United States Patent Application Publication US 2008/0113351 A1 - sequence listing, part 28

SEQ ID NO: 684342 - DNA, 19 bp, Mus musculus
  siRNA target sequence for Numb (NM_010949.1,372-390).
cagagccttttcttacata

SEQ ID NO: 684343 - DNA, 19 bp, Mus musculus
  siRNA target sequence for Numb (NM_010949.1,409-427).
cggcgatggatctgtcatt

SEQ ID NO: 684344 - DNA, 19 bp, Mus musculus
  siRNA target sequence for Numb (NM_010949.1,411-429).
gcgatggatctgtcattgt

SEQ ID NO: 684345 - DNA, 19 bp, Mus musculus
  siRNA target sequence for Numb (NM_010949.1,416-434).
ggatctgtcattgtttcat

SEQ ID NO: 684346 - DNA, 19 bp, Mus musculus
  siRNA target sequence for Numb (NM_010949.1,428-446).
gtttcatggctgtcaaaga

SEQ ID NO: 684347 - DNA, 19 bp, Mus musculus
  siRNA target sequence for Numb (NM_010949.1,491-509).
cctgtttagagcgtaaaca

SEQ ID NO: 684348 - DNA, 19 bp, Mus musculus
  siRNA target sequence for Numb (NM_010949.1,494-512).
gtttagagcgtaaacagaa

SEQ ID NO: 684349 - DNA, 19 bp, Mus musculus
  siRNA target sequence for Numb (NM_010949.1,530-548).
gcgtcactgctacttttga

SEQ ID NO: 684350 - DNA, 19 bp, Mus musculus
  siRNA target sequence for Numb (NM_010949.1,825-843).
ctctttccggggatttcct

SEQ ID NO: 684351 - DNA, 19 bp, Mus musculus
  siRNA target sequence for Numb (NM_010949.1,855-873).
gaagatgtcaccctttaaa

SEQ ID NO: 684352 - DNA, 19 bp, Mus musculus
  siRNA target sequence for Numb (NM_010949.1,879-897).
gctgtccctacgcatcaat

SEQ ID NO: 684353 - DNA, 19 bp, Mus musculus
  siRNA target sequence for Numb (NM_010949.1,1178-1196).
ctgaccgctggttagaaga

SEQ ID NO: 684354 - DNA, 19 bp, Mus musculus
  siRNA target sequence for Numb (NM_010949.1,1456-1474).
cagatggtagccaatgtgt

SEQ ID NO: 684355 - DNA, 19 bp, Mus musculus
  siRNA target sequence for Numb (NM_010949.1,1458-1476).
gatggtagccaatgtgttt

SEQ ID NO: 684356 - DNA, 19 bp, Mus musculus
  siRNA target sequence for Numb (NM_010949.1,1536-1554).
gcagacattccctcaatat

SEQ ID NO: 684357 - DNA, 19 bp, Mus musculus
  siRNA target sequence for Numb (NM_010949.1,1546-1564).
cctcaatatgagacaagta

SEQ ID NO: 684358 - DNA, 19 bp, Mus musculus
  siRNA target sequence for Numb (NM_010949.1,1692-1710).
cccagtggatcctttcgaa

SEQ ID NO: 684359 - DNA, 19 bp, Mus musculus
  siRNA target sequence for Numb (NM_010949.1,1740-1758).
caagcagcgtacaaatcct

SEQ ID NO: 684360 - DNA, 19 bp, Mus musculus
  siRNA target sequence for Numb (NM_010949.1,1770-1788).
ccctttctccagtgactta

SEQ ID NO: 684361 - DNA, 19 bp, Mus musculus
  siRNA target sequence for Numb (NM_010949.1,1772-1790).
ctttctccagtgacttaca

SEQ ID NO: 684362 - DNA, 19 bp, Mus musculus
  siRNA target sequence for Numb (NM_010949.1,1779-1797).
cagtgacttacagaaaaca

SEQ ID NO: 684363 - DNA, 19 bp, Mus musculus
  siRNA target sequence for Numb (NM_010949.1,1781-1799).
gtgacttacagaaaacatt

SEQ ID NO: 684364 - DNA, 19 bp, Mus musculus
  siRNA target sequence for Numbl (NM_010950.1,1024-1042).
gctgagcctacggttgaat

SEQ ID NO: 684365 - DNA, 19 bp, Mus musculus
  siRNA target sequence for Numbl (NM_010950.1,1525-1543).
cccaggtctgggttatcca

SEQ ID NO: 684366 - DNA, 19 bp, Mus musculus
  siRNA target sequence for Efna5 (NM_010109.1,251-269).
gtacatggtgaattttgat

SEQ ID NO: 684367 - DNA, 19 bp, Mus musculus
  siRNA target sequence for Efna5 (NM_010109.1,337-355).
caaacggaccgctgaagtt

SEQ ID NO: 684368 - DNA, 19 bp, Mus musculus
  siRNA target sequence for Efna5 (NM_010109.1,348-366).
ctgaagttctcggaaaaat

SEQ ID NO: 684369 - DNA, 19 bp, Mus musculus
  siRNA target sequence for Efna5 (NM_010109.1,377-395).
cactcccttttctttagga

SEQ ID NO: 684370 - DNA, 19 bp, Mus musculus
  siRNA target sequence for Efna5 (NM_010109.1,406-424).
ggccaggccgagagtattt

SEQ ID NO: 684371 - DNA, 19 bp, Mus musculus
  siRNA target sequence for Efna5 (NM_010109.1,408-426).
ccaggccgagagtatttct

SEQ ID NO: 684372 - DNA, 19 bp, Mus musculus
  siRNA target sequence for Efna5 (NM_010109.1,409-427).
caggccgagagtatttcta

SEQ ID NO: 684373 - DNA, 19 bp, Mus musculus
  siRNA target sequence for Efna5 (NM_010109.1,411-429).
ggccgagagtatttctaca

SEQ ID NO: 684374 - DNA, 19 bp, Mus musculus
  siRNA target sequence for Efna5 (NM_010109.1,457-475).
gaaggtcctgtctaaagct

SEQ ID NO: 684375 - DNA, 19 bp, Mus musculus
  siRNA target sequence for Efna5 (NM_010109.1,482-500).
ctttgtgagaccaacaaat

SEQ ID NO: 684376 - DNA, 19 bp, Mus musculus
  siRNA target sequence for Efna5 (NM_010109.1,569-587).
ccgccttttggcaatccta

SEQ ID NO: 684377 - DNA, 19 bp, Mus musculus
  siRNA target sequence for Efna5 (NM_010109.1,594-612).
ctcctggcgatgcttttga

SEQ ID NO: 684378 - DNA, 19 bp, Mus musculus
  siRNA target sequence for Efna5 (NM_010109.1,599-617).
ggcgatgcttttgacatta

SEQ ID NO: 684379 - DNA, 19 bp, Mus musculus
  siRNA target sequence for Efna5 (NM_010109.1,600-618).
gcgatgcttttgacattat

SEQ ID NO: 684380 - DNA, 19 bp, Mus musculus
  siRNA target sequence for Efnb2 (NM_010111.2,209-227).
ggacttttgatggttttgt

SEQ ID NO: 684381 - DNA, 19 bp, Mus musculus
  siRNA target sequence for Efnb2 (NM_010111.2,238-256).
gatctccagatcgatagtt

SEQ ID NO: 684382 - DNA, 19 bp, Mus musculus
  siRNA target sequence for Efnb2 (NM_010111.2,243-261).
ccagatcgatagttttaga

SEQ ID NO: 684383 - DNA, 19 bp, Mus musculus
  siRNA target sequence for Efnb2 (NM_010111.2,254-272).
gttttagagcctatctact

SEQ ID NO: 684384 - DNA, 19 bp, Mus musculus
  siRNA target sequence for Efnb2 (NM_010111.2,280-298).
ctcgaactccaaatttcta

SEQ ID NO: 684385 - DNA, 19 bp, Mus musculus
  siRNA target sequence for Efnb2 (NM_010111.2,303-321).
gacaaggcctggtactata

SEQ ID NO: 684386 - DNA, 19 bp, Mus musculus
  siRNA target sequence for Efnb2 (NM_010111.2,313-331).
ggtactatacccacagata

SEQ ID NO: 684387 - DNA, 19 bp, Mus musculus
  siRNA target sequence for Efnb2 (NM_010111.2,333-351).
gagacaaattggatattat

SEQ ID NO: 684388 - DNA, 19 bp, Mus musculus
  siRNA target sequence for Efnb2 (NM_010111.2,355-373).
ccccaaagtggactctaaa

SEQ ID NO: 684389 - DNA, 19 bp, Mus musculus
  siRNA target sequence for Efnb2 (NM_010111.2,356-374).
cccaaagtggactctaaaa

SEQ ID NO: 684390 - DNA, 19 bp, Mus musculus
  siRNA target sequence for Efnb2 (NM_010111.2,358-376).
caaagtggactctaaaact

SEQ ID NO: 684391 - DNA, 19 bp, Mus musculus
  siRNA target sequence for Efnb2 (NM_010111.2,375-393).
ctgttggccagtatgaata

SEQ ID NO: 684392 - DNA, 19 bp, Mus musculus
  siRNA target sequence for Efnb2 (NM_010111.2,377-395).
gttggccagtatgaatatt

SEQ ID NO: 684393 - DNA, 19 bp, Mus musculus
  siRNA target sequence for Efnb2 (NM_010111.2,381-399).
gccagtatgaatattataa

SEQ ID NO: 684394 - DNA, 19 bp, Mus musculus
  siRNA target sequence for Efnb2 (NM_010111.2,382-400).
ccagtatgaatattataaa

SEQ ID NO: 684395 - DNA, 19 bp, Mus musculus
  siRNA target sequence for Efnb2 (NM_010111.2,385-403).
gtatgaatattataaagtt

SEQ ID NO: 684396 - DNA, 19 bp, Mus musculus
  siRNA target sequence for Efnb2 (NM_010111.2,474-492).
ccagaccagaccaagatgt

SEQ ID NO: 684397 - DNA, 19 bp, Mus musculus
  siRNA target sequence for Efnb2 (NM_010111.2,643-661).
gaagatcctcatgaaagtt

SEQ ID NO: 684398 - DNA, 19 bp, Mus musculus
  siRNA target sequence for Efnb2 (NM_010111.2,721-739).
gctagaagctggtacaaat

SEQ ID NO: 684399 - DNA, 19 bp, Mus musculus
  siRNA target sequence for Efnb2 (NM_010111.2,810-828).
ggcattccgggaacaatct

SEQ ID NO: 684400 - DNA, 19 bp, Mus musculus
  siRNA target sequence for Efnb2 (NM_010111.2,834-852).
gttccgaagtggccttatt

SEQ ID NO: 684401 - DNA, 19 bp, Mus musculus
  siRNA target sequence for Efnb2 (NM_010111.2,997-1015).
gcgaggtggcaacaacaat

SEQ ID NO: 684402 - DNA, 19 bp, Mus musculus
  siRNA target sequence for Efnb2 (NM_010111.2,1020-1038).
cggagcccagtgacgttat

SEQ ID NO: 684403 - DNA, 19 bp, Mus musculus
  siRNA target sequence for Efnb2 (NM_010111.2,1024-1042).
gcccagtgacgttatcata

SEQ ID NO: 684404 - DNA, 19 bp, Mus musculus
  siRNA target sequence for Gas7 (NM_008088.1,401-419).
cacatgagtctccgaaaat

SEQ ID NO: 684405 - DNA, 19 bp, Mus musculus
  siRNA target sequence for Gas7 (NM_008088.1,682-700).
gttcatccgggaaaggata

SEQ ID NO: 684406 - DNA, 19 bp, Mus musculus
  siRNA target sequence for Gas7 (NM_008088.1,782-800).
gaggcatgggcccaagtaa

SEQ ID NO: 684407 - DNA, 19 bp, Mus musculus
  siRNA target sequence for Gas7 (NM_008088.1,1119-1137).
gctgtgtggacctctacaa

SEQ ID NO: 684408 - DNA, 19 bp, Mus musculus
  siRNA target sequence for Gas7 (NM_008088.1,1144-1162).
ccagtccaagtggtttgaa

SEQ ID NO: 684409 - DNA, 19 bp, Mus musculus
  siRNA target sequence for Gas7 (NM_008088.1,1213-1231).
ggaaatgatccgacaacat

SEQ ID NO: 684410 - DNA, 19 bp, Mus musculus
  siRNA target sequence for Gas7 (NM_008088.1,1254-1272).
ggcacgagacggacatgtt

SEQ ID NO: 684411 - DNA, 19 bp, Mus musculus
  siRNA target sequence for Gas7 (NM_008088.1,1256-1274).
cacgagacggacatgttca

SEQ ID NO: 684412 - DNA, 19 bp, Mus musculus
  siRNA target sequence for Sema3a (NM_009152.2,1008-1026).
ggtcctggaggcttataat

SEQ ID NO: 684413 - DNA, 19 bp, Mus musculus
  siRNA target sequence for Sema3a (NM_009152.2,1063-1081).
catccaatctgcacctata

SEQ ID NO: 684414 - DNA, 19 bp, Mus musculus
  siRNA target sequence for Sema3a (NM_009152.2,1071-1089).
ctgcacctatattgaagtt

SEQ ID NO: 684415 - DNA, 19 bp, Mus musculus
  siRNA target sequence for Sema3a (NM_009152.2,1119-1137).
gctgcaggactcacatttt

SEQ ID NO: 684416 - DNA, 19 bp, Mus musculus
  siRNA target sequence for Sema3a (NM_009152.2,1158-1176).
cccttatgatcccaaacta

SEQ ID NO: 684417 - DNA, 19 bp, Mus musculus
  siRNA target sequence for Sema3a (NM_009152.2,1160-1178).
cttatgatcccaaactact

SEQ ID NO: 684418 - DNA, 19 bp, Mus musculus
  siRNA target sequence for Sema3a (NM_009152.2,1179-1197).
gactgcctctcttctaata

SEQ ID NO: 684419 - DNA, 19 bp, Mus musculus
  siRNA target sequence for Sema3a (NM_009152.2,1238-1256).
gacgggacttcgctatctt

SEQ ID NO: 684420 - DNA, 19 bp, Mus musculus
  siRNA target sequence for Sema3a (NM_009152.2,1240-1258).
cgggacttcgctatcttca

SEQ ID NO: 684421 - DNA, 19 bp, Mus musculus
  siRNA target sequence for Sema3a (NM_009152.2,1243-1261).
gacttcgctatcttcagaa

SEQ ID NO: 684422 - DNA, 19 bp, Mus musculus
  siRNA target sequence for Sema3a (NM_009152.2,1310-1328).
ggctcaatgatcctagatt

SEQ ID NO: 684423 - DNA, 19 bp, Mus musculus
  siRNA target sequence for Sema3a (NM_009152.2,1359-1377).
caaccctgaagatgacaaa

SEQ ID NO: 684424 - DNA, 19 bp, Mus musculus
  siRNA target sequence for Sema3a (NM_009152.2,1431-1449).
cactcatgctagaataggt

SEQ ID NO: 684425 - DNA, 19 bp, Mus musculus
  siRNA target sequence for Sema3a (NM_009152.2,1438-1456).
gctagaataggtcagatat

SEQ ID NO: 684426 - DNA, 19 bp, Mus musculus
  siRNA target sequence for Sema3a (NM_009152.2,1442-1460).
gaataggtcagatatgcaa

SEQ ID NO: 684427 - DNA, 19 bp, Mus musculus
  siRNA target sequence for Sema3a (NM_009152.2,1452-1470).
gatatgcaagaatgacttt

SEQ ID NO: 684428 - DNA, 19 bp, Mus musculus
  siRNA target sequence for Sema3a (NM_009152.2,1477-1495).
cacagaagtcttgtgaata

SEQ ID NO: 684429 - DNA, 19 bp, Mus musculus
  siRNA target sequence for Sema3a (NM_009152.2,1510-1528).
ctaaaagcacgcctgattt

SEQ ID NO: 684430 - DNA, 19 bp, Mus musculus
  siRNA target sequence for Sema3a (NM_009152.2,1550-1568).
gcattgacacccattttga

SEQ ID NO: 684431 - DNA, 19 bp, Mus musculus
  siRNA target sequence for Sema3a (NM_009152.2,1567-1585).
gatgaattgcaggatgtat

SEQ ID NO: 684432 - DNA, 19 bp, Mus musculus
  siRNA target sequence for Sema3a (NM_009152.2,1576-1594).
caggatgtattcctaatga

SEQ ID NO: 684433 - DNA, 19 bp, Mus musculus
  siRNA target sequence for Sema3a (NM_009152.2,1582-1600).
gtattcctaatgaactcta

SEQ ID NO: 684434 - DNA, 19 bp, Mus musculus
  siRNA target sequence for Sema3a (NM_009152.2,1627-1645).
ggagtgttcacaacatcaa

SEQ ID NO: 684435 - DNA, 19 bp, Mus musculus
  siRNA target sequence for Sema3a (NM_009152.2,1637-1655).
caacatcaagcaacatctt

SEQ ID NO: 684436 - DNA, 19 bp, Mus musculus
  siRNA target sequence for Sema3a (NM_009152.2,1729-1747).
gatggtcccaactatcagt

SEQ ID NO: 684437 - DNA, 19 bp, Mus musculus
  siRNA target sequence for Sema3a (NM_009152.2,1790-1808).
cttgtcccagtaaaacatt

SEQ ID NO: 684438 - DNA, 19 bp, Mus musculus
  siRNA target sequence for Sema3a (NM_009152.2,1865-1883).
gtcatccagccatgtacaa

SEQ ID NO: 684439 - DNA, 19 bp, Mus musculus
  siRNA target sequence for Sema3a (NM_009152.2,1906-1924).
cgcccgatcatgatcaaaa

SEQ ID NO: 684440 - DNA, 19 bp, Mus musculus
  siRNA target sequence for Sema3a (NM_009152.2,1910-1928).
cgatcatgatcaaaacaga

SEQ ID NO: 684441 - DNA, 19 bp, Mus musculus
  siRNA target sequence for Sema3a (NM_009152.2,1941-1959).
gttcacacaaattgttgta

SEQ ID NO: 684442 - DNA, 19 bp, Mus musculus
  siRNA target sequence for Sema3a (NM_009152.2,1978-1996).
gatggccagtatgatgtta

SEQ ID NO: 684443 - DNA, 19 bp, Mus musculus
  siRNA target sequence for Sema3a (NM_009152.2,1984-2002).
cagtatgatgttatgttca

SEQ ID NO: 684444 - DNA, 19 bp, Mus musculus
  siRNA target sequence for Sema3a (NM_009152.2,1998-2016).
gttcatcggaacagatgtt

SEQ ID NO: 684445 - DNA, 19 bp, Mus musculus
  siRNA target sequence for Sema3a (NM_009152.2,2100-2118).
ccgggaaccaacaactatt

SEQ ID NO: 684446 - DNA, 19 bp, Mus musculus
  siRNA target sequence for Sema3a (NM_009152.2,2101-2119).
cgggaaccaacaactattt

SEQ ID NO: 684447 - DNA, 19 bp, Mus musculus
  siRNA target sequence for Sema3a (NM_009152.2,2121-2139).
ggcaatggagctttctact

SEQ ID NO: 684448 - DNA, 19 bp, Mus musculus
  siRNA target sequence for Sema3a (NM_009152.2,2122-2140).
gcaatggagctttctacta

SEQ ID NO: 684449 - DNA, 19 bp, Mus musculus
  siRNA target sequence for Sema3a (NM_009152.2,2123-2141).
caatggagctttctactaa

SEQ ID NO: 684450 - DNA, 19 bp, Mus musculus
  siRNA target sequence for Sema3a (NM_009152.2,2271-2289).
ctcatgctcacgctatttt

SEQ ID NO: 684451 - DNA, 19 bp, Mus musculus
  siRNA target sequence for Sema3a (NM_009152.2,2304-2322).
gcgcacaagacgacaagat

SEQ ID NO: 684452 - DNA, 19 bp, Mus musculus
  siRNA target sequence for Sema3a (NM_009152.2,2305-2323).
cgcacaagacgacaagata

SEQ ID NO: 684453 - DNA, 19 bp, Mus musculus
  siRNA target sequence for Sema3a (NM_009152.2,2306-2324).
gcacaagacgacaagatat

SEQ ID NO: 684454 - DNA, 19 bp, Mus musculus
  siRNA target sequence for Sema3a (NM_009152.2,2307-2325).
cacaagacgacaagatata

SEQ ID NO: 684455 - DNA, 19 bp, Mus musculus
  siRNA target sequence for Sema3a (NM_009152.2,2312-2330).
gacgacaagatataaggaa

SEQ ID NO: 684456 - DNA, 19 bp, Mus musculus
  siRNA target sequence for Sema3a (NM_009152.2,2356-2374).
gacttgcagcaccatgata

SEQ ID NO: 684457 - DNA, 19 bp, Mus musculus
  siRNA target sequence for Sema3a (NM_009152.2,2358-2376).
cttgcagcaccatgataat

SEQ ID NO: 684458 - DNA, 19 bp, Mus musculus
  siRNA target sequence for Sema3a (NM_009152.2,2419-2437).
gaaaacagtagtacattct

SEQ ID NO: 684459 - DNA, 19 bp, Mus musculus
  siRNA target sequence for Sema3a (NM_009152.2,2466-2484).
cttggtatattggcaattt

SEQ ID NO: 684460 - DNA, 19 bp, Mus musculus
  siRNA target sequence for Sema3a (NM_009152.2,2519-2537).
gaatgggtgatcatatcat

SEQ ID NO: 684461 - DNA, 19 bp, Mus musculus
  siRNA target sequence for Sema3a (NM_009152.2,2606-2624).
ctgtggaacacggattcat

SEQ ID NO: 684462 - DNA, 19 bp, Mus musculus
  siRNA target sequence for Sema3a (NM_009152.2,2611-2629).
gaacacggattcatgcaaa

SEQ ID NO: 684463 - DNA, 19 bp, Mus musculus
  siRNA target sequence for Sema3a (NM_009152.2,2616-2634).
cggattcatgcaaactctt

SEQ ID NO: 684464 - DNA, 19 bp, Mus musculus
  siRNA target sequence for Sema3a (NM_009152.2,2653-2671).
gtcattgacacagaacatt

SEQ ID NO: 684465 - DNA, 19 bp, Mus musculus
  siRNA target sequence for Sema3a (NM_009152.2,2767-2785).
gacttcatgcagctcatta

SEQ ID NO: 684466 - DNA, 19 bp, Mus musculus
  siRNA target sequence for Sema3a (NM_009152.2,2808-2826).
ggatgagttctgtgaacaa

SEQ ID NO: 684467 - DNA, 19 bp, Mus musculus
  siRNA target sequence for Sema3b (NM_009153.1,275-293).
ggatactgcccctaacctt

SEQ ID NO: 684468 - DNA, 19 bp, Mus musculus
  siRNA target sequence for Sema3b (NM_009153.1,303-321).
cggctctcctttcaagaat

SEQ ID NO: 684469 - DNA, 19 bp, Mus musculus
  siRNA target sequence for Sema3b (NM_009153.1,356-374).
ggagcggacctgctgttat

SEQ ID NO: 684470 - DNA, 19 bp, Mus musculus
  siRNA target sequence for Sema3b (NM_009153.1,359-377).
gcggacctgctgttatgaa

SEQ ID NO: 684471 - DNA, 19 bp, Mus musculus
  siRNA target sequence for Sema3b (NM_009153.1,494-512).
cgtggaatggcgtgaagaa

SEQ ID NO: 684472 - DNA, 19 bp, Mus musculus
  siRNA target sequence for Sema3b (NM_009153.1,495-513).
gtggaatggcgtgaagaat

SEQ ID NO: 684473 - DNA, 19 bp, Mus musculus
  siRNA target sequence for Sema3b (NM_009153.1,537-555).
ggtaccgagtgcatgaact

SEQ ID NO: 684474 - DNA, 19 bp, Mus musculus
  siRNA target sequence for Sema3b (NM_009153.1,538-556).
gtaccgagtgcatgaactt

SEQ ID NO: 684475 - DNA, 19 bp, Mus musculus
  siRNA target sequence for Sema3b (NM_009153.1,747-765).
gtgggggaagaactgtatt

SEQ ID NO: 684476 - DNA, 19 bp, Mus musculus
  siRNA target sequence for Sema3b (NM_009153.1,769-787).
gggtgacagcagaccttat

SEQ ID NO: 684477 - DNA, 19 bp, Mus musculus
  siRNA target sequence for Sema3b (NM_009153.1,795-813).
gactttaccatctttcgaa

SEQ ID NO: 684478 - DNA, 19 bp, Mus musculus
  siRNA target sequence for Sema3b (NM_009153.1,837-855).
cgaacagagccccatgatt

SEQ ID NO: 684479 - DNA, 19 bp, Mus musculus
  siRNA target sequence for Sema3b (NM_009153.1,911-929).
gaaccctgatgacgataaa

SEQ ID NO: 684480 - DNA, 19 bp, Mus musculus
  siRNA target sequence for Sema3b (NM_009153.1,1034-1052).
gcggagcttggtcaacaaa

SEQ ID NO: 684481 - DNA, 19 bp, Mus musculus
  siRNA target sequence for Sema3b (NM_009153.1,1035-1053).
cggagcttggtcaacaaat

SEQ ID NO: 684482 - DNA, 19 bp, Mus musculus
  siRNA target sequence for Sema3b (NM_009153.1,1111-1129).
cccactttgaccaacttca

SEQ ID NO: 684483 - DNA, 19 bp, Mus musculus
  siRNA target sequence for Sema3b (NM_009153.1,1538-1556).
ctacgatgttctcttcatt

SEQ ID NO: 684484 - DNA, 19 bp, Mus musculus
  siRNA target sequence for Sema3b (NM_009153.1,1665-1683).
gctatcaccagcatgcaaa

SEQ ID NO: 684485 - DNA, 19 bp, Mus musculus
  siRNA target sequence for Sema3b (NM_009153.1,1666-1684).
ctatcaccagcatgcaaat

SEQ ID NO: 684486 - DNA, 19 bp, Mus musculus
  siRNA target sequence for Sema3b (NM_009153.1,1676-1694).
catgcaaatctcctctaaa

SEQ ID NO: 684487 - DNA, 19 bp, Mus musculus
  siRNA target sequence for Sema3b (NM_009153.1,1726-1744).
cagtggcccagattgcttt

SEQ ID NO: 684488 - DNA, 19 bp, Mus musculus
  siRNA target sequence for Sema3b (NM_009153.1,1730-1748).
ggcccagattgctttgcat

SEQ ID NO: 684489 - DNA, 19 bp, Mus musculus
  siRNA target sequence for Sema3b (NM_009153.1,1786-1804).
gcttggcccgtgatcctta

SEQ ID NO: 684490 - DNA, 19 bp, Mus musculus
  siRNA target sequence for Sema3b (NM_009153.1,1863-1881).
cggaggcaagacataagga

SEQ ID NO: 684491 - DNA, 19 bp, Mus musculus
  siRNA target sequence for Sema3b (NM_009153.1,1865-1883).
gaggcaagacataaggaat

SEQ ID NO: 684492 - DNA, 19 bp, Mus musculus
  siRNA target sequence for Sema3b (NM_009153.1,2144-2162).
ggttgaacaaggcttttca

SEQ ID NO: 684493 - DNA, 19 bp, Mus musculus
  siRNA target sequence for Sema3b (NM_009153.1,2248-2266).
cacctcctggccctaaact

SEQ ID NO: 684494 - DNA, 19 bp, Mus musculus
  siRNA target sequence for Sema3c (NM_013657.3,353-371).
cttcgagaaaccaaaacct

SEQ ID NO: 684495 - DNA, 19 bp, Mus musculus
  siRNA target sequence for Sema3c (NM_013657.3,390-408).
cccaccagcagttagacta

SEQ ID NO: 684496 - DNA, 19 bp, Mus musculus
  siRNA target sequence for Sema3c (NM_013657.3,397-415).
gcagttagactacagaata

SEQ ID NO: 684497 - DNA, 19 bp, Mus musculus
  siRNA target sequence for Sema3c (NM_013657.3,398-416).
cagttagactacagaatat

SEQ ID NO: 684498 - DNA, 19 bp, Mus musculus
  siRNA target sequence for Sema3c (NM_013657.3,470-488).
ctgtctttgaatatcaaca

SEQ ID NO: 684499 - DNA, 19 bp, Mus musculus
  siRNA target sequence for Sema3c (NM_013657.3,472-490).
gtctttgaatatcaacaat

SEQ ID NO: 684500 - DNA, 19 bp, Mus musculus
  siRNA target sequence for Sema3c (NM_013657.3,497-515).
caagaacctttgagtgttt

SEQ ID NO: 684501 - DNA, 19 bp, Mus musculus
  siRNA target sequence for Sema3c (NM_013657.3,522-540).
cagcatcaacaatcaaagt

SEQ ID NO: 684502 - DNA, 19 bp, Mus musculus
  siRNA target sequence for Sema3c (NM_013657.3,596-614).
cgggtgattcagacattca

SEQ ID NO: 684503 - DNA, 19 bp, Mus musculus
  siRNA target sequence for Sema3c (NM_013657.3,617-635).
cgtactcacctgtatgtct

SEQ ID NO: 684504 - DNA, 19 bp, Mus musculus
  siRNA target sequence for Sema3c (NM_013657.3,712-730).
cgactctaagtgtgaatct

SEQ ID NO: 684505 - DNA, 19 bp, Mus musculus
  siRNA target sequence for Sema3c (NM_013657.3,747-765).
ctttcaacccgaatgtgaa

SEQ ID NO: 684506 - DNA, 19 bp, Mus musculus
  siRNA target sequence for Sema3c (NM_013657.3,761-779).
gtgaacactgtgtctgtta

SEQ ID NO: 684507 - DNA, 19 bp, Mus musculus
  siRNA target sequence for Sema3c (NM_013657.3,768-786).
ctgtgtctgttatgatcaa

SEQ ID NO: 684508 - DNA, 19 bp, Mus musculus
  siRNA target sequence for Sema3c (NM_013657.3,804-822).
gaatgtatatagacttcat

SEQ ID NO: 684509 - DNA, 19 bp, Mus musculus
  siRNA target sequence for Sema3c (NM_013657.3,834-852).
ctgctattttccgaagttt

SEQ ID NO: 684510 - DNA, 19 bp, Mus musculus
  siRNA target sequence for Sema3c (NM_013657.3,836-854).
gctattttccgaagtttaa

SEQ ID NO: 684511 - DNA, 19 bp, Mus musculus
  siRNA target sequence for Sema3c (NM_013657.3,862-880).
gaatgcagttcgaactgat

SEQ ID NO: 684512 - DNA, 19 bp, Mus musculus
  siRNA target sequence for Sema3c (NM_013657.3,867-885).
cagttcgaactgatcaaca

SEQ ID NO: 684513 - DNA, 19 bp, Mus musculus
  siRNA target sequence for Sema3c (NM_013657.3,869-887).
gttcgaactgatcaacata

SEQ ID NO: 684514 - DNA, 19 bp, Mus musculus
  siRNA target sequence for Sema3c (NM_013657.3,872-890).
cgaactgatcaacataatt

SEQ ID NO: 684515 - DNA, 19 bp, Mus musculus
  siRNA target sequence for Sema3c (NM_013657.3,876-894).
ctgatcaacataattcaaa

SEQ ID NO: 684516 - DNA, 19 bp, Mus musculus
  siRNA target sequence for Sema3c (NM_013657.3,898-916).
gctgagtgaacccatgttt

SEQ ID NO: 684517 - DNA, 19 bp, Mus musculus
  siRNA target sequence for Sema3c (NM_013657.3,945-963).
ctgatccaaatgatgctaa

SEQ ID NO: 684518 - DNA, 19 bp, Mus musculus
  siRNA target sequence for Sema3c (NM_013657.3,956-974).
gatgctaaggtctatttct

SEQ ID NO: 684519 - DNA, 19 bp, Mus musculus
  siRNA target sequence for Sema3c (NM_013657.3,989-1007).
ctgactgacaacaatagga

SEQ ID NO: 684520 - DNA, 19 bp, Mus musculus
  siRNA target sequence for Sema3c (NM_013657.3,1062-1080).
gacaacgtagtcttgtcaa

SEQ ID NO: 684521 - DNA, 19 bp, Mus musculus
  siRNA target sequence for Sema3c (NM_013657.3,1067-1085).
cgtagtcttgtcaacaagt

SEQ ID NO: 684522 - DNA, 19 bp, Mus musculus
  siRNA target sequence for Sema3c (NM_013657.3,1081-1099).
caagtggaccacattctta

SEQ ID NO: 684523 - DNA, 19 bp, Mus musculus
  siRNA target sequence for Sema3c (NM_013657.3,1205-1223).
ctcgtgtatggcatcttca

SEQ ID NO: 684524 - DNA, 19 bp, Mus musculus
  siRNA target sequence for Sema3c (NM_013657.3,1251-1269).
cggcagtgtgtgtgtatca

SEQ ID NO: 684525 - DNA, 19 bp, Mus musculus
  siRNA target sequence for Sema3c (NM_013657.3,1277-1295).
gatatacagactgtattca

SEQ ID NO: 684526 - DNA, 19 bp, Mus musculus
  siRNA target sequence for Sema3c (NM_013657.3,1389-1407).
gggcctttacacccaatat

SEQ ID NO: 684527 - DNA, 19 bp, Mus musculus
  siRNA target sequence for Sema3c (NM_013657.3,1393-1411).
ctttacacccaatatgaga

SEQ ID NO: 684528 - DNA, 19 bp, Mus musculus
  siRNA target sequence for Sema3c (NM_013657.3,1428-1446).
cagatgacgttgtcacttt

SEQ ID NO: 684529 - DNA, 19 bp, Mus musculus
  siRNA target sequence for Sema3c (NM_013657.3,1430-1448).
gatgacgttgtcactttta

SEQ ID NO: 684530 - DNA, 19 bp, Mus musculus
  siRNA target sequence for Sema3c (NM_013657.3,1460-1478).
cctctcatgtacaattcca

SEQ ID NO: 684531 - DNA, 19 bp, Mus musculus
  siRNA target sequence for Sema3c (NM_013657.3,1461-1479).
ctctcatgtacaattccat

SEQ ID NO: 684532 - DNA, 19 bp, Mus musculus
  siRNA target sequence for Sema3c (NM_013657.3,1489-1507).
ccacagaaggcctctgata

SEQ ID NO: 684533 - DNA, 19 bp, Mus musculus
  siRNA target sequence for Sema3c (NM_013657.3,1572-1590).
ggagataccacgttctgtt

SEQ ID NO: 684534 - DNA, 19 bp, Mus musculus
  siRNA target sequence for Sema3c (NM_013657.3,1573-1591).
gagataccacgttctgttt

SEQ ID NO: 684535 - DNA, 19 bp, Mus musculus
  siRNA target sequence for Sema3c (NM_013657.3,1575-1593).
gataccacgttctgtttct

SEQ ID NO: 684536 - DNA, 19 bp, Mus musculus
  siRNA target sequence for Sema3c (NM_013657.3,1624-1642).
cgtagtccttcctaccaat

SEQ ID NO: 684537 - DNA, 19 bp, Mus musculus
  siRNA target sequence for Sema3c (NM_013657.3,1628-1646).
gtccttcctaccaatagct

SEQ ID NO: 684538 - DNA, 19 bp, Mus musculus
  siRNA target sequence for Sema3c (NM_013657.3,1778-1796).
ctgcatcgctgccatatct

SEQ ID NO: 684539 - DNA, 19 bp, Mus musculus
  siRNA target sequence for Sema3c (NM_013657.3,1821-1839).
gcttggcgagggatccata

SEQ ID NO: 684540 - DNA, 19 bp, Mus musculus
  siRNA target sequence for Sema3c (NM_013657.3,1825-1843).
ggcgagggatccatactgt

SEQ ID NO: 684541 - DNA, 19 bp, Mus musculus
  siRNA target sequence for Sema3c (NM_013657.3,1888-1906).
gcggaggagccgaagacaa

SEQ ID NO: 684542 - DNA, 19 bp, Mus musculus
  siRNA target sequence for Sema3c (NM_013657.3,1891-1909).
gaggagccgaagacaagat

SEQ ID NO: 684543 - DNA, 19 bp, Mus musculus
  siRNA target sequence for Sema3c (NM_013657.3,1893-1911).
ggagccgaagacaagatgt

SEQ ID NO: 684544 - DNA, 19 bp, Mus musculus
  siRNA target sequence for Sema3c (NM_013657.3,1939-1957).
ccgagggttcaatctgaaa

SEQ ID NO: 684545 - DNA, 19 bp, Mus musculus
  siRNA target sequence for Sema3c (NM_013657.3,1982-2000).
gttcagtatggagtaagaa

SEQ ID NO: 684546 - DNA, 19 bp, Mus musculus
  siRNA target sequence for Sema3c (NM_013657.3,1985-2003).
cagtatggagtaagaaata

SEQ ID NO: 684547 - DNA, 19 bp, Mus musculus
  siRNA target sequence for Sema3c (NM_013657.3,2034-2052).
ctccacaggcatctatcaa

SEQ ID NO: 684548 - DNA, 19 bp, Mus musculus
  siRNA target sequence for Sema3c (NM_013657.3,2036-2054).
ccacaggcatctatcaagt

SEQ ID NO: 684549 - DNA, 19 bp, Mus musculus
  siRNA target sequence for Sema3c (NM_013657.3,2082-2100).
ggaaggaggttaaactgaa

SEQ ID NO: 684550 - DNA, 19 bp, Mus musculus
  siRNA target sequence for Sema3c (NM_013657.3,2098-2116).
gaacgagcgcattatagct

SEQ ID NO: 684551 - DNA, 19 bp, Mus musculus
  siRNA target sequence for Sema3c (NM_013657.3,2118-2136).
cttcccaaggactactgat

SEQ ID NO: 684552 - DNA, 19 bp, Mus musculus
  siRNA target sequence for Sema3c (NM_013657.3,2134-2152).
gattcgctctgttcaagat

SEQ ID NO: 684553 - DNA, 19 bp, Mus musculus
  siRNA target sequence for Sema3c (NM_013657.3,2139-2157).
gctctgttcaagattctga

SEQ ID NO: 684554 - DNA, 19 bp, Mus musculus
  siRNA target sequence for Sema3c (NM_013657.3,2221-2239).
cttcaaagttttagattca

SEQ ID NO: 684555 - DNA, 19 bp, Mus musculus
  siRNA target sequence for Sema3e (NM_011348.1,704-722).
ggctaccgctgtcacataa

SEQ ID NO: 684556 - DNA, 19 bp, Mus musculus
  siRNA target sequence for Sema3e (NM_011348.1,705-723).
gctaccgctgtcacataaa

SEQ ID NO: 684557 - DNA, 19 bp, Mus musculus
  siRNA target sequence for Sema3e (NM_011348.1,716-734).
cacataaagaacttttcga

SEQ ID NO: 684558 - DNA, 19 bp, Mus musculus
  siRNA target sequence for Sema3e (NM_011348.1,764-782).
cccttggatttcttgatct

SEQ ID NO: 684559 - DNA, 19 bp, Mus musculus
  siRNA target sequence for Sema3e (NM_011348.1,792-810).
gctgctggatgagtatcaa

SEQ ID NO: 684560 - DNA, 19 bp, Mus musculus
  siRNA target sequence for Sema3e (NM_011348.1,896-914).
cgagcacagcagtaaaggt

SEQ ID NO: 684561 - DNA, 19 bp, Mus musculus
  siRNA target sequence for Sema3e (NM_011348.1,897-915).
gagcacagcagtaaaggta

SEQ ID NO: 684562 - DNA, 19 bp, Mus musculus
  siRNA target sequence for Sema3e (NM_011348.1,902-920).
cagcagtaaaggtagaaga

SEQ ID NO: 684563 - DNA, 19 bp, Mus musculus
  siRNA target sequence for Sema3e (NM_011348.1,968-986).
gggttttgcatcactacaa

SEQ ID NO: 684564 - DNA, 19 bp, Mus musculus
  siRNA target sequence for Sema3e (NM_011348.1,970-988).
gttttgcatcactacaaca

SEQ ID NO: 684565 - DNA, 19 bp, Mus musculus
  siRNA target sequence for Sema3e (NM_011348.1,1005-1023).
ctgtgctactggtgctttt

SEQ ID NO: 684566 - DNA, 19 bp, Mus musculus
  siRNA target sequence for Sema3e (NM_011348.1,1046-1064).
gagtcgggcaccattcaga

SEQ ID NO: 684567 - DNA, 19 bp, Mus musculus
  siRNA target sequence for Sema3e (NM_011348.1,1218-1236).
ccgcagcatggggaagtta

SEQ ID NO: 684568 - DNA, 19 bp, Mus musculus
  siRNA target sequence for Sema3e (NM_011348.1,1227-1245).
ggggaagttaggccatatt

SEQ ID NO: 684569 - DNA, 19 bp, Mus musculus
  siRNA target sequence for Sema3e (NM_011348.1,1272-1290).
cctgaaagaaccaaaattt

SEQ ID NO: 684570 - DNA, 19 bp, Mus musculus
  siRNA target sequence for Sema3e (NM_011348.1,1275-1293).
gaaagaaccaaaatttgta

SEQ ID NO: 684571 - DNA, 19 bp, Mus musculus
  siRNA target sequence for Sema3e (NM_011348.1,1283-1301).
caaaatttgtaggttcata

SEQ ID NO: 684572 - DNA, 19 bp, Mus musculus
  siRNA target sequence for Sema3e (NM_011348.1,1380-1398).
caacgcccacacgatctta

SEQ ID NO: 684573 - DNA, 19 bp, Mus musculus
  siRNA target sequence for Sema3e (NM_011348.1,1495-1513).
gtgccgggaatgaatggaa

SEQ ID NO: 684574 - DNA, 19 bp, Mus musculus
  siRNA target sequence for Sema3e (NM_011348.1,1520-1538).
catactttgacgaactaga

SEQ ID NO: 684575 - DNA, 19 bp, Mus musculus
  siRNA target sequence for Sema3e (NM_011348.1,1567-1585).
cctaagaatccagtgatat

SEQ ID NO: 684576 - DNA, 19 bp, Mus musculus
  siRNA target sequence for Sema3e (NM_011348.1,1579-1597).
gtgatatttggactgttta

SEQ ID NO: 684577 - DNA, 19 bp, Mus musculus
  siRNA target sequence for Sema3e (NM_011348.1,1673-1691).
gcccatatgctcataaaga

SEQ ID NO: 684578 - DNA, 19 bp, Mus musculus
  siRNA target sequence for Sema3e (NM_011348.1,1704-1722).
ccactggtcactatatgaa

SEQ ID NO: 684579 - DNA, 19 bp, Mus musculus
  siRNA target sequence for Sema3e (NM_011348.1,1709-1727).
ggtcactatatgaaggaaa

SEQ ID NO: 684580 - DNA, 19 bp, Mus musculus
  siRNA target sequence for Sema3e (NM_011348.1,1710-1728).
gtcactatatgaaggaaaa

SEQ ID NO: 684581 - DNA, 19 bp, Mus musculus
  siRNA target sequence for Sema3e (NM_011348.1,1826-1844).
ggatgcatcctctaatgta

SEQ ID NO: 684582 - DNA, 19 bp, Mus musculus
  siRNA target sequence for Sema3e (NM_011348.1,1827-1845).
gatgcatcctctaatgtat

SEQ ID NO: 684583 - DNA, 19 bp, Mus musculus
  siRNA target sequence for Sema3e (NM_011348.1,1842-1860).
gtatcagcccataaaacct

SEQ ID NO: 684584 - DNA, 19 bp, Mus musculus
  siRNA target sequence for Sema3e (NM_011348.1,1945-1963).
ggccagtatgacgtcttat

SEQ ID NO: 684585 - DNA, 19 bp, Mus musculus
  siRNA target sequence for Sema3e (NM_011348.1,1946-1964).
gccagtatgacgtcttatt

SEQ ID NO: 684586 - DNA, 19 bp, Mus musculus
  siRNA target sequence for Sema3e (NM_011348.1,1948-1966).
cagtatgacgtcttattta

SEQ ID NO: 684587 - DNA, 19 bp, Mus musculus
  siRNA target sequence for Sema3e (NM_011348.1,1989-2007).
gctgctgaaagtaatcaca

SEQ ID NO: 684588 - DNA, 19 bp, Mus musculus
  siRNA target sequence for Sema3e (NM_011348.1,1992-2010).
gctgaaagtaatcacaatt

SEQ ID NO: 684589 - DNA, 19 bp, Mus musculus
  siRNA target sequence for Sema3e (NM_011348.1,2043-2061).
cattctagaggaacttcaa

SEQ ID NO: 684590 - DNA, 19 bp, Mus musculus
  siRNA target sequence for Sema3e (NM_011348.1,2050-2068).
gaggaacttcaaatattca

SEQ ID NO: 684591 - DNA, 19 bp, Mus musculus
  siRNA target sequence for Sema3e (NM_011348.1,2070-2088).
ggatccagcccctatcatt

SEQ ID NO: 684592 - DNA, 19 bp, Mus musculus
  siRNA target sequence for Sema3e (NM_011348.1,2071-2089).
gatccagcccctatcattt

SEQ ID NO: 684593 - DNA, 19 bp, Mus musculus
  siRNA target sequence for Sema3e (NM_011348.1,2080-2098).
cctatcatttctatggaaa

SEQ ID NO: 684594 - DNA, 19 bp, Mus musculus
  siRNA target sequence for Sema3e (NM_011348.1,2258-2276).
caacaggtgcacacgaaaa

SEQ ID NO: 684595 - DNA, 19 bp, Mus musculus
  siRNA target sequence for Sema3e (NM_011348.1,2327-2345).
gctttggacagcaatttgt

SEQ ID NO: 684596 - DNA, 19 bp, Mus musculus
  siRNA target sequence for Sema3e (NM_011348.1,2328-2346).
ctttggacagcaatttgtt

SEQ ID NO: 684597 - DNA, 19 bp, Mus musculus
  siRNA target sequence for Sema3e (NM_011348.1,2418-2436).
caccccgctatcactacaa

SEQ ID NO: 684598 - DNA, 19 bp, Mus musculus
  siRNA target sequence for Sema3e (NM_011348.1,2423-2441).
cgctatcactacaagcaaa

SEQ ID NO: 684599 - DNA, 19 bp, Mus musculus
  siRNA target sequence for Sema3e (NM_011348.1,2463-2481).
gggacgcgacgtaagaaaa

SEQ ID NO: 684600 - DNA, 19 bp, Mus musculus
  siRNA target sequence for Sema3e (NM_011348.1,2465-2483).
gacgcgacgtaagaaaaga

SEQ ID NO: 684601 - DNA, 19 bp, Mus musculus
  siRNA target sequence for Sema3e (NM_011348.1,2468-2486).
gcgacgtaagaaaagaaga

SEQ ID NO: 684602 - DNA, 19 bp, Mus musculus
  siRNA target sequence for Sema3e (NM_011348.1,2495-2513).
cggatgacagagttgtcaa

SEQ ID NO: 684603 - DNA, 19 bp, Mus musculus
  siRNA target sequence for Sema3e (NM_011348.1,2579-2597).
cagtagaacacaattttgt

SEQ ID NO: 684604 - DNA, 19 bp, Mus musculus
  siRNA target sequence for Sema3e (NM_011348.1,2596-2614).
gtccatactgtgcgtaaaa

SEQ ID NO: 684605 - DNA, 19 bp, Mus musculus
  siRNA target sequence for Sema3e (NM_011348.1,2644-2662).
gtggagggcatgtttcata

SEQ ID NO: 684606 - DNA, 19 bp, Mus musculus
  siRNA target sequence for Sema3e (NM_011348.1,2886-2904).
gaggcttcgctctaaagct

SEQ ID NO: 684607 - DNA, 19 bp, Mus musculus
  siRNA target sequence for Sema6b (NM_013662.1,313-331).
ccacggagctgcgatatca

SEQ ID NO: 684608 - DNA, 19 bp, Mus musculus
  siRNA target sequence for Sema6b (NM_013662.1,398-416).
gggtgagtgtcggaacttt

SEQ ID NO: 684609 - DNA, 19 bp, Mus musculus
  siRNA target sequence for Sema6b (NM_013662.1,400-418).
gtgagtgtcggaactttgt

SEQ ID NO: 684610 - DNA, 19 bp, Mus musculus
  siRNA target sequence for Sema6b (NM_013662.1,402-420).
gagtgtcggaactttgtca

SEQ ID NO: 684611 - DNA, 19 bp, Mus musculus
  siRNA target sequence for Sema6b (NM_013662.1,461-479).
cggctccaatgcgttcaat

SEQ ID NO: 684612 - DNA, 19 bp, Mus musculus
  siRNA target sequence for Sema6b (NM_013662.1,480-498).
cccatctgcgccaattaca

SEQ ID NO: 684613 - DNA, 19 bp, Mus musculus
  siRNA target sequence for Sema6b (NM_013662.1,482-500).
catctgcgccaattacagt

SEQ ID NO: 684614 - DNA, 19 bp, Mus musculus
  siRNA target sequence for Sema6b (NM_013662.1,551-569).
cccctatgaccccaaacat

SEQ ID NO: 684615 - DNA, 19 bp, Mus musculus
  siRNA target sequence for Sema6b (NM_013662.1,630-648).
gccatcgacgctgttatct

SEQ ID NO: 684616 - DNA, 19 bp, Mus musculus
  siRNA target sequence for Sema6b (NM_013662.1,631-649).
ccatcgacgctgttatcta

SEQ ID NO: 684617 - DNA, 19 bp, Mus musculus
  siRNA target sequence for Sema6b (NM_013662.1,669-687).
cccacactgcgcacagtaa

SEQ ID NO: 684618 - DNA, 19 bp, Mus musculus
  siRNA target sequence for Sema6b (NM_013662.1,670-688).
ccacactgcgcacagtaaa

SEQ ID NO: 684619 - DNA, 19 bp, Mus musculus
  siRNA target sequence for Sema6b (NM_013662.1,673-691).
cactgcgcacagtaaagca

SEQ ID NO: 684620 - DNA, 19 bp, Mus musculus
  siRNA target sequence for Sema6b (NM_013662.1,690-708).
cacgactccaagtggttta

SEQ ID NO: 684621 - DNA, 19 bp, Mus musculus
  siRNA target sequence for Sema6b (NM_013662.1,692-710).
cgactccaagtggtttaaa

SEQ ID NO: 684622 - DNA, 19 bp, Mus musculus
  siRNA target sequence for Sema6b (NM_013662.1,739-757).
ggggaagccacgtctattt

SEQ ID NO: 684623 - DNA, 19 bp, Mus musculus
  siRNA target sequence for Sema6b (NM_013662.1,741-759).
ggaagccacgtctatttct

SEQ ID NO: 684624 - DNA, 19 bp, Mus musculus
  siRNA target sequence for Sema6b (NM_013662.1,745-763).
gccacgtctatttcttctt

SEQ ID NO: 684625 - DNA, 19 bp, Mus musculus
  siRNA target sequence for Sema6b (NM_013662.1,913-931).
caggggattcacacttcta

SEQ ID NO: 684626 - DNA, 19 bp, Mus musculus
  siRNA target sequence for Sema6b (NM_013662.1,1032-1050).
gccgtctgcgcctttgaca

SEQ ID NO: 684627 - DNA, 19 bp, Mus musculus
  siRNA target sequence for Sema6b (NM_013662.1,1033-1051).
ccgtctgcgcctttgacat

SEQ ID NO: 684628 - DNA, 19 bp, Mus musculus
  siRNA target sequence for Sema6b (NM_013662.1,1168-1186).
cacctggcatgcagtacaa

SEQ ID NO: 684629 - DNA, 19 bp, Mus musculus
  siRNA target sequence for Sema6b (NM_013662.1,1204-1222).
ctgacgagatcctcaactt

SEQ ID NO: 684630 - DNA, 19 bp, Mus musculus
  siRNA target sequence for Sema6b (NM_013662.1,1338-1356).
ggtccatggggcaatcaga

SEQ ID NO: 684631 - DNA, 19 bp, Mus musculus
  siRNA target sequence for Sema6b (NM_013662.1,1342-1360).
catggggcaatcagacaat

SEQ ID NO: 684632 - DNA, 19 bp, Mus musculus
  siRNA target sequence for Sema6b (NM_013662.1,1345-1363).
ggggcaatcagacaatagt

SEQ ID NO: 684633 - DNA, 19 bp, Mus musculus
  siRNA target sequence for Sema6b (NM_013662.1,1347-1365).
ggcaatcagacaatagtct

SEQ ID NO: 684634 - DNA, 19 bp, Mus musculus
  siRNA target sequence for Sema6b (NM_013662.1,1348-1366).
gcaatcagacaatagtctt

SEQ ID NO: 684635 - DNA, 19 bp, Mus musculus
  siRNA target sequence for Sema6b (NM_013662.1,1381-1399).
ctggcacagtcctcaaatt

SEQ ID NO: 684636 - DNA, 19 bp, Mus musculus
  siRNA target sequence for Sema6b (NM_013662.1,1384-1402).
gcacagtcctcaaatttct

SEQ ID NO: 684637 - DNA, 19 bp, Mus musculus
  siRNA target sequence for Sema6b (NM_013662.1,1624-1642).
ggtgcatgaagaactgtat

SEQ ID NO: 684638 - DNA, 19 bp, Mus musculus
  siRNA target sequence for Sema6c (NM_011351.1,197-215).
cttgggctggactttcaga

SEQ ID NO: 684639 - DNA, 19 bp, Mus musculus
  siRNA target sequence for Sema6c (NM_011351.1,302-320).
gggctggtgcccaacaagt

SEQ ID NO: 684640 - DNA, 19 bp, Mus musculus
  siRNA target sequence for Sema6c (NM_011351.1,325-343).
gacatggaggagtcaagat

SEQ ID NO: 684641 - DNA, 19 bp, Mus musculus
  siRNA target sequence for Sema6c (NM_011351.1,377-395).
gacgaatgctacaactaca

SEQ ID NO: 684642 - DNA, 19 bp, Mus musculus
  siRNA target sequence for Sema6c (NM_011351.1,466-484).
ccgcagctatgggataaca

SEQ ID NO: 684643 - DNA, 19 bp, Mus musculus
  siRNA target sequence for Sema6c (NM_011351.1,467-485).
cgcagctatgggataacat

SEQ ID NO: 684644 - DNA, 19 bp, Mus musculus
  siRNA target sequence for Sema6c (NM_011351.1,469-487).
cagctatgggataacatct

SEQ ID NO: 684645 - DNA, 19 bp, Mus musculus
  siRNA target sequence for Sema6c (NM_011351.1,566-584).
gcagagggcagtttgtact

SEQ ID NO: 684646 - DNA, 19 bp, Mus musculus
  siRNA target sequence for Sema6c (NM_011351.1,651-669).
cactccgttctgcaaagta

SEQ ID NO: 684647 - DNA, 19 bp, Mus musculus
  siRNA target sequence for Sema6c (NM_011351.1,656-674).
cgttctgcaaagtatgact

SEQ ID NO: 684648 - DNA, 19 bp, Mus musculus
  siRNA target sequence for Sema6c (NM_011351.1,687-705).
gagagccacactttgtcta

SEQ ID NO: 684649 - DNA, 19 bp, Mus musculus
  siRNA target sequence for Sema6c (NM_011351.1,719-737).
ggagagcacgtctacttct

SEQ ID NO: 684650 - DNA, 19 bp, Mus musculus
  siRNA target sequence for Sema6c (NM_011351.1,720-738).
gagagcacgtctacttctt

SEQ ID NO: 684651 - DNA, 19 bp, Mus musculus
  siRNA target sequence for Sema6c (NM_011351.1,722-740).
gagcacgtctacttcttct

SEQ ID NO: 684652 - DNA, 19 bp, Mus musculus
  siRNA target sequence for Sema6c (NM_011351.1,893-911).
ggggactctaccttctact

SEQ ID NO: 684653 - DNA, 19 bp, Mus musculus
  siRNA target sequence for Sema6c (NM_011351.1,894-912).
gggactctaccttctactt

SEQ ID NO: 684654 - DNA, 19 bp, Mus musculus
  siRNA target sequence for Sema6c (NM_011351.1,914-932).
gacgtcttacagtccttaa

SEQ ID NO: 684655 - DNA, 19 bp, Mus musculus
  siRNA target sequence for Sema6c (NM_011351.1,916-934).
cgtcttacagtccttaact

SEQ ID NO: 684656 - DNA, 19 bp, Mus musculus
  siRNA target sequence for Sema6c (NM_011351.1,981-999).
ctactcagaccaatagcat

SEQ ID NO: 684657 - DNA, 19 bp, Mus musculus
  siRNA target sequence for Sema6c (NM_011351.1,1017-1035).
gcgccttctacctagatga

SEQ ID NO: 684658 - DNA, 19 bp, Mus musculus
  siRNA target sequence for Sema6c (NM_011351.1,1018-1036).
cgccttctacctagatgat

SEQ ID NO: 684659 - DNA, 19 bp, Mus musculus
  siRNA target sequence for Sema6c (NM_011351.1,1019-1037).
gccttctacctagatgata

SEQ ID NO: 684660 - DNA, 19 bp, Mus musculus
  siRNA target sequence for Sema6c (NM_011351.1,1020-1038).
ccttctacctagatgatat

SEQ ID NO: 684661 - DNA, 19 bp, Mus musculus
  siRNA target sequence for Sema6c (NM_011351.1,1024-1042).
ctacctagatgatattgaa

SEQ ID NO: 684662 - DNA, 19 bp, Mus musculus
  siRNA target sequence for Sema6c (NM_011351.1,1807-1825).
ctcagcctcccgatccatt

SEQ ID NO: 684663 - DNA, 19 bp, Mus musculus
  siRNA target sequence for Sema6c (NM_011351.1,2789-2807).
ccgcacggtggtcatttca

SEQ ID NO: 684664 - DNA, 19 bp, Mus musculus
  siRNA target sequence for Sema6c (NM_011351.1,2790-2808).
cgcacggtggtcatttcaa

SEQ ID NO: 684665 - DNA, 19 bp, Mus musculus
  siRNA target sequence for Sema6c (NM_011351.1,2792-2810).
cacggtggtcatttcaact

SEQ ID NO: 684666 - DNA, 19 bp, Mus musculus
  siRNA target sequence for Sema6c (NM_011351.1,2795-2813).
ggtggtcatttcaacttct

SEQ ID NO: 684667 - DNA, 19 bp, Mus musculus
  siRNA target sequence for Sema7a (NM_011352.2,228-246).
cacacaccgtgcttttcca

SEQ ID NO: 684668 - DNA, 19 bp, Mus musculus
  siRNA target sequence for Sema7a (NM_011352.2,285-303).
gcaaggtctaccacttcaa

SEQ ID NO: 684669 - DNA, 19 bp, Mus musculus
  siRNA target sequence for Sema7a (NM_011352.2,304-322).
cttccccgagggcaagaat

SEQ ID NO: 684670 - DNA, 19 bp, Mus musculus
  siRNA target sequence for Sema7a (NM_011352.2,327-345).
ctgtgcgcacggtgaacat

SEQ ID NO: 684671 - DNA, 19 bp, Mus musculus
  siRNA target sequence for Sema7a (NM_011352.2,380-398).
gactgtgggaattacatca

SEQ ID NO: 684672 - DNA, 19 bp, Mus musculus
  siRNA target sequence for Sema7a (NM_011352.2,493-511).
gtcacttggtgagatgaaa

SEQ ID NO: 684673 - DNA, 19 bp, Mus musculus
  siRNA target sequence for Sema7a (NM_011352.2,522-540).
ccttcagcccggatgagaa

SEQ ID NO: 684674 - DNA, 19 bp, Mus musculus
  siRNA target sequence for Sema7a (NM_011352.2,541-559).
ctccctggttctgtttgaa

SEQ ID NO: 684675 - DNA, 19 bp, Mus musculus
  siRNA target sequence for Sema7a (NM_011352.2,579-597).
ccatccggaagcaggaata

SEQ ID NO: 684676 - DNA, 19 bp, Mus musculus
  siRNA target sequence for Sema7a (NM_011352.2,641-659).
gaactgtacacaagtgata

SEQ ID NO: 684677 - DNA, 19 bp, Mus musculus
  siRNA target sequence for Sema7a (NM_011352.2,710-728).
caagcctatgatgataaga

SEQ ID NO: 684678 - DNA, 19 bp, Mus musculus
  siRNA target sequence for Sema7a (NM_011352.2,713-731).
gcctatgatgataagatct

SEQ ID NO: 684679 - DNA, 19 bp, Mus musculus
  siRNA target sequence for Sema7a (NM_011352.2,714-732).
cctatgatgataagatcta

SEQ ID NO: 684680 - DNA, 19 bp, Mus musculus
  siRNA target sequence for Sema7a (NM_011352.2,766-784).
ccccgaggctcctctcaat

SEQ ID NO: 684681 - DNA, 19 bp, Mus musculus
  siRNA target sequence for Sema7a (NM_011352.2,895-913).
caccaacaggaacttcaat

SEQ ID NO: 684682 - DNA, 19 bp, Mus musculus
  siRNA target sequence for Sema7a (NM_011352.2,1018-1036).
gtattcgcttggtgacatt

SEQ ID NO: 684683 - DNA, 19 bp, Mus musculus
  siRNA target sequence for Sema7a (NM_011352.2,1100-1118).
ggcatgtgcctcccaaaaa

SEQ ID NO: 684684 - DNA, 19 bp, Mus musculus
  siRNA target sequence for Sema7a (NM_011352.2,1101-1119).
gcatgtgcctcccaaaaaa

SEQ ID NO: 684685 - DNA, 19 bp, Mus musculus
  siRNA target sequence for Sema7a (NM_011352.2,1141-1159).
cttccaggtagctgatagt

SEQ ID NO: 684686 - DNA, 19 bp, Mus musculus
  siRNA target sequence for Sema7a (NM_011352.2,1173-1191).
ctcagagggtggaacctat

SEQ ID NO: 684687 - DNA, 19 bp, Mus musculus
  siRNA target sequence for Sema7a (NM_011352.2,1206-1224).
caccattgttccattctaa

SEQ ID NO: 684688 - DNA, 19 bp, Mus musculus
  siRNA target sequence for Sema7a (NM_011352.2,1338-1356).
gggaccaggaccatagctt

SEQ ID NO: 684689 - DNA, 19 bp, Mus musculus
  siRNA target sequence for Sema7a (NM_011352.2,1339-1357).
ggaccaggaccatagcttt

SEQ ID NO: 684690 - DNA, 19 bp, Mus musculus
  siRNA target sequence for Sema7a (NM_011352.2,1349-1367).
catagctttgtcttcaata

SEQ ID NO: 684691 - DNA, 19 bp, Mus musculus
  siRNA target sequence for Sema7a (NM_011352.2,1397-1415).
gcggccatccaggctatat

SEQ ID NO: 684692 - DNA, 19 bp, Mus musculus
  siRNA target sequence for Sema7a (NM_011352.2,1401-1419).
ccatccaggctatatcatt

SEQ ID NO: 684693 - DNA, 19 bp, Mus musculus
  siRNA target sequence for Sema7a (NM_011352.2,1405-1423).
ccaggctatatcattggat

SEQ ID NO: 684694 - DNA, 19 bp, Mus musculus
  siRNA target sequence for Sema7a (NM_011352.2,1559-1577).
cgctgcgtgtctatctaca

SEQ ID NO: 684695 - DNA, 19 bp, Mus musculus
  siRNA target sequence for Sema7a (NM_011352.2,1630-1648).
gtgtcccaaccctaaacca

SEQ ID NO: 684696 - DNA, 19 bp, Mus musculus
  siRNA target sequence for Sema7a (NM_011352.2,1680-1698).
ctcggaactctcgatacta

SEQ ID NO: 684697 - DNA, 19 bp, Mus musculus
  siRNA target sequence for Sema7a (NM_011352.2,1721-1739).
cgccacgccacttacttat

SEQ ID NO: 684698 - DNA, 19 bp, Mus musculus
  siRNA target sequence for Sema7a (NM_011352.2,1797-1815).
gcatcctgttcattgagaa

SEQ ID NO: 684699 - DNA, 19 bp, Mus musculus
  siRNA target sequence for Sema7a (NM_011352.2,1911-1929).
gagcactggccgaacaact

SEQ ID NO: 684700 - DNA, 19 bp, Mus musculus
  siRNA target sequence for Sema7a (NM_011352.2,1913-1931).
gcactggccgaacaactaa

SEQ ID NO: 684701 - DNA, 19 bp, Mus musculus
  siRNA target sequence for Sema7a (NM_011352.2,1914-1932).
cactggccgaacaactaat

SEQ ID NO: 684702 - DNA, 19 bp, Mus musculus
  siRNA target sequence for Agpt2 (NM_007426.2,600-618).
ggtggagatccaacagaat

SEQ ID NO: 684703 - DNA, 19 bp, Mus musculus
  siRNA target sequence for Agpt2 (NM_007426.2,640-658).
gtgatgatagagattggaa

SEQ ID NO: 684704 - DNA, 19 bp, Mus musculus
  siRNA target sequence for Agpt2 (NM_007426.2,682-700).
gcacaaactcggaaactga

SEQ ID NO: 684705 - DNA, 19 bp, Mus musculus
  siRNA target sequence for Agpt2 (NM_007426.2,798-816).
ggatcagaccagtgaaata

SEQ ID NO: 684706 - DNA, 19 bp, Mus musculus
  siRNA target sequence for Agpt2 (NM_007426.2,802-820).
cagaccagtgaaataaaca

SEQ ID NO: 684707 - DNA, 19 bp, Mus musculus
  siRNA target sequence for Agpt2 (NM_007426.2,840-858).
cttcctagaacagaaagtt

SEQ ID NO: 684708 - DNA, 19 bp, Mus musculus
  siRNA target sequence for Agpt2 (NM_007426.2,1073-1091).
ccaagagctcggttgctat

SEQ ID NO: 684709 - DNA, 19 bp, Mus musculus
  siRNA target sequence for Agpt2 (NM_007426.2,1082-1100).
cggttgctatccgtaaaga

SEQ ID NO: 684710 - DNA, 19 bp, Mus musculus
  siRNA target sequence for Agpt2 (NM_007426.2,1083-1101).
ggttgctatccgtaaagaa

SEQ ID NO: 684711 - DNA, 19 bp, Mus musculus
  siRNA target sequence for Agpt2 (NM_007426.2,1372-1390).
caccgctacgtgcttaaga

SEQ ID NO: 684712 - DNA, 19 bp, Mus musculus
  siRNA target sequence for Agpt2 (NM_007426.2,1419-1437).
ggcgcattcgctgtatgat

SEQ ID NO: 684713 - DNA, 19 bp, Mus musculus
  siRNA target sequence for Agpt2 (NM_007426.2,1427-1445).
cgctgtatgatcacttcta

SEQ ID NO: 684714 - DNA, 19 bp, Mus musculus
  siRNA target sequence for Agpt2 (NM_007426.2,1453-1471).
ggtgaagagtccaactaca

SEQ ID NO: 684715 - DNA, 19 bp, Mus musculus
  siRNA target sequence for Agpt2 (NM_007426.2,1556-1574).
cggacaatgacaaatgcat

SEQ ID NO: 684716 - DNA, 19 bp, Mus musculus
  siRNA target sequence for Agpt2 (NM_007426.2,1643-1661).
gacagtactacccacaaaa

SEQ ID NO: 684717 - DNA, 19 bp, Mus musculus
  siRNA target sequence for Agpt2 (NM_007426.2,1684-1702).
ggtatcaagtggtactact

SEQ ID NO: 684718 - DNA, 19 bp, Mus musculus
  siRNA target sequence for Tnfaip2 (NM_009396.1,288-306).
gcccaggcccgagttagat

SEQ ID NO: 684719 - DNA, 19 bp, Mus musculus
  siRNA target sequence for Tnfaip2 (NM_009396.1,833-851).
gcacctacgccgaaagcta

SEQ ID NO: 684720 - DNA, 19 bp, Mus musculus
  siRNA target sequence for Tnfaip2 (NM_009396.1,939-957).
gaacctctaccccaatgat

SEQ ID NO: 684721 - DNA, 19 bp, Mus musculus
  siRNA target sequence for Tnfaip2 (NM_009396.1,942-960).
cctctaccccaatgatatt

SEQ ID NO: 684722 - DNA, 19 bp, Mus musculus
  siRNA target sequence for Tnfaip2 (NM_009396.1,1083-1101).
gctcatggcccgagcttta

SEQ ID NO: 684723 - DNA, 19 bp, Mus musculus
  siRNA target sequence for Tnfaip2 (NM_009396.1,1179-1197).
cgacattctccagatcatt

SEQ ID NO: 684724 - DNA, 19 bp, Mus musculus
  siRNA target sequence for Tnfaip2 (NM_009396.1,1302-1320).
cgcctttgatgagtttcta

SEQ ID NO: 684725 - DNA, 19 bp, Mus musculus
  siRNA target sequence for Tnfaip2 (NM_009396.1,1407-1425).
gaaatggcagatatctcat

SEQ ID NO: 684726 - DNA, 19 bp, Mus musculus
  siRNA target sequence for Tnfaip2 (NM_009396.1,1507-1525).
gacctgaagccgctgttta

SEQ ID NO: 684727 - DNA, 19 bp, Mus musculus
  siRNA target sequence for Tnfaip2 (NM_009396.1,1539-1557).
gacccgttgggcaaatcca

SEQ ID NO: 684728 - DNA, 19 bp, Mus musculus
  siRNA target sequence for Tnfaip2 (NM_009396.1,1656-1674).
gcacctgcacctagtgaaa

SEQ ID NO: 684729 - DNA, 19 bp, Mus musculus
  siRNA target sequence for Tnfaip2 (NM_009396.1,1663-1681).
cacctagtgaaagaataca

SEQ ID NO: 684730 - DNA, 19 bp, Mus musculus
  siRNA target sequence for Tnfaip2 (NM_009396.1,1976-1994).
ggagcatccggaacatact

SEQ ID NO: 684731 - DNA, 19 bp, Mus musculus
  siRNA target sequence for Tnfaip2 (NM_009396.1,1985-2003).
ggaacatactggacatcaa

SEQ ID NO: 684732 - DNA, 19 bp, Mus musculus
  siRNA target sequence for Tnfaip2 (NM_009396.1,2028-2046).
gcccctgttctcccttata

SEQ ID NO: 684733 - DNA, 19 bp, Mus musculus
  siRNA target sequence for Tnfaip2 (NM_009396.1,2029-2047).
cccctgttctcccttataa

SEQ ID NO: 684734 - DNA, 19 bp, Mus musculus
  siRNA target sequence for Ky (NM_024291.1,331-349).
ccccagctgcttaagaagt

SEQ ID NO: 684735 - DNA, 19 bp, Mus musculus
  siRNA target sequence for Ky (NM_024291.1,332-350).
cccagctgcttaagaagtt

SEQ ID NO: 684736 - DNA, 19 bp, Mus musculus
  siRNA target sequence for Ky (NM_024291.1,348-366).
gttctctttggctaaacgt

SEQ ID NO: 684737 - DNA, 19 bp, Mus musculus
  siRNA target sequence for Ky (NM_024291.1,648-666).
ggaccgccaggccttcaaa

SEQ ID NO: 684738 - DNA, 19 bp, Mus musculus
  siRNA target sequence for Ky (NM_024291.1,919-937).
cacttcccagacaacaaaa

SEQ ID NO: 684739 - DNA, 19 bp, Mus musculus
  siRNA target sequence for Ky (NM_024291.1,1036-1054).
ccggagacgtccatgatca

SEQ ID NO: 684740 - DNA, 19 bp, Mus musculus
  siRNA target sequence for Ky (NM_024291.1,1039-1057).
gagacgtccatgatcagaa

SEQ ID NO: 684741 - DNA, 19 bp, Mus musculus
  siRNA target sequence for Ky (NM_024291.1,1047-1065).
catgatcagaacagtcaat

SEQ ID NO: 684742 - DNA, 19 bp, Mus musculus
  siRNA target sequence for Ky (NM_024291.1,1248-1266).
ctcggtgctagaatacaca

SEQ ID NO: 684743 - DNA, 19 bp, Mus musculus
  siRNA target sequence for Ky (NM_024291.1,1561-1579).
ggcaagtttgcccttaaga

SEQ ID NO: 684744 - DNA, 19 bp, Mus musculus
  siRNA target sequence for Ky (NM_024291.1,1570-1588).
gcccttaagatctttgtga

SEQ ID NO: 684745 - DNA, 19 bp, Mus musculus
  siRNA target sequence for Ky (NM_024291.1,1746-1764).
ccgcaacatagccttcaaa

SEQ ID NO: 684746 - DNA, 19 bp, Mus musculus
  siRNA target sequence for Ky (NM_024291.1,1811-1829).
cgtggcccctcactcttaa

SEQ ID NO: 684747 - DNA, 19 bp, Mus musculus
  siRNA target sequence for Ky (NM_024291.1,1903-1921).
gctaaccacaacttctaca

SEQ ID NO: 684748 - DNA, 19 bp, Mus musculus
  siRNA target sequence for Csrp3 (NM_013808.2,112-130).
ggtctaccatgcagaagaa

SEQ ID NO: 684749 - DNA, 19 bp, Mus musculus
  siRNA target sequence for Csrp3 (NM_013808.2,113-131).
gtctaccatgcagaagaaa

SEQ ID NO: 684750 - DNA, 19 bp, Mus musculus
  siRNA target sequence for Csrp3 (NM_013808.2,387-405).
ccaaattctctgcaaagtt

SEQ ID NO: 684751 - DNA, 19 bp, Mus musculus
  siRNA target sequence for Csrp3 (NM_013808.2,524-542).
ctggagtctacaaatgtca

SEQ ID NO: 684752 - DNA, 19 bp, Mus musculus
  siRNA target sequence for Vamp5 (NM_016872.1,49-67).
gacgaagtgacggaaatca

SEQ ID NO: 684753 - DNA, 19 bp, Mus musculus
  siRNA target sequence for Des (NM_010043.1,206-224).
ctcctcgagttcaatgaca

SEQ ID NO: 684754 - DNA, 19 bp, Mus musculus
  siRNA target sequence for Des (NM_010043.1,302-320).
cacccgagcgccatcctat

SEQ ID NO: 684755 - DNA, 19 bp, Mus musculus
  siRNA target sequence for Des (NM_010043.1,654-672).
caggaggaaatccaactaa

SEQ ID NO: 684756 - DNA, 19 bp, Mus musculus
  siRNA target sequence for Des (NM_010043.1,659-677).
ggaaatccaactaagagaa

SEQ ID NO: 684757 - DNA, 19 bp, Mus musculus
  siRNA target sequence for Des (NM_010043.1,675-693).
gaagaagcagagaacaact

SEQ ID NO: 684758 - DNA, 19 bp, Mus musculus
  siRNA target sequence for Des (NM_010043.1,724-742).
ccactctagctcgtattga

SEQ ID NO: 684759 - DNA, 19 bp, Mus musculus
  siRNA target sequence for Des (NM_010043.1,743-761).
cctggagcgcagaatcgaa

SEQ ID NO: 684760 - DNA, 19 bp, Mus musculus
  siRNA target sequence for Des (NM_010043.1,744-762).
ctggagcgcagaatcgaat

SEQ ID NO: 684761 - DNA, 19 bp, Mus musculus
  siRNA target sequence for Des (NM_010043.1,771-789).
gaggagatcgcgttcctta

SEQ ID NO: 684762 - DNA, 19 bp, Mus musculus
  siRNA target sequence for Des (NM_010043.1,774-792).
gagatcgcgttccttaaga

SEQ ID NO: 684763 - DNA, 19 bp, Mus musculus
  siRNA target sequence for Des (NM_010043.1,776-794).
gatcgcgttccttaagaaa

SEQ ID NO: 684764 - DNA, 19 bp, Mus musculus
  siRNA target sequence for Des (NM_010043.1,919-937).
ccatcgcggctaagaacat

SEQ ID NO: 684765 - DNA, 19 bp, Mus musculus
  siRNA target sequence for Des (NM_010043.1,984-1002).
caggcagccaataagaaca

SEQ ID NO: 684766 - DNA, 19 bp, Mus musculus
  siRNA target sequence for Des (NM_010043.1,1190-1208).
gatccgacacctaaaggat

SEQ ID NO: 684767 - DNA, 19 bp, Mus musculus
  siRNA target sequence for Des (NM_010043.1,1195-1213).
gacacctaaaggatgagat

SEQ ID NO: 684768 - DNA, 19 bp, Mus musculus
  siRNA target sequence for Des (NM_010043.1,1312-1330).
gcaggatcaaccttcctat

SEQ ID NO: 684769 - DNA, 19 bp, Mus musculus
  siRNA target sequence for Tagln (NM_011526.2,112-130).
cgagaagtgcagtccaaaa

SEQ ID NO: 684770 - DNA, 19 bp, Mus musculus
  siRNA target sequence for Tagln (NM_011526.2,325-343).
ccaccctccatggtcttta

SEQ ID NO: 684771 - DNA, 19 bp, Mus musculus
  siRNA target sequence for Tagln (NM_011526.2,326-344).
caccctccatggtctttaa

SEQ ID NO: 684772 - DNA, 19 bp, Mus musculus
  siRNA target sequence for Tagln (NM_011526.2,329-347).
cctccatggtctttaagca

SEQ ID NO: 684773 - DNA, 19 bp, Mus musculus
  siRNA target sequence for Tagln (NM_011526.2,426-444).
cctctatgaaggtaaggat

SEQ ID NO: 684774 - DNA, 19 bp, Mus musculus
  siRNA target sequence for Tagln (NM_011526.2,427-445).
ctctatgaaggtaaggata

SEQ ID NO: 684775 - DNA, 19 bp, Mus musculus
  siRNA target sequence for Tagln (NM_011526.2,486-504).
ggctgtgaccaaaaacgat

SEQ ID NO: 684776 - DNA, 19 bp, Mus musculus
  siRNA target sequence for Tagln (NM_011526.2,518-536).
gagatcccaactggtttat

SEQ ID NO: 684777 - DNA, 19 bp, Mus musculus
  siRNA target sequence for Tagln (NM_011526.2,520-538).
gatcccaactggtttatga

SEQ ID NO: 684778 - DNA, 19 bp, Mus musculus
  siRNA target sequence for Tagln (NM_011526.2,595-613).
cacgtcattggccttcaaa

SEQ ID NO: 684779 - DNA, 19 bp, Mus musculus
  siRNA target sequence for Tnnt2 (NM_011619.1,432-450).
ctcaaagacaggatcgaaa

SEQ ID NO: 684780 - DNA, 19 bp, Mus musculus
  siRNA target sequence for Tnnt2 (NM_011619.1,758-776).
ggagctgtggcagagtatt

SEQ ID NO: 684781 - DNA, 19 bp, Mus musculus
  siRNA target sequence for Tnnt2 (NM_011619.1,849-867).
cgaaaccggatcaatgaca

SEQ ID NO: 684782 - DNA, 19 bp, Mus musculus
  siRNA target sequence for Tnnt2 (NM_011619.1,850-868).
gaaaccggatcaatgacaa

SEQ ID NO: 684783 - DNA, 19 bp, Mus musculus
  siRNA target sequence for Tnnt3 (NM_011620.1,189-207).
cccggaaggggagaaagta

SEQ ID NO: 684784 - DNA, 19 bp, Mus musculus
  siRNA target sequence for Tnnt3 (NM_011620.1,191-209).
cggaaggggagaaagtaga

SEQ ID NO: 684785 - DNA, 19 bp, Mus musculus
  siRNA target sequence for Tnnt3 (NM_011620.1,275-293).
gccactttgaagctagaaa

SEQ ID NO: 684786 - DNA, 19 bp, Mus musculus
  siRNA target sequence for Tnnt3 (NM_011620.1,306-324).
ggagctaatcgcacttaaa

SEQ ID NO: 684787 - DNA, 19 bp, Mus musculus
  siRNA target sequence for Tnnt3 (NM_011620.1,309-327).
gctaatcgcacttaaagaa

SEQ ID NO: 684788 - DNA, 19 bp, Mus musculus
  siRNA target sequence for Tnnt3 (NM_011620.1,310-328).
ctaatcgcacttaaagaaa

SEQ ID NO: 684789 - DNA, 19 bp, Mus musculus
  siRNA target sequence for Tnnt3 (NM_011620.1,315-333).
cgcacttaaagaaagaatt

SEQ ID NO: 684790 - DNA, 19 bp, Mus musculus
  siRNA target sequence for Tnnt3 (NM_011620.1,354-372).
ggctgagcagcaaagaatt

SEQ ID NO: 684791 - DNA, 19 bp, Mus musculus
  siRNA target sequence for Tnnt3 (NM_011620.1,388-406).
cgggaacgccagaacagat

SEQ ID NO: 684792 - DNA, 19 bp, Mus musculus
  siRNA target sequence for Tnnt3 (NM_011620.1,389-407).
gggaacgccagaacagatt

SEQ ID NO: 684793 - DNA, 19 bp, Mus musculus
  siRNA target sequence for Tnnt3 (NM_011620.1,590-608).
ggcgcaagcctctgaacat

SEQ ID NO: 684794 - DNA, 19 bp, Mus musculus
  siRNA target sequence for Tnnt3 (NM_011620.1,591-609).
gcgcaagcctctgaacatt

SEQ ID NO: 684795 - DNA, 19 bp, Mus musculus
  siRNA target sequence for Tnnt3 (NM_011620.1,708-726).
gaaacgtcagaaatatgat

SEQ ID NO: 684796 - DNA, 19 bp, Mus musculus
  siRNA target sequence for Arc (NM_018790.1,320-338).
ggacccaccggcatctgtt

SEQ ID NO: 684797 - DNA, 19 bp, Mus musculus
  siRNA target sequence for Arc (NM_018790.1,752-770).
cagttgaggctcagcaata

SEQ ID NO: 684798 - DNA, 19 bp, Mus musculus
  siRNA target sequence for Arc (NM_018790.1,812-830).
gtgtggatacacagatctt

SEQ ID NO: 684799 - DNA, 19 bp, Mus musculus
  siRNA target sequence for Arc (NM_018790.1,996-1014).
ggagtttctgcaatacagt

SEQ ID NO: 684800 - DNA, 19 bp, Mus musculus
  siRNA target sequence for Gp38 (NM_010329.1,234-252).
ggactataggcgtgaatga

SEQ ID NO: 684801 - DNA, 19 bp, Mus musculus
  siRNA target sequence for Gp38 (NM_010329.1,235-253).
gactataggcgtgaatgaa

SEQ ID NO: 684802 - DNA, 19 bp, Mus musculus
  siRNA target sequence for Gp38 (NM_010329.1,237-255).
ctataggcgtgaatgaaga

SEQ ID NO: 684803 - DNA, 19 bp, Mus musculus
  siRNA target sequence for Gp38 (NM_010329.1,242-260).
ggcgtgaatgaagatgata

SEQ ID NO: 684804 - DNA, 19 bp, Mus musculus
  siRNA target sequence for Gp38 (NM_010329.1,243-261).
gcgtgaatgaagatgatat

SEQ ID NO: 684805 - DNA, 19 bp, Mus musculus
  siRNA target sequence for Gp38 (NM_010329.1,286-304).
catggtgcccccaggtata

SEQ ID NO: 684806 - DNA, 19 bp, Mus musculus
  siRNA target sequence for Gp38 (NM_010329.1,289-307).
ggtgcccccaggtatagaa

SEQ ID NO: 684807 - DNA, 19 bp, Mus musculus
  siRNA target sequence for Gp38 (NM_010329.1,294-312).
ccccaggtatagaagacaa

SEQ ID NO: 684808 - DNA, 19 bp, Mus musculus
  siRNA target sequence for Gp38 (NM_010329.1,295-313).
cccaggtatagaagacaaa

SEQ ID NO: 684809 - DNA, 19 bp, Mus musculus
  siRNA target sequence for Gp38 (NM_010329.1,513-531).
gtcaccccaatagagataa

SEQ ID NO: 684810 - DNA, 19 bp, Mus musculus
  siRNA target sequence for Gp38 (NM_010329.1,517-535).
ccccaatagagataatgca

SEQ ID NO: 684811 - DNA, 19 bp, Mus musculus
  siRNA target sequence for Gp38 (NM_010329.1,527-545).
gataatgcaggggatgaaa

SEQ ID NO: 684812 - DNA, 19 bp, Mus musculus
  siRNA target sequence for Gp38 (NM_010329.1,546-564).
cgcagacaacagataagaa

SEQ ID NO: 684813 - DNA, 19 bp, Mus musculus
  siRNA target sequence for Gp38 (NM_010329.1,586-604).
cctggttggaatcatagtt

SEQ ID NO: 684814 - DNA, 19 bp, Mus musculus
  siRNA target sequence for Gp38 (NM_010329.1,628-646).
cgtcggagggatcttcatt

SEQ ID NO: 684815 - DNA, 19 bp, Mus musculus
  siRNA target sequence for Gp38 (NM_010329.1,635-653).
gggatcttcattgttgtta

SEQ ID NO: 684816 - DNA, 19 bp, Mus musculus
  siRNA target sequence for Gp38 (NM_010329.1,647-665).
gttgttatgaagaagattt

SEQ ID NO: 684817 - DNA, 19 bp, Mus musculus
  siRNA target sequence for Gp38 (NM_010329.1,715-733).
cacatctgaaaataagaga

SEQ ID NO: 684818 - DNA, 19 bp, Mus musculus
  siRNA target sequence for TgN737Rpw (NM_009376.1,100-118).
cagatgaggacgaccttta

SEQ ID NO: 684819 - DNA, 19 bp, Mus musculus
  siRNA target sequence for TgN737Rpw (NM_009376.1,137-155).
caacccagcctatgatact

SEQ ID NO: 684820 - DNA, 19 bp, Mus musculus
  siRNA target sequence for TgN737Rpw (NM_009376.1,216-234).
cctcccgtaactgctaaaa

SEQ ID NO: 684821 - DNA, 19 bp, Mus musculus
  siRNA target sequence for TgN737Rpw (NM_009376.1,217-235).
ctcccgtaactgctaaaat

SEQ ID NO: 684822 - DNA, 19 bp, Mus musculus
  siRNA target sequence for TgN737Rpw (NM_009376.1,222-240).
gtaactgctaaaataccaa

SEQ ID NO: 684823 - DNA, 19 bp, Mus musculus
  siRNA target sequence for TgN737Rpw (NM_009376.1,249-267).
gtcagcagacccatagcta

SEQ ID NO: 684824 - DNA, 19 bp, Mus musculus
  siRNA target sequence for TgN737Rpw (NM_009376.1,270-288).
ggatatgggtccaagacat

SEQ ID NO: 684825 - DNA, 19 bp, Mus musculus
  siRNA target sequence for TgN737Rpw (NM_009376.1,313-331).
cgatgacagggacaattca

SEQ ID NO: 684826 - DNA, 19 bp, Mus musculus
  siRNA target sequence for TgN737Rpw (NM_009376.1,431-449).
ccctgctcctcctttggaa

SEQ ID NO: 684827 - DNA, 19 bp, Mus musculus
  siRNA target sequence for TgN737Rpw (NM_009376.1,560-578).
cttagagaaggcaaaagat

SEQ ID NO: 684828 - DNA, 19 bp, Mus musculus
  siRNA target sequence for TgN737Rpw (NM_009376.1,625-643).
caagtccagaaaatatcaa

SEQ ID NO: 684829 - DNA, 19 bp, Mus musculus
  siRNA target sequence for TgN737Rpw (NM_009376.1,628-646).
gtccagaaaatatcaactt

SEQ ID NO: 684830 - DNA, 19 bp, Mus musculus
  siRNA target sequence for TgN737Rpw (NM_009376.1,655-673).
cctactccgttcttttcaa

SEQ ID NO: 684831 - DNA, 19 bp, Mus musculus
  siRNA target sequence for TgN737Rpw (NM_009376.1,682-700).
gtcagtattctgctaatga

SEQ ID NO: 684832 - DNA, 19 bp, Mus musculus
  siRNA target sequence for TgN737Rpw (NM_009376.1,684-702).
cagtattctgctaatgaaa

SEQ ID NO: 684833 - DNA, 19 bp, Mus musculus
  siRNA target sequence for TgN737Rpw (NM_009376.1,708-726).
gcagaagcactgaacacat

SEQ ID NO: 684834 - DNA, 19 bp, Mus musculus
  siRNA target sequence for TgN737Rpw (NM_009376.1,724-742).
cataccaagttatagtgaa

SEQ ID NO: 684835 - DNA, 19 bp, Mus musculus
  siRNA target sequence for TgN737Rpw (NM_009376.1,729-747).
caagttatagtgaaaaaca

SEQ ID NO: 684836 - DNA, 19 bp, Mus musculus
  siRNA target sequence for TgN737Rpw (NM_009376.1,738-756).
gtgaaaaacaagatgttta

SEQ ID NO: 684837 - DNA, 19 bp, Mus musculus
  siRNA target sequence for TgN737Rpw (NM_009376.1,803-821).
gcagagaaattattccaaa

SEQ ID NO: 684838 - DNA, 19 bp, Mus musculus
  siRNA target sequence for TgN737Rpw (NM_009376.1,833-851).
ctaccgaatggccttagat

SEQ ID NO: 684839 - DNA, 19 bp, Mus musculus
  siRNA target sequence for TgN737Rpw (NM_009376.1,903-921).
ggaatcacatttataaaaa

SEQ ID NO: 684840 - DNA, 19 bp, Mus musculus
  siRNA target sequence for TgN737Rpw (NM_009376.1,934-952).
cagatgccatcaactcatt

SEQ ID NO: 684841 - DNA, 19 bp, Mus musculus
  siRNA target sequence for TgN737Rpw (NM_009376.1,995-1013).
caacctcatccttagttgt

SEQ ID NO: 684842 - DNA, 19 bp, Mus musculus
  siRNA target sequence for TgN737Rpw (NM_009376.1,1046-1064).
ggcattccaaaaattaatt

SEQ ID NO: 684843 - DNA, 19 bp, Mus musculus
  siRNA target sequence for TgN737Rpw (NM_009376.1,1066-1084).
ctgttccgttagaaattga

SEQ ID NO: 684844 - DNA, 19 bp, Mus musculus
  siRNA target sequence for TgN737Rpw (NM_009376.1,1113-1131).
gatgatccccatactaact

SEQ ID NO: 684845 - DNA, 19 bp, Mus musculus
  siRNA target sequence for TgN737Rpw (NM_009376.1,1189-1207).
ccatggcagaaaaatacat

SEQ ID NO: 684846 - DNA, 19 bp, Mus musculus
  siRNA target sequence for TgN737Rpw (NM_009376.1,1238-1256).
gatcgaagcgtcttttgct

SEQ ID NO: 684847 - DNA, 19 bp, Mus musculus
  siRNA target sequence for TgN737Rpw (NM_009376.1,1312-1330).
ccaacgacctggagattaa

SEQ ID NO: 684848 - DNA, 19 bp, Mus musculus
  siRNA target sequence for TgN737Rpw (NM_009376.1,1316-1334).
cgacctggagattaacaaa

SEQ ID NO: 684849 - DNA, 19 bp, Mus musculus
  siRNA target sequence for TgN737Rpw (NM_009376.1,1368-1386).
caagctgtagacacattga

SEQ ID NO: 684850 - DNA, 19 bp, Mus musculus
  siRNA target sequence for TgN737Rpw (NM_009376.1,1500-1518).
gtgaactcggatagatata

SEQ ID NO: 684851 - DNA, 19 bp, Mus musculus
  siRNA target sequence for TgN737Rpw (NM_009376.1,1523-1541).
gtcagctctcactaataaa

SEQ ID NO: 684852 - DNA, 19 bp, Mus musculus
  siRNA target sequence for TgN737Rpw (NM_009376.1,1557-1575).
gcaaatggtgattatgaga

SEQ ID NO: 684853 - DNA, 19 bp, Mus musculus
  siRNA target sequence for TgN737Rpw (NM_009376.1,1621-1639).
gtactgaagcactgtataa

SEQ ID NO: 684854 - DNA, 19 bp, Mus musculus
  siRNA target sequence for TgN737Rpw (NM_009376.1,1739-1757).
ccagatagcaaacatatat

SEQ ID NO: 684855 - DNA, 19 bp, Mus musculus
  siRNA target sequence for TgN737Rpw (NM_009376.1,1751-1769).
catatatgagttaatggaa

SEQ ID NO: 684856 - DNA, 19 bp, Mus musculus
  siRNA target sequence for TgN737Rpw (NM_009376.1,1773-1791).
cccaatcaagctattgaat

SEQ ID NO: 684857 - DNA, 19 bp, Mus musculus
  siRNA target sequence for TgN737Rpw (NM_009376.1,1808-1826).
cagcgttgttccaactgat

SEQ ID NO: 684858 - DNA, 19 bp, Mus musculus
  siRNA target sequence for TgN737Rpw (NM_009376.1,1838-1856).
gtctaaactgggagagtta

SEQ ID NO: 684859 - DNA, 19 bp, Mus musculus
  siRNA target sequence for TgN737Rpw (NM_009376.1,1840-1858).
ctaaactgggagagttata

SEQ ID NO: 684860 - DNA, 19 bp, Mus musculus
  siRNA target sequence for TgN737Rpw (NM_009376.1,1849-1867).
gagagttatacgatagtga

SEQ ID NO: 684861 - DNA, 19 bp, Mus musculus
  siRNA target sequence for TgN737Rpw (NM_009376.1,1879-1897).
cccaggcattccaatatta

SEQ ID NO: 684862 - DNA, 19 bp, Mus musculus
  siRNA target sequence for TgN737Rpw (NM_009376.1,1881-1899).
caggcattccaatattact

SEQ ID NO: 684863 - DNA, 19 bp, Mus musculus
  siRNA target sequence for TgN737Rpw (NM_009376.1,1883-1901).
ggcattccaatattactat

SEQ ID NO: 684864 - DNA, 19 bp, Mus musculus
  siRNA target sequence for TgN737Rpw (NM_009376.1,1885-1903).
cattccaatattactatga

SEQ ID NO: 684865 - DNA, 19 bp, Mus musculus
  siRNA target sequence for TgN737Rpw (NM_009376.1,1941-1959).
gaatggcttggagcttatt

SEQ ID NO: 684866 - DNA, 19 bp, Mus musculus
  siRNA target sequence for TgN737Rpw (NM_009376.1,1978-1996).
gcgagaaagccattcagta

SEQ ID NO: 684867 - DNA, 19 bp, Mus musculus
  siRNA target sequence for TgN737Rpw (NM_009376.1,2048-2066).
ggtagctagctgctttaga

SEQ ID NO: 684868 - DNA, 19 bp, Mus musculus
  siRNA target sequence for TgN737Rpw (NM_009376.1,2049-2067).
gtagctagctgctttagaa

SEQ ID NO: 684869 - DNA, 19 bp, Mus musculus
  siRNA target sequence for TgN737Rpw (NM_009376.1,2068-2086).
gaagtggtaactaccaaaa

SEQ ID NO: 684870 - DNA, 19 bp, Mus musculus
  siRNA target sequence for TgN737Rpw (NM_009376.1,2081-2099).
ccaaaaggcattagatact

SEQ ID NO: 684871 - DNA, 19 bp, Mus musculus
  siRNA target sequence for TgN737Rpw (NM_009376.1,2082-2100).
caaaaggcattagatactt

SEQ ID NO: 684872 - DNA, 19 bp, Mus musculus
  siRNA target sequence for TgN737Rpw (NM_009376.1,2087-2105).
ggcattagatacttataaa

SEQ ID NO: 684873 - DNA, 19 bp, Mus musculus
  siRNA target sequence for TgN737Rpw (NM_009376.1,2089-2107).
cattagatacttataaaga

SEQ ID NO: 684874 - DNA, 19 bp, Mus musculus
  siRNA target sequence for TgN737Rpw (NM_009376.1,2116-2134).
ggaaatttccggagaatgt

SEQ ID NO: 684875 - DNA, 19 bp, Mus musculus
  siRNA target sequence for TgN737Rpw (NM_009376.1,2117-2135).
gaaatttccggagaatgtt

SEQ ID NO: 684876 - DNA, 19 bp, Mus musculus
  siRNA target sequence for TgN737Rpw (NM_009376.1,2160-2178).
ctctgcacagatattggat

SEQ ID NO: 684877 - DNA, 19 bp, Mus musculus
  siRNA target sequence for TgN737Rpw (NM_009376.1,2164-2182).
gcacagatattggattaaa

SEQ ID NO: 684878 - DNA, 19 bp, Mus musculus
  siRNA target sequence for TgN737Rpw (NM_009376.1,2176-2194).
gattaaaagaagttcaaga

SEQ ID NO: 684879 - DNA, 19 bp, Mus musculus
  siRNA target sequence for TgN737Rpw (NM_009376.1,2311-2329).
gtgacagtggccagaacaa

SEQ ID NO: 684880 - DNA, 19 bp, Mus musculus
  siRNA target sequence for TgN737Rpw (NM_009376.1,2404-2422).
gtagcggtaacaaagaaat

SEQ ID NO: 684881 - DNA, 19 bp, Mus musculus
  siRNA target sequence for TgN737Rpw (NM_009376.1,2407-2425).
gcggtaacaaagaaataga

SEQ ID NO: 684882 - DNA, 19 bp, Mus musculus
  siRNA target sequence for TgN737Rpw (NM_009376.1,2445-2463).
ctgggccctcagatagaaa

SEQ ID NO: 684883 - DNA, 19 bp, Mus musculus
  siRNA target sequence for TgN737Rpw (NM_009376.1,2447-2465).
gggccctcagatagaaaga

SEQ ID NO: 684884 - DNA, 19 bp, Mus musculus
  siRNA target sequence for TgN737Rpw (NM_009376.1,2476-2494).
cagccaagaaaagaattga

SEQ ID NO: 684885 - DNA, 19 bp, Mus musculus
  siRNA target sequence for TgN737Rpw (NM_009376.1,2488-2506).
gaattgacgaggatgattt

SEQ ID NO: 684886 - DNA, 19 bp, Mus musculus
  siRNA target sequence for Gpc3 (NM_016697.2,218-236).
gtcaccaggtccgttcttt

SEQ ID NO: 684887 - DNA, 19 bp, Mus musculus
  siRNA target sequence for Gpc3 (NM_016697.2,220-238).
caccaggtccgttctttct

SEQ ID NO: 684888 - DNA, 19 bp, Mus musculus
  siRNA target sequence for Gpc3 (NM_016697.2,280-298).
cctgtaccaggatcagatt

SEQ ID NO: 684889 - DNA, 19 bp, Mus musculus
  siRNA target sequence for Gpc3 (NM_016697.2,293-311).
cagatttgcaagtatgtct

SEQ ID NO: 684890 - DNA, 19 bp, Mus musculus
  siRNA target sequence for Gpc3 (NM_016697.2,326-344).
catgctgctcaagaaagat

SEQ ID NO: 684891 - DNA, 19 bp, Mus musculus
  siRNA target sequence for Gpc3 (NM_016697.2,401-419).
cgagtatggaactcaagtt

SEQ ID NO: 684892 - DNA, 19 bp, Mus musculus
  siRNA target sequence for Gpc3 (NM_016697.2,404-422).
gtatggaactcaagttctt

SEQ ID NO: 684893 - DNA, 19 bp, Mus musculus
  siRNA target sequence for Gpc3 (NM_016697.2,417-435).
gttcttaattattcagaat

SEQ ID NO: 684894 - DNA, 19 bp, Mus musculus
  siRNA target sequence for Gpc3 (NM_016697.2,469-487).
gttcgccatgccaagaact

SEQ ID NO: 684895 - DNA, 19 bp, Mus musculus
  siRNA target sequence for Gpc3 (NM_016697.2,491-509).
ccaacgccatgttcaagaa

SEQ ID NO: 684896 - DNA, 19 bp, Mus musculus
  siRNA target sequence for Gpc3 (NM_016697.2,496-514).
gccatgttcaagaataact

SEQ ID NO: 684897 - DNA, 19 bp, Mus musculus
  siRNA target sequence for Gpc3 (NM_016697.2,497-515).
ccatgttcaagaataacta

SEQ ID NO: 684898 - DNA, 19 bp, Mus musculus
  siRNA target sequence for Gpc3 (NM_016697.2,522-540).
cctgactccacaagctttt

SEQ ID NO: 684899 - DNA, 19 bp, Mus musculus
  siRNA target sequence for Gpc3 (NM_016697.2,541-559).
gagtttgtcggtgaatttt

SEQ ID NO: 684900 - DNA, 19 bp, Mus musculus
  siRNA target sequence for Gpc3 (NM_016697.2,592-610).
gatatcaacgtggatgata

SEQ ID NO: 684901 - DNA, 19 bp, Mus musculus
  siRNA target sequence for Gpc3 (NM_016697.2,604-622).
gatgatatggtcaatgaat

SEQ ID NO: 684902 - DNA, 19 bp, Mus musculus
  siRNA target sequence for Gpc3 (NM_016697.2,632-650).
gcctctttccagtcatcta

SEQ ID NO: 684903 - DNA, 19 bp, Mus musculus
  siRNA target sequence for Gpc3 (NM_016697.2,634-652).
ctctttccagtcatctaca

SEQ ID NO: 684904 - DNA, 19 bp, Mus musculus
  siRNA target sequence for Gpc3 (NM_016697.2,676-694).
cctgagtcagtcttagaca

SEQ ID NO: 684905 - DNA, 19 bp, Mus musculus
  siRNA target sequence for Gpc3 (NM_016697.2,716-734).
caagacgtgacctgaaagt

SEQ ID NO: 684906 - DNA, 19 bp, Mus musculus
  siRNA target sequence for Gpc3 (NM_016697.2,740-758).
gcagtttccccaagcttat

SEQ ID NO: 684907 - DNA, 19 bp, Mus musculus
  siRNA target sequence for Gpc3 (NM_016697.2,743-761).
gtttccccaagcttattat

SEQ ID NO: 684908 - DNA, 19 bp, Mus musculus
  siRNA target sequence for Gpc3 (NM_016697.2,809-827).
ccctgaatctcggaattga

SEQ ID NO: 684909 - DNA, 19 bp, Mus musculus
  siRNA target sequence for Gpc3 (NM_016697.2,839-857).
ctaccgaccacctcaagtt

SEQ ID NO: 684910 - DNA, 19 bp, Mus musculus
  siRNA target sequence for Gpc3 (NM_016697.2,843-861).
cgaccacctcaagtttagt

SEQ ID NO: 684911 - DNA, 19 bp, Mus musculus
  siRNA target sequence for Gpc3 (NM_016697.2,844-862).
gaccacctcaagtttagta

SEQ ID NO: 684912 - DNA, 19 bp, Mus musculus
  siRNA target sequence for Gpc3 (NM_016697.2,880-898).
ctcacccgaatgtggtatt

SEQ ID NO: 684913 - DNA, 19 bp, Mus musculus
  siRNA target sequence for Gpc3 (NM_016697.2,910-928).
cagggactgatgatggtta

SEQ ID NO: 684914 - DNA, 19 bp, Mus musculus
  siRNA target sequence for Gpc3 (NM_016697.2,931-949).
ccttgcggtggttattgca

SEQ ID NO: 684915 - DNA, 19 bp, Mus musculus
  siRNA target sequence for Gpc3 (NM_016697.2,932-950).
cttgcggtggttattgcaa

SEQ ID NO: 684916 - DNA, 19 bp, Mus musculus
  siRNA target sequence for Gpc3 (NM_016697.2,1030-1048).
ctcgtgaatggcatgtaca

SEQ ID NO: 684917 - DNA, 19 bp, Mus musculus
  siRNA target sequence for Gpc3 (NM_016697.2,1033-1051).
gtgaatggcatgtacagaa

SEQ ID NO: 684918 - DNA, 19 bp, Mus musculus
  siRNA target sequence for Gpc3 (NM_016697.2,1069-1087).
gtgctgctcggcctctttt

SEQ ID NO: 684919 - DNA, 19 bp, Mus musculus
  siRNA target sequence for Gpc3 (NM_016697.2,1167-1185).
ctcccagcaacgccaatat

SEQ ID NO: 684920 - DNA, 19 bp, Mus musculus
  siRNA target sequence for Gpc3 (NM_016697.2,1171-1189).
cagcaacgccaatatagat

SEQ ID NO: 684921 - DNA, 19 bp, Mus musculus
  siRNA target sequence for Gpc3 (NM_016697.2,1173-1191).
gcaacgccaatatagatct

SEQ ID NO: 684922 - DNA, 19 bp, Mus musculus
  siRNA target sequence for Gpc3 (NM_016697.2,1193-1211).
cttattaccctgaagatct

SEQ ID NO: 684923 - DNA, 19 bp, Mus musculus
  siRNA target sequence for Gpc3 (NM_016697.2,1239-1257).
cgctcatgtcgaacatgaa

SEQ ID NO: 684924 - DNA, 19 bp, Mus musculus
  siRNA target sequence for Gpc3 (NM_016697.2,1248-1266).
cgaacatgaagaaacctta

SEQ ID NO: 684925 - DNA, 19 bp, Mus musculus
  siRNA target sequence for Gpc3 (NM_016697.2,1272-1290).
ccgaagaagggaactgatt

SEQ ID NO: 684926 - DNA, 19 bp, Mus musculus
  siRNA target sequence for Gpc3 (NM_016697.2,1302-1320).
gtctttcatcaacttctat

SEQ ID NO: 684927 - DNA, 19 bp, Mus musculus
  siRNA target sequence for Gpc3 (NM_016697.2,1352-1370).
gccccgtggccgaaaatga

SEQ ID NO: 684928 - DNA, 19 bp, Mus musculus
  siRNA target sequence for Gpc3 (NM_016697.2,1353-1371).
ccccgtggccgaaaatgat

SEQ ID NO: 684929 - DNA, 19 bp, Mus musculus
  siRNA target sequence for Gpc3 (NM_016697.2,1379-1397).
gctggaacggacaagaact

SEQ ID NO: 684930 - DNA, 19 bp, Mus musculus
  siRNA target sequence for Gpc3 (NM_016697.2,1382-1400).
ggaacggacaagaacttgt

SEQ ID NO: 684931 - DNA, 19 bp, Mus musculus
  siRNA target sequence for Gpc3 (NM_016697.2,1393-1411).
gaacttgtggagagataca

SEQ ID NO: 684932 - DNA, 19 bp, Mus musculus
  siRNA target sequence for Gpc3 (NM_016697.2,1431-1449).
cgggatgaagaatcagttt

SEQ ID NO: 684933 - DNA, 19 bp, Mus musculus
  siRNA target sequence for Gpc3 (NM_016697.2,1484-1502).
cggtggttagccagatcat

SEQ ID NO: 684934 - DNA, 19 bp, Mus musculus
  siRNA target sequence for Gpc3 (NM_016697.2,1554-1572).
gggtaaagttctggataaa

SEQ ID NO: 684935 - DNA, 19 bp, Mus musculus
  siRNA target sequence for Gpc3 (NM_016697.2,1618-1636).
gaagatgaatgcattggaa

SEQ ID NO: 684936 - DNA, 19 bp, Mus musculus
  siRNA target sequence for Gpc3 (NM_016697.2,1643-1661).
gtgacgggatggtgaaagt

SEQ ID NO: 684937 - DNA, 19 bp, Mus musculus
  siRNA target sequence for Gpc3 (NM_016697.2,1685-1703).
cagaactggcctatgatct

SEQ ID NO: 684938 - DNA, 19 bp, Mus musculus
  siRNA target sequence for Gpc3 (NM_016697.2,1724-1742).
ggaacaagcagcatggaaa

SEQ ID NO: 684939 - DNA, 19 bp, Mus musculus
  siRNA target sequence for Gpc3 (NM_016697.2,1725-1743).
gaacaagcagcatggaaat

SEQ ID NO: 684940 - DNA, 19 bp, Mus musculus
  siRNA target sequence for Gpc3 (NM_016697.2,1824-1842).
ctatgtggcgtgctttttt

SEQ ID NO: 684941 - DNA, 19 bp, Mus musculus
  siRNA target sequence for Phlda2 (NM_009434.1,231-249).
gtggagcacacctctaagt

SEQ ID NO: 684942 - DNA, 19 bp, Mus musculus
  siRNA target sequence for Phlda2 (NM_009434.1,241-259).
cctctaagtacgtgtactt

SEQ ID NO: 684943 - DNA, 19 bp, Mus musculus
  siRNA target sequence for Phlda2 (NM_009434.1,260-278).
caccatcgtcaccaactat

SEQ ID NO: 684944 - DNA, 19 bp, Mus musculus
  siRNA target sequence for Phlda2 (NM_009434.1,262-280).
ccatcgtcaccaactatta

SEQ ID NO: 684945 - DNA, 19 bp, Mus musculus
  siRNA target sequence for Phlda2 (NM_009434.1,396-414).
cagcgctctgagtctgaaa

SEQ ID NO: 684946 - DNA, 19 bp, Mus musculus
  siRNA target sequence for Tgm1 (NM_019984.2,294-312).
cttctgggctcgttgttgt

SEQ ID NO: 684947 - DNA, 19 bp, Mus musculus
  siRNA target sequence for Tgm1 (NM_019984.2,540-558).
gcaccacacggatgagttt

SEQ ID NO: 684948 - DNA, 19 bp, Mus musculus
  siRNA target sequence for Tgm1 (NM_019984.2,739-757).
gcccaagtgactaagaaca

SEQ ID NO: 684949 - DNA, 19 bp, Mus musculus
  siRNA target sequence for Tgm1 (NM_019984.2,759-777).
cggacacaacctaaaccta

SEQ ID NO: 684950 - DNA, 19 bp, Mus musculus
  siRNA target sequence for Tgm1 (NM_019984.2,911-929).
cagaggacatagtgtatgt

SEQ ID NO: 684951 - DNA, 19 bp, Mus musculus
  siRNA target sequence for Tgm1 (NM_019984.2,937-955).
gaggactggcggcaagaat

SEQ ID NO: 684952 - DNA, 19 bp, Mus musculus
  siRNA target sequence for Tgm1 (NM_019984.2,939-957).
ggactggcggcaagaatat

SEQ ID NO: 684953 - DNA, 19 bp, Mus musculus
  siRNA target sequence for Tgm1 (NM_019984.2,952-970).
gaatatgtgcttaatgagt

SEQ ID NO: 684954 - DNA, 19 bp, Mus musculus
  siRNA target sequence for Tgm1 (NM_019984.2,967-985).
gagtctggaagaatctact

SEQ ID NO: 684955 - DNA, 19 bp, Mus musculus
  siRNA target sequence for Tgm1 (NM_019984.2,973-991).
ggaagaatctactatggaa

SEQ ID NO: 684956 - DNA, 19 bp, Mus musculus
  siRNA target sequence for Tgm1 (NM_019984.2,1077-1095).
gagggggatgccatatgga

SEQ ID NO: 684957 - DNA, 19 bp, Mus musculus
  siRNA target sequence for Tgm1 (NM_019984.2,1342-1360).
cgtaccgtcaccaacttca

SEQ ID NO: 684958 - DNA, 19 bp, Mus musculus
  siRNA target sequence for Tgm1 (NM_019984.2,1376-1394).
cagacacctccctcactat

SEQ ID NO: 684959 - DNA, 19 bp, Mus musculus
  siRNA target sequence for Tgm1 (NM_019984.2,1389-1407).
cactatggacatctacttt

SEQ ID NO: 684960 - DNA, 19 bp, Mus musculus
  siRNA target sequence for Tgm1 (NM_019984.2,1391-1409).
ctatggacatctactttga

SEQ ID NO: 684961 - DNA, 19 bp, Mus musculus
  siRNA target sequence for Tgm1 (NM_019984.2,1413-1431).
gaacatgaagccacttgaa

SEQ ID NO: 684962 - DNA, 19 bp, Mus musculus
  siRNA target sequence for Tgm1 (NM_019984.2,1416-1434).
catgaagccacttgaacat

SEQ ID NO: 684963 - DNA, 19 bp, Mus musculus
  siRNA target sequence for Tgm1 (NM_019984.2,1435-1453).
ctgaaccatgattctgttt

SEQ ID NO: 684964 - DNA, 19 bp, Mus musculus
  siRNA target sequence for Tgm1 (NM_019984.2,1604-1622).
gcttagtctacatgaagta

SEQ ID NO: 684965 - DNA, 19 bp, Mus musculus
  siRNA target sequence for Tgm1 (NM_019984.2,1605-1623).
cttagtctacatgaagtat

SEQ ID NO: 684966 - DNA, 19 bp, Mus musculus
  siRNA target sequence for Tgm1 (NM_019984.2,1609-1627).
gtctacatgaagtatgaca

SEQ ID NO: 684967 - DNA, 19 bp, Mus musculus
  siRNA target sequence for Tgm1 (NM_019984.2,1620-1638).
gtatgacacacctttcatt

SEQ ID NO: 684968 - DNA, 19 bp, Mus musculus
  siRNA target sequence for Tgm1 (NM_019984.2,1647-1665).
ggtaaatagcgataaggta

SEQ ID NO: 684969 - DNA, 19 bp, Mus musculus
  siRNA target sequence for Tgm1 (NM_019984.2,1648-1666).
gtaaatagcgataaggtat

SEQ ID NO: 684970 - DNA, 19 bp, Mus musculus
  siRNA target sequence for Tgm1 (NM_019984.2,1678-1696).
caggatgatggcagcttta

SEQ ID NO: 684971 - DNA, 19 bp, Mus musculus
  siRNA target sequence for Tgm1 (NM_019984.2,1687-1705).
ggcagctttaagatagtgt

SEQ ID NO: 684972 - DNA, 19 bp, Mus musculus
  siRNA target sequence for Tgm1 (NM_019984.2,1688-1706).
gcagctttaagatagtgta

SEQ ID NO: 684973 - DNA, 19 bp, Mus musculus
  siRNA target sequence for Tgm1 (NM_019984.2,1840-1858).
gcccatggcagcaaaccta

SEQ ID NO: 684974 - DNA, 19 bp, Mus musculus
  siRNA target sequence for Tgm1 (NM_019984.2,1846-1864).
ggcagcaaacctaatgtgt

SEQ ID NO: 684975 - DNA, 19 bp, Mus musculus
  siRNA target sequence for Tgm1 (NM_019984.2,1847-1865).
gcagcaaacctaatgtgta

SEQ ID NO: 684976 - DNA, 19 bp, Mus musculus
  siRNA target sequence for Tgm1 (NM_019984.2,1848-1866).
cagcaaacctaatgtgtat

SEQ ID NO: 684977 - DNA, 19 bp, Mus musculus
  siRNA target sequence for Tgm1 (NM_019984.2,1973-1991).
gccgacgcactgtgaagtt

SEQ ID NO: 684978 - DNA, 19 bp, Mus musculus
  siRNA target sequence for Tgm1 (NM_019984.2,2104-2122).
gtggcctacaaggaataca

SEQ ID NO: 684979 - DNA, 19 bp, Mus musculus
  siRNA target sequence for Tgm1 (NM_019984.2,2223-2241).
caccccagacctttctctt

SEQ ID NO: 684980 - DNA, 19 bp, Mus musculus
  siRNA target sequence for Tgm1 (NM_019984.2,2228-2246).
cagacctttctcttacgtt

SEQ ID NO: 684981 - DNA, 19 bp, Mus musculus
  siRNA target sequence for Tgm1 (NM_019984.2,2281-2299).
gtacagatcgtgttcaaga

SEQ ID NO: 684982 - DNA, 19 bp, Mus musculus
  siRNA target sequence for Tgm1 (NM_019984.2,2381-2399).
gggacatcgggggtaatga

SEQ ID NO: 684983 - DNA, 19 bp, Mus musculus
  siRNA target sequence for Tgm1 (NM_019984.2,2383-2401).
gacatcgggggtaatgaga

SEQ ID NO: 684984 - DNA, 19 bp, Mus musculus
  siRNA target sequence for Tgm1 (NM_019984.2,2484-2502).
ccaagtgcacggtgttatt

SEQ ID NO: 684985 - DNA, 19 bp, Mus musculus
  siRNA target sequence for Tgm1 (NM_019984.2,2577-2595).
catacctatggcatatcga

SEQ ID NO: 684986 - DNA, 19 bp, Mus musculus
  siRNA target sequence for Ltap (NM_033509.2,545-563).
gaccgacaccgctctaaga

SEQ ID NO: 684987 - DNA, 19 bp, Mus musculus
  siRNA target sequence for Ltap (NM_033509.2,572-590).
gggagtcgtggagataaat

SEQ ID NO: 684988 - DNA, 19 bp, Mus musculus
  siRNA target sequence for Ltap (NM_033509.2,574-592).
gagtcgtggagataaatca

SEQ ID NO: 684989 - DNA, 19 bp, Mus musculus
  siRNA target sequence for Ltap (NM_033509.2,576-594).
gtcgtggagataaatcagt

SEQ ID NO: 684990 - DNA, 19 bp, Mus musculus
  siRNA target sequence for Ltap (NM_033509.2,645-663).
gggatgagcgggatgacaa

SEQ ID NO: 684991 - DNA, 19 bp, Mus musculus
  siRNA target sequence for Ltap (NM_033509.2,661-679).
caactggggagaaacaaca

SEQ ID NO: 684992 - DNA, 19 bp, Mus musculus
  siRNA target sequence for Ltap (NM_033509.2,752-770).
gacagtgtcccgttggatt

SEQ ID NO: 684993 - DNA, 19 bp, Mus musculus
  siRNA target sequence for Ltap (NM_033509.2,1033-1051).
cctgctggttatttcctat

SEQ ID NO: 684994 - DNA, 19 bp, Mus musculus
  siRNA target sequence for Ltap (NM_033509.2,1099-1117).
ccagggcgtggttcagttt

SEQ ID NO: 684995 - DNA, 19 bp, Mus musculus
  siRNA target sequence for Ltap (NM_033509.2,1231-1249).
ggccagccgcttctacaat

SEQ ID NO: 684996 - DNA, 19 bp, Mus musculus
  siRNA target sequence for Ltap (NM_033509.2,1352-1370).
gtcctggccaagaaagtgt

SEQ ID NO: 684997 - DNA, 19 bp, Mus musculus
  siRNA target sequence for Ltap (NM_033509.2,1464-1482).
gcgacaacagccacaatga

SEQ ID NO: 684998 - DNA, 19 bp, Mus musculus
  siRNA target sequence for Ltap (NM_033509.2,1473-1491).
gccacaatgagtactacta

SEQ ID NO: 684999 - DNA, 19 bp, Mus musculus
  siRNA target sequence for Ltap (NM_033509.2,1634-1652).
gcccaagcgatctttgcat

SEQ ID NO: 685000 - DNA, 19 bp, Mus musculus
  siRNA target sequence for Ltap (NM_033509.2,1823-1841).
cgttggctggccaaacagt

SEQ ID NO: 685001 - DNA, 19 bp, Mus musculus
  siRNA target sequence for Ltap (NM_033509.2,1867-1885).
gaccaatgggcttaaggat

SEQ ID NO: 685002 - DNA, 19 bp, Mus musculus
  siRNA target sequence for Ltap (NM_033509.2,1887-1905).
gcatcgtgttcctcttgaa

SEQ ID NO: 685003 - DNA, 19 bp, Mus musculus
  siRNA target sequence for Ltap (NM_033509.2,1976-1994).
gatcccaagtcacataagt

SEQ ID NO: 685004 - DNA, 19 bp, Mus musculus
  siRNA target sequence for Azi1 (NM_009734.1,293-311).
ctctgccacaaggtctatt

SEQ ID NO: 685005 - DNA, 19 bp, Mus musculus
  siRNA target sequence for Azi1 (NM_009734.1,385-403).
cccgagctatcaacaatct

SEQ ID NO: 685006 - DNA, 19 bp, Mus musculus
  siRNA target sequence for Azi1 (NM_009734.1,386-404).
ccgagctatcaacaatctt

SEQ ID NO: 685007 - DNA, 19 bp, Mus musculus
  siRNA target sequence for Azi1 (NM_009734.1,395-413).
caacaatcttcgaagatct

SEQ ID NO: 685008 - DNA, 19 bp, Mus musculus
  siRNA target sequence for Azi1 (NM_009734.1,727-745).
ccaccatggtgcataacca

SEQ ID NO: 685009 - DNA, 19 bp, Mus musculus
  siRNA target sequence for Azi1 (NM_009734.1,799-817).
cctccctcaacaatattgt

SEQ ID NO: 685010 - DNA, 19 bp, Mus musculus
  siRNA target sequence for Azi1 (NM_009734.1,857-875).
ggggaagcctcggaagaat

SEQ ID NO: 685011 - DNA, 19 bp, Mus musculus
  siRNA target sequence for Azi1 (NM_009734.1,859-877).
ggaagcctcggaagaattt

SEQ ID NO: 685012 - DNA, 19 bp, Mus musculus
  siRNA target sequence for Azi1 (NM_009734.1,955-973).
ggttcatccatcaggtaaa

SEQ ID NO: 685013 - DNA, 19 bp, Mus musculus
  siRNA target sequence for Azi1 (NM_009734.1,1504-1522).
caaccctggacgatcttct

SEQ ID NO: 685014 - DNA, 19 bp, Mus musculus
  siRNA target sequence for Azi1 (NM_009734.1,1570-1588).
ccaaggcctaccataagga

SEQ ID NO: 685015 - DNA, 19 bp, Mus musculus
  siRNA target sequence for Azi1 (NM_009734.1,1577-1595).
ctaccataaggacagatat

SEQ ID NO: 685016 - DNA, 19 bp, Mus musculus
  siRNA target sequence for Azi1 (NM_009734.1,1711-1729).
ccaagcttcagagcattat

SEQ ID NO: 685017 - DNA, 19 bp, Mus musculus
  siRNA target sequence for Azi1 (NM_009734.1,1918-1936).
ctgttcgacgtgttaagga

SEQ ID NO: 685018 - DNA, 19 bp, Mus musculus
  siRNA target sequence for Azi1 (NM_009734.1,2027-2045).
gattgaagacaagaaagtt

SEQ ID NO: 685019 - DNA, 19 bp, Mus musculus
  siRNA target sequence for Azi1 (NM_009734.1,2200-2218).
ggatcaatgagaaaacgaa

SEQ ID NO: 685020 - DNA, 19 bp, Mus musculus
  siRNA target sequence for Azi1 (NM_009734.1,2253-2271).
cctgagatccagaaactaa

SEQ ID NO: 685021 - DNA, 19 bp, Mus musculus
  siRNA target sequence for Azi1 (NM_009734.1,2254-2272).
ctgagatccagaaactaat

SEQ ID NO: 685022 - DNA, 19 bp, Mus musculus
  siRNA target sequence for Azi1 (NM_009734.1,2800-2818).
gccgagaccaggagattga

SEQ ID NO: 685023 - DNA, 19 bp, Mus musculus
  siRNA target sequence for Azi1 (NM_009734.1,2897-2915).
gcgtgtgcgtgataagtat

SEQ ID NO: 685024 - DNA, 19 bp, Mus musculus
  siRNA target sequence for Azi1 (NM_009734.1,3015-3033).
cggctgcagtccctagtaa

SEQ ID NO: 685025 - DNA, 19 bp, Mus musculus
  siRNA target sequence for Hook1 (NM_030014.2,204-222).
cttgtcaagatgtcaaaca

SEQ ID NO: 685026 - DNA, 19 bp, Mus musculus
  siRNA target sequence for Hook1 (NM_030014.2,241-259).
catggcacaagttcttcat

SEQ ID NO: 685027 - DNA, 19 bp, Mus musculus
  siRNA target sequence for Hook1 (NM_030014.2,272-290).
gcttggttcagcgaatctt

SEQ ID NO: 685028 - DNA, 19 bp, Mus musculus
  siRNA target sequence for Hook1 (NM_030014.2,277-295).
gttcagcgaatcttggtta

SEQ ID NO: 685029 - DNA, 19 bp, Mus musculus
  siRNA target sequence for Hook1 (NM_030014.2,291-309).
ggttaagccgaattaaaga

SEQ ID NO: 685030 - DNA, 19 bp, Mus musculus
  siRNA target sequence for Hook1 (NM_030014.2,292-310).
gttaagccgaattaaagat

SEQ ID NO: 685031 - DNA, 19 bp, Mus musculus
  siRNA target sequence for Hook1 (NM_030014.2,355-373).
ggtcctccatggaattaca

SEQ ID NO: 685032 - DNA, 19 bp, Mus musculus
  siRNA target sequence for Hook1 (NM_030014.2,356-374).
gtcctccatggaattacaa

SEQ ID NO: 685033 - DNA, 19 bp, Mus musculus
  siRNA target sequence for Hook1 (NM_030014.2,359-377).
ctccatggaattacaagtt

SEQ ID NO: 685034 - DNA, 19 bp, Mus musculus
  siRNA target sequence for Hook1 (NM_030014.2,362-380).
catggaattacaagttact

SEQ ID NO: 685035 - DNA, 19 bp, Mus musculus
  siRNA target sequence for Hook1 (NM_030014.2,366-384).
gaattacaagttactatca

SEQ ID NO: 685036 - DNA, 19 bp, Mus musculus
  siRNA target sequence for Hook1 (NM_030014.2,372-390).
caagttactatcatgagtt

SEQ ID NO: 685037 - DNA, 19 bp, Mus musculus
  siRNA target sequence for Hook1 (NM_030014.2,422-440).
cctgatttaaatcaaatca

SEQ ID NO: 685038 - DNA, 19 bp, Mus musculus
  siRNA target sequence for Hook1 (NM_030014.2,468-486).
ggaggttgcttcagctaat

SEQ ID NO: 685039 - DNA, 19 bp, Mus musculus
  siRNA target sequence for Hook1 (NM_030014.2,765-783).
cactggtctctgagaatga

SEQ ID NO: 685040 - DNA, 19 bp, Mus musculus
  siRNA target sequence for Hook1 (NM_030014.2,866-884).
cagctacaactagaacaat

SEQ ID NO: 685041 - DNA, 19 bp, Mus musculus
  siRNA target sequence for Hook1 (NM_030014.2,903-921).
ggcttgaagctgcaaaaga

SEQ ID NO: 685042 - DNA, 19 bp, Mus musculus
  siRNA target sequence for Hook1 (NM_030014.2,1011-1029).
ccagagccctaaaagatga

SEQ ID NO: 685043 - DNA, 19 bp, Mus musculus
  siRNA target sequence for Hook1 (NM_030014.2,1046-1064).
gctacgtcagacaaagcaa

SEQ ID NO: 685044 - DNA, 19 bp, Mus musculus
  siRNA target sequence for Hook1 (NM_030014.2,1047-1065).
ctacgtcagacaaagcaaa

SEQ ID NO: 685045 - DNA, 19 bp, Mus musculus
  siRNA target sequence for Hook1 (NM_030014.2,1050-1068).
cgtcagacaaagcaaataa

SEQ ID NO: 685046 - DNA, 19 bp, Mus musculus
  siRNA target sequence for Hook1 (NM_030014.2,1075-1093).
gtcaacagtggaggtatat

SEQ ID NO: 685047 - DNA, 19 bp, Mus musculus
  siRNA target sequence for Hook1 (NM_030014.2,1121-1139).
ctccgcaaacaggtgaaat

SEQ ID NO: 685048 - DNA, 19 bp, Mus musculus
  siRNA target sequence for Hook1 (NM_030014.2,1124-1142).
cgcaaacaggtgaaatctt

SEQ ID NO: 685049 - DNA, 19 bp, Mus musculus
  siRNA target sequence for Hook1 (NM_030014.2,1140-1158).
ctttacaggagacaaatat

SEQ ID NO: 685050 - DNA, 19 bp, Mus musculus
  siRNA target sequence for Hook1 (NM_030014.2,1220-1238).
gcacagttagagacctata

SEQ ID NO: 685051 - DNA, 19 bp, Mus musculus
  siRNA target sequence for Hook1 (NM_030014.2,1221-1239).
cacagttagagacctataa

SEQ ID NO: 685052 - DNA, 19 bp, Mus musculus
  siRNA target sequence for Hook1 (NM_030014.2,1252-1270).
ggaccttcacacaaagctt

SEQ ID NO: 685053 - DNA, 19 bp, Mus musculus
  siRNA target sequence for Hook1 (NM_030014.2,1253-1271).
gaccttcacacaaagcttt

SEQ ID NO: 685054 - DNA, 19 bp, Mus musculus
  siRNA target sequence for Hook1 (NM_030014.2,1282-1300).
caaaagggcagatacacta

SEQ ID NO: 685055 - DNA, 19 bp, Mus musculus
  siRNA target sequence for Hook1 (NM_030014.2,1348-1366).
ggaaaaagagcgattgata

SEQ ID NO: 685056 - DNA, 19 bp, Mus musculus
  siRNA target sequence for Hook1 (NM_030014.2,1399-1417).
ggagctgcggtgctcaaaa

SEQ ID NO: 685057 - DNA, 19 bp, Mus musculus
  siRNA target sequence for Hook1 (NM_030014.2,1443-1461).
ctgatgcatctgctacaaa

SEQ ID NO: 685058 - DNA, 19 bp, Mus musculus
  siRNA target sequence for Hook1 (NM_030014.2,1445-1463).
gatgcatctgctacaaaaa

SEQ ID NO: 685059 - DNA, 19 bp, Mus musculus
  siRNA target sequence for Hook1 (NM_030014.2,1458-1476).
caaaaagttatgaaaatct

SEQ ID NO: 685060 - DNA, 19 bp, Mus musculus
  siRNA target sequence for Hook1 (NM_030014.2,1489-1507).
catgcccgtggaatacaga

SEQ ID NO: 685061 - DNA, 19 bp, Mus musculus
  siRNA target sequence for Hook1 (NM_030014.2,1609-1627).
gaagcaccgcaagatgaat

SEQ ID NO: 685062 - DNA, 19 bp, Mus musculus
  siRNA target sequence for Hook1 (NM_030014.2,1688-1706).
gaggacctccagaagtcat

SEQ ID NO: 685063 - DNA, 19 bp, Mus musculus
  siRNA target sequence for Hook1 (NM_030014.2,1709-1727).
caagaacagggctctaagt

SEQ ID NO: 685064 - DNA, 19 bp, Mus musculus
  siRNA target sequence for Hook1 (NM_030014.2,1762-1780).
gttggaagctcatatggaa

SEQ ID NO: 685065 - DNA, 19 bp, Mus musculus
  siRNA target sequence for Hook1 (NM_030014.2,1834-1852).
ccttcagccagatataagt

SEQ ID NO: 685066 - DNA, 19 bp, Mus musculus
  siRNA target sequence for Hook1 (NM_030014.2,1851-1869).
gtcagaatgcccaaaagat

SEQ ID NO: 685067 - DNA, 19 bp, Mus musculus
  siRNA target sequence for Hook1 (NM_030014.2,1884-1902).
cggctcttcagaagaaaga

SEQ ID NO: 685068 - DNA, 19 bp, Mus musculus
  siRNA target sequence for Hook1 (NM_030014.2,1922-1940).
gaggagagatacaaaatgt

SEQ ID NO: 685069 - DNA, 19 bp, Mus musculus
  siRNA target sequence for Hook1 (NM_030014.2,2000-2018).
gcagaaataatgttactca

SEQ ID NO: 685070 - DNA, 19 bp, Mus musculus
  siRNA target sequence for Hook1 (NM_030014.2,2053-2071).
gattctagagagtgaatgt

SEQ ID NO: 685071 - DNA, 19 bp, Mus musculus
  siRNA target sequence for Hook1 (NM_030014.2,2064-2082).
gtgaatgtaaagtagcaaa

SEQ ID NO: 685072 - DNA, 19 bp, Mus musculus
  siRNA target sequence for Hook1 (NM_030014.2,2079-2097).
caaaattgagggattatga

SEQ ID NO: 685073 - DNA, 19 bp, Mus musculus
  siRNA target sequence for Hook1 (NM_030014.2,2090-2108).
gattatgaggaaaaactca

SEQ ID NO: 685074 - DNA, 19 bp, Mus musculus
  siRNA target sequence for Hook1 (NM_030014.2,2131-2149).
gagcctggcgtttcagaaa

SEQ ID NO: 685075 - DNA, 19 bp, Mus musculus
  siRNA target sequence for Hook1 (NM_030014.2,2180-2198).
gctagtgcttgcaaagaca

SEQ ID NO: 685076 - DNA, 19 bp, Mus musculus
  siRNA target sequence for Hook1 (NM_030014.2,2258-2276).
cgaagaaacctctctgtta

SEQ ID NO: 685077 - DNA, 19 bp, Mus musculus
  siRNA target sequence for Hook1 (NM_030014.2,2262-2280).
gaaacctctctgttaaggt

SEQ ID NO: 685078 - DNA, 19 bp, Mus musculus
  siRNA target sequence for Mea1 (NM_010787.1,250-268).
cgtaccagcccctcaatca

SEQ ID NO: 685079 - DNA, 19 bp, Mus musculus
  siRNA target sequence for Mea1 (NM_010787.1,251-269).
gtaccagcccctcaatcaa

SEQ ID NO: 685080 - DNA, 19 bp, Mus musculus
  siRNA target sequence for Mtl5 (NM_010841.1,822-840).
ccagcgaagttaaatctca

SEQ ID NO: 685081 - DNA, 19 bp, Mus musculus
  siRNA target sequence for Mtl5 (NM_010841.1,823-841).
cagcgaagttaaatctcat

SEQ ID NO: 685082 - DNA, 19 bp, Mus musculus
  siRNA target sequence for Mtl5 (NM_010841.1,837-855).
ctcatcacacaggttgata

SEQ ID NO: 685083 - DNA, 19 bp, Mus musculus
  siRNA target sequence for Mtl5 (NM_010841.1,842-860).
cacacaggttgataatgga

SEQ ID NO: 685084 - DNA, 19 bp, Mus musculus
  siRNA target sequence for Mtl5 (NM_010841.1,916-934).
ggccacccaaaataactct

SEQ ID NO: 685085 - DNA, 19 bp, Mus musculus
  siRNA target sequence for Mtl5 (NM_010841.1,1025-1043).
cataaaggcgtgtcttgat

SEQ ID NO: 685086 - DNA, 19 bp, Mus musculus
  siRNA target sequence for Mtl5 (NM_010841.1,1034-1052).
gtgtcttgatagaaatcct

SEQ ID NO: 685087 - DNA, 19 bp, Mus musculus
  siRNA target sequence for Mtl5 (NM_010841.1,1082-1100).
ccgtctgggagctgctaaa

SEQ ID NO: 685088 - DNA, 19 bp, Mus musculus
  siRNA target sequence for Mtl5 (NM_010841.1,1201-1219).
gcattgcttgcaaaaacta

SEQ ID NO: 685089 - DNA, 19 bp, Mus musculus
  siRNA target sequence for Mtl5 (NM_010841.1,1228-1246).
gtccagaacgaaaaatgct

SEQ ID NO: 685090 - DNA, 19 bp, Mus musculus
  siRNA target sequence for Mtl5 (NM_010841.1,1360-1378).
gtatctcctgggaagtagt

SEQ ID NO: 685091 - DNA, 19 bp, Mus musculus
  siRNA target sequence for Mtl5 (NM_010841.1,1444-1462).
gcttggctgagcagatgat

SEQ ID NO: 685092 - DNA, 19 bp, Mus musculus
  siRNA target sequence for Mtl5 (NM_010841.1,1514-1532).
gtccaaggggctgaaaatt

SEQ ID NO: 685093 - DNA, 19 bp, Mus musculus
  siRNA target sequence for Mtl5 (NM_010841.1,1516-1534).
ccaaggggctgaaaattga

SEQ ID NO: 685094 - DNA, 19 bp, Mus musculus
  siRNA target sequence for Odf1 (NM_008757.1,234-252).
ggccgcactgagttgtctt

SEQ ID NO: 685095 - DNA, 19 bp, Mus musculus
  siRNA target sequence for Odf1 (NM_008757.1,235-253).
gccgcactgagttgtcttt

SEQ ID NO: 685096 - DNA, 19 bp, Mus musculus
  siRNA target sequence for Odf1 (NM_008757.1,236-254).
ccgcactgagttgtctttt

SEQ ID NO: 685097 - DNA, 19 bp, Mus musculus
  siRNA target sequence for Odf1 (NM_008757.1,260-278).
gtgttaggagggacataaa

SEQ ID NO: 685098 - DNA, 19 bp, Mus musculus
  siRNA target sequence for Odf1 (NM_008757.1,330-348).
ccgctgcctgtgtgactta

SEQ ID NO: 685099 - DNA, 19 bp, Mus musculus
  siRNA target sequence for Odf1 (NM_008757.1,331-349).
cgctgcctgtgtgacttat

SEQ ID NO: 685100 - DNA, 19 bp, Mus musculus
  siRNA target sequence for Odf1 (NM_008757.1,335-353).
gcctgtgtgacttatacat

SEQ ID NO: 685101 - DNA, 19 bp, Mus musculus
  siRNA target sequence for Odf1 (NM_008757.1,452-470).
gctgcctgtgtgactacaa

SEQ ID NO: 685102 - DNA, 19 bp, Mus musculus
  siRNA target sequence for Odf1 (NM_008757.1,513-531).
cagaaggacgacaaataga

SEQ ID NO: 685103 - DNA, 19 bp, Mus musculus
  siRNA target sequence for Odf1 (NM_008757.1,548-566).
gctgcagcagtaacatact

SEQ ID NO: 685104 - DNA, 19 bp, Mus musculus
  siRNA target sequence for Odf1 (NM_008757.1,576-594).
gaatgtgtgcggctttgaa

SEQ ID NO: 685105 - DNA, 19 bp, Mus musculus
  siRNA target sequence for Odf1 (NM_008757.1,606-624).
caaagtgcgcgtgaaagat

SEQ ID NO: 685106 - DNA, 19 bp, Mus musculus
  siRNA target sequence for Odf1 (NM_008757.1,664-682).
gactgcctcggatccaaaa

SEQ ID NO: 685107 - DNA, 19 bp, Mus musculus
  siRNA target sequence for Odf1 (NM_008757.1,668-686).
gcctcggatccaaaaagta

SEQ ID NO: 685108 - DNA, 19 bp, Mus musculus
  siRNA target sequence for Odf1 (NM_008757.1,670-688).
ctcggatccaaaaagtaca

SEQ ID NO: 685109 - DNA, 19 bp, Mus musculus
  siRNA target sequence for Odf1 (NM_008757.1,674-692).
gatccaaaaagtacagtta

SEQ ID NO: 685110 - DNA, 19 bp, Mus musculus
  siRNA target sequence for Odf1 (NM_008757.1,677-695).
ccaaaaagtacagttacat

SEQ ID NO: 685111 - DNA, 19 bp, Mus musculus
  siRNA target sequence for Odf1 (NM_008757.1,804-822).
cacgtctccctgtaatcct

SEQ ID NO: 685112 - DNA, 19 bp, Mus musculus
  siRNA target sequence for Odf1 (NM_008757.1,954-972).
ctgtaggaagatgatctta

SEQ ID NO: 685113 - DNA, 19 bp, Mus musculus
  siRNA target sequence for Tcp11 (NM_013687.2,450-468).
cgcttccaagcttgattgt

SEQ ID NO: 685114 - DNA, 19 bp, Mus musculus
  siRNA target sequence for Tcp11 (NM_013687.2,452-470).
cttccaagcttgattgtca

SEQ ID NO: 685115 - DNA, 19 bp, Mus musculus
  siRNA target sequence for Tcp11 (NM_013687.2,590-608).
gtgctcttgagcttctgaa

SEQ ID NO: 685116 - DNA, 19 bp, Mus musculus
  siRNA target sequence for Tcp11 (NM_013687.2,1290-1308).
ctctgacagtggtctgttt

SEQ ID NO: 685117 - DNA, 19 bp, Mus musculus
  siRNA target sequence for Tcp11 (NM_013687.2,1523-1541).
gcgtccgcagcgtcattga

SEQ ID NO: 685118 - DNA, 19 bp, Mus musculus
  siRNA target sequence for Tcp11 (NM_013687.2,1700-1718).
cgtattacaccgagatctt

SEQ ID NO: 685119 - DNA, 19 bp, Mus musculus
  siRNA target sequence for Tcp11 (NM_013687.2,1701-1719).
gtattacaccgagatctta

SEQ ID NO: 685120 - DNA, 19 bp, Mus musculus
  siRNA target sequence for 7420700M05Rik (NM_029416.1,121-139).
cagcctcccatggataata

SEQ ID NO: 685121 - DNA, 19 bp, Mus musculus
  siRNA target sequence for 7420700M05Rik (NM_029416.1,330-348).
ctcccagctggctcctata

SEQ ID NO: 685122 - DNA, 19 bp, Mus musculus
  siRNA target sequence for 7420700M05Rik (NM_029416.1,396-414).
gatgccagttggaagttca

SEQ ID NO: 685123 - DNA, 19 bp, Mus musculus
  siRNA target sequence for 7420700M05Rik (NM_029416.1,552-570).
caccacgggctctttaaaa

SEQ ID NO: 685124 - DNA, 19 bp, Mus musculus
  siRNA target sequence for 7420700M05Rik (NM_029416.1,555-573).
cacgggctctttaaaacat

SEQ ID NO: 685125 - DNA, 19 bp, Mus musculus
  siRNA target sequence for 7420700M05Rik (NM_029416.1,617-635).
ctgtggctccgtttatgga

SEQ ID NO: 685126 - DNA, 19 bp, Mus musculus
  siRNA target sequence for 7420700M05Rik (NM_029416.1,623-641).
ctccgtttatggatcagat

SEQ ID NO: 685127 - DNA, 19 bp, Mus musculus
  siRNA target sequence for 7420700M05Rik (NM_029416.1,680-698).
cagctaggttccagcaatt

SEQ ID NO: 685128 - DNA, 19 bp, Mus musculus
  siRNA target sequence for 7420700M05Rik (NM_029416.1,683-701).
ctaggttccagcaattgct

SEQ ID NO: 685129 - DNA, 19 bp, Mus musculus
  siRNA target sequence for 7420700M05Rik (NM_029416.1,703-721).
cctttagactcccaagatt

SEQ ID NO: 685130 - DNA, 19 bp, Mus musculus
  siRNA target sequence for 7420700M05Rik (NM_029416.1,796-814).
gagagccccagtacttcaa

SEQ ID NO: 685131 - DNA, 19 bp, Mus musculus
  siRNA target sequence for 7420700M05Rik (NM_029416.1,828-846).
gagacagtccccagtttca

SEQ ID NO: 685132 - DNA, 19 bp, Mus musculus
  siRNA target sequence for 7420700M05Rik (NM_029416.1,841-859).
gtttcaaggccttatgtct

SEQ ID NO: 685133 - DNA, 19 bp, Mus musculus
  siRNA target sequence for 7420700M05Rik (NM_029416.1,849-867).
gccttatgtctgcacatat

SEQ ID NO: 685134 - DNA, 19 bp, Mus musculus
  siRNA target sequence for 7420700M05Rik (NM_029416.1,850-868).
ccttatgtctgcacatata

SEQ ID NO: 685135 - DNA, 19 bp, Mus musculus
  siRNA target sequence for 7420700M05Rik (NM_029416.1,851-869).
cttatgtctgcacatataa

SEQ ID NO: 685136 - DNA, 19 bp, Mus musculus
  siRNA target sequence for 7420700M05Rik (NM_029416.1,1019-1037).
ccagataccgaccacataa

SEQ ID NO: 685137 - DNA, 19 bp, Mus musculus
  siRNA target sequence for 7420700M05Rik (NM_029416.1,1020-1038).
cagataccgaccacataaa

SEQ ID NO: 685138 - DNA, 19 bp, Mus musculus
  siRNA target sequence for 7420700M05Rik (NM_029416.1,1051-1069).
gatcgagagttcatgagat

SEQ ID NO: 685139 - DNA, 19 bp, Mus musculus
  siRNA target sequence for 9630042H07Rik (NM_178753.2,533-551).
ccgcgtacctgatgaagaa

SEQ ID NO: 685140 - DNA, 19 bp, Mus musculus
  siRNA target sequence for 9630042H07Rik (NM_178753.2,534-552).
cgcgtacctgatgaagaaa

SEQ ID NO: 685141 - DNA, 19 bp, Mus musculus
  siRNA target sequence for 9630042H07Rik (NM_178753.2,587-605).
ctttcctcactcataggaa

SEQ ID NO: 685142 - DNA, 19 bp, Mus musculus
  siRNA target sequence for 9630042H07Rik (NM_178753.2,609-627).
cgtgggctgccgcattcaa

SEQ ID NO: 685143 - DNA, 19 bp, Mus musculus
  siRNA target sequence for 9630042H07Rik (NM_178753.2,655-673).
gtggagcaatggaaaggta

SEQ ID NO: 685144 - DNA, 19 bp, Mus musculus
  siRNA target sequence for 9630042H07Rik (NM_178753.2,693-711).
cgtgaagcccactctgtat

SEQ ID NO: 685145 - DNA, 19 bp, Mus musculus
  siRNA target sequence for 9630042H07Rik (NM_178753.2,694-712).
gtgaagcccactctgtata

SEQ ID NO: 685146 - DNA, 19 bp, Mus musculus
  siRNA target sequence for 9630042H07Rik (NM_178753.2,700-718).
cccactctgtatatcatca

SEQ ID NO: 685147 - DNA, 19 bp, Mus musculus
  siRNA target sequence for 9630042H07Rik (NM_178753.2,701-719).
ccactctgtatatcatcaa

SEQ ID NO: 685148 - DNA, 19 bp, Mus musculus
  siRNA target sequence for 9630042H07Rik (NM_178753.2,922-940).
gcccccatcatggatactt

SEQ ID NO: 685149 - DNA, 19 bp, Mus musculus
  siRNA target sequence for 9630042H07Rik (NM_178753.2,927-945).
catcatggatacttggttt

SEQ ID NO: 685150 - DNA, 19 bp, Mus musculus
  siRNA target sequence for 9630042H07Rik (NM_178753.2,967-985).
ccggtcctctatatgtaca

SEQ ID NO: 685151 - DNA, 19 bp, Mus musculus
  siRNA target sequence for 9630042H07Rik (NM_178753.2,1027-1045).
ccagattccaactactact

SEQ ID NO: 685152 - DNA, 19 bp, Mus musculus
  siRNA target sequence for 9630042H07Rik (NM_178753.2,1028-1046).
cagattccaactactactt

SEQ ID NO: 685153 - DNA, 19 bp, Mus musculus
  siRNA target sequence for 9630042H07Rik (NM_178753.2,1117-1135).
gacgacgggtccaagagaa

SEQ ID NO: 685154 - DNA, 19 bp, Mus musculus
  siRNA target sequence for 9630042H07Rik (NM_178753.2,1136-1154).
ctgggatctttattcatca

SEQ ID NO: 685155 - DNA, 19 bp, Mus musculus
  siRNA target sequence for Msgn1 (NM_019544.1,118-136).
caggagtcccccactcaaa

SEQ ID NO: 685156 - DNA, 19 bp, Mus musculus
  siRNA target sequence for Msgn1 (NM_019544.1,248-266).
gcttagtcgagctggatta

SEQ ID NO: 685157 - DNA, 19 bp, Mus musculus
  siRNA target sequence for Rttn (NM_175542.3,329-347).
gtatcctgtgcaagattga

SEQ ID NO: 685158 - DNA, 19 bp, Mus musculus
  siRNA target sequence for Rttn (NM_175542.3,423-441).
cccatctgtcccaatgaaa

SEQ ID NO: 685159 - DNA, 19 bp, Mus musculus
  siRNA target sequence for Rttn (NM_175542.3,425-443).
catctgtcccaatgaaaga

SEQ ID NO: 685160 - DNA, 19 bp, Mus musculus
  siRNA target sequence for Rttn (NM_175542.3,442-460).
gaggaggttctgaacttgt

SEQ ID NO: 685161 - DNA, 19 bp, Mus musculus
  siRNA target sequence for Rttn (NM_175542.3,444-462).
ggaggttctgaacttgtta

SEQ ID NO: 685162 - DNA, 19 bp, Mus musculus
  siRNA target sequence for Rttn (NM_175542.3,445-463).
gaggttctgaacttgttaa

SEQ ID NO: 685163 - DNA, 19 bp, Mus musculus
  siRNA target sequence for Rttn (NM_175542.3,456-474).
cttgttaagcagattggtt

SEQ ID NO: 685164 - DNA, 19 bp, Mus musculus
  siRNA target sequence for Rttn (NM_175542.3,485-503).
cagccgtccaacacttgat

SEQ ID NO: 685165 - DNA, 19 bp, Mus musculus
  siRNA target sequence for Rttn (NM_175542.3,488-506).
ccgtccaacacttgattga

SEQ ID NO: 685166 - DNA, 19 bp, Mus musculus
  siRNA target sequence for Rttn (NM_175542.3,511-529).
ggtgcagtagagtttttat

SEQ ID NO: 685167 - DNA, 19 bp, Mus musculus
  siRNA target sequence for Rttn (NM_175542.3,514-532).
gcagtagagtttttatcta

SEQ ID NO: 685168 - DNA, 19 bp, Mus musculus
  siRNA target sequence for Rttn (NM_175542.3,515-533).
cagtagagtttttatctaa

SEQ ID NO: 685169 - DNA, 19 bp, Mus musculus
  siRNA target sequence for Rttn (NM_175542.3,530-548).
ctaagctccgtccaaatgt

SEQ ID NO: 685170 - DNA, 19 bp, Mus musculus
  siRNA target sequence for Rttn (NM_175542.3,578-596).
gcattctcgatggactttt

SEQ ID NO: 685171 - DNA, 19 bp, Mus musculus
  siRNA target sequence for Rttn (NM_175542.3,585-603).
cgatggacttttcattctt

SEQ ID NO: 685172 - DNA, 19 bp, Mus musculus
  siRNA target sequence for Rttn (NM_175542.3,633-651).
cagttaccacactgatcaa

SEQ ID NO: 685173 - DNA, 19 bp, Mus musculus
  siRNA target sequence for Rttn (NM_175542.3,694-712).
ccccaagacaaaagtaatt

SEQ ID NO: 685174 - DNA, 19 bp, Mus musculus
  siRNA target sequence for Rttn (NM_175542.3,836-854).
gctctttgagaagtagtaa

SEQ ID NO: 685175 - DNA, 19 bp, Mus musculus
  siRNA target sequence for Rttn (NM_175542.3,992-1010).
ggaagcatcgtctagcatt

SEQ ID NO: 685176 - DNA, 19 bp, Mus musculus
  siRNA target sequence for Rttn (NM_175542.3,993-1011).
gaagcatcgtctagcatta

SEQ ID NO: 685177 - DNA, 19 bp, Mus musculus
  siRNA target sequence for Rttn (NM_175542.3,1052-1070).
gaaacagactcaactttta

SEQ ID NO: 685178 - DNA, 19 bp, Mus musculus
  siRNA target sequence for Rttn (NM_175542.3,1083-1101).
ctttttctccagtagacaa

SEQ ID NO: 685179 - DNA, 19 bp, Mus musculus
  siRNA target sequence for Rttn (NM_175542.3,1102-1120).
gacacagtctcccagaatt

SEQ ID NO: 685180 - DNA, 19 bp, Mus musculus
  siRNA target sequence for Rttn (NM_175542.3,1108-1126).
gtctcccagaattcttctt

SEQ ID NO: 685181 - DNA, 19 bp, Mus musculus
  siRNA target sequence for Rttn (NM_175542.3,1260-1278).
gtcttccagtggaagtagt

SEQ ID NO: 685182 - DNA, 19 bp, Mus musculus
  siRNA target sequence for Rttn (NM_175542.3,1277-1295).
gtagtcacacgcatgtgaa

SEQ ID NO: 685183 - DNA, 19 bp, Mus musculus
  siRNA target sequence for Rttn (NM_175542.3,1287-1305).
gcatgtgaactctaggata

SEQ ID NO: 685184 - DNA, 19 bp, Mus musculus
  siRNA target sequence for Rttn (NM_175542.3,1288-1306).
catgtgaactctaggatat

SEQ ID NO: 685185 - DNA, 19 bp, Mus musculus
  siRNA target sequence for Rttn (NM_175542.3,1380-1398).
gttccaacagcttagtctt

SEQ ID NO: 685186 - DNA, 19 bp, Mus musculus
  siRNA target sequence for Rttn (NM_175542.3,1451-1469).
gcagcagagaaatgataat

SEQ ID NO: 685187 - DNA, 19 bp, Mus musculus
  siRNA target sequence for Rttn (NM_175542.3,1452-1470).
cagcagagaaatgataata

SEQ ID NO: 685188 - DNA, 19 bp, Mus musculus
  siRNA target sequence for Rttn (NM_175542.3,1457-1475).
gagaaatgataataagagt

SEQ ID NO: 685189 - DNA, 19 bp, Mus musculus
  siRNA target sequence for Rttn (NM_175542.3,1503-1521).
gctcattggacaagcaatt

SEQ ID NO: 685190 - DNA, 19 bp, Mus musculus
  siRNA target sequence for Rttn (NM_175542.3,1545-1563).
cagcctttttgctatcaat

SEQ ID NO: 685191 - DNA, 19 bp, Mus musculus
  siRNA target sequence for Rttn (NM_175542.3,1549-1567).
ctttttgctatcaatgtga

SEQ ID NO: 685192 - DNA, 19 bp, Mus musculus
  siRNA target sequence for Rttn (NM_175542.3,1614-1632).
ctaccgtaaaaccagtttt

SEQ ID NO: 685193 - DNA, 19 bp, Mus musculus
  siRNA target sequence for Rttn (NM_175542.3,1666-1684).
cacagaatggcctttgtca

SEQ ID NO: 685194 - DNA, 19 bp, Mus musculus
  siRNA target sequence for Rttn (NM_175542.3,1706-1724).
gactgttgcaacttcttct

SEQ ID NO: 685195 - DNA, 19 bp, Mus musculus
  siRNA target sequence for Rttn (NM_175542.3,1758-1776).
gtccatgtcagcagcatta

SEQ ID NO: 685196 - DNA, 19 bp, Mus musculus
  siRNA target sequence for Rttn (NM_175542.3,1809-1827).
ggaatatccagagattcat

SEQ ID NO: 685197 - DNA, 19 bp, Mus musculus
  siRNA target sequence for Rttn (NM_175542.3,1828-1846).
gacacagttgtggcttatt

SEQ ID NO: 685198 - DNA, 19 bp, Mus musculus
  siRNA target sequence for Rttn (NM_175542.3,1920-1938).
ctgtaacttcctatctgat

SEQ ID NO: 685199 - DNA, 19 bp, Mus musculus
  siRNA target sequence for Rttn (NM_175542.3,1990-2008).
caagccttgcgtagctttt

SEQ ID NO: 685200 - DNA, 19 bp, Mus musculus
  siRNA target sequence for Rttn (NM_175542.3,1993-2011).
gccttgcgtagcttttcct

SEQ ID NO: 685201 - DNA, 19 bp, Mus musculus
  siRNA target sequence for Rttn (NM_175542.3,1994-2012).
ccttgcgtagcttttccta

SEQ ID NO: 685202 - DNA, 19 bp, Mus musculus
  siRNA target sequence for Rttn (NM_175542.3,2000-2018).
gtagcttttcctatcatca

SEQ ID NO: 685203 - DNA, 19 bp, Mus musculus
  siRNA target sequence for Rttn (NM_175542.3,2024-2042).
ctcccctaataaaggaaat

SEQ ID NO: 685204 - DNA, 19 bp, Mus musculus
  siRNA target sequence for Rttn (NM_175542.3,2075-2093).
cacaggctagtccattact

SEQ ID NO: 685205 - DNA, 19 bp, Mus musculus
  siRNA target sequence for Rttn (NM_175542.3,2169-2187).
gtgctgcctggagattgta

SEQ ID NO: 685206 - DNA, 19 bp, Mus musculus
  siRNA target sequence for Rttn (NM_175542.3,2171-2189).
gctgcctggagattgtaaa

SEQ ID NO: 685207 - DNA, 19 bp, Mus musculus
  siRNA target sequence for Rttn (NM_175542.3,2176-2194).
ctggagattgtaaaggaat

SEQ ID NO: 685208 - DNA, 19 bp, Mus musculus
  siRNA target sequence for Rttn (NM_175542.3,2179-2197).
gagattgtaaaggaatgtt

SEQ ID NO: 685209 - DNA, 19 bp, Mus musculus
  siRNA target sequence for Rttn (NM_175542.3,2201-2219).
gtgtccaaaatgtcactaa

SEQ ID NO: 685210 - DNA, 19 bp, Mus musculus
  siRNA target sequence for Rttn (NM_175542.3,2264-2282).
caaaagttctgtatgaaat

SEQ ID NO: 685211 - DNA, 19 bp, Mus musculus
  siRNA target sequence for Rttn (NM_175542.3,2285-2303).
ctgcatttggtattcaaga

SEQ ID NO: 685212 - DNA, 19 bp, Mus musculus
  siRNA target sequence for Rttn (NM_175542.3,2353-2371).
cttcagggacgattgatga

SEQ ID NO: 685213 - DNA, 19 bp, Mus musculus
  siRNA target sequence for Rttn (NM_175542.3,2356-2374).
cagggacgattgatgatga

SEQ ID NO: 685214 - DNA, 19 bp, Mus musculus
  siRNA target sequence for Rttn (NM_175542.3,2384-2402).
cctggaacaagtttatcga

SEQ ID NO: 685215 - DNA, 19 bp, Mus musculus
  siRNA target sequence for Rttn (NM_175542.3,2385-2403).
ctggaacaagtttatcgaa

SEQ ID NO: 685216 - DNA, 19 bp, Mus musculus
  siRNA target sequence for Rttn (NM_175542.3,2433-2451).
gggctacgctgatacagaa

SEQ ID NO: 685217 - DNA, 19 bp, Mus musculus
  siRNA target sequence for Rttn (NM_175542.3,2436-2454).
ctacgctgatacagaagat

SEQ ID NO: 685218 - DNA, 19 bp, Mus musculus
  siRNA target sequence for Rttn (NM_175542.3,2469-2487).
cattctccttctaagcaaa

SEQ ID NO: 685219 - DNA, 19 bp, Mus musculus
  siRNA target sequence for Rttn (NM_175542.3,2473-2491).
ctccttctaagcaaagtga

SEQ ID NO: 685220 - DNA, 19 bp, Mus musculus
  siRNA target sequence for Rttn (NM_175542.3,2540-2558).
ctgtgctacggcttttgct

SEQ ID NO: 685221 - DNA, 19 bp, Mus musculus
  siRNA target sequence for Rttn (NM_175542.3,2545-2563).
ctacggcttttgctagtaa

SEQ ID NO: 685222 - DNA, 19 bp, Mus musculus
  siRNA target sequence for Rttn (NM_175542.3,2548-2566).
cggcttttgctagtaaaaa

SEQ ID NO: 685223 - DNA, 19 bp, Mus musculus
  siRNA target sequence for Rttn (NM_175542.3,2573-2591).
cggttcgttcactagcatt

SEQ ID NO: 685224 - DNA, 19 bp, Mus musculus
  siRNA target sequence for Rttn (NM_175542.3,2574-2592).
ggttcgttcactagcatta

SEQ ID NO: 685225 - DNA, 19 bp, Mus musculus
  siRNA target sequence for Rttn (NM_175542.3,2579-2597).
gttcactagcattaaaact

SEQ ID NO: 685226 - DNA, 19 bp, Mus musculus
  siRNA target sequence for Rttn (NM_175542.3,2588-2606).
cattaaaacttttagcatt

SEQ ID NO: 685227 - DNA, 19 bp, Mus musculus
  siRNA target sequence for Rttn (NM_175542.3,2596-2614).
cttttagcatttcatctta

SEQ ID NO: 685228 - DNA, 19 bp, Mus musculus
  siRNA target sequence for Rttn (NM_175542.3,2659-2677).
ggcgttctctccagagtta

SEQ ID NO: 685229 - DNA, 19 bp, Mus musculus
  siRNA target sequence for Rttn (NM_175542.3,2661-2679).
cgttctctccagagttact

SEQ ID NO: 685230 - DNA, 19 bp, Mus musculus
  siRNA target sequence for Rttn (NM_175542.3,2670-2688).
cagagttactaatctgttt

SEQ ID NO: 685231 - DNA, 19 bp, Mus musculus
  siRNA target sequence for Rttn (NM_175542.3,2718-2736).
ggatgacagaagagaacta

SEQ ID NO: 685232 - DNA, 19 bp, Mus musculus
  siRNA target sequence for Rttn (NM_175542.3,2778-2796).
cacctcagacgatgttgat

SEQ ID NO: 685233 - DNA, 19 bp, Mus musculus
  siRNA target sequence for Rttn (NM_175542.3,2780-2798).
cctcagacgatgttgatct

SEQ ID NO: 685234 - DNA, 19 bp, Mus musculus
  siRNA target sequence for Rttn (NM_175542.3,2781-2799).
ctcagacgatgttgatctt

SEQ ID NO: 685235 - DNA, 19 bp, Mus musculus
  siRNA target sequence for Rttn (NM_175542.3,2791-2809).
gttgatcttgttttaagaa

SEQ ID NO: 685236 - DNA, 19 bp, Mus musculus
  siRNA target sequence for Rttn (NM_175542.3,2830-2848).
gctgtgataatgcaagata

SEQ ID NO: 685237 - DNA, 19 bp, Mus musculus
  siRNA target sequence for Rttn (NM_175542.3,2833-2851).
gtgataatgcaagatatta

SEQ ID NO: 685238 - DNA, 19 bp, Mus musculus
  siRNA target sequence for Rttn (NM_175542.3,2857-2875).
catacagtggtgaaaaagt

SEQ ID NO: 685239 - DNA, 19 bp, Mus musculus
  siRNA target sequence for Rttn (NM_175542.3,2863-2881).
gtggtgaaaaagttatgct

SEQ ID NO: 685240 - DNA, 19 bp, Mus musculus
  siRNA target sequence for Rttn (NM_175542.3,2868-2886).
gaaaaagttatgcttagtt

SEQ ID NO: 685241 - DNA, 19 bp, Mus musculus
  siRNA target sequence for Rttn (NM_175542.3,2996-3014).
cggttatccgtgtttcctt

SEQ ID NO: 685242 - DNA, 19 bp, Mus musculus
  siRNA target sequence for Rttn (NM_175542.3,3027-3045).
ctctctcttgaccctatta

SEQ ID NO: 685243 - DNA, 19 bp, Mus musculus
  siRNA target sequence for Rttn (NM_175542.3,3029-3047).
ctctcttgaccctattact

SEQ ID NO: 685244 - DNA, 19 bp, Mus musculus
  siRNA target sequence for Rttn (NM_175542.3,3031-3049).
ctcttgaccctattactca

SEQ ID NO: 685245 - DNA, 19 bp, Mus musculus
  siRNA target sequence for Rttn (NM_175542.3,3089-3107).
ctgaagtcggggcattgtt

SEQ ID NO: 685246 - DNA, 19 bp, Mus musculus
  siRNA target sequence for Rttn (NM_175542.3,3115-3133).
ctattgttcgatgaagtat

SEQ ID NO: 685247 - DNA, 19 bp, Mus musculus
  siRNA target sequence for Rttn (NM_175542.3,3120-3138).
gttcgatgaagtatcaaga

SEQ ID NO: 685248 - DNA, 19 bp, Mus musculus
  siRNA target sequence for Rttn (NM_175542.3,3141-3159).
ggatacatggtctgatact

SEQ ID NO: 685249 - DNA, 19 bp, Mus musculus
  siRNA target sequence for Rttn (NM_175542.3,3149-3167).
ggtctgatactctttctga

SEQ ID NO: 685250 - DNA, 19 bp, Mus musculus
  siRNA target sequence for Rttn (NM_175542.3,3210-3228).
ctttagaaggtatcatcta

SEQ ID NO: 685251 - DNA, 19 bp, Mus musculus
  siRNA target sequence for Rttn (NM_175542.3,3253-3271).
gctgtgagtccttactcaa

SEQ ID NO: 685252 - DNA, 19 bp, Mus musculus
  siRNA target sequence for Rttn (NM_175542.3,3258-3276).
gagtccttactcaatagtt

SEQ ID NO: 685253 - DNA, 19 bp, Mus musculus
  siRNA target sequence for Rttn (NM_175542.3,3279-3297).
gccattacctactgaatgt

SEQ ID NO: 685254 - DNA, 19 bp, Mus musculus
  siRNA target sequence for Rttn (NM_175542.3,3281-3299).
cattacctactgaatgttt

SEQ ID NO: 685255 - DNA, 19 bp, Mus musculus
  siRNA target sequence for Rttn (NM_175542.3,3339-3357).
gaacctggcatggtatcat

SEQ ID NO: 685256 - DNA, 19 bp, Mus musculus
  siRNA target sequence for Rttn (NM_175542.3,3350-3368).
ggtatcatgggagtgataa

SEQ ID NO: 685257 - DNA, 19 bp, Mus musculus
  siRNA target sequence for Rttn (NM_175542.3,3351-3369).
gtatcatgggagtgataat

SEQ ID NO: 685258 - DNA, 19 bp, Mus musculus
  siRNA target sequence for Rttn (NM_175542.3,3355-3373).
catgggagtgataatctat

SEQ ID NO: 685259 - DNA, 19 bp, Mus musculus
  siRNA target sequence for Rttn (NM_175542.3,3358-3376).
gggagtgataatctattga

SEQ ID NO: 685260 - DNA, 19 bp, Mus musculus
  siRNA target sequence for Rttn (NM_175542.3,3362-3380).
gtgataatctattgaaaca

SEQ ID NO: 685261 - DNA, 19 bp, Mus musculus
  siRNA target sequence for Rttn (NM_175542.3,3386-3404).
cctctgaagctaaaattca

SEQ ID NO: 685262 - DNA, 19 bp, Mus musculus
  siRNA target sequence for Rttn (NM_175542.3,3429-3447).
gtccacagaagatatcctt

SEQ ID NO: 685263 - DNA, 19 bp, Mus musculus
  siRNA target sequence for Rttn (NM_175542.3,3535-3553).
gctatcaccaggatgagtt

SEQ ID NO: 685264 - DNA, 19 bp, Mus musculus
  siRNA target sequence for Rttn (NM_175542.3,3595-3613).
ggtccatgtggcgttactt

SEQ ID NO: 685265 - DNA, 19 bp, Mus musculus
  siRNA target sequence for Rttn (NM_175542.3,3596-3614).
gtccatgtggcgttacttt

SEQ ID NO: 685266 - DNA, 19 bp, Mus musculus
  siRNA target sequence for Rttn (NM_175542.3,3767-3785).
ggattctggaattacttct

SEQ ID NO: 685267 - DNA, 19 bp, Mus musculus
  siRNA target sequence for Rttn (NM_175542.3,3781-3799).
cttcttaggcataatccaa

SEQ ID NO: 685268 - DNA, 19 bp, Mus musculus
  siRNA target sequence for Rttn (NM_175542.3,3895-3913).
ctgatcagtcttctcaatt

SEQ ID NO: 685269 - DNA, 19 bp, Mus musculus
  siRNA target sequence for Rttn (NM_175542.3,3953-3971).
gcttggaactgttttacgt

SEQ ID NO: 685270 - DNA, 19 bp, Mus musculus
  siRNA target sequence for Rttn (NM_175542.3,3954-3972).
cttggaactgttttacgtt

SEQ ID NO: 685271 - DNA, 19 bp, Mus musculus
  siRNA target sequence for Rttn (NM_175542.3,4030-4048).
catttctatggcttacctt

SEQ ID NO: 685272 - DNA, 19 bp, Mus musculus
  siRNA target sequence for Rttn (NM_175542.3,4105-4123).
gcacactctcctctttcaa

SEQ ID NO: 685273 - DNA, 19 bp, Mus musculus
  siRNA target sequence for Rttn (NM_175542.3,4159-4177).
ctcctggaggtcattactt

SEQ ID NO: 685274 - DNA, 19 bp, Mus musculus
  siRNA target sequence for Rttn (NM_175542.3,4236-4254).
gagcacaggtctttgctta

SEQ ID NO: 685275 - DNA, 19 bp, Mus musculus
  siRNA target sequence for Rttn (NM_175542.3,4239-4257).
cacaggtctttgcttactt

SEQ ID NO: 685276 - DNA, 19 bp, Mus musculus
  siRNA target sequence for Rttn (NM_175542.3,4244-4262).
gtctttgcttacttcactt

SEQ ID NO: 685277 - DNA, 19 bp, Mus musculus
  siRNA target sequence for Rttn (NM_175542.3,4508-4526).
ggggaaccgtggtgaacat

SEQ ID NO: 685278 - DNA, 19 bp, Mus musculus
  siRNA target sequence for Rttn (NM_175542.3,4509-4527).
gggaaccgtggtgaacatt

SEQ ID NO: 685279 - DNA, 19 bp, Mus musculus
  siRNA target sequence for Rttn (NM_175542.3,4511-4529).
gaaccgtggtgaacattct

SEQ ID NO: 685280 - DNA, 19 bp, Mus musculus
  siRNA target sequence for Rttn (NM_175542.3,4571-4589).
catttattcttcagaatct

SEQ ID NO: 685281 - DNA, 19 bp, Mus musculus
  siRNA target sequence for Rttn (NM_175542.3,4579-4597).
cttcagaatctccttgtaa

SEQ ID NO: 685282 - DNA, 19 bp, Mus musculus
  siRNA target sequence for Rttn (NM_175542.3,4584-4602).
gaatctccttgtaattcca

SEQ ID NO: 685283 - DNA, 19 bp, Mus musculus
  siRNA target sequence for Rttn (NM_175542.3,4713-4731).
ctgtcgtttctatgaacat

SEQ ID NO: 685284 - DNA, 19 bp, Mus musculus
  siRNA target sequence for Rttn (NM_175542.3,4717-4735).
cgtttctatgaacatttga

SEQ ID NO: 685285 - DNA, 19 bp, Mus musculus
  siRNA target sequence for Rttn (NM_175542.3,4734-4752).
gactcacatggtgaaacat

SEQ ID NO: 685286 - DNA, 19 bp, Mus musculus
  siRNA target sequence for Rttn (NM_175542.3,4743-4761).
ggtgaaacattgttatgta

SEQ ID NO: 685287 - DNA, 19 bp, Mus musculus
  siRNA target sequence for Rttn (NM_175542.3,4815-4833).
cagtgatttaaatggttta

SEQ ID NO: 685288 - DNA, 19 bp, Mus musculus
  siRNA target sequence for Rttn (NM_175542.3,4834-4852).
gacgactcattcaagtttt

SEQ ID NO: 685289 - DNA, 19 bp, Mus musculus
  siRNA target sequence for Rttn (NM_175542.3,4956-4974).
cctgctgccgtcaacactt

SEQ ID NO: 685290 - DNA, 19 bp, Mus musculus
  siRNA target sequence for Rttn (NM_175542.3,5006-5024).
cgcaaggtcaacgtgaaat

SEQ ID NO: 685291 - DNA, 19 bp, Mus musculus
  siRNA target sequence for Rttn (NM_175542.3,5008-5026).
caaggtcaacgtgaaatga

SEQ ID NO: 685292 - DNA, 19 bp, Mus musculus
  siRNA target sequence for Rttn (NM_175542.3,5067-5085).
gaacaggcagtatgtgttt

SEQ ID NO: 685293 - DNA, 19 bp, Mus musculus
  siRNA target sequence for Rttn (NM_175542.3,5108-5126).
cagtctgtagccttttaga

SEQ ID NO: 685294 - DNA, 19 bp, Mus musculus
  siRNA target sequence for Rttn (NM_175542.3,5127-5145).
caacctcttggcagttact

SEQ ID NO: 685295 - DNA, 19 bp, Mus musculus
  siRNA target sequence for Rttn (NM_175542.3,5212-5230).
gcttccctcatagaaatgt

SEQ ID NO: 685296 - DNA, 19 bp, Mus musculus
  siRNA target sequence for Rttn (NM_175542.3,5264-5282).
catctgctgttgaacatat

SEQ ID NO: 685297 - DNA, 19 bp, Mus musculus
  siRNA target sequence for Rttn (NM_175542.3,5267-5285).
ctgctgttgaacatattca

SEQ ID NO: 685298 - DNA, 19 bp, Mus musculus
  siRNA target sequence for Rttn (NM_175542.3,5298-5316).
ctttttcttggaataccta

SEQ ID NO: 685299 - DNA, 19 bp, Mus musculus
  siRNA target sequence for Rttn (NM_175542.3,5308-5326).
gaatacctatcctctttgt

SEQ ID NO: 685300 - DNA, 19 bp, Mus musculus
  siRNA target sequence for Rttn (NM_175542.3,5372-5390).
cacaagatgagctcttgaa

SEQ ID NO: 685301 - DNA, 19 bp, Mus musculus
  siRNA target sequence for Rttn (NM_175542.3,5383-5401).
ctcttgaaacctcttatca

SEQ ID NO: 685302 - DNA, 19 bp, Mus musculus
  siRNA target sequence for Rttn (NM_175542.3,5385-5403).
cttgaaacctcttatcact

SEQ ID NO: 685303 - DNA, 19 bp, Mus musculus
  siRNA target sequence for Rttn (NM_175542.3,5388-5406).
gaaacctcttatcactaat

SEQ ID NO: 685304 - DNA, 19 bp, Mus musculus
  siRNA target sequence for Rttn (NM_175542.3,5472-5490).
ccgcacatggacgcattta

SEQ ID NO: 685305 - DNA, 19 bp, Mus musculus
  siRNA target sequence for Rttn (NM_175542.3,5473-5491).
cgcacatggacgcatttat

SEQ ID NO: 685306 - DNA, 19 bp, Mus musculus
  siRNA target sequence for Rttn (NM_175542.3,5474-5492).
gcacatggacgcatttatt

SEQ ID NO: 685307 - DNA, 19 bp, Mus musculus
  siRNA target sequence for Rttn (NM_175542.3,5475-5493).
cacatggacgcatttattt

SEQ ID NO: 685308 - DNA, 19 bp, Mus musculus
  siRNA target sequence for Rttn (NM_175542.3,5477-5495).
catggacgcatttatttga

SEQ ID NO: 685309 - DNA, 19 bp, Mus musculus
  siRNA target sequence for Rttn (NM_175542.3,5597-5615).
gatgtgtgggcctctcatt

SEQ ID NO: 685310 - DNA, 19 bp, Mus musculus
  siRNA target sequence for Rttn (NM_175542.3,5619-5637).
gtgccctgccctgactatt

SEQ ID NO: 685311 - DNA, 19 bp, Mus musculus
  siRNA target sequence for Rttn (NM_175542.3,5729-5747).
cagtggccttacttcttga

SEQ ID NO: 685312 - DNA, 19 bp, Mus musculus
  siRNA target sequence for Rttn (NM_175542.3,5768-5786).
gctcttcagagcgacttaa

SEQ ID NO: 685313 - DNA, 19 bp, Mus musculus
  siRNA target sequence for Rttn (NM_175542.3,5769-5787).
ctcttcagagcgacttaat

SEQ ID NO: 685314 - DNA, 19 bp, Mus musculus
  siRNA target sequence for Rttn (NM_175542.3,5776-5794).
gagcgacttaatgaaacaa

SEQ ID NO: 685315 - DNA, 19 bp, Mus musculus
  siRNA target sequence for Rttn (NM_175542.3,5778-5796).
gcgacttaatgaaacaatt

SEQ ID NO: 685316 - DNA, 19 bp, Mus musculus
  siRNA target sequence for Rttn (NM_175542.3,5780-5798).
gacttaatgaaacaattct

SEQ ID NO: 685317 - DNA, 19 bp, Mus musculus
  siRNA target sequence for Rttn (NM_175542.3,6038-6056).
ccatgcagctcctaagaaa

SEQ ID NO: 685318 - DNA, 19 bp, Mus musculus
  siRNA target sequence for Rttn (NM_175542.3,6061-6079).
ctttatcaaaatgaagaat

SEQ ID NO: 685319 - DNA, 19 bp, Mus musculus
  siRNA target sequence for Rttn (NM_175542.3,6101-6119).
cacgtcttgtgcctgtatt

SEQ ID NO: 685320 - DNA, 19 bp, Mus musculus
  siRNA target sequence for Rttn (NM_175542.3,6139-6157).
cttttgatggaagattcat

SEQ ID NO: 685321 - DNA, 19 bp, Mus musculus
  siRNA target sequence for Rttn (NM_175542.3,6174-6192).
gcagttgctttgtgtctat

SEQ ID NO: 685322 - DNA, 19 bp, Mus musculus
  siRNA target sequence for Rttn (NM_175542.3,6185-6203).
gtgtctatactgcaaattt

SEQ ID NO: 685323 - DNA, 19 bp, Mus musculus
  siRNA target sequence for Rttn (NM_175542.3,6275-6293).
ccagtagctccctgatact

SEQ ID NO: 685324 - DNA, 19 bp, Mus musculus
  siRNA target sequence for Rttn (NM_175542.3,6343-6361).
cagcagttggtttttatgt

SEQ ID NO: 685325 - DNA, 19 bp, Mus musculus
  siRNA target sequence for Rttn (NM_175542.3,6368-6386).
caaacttggccttatctca

SEQ ID NO: 685326 - DNA, 19 bp, Mus musculus
  siRNA target sequence for Rttn (NM_175542.3,6390-6408).
ctgcaagggagtaattcaa

SEQ ID NO: 685327 - DNA, 19 bp, Mus musculus
  siRNA target sequence for Rttn (NM_175542.3,6392-6410).
gcaagggagtaattcaaaa

SEQ ID NO: 685328 - DNA, 19 bp, Mus musculus
  siRNA target sequence for Rttn (NM_175542.3,6556-6574).
ggctgcttagacttactca

SEQ ID NO: 685329 - DNA, 19 bp, Mus musculus
  siRNA target sequence for Rttn (NM_175542.3,6558-6576).
ctgcttagacttactcata

SEQ ID NO: 685330 - DNA, 19 bp, Mus musculus
  siRNA target sequence for Rttn (NM_175542.3,6560-6578).
gcttagacttactcataga

SEQ ID NO: 685331 - DNA, 19 bp, Mus musculus
  siRNA target sequence for Rttn (NM_175542.3,6662-6680).
ctaaaatcctggctaatga

SEQ ID NO: 685332 - DNA, 19 bp, Mus musculus
  siRNA target sequence for Rttn (NM_175542.3,6752-6770).
cactttgggctctaactta

SEQ ID NO: 685333 - DNA, 19 bp, Mus musculus
  siRNA target sequence for Rttn (NM_175542.3,6758-6776).
gggctctaacttacaatta

SEQ ID NO: 685334 - DNA, 19 bp, Mus musculus
  siRNA target sequence for Rttn (NM_175542.3,6761-6779).
ctctaacttacaattacca

SEQ ID NO: 685335 - DNA, 19 bp, Mus musculus
  siRNA target sequence for Rttn (NM_175542.3,6763-6781).
ctaacttacaattaccaaa

SEQ ID NO: 685336 - DNA, 19 bp, Mus musculus
  siRNA target sequence for Rttn (NM_175542.3,6829-6847).
gaagcatattccatagcaa

SEQ ID NO: 685337 - DNA, 19 bp, Mus musculus
  siRNA target sequence for Rttn (NM_175542.3,6849-6867).
gagaactctctcaaactca

SEQ ID NO: 685338 - DNA, 19 bp, Mus musculus
  siRNA target sequence for Rttn (NM_175542.3,6878-6896).
ctctgaattcctactattt

SEQ ID NO: 685339 - DNA, 19 bp, Mus musculus
  siRNA target sequence for Rttn (NM_175542.3,6913-6931).
ctagtacaactgcttaact

SEQ ID NO: 685340 - DNA, 19 bp, Mus musculus
  siRNA target sequence for Rttn (NM_175542.3,6916-6934).
gtacaactgcttaactatt

SEQ ID NO: 685341 - DNA, 19 bp, Mus musculus
  siRNA target sequence for 2010012C16Rik (NM_025564.1,120-138).
cgggcataagggcaagttt

SEQ ID NO: 685342 - DNA, 19 bp, Mus musculus
  siRNA target sequence for 2010012C16Rik (NM_025564.1,169-187).
ccggacgggaagcttagat

SEQ ID NO: 685343 - DNA, 19 bp, Mus musculus
  siRNA target sequence for 2010012C16Rik (NM_025564.1,170-188).
cggacgggaagcttagata

SEQ ID NO: 685344 - DNA, 19 bp, Mus musculus
  siRNA target sequence for 2010012C16Rik (NM_025564.1,171-189).
ggacgggaagcttagatat

SEQ ID NO: 685345 - DNA, 19 bp, Mus musculus
  siRNA target sequence for 2010012C16Rik (NM_025564.1,243-261).
ccacaagagtgtaatggaa

SEQ ID NO: 685346 - DNA, 19 bp, Mus musculus
  siRNA target sequence for 2010012C16Rik (NM_025564.1,282-300).
cgacagtgaaattacaaaa

SEQ ID NO: 685347 - DNA, 19 bp, Mus musculus
  siRNA target sequence for 2010012C16Rik (NM_025564.1,343-361).
caggaacttgaaatcgtaa

SEQ ID NO: 685348 - DNA, 19 bp, Mus musculus
  siRNA target sequence for 2010012C16Rik (NM_025564.1,345-363).
ggaacttgaaatcgtaatt

SEQ ID NO: 685349 - DNA, 19 bp, Mus musculus
  siRNA target sequence for 2010012C16Rik (NM_025564.1,442-460).
cttcgtgtattttactatt

SEQ ID NO: 685350 - DNA, 19 bp, Mus musculus
  siRNA target sequence for 2010012C16Rik (NM_025564.1,469-487).
gacttgaaatgcttagtgt

SEQ ID NO: 685351 - DNA, 19 bp, Mus musculus
  siRNA target sequence for 2010012C16Rik (NM_025564.1,491-509).
gcctcattggtctacactt

SEQ ID NO: 685352 - DNA, 19 bp, Mus musculus
  siRNA target sequence for 1810010L20Rik (NM_145925.1,185-203).
ggttgctctgagtacacaa

SEQ ID NO: 685353 - DNA, 19 bp, Mus musculus
  siRNA target sequence for 1810010L20Rik (NM_145925.1,218-236).
gagtgcctcaggaatgtct

SEQ ID NO: 685354 - DNA, 19 bp, Mus musculus
  siRNA target sequence for 1810010L20Rik (NM_145925.1,302-320).
gcttctctctgtaaattga

SEQ ID NO: 685355 - DNA, 19 bp, Mus musculus
  siRNA target sequence for 1810010L20Rik (NM_145925.1,336-354).
gcgtatgctgggtgaactt

SEQ ID NO: 685356 - DNA, 19 bp, Mus musculus
  siRNA target sequence for 1810010L20Rik (NM_145925.1,578-596).
gaacaaaacccgtatgaga

SEQ ID NO: 685357 - DNA, 19 bp, Mus musculus
  siRNA target sequence for Amn (NM_033603.2,44-62).
gcagctctgtgcaatgact

SEQ ID NO: 685358 - DNA, 19 bp, Mus musculus
  siRNA target sequence for Amn (NM_033603.2,87-105).
cccaatacctccttcgata

SEQ ID NO: 685359 - DNA, 19 bp, Mus musculus
  siRNA target sequence for Amn (NM_033603.2,142-160).
cgggagatgcggttcagtt

SEQ ID NO: 685360 - DNA, 19 bp, Mus musculus
  siRNA target sequence for Amn (NM_033603.2,788-806).
gacccacgaccccacattt

SEQ ID NO: 685361 - DNA, 19 bp, Mus musculus
  siRNA target sequence for Amn (NM_033603.2,790-808).
cccacgaccccacatttga

SEQ ID NO: 685362 - DNA, 19 bp, Mus musculus
  siRNA target sequence for Amn (NM_033603.2,1231-1249).
gtttccgaaatccgatttt

SEQ ID NO: 685363 - DNA, 19 bp, Mus musculus
  siRNA target sequence for Amn (NM_033603.2,1343-1361).
cttcgttaacccactcttt

SEQ ID NO: 685364 - DNA, 19 bp, Mus musculus
  siRNA target sequence for Dkk1 (NM_010051.2,148-166).
cggttcttggccgtgttta

SEQ ID NO: 685365 - DNA, 19 bp, Mus musculus
  siRNA target sequence for Dkk1 (NM_010051.2,366-384).
ctacccttgcgctgaagat

SEQ ID NO: 685366 - DNA, 19 bp, Mus musculus
  siRNA target sequence for Dkk1 (NM_010051.2,437-455).
gcgtcggaggtgtacagat

SEQ ID NO: 685367 - DNA, 19 bp, Mus musculus
  siRNA target sequence for Dkk1 (NM_010051.2,519-537).
ctactgcaaaaatggaata

SEQ ID NO: 685368 - DNA, 19 bp, Mus musculus
  siRNA target sequence for Dkk1 (NM_010051.2,591-609).
cattgaaaaccttggtaat

SEQ ID NO: 685369 - DNA, 19 bp, Mus musculus
  siRNA target sequence for Dkk1 (NM_010051.2,651-669).
cacactgacttcaaaaata

SEQ ID NO: 685370 - DNA, 19 bp, Mus musculus
  siRNA target sequence for Dkk1 (NM_010051.2,696-714).
cgtctgcctccgatcatca

SEQ ID NO: 685371 - DNA, 19 bp, Mus musculus
  siRNA target sequence for Dkk1 (NM_010051.2,750-768).
ctggtccaagatctgtaaa

SEQ ID NO: 685372 - DNA, 19 bp, Mus musculus
  siRNA target sequence for Dkk1 (NM_010051.2,753-771).
gtccaagatctgtaaacct

SEQ ID NO: 685373 - DNA, 19 bp, Mus musculus
  siRNA target sequence for Dkk1 (NM_010051.2,762-780).
ctgtaaacctgtccttaaa

SEQ ID NO: 685374 - DNA, 19 bp, Mus musculus
  siRNA target sequence for Dkk1 (NM_010051.2,866-884).
cttgcaggatacagaaaga

SEQ ID NO: 685375 - DNA, 19 bp, Mus musculus
  siRNA target sequence for Dkk1 (NM_010051.2,886-904).
caccatcaagccagcaatt

SEQ ID NO: 685376 - DNA, 19 bp, Mus musculus
  siRNA target sequence for Dkk1 (NM_010051.2,892-910).
caagccagcaattcttcta

SEQ ID NO: 685377 - DNA, 19 bp, Mus musculus
  siRNA target sequence for Dkk2 (NM_020265.2,978-996).
gcagtgataaggaatgtga

SEQ ID NO: 685378 - DNA, 19 bp, Mus musculus
  siRNA target sequence for Dkk2 (NM_020265.2,1094-1112).
cctggtacccgctgcaata

SEQ ID NO: 685379 - DNA, 19 bp, Mus musculus
  siRNA target sequence for Dkk2 (NM_020265.2,1095-1113).
ctggtacccgctgcaataa

SEQ ID NO: 685380 - DNA, 19 bp, Mus musculus
  siRNA target sequence for Dkk2 (NM_020265.2,1101-1119).
cccgctgcaataatggaat

SEQ ID NO: 685381 - DNA, 19 bp, Mus musculus
  siRNA target sequence for Dkk2 (NM_020265.2,1190-1208).
cgcaaccatggtcactatt

SEQ ID NO: 685382 - DNA, 19 bp, Mus musculus
  siRNA target sequence for Dkk2 (NM_020265.2,1331-1349).
cgccacttctggaccaaaa

SEQ ID NO: 685383 - DNA, 19 bp, Mus musculus
  siRNA target sequence for Dkk2 (NM_020265.2,1375-1393).
ggaagtctgtaccaaacaa

SEQ ID NO: 685384 - DNA, 19 bp, Mus musculus
  siRNA target sequence for Dkk2 (NM_020265.2,1448-1466).
ggcctgtcctgcaaagtgt

SEQ ID NO: 685385 - DNA, 19 bp, Mus musculus
  siRNA target sequence for Dkk3 (NM_015814.2,119-137).
cagcggctcgggggtattt

SEQ ID NO: 685386 - DNA, 19 bp, Mus musculus
  siRNA target sequence for Dkk3 (NM_015814.2,123-141).
ggctcgggggtattttgct

SEQ ID NO: 685387 - DNA, 19 bp, Mus musculus
  siRNA target sequence for Dkk3 (NM_015814.2,381-399).
gcttacctcccaactatca

SEQ ID NO: 685388 - DNA, 19 bp, Mus musculus
  siRNA target sequence for Dkk3 (NM_015814.2,387-405).
ctcccaactatcacaatga

SEQ ID NO: 685389 - DNA, 19 bp, Mus musculus
  siRNA target sequence for Dkk3 (NM_015814.2,389-407).
cccaactatcacaatgaga

SEQ ID NO: 685390 - DNA, 19 bp, Mus musculus
  siRNA target sequence for Dkk3 (NM_015814.2,486-504).
gacaggtggtcttttctga

SEQ ID NO: 685391 - DNA, 19 bp, Mus musculus
  siRNA target sequence for Dkk3 (NM_015814.2,629-647).
cgggaccagcagatgctat

SEQ ID NO: 685392 - DNA, 19 bp, Mus musculus
  siRNA target sequence for Dkk3 (NM_015814.2,1039-1057).
cgaagatgttggcttcata

SEQ ID NO: 685393 - DNA, 19 bp, Mus musculus
  siRNA target sequence for Fbxw4 (NM_013907.1,555-573).
ctatcacaggctaatttca

SEQ ID NO: 685394 - DNA, 19 bp, Mus musculus
  siRNA target sequence for Fbxw4 (NM_013907.1,787-805).
gtaaaggtggcatcattgt

SEQ ID NO: 685395 - DNA, 19 bp, Mus musculus
  siRNA target sequence for Fbxw4 (NM_013907.1,909-927).
gctatcagcccattactca

SEQ ID NO: 685396 - DNA, 19 bp, Mus musculus
  siRNA target sequence for Fbxw4 (NM_013907.1,938-956).
gactggaacagcttgttgt

SEQ ID NO: 685397 - DNA, 19 bp, Mus musculus
  siRNA target sequence for Fbxw4 (NM_013907.1,1124-1142).
cacaagtacacggaaatgt

SEQ ID NO: 685398 - DNA, 19 bp, Mus musculus
  siRNA target sequence for Fbxw4 (NM_013907.1,1126-1144).
caagtacacggaaatgtgt

SEQ ID NO: 685399 - DNA, 19 bp, Mus musculus
  siRNA target sequence for Fbxw4 (NM_013907.1,1164-1182).
catgacagtaccttctact

SEQ ID NO: 685400 - DNA, 19 bp, Mus musculus
  siRNA target sequence for Fbxw4 (NM_013907.1,1270-1288).
gcctgcatgccttctcatt

SEQ ID NO: 685401 - DNA, 19 bp, Mus musculus
  siRNA target sequence for Fbxw4 (NM_013907.1,1272-1290).
ctgcatgccttctcattga

SEQ ID NO: 685402 - DNA, 19 bp, Mus musculus
  siRNA target sequence for Idb2 (NM_010496.2,76-94).
cggtgaggtccgttaggaa

SEQ ID NO: 685403 - DNA, 19 bp, Mus musculus
  siRNA target sequence for Idb2 (NM_010496.2,77-95).
ggtgaggtccgttaggaaa

SEQ ID NO: 685404 - DNA, 19 bp, Mus musculus
  siRNA target sequence for Idb2 (NM_010496.2,78-96).
gtgaggtccgttaggaaaa

SEQ ID NO: 685405 - DNA, 19 bp, Mus musculus
  siRNA target sequence for Idb2 (NM_010496.2,258-276).
cacgtcatcgattacatct

SEQ ID NO: 685406 - DNA, 19 bp, Mus musculus
  siRNA target sequence for Idb2 (NM_010496.2,426-444).
gagcttatgtcgaatgata

SEQ ID NO: 685407 - DNA, 19 bp, Mus musculus
  siRNA target sequence for Idb2 (NM_010496.2,434-452).
gtcgaatgatagcaaagta

SEQ ID NO: 685408 - DNA, 19 bp, Mus musculus
  siRNA target sequence for Idb2 (NM_010496.2,436-454).
cgaatgatagcaaagtact

SEQ ID NO: 685409 - DNA, 19 bp, Mus musculus
  siRNA target sequence for Nnat (NM_010923.1,165-183).
ggtaggattcgcttttcga

SEQ ID NO: 685410 - DNA, 19 bp, Mus musculus
  siRNA target sequence for Nnat (NM_010923.1,166-184).
gtaggattcgcttttcgaa

SEQ ID NO: 685411 - DNA, 19 bp, Mus musculus
  siRNA target sequence for Olfm1 (NM_019498.1,359-377).
ctggtgggcctcaatacca

SEQ ID NO: 685412 - DNA, 19 bp, Mus musculus
  siRNA target sequence for Olfm1 (NM_019498.1,532-550).
gcgggatgcccgcacaaaa

SEQ ID NO: 685413 - DNA, 19 bp, Mus musculus
  siRNA target sequence for Olfm1 (NM_019498.1,534-552).
gggatgcccgcacaaaaca

SEQ ID NO: 685414 - DNA, 19 bp, Mus musculus
  siRNA target sequence for Olfm1 (NM_019498.1,720-738).
ggcagttcaaggcaataaa

SEQ ID NO: 685415 - DNA, 19 bp, Mus musculus
  siRNA target sequence for Olfm1 (NM_019498.1,721-739).
gcagttcaaggcaataaaa

SEQ ID NO: 685416 - DNA, 19 bp, Mus musculus
  siRNA target sequence for Olfm1 (NM_019498.1,740-758).
gcgaaaatggatgaactta

SEQ ID NO: 685417 - DNA, 19 bp, Mus musculus
  siRNA target sequence for Olfm1 (NM_019498.1,790-808).
ggccgatgccaaattggta

SEQ ID NO: 685418 - DNA, 19 bp, Mus musculus
  siRNA target sequence for Olfm1 (NM_019498.1,791-809).
gccgatgccaaattggtat

SEQ ID NO: 685419 - DNA, 19 bp, Mus musculus
  siRNA target sequence for Olfm1 (NM_019498.1,792-810).
ccgatgccaaattggtatt

SEQ ID NO: 685420 - DNA, 19 bp, Mus musculus
  siRNA target sequence for Olfm1 (NM_019498.1,838-856).
gacgtcagtgcttaacgaa

SEQ ID NO: 685421 - DNA, 19 bp, Mus musculus
  siRNA target sequence for Olfm1 (NM_019498.1,898-916).
gagcagagtgtccaatctt

SEQ ID NO: 685422 - DNA, 19 bp, Mus musculus
  siRNA target sequence for Olfm1 (NM_019498.1,900-918).
gcagagtgtccaatcttga

SEQ ID NO: 685423 - DNA, 19 bp, Mus musculus
  siRNA target sequence for Olfm1 (NM_019498.1,901-919).
cagagtgtccaatcttgaa

SEQ ID NO: 685424 - DNA, 19 bp, Mus musculus
  siRNA target sequence for Olfm1 (NM_019498.1,903-921).
gagtgtccaatcttgaaga

SEQ ID NO: 685425 - DNA, 19 bp, Mus musculus
  siRNA target sequence for Olfm1 (NM_019498.1,905-923).
gtgtccaatcttgaagaaa

SEQ ID NO: 685426 - DNA, 19 bp, Mus musculus
  siRNA target sequence for Olfm1 (NM_019498.1,1089-1107).
gcttcgtccgtgagtacaa

SEQ ID NO: 685427 - DNA, 19 bp, Mus musculus
  siRNA target sequence for Olfm1 (NM_019498.1,1196-1214).
ggctccatctatttcaaca

SEQ ID NO: 685428 - DNA, 19 bp, Mus musculus
  siRNA target sequence for Olfm1 (NM_019498.1,1197-1215).
gctccatctatttcaacaa

SEQ ID NO: 685429 - DNA, 19 bp, Mus musculus
  siRNA target sequence for Olfm1 (NM_019498.1,1200-1218).
ccatctatttcaacaaatt

SEQ ID NO: 685430 - DNA, 19 bp, Mus musculus
  siRNA target sequence for Olfm1 (NM_019498.1,1219-1237).
ccagagtcacattatcatt

SEQ ID NO: 685431 - DNA, 19 bp, Mus musculus
  siRNA target sequence for Olfm1 (NM_019498.1,1224-1242).
gtcacattatcattaggtt

SEQ ID NO: 685432 - DNA, 19 bp, Mus musculus
  siRNA target sequence for Olfm1 (NM_019498.1,1285-1303).
ctatgctggctacaacaat

SEQ ID NO: 685433 - DNA, 19 bp, Mus musculus
  siRNA target sequence for Olfm1 (NM_019498.1,1289-1307).
gctggctacaacaatatgt

SEQ ID NO: 685434 - DNA, 19 bp, Mus musculus
  siRNA target sequence for Olfm1 (NM_019498.1,1293-1311).
gctacaacaatatgtatca

SEQ ID NO: 685435 - DNA, 19 bp, Mus musculus
  siRNA target sequence for Olfm1 (NM_019498.1,1569-1587).
cctcgacctacgagtacat

SEQ ID NO: 685436 - DNA, 19 bp, Mus musculus
  siRNA target sequence for Olfm1 (NM_019498.1,1570-1588).
ctcgacctacgagtacatt

SEQ ID NO: 685437 - DNA, 19 bp, Mus musculus
  siRNA target sequence for Olfm1 (NM_019498.1,1572-1590).
cgacctacgagtacattga

SEQ ID NO: 685438 - DNA, 19 bp, Mus musculus
  siRNA target sequence for Olfm1 (NM_019498.1,1654-1672).
gctgtacgcctggaacaat

SEQ ID NO: 685439 - DNA, 19 bp, Mus musculus
  siRNA target sequence for Olfm1 (NM_019498.1,1673-1691).
ggccatcagaccctctata

SEQ ID NO: 685440 - DNA, 19 bp, Mus musculus
  siRNA target sequence for Sema3d (NM_028882.2,219-237).
gcttggatgatgttaatca

SEQ ID NO: 685441 - DNA, 19 bp, Mus musculus
  siRNA target sequence for Sema3d (NM_028882.2,260-278).
cactgaaacgtctaaacaa

SEQ ID NO: 685442 - DNA, 19 bp, Mus musculus
  siRNA target sequence for Sema3d (NM_028882.2,286-304).
caagactcaagctaaccta

SEQ ID NO: 685443 - DNA, 19 bp, Mus musculus
  siRNA target sequence for Sema3d (NM_028882.2,349-367).
catcagaaggattggattt

SEQ ID NO: 685444 - DNA, 19 bp, Mus musculus
  siRNA target sequence for Sema3d (NM_028882.2,412-430).
gagccaaagaccatgtctt

SEQ ID NO: 685445 - DNA, 19 bp, Mus musculus
  siRNA target sequence for Sema3d (NM_028882.2,439-457).
gtctggttgacttgaacaa

SEQ ID NO: 685446 - DNA, 19 bp, Mus musculus
  siRNA target sequence for Sema3d (NM_028882.2,495-513).
cgagtggagctatgtaaat

SEQ ID NO: 685447 - DNA, 19 bp, Mus musculus
  siRNA target sequence for Sema3d (NM_028882.2,496-514).
gagtggagctatgtaaatt

SEQ ID NO: 685448 - DNA, 19 bp, Mus musculus
  siRNA target sequence for Sema3d (NM_028882.2,556-574).
gtgtgcttcaaccctataa

SEQ ID NO: 685449 - DNA, 19 bp, Mus musculus
  siRNA target sequence for Sema3d (NM_028882.2,616-634).
cgctgtgtgggtacattga

SEQ ID NO: 685450 - DNA, 19 bp, Mus musculus
  siRNA target sequence for Sema3d (NM_028882.2,644-662).
caacaaggaggaactcata

SEQ ID NO: 685451 - DNA, 19 bp, Mus musculus
  siRNA target sequence for Sema3d (NM_028882.2,650-668).
ggaggaactcatatttaaa

SEQ ID NO: 685452 - DNA, 19 bp, Mus musculus
  siRNA target sequence for Sema3d (NM_028882.2,687-705).
gagtctggcagactgaaat

SEQ ID NO: 685453 - DNA, 19 bp, Mus musculus
  siRNA target sequence for Sema3d (NM_028882.2,722-740).
gcagccttttgcttcagta

SEQ ID NO: 685454 - DNA, 19 bp, Mus musculus
  siRNA target sequence for Sema3d (NM_028882.2,866-884).
ctggctcaatggagcaaaa

SEQ ID NO: 685455 - DNA, 19 bp, Mus musculus
  siRNA target sequence for Sema3d (NM_028882.2,880-898).
caaaatttatcggaacatt

SEQ ID NO: 685456 - DNA, 19 bp, Mus musculus
  siRNA target sequence for Sema3d (NM_028882.2,900-918).
cccattccagacacctata

SEQ ID NO: 685457 - DNA, 19 bp, Mus musculus
  siRNA target sequence for Sema3d (NM_028882.2,901-919).
ccattccagacacctataa

SEQ ID NO: 685458 - DNA, 19 bp, Mus musculus
  siRNA target sequence for Sema3d (NM_028882.2,902-920).
cattccagacacctataat

SEQ ID NO: 685459 - DNA, 19 bp, Mus musculus
  siRNA target sequence for Sema3d (NM_028882.2,1000-1018).
gagttggaagagtttgtaa

SEQ ID NO: 685460 - DNA, 19 bp, Mus musculus
  siRNA target sequence for Sema3d (NM_028882.2,1002-1020).
gttggaagagtttgtaaga

SEQ ID NO: 685461 - DNA, 19 bp, Mus musculus
  siRNA target sequence for Sema3d (NM_028882.2,1032-1050).
gggcaacgaagtctgataa

SEQ ID NO: 685462 - DNA, 19 bp, Mus musculus
  siRNA target sequence for Sema3d (NM_028882.2,1033-1051).
ggcaacgaagtctgataaa

SEQ ID NO: 685463 - DNA, 19 bp, Mus musculus
  siRNA target sequence for Sema3d (NM_028882.2,1035-1053).
caacgaagtctgataaaca

SEQ ID NO: 685464 - DNA, 19 bp, Mus musculus
  siRNA target sequence for Sema3d (NM_028882.2,1068-1086).
ctaaaggcaagactgattt

SEQ ID NO: 685465 - DNA, 19 bp, Mus musculus
  siRNA target sequence for Sema3d (NM_028882.2,1108-1126).
gggcagatacccattttga

SEQ ID NO: 685466 - DNA, 19 bp, Mus musculus
  siRNA target sequence for Sema3d (NM_028882.2,1149-1167).
ctccctacgagagatgaaa

SEQ ID NO: 685467 - DNA, 19 bp, Mus musculus
  siRNA target sequence for Sema3d (NM_028882.2,1198-1216).
caaccagctccatcttcaa

SEQ ID NO: 685468 - DNA, 19 bp, Mus musculus
  siRNA target sequence for Sema3d (NM_028882.2,1248-1266).
gatatccgagcagtcttta

SEQ ID NO: 685469 - DNA, 19 bp, Mus musculus
  siRNA target sequence for Sema3d (NM_028882.2,1253-1271).
ccgagcagtctttaatggt

SEQ ID NO: 685470 - DNA, 19 bp, Mus musculus
  siRNA target sequence for Sema3d (NM_028882.2,1298-1316).
ccatcgctgggtgcaatat

SEQ ID NO: 685471 - DNA, 19 bp, Mus musculus
  siRNA target sequence for Sema3d (NM_028882.2,1310-1328).
gcaatatgatggaaggata

SEQ ID NO: 685472 - DNA, 19 bp, Mus musculus
  siRNA target sequence for Sema3d (NM_028882.2,1348-1366).
cgtgtccaagcaaaaccta

SEQ ID NO: 685473 - DNA, 19 bp, Mus musculus
  siRNA target sequence for Sema3d (NM_028882.2,1349-1367).
gtgtccaagcaaaacctat

SEQ ID NO: 685474 - DNA, 19 bp, Mus musculus
  siRNA target sequence for Sema3d (NM_028882.2,1392-1410).
gactttccagacgatgtta

SEQ ID NO: 685475 - DNA, 19 bp, Mus musculus
  siRNA target sequence for Sema3d (NM_028882.2,1398-1416).
ccagacgatgttatcagtt

SEQ ID NO: 685476 - DNA, 19 bp, Mus musculus
  siRNA target sequence for Sema3d (NM_028882.2,1399-1417).
cagacgatgttatcagttt

SEQ ID NO: 685477 - DNA, 19 bp, Mus musculus
  siRNA target sequence for Sema3d (NM_028882.2,1401-1419).
gacgatgttatcagtttca

SEQ ID NO: 685478 - DNA, 19 bp, Mus musculus
  siRNA target sequence for Sema3d (NM_028882.2,1403-1421).
cgatgttatcagtttcata

SEQ ID NO: 685479 - DNA, 19 bp, Mus musculus
  siRNA target sequence for Sema3d (NM_028882.2,1423-1441).
ggcggcaccctgtgatgta

SEQ ID NO: 685480 - DNA, 19 bp, Mus musculus
  siRNA target sequence for Sema3d (NM_028882.2,1424-1442).
gcggcaccctgtgatgtat

SEQ ID NO: 685481 - DNA, 19 bp, Mus musculus
  siRNA target sequence for Sema3d (NM_028882.2,1425-1443).
cggcaccctgtgatgtata

SEQ ID NO: 685482 - DNA, 19 bp, Mus musculus
  siRNA target sequence for Sema3d (NM_028882.2,1426-1444).
ggcaccctgtgatgtataa

SEQ ID NO: 685483 - DNA, 19 bp, Mus musculus
  siRNA target sequence for Sema3d (NM_028882.2,1428-1446).
caccctgtgatgtataagt

SEQ ID NO: 685484 - DNA, 19 bp, Mus musculus
  siRNA target sequence for Sema3d (NM_028882.2,1470-1488).
ccgaccttcaagagaatca

SEQ ID NO: 685485 - DNA, 19 bp, Mus musculus
  siRNA target sequence for Sema3d (NM_028882.2,1559-1577).
gtttctcggaacagacatt

SEQ ID NO: 685486 - DNA, 19 bp, Mus musculus
  siRNA target sequence for Sema3d (NM_028882.2,1662-1680).
cacccaacagctatcttga

SEQ ID NO: 685487 - DNA, 19 bp, Mus musculus
  siRNA target sequence for Sema3d (NM_028882.2,1665-1683).
ccaacagctatcttgaaca

SEQ ID NO: 685488 - DNA, 19 bp, Mus musculus
  siRNA target sequence for Sema3d (NM_028882.2,1761-1779).
gacacttacgggaaagcat

SEQ ID NO: 685489 - DNA, 19 bp, Mus musculus
  siRNA target sequence for Sema3d (NM_028882.2,1866-1884).
gctagacgccaggatgtaa

SEQ ID NO: 685490 - DNA, 19 bp, Mus musculus
  siRNA target sequence for Sema3d (NM_028882.2,1867-1885).
ctagacgccaggatgtaaa

SEQ ID NO: 685491 - DNA, 19 bp, Mus musculus
  siRNA target sequence for Sema3d (NM_028882.2,1870-1888).
gacgccaggatgtaaaata

SEQ ID NO: 685492 - DNA, 19 bp, Mus musculus
  siRNA target sequence for Sema3d (NM_028882.2,1916-1934).
catagaagacagcattagt

SEQ ID NO: 685493 - DNA, 19 bp, Mus musculus
  siRNA target sequence for Sema3d (NM_028882.2,2054-2072).
gcatcgagaggagttgaaa

SEQ ID NO: 685494 - DNA, 19 bp, Mus musculus
  siRNA target sequence for Sema3d (NM_028882.2,2073-2091).
cctgatgaaaggatcatca

SEQ ID NO: 685495 - DNA, 19 bp, Mus musculus
  siRNA target sequence for Sema3d (NM_028882.2,2233-2251).
cccagagggcagaatacca

SEQ ID NO: 685496 - DNA, 19 bp, Mus musculus
  siRNA target sequence for Sema3d (NM_028882.2,2257-2275).
ggcaggtcaaggatctgtt

SEQ ID NO: 685497 - DNA, 19 bp, Mus musculus
  siRNA target sequence for Sema3d (NM_028882.2,2278-2296).
ctgagtcacggttgagata

SEQ ID NO: 685498 - DNA, 19 bp, Mus musculus
  siRNA target sequence for Sema3d (NM_028882.2,2280-2298).
gagtcacggttgagataca

SEQ ID NO: 685499 - DNA, 19 bp, Mus musculus
  siRNA target sequence for Sema3d (NM_028882.2,2284-2302).
cacggttgagatacaaaga

SEQ ID NO: 685500 - DNA, 19 bp, Mus musculus
  siRNA target sequence for Sema3d (NM_028882.2,2286-2304).
cggttgagatacaaagact

SEQ ID NO: 685501 - DNA, 19 bp, Mus musculus
  siRNA target sequence for Sema3d (NM_028882.2,2287-2305).
ggttgagatacaaagacta

SEQ ID NO: 685502 - DNA, 19 bp, Mus musculus
  siRNA target sequence for Sema3d (NM_028882.2,2301-2319).
gactacatccaaatcctta

SEQ ID NO: 685503 - DNA, 19 bp, Mus musculus
  siRNA target sequence for Sema3d (NM_028882.2,2316-2334).
cttagcagcccgaacttca

SEQ ID NO: 685504 - DNA, 19 bp, Mus musculus
  siRNA target sequence for Sema3f (NM_011349.2,291-309).
ctagagtccgactgtcatt

SEQ ID NO: 685505 - DNA, 19 bp, Mus musculus
  siRNA target sequence for Sema3f (NM_011349.2,294-312).
gagtccgactgtcattcaa

SEQ ID NO: 685506 - DNA, 19 bp, Mus musculus
  siRNA target sequence for Sema3f (NM_011349.2,327-345).
ccggtaccgcccacttctt

SEQ ID NO: 685507 - DNA, 19 bp, Mus musculus
  siRNA target sequence for Sema3f (NM_011349.2,334-352).
cgcccacttcttcaacttt

SEQ ID NO: 685508 - DNA, 19 bp, Mus musculus
  siRNA target sequence for Sema3f (NM_011349.2,394-412).
ggaccatgaccgcatgtat

SEQ ID NO: 685509 - DNA, 19 bp, Mus musculus
  siRNA target sequence for Sema3f (NM_011349.2,464-482).
gagccccttattatccatt

SEQ ID NO: 685510 - DNA, 19 bp, Mus musculus
  siRNA target sequence for Sema3f (NM_011349.2,621-639).
ccatgtgcacctatgtgaa

SEQ ID NO: 685511 - DNA, 19 bp, Mus musculus
  siRNA target sequence for Sema3f (NM_011349.2,645-663).
gccgtcgcgcacaggatta

SEQ ID NO: 685512 - DNA, 19 bp, Mus musculus
  siRNA target sequence for Sema3f (NM_011349.2,647-665).
cgtcgcgcacaggattaca

SEQ ID NO: 685513 - DNA, 19 bp, Mus musculus
  siRNA target sequence for Sema3f (NM_011349.2,648-666).
gtcgcgcacaggattacat

SEQ ID NO: 685514 - DNA, 19 bp, Mus musculus
  siRNA target sequence for Sema3f (NM_011349.2,650-668).
cgcgcacaggattacatct

SEQ ID NO: 685515 - DNA, 19 bp, Mus musculus
  siRNA target sequence for Sema3f (NM_011349.2,651-669).
gcgcacaggattacatctt

SEQ ID NO: 685516 - DNA, 19 bp, Mus musculus
  siRNA target sequence for Sema3f (NM_011349.2,748-766).
catcaatgaggaactctat

SEQ ID NO: 685517 - DNA, 19 bp, Mus musculus
  siRNA target sequence for Sema3f (NM_011349.2,768-786).
caggagtgtacatcgattt

SEQ ID NO: 685518 - DNA, 19 bp, Mus musculus
  siRNA target sequence for Sema3f (NM_011349.2,771-789).
gagtgtacatcgattttat

SEQ ID NO: 685519 - DNA, 19 bp, Mus musculus
  siRNA target sequence for Sema3f (NM_011349.2,834-852).
ccatgcgcacagatcagta

SEQ ID NO: 685520 - DNA, 19 bp, Mus musculus
  siRNA target sequence for Sema3f (NM_011349.2,839-857).
cgcacagatcagtacaact

SEQ ID NO: 685521 - DNA, 19 bp, Mus musculus
  siRNA target sequence for Sema3f (NM_011349.2,868-886).
caatgatccttccttcata

SEQ ID NO: 685522 - DNA, 19 bp, Mus musculus
  siRNA target sequence for Sema3f (NM_011349.2,912-930).
cagagcgcaatgacgataa

SEQ ID NO: 685523 - DNA, 19 bp, Mus musculus
  siRNA target sequence for Sema3f (NM_011349.2,917-935).
cgcaatgacgataaactct

SEQ ID NO: 685524 - DNA, 19 bp, Mus musculus
  siRNA target sequence for Sema3f (NM_011349.2,918-936).
gcaatgacgataaactcta

SEQ ID NO: 685525 - DNA, 19 bp, Mus musculus
  siRNA target sequence for Sema3f (NM_011349.2,1087-1105).
gccaggcgaggatggtatt

SEQ ID NO: 685526 - DNA, 19 bp, Mus musculus
  siRNA target sequence for Sema3f (NM_011349.2,1091-1109).
ggcgaggatggtattgaga

SEQ ID NO: 685527 - DNA, 19 bp, Mus musculus
  siRNA target sequence for Sema3f (NM_011349.2,1159-1177).
caggaacccagtcatttat

SEQ ID NO: 685528 - DNA, 19 bp, Mus musculus
  siRNA target sequence for Sema3f (NM_011349.2,1879-1897).
ccacgggaaccctatcaga

SEQ ID NO: 685529 - DNA, 19 bp, Mus musculus
  siRNA target sequence for Sema3f (NM_011349.2,1903-1921).
ccgtggtttcaattccaat

SEQ ID NO: 685530 - DNA, 19 bp, Mus musculus
  siRNA target sequence for Sema3f (NM_011349.2,2145-2163).
cggccactgagaacaactt

SEQ ID NO: 685531 - DNA, 19 bp, Mus musculus
  siRNA target sequence for Spry1 (NM_011896.1,512-530).
cttcgctagtggtgattca

SEQ ID NO: 685532 - DNA, 19 bp, Mus musculus
  siRNA target sequence for Spry1 (NM_011896.1,551-569).
ggcagaggttagactatga

SEQ ID NO: 685533 - DNA, 19 bp, Mus musculus
  siRNA target sequence for Spry1 (NM_011896.1,597-615).
gtccctagaccagatcaaa

SEQ ID NO: 685534 - DNA, 19 bp, Mus musculus
  siRNA target sequence for Spry1 (NM_011896.1,618-636).
catcagaggcagcaatgaa

SEQ ID NO: 685535 - DNA, 19 bp, Mus musculus
  siRNA target sequence for Spry1 (NM_011896.1,720-738).
cataccagccaatgtgaat

SEQ ID NO: 685536 - DNA, 19 bp, Mus musculus
  siRNA target sequence for Spry1 (NM_011896.1,724-742).
ccagccaatgtgaatagca

SEQ ID NO: 685537 - DNA, 19 bp, Mus musculus
  siRNA target sequence for Spry1 (NM_011896.1,957-975).
cttgaaggcctccttgaaa

SEQ ID NO: 685538 - DNA, 19 bp, Mus musculus
  siRNA target sequence for Spry1 (NM_011896.1,1097-1115).
cggagagcatggtggaata

SEQ ID NO: 685539 - DNA, 19 bp, Mus musculus
  siRNA target sequence for Spry1 (NM_011896.1,1238-1256).
gcatgggagccctgtcttt

SEQ ID NO: 685540 - DNA, 19 bp, Mus musculus
  siRNA target sequence for Spry1 (NM_011896.1,1340-1358).
ctggctgcaggtgtagaaa

SEQ ID NO: 685541 - DNA, 19 bp, Mus musculus
  siRNA target sequence for Spry4 (NM_011898.2,386-404).
ccgctgtgaccaggatatt

SEQ ID NO: 685542 - DNA, 19 bp, Mus musculus
  siRNA target sequence for Spry4 (NM_011898.2,387-405).
cgctgtgaccaggatatta

SEQ ID NO: 685543 - DNA, 19 bp, Mus musculus
  siRNA target sequence for Spry4 (NM_011898.2,389-407).
ctgtgaccaggatattact

SEQ ID NO: 685544 - DNA, 19 bp, Mus musculus
  siRNA target sequence for Spry4 (NM_011898.2,547-565).
ccaaggtggttcactgtaa

SEQ ID NO: 685545 - DNA, 19 bp, Mus musculus
  siRNA target sequence for Spry4 (NM_011898.2,630-648).
gcctgtggaaagtgtaagt

SEQ ID NO: 685546 - DNA, 19 bp, Mus musculus
  siRNA target sequence for Spry4 (NM_011898.2,718-736).
ctcagacgctggtcaacta

SEQ ID NO: 685547 - DNA, 19 bp, Mus musculus
  siRNA target sequence for Spry4 (NM_011898.2,751-769).
gtctggtgcaaggtatctt

SEQ ID NO: 685548 - DNA, 19 bp, Mus musculus
  siRNA target sequence for Spry4 (NM_011898.2,753-771).
ctggtgcaaggtatcttct

SEQ ID NO: 685549 - DNA, 19 bp, Mus musculus
  siRNA target sequence for Spry4 (NM_011898.2,755-773).
ggtgcaaggtatcttctat

SEQ ID NO: 685550 - DNA, 19 bp, Mus musculus
  siRNA target sequence for Spry4 (NM_011898.2,767-785).
cttctatcactgtactaat

SEQ ID NO: 685551 - DNA, 19 bp, Mus musculus
  siRNA target sequence for Jph3 (NM_020605.1,63-81).
gtccagtgggggtaggttt

SEQ ID NO: 685552 - DNA, 19 bp, Mus musculus
  siRNA target sequence for Jph3 (NM_020605.1,66-84).
cagtgggggtaggtttaat

SEQ ID NO: 685553 - DNA, 19 bp, Mus musculus
  siRNA target sequence for Jph3 (NM_020605.1,362-380).
cgggcaacggagccaaata

SEQ ID NO: 685554 - DNA, 19 bp, Mus musculus
  siRNA target sequence for Jph3 (NM_020605.1,365-383).
gcaacggagccaaatacga

SEQ ID NO: 685555 - DNA, 19 bp, Mus musculus
  siRNA target sequence for Jph3 (NM_020605.1,432-450).
ctcggatggaggaacgtat

SEQ ID NO: 685556 - DNA, 19 bp, Mus musculus
  siRNA target sequence for Jph3 (NM_020605.1,872-890).
ctgagctggcggtcattga

SEQ ID NO: 685557 - DNA, 19 bp, Mus musculus
  siRNA target sequence for Jph3 (NM_020605.1,973-991).
cgctcggacgggcttaagt

SEQ ID NO: 685558 - DNA, 19 bp, Mus musculus
  siRNA target sequence for Jph3 (NM_020605.1,974-992).
gctcggacgggcttaagta

SEQ ID NO: 685559 - DNA, 19 bp, Mus musculus
  siRNA target sequence for Jph3 (NM_020605.1,975-993).
ctcggacgggcttaagtat

SEQ ID NO: 685560 - DNA, 19 bp, Mus musculus
  siRNA target sequence for Jph3 (NM_020605.1,977-995).
cggacgggcttaagtatga

SEQ ID NO: 685561 - DNA, 19 bp, Mus musculus
  siRNA target sequence for Jph3 (NM_020605.1,1092-1110).
gagcggcaaacgcaagaat

SEQ ID NO: 685562 - DNA, 19 bp, Mus musculus
  siRNA target sequence for Jph3 (NM_020605.1,1094-1112).
gcggcaaacgcaagaatct

SEQ ID NO: 685563 - DNA, 19 bp, Mus musculus
  siRNA target sequence for Jph3 (NM_020605.1,1337-1355).
gggaaaacgggcttgagta

SEQ ID NO: 685564 - DNA, 19 bp, Mus musculus
  siRNA target sequence for Jph3 (NM_020605.1,1449-1467).
gggcaccaccccttctgat

SEQ ID NO: 685565 - DNA, 19 bp, Mus musculus
  siRNA target sequence for Jph3 (NM_020605.1,2260-2278).
ggagtcgccattttgttta

SEQ ID NO: 685566 - DNA, 19 bp, Mus musculus
  siRNA target sequence for Jph3 (NM_020605.1,2261-2279).
gagtcgccattttgtttat

SEQ ID NO: 685567 - DNA, 19 bp, Mus musculus
  siRNA target sequence for Ccrn4l (NM_009834.1,938-956).
caactgaccccgaacatct

SEQ ID NO: 685568 - DNA, 19 bp, Mus musculus
  siRNA target sequence for Ccrn4l (NM_009834.1,1020-1038).
ccgctaccagcgggatttt

SEQ ID NO: 685569 - DNA, 19 bp, Mus musculus
  siRNA target sequence for Ccrn4l (NM_009834.1,1022-1040).
gctaccagcgggattttgt

SEQ ID NO: 685570 - DNA, 19 bp, Mus musculus
  siRNA target sequence for Ccrn4l (NM_009834.1,1114-1132).
ctcggagaaggcaaagaca

SEQ ID NO: 685571 - DNA, 19 bp, Mus musculus
  siRNA target sequence for Ccrn4l (NM_009834.1,1205-1223).
cttaccagccagacatact

SEQ ID NO: 685572 - DNA, 19 bp, Mus musculus
  siRNA target sequence for Ccrn4l (NM_009834.1,1237-1255).
gtggaccactactttgaca

SEQ ID NO: 685573 - DNA, 19 bp, Mus musculus
  siRNA target sequence for Ccrn4l (NM_009834.1,1282-1300).
ggctaccaaggcacgtttt

SEQ ID NO: 685574 - DNA, 19 bp, Mus musculus
  siRNA target sequence for Ccrn4l (NM_009834.1,1283-1301).
gctaccaaggcacgttttt

SEQ ID NO: 685575 - DNA, 19 bp, Mus musculus
  siRNA target sequence for Ccrn4l (NM_009834.1,1308-1326).
gccctggtcaccatgtcta

SEQ ID NO: 685576 - DNA, 19 bp, Mus musculus
  siRNA target sequence for Ccrn4l (NM_009834.1,1311-1329).
ctggtcaccatgtctagat

SEQ ID NO: 685577 - DNA, 19 bp, Mus musculus
  siRNA target sequence for Ccrn4l (NM_009834.1,1313-1331).
ggtcaccatgtctagatgt

SEQ ID NO: 685578 - DNA, 19 bp, Mus musculus
  siRNA target sequence for Ccrn4l (NM_009834.1,1375-1393).
caaaaccgattcaagctta

SEQ ID NO: 685579 - DNA, 19 bp, Mus musculus
  siRNA target sequence for Ccrn4l (NM_009834.1,1416-1434).
gacagccatgaccctaaaa

SEQ ID NO: 685580 - DNA, 19 bp, Mus musculus
  siRNA target sequence for Ccrn4l (NM_009834.1,1640-1658).
ccgaagaggtctacaaaca

SEQ ID NO: 685581 - DNA, 19 bp, Mus musculus
  siRNA target sequence for Ccrn4l (NM_009834.1,1771-1789).
cacacgctggactatatct

SEQ ID NO: 685582 - DNA, 19 bp, Mus musculus
  siRNA target sequence for Ccrn4l (NM_009834.1,1817-1835).
cgtccgccctggatctact

SEQ ID NO: 685583 - DNA, 19 bp, Mus musculus
  siRNA target sequence for Ccrn4l (NM_009834.1,1861-1879).
cggctcccatccttccatt

SEQ ID NO: 685584 - DNA, 19 bp, Mus musculus
  siRNA target sequence for Ccrn4l (NM_009834.1,1862-1880).
ggctcccatccttccatta

SEQ ID NO: 685585 - DNA, 19 bp, Mus musculus
  siRNA target sequence for Ccrn4l (NM_009834.1,1903-1921).
gtgtgtgacttcagcttta

SEQ ID NO: 685586 - DNA, 19 bp, Mus musculus
  siRNA target sequence for Ccrn4l (NM_009834.1,1907-1925).
gtgacttcagctttaacga

SEQ ID NO: 685587 - DNA, 19 bp, Mus musculus
  siRNA target sequence for Ccrn4l (NM_009834.1,1927-1945).
gagccccatgagctctttt

SEQ ID NO: 685588 - DNA, 19 bp, Mus musculus
  siRNA target sequence for Fmr2 (NM_008032.1,469-487).
gatctattcgactttttca

SEQ ID NO: 685589 - DNA, 19 bp, Mus musculus
  siRNA target sequence for Fmr2 (NM_008032.1,526-544).
gaccgtagtgcacttaaaa

SEQ ID NO: 685590 - DNA, 19 bp, Mus musculus
  siRNA target sequence for Fmr2 (NM_008032.1,626-644).
cctacaaggtagctgaata

SEQ ID NO: 685591 - DNA, 19 bp, Mus musculus
  siRNA target sequence for Fmr2 (NM_008032.1,627-645).
ctacaaggtagctgaatat

SEQ ID NO: 685592 - DNA, 19 bp, Mus musculus
  siRNA target sequence for Fmr2 (NM_008032.1,630-648).
caaggtagctgaatataca

SEQ ID NO: 685593 - DNA, 19 bp, Mus musculus
  siRNA target sequence for Fmr2 (NM_008032.1,684-702).
cactcttggaagttatgat

SEQ ID NO: 685594 - DNA, 19 bp, Mus musculus
  siRNA target sequence for Fmr2 (NM_008032.1,742-760).
catctggtgggcattccaa

SEQ ID NO: 685595 - DNA, 19 bp, Mus musculus
  siRNA target sequence for Fmr2 (NM_008032.1,750-768).
gggcattccaaagaattct

SEQ ID NO: 685596 - DNA, 19 bp, Mus musculus
  siRNA target sequence for Fmr2 (NM_008032.1,880-898).
ccttcagtcgtgatactga

SEQ ID NO: 685597 - DNA, 19 bp, Mus musculus
  siRNA target sequence for Fmr2 (NM_008032.1,886-904).
gtcgtgatactgaattcca

SEQ ID NO: 685598 - DNA, 19 bp, Mus musculus
  siRNA target sequence for Fmr2 (NM_008032.1,941-959).
ggccacgagatagtcataa

SEQ ID NO: 685599 - DNA, 19 bp, Mus musculus
  siRNA target sequence for Fmr2 (NM_008032.1,943-961).
ccacgagatagtcataaca

SEQ ID NO: 685600 - DNA, 19 bp, Mus musculus
  siRNA target sequence for Fmr2 (NM_008032.1,946-964).
cgagatagtcataacacta

SEQ ID NO: 685601 - DNA, 19 bp, Mus musculus
  siRNA target sequence for Fmr2 (NM_008032.1,1040-1058).
gactggaagacttctttgt

SEQ ID NO: 685602 - DNA, 19 bp, Mus musculus
  siRNA target sequence for Fmr2 (NM_008032.1,1069-1087).
gagcaaccccaaattggta

SEQ ID NO: 685603 - DNA, 19 bp, Mus musculus
  siRNA target sequence for Fmr2 (NM_008032.1,1077-1095).
ccaaattggtacagttgaa

SEQ ID NO: 685604 - DNA, 19 bp, Mus musculus
  siRNA target sequence for Fmr2 (NM_008032.1,1078-1096).
caaattggtacagttgaaa

SEQ ID NO: 685605 - DNA, 19 bp, Mus musculus
  siRNA target sequence for Fmr2 (NM_008032.1,1170-1188).
gtctaattcaccagaagaa

SEQ ID NO: 685606 - DNA, 19 bp, Mus musculus
  siRNA target sequence for Fmr2 (NM_008032.1,1178-1196).
caccagaagaatctgaatt

SEQ ID NO: 685607 - DNA, 19 bp, Mus musculus
  siRNA target sequence for Fmr2 (NM_008032.1,1180-1198).
ccagaagaatctgaattta

SEQ ID NO: 685608 - DNA, 19 bp, Mus musculus
  siRNA target sequence for Fmr2 (NM_008032.1,1220-1238).
ccctagttgcctcatcttt

SEQ ID NO: 685609 - DNA, 19 bp, Mus musculus
  siRNA target sequence for Fmr2 (NM_008032.1,1221-1239).
cctagttgcctcatcttta

SEQ ID NO: 685610 - DNA, 19 bp, Mus musculus
  siRNA target sequence for Fmr2 (NM_008032.1,1222-1240).
ctagttgcctcatctttat

SEQ ID NO: 685611 - DNA, 19 bp, Mus musculus
  siRNA target sequence for Fmr2 (NM_008032.1,1247-1265).
ccagcagtggcctttcagt

SEQ ID NO: 685612 - DNA, 19 bp, Mus musculus
  siRNA target sequence for Fmr2 (NM_008032.1,1380-1398).
gaagccttccattgaattt

SEQ ID NO: 685613 - DNA, 19 bp, Mus musculus
  siRNA target sequence for Fmr2 (NM_008032.1,1417-1435).
ctctcctttggatcactat

SEQ ID NO: 685614 - DNA, 19 bp, Mus musculus
  siRNA target sequence for Fmr2 (NM_008032.1,1421-1439).
cctttggatcactattgga

SEQ ID NO: 685615 - DNA, 19 bp, Mus musculus
  siRNA target sequence for Fmr2 (NM_008032.1,1447-1465).
cccagtgcagtcagttcaa

SEQ ID NO: 685616 - DNA, 19 bp, Mus musculus
  siRNA target sequence for Fmr2 (NM_008032.1,1485-1503).
cacaatcctgcaaacaagt

SEQ ID NO: 685617 - DNA, 19 bp, Mus musculus
  siRNA target sequence for Fmr2 (NM_008032.1,1492-1510).
ctgcaaacaagtgaagtaa

SEQ ID NO: 685618 - DNA, 19 bp, Mus musculus
  siRNA target sequence for Fmr2 (NM_008032.1,1529-1547).
gctgtgttgaagaaatctt

SEQ ID NO: 685619 - DNA, 19 bp, Mus musculus
  siRNA target sequence for Fmr2 (NM_008032.1,1561-1579).
catctgactccaggattta

SEQ ID NO: 685620 - DNA, 19 bp, Mus musculus
  siRNA target sequence for Fmr2 (NM_008032.1,1564-1582).
ctgactccaggatttacct

SEQ ID NO: 685621 - DNA, 19 bp, Mus musculus
  siRNA target sequence for Fmr2 (NM_008032.1,1566-1584).
gactccaggatttacctta

SEQ ID NO: 685622 - DNA, 19 bp, Mus musculus
  siRNA target sequence for Fmr2 (NM_008032.1,1570-1588).
ccaggatttaccttacaaa

SEQ ID NO: 685623 - DNA, 19 bp, Mus musculus
  siRNA target sequence for Fmr2 (NM_008032.1,1571-1589).
caggatttaccttacaaaa

SEQ ID NO: 685624 - DNA, 19 bp, Mus musculus
  siRNA target sequence for Fmr2 (NM_008032.1,1573-1591).
ggatttaccttacaaaagt

SEQ ID NO: 685625 - DNA, 19 bp, Mus musculus
  siRNA target sequence for Fmr2 (NM_008032.1,1700-1718).
cagccaacgagctttacca

SEQ ID NO: 685626 - DNA, 19 bp, Mus musculus
  siRNA target sequence for Fmr2 (NM_008032.1,1723-1741).
gttgaaaaggcaaaaccta

SEQ ID NO: 685627 - DNA, 19 bp, Mus musculus
  siRNA target sequence for Fmr2 (NM_008032.1,1784-1802).
cgcctgcaacacaaaccaa

SEQ ID NO: 685628 - DNA, 19 bp, Mus musculus
  siRNA target sequence for Fmr2 (NM_008032.1,1785-1803).
gcctgcaacacaaaccaat

SEQ ID NO: 685629 - DNA, 19 bp, Mus musculus
  siRNA target sequence for Fmr2 (NM_008032.1,1871-1889).
ccactgacagcgaatccaa

SEQ ID NO: 685630 - DNA, 19 bp, Mus musculus
  siRNA target sequence for Fmr2 (NM_008032.1,1969-1987).
gtcacgtcccagaacaagt

SEQ ID NO: 685631 - DNA, 19 bp, Mus musculus
  siRNA target sequence for Fmr2 (NM_008032.1,1973-1991).
cgtcccagaacaagtcatt

SEQ ID NO: 685632 - DNA, 19 bp, Mus musculus
  siRNA target sequence for Fmr2 (NM_008032.1,2030-2048).
ctctgcctcctccaataat

SEQ ID NO: 685633 - DNA, 19 bp, Mus musculus
  siRNA target sequence for Fmr2 (NM_008032.1,2117-2135).
ggcctctccttagtcttat

SEQ ID NO: 685634 - DNA, 19 bp, Mus musculus
  siRNA target sequence for Fmr2 (NM_008032.1,2118-2136).
gcctctccttagtcttatt

SEQ ID NO: 685635 - DNA, 19 bp, Mus musculus
  siRNA target sequence for Fmr2 (NM_008032.1,2193-2211).
gcataagctgtcaacatca

SEQ ID NO: 685636 - DNA, 19 bp, Mus musculus
  siRNA target sequence for Fmr2 (NM_008032.1,2291-2309).
cctggcccaaaccaaatat

SEQ ID NO: 685637 - DNA, 19 bp, Mus musculus
  siRNA target sequence for Fmr2 (NM_008032.1,2296-2314).
cccaaaccaaatattacca

SEQ ID NO: 685638 - DNA, 19 bp, Mus musculus
  siRNA target sequence for Fmr2 (NM_008032.1,2362-2380).
cgaagccgaaacaaagcta

SEQ ID NO: 685639 - DNA, 19 bp, Mus musculus
  siRNA target sequence for Fmr2 (NM_008032.1,2453-2471).
gagggcctgggaagattgt

SEQ ID NO: 685640 - DNA, 19 bp, Mus musculus
  siRNA target sequence for Fmr2 (NM_008032.1,2474-2492).
ccaagtcccgggaatttat

SEQ ID NO: 685641 - DNA, 19 bp, Mus musculus
  siRNA target sequence for Fmr2 (NM_008032.1,2475-2493).
caagtcccgggaatttatt

SEQ ID NO: 685642 - DNA, 19 bp, Mus musculus
  siRNA target sequence for Fmr2 (NM_008032.1,2481-2499).
ccgggaatttattgaaaca

SEQ ID NO: 685643 - DNA, 19 bp, Mus musculus
  siRNA target sequence for Fmr2 (NM_008032.1,2540-2558).
ccctacagatcaaagtact

SEQ ID NO: 685644 - DNA, 19 bp, Mus musculus
  siRNA target sequence for Fmr2 (NM_008032.1,2557-2575).
ctgccaccttgcattactt

SEQ ID NO: 685645 - DNA, 19 bp, Mus musculus
  siRNA target sequence for Fmr2 (NM_008032.1,2559-2577).
gccaccttgcattacttct

SEQ ID NO: 685646 - DNA, 19 bp, Mus musculus
  siRNA target sequence for Fmr2 (NM_008032.1,2560-2578).
ccaccttgcattacttcta

SEQ ID NO: 685647 - DNA, 19 bp, Mus musculus
  siRNA target sequence for Fmr2 (NM_008032.1,2561-2579).
caccttgcattacttctaa

SEQ ID NO: 685648 - DNA, 19 bp, Mus musculus
  siRNA target sequence for Fmr2 (NM_008032.1,2567-2585).
gcattacttctaaatccaa

SEQ ID NO: 685649 - DNA, 19 bp, Mus musculus
  siRNA target sequence for Fmr2 (NM_008032.1,2629-2647).
ggcaacagcaacaacttat

SEQ ID NO: 685650 - DNA, 19 bp, Mus musculus
  siRNA target sequence for Fmr2 (NM_008032.1,2681-2699).
ctcctgccatgcaaactga

SEQ ID NO: 685651 - DNA, 19 bp, Mus musculus
  siRNA target sequence for Fmr2 (NM_008032.1,2708-2726).
cccctctacgggatcatga

SEQ ID NO: 685652 - DNA, 19 bp, Mus musculus
  siRNA target sequence for Fmr2 (NM_008032.1,2709-2727).
ccctctacgggatcatgaa

SEQ ID NO: 685653 - DNA, 19 bp, Mus musculus
  siRNA target sequence for Fmr2 (NM_008032.1,2710-2728).
cctctacgggatcatgaaa

SEQ ID NO: 685654 - DNA, 19 bp, Mus musculus
  siRNA target sequence for Fmr2 (NM_008032.1,2711-2729).
ctctacgggatcatgaaaa

SEQ ID NO: 685655 - DNA, 19 bp, Mus musculus
  siRNA target sequence for Fmr2 (NM_008032.1,2719-2737).
gatcatgaaaatccaaaaa

SEQ ID NO: 685656 - DNA, 19 bp, Mus musculus
  siRNA target sequence for Fmr2 (NM_008032.1,2751-2769).
gattgacctcgacttactt

SEQ ID NO: 685657 - DNA, 19 bp, Mus musculus
  siRNA target sequence for Fmr2 (NM_008032.1,2757-2775).
cctcgacttactttctaga

SEQ ID NO: 685658 - DNA, 19 bp, Mus musculus
  siRNA target sequence for Fmr2 (NM_008032.1,2760-2778).
cgacttactttctagagta

SEQ ID NO: 685659 - DNA, 19 bp, Mus musculus
  siRNA target sequence for Fmr2 (NM_008032.1,2947-2965).
cgcctggaggacaacacta

SEQ ID NO: 685660 - DNA, 19 bp, Mus musculus
  siRNA target sequence for Fmr2 (NM_008032.1,2950-2968).
ctggaggacaacactacta

SEQ ID NO: 685661 - DNA, 19 bp, Mus musculus
  siRNA target sequence for Fmr2 (NM_008032.1,3014-3032).
ctcccagcactagagaaaa

SEQ ID NO: 685662 - DNA, 19 bp, Mus musculus
  siRNA target sequence for Fmr2 (NM_008032.1,3107-3125).
ctccacgtcgcagaaatgt

SEQ ID NO: 685663 - DNA, 19 bp, Mus musculus
  siRNA target sequence for Fmr2 (NM_008032.1,3109-3127).
ccacgtcgcagaaatgtca

SEQ ID NO: 685664 - DNA, 19 bp, Mus musculus
  siRNA target sequence for Fmr2 (NM_008032.1,3148-3166).
ggtcaggacaaaaacattt

SEQ ID NO: 685665 - DNA, 19 bp, Mus musculus
  siRNA target sequence for Fmr2 (NM_008032.1,3183-3201).
cacctctagcaaacctaaa

SEQ ID NO: 685666 - DNA, 19 bp, Mus musculus
  siRNA target sequence for Fmr2 (NM_008032.1,3186-3204).
ctctagcaaacctaaaaga

SEQ ID NO: 685667 - DNA, 19 bp, Mus musculus
  siRNA target sequence for Fmr2 (NM_008032.1,3227-3245).
ctttcaaggggatatctat

SEQ ID NO: 685668 - DNA, 19 bp, Mus musculus
  siRNA target sequence for Fmr2 (NM_008032.1,3231-3249).
caaggggatatctataaat

SEQ ID NO: 685669 - DNA, 19 bp, Mus musculus
  siRNA target sequence for Fmr2 (NM_008032.1,3419-3437).
ctagcatcacccctacaat

SEQ ID NO: 685670 - DNA, 19 bp, Mus musculus
  siRNA target sequence for Fmr2 (NM_008032.1,3524-3542).
ggagacccaagctcacatt

SEQ ID NO: 685671 - DNA, 19 bp, Mus musculus
  siRNA target sequence for Fmr2 (NM_008032.1,3527-3545).
gacccaagctcacatttga

SEQ ID NO: 685672 - DNA, 19 bp, Mus musculus
  siRNA target sequence for Fmr2 (NM_008032.1,3553-3571).
gttcacaatgctgattttt

SEQ ID NO: 685673 - DNA, 19 bp, Mus musculus
  siRNA target sequence for Fmr2 (NM_008032.1,3556-3574).
cacaatgctgatttttaca

SEQ ID NO: 685674 - DNA, 19 bp, Mus musculus
  siRNA target sequence for Fmr2 (NM_008032.1,3703-3721).
gaagcgaagtccccatata

SEQ ID NO: 685675 - DNA, 19 bp, Mus musculus
  siRNA target sequence for Fmr2 (NM_008032.1,3706-3724).
gcgaagtccccatatacca

SEQ ID NO: 685676 - DNA, 19 bp, Mus musculus
  siRNA target sequence for Fmr2 (NM_008032.1,3707-3725).
cgaagtccccatataccat

SEQ ID NO: 685677 - DNA, 19 bp, Mus musculus
  siRNA target sequence for Fmr2 (NM_008032.1,3830-3848).
gatgcttgtcacttctcta

SEQ ID NO: 685678 - DNA, 19 bp, Mus musculus
  siRNA target sequence for Fmr2 (NM_008032.1,3918-3936).
gcaaaatgcttcaaaagtt

SEQ ID NO: 685679 - DNA, 19 bp, Mus musculus
  siRNA target sequence for Fmr2 (NM_008032.1,3919-3937).
caaaatgcttcaaaagtta

SEQ ID NO: 685680 - DNA, 19 bp, Mus musculus
  siRNA target sequence for Fmr2 (NM_008032.1,3952-3970).
ccttgggtaggcaatggaa

SEQ ID NO: 685681 - DNA, 19 bp, Mus musculus
  siRNA target sequence for Fmr2 (NM_008032.1,3953-3971).
cttgggtaggcaatggaaa

SEQ ID NO: 685682 - DNA, 19 bp, Mus musculus
  siRNA target sequence for Fmr2 (NM_008032.1,3956-3974).
gggtaggcaatggaaagaa

SEQ ID NO: 685683 - DNA, 19 bp, Mus musculus
  siRNA target sequence for Fmr2 (NM_008032.1,3958-3976).
gtaggcaatggaaagaata

SEQ ID NO: 685684 - DNA, 19 bp, Mus musculus
  siRNA target sequence for Fmr2 (NM_008032.1,3983-4001).
ccccagtgtctctcaacaa

SEQ ID NO: 685685 - DNA, 19 bp, Mus musculus
  siRNA target sequence for Fmr2 (NM_008032.1,3984-4002).
cccagtgtctctcaacaat

SEQ ID NO: 685686 - DNA, 19 bp, Mus musculus
  siRNA target sequence for Fmr2 (NM_008032.1,3986-4004).
cagtgtctctcaacaatgt

SEQ ID NO: 685687 - DNA, 19 bp, Mus musculus
  siRNA target sequence for Fmr2 (NM_008032.1,4014-4032).
caactcagtggggaattgt

SEQ ID NO: 685688 - DNA, 19 bp, Mus musculus
  siRNA target sequence for Fmr2 (NM_008032.1,4035-4053).
caatggccctgtcacaatt

SEQ ID NO: 685689 - DNA, 19 bp, Mus musculus
  siRNA target sequence for Fmr2 (NM_008032.1,4074-4092).
ggctgctagccatgtgaat

SEQ ID NO: 685690 - DNA, 19 bp, Mus musculus
  siRNA target sequence for Fmr2 (NM_008032.1,4076-4094).
ctgctagccatgtgaatat

SEQ ID NO: 685691 - DNA, 19 bp, Mus musculus
  siRNA target sequence for Fmr2 (NM_008032.1,4125-4143).
ctgggatatggctgacaaa

SEQ ID NO: 685692 - DNA, 19 bp, Mus musculus
  siRNA target sequence for Fmr2 (NM_008032.1,4127-4145).
gggatatggctgacaaact

SEQ ID NO: 685693 - DNA, 19 bp, Mus musculus
  siRNA target sequence for Fmr2 (NM_008032.1,4151-4169).
gagacaataaagaattctt

SEQ ID NO: 685694 - DNA, 19 bp, Mus musculus
  siRNA target sequence for Fmr2 (NM_008032.1,4261-4279).
cgcatcgatgctcatttgt

SEQ ID NO: 685695 - DNA, 19 bp, Mus musculus
  siRNA target sequence for Fmr2 (NM_008032.1,4262-4280).
gcatcgatgctcatttgtt

SEQ ID NO: 685696 - DNA, 19 bp, Mus musculus
  siRNA target sequence for 5330426L24Rik (NM_178402.2,717-735).
ccgtaactcaggttgagtt

SEQ ID NO: 685697 - DNA, 19 bp, Mus musculus
  siRNA target sequence for 5330426L24Rik (NM_178402.2,745-763).
gtactgtatgactcctttt

SEQ ID NO: 685698 - DNA, 19 bp, Mus musculus
  siRNA target sequence for 5330426L24Rik (NM_178402.2,748-766).
ctgtatgactccttttgat

SEQ ID NO: 685699 - DNA, 19 bp, Mus musculus
  siRNA target sequence for 1700011A15Rik (NM_025487.1,181-199).
gatggagccttgtgaacta

SEQ ID NO: 685700 - DNA, 19 bp, Mus musculus
  siRNA target sequence for 1700021O15Rik (NM_029599.1,161-179).
gggcgtccaaagaagctat

SEQ ID NO: 685701 - DNA, 19 bp, Mus musculus
  siRNA target sequence for 1700021O15Rik (NM_029599.1,163-181).
gcgtccaaagaagctatat

SEQ ID NO: 685702 - DNA, 19 bp, Mus musculus
  siRNA target sequence for 1700021O15Rik (NM_029599.1,345-363).
ggcttctggatgttttcca

SEQ ID NO: 685703 - DNA, 19 bp, Mus musculus
  siRNA target sequence for 1700021O15Rik (NM_029599.1,395-413).
ggatgacagcataaatggt

SEQ ID NO: 685704 - DNA, 19 bp, Mus musculus
  siRNA target sequence for 1700021O15Rik (NM_029599.1,518-536).
gatggaagccatatctgat

SEQ ID NO: 685705 - DNA, 19 bp, Mus musculus
  siRNA target sequence for 1700021O15Rik (NM_029599.1,639-657).
cacacgtcagccacgtata

SEQ ID NO: 685706 - DNA, 19 bp, Mus musculus
  siRNA target sequence for 1700021O15Rik (NM_029599.1,643-661).
cgtcagccacgtataacca

SEQ ID NO: 685707 - DNA, 19 bp, Mus musculus
  siRNA target sequence for 1700021O15Rik (NM_029599.1,795-813).
cgtttggcccagaaagtct

SEQ ID NO: 685708 - DNA, 19 bp, Mus musculus
  siRNA target sequence for 1700021O15Rik (NM_029599.1,883-901).
caaaggactttgtcatcta

SEQ ID NO: 685709 - DNA, 19 bp, Mus musculus
  siRNA target sequence for 1700021O15Rik (NM_029599.1,1077-1095).
cgtgtgcacggctctgtaa

SEQ ID NO: 685710 - DNA, 19 bp, Mus musculus
  siRNA target sequence for 1700041K21Rik (NM_139151.2,426-444).
ccaaccgtctggatcttct

SEQ ID NO: 685711 - DNA, 19 bp, Mus musculus
  siRNA target sequence for 2310015J09Rik (NM_027983.1,414-432).
gatcttgtgtggcaaatct

SEQ ID NO: 685712 - DNA, 19 bp, Mus musculus
  siRNA target sequence for 2310015J09Rik (NM_027983.1,1185-1203).
cacaaccaatgcttgtgat

SEQ ID NO: 685713 - DNA, 19 bp, Mus musculus
  siRNA target sequence for 2310015J09Rik (NM_027983.1,1187-1205).
caaccaatgcttgtgataa

SEQ ID NO: 685714 - DNA, 19 bp, Mus musculus
  siRNA target sequence for 2310015J09Rik (NM_027983.1,1256-1274).
gaccttgcaacacttttgt

SEQ ID NO: 685715 - DNA, 19 bp, Mus musculus
  siRNA target sequence for 4732468K03Rik (NM_133357.1,503-521).
ccagcgggtgcggaaagaa

SEQ ID NO: 685716 - DNA, 19 bp, Mus musculus
  siRNA target sequence for 4732468K03Rik (NM_133357.1,506-524).
gcgggtgcggaaagaagaa

SEQ ID NO: 685717 - DNA, 19 bp, Mus musculus
  siRNA target sequence for 4732468K03Rik (NM_133357.1,670-688).
ctttcttcgatacatatgt

SEQ ID NO: 685718 - DNA, 19 bp, Mus musculus
  siRNA target sequence for 4732468K03Rik (NM_133357.1,674-692).
cttcgatacatatgtcaat

SEQ ID NO: 685719 - DNA, 19 bp, Mus musculus
  siRNA target sequence for 4732468K03Rik (NM_133357.1,779-797).
cttcaaagtcaggtatgaa

SEQ ID NO: 685720 - DNA, 19 bp, Mus musculus
  siRNA target sequence for 4732468K03Rik (NM_133357.1,814-832).
gtgcggctgccgagaatga

SEQ ID NO: 685721 - DNA, 19 bp, Mus musculus
  siRNA target sequence for 4732468K03Rik (NM_133357.1,906-924).
ctgactgaccagatcaact

SEQ ID NO: 685722 - DNA, 19 bp, Mus musculus
  siRNA target sequence for 4732468K03Rik (NM_133357.1,910-928).
ctgaccagatcaacttcta

SEQ ID NO: 685723 - DNA, 19 bp, Mus musculus
  siRNA target sequence for 4732468K03Rik (NM_133357.1,1205-1223).
gctcagatctgagattgat

SEQ ID NO: 685724 - DNA, 19 bp, Mus musculus
  siRNA target sequence for 4732468K03Rik (NM_133357.1,1672-1690).
gtggctccagcatcaagtt

SEQ ID NO: 685725 - DNA, 19 bp, Mus musculus
  siRNA target sequence for 9030623C06Rik (NM_023256.1,60-78).
gatttcagtcgtcaaagtt

SEQ ID NO: 685726 - DNA, 19 bp, Mus musculus
  siRNA target sequence for 9030623C06Rik (NM_023256.1,367-385).
gacttgaagcccagatcaa

SEQ ID NO: 685727 - DNA, 19 bp, Mus musculus
  siRNA target sequence for 9030623C06Rik (NM_023256.1,410-428).
gagcaccatccgagactat

SEQ ID NO: 685728 - DNA, 19 bp, Mus musculus
  siRNA target sequence for 9030623C06Rik (NM_023256.1,431-449).
ctcctactacgcacagatt

SEQ ID NO: 685729 - DNA, 19 bp, Mus musculus
  siRNA target sequence for 9030623C06Rik (NM_023256.1,433-451).
cctactacgcacagattaa

SEQ ID NO: 685730 - DNA, 19 bp, Mus musculus
  siRNA target sequence for 9030623C06Rik (NM_023256.1,434-452).
ctactacgcacagattaaa

SEQ ID NO: 685731 - DNA, 19 bp, Mus musculus
  siRNA target sequence for 9030623C06Rik (NM_023256.1,446-464).
gattaaagagctgcaaaat

SEQ ID NO: 685732 - DNA, 19 bp, Mus musculus
  siRNA target sequence for 9030623C06Rik (NM_023256.1,458-476).
gcaaaatcaggttaaggat

SEQ ID NO: 685733 - DNA, 19 bp, Mus musculus
  siRNA target sequence for 9030623C06Rik (NM_023256.1,467-485).
ggttaaggatgctcaagta

SEQ ID NO: 685734 - DNA, 19 bp, Mus musculus
  siRNA target sequence for 9030623C06Rik (NM_023256.1,473-491).
ggatgctcaagtacaaaat

SEQ ID NO: 685735 - DNA, 19 bp, Mus musculus
  siRNA target sequence for 9030623C06Rik (NM_023256.1,499-517).
gcgtcctgcgaattgacaa

SEQ ID NO: 685736 - DNA, 19 bp, Mus musculus
  siRNA target sequence for 9030623C06Rik (NM_023256.1,500-518).
cgtcctgcgaattgacaat

SEQ ID NO: 685737 - DNA, 19 bp, Mus musculus
  siRNA target sequence for 9030623C06Rik (NM_023256.1,504-522).
ctgcgaattgacaatgcta

SEQ ID NO: 685738 - DNA, 19 bp, Mus musculus
  siRNA target sequence for 9030623C06Rik (NM_023256.1,563-581).
gaggggaatgcgtatagct

SEQ ID NO: 685739 - DNA, 19 bp, Mus musculus
  siRNA target sequence for 9030623C06Rik (NM_023256.1,605-623).
gagcaaagtttatgataat

SEQ ID NO: 685740 - DNA, 19 bp, Mus musculus
  siRNA target sequence for 9030623C06Rik (NM_023256.1,607-625).
gcaaagtttatgataatct

SEQ ID NO: 685741 - DNA, 19 bp, Mus musculus
  siRNA target sequence for 9030623C06Rik (NM_023256.1,686-704).
cctcaaaaaggaacatcaa

SEQ ID NO: 685742 - DNA, 19 bp, Mus musculus
  siRNA target sequence for 9030623C06Rik (NM_023256.1,727-745).
ggcagctgggcaacaatgt

SEQ ID NO: 685743 - DNA, 19 bp, Mus musculus
  siRNA target sequence for 9030623C06Rik (NM_023256.1,860-878).
cgagagacagagtcaaact

SEQ ID NO: 685744 - DNA, 19 bp, Mus musculus
  siRNA target sequence for 9030623C06Rik (NM_023256.1,984-1002).
cacctcagcatgaaagagt

SEQ ID NO: 685745 - DNA, 19 bp, Mus musculus
  siRNA target sequence for 9030623C06Rik (NM_023256.1,1209-1227).
gatataaaaactacagaat

SEQ ID NO: 685746 - DNA, 19 bp, Mus musculus
  siRNA target sequence for 9030623C06Rik (NM_023256.1,1321-1339).
ctgaagtcaaggagataga

SEQ ID NO: 685747 - DNA, 19 bp, Mus musculus
  siRNA target sequence for 9830169C18Rik (NM_172581.1,116-134).
cgagtggagccgtgagata

SEQ ID NO: 685748 - DNA, 19 bp, Mus musculus
  siRNA target sequence for 9830169C18Rik (NM_172581.1,117-135).
gagtggagccgtgagatat

SEQ ID NO: 685749 - DNA, 19 bp, Mus musculus
  siRNA target sequence for 9830169C18Rik (NM_172581.1,122-140).
gagccgtgagatatttcct

SEQ ID NO: 685750 - DNA, 19 bp, Mus musculus
  siRNA target sequence for 9830169C18Rik (NM_172581.1,266-284).
ctccacggggagcttttat

SEQ ID NO: 685751 - DNA, 19 bp, Mus musculus
  siRNA target sequence for 9830169C18Rik (NM_172581.1,313-331).
gccggtgggatgtattgga

SEQ ID NO: 685752 - DNA, 19 bp, Mus musculus
  siRNA target sequence for 9830169C18Rik (NM_172581.1,807-825).
gctgggattcggaagagaa

SEQ ID NO: 685753 - DNA, 19 bp, Mus musculus
  siRNA target sequence for 9830169C18Rik (NM_172581.1,812-830).
gattcggaagagaaaggaa

SEQ ID NO: 685754 - DNA, 19 bp, Mus musculus
  siRNA target sequence for 9830169C18Rik (NM_172581.1,962-980).
gatccccaagtccattcta

SEQ ID NO: 685755 - DNA, 19 bp, Mus musculus
  siRNA target sequence for 9830169C18Rik (NM_172581.1,985-1003).
cagcccttggcgacaaact

SEQ ID NO: 685756 - DNA, 19 bp, Mus musculus
  siRNA target sequence for 9830169C18Rik (NM_172581.1,1012-1030).
cggagctcctcaggaaaat

SEQ ID NO: 685757 - DNA, 19 bp, Mus musculus
  siRNA target sequence for 9830169C18Rik (NM_172581.1,1194-1212).
gactacgagggcctttaca

SEQ ID NO: 685758 - DNA, 19 bp, Mus musculus
  siRNA target sequence for 9830169C18Rik (NM_172581.1,1211-1229).
caaggctttccagaaaaga

SEQ ID NO: 685759 - DNA, 19 bp, Mus musculus
  siRNA target sequence for 9830169C18Rik (NM_172581.1,1251-1269).
cgggagacaaccagaaata

SEQ ID NO: 685760 - DNA, 19 bp, Mus musculus
  siRNA target sequence for 9830169C18Rik (NM_172581.1,1271-1289).
gcccttcttgctaagaact

SEQ ID NO: 685761 - DNA, 19 bp, Mus musculus
  siRNA target sequence for 9830169C18Rik (NM_172581.1,1394-1412).
gagtggtctcgcttctttt

SEQ ID NO: 685762 - DNA, 19 bp, Mus musculus
  siRNA target sequence for 9830169C18Rik (NM_172581.1,1524-1542).
gaggtgcacaaaaagaact

SEQ ID NO: 685763 - DNA, 19 bp, Mus musculus
  siRNA target sequence for 9830169C18Rik (NM_172581.1,1541-1559).
ctgtcaagccatgtctaaa

SEQ ID NO: 685764 - DNA, 19 bp, Mus musculus
  siRNA target sequence for 9830169C18Rik (NM_172581.1,1638-1656).
cggagcaatgaccgtaaaa

SEQ ID NO: 685765 - DNA, 19 bp, Mus musculus
  siRNA target sequence for 9830169C18Rik (NM_172581.1,1640-1658).
gagcaatgaccgtaaaaga

SEQ ID NO: 685766 - DNA, 19 bp, Mus musculus
  siRNA target sequence for 9830169C18Rik (NM_172581.1,1650-1668).
cgtaaaagagcaaaggaat

SEQ ID NO: 685767 - DNA, 19 bp, Mus musculus
  siRNA target sequence for 9830169C18Rik (NM_172581.1,1711-1729).
ggccctatctctttgaaca

SEQ ID NO: 685768 - DNA, 19 bp, Mus musculus
  siRNA target sequence for 9830169C18Rik (NM_172581.1,1712-1730).
gccctatctctttgaacaa

SEQ ID NO: 685769 - DNA, 19 bp, Mus musculus
  siRNA target sequence for 9830169C18Rik (NM_172581.1,1714-1732).
cctatctctttgaacaagt

SEQ ID NO: 685770 - DNA, 19 bp, Mus musculus
  siRNA target sequence for Agpt4 (NM_009641.1,12-30).
gccagctatgctactagat

SEQ ID NO: 685771 - DNA, 19 bp, Mus musculus
  siRNA target sequence for Agpt4 (NM_009641.1,86-104).
gtgggcaccgccagattca

SEQ ID NO: 685772 - DNA, 19 bp, Mus musculus
  siRNA target sequence for Agpt4 (NM_009641.1,142-160).
gtgccggagcctgatatct

SEQ ID NO: 685773 - DNA, 19 bp, Mus musculus
  siRNA target sequence for Agpt4 (NM_009641.1,731-749).
ctaacctgaagcacaatct

SEQ ID NO: 685774 - DNA, 19 bp, Mus musculus
  siRNA target sequence for Agpt4 (NM_009641.1,816-834).
gcgcctggtacggattgta

SEQ ID NO: 685775 - DNA, 19 bp, Mus musculus
  siRNA target sequence for Agpt4 (NM_009641.1,900-918).
caagcgctccggggttaat

SEQ ID NO: 685776 - DNA, 19 bp, Mus musculus
  siRNA target sequence for Agpt4 (NM_009641.1,904-922).
cgctccggggttaatacca

SEQ ID NO: 685777 - DNA, 19 bp, Mus musculus
  siRNA target sequence for Agpt4 (NM_009641.1,920-938).
ccagcggtgtctataccat

SEQ ID NO: 685778 - DNA, 19 bp, Mus musculus
  siRNA target sequence for Agpt4 (NM_009641.1,926-944).
gtgtctataccatctatga

SEQ ID NO: 685779 - DNA, 19 bp, Mus musculus
  siRNA target sequence for Agpt4 (NM_009641.1,1023-1041).
ggaggatggaagcgtaaat

SEQ ID NO: 685780 - DNA, 19 bp, Mus musculus
  siRNA target sequence for Agpt4 (NM_009641.1,1233-1251).
gtacagcctctctgtgaat

SEQ ID NO: 685781 - DNA, 19 bp, Mus musculus
  siRNA target sequence for Agpt4 (NM_009641.1,1318-1336).
gacatggacaatgataact

SEQ ID NO: 685782 - DNA, 19 bp, Mus musculus
  siRNA target sequence for Agpt4 (NM_009641.1,1402-1420).
ctcaatggcatctactatt

SEQ ID NO: 685783 - DNA, 19 bp, Mus musculus
  siRNA target sequence for Agpt4 (NM_009641.1,1410-1428).
catctactattcagttcat

SEQ ID NO: 685784 - DNA, 19 bp, Mus musculus
  siRNA target sequence for Agpt4 (NM_009641.1,1431-1449).
gcacttgcacaagatcaat

SEQ ID NO: 685785 - DNA, 19 bp, Mus musculus
  siRNA target sequence for Angptl2 (NM_011923.2,525-543).
gttcacagagagagtacat

SEQ ID NO: 685786 - DNA, 19 bp, Mus musculus
  siRNA target sequence for Angptl2 (NM_011923.2,581-599).
gacaagtgcacctacactt

SEQ ID NO: 685787 - DNA, 19 bp, Mus musculus
  siRNA target sequence for Angptl2 (NM_011923.2,586-604).
gtgcacctacactttcatt

SEQ ID NO: 685788 - DNA, 19 bp, Mus musculus
  siRNA target sequence for Angptl2 (NM_011923.2,862-880).
cattcgaaagcgagacaat

SEQ ID NO: 685789 - DNA, 19 bp, Mus musculus
  siRNA target sequence for Angptl2 (NM_011923.2,1121-1139).
cgcatcatcaaccagattt

SEQ ID NO: 685790 - DNA, 19 bp, Mus musculus
  siRNA target sequence for Angptl2 (NM_011923.2,1304-1322).
ctggtgaagcctgagaata

SEQ ID NO: 685791 - DNA, 19 bp, Mus musculus
  siRNA target sequence for Angptl2 (NM_011923.2,1307-1325).
gtgaagcctgagaatacca

SEQ ID NO: 685792 - DNA, 19 bp, Mus musculus
  siRNA target sequence for Angptl2 (NM_011923.2,1500-1518).
cgaaccaaggcaactacaa

SEQ ID NO: 685793 - DNA, 19 bp, Mus musculus
  siRNA target sequence for Angptl2 (NM_011923.2,1542-1560).
ggtctggccgtaaagtctt

SEQ ID NO: 685794 - DNA, 19 bp, Mus musculus
  siRNA target sequence for Angptl2 (NM_011923.2,1588-1606).
gccagaaagcgagtactat

SEQ ID NO: 685795 - DNA, 19 bp, Mus musculus
  siRNA target sequence for Angptl2 (NM_011923.2,1589-1607).
ccagaaagcgagtactata

SEQ ID NO: 685796 - DNA, 19 bp, Mus musculus
  siRNA target sequence for Angptl2 (NM_011923.2,1590-1608).
cagaaagcgagtactataa

SEQ ID NO: 685797 - DNA, 19 bp, Mus musculus
  siRNA target sequence for Angptl2 (NM_011923.2,1612-1630).
gcggctggggcgttatcat

SEQ ID NO: 685798 - DNA, 19 bp, Mus musculus
  siRNA target sequence for Angptl2 (NM_011923.2,1637-1655).
gcaggcgactcctttacct

SEQ ID NO: 685799 - DNA, 19 bp, Mus musculus
  siRNA target sequence for Angptl2 (NM_011923.2,1658-1676).
cacaacggcaaacagttta

SEQ ID NO: 685800 - DNA, 19 bp, Mus musculus
  siRNA target sequence for Angptl2 (NM_011923.2,1710-1728).
gaaactgtgcccactatca

SEQ ID NO: 685801 - DNA, 19 bp, Mus musculus
  siRNA target sequence for Angptl2 (NM_011923.2,1840-1858).
ccgaggaggctcttactca

SEQ ID NO: 685802 - DNA, 19 bp, Mus musculus
  siRNA target sequence for Angptl2 (NM_011923.2,1848-1866).
gctcttactcactcaagaa

SEQ ID NO: 685803 - DNA, 19 bp, Mus musculus
  siRNA target sequence for Angptl3 (NM_013913.1,49-67).
gttcctttagtaattgcat

SEQ ID NO: 685804 - DNA, 19 bp, Mus musculus
  siRNA target sequence for Angptl3 (NM_013913.1,75-93).
ggatccagacctttcatca

SEQ ID NO: 685805 - DNA, 19 bp, Mus musculus
  siRNA target sequence for Angptl3 (NM_013913.1,110-128).
cagagccaaaatcaagatt

SEQ ID NO: 685806 - DNA, 19 bp, Mus musculus
  siRNA target sequence for Angptl3 (NM_013913.1,135-153).
gttggatgatgtcaaaatt

SEQ ID NO: 685807 - DNA, 19 bp, Mus musculus
  siRNA target sequence for Angptl3 (NM_013913.1,177-195).
gggtcatggacttaaagat

SEQ ID NO: 685808 - DNA, 19 bp, Mus musculus
  siRNA target sequence for Angptl3 (NM_013913.1,193-211).
gattttgtccataagacta

SEQ ID NO: 685809 - DNA, 19 bp, Mus musculus
  siRNA target sequence for Angptl3 (NM_013913.1,209-227).
ctaagggacaaattaacga

SEQ ID NO: 685810 - DNA, 19 bp, Mus musculus
  siRNA target sequence for Angptl3 (NM_013913.1,214-232).
ggacaaattaacgacatat

SEQ ID NO: 685811 - DNA, 19 bp, Mus musculus
  siRNA target sequence for Angptl3 (NM_013913.1,215-233).
gacaaattaacgacatatt

SEQ ID NO: 685812 - DNA, 19 bp, Mus musculus
  siRNA target sequence for Angptl3 (NM_013913.1,270-288).
cctatcacttcgaaccaat

SEQ ID NO: 685813 - DNA, 19 bp, Mus musculus
  siRNA target sequence for Angptl3 (NM_013913.1,275-293).
cacttcgaaccaatgaaat

SEQ ID NO: 685814 - DNA, 19 bp, Mus musculus
  siRNA target sequence for Angptl3 (NM_013913.1,277-295).
cttcgaaccaatgaaatca

SEQ ID NO: 685815 - DNA, 19 bp, Mus musculus
  siRNA target sequence for Angptl3 (NM_013913.1,309-327).
ggagctaagaagaactaca

SEQ ID NO: 685816 - DNA, 19 bp, Mus musculus
  siRNA target sequence for Angptl3 (NM_013913.1,329-347).
ctacactacaagttaaaaa

SEQ ID NO: 685817 - DNA, 19 bp, Mus musculus
  siRNA target sequence for Angptl3 (NM_013913.1,332-350).
cactacaagttaaaaacga

SEQ ID NO: 685818 - DNA, 19 bp, Mus musculus
  siRNA target sequence for Angptl3 (NM_013913.1,368-386).
cagtagaactgaactcaaa

SEQ ID NO: 685819 - DNA, 19 bp, Mus musculus
  siRNA target sequence for Angptl3 (NM_013913.1,444-462).
ggagcagctaaccaactta

SEQ ID NO: 685820 - DNA, 19 bp, Mus musculus
  siRNA target sequence for Angptl3 (NM_013913.1,447-465).
gcagctaaccaacttaatt

SEQ ID NO: 685821 - DNA, 19 bp, Mus musculus
  siRNA target sequence for Angptl3 (NM_013913.1,450-468).
gctaaccaacttaattcta

SEQ ID NO: 685822 - DNA, 19 bp, Mus musculus
  siRNA target sequence for Angptl3 (NM_013913.1,451-469).
ctaaccaacttaattctaa

SEQ ID NO: 685823 - DNA, 19 bp, Mus musculus
  siRNA target sequence for Angptl3 (NM_013913.1,486-504).
ggagcacccagaagtaaca

SEQ ID NO: 685824 - DNA, 19 bp, Mus musculus
  siRNA target sequence for Angptl3 (NM_013913.1,487-505).
gagcacccagaagtaacat

SEQ ID NO: 685825 - DNA, 19 bp, Mus musculus
  siRNA target sequence for Angptl3 (NM_013913.1,489-507).
gcacccagaagtaacatca

SEQ ID NO: 685826 - DNA, 19 bp, Mus musculus
  siRNA target sequence for Angptl3 (NM_013913.1,496-514).
gaagtaacatcactcaaaa

SEQ ID NO: 685827 - DNA, 19 bp, Mus musculus
  siRNA target sequence for Angptl3 (NM_013913.1,627-645).
cagaaagactggtattcaa

SEQ ID NO: 685828 - DNA, 19 bp, Mus musculus
  siRNA target sequence for Angptl3 (NM_013913.1,692-710).
ctactccccctcttcaact

SEQ ID NO: 685829 - DNA, 19 bp, Mus musculus
  siRNA target sequence for Angptl3 (NM_013913.1,750-768).
cgactgctctgccgtttat

SEQ ID NO: 685830 - DNA, 19 bp, Mus musculus
  siRNA target sequence for Angptl3 (NM_013913.1,751-769).
gactgctctgccgtttata

SEQ ID NO: 685831 - DNA, 19 bp, Mus musculus
  siRNA target sequence for Angptl3 (NM_013913.1,756-774).
ctctgccgtttataacaga

SEQ ID NO: 685832 - DNA, 19 bp, Mus musculus
  siRNA target sequence for Angptl3 (NM_013913.1,771-789).
cagaggcgaacatacaagt

SEQ ID NO: 685833 - DNA, 19 bp, Mus musculus
  siRNA target sequence for Angptl3 (NM_013913.1,788-806).
gtggcgtgtacactattaa

SEQ ID NO: 685834 - DNA, 19 bp, Mus musculus
  siRNA target sequence for Angptl3 (NM_013913.1,792-810).
cgtgtacactattaaacca

SEQ ID NO: 685835 - DNA, 19 bp, Mus musculus
  siRNA target sequence for Angptl3 (NM_013913.1,793-811).
gtgtacactattaaaccaa

SEQ ID NO: 685836 - DNA, 19 bp, Mus musculus
  siRNA target sequence for Angptl3 (NM_013913.1,853-871).
ggcagtccatggacattaa

SEQ ID NO: 685837 - DNA, 19 bp, Mus musculus
  siRNA target sequence for Angptl3 (NM_013913.1,854-872).
gcagtccatggacattaat

SEQ ID NO: 685838 - DNA, 19 bp, Mus musculus
  siRNA target sequence for Angptl3 (NM_013913.1,855-873).
cagtccatggacattaatt

SEQ ID NO: 685839 - DNA, 19 bp, Mus musculus
  siRNA target sequence for Angptl3 (NM_013913.1,895-913).
caggacttcaacgaaacat

SEQ ID NO: 685840 - DNA, 19 bp, Mus musculus
  siRNA target sequence for Angptl3 (NM_013913.1,938-956).
ggaggctcgatggagaatt

SEQ ID NO: 685841 - DNA, 19 bp, Mus musculus
  siRNA target sequence for Angptl3 (NM_013913.1,939-957).
gaggctcgatggagaattt

SEQ ID NO: 685842 - DNA, 19 bp, Mus musculus
  siRNA target sequence for Angptl3 (NM_013913.1,963-981).
gggcctagagaagatctat

SEQ ID NO: 685843 - DNA, 19 bp, Mus musculus
  siRNA target sequence for Angptl3 (NM_013913.1,983-1001).
ctatagtccaacagtctaa

SEQ ID NO: 685844 - DNA, 19 bp, Mus musculus
  siRNA target sequence for Angptl3 (NM_013913.1,996-1014).
gtctaactacattttacga

SEQ ID NO: 685845 - DNA, 19 bp, Mus musculus
  siRNA target sequence for Angptl3 (NM_013913.1,1040-1058).
gcaagcactacgttgaata

SEQ ID NO: 685846 - DNA, 19 bp, Mus musculus
  siRNA target sequence for Angptl3 (NM_013913.1,1106-1124).
ctgagattgctggcaatat

SEQ ID NO: 685847 - DNA, 19 bp, Mus musculus
  siRNA target sequence for Angptl3 (NM_013913.1,1220-1238).
gctggtggtggaatgacat

SEQ ID NO: 685848 - DNA, 19 bp, Mus musculus
  siRNA target sequence for Angptl3 (NM_013913.1,1221-1239).
ctggtggtggaatgacata

SEQ ID NO: 685849 - DNA, 19 bp, Mus musculus
  siRNA target sequence for Angptl3 (NM_013913.1,1224-1242).
gtggtggaatgacatatgt

SEQ ID NO: 685850 - DNA, 19 bp, Mus musculus
  siRNA target sequence for Angptl3 (NM_013913.1,1331-1349).
gcagaaagctctatgctat

SEQ ID NO: 685851 - DNA, 19 bp, Mus musculus
  siRNA target sequence for Angptl3 (NM_013913.1,1339-1357).
ctctatgctatcaaatcat

SEQ ID NO: 685852 - DNA, 19 bp, Mus musculus
  siRNA target sequence for Angptl4 (NM_020581.1,221-239).
catcctgggacgagatgaa

SEQ ID NO: 685853 - DNA, 19 bp, Mus musculus
  siRNA target sequence for Angptl4 (NM_020581.1,373-391).
gatgcacccttcaaagact

SEQ ID NO: 685854 - DNA, 19 bp, Mus musculus
  siRNA target sequence for Angptl4 (NM_020581.1,467-485).
gcaagatccagcaattgtt

SEQ ID NO: 685855 - DNA, 19 bp, Mus musculus
  siRNA target sequence for Angptl4 (NM_020581.1,502-520).
cagcagagatacctatcaa

SEQ ID NO: 685856 - DNA, 19 bp, Mus musculus
  siRNA target sequence for Angptl4 (NM_020581.1,653-671).
ccaacgccacccacttaca

SEQ ID NO: 685857 - DNA, 19 bp, Mus musculus
  siRNA target sequence for Angptl4 (NM_020581.1,1060-1078).
ctgggtgccaccaatgttt

SEQ ID NO: 685858 - DNA, 19 bp, Mus musculus
  siRNA target sequence for Angptl4 (NM_020581.1,1129-1147).
ctccgtggggaccttaact

SEQ ID NO: 685859 - DNA, 19 bp, Mus musculus
  siRNA target sequence for Angptl4 (NM_020581.1,1131-1149).
ccgtggggaccttaactgt

SEQ ID NO: 685860 - DNA, 19 bp, Mus musculus
  siRNA target sequence for Angptl4 (NM_020581.1,1181-1199).
gtacctgtagccattccaa

SEQ ID NO: 685861 - DNA, 19 bp, Mus musculus
  siRNA target sequence for Angptl4 (NM_020581.1,1208-1226).
gacaatacttccactctat

SEQ ID NO: 685862 - DNA, 19 bp, Mus musculus
  siRNA target sequence for Angptl4 (NM_020581.1,1254-1272).
gggtatcttctggaaaaca

SEQ ID NO: 685863 - DNA, 19 bp, Mus musculus
  siRNA target sequence for Bicd1 (NM_009753.1,391-409).
ggtagaccaatataagact

SEQ ID NO: 685864 - DNA, 19 bp, Mus musculus
  siRNA target sequence for Bicd1 (NM_009753.1,438-456).
cagaaacgacccatgagaa

SEQ ID NO: 685865 - DNA, 19 bp, Mus musculus
  siRNA target sequence for Bicd1 (NM_009753.1,504-522).
ctctcaagcaacagtatga

SEQ ID NO: 685866 - DNA, 19 bp, Mus musculus
  siRNA target sequence for Bicd1 (NM_009753.1,538-556).
gtatgacggcctcaaacaa

SEQ ID NO: 685867 - DNA, 19 bp, Mus musculus
  siRNA target sequence for Bicd1 (NM_009753.1,595-613).
ctctatccaccgtaaagta

SEQ ID NO: 685868 - DNA, 19 bp, Mus musculus
  siRNA target sequence for Bicd1 (NM_009753.1,633-651).
gggaggaaacacttcttca

SEQ ID NO: 685869 - DNA, 19 bp, Mus musculus
  siRNA target sequence for Bicd1 (NM_009753.1,657-675).
ctgcatccaaagaagctta

SEQ ID NO: 685870 - DNA, 19 bp, Mus musculus
  siRNA target sequence for Bicd1 (NM_009753.1,668-686).
gaagcttactatctaaaca

SEQ ID NO: 685871 - DNA, 19 bp, Mus musculus
  siRNA target sequence for Bicd1 (NM_009753.1,672-690).
cttactatctaaacaagat

SEQ ID NO: 685872 - DNA, 19 bp, Mus musculus
  siRNA target sequence for Bicd1 (NM_009753.1,759-777).
ggctctcggccgttgtaca

SEQ ID NO: 685873 - DNA, 19 bp, Mus musculus
  siRNA target sequence for Bicd1 (NM_009753.1,802-820).
ggtggagctacagagaata

SEQ ID NO: 685874 - DNA, 19 bp, Mus musculus
  siRNA target sequence for Bicd1 (NM_009753.1,806-824).
gagctacagagaatacgaa

SEQ ID NO: 685875 - DNA, 19 bp, Mus musculus
  siRNA target sequence for Bicd1 (NM_009753.1,830-848).
gatgaaatccgagaatata

SEQ ID NO: 685876 - DNA, 19 bp, Mus musculus
  siRNA target sequence for Bicd1 (NM_009753.1,874-892).
ggactacacagaattggaa

SEQ ID NO: 685877 - DNA, 19 bp, Mus musculus
  siRNA target sequence for Bicd1 (NM_009753.1,937-955).
gaaccaggttgaatacgaa

SEQ ID NO: 685878 - DNA, 19 bp, Mus musculus
  siRNA target sequence for Bicd1 (NM_009753.1,953-971).
gaaggcttaaagcatgaaa

SEQ ID NO: 685879 - DNA, 19 bp, Mus musculus
  siRNA target sequence for Bicd1 (NM_009753.1,956-974).
ggcttaaagcatgaaatta

SEQ ID NO: 685880 - DNA, 19 bp, Mus musculus
  siRNA target sequence for Bicd1 (NM_009753.1,1022-1040).
gccattcgactgaaagaga

SEQ ID NO: 685881 - DNA, 19 bp, Mus musculus
  siRNA target sequence for Bicd1 (NM_009753.1,1187-1205).
gatggaagtgagccaaata

SEQ ID NO: 685882 - DNA, 19 bp, Mus musculus
  siRNA target sequence for Bicd1 (NM_009753.1,1191-1209).
gaagtgagccaaataacga

SEQ ID NO: 685883 - DNA, 19 bp, Mus musculus
  siRNA target sequence for Bicd1 (NM_009753.1,1250-1268).
ctgaatggagactatcgta

SEQ ID NO: 685884 - DNA, 19 bp, Mus musculus
  siRNA target sequence for Bicd1 (NM_009753.1,1318-1336).
cagtgagttgaacatttca

SEQ ID NO: 685885 - DNA, 19 bp, Mus musculus
  siRNA target sequence for Bicd1 (NM_009753.1,1375-1393).
gagggaaaaagctattctt

SEQ ID NO: 685886 - DNA, 19 bp, Mus musculus
  siRNA target sequence for Bicd1 (NM_009753.1,1419-1437).
cccagctagaacataccaa

SEQ ID NO: 685887 - DNA, 19 bp, Mus musculus
  siRNA target sequence for Bicd1 (NM_009753.1,1473-1491).
ggctcacagagcatgtcaa

SEQ ID NO: 685888 - DNA, 19 bp, Mus musculus
  siRNA target sequence for Bicd1 (NM_009753.1,1474-1492).
gctcacagagcatgtcaat

SEQ ID NO: 685889 - DNA, 19 bp, Mus musculus
  siRNA target sequence for Bicd1 (NM_009753.1,1479-1497).
cagagcatgtcaatgctat

SEQ ID NO: 685890 - DNA, 19 bp, Mus musculus
  siRNA target sequence for Bicd1 (NM_009753.1,1494-1512).
ctatgaggggcttgcaaaa

SEQ ID NO: 685891 - DNA, 19 bp, Mus musculus
  siRNA target sequence for Bicd1 (NM_009753.1,1563-1581).
cggaggaagctcatgacta

SEQ ID NO: 685892 - DNA, 19 bp, Mus musculus
  siRNA target sequence for Bicd1 (NM_009753.1,1609-1627).
ccttgagtgcaaatataga

SEQ ID NO: 685893 - DNA, 19 bp, Mus musculus
  siRNA target sequence for Bicd1 (NM_009753.1,1633-1651).
cgtcacagaagtcattgat

SEQ ID NO: 685894 - DNA, 19 bp, Mus musculus
  siRNA target sequence for Bicd1 (NM_009753.1,1638-1656).
cagaagtcattgatttgaa

SEQ ID NO: 685895 - DNA, 19 bp, Mus musculus
  siRNA target sequence for Bicd1 (NM_009753.1,1695-1713).
ctgtagaaaattatacaga

SEQ ID NO: 685896 - DNA, 19 bp, Mus musculus
  siRNA target sequence for Bicd1 (NM_009753.1,1722-1740).
ccaaatatgagagtaagat

SEQ ID NO: 685897 - DNA, 19 bp, Mus musculus
  siRNA target sequence for Bicd1 (NM_009753.1,1738-1756).
gatccaaatgtatgatgaa

SEQ ID NO: 685898 - DNA, 19 bp, Mus musculus
  siRNA target sequence for Bicd1 (NM_009753.1,1836-1854).
ctggcatagccaacgaaaa

SEQ ID NO: 685899 - DNA, 19 bp, Mus musculus
  siRNA target sequence for Bicd1 (NM_009753.1,1839-1857).
gcatagccaacgaaaatca

SEQ ID NO: 685900 - DNA, 19 bp, Mus musculus
  siRNA target sequence for Bicd1 (NM_009753.1,1879-1897).
ggatgagttggtgacattt

SEQ ID NO: 685901 - DNA, 19 bp, Mus musculus
  siRNA target sequence for Bicd1 (NM_009753.1,1880-1898).
gatgagttggtgacattta

SEQ ID NO: 685902 - DNA, 19 bp, Mus musculus
  siRNA target sequence for Bicd1 (NM_009753.1,1950-1968).
ctcccaatagagtcatgtt

SEQ ID NO: 685903 - DNA, 19 bp, Mus musculus
  siRNA target sequence for Bicd1 (NM_009753.1,1959-1977).
gagtcatgttggactacta

SEQ ID NO: 685904 - DNA, 19 bp, Mus musculus
  siRNA target sequence for Bicd1 (NM_009753.1,2008-2026).
cctcaaggggcctgatgat

SEQ ID NO: 685905 - DNA, 19 bp, Mus musculus
  siRNA target sequence for Bicd1 (NM_009753.1,2035-2053).
gcttttgtcgccaagatta

SEQ ID NO: 685906 - DNA, 19 bp, Mus musculus
  siRNA target sequence for Bicd1 (NM_009753.1,2094-2112).
catctgaaccagtttcaaa

SEQ ID NO: 685907 - DNA, 19 bp, Mus musculus
  siRNA target sequence for Bicd1 (NM_009753.1,2099-2117).
gaaccagtttcaaaggaaa

SEQ ID NO: 685908 - DNA, 19 bp, Mus musculus
  siRNA target sequence for Bicd1 (NM_009753.1,2135-2153).
gagccaagtccaactaaga

SEQ ID NO: 685909 - DNA, 19 bp, Mus musculus
  siRNA target sequence for Bicd1 (NM_009753.1,2220-2238).
gcaaagagccaatgaatat

SEQ ID NO: 685910 - DNA, 19 bp, Mus musculus
  siRNA target sequence for Bicd1 (NM_009753.1,2370-2388).
ccttaatggaagagattct

SEQ ID NO: 685911 - DNA, 19 bp, Mus musculus
  siRNA target sequence for Bicd1 (NM_009753.1,2469-2487).
ctgaagtggctttagctaa

SEQ ID NO: 685912 - DNA, 19 bp, Mus musculus
  siRNA target sequence for Bicd1 (NM_009753.1,2521-2539).
ggttactgaaacaatgaca

SEQ ID NO: 685913 - DNA, 19 bp, Mus musculus
  siRNA target sequence for Bicd1 (NM_009753.1,2528-2546).
gaaacaatgacaaaactga

SEQ ID NO: 685914 - DNA, 19 bp, Mus musculus
  siRNA target sequence for Bicd1 (NM_009753.1,2538-2556).
caaaactgaggaatgaact

SEQ ID NO: 685915 - DNA, 19 bp, Mus musculus
  siRNA target sequence for Bicd1 (NM_009753.1,2573-2591).
gatgctgcaaccttctcat

SEQ ID NO: 685916 - DNA, 19 bp, Mus musculus
  siRNA target sequence for Bicd1 (NM_009753.1,2600-2618).
gcaatgtttgcaacaagat

SEQ ID NO: 685917 - DNA, 19 bp, Mus musculus
  siRNA target sequence for Bicd1 (NM_009753.1,2609-2627).
gcaacaagatgcgatgaat

SEQ ID NO: 685918 - DNA, 19 bp, Mus musculus
  siRNA target sequence for Bicd1 (NM_009753.1,2610-2628).
caacaagatgcgatgaata

SEQ ID NO: 685919 - DNA, 19 bp, Mus musculus
  siRNA target sequence for Bicd1 (NM_009753.1,2613-2631).
caagatgcgatgaatatgt

SEQ ID NO: 685920 - DNA, 19 bp, Mus musculus
  siRNA target sequence for Bicd1 (NM_009753.1,2680-2698).
gaagaagactctaaacact

SEQ ID NO: 685921 - DNA, 19 bp, Mus musculus
  siRNA target sequence for Bicd1 (NM_009753.1,2706-2724).
gaatggctatccagcaaaa

SEQ ID NO: 685922 - DNA, 19 bp, Mus musculus
  siRNA target sequence for Bicd1 (NM_009753.1,2809-2827).
gatcggcagccctaaaatt

SEQ ID NO: 685923 - DNA, 19 bp, Mus musculus
  siRNA target sequence for Cdv1 (NM_009879.2,242-260).
ccaagcaagatgttgatat

SEQ ID NO: 685924 - DNA, 19 bp, Mus musculus
  siRNA target sequence for Cdv1 (NM_009879.2,284-302).
cagccaaacgaatgttgaa

SEQ ID NO: 685925 - DNA, 19 bp, Mus musculus
  siRNA target sequence for Cdv1 (NM_009879.2,287-305).
ccaaacgaatgttgaatct

SEQ ID NO: 685926 - DNA, 19 bp, Mus musculus
  siRNA target sequence for Cdv1 (NM_009879.2,288-306).
caaacgaatgttgaatctt

SEQ ID NO: 685927 - DNA, 19 bp, Mus musculus
  siRNA target sequence for Cdv1 (NM_009879.2,307-325).
cttggtatccttaagtaca

SEQ ID NO: 685928 - DNA, 19 bp, Mus musculus
  siRNA target sequence for Cdv1 (NM_009879.2,364-382).
cagggcttggtgattggaa

SEQ ID NO: 685929 - DNA, 19 bp, Mus musculus
  siRNA target sequence for Cdv1 (NM_009879.2,379-397).
ggaagtaaacctgtgattt

SEQ ID NO: 685930 - DNA, 19 bp, Mus musculus
  siRNA target sequence for Cdv1 (NM_009879.2,380-398).
gaagtaaacctgtgattta

SEQ ID NO: 685931 - DNA, 19 bp, Mus musculus
  siRNA target sequence for Cdv1 (NM_009879.2,421-439).
cagcggagtaatgaactaa

SEQ ID NO: 685932 - DNA, 19 bp, Mus musculus
  siRNA target sequence for Cdv1 (NM_009879.2,424-442).
cggagtaatgaactaaaga

SEQ ID NO: 685933 - DNA, 19 bp, Mus musculus
  siRNA target sequence for Cdv1 (NM_009879.2,425-443).
ggagtaatgaactaaagaa

SEQ ID NO: 685934 - DNA, 19 bp, Mus musculus
  siRNA target sequence for Cdv1 (NM_009879.2,426-444).
gagtaatgaactaaagaaa

SEQ ID NO: 685935 - DNA, 19 bp, Mus musculus
  siRNA target sequence for Cdv1 (NM_009879.2,488-506).
gtgagtttcttcaagatga

SEQ ID NO: 685936 - DNA, 19 bp, Mus musculus
  siRNA target sequence for Cdv1 (NM_009879.2,514-532).
gctgacaccaataaacagt

SEQ ID NO: 685937 - DNA, 19 bp, Mus musculus
  siRNA target sequence for Cdv1 (NM_009879.2,515-533).
ctgacaccaataaacagta

SEQ ID NO: 685938 - DNA, 19 bp, Mus musculus
  siRNA target sequence for Cdv1 (NM_009879.2,540-558).
gctgatggaagcctttaaa

SEQ ID NO: 685939 - DNA, 19 bp, Mus musculus
  siRNA target sequence for Cdv1 (NM_009879.2,541-559).
ctgatggaagcctttaaaa

SEQ ID NO: 685940 - DNA, 19 bp, Mus musculus
  siRNA target sequence for Cdv1 (NM_009879.2,610-628).
gaaatcagaagggatatca

SEQ ID NO: 685941 - DNA, 19 bp, Mus musculus
  siRNA target sequence for Cdv1 (NM_009879.2,665-683).
gagttgaacggctgaagaa

SEQ ID NO: 685942 - DNA, 19 bp, Mus musculus
  siRNA target sequence for Cdv1 (NM_009879.2,686-704).
gggtggagaccgttcagaa

SEQ ID NO: 685943 - DNA, 19 bp, Mus musculus
  siRNA target sequence for Cdv1 (NM_009879.2,702-720).
gaaccatcagcgaatgctt

SEQ ID NO: 685944 - DNA, 19 bp, Mus musculus
  siRNA target sequence for Cdv1 (NM_009879.2,705-723).
ccatcagcgaatgcttaaa

SEQ ID NO: 685945 - DNA, 19 bp, Mus musculus
  siRNA target sequence for Cdv1 (NM_009879.2,711-729).
gcgaatgcttaaaatagca

SEQ ID NO: 685946 - DNA, 19 bp, Mus musculus
  siRNA target sequence for Cdv1 (NM_009879.2,731-749).
gacagcttcgagttgagaa

SEQ ID NO: 685947 - DNA, 19 bp, Mus musculus
  siRNA target sequence for Cdv1 (NM_009879.2,877-895).
cctgagagtttaatgaaga

SEQ ID NO: 685948 - DNA, 19 bp, Mus musculus
  siRNA target sequence for Cdv1 (NM_009879.2,930-948).
ggtcactgaaaaatttcca

SEQ ID NO: 685949 - DNA, 19 bp, Mus musculus
  siRNA target sequence for Cdv1 (NM_009879.2,1041-1059).
gactaaagtcaatgaagta

SEQ ID NO: 685950 - DNA, 19 bp, Mus musculus
  siRNA target sequence for Cdv1 (NM_009879.2,1064-1082).
cggagatcaatcagttgat

SEQ ID NO: 685951 - DNA, 19 bp, Mus musculus
  siRNA target sequence for Cdv1 (NM_009879.2,1065-1083).
ggagatcaatcagttgatt

SEQ ID NO: 685952 - DNA, 19 bp, Mus musculus
  siRNA target sequence for Cdv1 (NM_009879.2,1098-1116).
gagaaacgagccaattgaa

SEQ ID NO: 685953 - DNA, 19 bp, Mus musculus
  siRNA target sequence for Cdv1 (NM_009879.2,1225-1243).
gaggtgttggtgaaaacaa

SEQ ID NO: 685954 - DNA, 19 bp, Mus musculus
  siRNA target sequence for Cdv1 (NM_009879.2,1293-1311).
caagcgatacgtcagtaaa

SEQ ID NO: 685955 - DNA, 19 bp, Mus musculus
  siRNA target sequence for Cdv1 (NM_009879.2,1319-1337).
gcaaaagcacagttttcaa

SEQ ID NO: 685956 - DNA, 19 bp, Mus musculus
  siRNA target sequence for Cdv1 (NM_009879.2,1341-1359).
gaagcatcagataatagct

SEQ ID NO: 685957 - DNA, 19 bp, Mus musculus
  siRNA target sequence for Cdv1 (NM_009879.2,1348-1366).
cagataatagctgaattta

SEQ ID NO: 685958 - DNA, 19 bp, Mus musculus
  siRNA target sequence for Cdv1 (NM_009879.2,1410-1428).
gcagcgtcaggaaaccatt

SEQ ID NO: 685959 - DNA, 19 bp, Mus musculus
  siRNA target sequence for Cdv1 (NM_009879.2,1431-1449).
gcatcaactgcgaactatt

SEQ ID NO: 685960 - DNA, 19 bp, Mus musculus
  siRNA target sequence for Cdv1 (NM_009879.2,1438-1456).
ctgcgaactattgaagaaa

SEQ ID NO: 685961 - DNA, 19 bp, Mus musculus
  siRNA target sequence for Cdv1 (NM_009879.2,1462-1480).
ggtatatctggatacagtt

SEQ ID NO: 685962 - DNA, 19 bp, Mus musculus
  siRNA target sequence for Cdv1 (NM_009879.2,1463-1481).
gtatatctggatacagtta

SEQ ID NO: 685963 - DNA, 19 bp, Mus musculus
  siRNA target sequence for Cdv1 (NM_009879.2,1581-1599).
gaattccttggtatcagaa

SEQ ID NO: 685964 - DNA, 19 bp, Mus musculus
  siRNA target sequence for Cdv1 (NM_009879.2,1616-1634).
ccccagttataaaagaact

SEQ ID NO: 685965 - DNA, 19 bp, Mus musculus
  siRNA target sequence for Cdv1 (NM_009879.2,1617-1635).
cccagttataaaagaacta

SEQ ID NO: 685966 - DNA, 19 bp, Mus musculus
  siRNA target sequence for Cdv1 (NM_009879.2,1636-1654).
cggcagttgcgtcagaaat

SEQ ID NO: 685967 - DNA, 19 bp, Mus musculus
  siRNA target sequence for Cdv1 (NM_009879.2,1638-1656).
gcagttgcgtcagaaatgt

SEQ ID NO: 685968 - DNA, 19 bp, Mus musculus
  siRNA target sequence for Cdv1 (NM_009879.2,1641-1659).
gttgcgtcagaaatgtcaa

SEQ ID NO: 685969 - DNA, 19 bp, Mus musculus
  siRNA target sequence for Cdv1 (NM_009879.2,1646-1664).
gtcagaaatgtcaagaact

SEQ ID NO: 685970 - DNA, 19 bp, Mus musculus
  siRNA target sequence for Cdv1 (NM_009879.2,1724-1742).
gcaaccggtccaaattaga

SEQ ID NO: 685971 - DNA, 19 bp, Mus musculus
  siRNA target sequence for Cdv1 (NM_009879.2,1797-1815).
ctatacaaactgcatgatt

SEQ ID NO: 685972 - DNA, 19 bp, Mus musculus
  siRNA target sequence for Cdv1 (NM_009879.2,1838-1856).
gtcgagcgactgatgagat

SEQ ID NO: 685973 - DNA, 19 bp, Mus musculus
  siRNA target sequence for Cdv1 (NM_009879.2,1860-1878).
ggcgtacgtctcttctgat

SEQ ID NO: 685974 - DNA, 19 bp, Mus musculus
  siRNA target sequence for Cdv1 (NM_009879.2,1897-1915).
gcaattagggaacagtata

SEQ ID NO: 685975 - DNA, 19 bp, Mus musculus
  siRNA target sequence for Cdv1 (NM_009879.2,1904-1922).
gggaacagtataccaaaaa

SEQ ID NO: 685976 - DNA, 19 bp, Mus musculus
  siRNA target sequence for Cdv1 (NM_009879.2,1905-1923).
ggaacagtataccaaaaat

SEQ ID NO: 685977 - DNA, 19 bp, Mus musculus
  siRNA target sequence for Cdv1 (NM_009879.2,1950-1968).
gaaactccgggaaaaacaa

SEQ ID NO: 685978 - DNA, 19 bp, Mus musculus
  siRNA target sequence for Cdv1 (NM_009879.2,2016-2034).
gtggcgtgatcttgaacaa

SEQ ID NO: 685979 - DNA, 19 bp, Mus musculus
  siRNA target sequence for Cdv1 (NM_009879.2,2081-2099).
cttccatcggccaggtaat

SEQ ID NO: 685980 - DNA, 19 bp, Mus musculus
  siRNA target sequence for Cdv1 (NM_009879.2,2084-2102).
ccatcggccaggtaattca

SEQ ID NO: 685981 - DNA, 19 bp, Mus musculus
  siRNA target sequence for Cdv1 (NM_009879.2,2085-2103).
catcggccaggtaattcaa

SEQ ID NO: 685982 - DNA, 19 bp, Mus musculus
  siRNA target sequence for D10Ertd749e (NM_025635.1,80-98).
ggcagcagccattctagaa

SEQ ID NO: 685983 - DNA, 19 bp, Mus musculus
  siRNA target sequence for D10Ertd749e (NM_025635.1,155-173).
gaggaactcgcggaagaaa

SEQ ID NO: 685984 - DNA, 19 bp, Mus musculus
  siRNA target sequence for D10Ertd749e (NM_025635.1,157-175).
ggaactcgcggaagaaaga

SEQ ID NO: 685985 - DNA, 19 bp, Mus musculus
  siRNA target sequence for D10Ertd749e (NM_025635.1,161-179).
ctcgcggaagaaagacaaa

SEQ ID NO: 685986 - DNA, 19 bp, Mus musculus
  siRNA target sequence for D10Ertd749e (NM_025635.1,163-181).
cgcggaagaaagacaaact

SEQ ID NO: 685987 - DNA, 19 bp, Mus musculus
  siRNA target sequence for D10Ertd749e (NM_025635.1,185-203).
ctgtagccagcttcaagta

SEQ ID NO: 685988 - DNA, 19 bp, Mus musculus
  siRNA target sequence for D10Ertd749e (NM_025635.1,187-205).
gtagccagcttcaagtagt

SEQ ID NO: 685989 - DNA, 19 bp, Mus musculus
  siRNA target sequence for D10Ertd749e (NM_025635.1,195-213).
cttcaagtagtgaacttct

SEQ ID NO: 685990 - DNA, 19 bp, Mus musculus
  siRNA target sequence for D10Ertd749e (NM_025635.1,284-302).
gcaaaaggcaactgaaact

SEQ ID NO: 685991 - DNA, 19 bp, Mus musculus
  siRNA target sequence for D10Ertd749e (NM_025635.1,338-356).
ggatcacgtggatgtcata

SEQ ID NO: 685992 - DNA, 19 bp, Mus musculus
  siRNA target sequence for D10Ertd749e (NM_025635.1,339-357).
gatcacgtggatgtcataa

SEQ ID NO: 685993 - DNA, 19 bp, Mus musculus
  siRNA target sequence for D10Ertd749e (NM_025635.1,342-360).
cacgtggatgtcataaaat

SEQ ID NO: 685994 - DNA, 19 bp, Mus musculus
  siRNA target sequence for D10Ertd749e (NM_025635.1,344-362).
cgtggatgtcataaaatgt

SEQ ID NO: 685995 - DNA, 19 bp, Mus musculus
  siRNA target sequence for D10Ertd749e (NM_025635.1,376-394).
ccttaccccaggttaaaga

SEQ ID NO: 685996 - DNA, 19 bp, Mus musculus
  siRNA target sequence for D10Ertd749e (NM_025635.1,673-691).
gttcgctgcagaataagct

SEQ ID NO: 685997 - DNA, 19 bp, Mus musculus
  siRNA target sequence for D10Ertd749e (NM_025635.1,738-756).
gcccttacagccaaatcca

SEQ ID NO: 685998 - DNA, 19 bp, Mus musculus
  siRNA target sequence for Dact1 (NM_021532.2,309-327).
gctgcgaaggcagttgaat

SEQ ID NO: 685999 - DNA, 19 bp, Mus musculus
  siRNA target sequence for Dact1 (NM_021532.2,310-328).
ctgcgaaggcagttgaatt

SEQ ID NO: 686000 - DNA, 19 bp, Mus musculus
  siRNA target sequence for Dact1 (NM_021532.2,312-330).
gcgaaggcagttgaattgt

SEQ ID NO: 686001 - DNA, 19 bp, Mus musculus
  siRNA target sequence for Dact1 (NM_021532.2,313-331).
cgaaggcagttgaattgtt

SEQ ID NO: 686002 - DNA, 19 bp, Mus musculus
  siRNA target sequence for Dact1 (NM_021532.2,338-356).
gaagagatgccggtttgtt

SEQ ID NO: 686003 - DNA, 19 bp, Mus musculus
  siRNA target sequence for Dact1 (NM_021532.2,341-359).
gagatgccggtttgttgaa

SEQ ID NO: 686004 - DNA, 19 bp, Mus musculus
  siRNA target sequence for Dact1 (NM_021532.2,346-364).
gccggtttgttgaatcagt

SEQ ID NO: 686005 - DNA, 19 bp, Mus musculus
  siRNA target sequence for Dact1 (NM_021532.2,603-621).
caaatctgcagatgtgaat

SEQ ID NO: 686006 - DNA, 19 bp, Mus musculus
  siRNA target sequence for Dact1 (NM_021532.2,672-690).
ctaccccagtccacttcat

SEQ ID NO: 686007 - DNA, 19 bp, Mus musculus
  siRNA target sequence for Dact1 (NM_021532.2,804-822).
cgccaccaaaacagacaat

SEQ ID NO: 686008 - DNA, 19 bp, Mus musculus
  siRNA target sequence for Dact1 (NM_021532.2,919-937).
caccctgtaaggaccaata

SEQ ID NO: 686009 - DNA, 19 bp, Mus musculus
  siRNA target sequence for Dact1 (NM_021532.2,1025-1043).
cgggcagtagtgtgaactt

SEQ ID NO: 686010 - DNA, 19 bp, Mus musculus
  siRNA target sequence for Dact1 (NM_021532.2,1026-1044).
gggcagtagtgtgaacttt

SEQ ID NO: 686011 - DNA, 19 bp, Mus musculus
  siRNA target sequence for Dact1 (NM_021532.2,1069-1087).
cccgctgggggaataacct

SEQ ID NO: 686012 - DNA, 19 bp, Mus musculus
  siRNA target sequence for Dact1 (NM_021532.2,1078-1096).
ggaataacctctttggaaa

SEQ ID NO: 686013 - DNA, 19 bp, Mus musculus
  siRNA target sequence for Dact1 (NM_021532.2,1142-1160).
cagaccagttagaaagcaa

SEQ ID NO: 686014 - DNA, 19 bp, Mus musculus
  siRNA target sequence for Dact1 (NM_021532.2,1311-1329).
cgctgtttctcctaaaaca

SEQ ID NO: 686015 - DNA, 19 bp, Mus musculus
  siRNA target sequence for Dact1 (NM_021532.2,1370-1388).
ccctgcagctcccgaaaaa

SEQ ID NO: 686016 - DNA, 19 bp, Mus musculus
  siRNA target sequence for Dact1 (NM_021532.2,1667-1685).
cagacgactcggatacaaa

SEQ ID NO: 686017 - DNA, 19 bp, Mus musculus
  siRNA target sequence for Dact1 (NM_021532.2,1672-1690).
gactcggatacaaataaga

SEQ ID NO: 686018 - DNA, 19 bp, Mus musculus
  siRNA target sequence for Dact1 (NM_021532.2,1674-1692).
ctcggatacaaataagaaa

SEQ ID NO: 686019 - DNA, 19 bp, Mus musculus
  siRNA target sequence for Dact1 (NM_021532.2,1676-1694).
cggatacaaataagaaatt

SEQ ID NO: 686020 - DNA, 19 bp, Mus musculus
  siRNA target sequence for Dact1 (NM_021532.2,2190-2208).
ccagactctcccgattcaa

SEQ ID NO: 686021 - DNA, 19 bp, Mus musculus
  siRNA target sequence for Dact1 (NM_021532.2,2191-2209).
cagactctcccgattcaaa

SEQ ID NO: 686022 - DNA, 19 bp, Mus musculus
  siRNA target sequence for Dact1 (NM_021532.2,2229-2247).
ccacacccgtcccacaaaa

SEQ ID NO: 686023 - DNA, 19 bp, Mus musculus
  siRNA target sequence for Dact1 (NM_021532.2,2230-2248).
cacacccgtcccacaaaaa

SEQ ID NO: 686024 - DNA, 19 bp, Mus musculus
  siRNA target sequence for Dact1 (NM_021532.2,2235-2253).
ccgtcccacaaaaaccttt

SEQ ID NO: 686025 - DNA, 19 bp, Mus musculus
  siRNA target sequence for Dact1 (NM_021532.2,2267-2285).
cttcgcacaacctcaagaa

SEQ ID NO: 686026 - DNA, 19 bp, Mus musculus
  siRNA target sequence for Dact1 (NM_021532.2,2270-2288).
cgcacaacctcaagaagaa

SEQ ID NO: 686027 - DNA, 19 bp, Mus musculus
  siRNA target sequence for Dgcr6 (NM_010047.1,456-474).
gacggaacggtgtttgaaa

SEQ ID NO: 686028 - DNA, 19 bp, Mus musculus
  siRNA target sequence for Dgcr6 (NM_010047.1,460-478).
gaacggtgtttgaaatcgt

SEQ ID NO: 686029 - DNA, 19 bp, Mus musculus
  siRNA target sequence for Dgcr6 (NM_010047.1,763-781).
caggggtagctggtttcta

SEQ ID NO: 686030 - DNA, 19 bp, Mus musculus
  siRNA target sequence for Dgcr6 (NM_010047.1,808-826).
cgctgcagatgaacctatt

SEQ ID NO: 686031 - DNA, 19 bp, Mus musculus
  siRNA target sequence for Dgcr6 (NM_010047.1,812-830).
gcagatgaacctattggaa

SEQ ID NO: 686032 - DNA, 19 bp, Mus musculus
  siRNA target sequence for Fyb (NM_011815.1,157-175).
gctcgccttctggaataca

SEQ ID NO: 686033 - DNA, 19 bp, Mus musculus
  siRNA target sequence for Fyb (NM_011815.1,162-180).
ccttctggaatacaatcaa

SEQ ID NO: 686034 - DNA, 19 bp, Mus musculus
  siRNA target sequence for Fyb (NM_011815.1,229-247).
ccagcagcatgcctaaatt

SEQ ID NO: 686035 - DNA, 19 bp, Mus musculus
  siRNA target sequence for Fyb (NM_011815.1,230-248).
cagcagcatgcctaaattt

SEQ ID NO: 686036 - DNA, 19 bp, Mus musculus
  siRNA target sequence for Fyb (NM_011815.1,264-282).
cccttggcagcgaaaccta

SEQ ID NO: 686037 - DNA, 19 bp, Mus musculus
  siRNA target sequence for Fyb (NM_011815.1,296-314).
gcctgagaaggaacctaaa

SEQ ID NO: 686038 - DNA, 19 bp, Mus musculus
  siRNA target sequence for Fyb (NM_011815.1,309-327).
cctaaacccccgtttttaa

SEQ ID NO: 686039 - DNA, 19 bp, Mus musculus
  siRNA target sequence for Fyb (NM_011815.1,310-328).
ctaaacccccgtttttaaa

SEQ ID NO: 686040 - DNA, 19 bp, Mus musculus
  siRNA target sequence for Fyb (NM_011815.1,472-490).
cacctgggaataaacttca

SEQ ID NO: 686041 - DNA, 19 bp, Mus musculus
  siRNA target sequence for Fyb (NM_011815.1,477-495).
gggaataaacttcacaatt

SEQ ID NO: 686042 - DNA, 19 bp, Mus musculus
  siRNA target sequence for Fyb (NM_011815.1,497-515).
gaaccaagagtctgactta

SEQ ID NO: 686043 - DNA, 19 bp, Mus musculus
  siRNA target sequence for Fyb (NM_011815.1,614-632).
gccagcggcacaagatact

SEQ ID NO: 686044 - DNA, 19 bp, Mus musculus
  siRNA target sequence for Fyb (NM_011815.1,616-634).
cagcggcacaagatactga

SEQ ID NO: 686045 - DNA, 19 bp, Mus musculus
  siRNA target sequence for Fyb (NM_011815.1,880-898).
cgggtctctccaaaaactt

SEQ ID NO: 686046 - DNA, 19 bp, Mus musculus
  siRNA target sequence for Fyb (NM_011815.1,881-899).
gggtctctccaaaaacttt

SEQ ID NO: 686047 - DNA, 19 bp, Mus musculus
  siRNA target sequence for Fyb (NM_011815.1,883-901).
gtctctccaaaaactttga

SEQ ID NO: 686048 - DNA, 19 bp, Mus musculus
  siRNA target sequence for Fyb (NM_011815.1,927-945).
gaccttgcaaagaacatct

SEQ ID NO: 686049 - DNA, 19 bp, Mus musculus
  siRNA target sequence for Fyb (NM_011815.1,1326-1344).
gacctgaaacatcctataa

SEQ ID NO: 686050 - DNA, 19 bp, Mus musculus
  siRNA target sequence for Fyb (NM_011815.1,1339-1357).
ctataaatgacgaaaatca

SEQ ID NO: 686051 - DNA, 19 bp, Mus musculus
  siRNA target sequence for Fyb (NM_011815.1,1373-1391).
ctctgatggtactggaaat

SEQ ID NO: 686052 - DNA, 19 bp, Mus musculus
  siRNA target sequence for Fyb (NM_011815.1,1427-1445).
cgaagacatagattcatct

SEQ ID NO: 686053 - DNA, 19 bp, Mus musculus
  siRNA target sequence for Fyb (NM_011815.1,1433-1451).
catagattcatctaaggaa

SEQ ID NO: 686054 - DNA, 19 bp, Mus musculus
  siRNA target sequence for Fyb (NM_011815.1,1486-1504).
ggttggaactagaacgaaa

SEQ ID NO: 686055 - DNA, 19 bp, Mus musculus
  siRNA target sequence for Fyb (NM_011815.1,1700-1718).
gactgcaagggggtcatat

SEQ ID NO: 686056 - DNA, 19 bp, Mus musculus
  siRNA target sequence for Fyb (NM_011815.1,1704-1722).
gcaagggggtcatatggtt

SEQ ID NO: 686057 - DNA, 19 bp, Mus musculus
  siRNA target sequence for Fyb (NM_011815.1,1710-1728).
gggtcatatggttatatta

SEQ ID NO: 686058 - DNA, 19 bp, Mus musculus
  siRNA target sequence for Fyb (NM_011815.1,1711-1729).
ggtcatatggttatattaa

SEQ ID NO: 686059 - DNA, 19 bp, Mus musculus
  siRNA target sequence for Fyb (NM_011815.1,1732-1750).
caactgccgtggagattga

SEQ ID NO: 686060 - DNA, 19 bp, Mus musculus
  siRNA target sequence for Fyb (NM_011815.1,1739-1757).
cgtggagattgactatgat

SEQ ID NO: 686061 - DNA, 19 bp, Mus musculus
  siRNA target sequence for Fyb (NM_011815.1,1793-1811).
cccaccaagacttgttgaa

SEQ ID NO: 686062 - DNA, 19 bp, Mus musculus
  siRNA target sequence for Fyb (NM_011815.1,1903-1921).
caacagacgacgagatcta

SEQ ID NO: 686063 - DNA, 19 bp, Mus musculus
  siRNA target sequence for Fyb (NM_011815.1,1997-2015).
ggggattttgaagatgtta

SEQ ID NO: 686064 - DNA, 19 bp, Mus musculus
  siRNA target sequence for Fyb (NM_011815.1,2041-2059).
gcattcgagagaaacctaa

SEQ ID NO: 686065 - DNA, 19 bp, Mus musculus
  siRNA target sequence for Fyb (NM_011815.1,2046-2064).
cgagagaaacctaaagtct

SEQ ID NO: 686066 - DNA, 19 bp, Mus musculus
  siRNA target sequence for Fyb (NM_011815.1,2061-2079).
gtctctgaatcagacaata

SEQ ID NO: 686067 - DNA, 19 bp, Mus musculus
  siRNA target sequence for Fyb (NM_011815.1,2065-2083).
ctgaatcagacaataatga

SEQ ID NO: 686068 - DNA, 19 bp, Mus musculus
  siRNA target sequence for Fyb (NM_011815.1,2075-2093).
caataatgaaggttcatct

SEQ ID NO: 686069 - DNA, 19 bp, Mus musculus
  siRNA target sequence for Fyb (NM_011815.1,2123-2141).
gggagaagaagtttacgat

SEQ ID NO: 686070 - DNA, 19 bp, Mus musculus
  siRNA target sequence for Fyb (NM_011815.1,2180-2198).
gatgagtcaaggaatgagt

SEQ ID NO: 686071 - DNA, 19 bp, Mus musculus
  siRNA target sequence for Fyb (NM_011815.1,2265-2283).
gacctcaggaaaaaattta

SEQ ID NO: 686072 - DNA, 19 bp, Mus musculus
  siRNA target sequence for Fyb (NM_011815.1,2285-2303).
gtacgacggtgaaattcga

SEQ ID NO: 686073 - DNA, 19 bp, Mus musculus
  siRNA target sequence for Fyb (NM_011815.1,2291-2309).
cggtgaaattcgagttcta

SEQ ID NO: 686074 - DNA, 19 bp, Mus musculus
  siRNA target sequence for Fyb (NM_011815.1,2293-2311).
gtgaaattcgagttctata

SEQ ID NO: 686075 - DNA, 19 bp, Mus musculus
  siRNA target sequence for Fyb (NM_011815.1,2301-2319).
cgagttctatattcaacta

SEQ ID NO: 686076 - DNA, 19 bp, Mus musculus
  siRNA target sequence for Fyb (NM_011815.1,2302-2320).
gagttctatattcaactaa

SEQ ID NO: 686077 - DNA, 19 bp, Mus musculus
  siRNA target sequence for Fyb (NM_011815.1,2322-2340).
gttgcgtcctccttaacct

SEQ ID NO: 686078 - DNA, 19 bp, Mus musculus
  siRNA target sequence for Fyb (NM_011815.1,2329-2347).
cctccttaacctctaaaaa

SEQ ID NO: 686079 - DNA, 19 bp, Mus musculus
  siRNA target sequence for Fyb (NM_011815.1,2357-2375).
gagagatctgcagataaaa

SEQ ID NO: 686080 - DNA, 19 bp, Mus musculus
  siRNA target sequence for Fyb (NM_011815.1,2379-2397).
ggggagtcactcgaagtta

SEQ ID NO: 686081 - DNA, 19 bp, Mus musculus
  siRNA target sequence for Fyb (NM_011815.1,2380-2398).
gggagtcactcgaagttat

SEQ ID NO: 686082 - DNA, 19 bp, Mus musculus
  siRNA target sequence for Fyb (NM_011815.1,2381-2399).
ggagtcactcgaagttata

SEQ ID NO: 686083 - DNA, 19 bp, Mus musculus
  siRNA target sequence for Fyb (NM_011815.1,2384-2402).
gtcactcgaagttatacaa

SEQ ID NO: 686084 - DNA, 19 bp, Mus musculus
  siRNA target sequence for Fyb (NM_011815.1,2407-2425).
cagatgacaccaaagttct

SEQ ID NO: 686085 - DNA, 19 bp, Mus musculus
  siRNA target sequence for Fyb (NM_011815.1,2431-2449).
ggaatgaagagggcaaata

SEQ ID NO: 686086 - DNA, 19 bp, Mus musculus
  siRNA target sequence for Fyb (NM_011815.1,2432-2450).
gaatgaagagggcaaatat

SEQ ID NO: 686087 - DNA, 19 bp, Mus musculus
  siRNA target sequence for Gcc1 (NM_028900.1,392-410).
caagtaagaaggatctctt

SEQ ID NO: 686088 - DNA, 19 bp, Mus musculus
  siRNA target sequence for Gcc1 (NM_028900.1,416-434).
ccatcgagacacagaaaaa

SEQ ID NO: 686089 - DNA, 19 bp, Mus musculus
  siRNA target sequence for Gcc1 (NM_028900.1,469-487).
gtggtgcgtgcctataaaa

SEQ ID NO: 686090 - DNA, 19 bp, Mus musculus
  siRNA target sequence for Gcc1 (NM_028900.1,661-679).
gataccgcagccagtctta

SEQ ID NO: 686091 - DNA, 19 bp, Mus musculus
  siRNA target sequence for Gcc1 (NM_028900.1,666-684).
cgcagccagtcttacaagt

SEQ ID NO: 686092 - DNA, 19 bp, Mus musculus
  siRNA target sequence for Gcc1 (NM_028900.1,766-784).
gagagtggcgttagtagta

SEQ ID NO: 686093 - DNA, 19 bp, Mus musculus
  siRNA target sequence for Gcc1 (NM_028900.1,808-826).
ggtagtgagatggacaaaa

SEQ ID NO: 686094 - DNA, 19 bp, Mus musculus
  siRNA target sequence for Gcc1 (NM_028900.1,911-929).
cttacctggcggataagaa

SEQ ID NO: 686095 - DNA, 19 bp, Mus musculus
  siRNA target sequence for Gcc1 (NM_028900.1,945-963).
cttagaggatgccaataaa

SEQ ID NO: 686096 - DNA, 19 bp, Mus musculus
  siRNA target sequence for Gcc1 (NM_028900.1,1146-1164).
cctggaacttcgcttagaa

SEQ ID NO: 686097 - DNA, 19 bp, Mus musculus
  siRNA target sequence for Gcc1 (NM_028900.1,1333-1351).
gaggctgcccgtcttaaaa

SEQ ID NO: 686098 - DNA, 19 bp, Mus musculus
  siRNA target sequence for Gcc1 (NM_028900.1,1598-1616).
gccggtcctcccttgacat

SEQ ID NO: 686099 - DNA, 19 bp, Mus musculus
  siRNA target sequence for Gcc1 (NM_028900.1,1828-1846).
gagtttgagcggtataaga

SEQ ID NO: 686100 - DNA, 19 bp, Mus musculus
  siRNA target sequence for Gcc1 (NM_028900.1,1852-1870).
gcccaagttgtgctcaaaa

SEQ ID NO: 686101 - DNA, 19 bp, Mus musculus
  siRNA target sequence for Gcc1 (NM_028900.1,2079-2097).
cagggaccgcacactgaaa

SEQ ID NO: 686102 - DNA, 19 bp, Mus musculus
  siRNA target sequence for Gcc1 (NM_028900.1,2081-2099).
gggaccgcacactgaaact

SEQ ID NO: 686103 - DNA, 19 bp, Mus musculus
  siRNA target sequence for Gcc1 (NM_028900.1,2260-2278).
gacacagcctcctcagata

SEQ ID NO: 686104 - DNA, 19 bp, Mus musculus
  siRNA target sequence for Gcc1 (NM_028900.1,2475-2493).
gagccacatcgaaaagaat

SEQ ID NO: 686105 - DNA, 19 bp, Mus musculus
  siRNA target sequence for Gcc1 (NM_028900.1,2477-2495).
gccacatcgaaaagaatat

SEQ ID NO: 686106 - DNA, 19 bp, Mus musculus
  siRNA target sequence for Gcc1 (NM_028900.1,2677-2695).
cttccggcaagagatgata

SEQ ID NO: 686107 - DNA, 19 bp, Mus musculus
  siRNA target sequence for Gcc1 (NM_028900.1,2680-2698).
ccggcaagagatgatagat

SEQ ID NO: 686108 - DNA, 19 bp, Mus musculus
  siRNA target sequence for Gcc1 (NM_028900.1,2681-2699).
cggcaagagatgatagata

SEQ ID NO: 686109 - DNA, 19 bp, Mus musculus
  siRNA target sequence for Gcc1 (NM_028900.1,2683-2701).
gcaagagatgatagatact

SEQ ID NO: 686110 - DNA, 19 bp, Mus musculus
  siRNA target sequence for Gcc1 (NM_028900.1,2687-2705).
gagatgatagatacttttt

SEQ ID NO: 686111 - DNA, 19 bp, Mus musculus
  siRNA target sequence for Gcc1 (NM_028900.1,2754-2772).
gggcaggctcggatttcta

SEQ ID NO: 686112 - DNA, 19 bp, Mus musculus
  siRNA target sequence for Gfap (NM_010277.1,66-84).
ctccttgtctcgaatgact

SEQ ID NO: 686113 - DNA, 19 bp, Mus musculus
  siRNA target sequence for Gfap (NM_010277.1,158-176).
gcgagcgtgcagagatgat

SEQ ID NO: 686114 - DNA, 19 bp, Mus musculus
  siRNA target sequence for Gfap (NM_010277.1,284-302).
ccaaactggctgatgtcta

SEQ ID NO: 686115 - DNA, 19 bp, Mus musculus
  siRNA target sequence for Gfap (NM_010277.1,456-474).
caacctggctgcgtataga

SEQ ID NO: 686116 - DNA, 19 bp, Mus musculus
  siRNA target sequence for Gfap (NM_010277.1,549-567).
gttcttaaggaagatctat

SEQ ID NO: 686117 - DNA, 19 bp, Mus musculus
  siRNA target sequence for Gfap (NM_010277.1,662-680).
gagagattcgcactcaata

SEQ ID NO: 686118 - DNA, 19 bp, Mus musculus
  siRNA target sequence for Gfap (NM_010277.1,718-736).
gagtggtatcggtctaagt

SEQ ID NO: 686119 - DNA, 19 bp, Mus musculus
  siRNA target sequence for Gfap (NM_010277.1,720-738).
gtggtatcggtctaagttt

SEQ ID NO: 686120 - DNA, 19 bp, Mus musculus
  siRNA target sequence for Gfap (NM_010277.1,1173-1191).
gaacatcgtggtaaagact

SEQ ID NO: 686121 - DNA, 19 bp, Mus musculus
  siRNA target sequence for Gfap (NM_010277.1,1201-1219).
cgggatggtgaggtcatta

SEQ ID NO: 686122 - DNA, 19 bp, Mus musculus
  siRNA target sequence for Gfap (NM_010277.1,1202-1220).
gggatggtgaggtcattaa

SEQ ID NO: 686123 - DNA, 19 bp, Mus musculus
  siRNA target sequence for Golga1 (NM_029793.1,352-370).
gcagctccagagaagatct

SEQ ID NO: 686124 - DNA, 19 bp, Mus musculus
  siRNA target sequence for Golga1 (NM_029793.1,416-434).
ggccagactttctgactat

SEQ ID NO: 686125 - DNA, 19 bp, Mus musculus
  siRNA target sequence for Golga1 (NM_029793.1,436-454).
ctgaacaggtccgaaactt

SEQ ID NO: 686126 - DNA, 19 bp, Mus musculus
  siRNA target sequence for Golga1 (NM_029793.1,447-465).
cgaaacttgcagaagataa

SEQ ID NO: 686127 - DNA, 19 bp, Mus musculus
  siRNA target sequence for Golga1 (NM_029793.1,473-491).
gcttgaaattgcattagaa

SEQ ID NO: 686128 - DNA, 19 bp, Mus musculus
  siRNA target sequence for Golga1 (NM_029793.1,474-492).
cttgaaattgcattagaaa

SEQ ID NO: 686129 - DNA, 19 bp, Mus musculus
  siRNA target sequence for Golga1 (NM_029793.1,489-507).
gaaaaacaccaggattctt

SEQ ID NO: 686130 - DNA, 19 bp, Mus musculus
  siRNA target sequence for Golga1 (NM_029793.1,505-523).
cttccatgcggaaatttca

SEQ ID NO: 686131 - DNA, 19 bp, Mus musculus
  siRNA target sequence for Golga1 (NM_029793.1,508-526).
ccatgcggaaatttcaaga

SEQ ID NO: 686132 - DNA, 19 bp, Mus musculus
  siRNA target sequence for Golga1 (NM_029793.1,509-527).
catgcggaaatttcaagaa

SEQ ID NO: 686133 - DNA, 19 bp, Mus musculus
  siRNA target sequence for Golga1 (NM_029793.1,655-673).
ctcagctgcaagaagtaaa

SEQ ID NO: 686134 - DNA, 19 bp, Mus musculus
  siRNA target sequence for Golga1 (NM_029793.1,680-698).
gagcttgagcctttttcaa

SEQ ID NO: 686135 - DNA, 19 bp, Mus musculus
  siRNA target sequence for Golga1 (NM_029793.1,727-745).
ggttccagcagcaggaaat

SEQ ID NO: 686136 - DNA, 19 bp, Mus musculus
  siRNA target sequence for Golga1 (NM_029793.1,813-831).
gcacgaaccagggaactta

SEQ ID NO: 686137 - DNA, 19 bp, Mus musculus
  siRNA target sequence for Golga1 (NM_029793.1,814-832).
cacgaaccagggaacttaa

SEQ ID NO: 686138 - DNA, 19 bp, Mus musculus
  siRNA target sequence for Golga1 (NM_029793.1,1118-1136).
gagactagaacagaattta

SEQ ID NO: 686139 - DNA, 19 bp, Mus musculus
  siRNA target sequence for Golga1 (NM_029793.1,1177-1195).
cagttgctgaacagaatct

SEQ ID NO: 686140 - DNA, 19 bp, Mus musculus
  siRNA target sequence for Golga1 (NM_029793.1,1308-1326).
cagctaagccagagtagaa

SEQ ID NO: 686141 - DNA, 19 bp, Mus musculus
  siRNA target sequence for Golga1 (NM_029793.1,1352-1370).
gatccagaagcttatcact

SEQ ID NO: 686142 - DNA, 19 bp, Mus musculus
  siRNA target sequence for Golga1 (NM_029793.1,1356-1374).
cagaagcttatcactacaa

SEQ ID NO: 686143 - DNA, 19 bp, Mus musculus
  siRNA target sequence for Golga1 (NM_029793.1,1444-1462).
cactggaggcccaaattga

SEQ ID NO: 686144 - DNA, 19 bp, Mus musculus
  siRNA target sequence for Golga1 (NM_029793.1,1573-1591).
ccttacaacatcaccaatt

SEQ ID NO: 686145 - DNA, 19 bp, Mus musculus
  siRNA target sequence for Golga1 (NM_029793.1,1586-1604).
ccaattggaactaaagaaa

SEQ ID NO: 686146 - DNA, 19 bp, Mus musculus
  siRNA target sequence for Golga1 (NM_029793.1,1709-1727).
gttgacagccatcatagaa

SEQ ID NO: 686147 - DNA, 19 bp, Mus musculus
  siRNA target sequence for Golga1 (NM_029793.1,2006-2024).
ggttggagccagtgatcta

SEQ ID NO: 686148 - DNA, 19 bp, Mus musculus
  siRNA target sequence for Golga1 (NM_029793.1,2011-2029).
gagccagtgatctaaagca

SEQ ID NO: 686149 - DNA, 19 bp, Mus musculus
  siRNA target sequence for Golga1 (NM_029793.1,2060-2078).
gcaacttatcgagaaaaat

SEQ ID NO: 686150 - DNA, 19 bp, Mus musculus
  siRNA target sequence for Golga1 (NM_029793.1,2061-2079).
caacttatcgagaaaaata

SEQ ID NO: 686151 - DNA, 19 bp, Mus musculus
  siRNA target sequence for Golga1 (NM_029793.1,2125-2143).
ctctacagaaagagttgaa

SEQ ID NO: 686152 - DNA, 19 bp, Mus musculus
  siRNA target sequence for Golga1 (NM_029793.1,2188-2206).
gccctgagataccaaatat

SEQ ID NO: 686153 - DNA, 19 bp, Mus musculus
  siRNA target sequence for Golga1 (NM_029793.1,2208-2226).
gccccttctgtcactaata

SEQ ID NO: 686154 - DNA, 19 bp, Mus musculus
  siRNA target sequence for Golga1 (NM_029793.1,2209-2227).
ccccttctgtcactaataa

SEQ ID NO: 686155 - DNA, 19 bp, Mus musculus
  siRNA target sequence for Golga1 (NM_029793.1,2215-2233).
ctgtcactaataatactga

SEQ ID NO: 686156 - DNA, 19 bp, Mus musculus
  siRNA target sequence for Golga1 (NM_029793.1,2241-2259).
gatgcccgagagatcaact

SEQ ID NO: 686157 - DNA, 19 bp, Mus musculus
  siRNA target sequence for Golga1 (NM_029793.1,2245-2263).
cccgagagatcaactttga

SEQ ID NO: 686158 - DNA, 19 bp, Mus musculus
  siRNA target sequence for Golga1 (NM_029793.1,2252-2270).
gatcaactttgaatacctt

SEQ ID NO: 686159 - DNA, 19 bp, Mus musculus
  siRNA target sequence for Golga1 (NM_029793.1,2291-2309).
catgtcctgtcgagaatct

SEQ ID NO: 686160 - DNA, 19 bp, Mus musculus
  siRNA target sequence for Golga1 (NM_029793.1,2308-2326).
ctgaggcttttcatctcat

SEQ ID NO: 686161 - DNA, 19 bp, Mus musculus
  siRNA target sequence for Golga1 (NM_029793.1,2310-2328).
gaggcttttcatctcataa

SEQ ID NO: 686162 - DNA, 19 bp, Mus musculus
  siRNA target sequence for Golga1 (NM_029793.1,2402-2420).
gtcttggtttggatccaaa

SEQ ID NO: 686163 - DNA, 19 bp, Mus musculus
  siRNA target sequence for Golga1 (NM_029793.1,2434-2452).
gcagcatccggccatctat

SEQ ID NO: 686164 - DNA, 19 bp, Mus musculus
  siRNA target sequence for Golga2 (NM_133852.1,1530-1548).
gtcaggctgaccaatgaga

SEQ ID NO: 686165 - DNA, 19 bp, Mus musculus
  siRNA target sequence for Golga2 (NM_133852.1,1896-1914).
caggagcgcctaaaagcta

SEQ ID NO: 686166 - DNA, 19 bp, Mus musculus
  siRNA target sequence for Golga2 (NM_133852.1,2055-2073).
gccatggtggcattcttta

SEQ ID NO: 686167 - DNA, 19 bp, Mus musculus
  siRNA target sequence for Golga2 (NM_133852.1,2056-2074).
ccatggtggcattctttaa

SEQ ID NO: 686168 - DNA, 19 bp, Mus musculus
  siRNA target sequence for Golga2 (NM_133852.1,2057-2075).
catggtggcattctttaat

SEQ ID NO: 686169 - DNA, 19 bp, Mus musculus
  siRNA target sequence for Golga2 (NM_133852.1,2167-2185).
cagccccagtccaaagcaa

SEQ ID NO: 686170 - DNA, 19 bp, Mus musculus
  siRNA target sequence for Golga2 (NM_133852.1,2175-2193).
gtccaaagcaagcttgaaa

SEQ ID NO: 686171 - DNA, 19 bp, Mus musculus
  siRNA target sequence for Golga2 (NM_133852.1,2242-2260).
gcaatcaggccctacatgt

SEQ ID NO: 686172 - DNA, 19 bp, Mus musculus
  siRNA target sequence for Golga2 (NM_133852.1,2328-2346).
gtagaggagcttgaacatt

SEQ ID NO: 686173 - DNA, 19 bp, Mus musculus
  siRNA target sequence for Golga2 (NM_133852.1,2387-2405).
gtacattgccctttaccaa

SEQ ID NO: 686174 - DNA, 19 bp, Mus musculus
  siRNA target sequence for Golga2 (NM_133852.1,2529-2547).
gtgaacgagcgcaatgaat

SEQ ID NO: 686175 - DNA, 19 bp, Mus musculus
  siRNA target sequence for Golga2 (NM_133852.1,2660-2678).
gagcctggctgacgatata

SEQ ID NO: 686176 - DNA, 19 bp, Mus musculus
  siRNA target sequence for Golga4 (NM_018748.2,358-376).
cagatggtgtcagtaaaga

SEQ ID NO: 686177 - DNA, 19 bp, Mus musculus
  siRNA target sequence for Golga4 (NM_018748.2,397-415).
cgggtgacacacagacttt

SEQ ID NO: 686178 - DNA, 19 bp, Mus musculus
  siRNA target sequence for Golga4 (NM_018748.2,462-480).
cgaagtcccataaaggaat

SEQ ID NO: 686179 - DNA, 19 bp, Mus musculus
  siRNA target sequence for Golga4 (NM_018748.2,481-499).
ccctgtttcggtcttctaa

SEQ ID NO: 686180 - DNA, 19 bp, Mus musculus
  siRNA target sequence for Golga4 (NM_018748.2,569-587).
ctttgaccccccttctgat

SEQ ID NO: 686181 - DNA, 19 bp, Mus musculus
  siRNA target sequence for Golga4 (NM_018748.2,749-767).
gcttcaaggtatattgagt

SEQ ID NO: 686182 - DNA, 19 bp, Mus musculus
  siRNA target sequence for Golga4 (NM_018748.2,764-782).
gagtcagagtcaagataaa

SEQ ID NO: 686183 - DNA, 19 bp, Mus musculus
  siRNA target sequence for Golga4 (NM_018748.2,907-925).
ctcaggtttctcttctaaa

SEQ ID NO: 686184 - DNA, 19 bp, Mus musculus
  siRNA target sequence for Golga4 (NM_018748.2,1057-1075).
ccgctaaaaccctggaaat

SEQ ID NO: 686185 - DNA, 19 bp, Mus musculus
  siRNA target sequence for Golga4 (NM_018748.2,1115-1133).
gcgctgtaaggagacaatt

SEQ ID NO: 686186 - DNA, 19 bp, Mus musculus
  siRNA target sequence for Golga4 (NM_018748.2,1264-1282).
ctcagttgcgtgatgcaaa

SEQ ID NO: 686187 - DNA, 19 bp, Mus musculus
  siRNA target sequence for Golga4 (NM_018748.2,1271-1289).
gcgtgatgcaaagaactta

SEQ ID NO: 686188 - DNA, 19 bp, Mus musculus
  siRNA target sequence for Golga4 (NM_018748.2,1272-1290).
cgtgatgcaaagaacttaa

SEQ ID NO: 686189 - DNA, 19 bp, Mus musculus
  siRNA target sequence for Golga4 (NM_018748.2,1273-1291).
gtgatgcaaagaacttaat

SEQ ID NO: 686190 - DNA, 19 bp, Mus musculus
  siRNA target sequence for Golga4 (NM_018748.2,1305-1323).
caagataaggggatggtaa

SEQ ID NO: 686191 - DNA, 19 bp, Mus musculus
  siRNA target sequence for Golga4 (NM_018748.2,1308-1326).
gataaggggatggtaataa

SEQ ID NO: 686192 - DNA, 19 bp, Mus musculus
  siRNA target sequence for Golga4 (NM_018748.2,1331-1349).
gacgaagcggcaaatgctt

SEQ ID NO: 686193 - DNA, 19 bp, Mus musculus
  siRNA target sequence for Golga4 (NM_018748.2,1381-1399).
ctcagcttcgtagtcatat

SEQ ID NO: 686194 - DNA, 19 bp, Mus musculus
  siRNA target sequence for Golga4 (NM_018748.2,1383-1401).
cagcttcgtagtcatatca

SEQ ID NO: 686195 - DNA, 19 bp, Mus musculus
  siRNA target sequence for Golga4 (NM_018748.2,1385-1403).
gcttcgtagtcatatcaaa

SEQ ID NO: 686196 - DNA, 19 bp, Mus musculus
  siRNA target sequence for Golga4 (NM_018748.2,1389-1407).
cgtagtcatatcaaacaga

SEQ ID NO: 686197 - DNA, 19 bp, Mus musculus
  siRNA target sequence for Golga4 (NM_018748.2,1390-1408).
gtagtcatatcaaacagat

SEQ ID NO: 686198 - DNA, 19 bp, Mus musculus
  siRNA target sequence for Golga4 (NM_018748.2,1395-1413).
catatcaaacagatgacta

SEQ ID NO: 686199 - DNA, 19 bp, Mus musculus
  siRNA target sequence for Golga4 (NM_018748.2,1487-1505).
gagtacagcccaaaaaact

SEQ ID NO: 686200 - DNA, 19 bp, Mus musculus
  siRNA target sequence for Golga4 (NM_018748.2,1489-1507).
gtacagcccaaaaaactga

SEQ ID NO: 686201 - DNA, 19 bp, Mus musculus
  siRNA target sequence for Golga4 (NM_018748.2,1643-1661).
gaactcagaagaacaagtt

SEQ ID NO: 686202 - DNA, 19 bp, Mus musculus
  siRNA target sequence for Golga4 (NM_018748.2,1780-1798).
gtcgatcagaatatttgaa

SEQ ID NO: 686203 - DNA, 19 bp, Mus musculus
  siRNA target sequence for Golga4 (NM_018748.2,1844-1862).
gttagagctgcagaaaaaa

SEQ ID NO: 686204 - DNA, 19 bp, Mus musculus
  siRNA target sequence for Golga4 (NM_018748.2,1868-1886).
ccttacagagagtgaaaat

SEQ ID NO: 686205 - DNA, 19 bp, Mus musculus
  siRNA target sequence for Golga4 (NM_018748.2,1873-1891).
cagagagtgaaaataaact

SEQ ID NO: 686206 - DNA, 19 bp, Mus musculus
  siRNA target sequence for Golga4 (NM_018748.2,1916-1934).
ggcttaccgaaccagaatt

SEQ ID NO: 686207 - DNA, 19 bp, Mus musculus
  siRNA target sequence for Golga4 (NM_018748.2,1918-1936).
cttaccgaaccagaattct

SEQ ID NO: 686208 - DNA, 19 bp, Mus musculus
  siRNA target sequence for Golga4 (NM_018748.2,1923-1941).
cgaaccagaattcttgaat

SEQ ID NO: 686209 - DNA, 19 bp, Mus musculus
  siRNA target sequence for Golga4 (NM_018748.2,2228-2246).
catacaagacatgaatgaa

SEQ ID NO: 686210 - DNA, 19 bp, Mus musculus
  siRNA target sequence for Golga4 (NM_018748.2,2361-2379).
ggtgatgcagataaaatga

SEQ ID NO: 686211 - DNA, 19 bp, Mus musculus
  siRNA target sequence for Golga4 (NM_018748.2,2362-2380).
gtgatgcagataaaatgaa

SEQ ID NO: 686212 - DNA, 19 bp, Mus musculus
  siRNA target sequence for Golga4 (NM_018748.2,2609-2627).
gcaggccttggccaaacta

SEQ ID NO: 686213 - DNA, 19 bp, Mus musculus
  siRNA target sequence for Golga4 (NM_018748.2,2612-2630).
ggccttggccaaactagat

SEQ ID NO: 686214 - DNA, 19 bp, Mus musculus
  siRNA target sequence for Golga4 (NM_018748.2,2614-2632).
ccttggccaaactagatct

SEQ ID NO: 686215 - DNA, 19 bp, Mus musculus
  siRNA target sequence for Golga4 (NM_018748.2,2922-2940).
cggcaaagcctgatggaaa

SEQ ID NO: 686216 - DNA, 19 bp, Mus musculus
  siRNA target sequence for Golga4 (NM_018748.2,2923-2941).
ggcaaagcctgatggaaaa

SEQ ID NO: 686217 - DNA, 19 bp, Mus musculus
  siRNA target sequence for Golga4 (NM_018748.2,3031-3049).
gtattttgcatgaagaata

SEQ ID NO: 686218 - DNA, 19 bp, Mus musculus
  siRNA target sequence for Golga4 (NM_018748.2,3313-3331).
gggctcatcagcgaaaact

SEQ ID NO: 686219 - DNA, 19 bp, Mus musculus
  siRNA target sequence for Golga4 (NM_018748.2,3314-3332).
ggctcatcagcgaaaactt

SEQ ID NO: 686220 - DNA, 19 bp, Mus musculus
  siRNA target sequence for Golga4 (NM_018748.2,3453-3471).
cgcatagtccagtctgaaa

SEQ ID NO: 686221 - DNA, 19 bp, Mus musculus
  siRNA target sequence for Golga4 (NM_018748.2,3455-3473).
catagtccagtctgaaaaa

SEQ ID NO: 686222 - DNA, 19 bp, Mus musculus
  siRNA target sequence for Golga4 (NM_018748.2,3584-3602).
cctttcggagcgtgaatct

SEQ ID NO: 686223 - DNA, 19 bp, Mus musculus
  siRNA target sequence for Golga4 (NM_018748.2,3901-3919).
ccaagacgaacgaactagt

SEQ ID NO: 686224 - DNA, 19 bp, Mus musculus
  siRNA target sequence for Golga4 (NM_018748.2,4016-4034).
gggccaggtttctgagtta

SEQ ID NO: 686225 - DNA, 19 bp, Mus musculus
  siRNA target sequence for Golga4 (NM_018748.2,4031-4049).
gttagaagcacaacttaca

SEQ ID NO: 686226 - DNA, 19 bp, Mus musculus
  siRNA target sequence for Golga4 (NM_018748.2,4253-4271).
gttagcggagaacatcaat

SEQ ID NO: 686227 - DNA, 19 bp, Mus musculus
  siRNA target sequence for Golga4 (NM_018748.2,4301-4319).
ggagaagaagtctgagatt

SEQ ID NO: 686228 - DNA, 19 bp, Mus musculus
  siRNA target sequence for Golga4 (NM_018748.2,4521-4539).
cattggtccaacaagttct

SEQ ID NO: 686229 - DNA, 19 bp, Mus musculus
  siRNA target sequence for Golga4 (NM_018748.2,4574-4592).
ccagcaccaaagcactatt

SEQ ID NO: 686230 - DNA, 19 bp, Mus musculus
  siRNA target sequence for Golga4 (NM_018748.2,4577-4595).
gcaccaaagcactattaaa

SEQ ID NO: 686231 - DNA, 19 bp, Mus musculus
  siRNA target sequence for Golga4 (NM_018748.2,4581-4599).
caaagcactattaaagact

SEQ ID NO: 686232 - DNA, 19 bp, Mus musculus
  siRNA target sequence for Golga4 (NM_018748.2,4647-4665).
gagcagatatgtttactga

SEQ ID NO: 686233 - DNA, 19 bp, Mus musculus
  siRNA target sequence for Golga4 (NM_018748.2,4673-4691).
ccttgatcggcagaataaa

SEQ ID NO: 686234 - DNA, 19 bp, Mus musculus
  siRNA target sequence for Golga4 (NM_018748.2,4674-4692).
cttgatcggcagaataaaa

SEQ ID NO: 686235 - DNA, 19 bp, Mus musculus
  siRNA target sequence for Golga4 (NM_018748.2,4783-4801).
cagcaagggtcgttgaatt

SEQ ID NO: 686236 - DNA, 19 bp, Mus musculus
  siRNA target sequence for Golga4 (NM_018748.2,4786-4804).
caagggtcgttgaattaga

SEQ ID NO: 686237 - DNA, 19 bp, Mus musculus
  siRNA target sequence for Golga4 (NM_018748.2,4810-4828).
gcgttactcagaggaaaaa

SEQ ID NO: 686238 - DNA, 19 bp, Mus musculus
  siRNA target sequence for Golga4 (NM_018748.2,4833-4851).
gttgagtccctaaatgaaa

SEQ ID NO: 686239 - DNA, 19 bp, Mus musculus
  siRNA target sequence for Golga4 (NM_018748.2,4997-5015).
ctcgctggaagctgaactt

SEQ ID NO: 686240 - DNA, 19 bp, Mus musculus
  siRNA target sequence for Golga4 (NM_018748.2,5071-5089).
gggagctgaaagctttaga

SEQ ID NO: 686241 - DNA, 19 bp, Mus musculus
  siRNA target sequence for Golga4 (NM_018748.2,5329-5347).
cagcggtgtccagatctat

SEQ ID NO: 686242 - DNA, 19 bp, Mus musculus
  siRNA target sequence for Golga4 (NM_018748.2,5403-5421).
cacaaggcctgtaaagaaa

SEQ ID NO: 686243 - DNA, 19 bp, Mus musculus
  siRNA target sequence for Golga4 (NM_018748.2,5432-5450).
gctgcaaagacgtttaagt

SEQ ID NO: 686244 - DNA, 19 bp, Mus musculus
  siRNA target sequence for Golga4 (NM_018748.2,5435-5453).
gcaaagacgtttaagtgaa

SEQ ID NO: 686245 - DNA, 19 bp, Mus musculus
  siRNA target sequence for Golga4 (NM_018748.2,5440-5458).
gacgtttaagtgaaaaaga

SEQ ID NO: 686246 - DNA, 19 bp, Mus musculus
  siRNA target sequence for Golga4 (NM_018748.2,5442-5460).
cgtttaagtgaaaaagaga

SEQ ID NO: 686247 - DNA, 19 bp, Mus musculus
  siRNA target sequence for Golga4 (NM_018748.2,5568-5586).
cttgaagatcacgttttga

SEQ ID NO: 686248 - DNA, 19 bp, Mus musculus
  siRNA target sequence for Golga4 (NM_018748.2,5574-5592).
gatcacgttttgataggat

SEQ ID NO: 686249 - DNA, 19 bp, Mus musculus
  siRNA target sequence for Golga4 (NM_018748.2,5607-5625).
ctcgaagaaaagatgaaat

SEQ ID NO: 686250 - DNA, 19 bp, Mus musculus
  siRNA target sequence for Golga4 (NM_018748.2,5645-5663).
gcccatgggagaagaaact

SEQ ID NO: 686251 - DNA, 19 bp, Mus musculus
  siRNA target sequence for Golga4 (NM_018748.2,5777-5795).
ggagtcggacttagtaaga

SEQ ID NO: 686252 - DNA, 19 bp, Mus musculus
  siRNA target sequence for Golga4 (NM_018748.2,6124-6142).
ccgaggaaaagctcaaaca

SEQ ID NO: 686253 - DNA, 19 bp, Mus musculus
  siRNA target sequence for Golga4 (NM_018748.2,6191-6209).
gatgcgggagtttaacaca

SEQ ID NO: 686254 - DNA, 19 bp, Mus musculus
  siRNA target sequence for Golga4 (NM_018748.2,6395-6413).
ccgtgaagaagaaatgact

SEQ ID NO: 686255 - DNA, 19 bp, Mus musculus
  siRNA target sequence for Golga4 (NM_018748.2,6493-6511).
ccaaggacagtgtaacaat

SEQ ID NO: 686256 - DNA, 19 bp, Mus musculus
  siRNA target sequence for Golga4 (NM_018748.2,6586-6604).
gagaacaggtccataattt

SEQ ID NO: 686257 - DNA, 19 bp, Mus musculus
  siRNA target sequence for Golga4 (NM_018748.2,6611-6629).
ccgtttgaaaagatatgaa

SEQ ID NO: 686258 - DNA, 19 bp, Mus musculus
  siRNA target sequence for Golga4 (NM_018748.2,6706-6724).
gagaacctaccgagtttga

SEQ ID NO: 686259 - DNA, 19 bp, Mus musculus
  siRNA target sequence for Golga4 (NM_018748.2,6723-6741).
gagtatttgcgaaaagtga

SEQ ID NO: 686260 - DNA, 19 bp, Mus musculus
  siRNA target sequence for Golga4 (NM_018748.2,6731-6749).
gcgaaaagtgatgtttgaa

SEQ ID NO: 686261 - DNA, 19 bp, Mus musculus
  siRNA target sequence for Golga4 (NM_018748.2,6732-6750).
cgaaaagtgatgtttgaat

SEQ ID NO: 686262 - DNA, 19 bp, Mus musculus
  siRNA target sequence for Golga4 (NM_018748.2,6821-6839).
ggctcagaaaattttggaa

SEQ ID NO: 686263 - DNA, 19 bp, Mus musculus
  siRNA target sequence for Golga5 (NM_013747.2,856-874).
gaagggctgaagatctttt

SEQ ID NO: 686264 - DNA, 19 bp, Mus musculus
  siRNA target sequence for Golga5 (NM_013747.2,903-921).
gctctcagaaaggagaata

SEQ ID NO: 686265 - DNA, 19 bp, Mus musculus
  siRNA target sequence for Golga5 (NM_013747.2,993-1011).
cagaccggacagaaagcta

SEQ ID NO: 686266 - DNA, 19 bp, Mus musculus
  siRNA target sequence for Golga5 (NM_013747.2,997-1015).
ccggacagaaagctaacta

SEQ ID NO: 686267 - DNA, 19 bp, Mus musculus
  siRNA target sequence for Golga5 (NM_013747.2,998-1016).
cggacagaaagctaactat

SEQ ID NO: 686268 - DNA, 19 bp, Mus musculus
  siRNA target sequence for Golga5 (NM_013747.2,999-1017).
ggacagaaagctaactata

SEQ ID NO: 686269 - DNA, 19 bp, Mus musculus
  siRNA target sequence for Golga5 (NM_013747.2,1000-1018).
gacagaaagctaactatat

SEQ ID NO: 686270 - DNA, 19 bp, Mus musculus
  siRNA target sequence for Golga5 (NM_013747.2,1069-1087).
gcacagcgaacgtgaaagt

SEQ ID NO: 686271 - DNA, 19 bp, Mus musculus
  siRNA target sequence for Golga5 (NM_013747.2,1755-1773).
gctgaccaggtgctaagtt

SEQ ID NO: 686272 - DNA, 19 bp, Mus musculus
  siRNA target sequence for Golga5 (NM_013747.2,1802-1820).
gagtgaaaagtcacgaata

SEQ ID NO: 686273 - DNA, 19 bp, Mus musculus
  siRNA target sequence for Golga5 (NM_013747.2,1816-1834).
gaataatgcaggatcacaa

SEQ ID NO: 686274 - DNA, 19 bp, Mus musculus
  siRNA target sequence for Golga5 (NM_013747.2,1890-1908).
gaagctgatgccactctaa

SEQ ID NO: 686275 - DNA, 19 bp, Mus musculus
  siRNA target sequence for Golga5 (NM_013747.2,1950-1968).
gctgcacgccttaacaaaa

SEQ ID NO: 686276 - DNA, 19 bp, Mus musculus
  siRNA target sequence for Golga5 (NM_013747.2,1951-1969).
ctgcacgccttaacaaaat

SEQ ID NO: 686277 - DNA, 19 bp, Mus musculus
  siRNA target sequence for Golga5 (NM_013747.2,1988-2006).
cttggcagaagcagttact

SEQ ID NO: 686278 - DNA, 19 bp, Mus musculus
  siRNA target sequence for Golga5 (NM_013747.2,2092-2110).
cggctaagcaggagttagt

SEQ ID NO: 686279 - DNA, 19 bp, Mus musculus
  siRNA target sequence for Golga5 (NM_013747.2,2093-2111).
ggctaagcaggagttagtt

SEQ ID NO: 686280 - DNA, 19 bp, Mus musculus
  siRNA target sequence for Golga5 (NM_013747.2,2095-2113).
ctaagcaggagttagttga

SEQ ID NO: 686281 - DNA, 19 bp, Mus musculus
  siRNA target sequence for Golga5 (NM_013747.2,2112-2130).
gactacaagcagaaagcta

SEQ ID NO: 686282 - DNA, 19 bp, Mus musculus
  siRNA target sequence for Golga5 (NM_013747.2,2135-2153).
gatactccaatctaaagaa

SEQ ID NO: 686283 - DNA, 19 bp, Mus musculus
  siRNA target sequence for Golga5 (NM_013747.2,2209-2227).
cggctagcagcatggaatt

SEQ ID NO: 686284 - DNA, 19 bp, Mus musculus
  siRNA target sequence for Golga5 (NM_013747.2,2212-2230).
ctagcagcatggaattgga

SEQ ID NO: 686285 - DNA, 19 bp, Mus musculus
  siRNA target sequence for Golga5 (NM_013747.2,2324-2342).
ggctcagcaggttagtgaa

SEQ ID NO: 686286 - DNA, 19 bp, Mus musculus
  siRNA target sequence for Golga5 (NM_013747.2,2333-2351).
ggttagtgaagctgaatca

SEQ ID NO: 686287 - DNA, 19 bp, Mus musculus
  siRNA target sequence for Golga5 (NM_013747.2,2350-2368).
cagcaagagaacaattaca

SEQ ID NO: 686288 - DNA, 19 bp, Mus musculus
  siRNA target sequence for Golga5 (NM_013747.2,2389-2407).
ctaagcagaggacatctaa

SEQ ID NO: 686289 - DNA, 19 bp, Mus musculus
  siRNA target sequence for Golga5 (NM_013747.2,2463-2481).
gaggatctgcatagaacaa

SEQ ID NO: 686290 - DNA, 19 bp, Mus musculus
  siRNA target sequence for Golga5 (NM_013747.2,2466-2484).
gatctgcatagaacaaaga

SEQ ID NO: 686291 - DNA, 19 bp, Mus musculus
  siRNA target sequence for Golga5 (NM_013747.2,2488-2506).
cactgcaaagcaggattaa

SEQ ID NO: 686292 - DNA, 19 bp, Mus musculus
  siRNA target sequence for Golga5 (NM_013747.2,2492-2510).
gcaaagcaggattaaagat

SEQ ID NO: 686293 - DNA, 19 bp, Mus musculus
  siRNA target sequence for Golga5 (NM_013747.2,2493-2511).
caaagcaggattaaagata

SEQ ID NO: 686294 - DNA, 19 bp, Mus musculus
  siRNA target sequence for Golga5 (NM_013747.2,2541-2559).
cagcttaccaacaaaactt

SEQ ID NO: 686295 - DNA, 19 bp, Mus musculus
  siRNA target sequence for Golga5 (NM_013747.2,2543-2561).
gcttaccaacaaaacttta

SEQ ID NO: 686296 - DNA, 19 bp, Mus musculus
  siRNA target sequence for Golga5 (NM_013747.2,2544-2562).
cttaccaacaaaactttaa

SEQ ID NO: 686297 - DNA, 19 bp, Mus musculus
  siRNA target sequence for Golga5 (NM_013747.2,2770-2788).
ggacacgcctgcgaaatgt

SEQ ID NO: 686298 - DNA, 19 bp, Mus musculus
  siRNA target sequence for Golga5 (NM_013747.2,2771-2789).
gacacgcctgcgaaatgtt

SEQ ID NO: 686299 - DNA, 19 bp, Mus musculus
  siRNA target sequence for Golga5 (NM_013747.2,2780-2798).
gcgaaatgttcctgttctt

SEQ ID NO: 686300 - DNA, 19 bp, Mus musculus
  siRNA target sequence for Golga5 (NM_013747.2,2781-2799).
cgaaatgttcctgttcttt

SEQ ID NO: 686301 - DNA, 19 bp, Mus musculus
  siRNA target sequence for Golga5 (NM_013747.2,2815-2833).
ctaatctggcaggaatgta

SEQ ID NO: 686302 - DNA, 19 bp, Mus musculus
  siRNA target sequence for Golga5 (NM_013747.2,2831-2849).
gtatgggaaggttcgaaaa

SEQ ID NO: 686303 - DNA, 19 bp, Mus musculus
  siRNA target sequence for Golga5 (NM_013747.2,2858-2876).
ctccattgaccaatttagt

SEQ ID NO: 686304 - DNA, 19 bp, Mus musculus
  siRNA target sequence for Golga5 (NM_013747.2,2860-2878).
ccattgaccaatttagtat

SEQ ID NO: 686305 - DNA, 19 bp, Mus musculus
  siRNA target sequence for Golga5 (NM_013747.2,2861-2879).
cattgaccaatttagtatt

SEQ ID NO: 686306 - DNA, 19 bp, Mus musculus
  siRNA target sequence for Golga5 (NM_013747.2,2880-2898).
cgcctgggaatttttctca

SEQ ID NO: 686307 - DNA, 19 bp, Mus musculus
  siRNA target sequence for Golga5 (NM_013747.2,2906-2924).
ccccatagcacgagtgttt

SEQ ID NO: 686308 - DNA, 19 bp, Mus musculus
  siRNA target sequence for Golga5 (NM_013747.2,2913-2931).
gcacgagtgtttgtaatca

SEQ ID NO: 686309 - DNA, 19 bp, Mus musculus
  siRNA target sequence for Golga5 (NM_013747.2,2914-2932).
cacgagtgtttgtaatcat

SEQ ID NO: 686310 - DNA, 19 bp, Mus musculus
  siRNA target sequence for Golga5 (NM_013747.2,2916-2934).
cgagtgtttgtaatcatct

SEQ ID NO: 686311 - DNA, 19 bp, Mus musculus
  siRNA target sequence for Golga5 (NM_013747.2,2966-2984).
cgtactgctgacttactca

SEQ ID NO: 686312 - DNA, 19 bp, Mus musculus
  siRNA target sequence for Ina (NM_146100.2,63-81).
ggatcggagcactatttgt

SEQ ID NO: 686313 - DNA, 19 bp, Mus musculus
  siRNA target sequence for Ina (NM_146100.2,812-830).
cgtggccgtggctaaacca

SEQ ID NO: 686314 - DNA, 19 bp, Mus musculus
  siRNA target sequence for Ina (NM_146100.2,1011-1029).
caggcacgtaccattgaga

SEQ ID NO: 686315 - DNA, 19 bp, Mus musculus
  siRNA target sequence for Ina (NM_146100.2,1013-1031).
ggcacgtaccattgagata

SEQ ID NO: 686316 - DNA, 19 bp, Mus musculus
  siRNA target sequence for Ina (NM_146100.2,1015-1033).
cacgtaccattgagataga

SEQ ID NO: 686317 - DNA, 19 bp, Mus musculus
  siRNA target sequence for Ina (NM_146100.2,1038-1056).
ctgcgcggagccaatgagt

SEQ ID NO: 686318 - DNA, 19 bp, Mus musculus
  siRNA target sequence for Ina (NM_146100.2,1315-1333).
ccaatcccagttatttgct

SEQ ID NO: 686319 - DNA, 19 bp, Mus musculus
  siRNA target sequence for Ina (NM_146100.2,1450-1468).
ccaaggtaggggaaggttt

SEQ ID NO: 686320 - DNA, 19 bp, Mus musculus
  siRNA target sequence for Ina (NM_146100.2,1479-1497).
ctgggggaagcggtaatat

SEQ ID NO: 686321 - DNA, 19 bp, Mus musculus
  siRNA target sequence for Ina (NM_146100.2,1481-1499).
gggggaagcggtaatatct

SEQ ID NO: 686322 - DNA, 19 bp, Mus musculus
  siRNA target sequence for Ina (NM_146100.2,1482-1500).
ggggaagcggtaatatcta

SEQ ID NO: 686323 - DNA, 19 bp, Mus musculus
  siRNA target sequence for Ina (NM_146100.2,1490-1508).
ggtaatatctacgaagaaa

SEQ ID NO: 686324 - DNA, 19 bp, Mus musculus
  siRNA target sequence for Krt1-1 (NM_010659.1,1296-1314).
gccatgcaactcctttgta

SEQ ID NO: 686325 - DNA, 19 bp, Mus musculus
  siRNA target sequence for Krt1-12 (NM_010661.1,76-94).
gaggtcttcctcacagaat

SEQ ID NO: 686326 - DNA, 19 bp, Mus musculus
  siRNA target sequence for Krt1-12 (NM_010661.1,205-223).
catgtttggttctagttct

SEQ ID NO: 686327 - DNA, 19 bp, Mus musculus
  siRNA target sequence for Krt1-12 (NM_010661.1,528-546).
ctgggtctcagagtgatta

SEQ ID NO: 686328 - DNA, 19 bp, Mus musculus
  siRNA target sequence for Krt1-12 (NM_010661.1,540-558).
gtgattacagtaaatacta

SEQ ID NO: 686329 - DNA, 19 bp, Mus musculus
  siRNA target sequence for Krt1-12 (NM_010661.1,903-921).
ccaaggtcctcaatgaaat

SEQ ID NO: 686330 - DNA, 19 bp, Mus musculus
  siRNA target sequence for Krt1-12 (NM_010661.1,907-925).
ggtcctcaatgaaatgaga

SEQ ID NO: 686331 - DNA, 19 bp, Mus musculus
  siRNA target sequence for Krt1-12 (NM_010661.1,993-1011).
gagagctccgaaaagagat

SEQ ID NO: 686332 - DNA, 19 bp, Mus musculus
  siRNA target sequence for Krt1-12 (NM_010661.1,1434-1452).
cagtcgtgcaggagatagt

SEQ ID NO: 686333 - DNA, 19 bp, Mus musculus
  siRNA target sequence for Krt1-12 (NM_010661.1,1438-1456).
cgtgcaggagatagtgaat

SEQ ID NO: 686334 - DNA, 19 bp, Mus musculus
  siRNA target sequence for Krt1-13 (NM_010662.1,67-85).
cttggaggaggccgtaata

SEQ ID NO: 686335 - DNA, 19 bp, Mus musculus
  siRNA target sequence for Krt1-13 (NM_010662.1,70-88).
ggaggaggccgtaatatct

SEQ ID NO: 686336 - DNA, 19 bp, Mus musculus
  siRNA target sequence for Krt1-13 (NM_010662.1,423-441).
gcgggactacagtgcttat

SEQ ID NO: 686337 - DNA, 19 bp, Mus musculus
  siRNA target sequence for Krt1-13 (NM_010662.1,424-442).
cgggactacagtgcttatt

SEQ ID NO: 686338 - DNA, 19 bp, Mus musculus
  siRNA target sequence for Krt1-13 (NM_010662.1,500-518).
ggatcatcctggagattga

SEQ ID NO: 686339 - DNA, 19 bp, Mus musculus
  siRNA target sequence for Krt1-13 (NM_010662.1,899-917).
cctccaacgctgaaatgat

SEQ ID NO: 686340 - DNA, 19 bp, Mus musculus
  siRNA target sequence for Krt1-13 (NM_010662.1,1236-1254).
ctccggaggaaataacact

SEQ ID NO: 686341 - DNA, 19 bp, Mus musculus
  siRNA target sequence for Krt1-13 (NM_010662.1,1240-1258).
ggaggaaataacactacta

SEQ ID NO: 686342 - DNA, 19 bp, Mus musculus
  siRNA target sequence for Krt1-13 (NM_010662.1,1294-1312).
ccagatttccgaaagtatt

SEQ ID NO: 686343 - DNA, 19 bp, Mus musculus
  siRNA target sequence for Krt1-15 (NM_008469.1,18-36).
gcaaacgtcttccactttt

SEQ ID NO: 686344 - DNA, 19 bp, Mus musculus
  siRNA target sequence for Krt1-15 (NM_008469.1,112-130).
ggtggaagccgaagtatct

SEQ ID NO: 686345 - DNA, 19 bp, Mus musculus
  siRNA target sequence for Krt1-15 (NM_008469.1,431-449).
gggactacagccattactt

SEQ ID NO: 686346 - DNA, 19 bp, Mus musculus
  siRNA target sequence for Krt1-15 (NM_008469.1,432-450).
ggactacagccattacttt

SEQ ID NO: 686347 - DNA, 19 bp, Mus musculus
  siRNA target sequence for Krt1-15 (NM_008469.1,433-451).
gactacagccattacttta

SEQ ID NO: 686348 - DNA, 19 bp, Mus musculus
  siRNA target sequence for Krt1-15 (NM_008469.1,904-922).
gcgtctaacacagaaatga

SEQ ID NO: 686349 - DNA, 19 bp, Mus musculus
  siRNA target sequence for Krt1-15 (NM_008469.1,905-923).
cgtctaacacagaaatgat

SEQ ID NO: 686350 - DNA, 19 bp, Mus musculus
  siRNA target sequence for Krt1-15 (NM_008469.1,967-985).
caggggctagagattgagt

SEQ ID NO: 686351 - DNA, 19 bp, Mus musculus
  siRNA target sequence for Krt1-15 (NM_008469.1,1283-1301).
gcagcagcaatttccatat

SEQ ID NO: 686352 - DNA, 19 bp, Mus musculus
  siRNA target sequence for Krt1-15 (NM_008469.1,1287-1305).
cagcaatttccatatcagt

SEQ ID NO: 686353 - DNA, 19 bp, Mus musculus
  siRNA target sequence for Krt1-15 (NM_008469.1,1337-1355).
cttcccgtaagagagaaat

SEQ ID NO: 686354 - DNA, 19 bp, Mus musculus
  siRNA target sequence for Krt1-18 (NM_010664.1,404-422).
gagactggggccactactt

SEQ ID NO: 686355 - DNA, 19 bp, Mus musculus
  siRNA target sequence for Krt1-18 (NM_010664.1,410-428).
ggggccactacttcaagat

SEQ ID NO: 686356 - DNA, 19 bp, Mus musculus
  siRNA target sequence for Krt1-18 (NM_010664.1,824-842).
gcgaggaactggacaagta

SEQ ID NO: 686357 - DNA, 19 bp, Mus musculus
  siRNA target sequence for Krt1-18 (NM_010664.1,1283-1301).
gagtggtgtccgagactaa

SEQ ID NO: 686358 - DNA, 19 bp, Mus musculus
  siRNA target sequence for Krt1-19 (NM_008471.1,240-258).
gagtccgcggtggaagttt

SEQ ID NO: 686359 - DNA, 19 bp, Mus musculus
  siRNA target sequence for Krt1-19 (NM_008471.1,242-260).
gtccgcggtggaagtttta

SEQ ID NO: 686360 - DNA, 19 bp, Mus musculus
  siRNA target sequence for Krt1-19 (NM_008471.1,244-262).
ccgcggtggaagttttagt

SEQ ID NO: 686361 - DNA, 19 bp, Mus musculus
  siRNA target sequence for Krt1-19 (NM_008471.1,428-446).
ggaccctcccgagattaca

SEQ ID NO: 686362 - DNA, 19 bp, Mus musculus
  siRNA target sequence for Krt1-19 (NM_008471.1,429-447).
gaccctcccgagattacaa

SEQ ID NO: 686363 - DNA, 19 bp, Mus musculus
  siRNA target sequence for Krt1-19 (NM_008471.1,440-458).
gattacaaccactacttta

SEQ ID NO: 686364 - DNA, 19 bp, Mus musculus
  siRNA target sequence for Krt1-19 (NM_008471.1,469-487).
ggacttgcgcgacaagatt

SEQ ID NO: 686365 - DNA, 19 bp, Mus musculus
  siRNA target sequence for Krt1-19 (NM_008471.1,472-490).
cttgcgcgacaagattctt

SEQ ID NO: 686366 - DNA, 19 bp, Mus musculus
  siRNA target sequence for Krt1-19 (NM_008471.1,1042-1060).
gacggaggcccgttatgga

SEQ ID NO: 686367 - DNA, 19 bp, Mus musculus
  siRNA target sequence for Krt1-19 (NM_008471.1,1083-1101).
gcgtgatcagcggttttga

SEQ ID NO: 686368 - DNA, 19 bp, Mus musculus
  siRNA target sequence for Krt1-19 (NM_008471.1,1084-1102).
cgtgatcagcggttttgaa

SEQ ID NO: 686369 - DNA, 19 bp, Mus musculus
  siRNA target sequence for Krt1-19 (NM_008471.1,1136-1154).
cgccagaaccaggagtata

SEQ ID NO: 686370 - DNA, 19 bp, Mus musculus
  siRNA target sequence for Krt1-19 (NM_008471.1,1225-1243).
ggaagcccactacaacaat

SEQ ID NO: 686371 - DNA, 19 bp, Mus musculus
  siRNA target sequence for Krt1-2 (NM_010665.1,638-656).
ctcggggaccgccttaaca

SEQ ID NO: 686372 - DNA, 19 bp, Mus musculus
  siRNA target sequence for Krt1-2 (NM_010665.1,640-658).
cggggaccgccttaacatt

SEQ ID NO: 686373 - DNA, 19 bp, Mus musculus
  siRNA target sequence for Krt1-2 (NM_010665.1,642-660).
gggaccgccttaacattga

SEQ ID NO: 686374 - DNA, 19 bp, Mus musculus
  siRNA target sequence for Krt1-2 (NM_010665.1,850-868).
gagacgaacagtcaatact

SEQ ID NO: 686375 - DNA, 19 bp, Mus musculus
  siRNA target sequence for Krt1-23 (NM_033373.1,286-304).
cgatcgcctggccacatat

SEQ ID NO: 686376 - DNA, 19 bp, Mus musculus
  siRNA target sequence for Krt1-23 (NM_033373.1,343-361).
gctggaaacccgtatacta

SEQ ID NO: 686377 - DNA, 19 bp, Mus musculus
  siRNA target sequence for Krt1-23 (NM_033373.1,405-423).
cccagtatgaggaaaacat

SEQ ID NO: 686378 - DNA, 19 bp, Mus musculus
  siRNA target sequence for Krt1-23 (NM_033373.1,530-548).
gaaaacgaacactcgttaa

SEQ ID NO: 686379 - DNA, 19 bp, Mus musculus
  siRNA target sequence for Krt1-23 (NM_033373.1,535-553).
cgaacactcgttaaagaaa

SEQ ID NO: 686380 - DNA, 19 bp, Mus musculus
  siRNA target sequence for Krt1-23 (NM_033373.1,582-600).
gaaagaccttggatgatct

SEQ ID NO: 686381 - DNA, 19 bp, Mus musculus
  siRNA target sequence for Krt1-23 (NM_033373.1,593-611).
gatgatctgaccattgtca

SEQ ID NO: 686382 - DNA, 19 bp, Mus musculus
  siRNA target sequence for Krt1-23 (NM_033373.1,743-761).
ccaggggaagatctgatta

SEQ ID NO: 686383 - DNA, 19 bp, Mus musculus
  siRNA target sequence for Krt1-23 (NM_033373.1,744-762).
caggggaagatctgattaa

SEQ ID NO: 686384 - DNA, 19 bp, Mus musculus
  siRNA target sequence for Krt1-23 (NM_033373.1,747-765).
gggaagatctgattaaggt

SEQ ID NO: 686385 - DNA, 19 bp, Mus musculus
  siRNA target sequence for Krt1-23 (NM_033373.1,780-798).
ggcaggaatacgagttaat

SEQ ID NO: 686386 - DNA, 19 bp, Mus musculus
  siRNA target sequence for Krt1-23 (NM_033373.1,781-799).
gcaggaatacgagttaata

SEQ ID NO: 686387 - DNA, 19 bp, Mus musculus
  siRNA target sequence for Krt1-23 (NM_033373.1,782-800).
caggaatacgagttaataa

SEQ ID NO: 686388 - DNA, 19 bp, Mus musculus
  siRNA target sequence for Krt1-23 (NM_033373.1,784-802).
ggaatacgagttaataata

SEQ ID NO: 686389 - DNA, 19 bp, Mus musculus
  siRNA target sequence for Krt1-23 (NM_033373.1,785-803).
gaatacgagttaataataa

SEQ ID NO: 686390 - DNA, 19 bp, Mus musculus
  siRNA target sequence for Krt1-23 (NM_033373.1,881-899).
cctgtacagggcaaccaaa

SEQ ID NO: 686391 - DNA, 19 bp, Mus musculus
  siRNA target sequence for Krt1-23 (NM_033373.1,891-909).
gcaaccaaagtgatatcca

SEQ ID NO: 686392 - DNA, 19 bp, Mus musculus
  siRNA target sequence for Krt1-23 (NM_033373.1,892-910).
caaccaaagtgatatccat

SEQ ID NO: 686393 - DNA, 19 bp, Mus musculus
  siRNA target sequence for Krt1-23 (NM_033373.1,1249-1267).
cactcaagagagtgtcaat

SEQ ID NO: 686394 - DNA, 19 bp, Mus musculus
  siRNA target sequence for Krt1-23 (NM_033373.1,1280-1298).
ctttctcaagtgaatgaga

SEQ ID NO: 686395 - DNA, 19 bp, Mus musculus
  siRNA target sequence for Krt1-23 (NM_033373.1,1286-1304).
caagtgaatgagatccaaa

SEQ ID NO: 686396 - DNA, 19 bp, Mus musculus
  siRNA target sequence for Krt1-23 (NM_033373.1,1295-1313).
gagatccaaaagcatatat

SEQ ID NO: 686397 - DNA, 19 bp, Mus musculus
  siRNA target sequence for Krt1-24 (NM_016880.1,169-187).
cgtggagcccggagtttct

SEQ ID NO: 686398 - DNA, 19 bp, Mus musculus
  siRNA target sequence for Krt1-24 (NM_016880.1,442-460).
cagcaggtgccctatatgt

SEQ ID NO: 686399 - DNA, 19 bp, Mus musculus
  siRNA target sequence for Krt1-24 (NM_016880.1,461-479).
gccccgattaccagtctta

SEQ ID NO: 686400 - DNA, 19 bp, Mus musculus
  siRNA target sequence for Krt1-24 (NM_016880.1,463-481).
cccgattaccagtcttact

SEQ ID NO: 686401 - DNA, 19 bp, Mus musculus
  siRNA target sequence for Krt1-24 (NM_016880.1,464-482).
ccgattaccagtcttactt

SEQ ID NO: 686402 - DNA, 19 bp, Mus musculus
  siRNA target sequence for Krt1-24 (NM_016880.1,779-797).
gcgatcggctcaatgttga

SEQ ID NO: 686403 - DNA, 19 bp, Mus musculus
  siRNA target sequence for Krt1-24 (NM_016880.1,962-980).
cctgccagtcggacatcat

SEQ ID NO: 686404 - DNA, 19 bp, Mus musculus
  siRNA target sequence for Krt1-4 (NM_027563.1,408-426).
gattctgtgtgctaagtct

SEQ ID NO: 686405 - DNA, 19 bp, Mus musculus
  siRNA target sequence for Krt2-1 (NM_008473.1,258-276).
gaagtaagagtcttatgaa

SEQ ID NO: 686406 - DNA, 19 bp, Mus musculus
  siRNA target sequence for Krt2-1 (NM_008473.1,756-774).
cccggacccaaaacttaga

SEQ ID NO: 686407 - DNA, 19 bp, Mus musculus
  siRNA target sequence for Krt2-1 (NM_008473.1,764-782).
caaaacttagacccttttt

SEQ ID NO: 686408 - DNA, 19 bp, Mus musculus
  siRNA target sequence for Krt2-1 (NM_008473.1,775-793).
ccctttttttgagaactat

SEQ ID NO: 686409 - DNA, 19 bp, Mus musculus
  siRNA target sequence for Krt2-1 (NM_008473.1,776-794).
cctttttttgagaactata

SEQ ID NO: 686410 - DNA, 19 bp, Mus musculus
  siRNA target sequence for Krt2-1 (NM_008473.1,1041-1059).
cactctaccaaatggaaat

SEQ ID NO: 686411 - DNA, 19 bp, Mus musculus
  siRNA target sequence for Krt2-1 (NM_008473.1,1156-1174).
ggcccagtatgatagcatt

SEQ ID NO: 686412 - DNA, 19 bp, Mus musculus
  siRNA target sequence for Krt2-1 (NM_008473.1,1234-1252).
gatcactgctggcaaacat

SEQ ID NO: 686413 - DNA, 19 bp, Mus musculus
  siRNA target sequence for Krt2-1 (NM_008473.1,1339-1357).
gaagcagatctcccaaata

SEQ ID NO: 686414 - DNA, 19 bp, Mus musculus
  siRNA target sequence for Krt2-1 (NM_008473.1,1350-1368).
cccaaatacagcagaacat

SEQ ID NO: 686415 - DNA, 19 bp, Mus musculus
  siRNA target sequence for Krt2-1 (NM_008473.1,1672-1690).
cggaggcggtggcagttat

SEQ ID NO: 686416 - DNA, 19 bp, Mus musculus
  siRNA target sequence for Krt2-1 (NM_008473.1,1877-1895).
ggtggcggtggcgttaagt

SEQ ID NO: 686417 - DNA, 19 bp, Mus musculus
  siRNA target sequence for Krt2-1 (NM_008473.1,1903-1921).
cagttctaccgtgaagttt

SEQ ID NO: 686418 - DNA, 19 bp, Mus musculus
  siRNA target sequence for Krt2-1 (NM_008473.1,1905-1923).
gttctaccgtgaagtttgt

SEQ ID NO: 686419 - DNA, 19 bp, Mus musculus
  siRNA target sequence for Krt2-20 (NM_053249.2,446-464).
cgattcgcatccttcatca

SEQ ID NO: 686420 - DNA, 19 bp, Mus musculus
  siRNA target sequence for Krt2-20 (NM_053249.2,447-465).
gattcgcatccttcatcaa

SEQ ID NO: 686421 - DNA, 19 bp, Mus musculus
  siRNA target sequence for Krt2-20 (NM_053249.2,653-671).
gaggcgctggagggttata

SEQ ID NO: 686422 - DNA, 19 bp, Mus musculus
  siRNA target sequence for Krt2-20 (NM_053249.2,657-675).
cgctggagggttataagaa

SEQ ID NO: 686423 - DNA, 19 bp, Mus musculus
  siRNA target sequence for Krt2-20 (NM_053249.2,700-718).
gcgtccctgtgctgagaat

SEQ ID NO: 686424 - DNA, 19 bp, Mus musculus
  siRNA target sequence for Krt2-20 (NM_053249.2,704-722).
ccctgtgctgagaatgagt

SEQ ID NO: 686425 - DNA, 19 bp, Mus musculus
  siRNA target sequence for Krt2-20 (NM_053249.2,794-812).
ctagaacatgagattgagt

SEQ ID NO: 686426 - DNA, 19 bp, Mus musculus
  siRNA target sequence for Krt2-20 (NM_053249.2,918-936).
gcatcgtagccgagatcaa

SEQ ID NO: 686427 - DNA, 19 bp, Mus musculus
  siRNA target sequence for Krt2-20 (NM_053249.2,1042-1060).
cctacgcaaccgcaaaaat

SEQ ID NO: 686428 - DNA, 19 bp, Mus musculus
  siRNA target sequence for Krt2-20 (NM_053249.2,1047-1065).
gcaaccgcaaaaatgagat

SEQ ID NO: 686429 - DNA, 19 bp, Mus musculus
  siRNA target sequence for Krt2-20 (NM_053249.2,1392-1410).
ccaaaggtgccgtactcta

SEQ ID NO: 686430 - DNA, 19 bp, Mus musculus
  siRNA target sequence for Krt2-20 (NM_053249.2,1586-1604).
ggggtgggtagcaattcgt

SEQ ID NO: 686431 - DNA, 19 bp, Mus musculus
  siRNA target sequence for Krt2-4 (NM_008475.1,381-399).
gtttggtgccggtggtttt

SEQ ID NO: 686432 - DNA, 19 bp, Mus musculus
  siRNA target sequence for Krt2-4 (NM_008475.1,453-471).
ctgtcctgctggaggtatt

SEQ ID NO: 686433 - DNA, 19 bp, Mus musculus
  siRNA target sequence for Krt2-4 (NM_008475.1,600-618).
cgataaggtgcgattctta

SEQ ID NO: 686434 - DNA, 19 bp, Mus musculus
  siRNA target sequence for Krt2-4 (NM_008475.1,867-885).
cgtggtcctcaagaaagat

SEQ ID NO: 686435 - DNA, 19 bp, Mus musculus
  siRNA target sequence for Krt2-4 (NM_008475.1,1564-1582).
ggcctgggtagcggttttt

SEQ ID NO: 686436 - DNA, 19 bp, Mus musculus
  siRNA target sequence for Krt2-4 (NM_008475.1,1567-1585).
ctgggtagcggtttttgct

SEQ ID NO: 686437 - DNA, 19 bp, Mus musculus
  siRNA target sequence for Krt2-4 (NM_008475.1,1636-1654).
ggttctggttccaagatca

SEQ ID NO: 686438 - DNA, 19 bp, Mus musculus
  siRNA target sequence for Krt2-6a (NM_008476.2,755-773).
gaagaactacggaacaaat

SEQ ID NO: 686439 - DNA, 19 bp, Mus musculus
  siRNA target sequence for Krt2-6g (NM_019956.1,249-267).
gaacggaggttttggattt

SEQ ID NO: 686440 - DNA, 19 bp, Mus musculus
  siRNA target sequence for Krt2-6g (NM_019956.1,286-304).
ggctttgccggaagtatct

SEQ ID NO: 686441 - DNA, 19 bp, Mus musculus
  siRNA target sequence for Krt2-6g (NM_019956.1,287-305).
gctttgccggaagtatctt

SEQ ID NO: 686442 - DNA, 19 bp, Mus musculus
  siRNA target sequence for Krt2-6g (NM_019956.1,1152-1170).
gaagcaggcttctaaccta

SEQ ID NO: 686443 - DNA, 19 bp, Mus musculus
  siRNA target sequence for Krt2-6g (NM_019956.1,1380-1398).
gatgtccggagaatactct

SEQ ID NO: 686444 - DNA, 19 bp, Mus musculus
  siRNA target sequence for Krt2-6g (NM_019956.1,1402-1420).
cccgtcagcatctccatta

SEQ ID NO: 686445 - DNA, 19 bp, Mus musculus
  siRNA target sequence for Krt2-7 (NM_033073.2,253-271).
ccgcgagatcaccatcaat

SEQ ID NO: 686446 - DNA, 19 bp, Mus musculus
  siRNA target sequence for Krt2-7 (NM_033073.2,255-273).
gcgagatcaccatcaatca

SEQ ID NO: 686447 - DNA, 19 bp, Mus musculus
  siRNA target sequence for Krt2-7 (NM_033073.2,468-486).
gccagcttccccgaatctt

SEQ ID NO: 686448 - DNA, 19 bp, Mus musculus
  siRNA target sequence for Krt2-7 (NM_033073.2,745-763).
ccttcacgagacagagtta

SEQ ID NO: 686449 - DNA, 19 bp, Mus musculus
  siRNA target sequence for Krt2-7 (NM_033073.2,1042-1060).
gaaccagcgtgccaagtta

SEQ ID NO: 686450 - DNA, 19 bp, Mus musculus
  siRNA target sequence for Krt2-7 (NM_033073.2,1046-1064).
cagcgtgccaagttagagt

SEQ ID NO: 686451 - DNA, 19 bp, Mus musculus
  siRNA target sequence for Krt2-7 (NM_033073.2,1326-1344).
gcaatggtggcaagcttat

SEQ ID NO: 686452 - DNA, 19 bp, Mus musculus
  siRNA target sequence for Krt2-7 (NM_033073.2,1436-1454).
cgcaggggcacccacaatt

SEQ ID NO: 686453 - DNA, 19 bp, Mus musculus
  siRNA target sequence for Lmna (NM_019390.1,333-351).
gacttccagaagaacattt

SEQ ID NO: 686454 - DNA, 19 bp, Mus musculus
  siRNA target sequence for Lmna (NM_019390.1,393-411).
cggcttgtggagatcgata

SEQ ID NO: 686455 - DNA, 19 bp, Mus musculus
  siRNA target sequence for Lmna (NM_019390.1,413-431).
cgggaagcagcgagagttt

SEQ ID NO: 686456 - DNA, 19 bp, Mus musculus
  siRNA target sequence for Lmna (NM_019390.1,415-433).
ggaagcagcgagagtttga

SEQ ID NO: 686457 - DNA, 19 bp, Mus musculus
  siRNA target sequence for Lmna (NM_019390.1,480-498).
gaccaggtggaacagtata

SEQ ID NO: 686458 - DNA, 19 bp, Mus musculus
  siRNA target sequence for Lmna (NM_019390.1,521-539).
ctccgccaagctggataat

SEQ ID NO: 686459 - DNA, 19 bp, Mus musculus
  siRNA target sequence for Lmna (NM_019390.1,1074-1092).
gtgcggctgcgcaacaagt

SEQ ID NO: 686460 - DNA, 19 bp, Mus musculus
  siRNA target sequence for Lmna (NM_019390.1,1121-1139).
gcagatcaggcgtcagaat

SEQ ID NO: 686461 - DNA, 19 bp, Mus musculus
  siRNA target sequence for Lmna (NM_019390.1,1164-1182).
cgcttcccaccgaagttca

SEQ ID NO: 686462 - DNA, 19 bp, Mus musculus
  siRNA target sequence for Lmna (NM_019390.1,1299-1317).
cgcaccgctctcatcaact

SEQ ID NO: 686463 - DNA, 19 bp, Mus musculus
  siRNA target sequence for Lmnb1 (NM_010721.1,672-690).
gaggcggcactaaactcta

SEQ ID NO: 686464 - DNA, 19 bp, Mus musculus
  siRNA target sequence for Lmnb1 (NM_010721.1,677-695).
ggcactaaactctaaggat

SEQ ID NO: 686465 - DNA, 19 bp, Mus musculus
  siRNA target sequence for Lmnb1 (NM_010721.1,709-727).
ctgccctaggggacaaaaa

SEQ ID NO: 686466 - DNA, 19 bp, Mus musculus
  siRNA target sequence for Lmnb1 (NM_010721.1,711-729).
gccctaggggacaaaaaga

SEQ ID NO: 686467 - DNA, 19 bp, Mus musculus
  siRNA target sequence for Lmnb1 (NM_010721.1,714-732).
ctaggggacaaaaagagtt

SEQ ID NO: 686468 - DNA, 19 bp, Mus musculus
  siRNA target sequence for Lmnb1 (NM_010721.1,770-788).
ccagctagaagcatcctta

SEQ ID NO: 686469 - DNA, 19 bp, Mus musculus
  siRNA target sequence for Lmnb1 (NM_010721.1,771-789).
cagctagaagcatccttat

SEQ ID NO: 686470 - DNA, 19 bp, Mus musculus
  siRNA target sequence for Lmnb1 (NM_010721.1,803-821).
gcagttagcagatgaaact

SEQ ID NO: 686471 - DNA, 19 bp, Mus musculus
  siRNA target sequence for Lmnb1 (NM_010721.1,806-824).
gttagcagatgaaacttta

SEQ ID NO: 686472 - DNA, 19 bp, Mus musculus
  siRNA target sequence for Lmnb1 (NM_010721.1,810-828).
gcagatgaaactttactta

SEQ ID NO: 686473 - DNA, 19 bp, Mus musculus
  siRNA target sequence for Lmnb1 (NM_010721.1,811-829).
cagatgaaactttacttaa

SEQ ID NO: 686474 - DNA, 19 bp, Mus musculus
  siRNA target sequence for Lmnb1 (NM_010721.1,864-882).
gaggacttggagtttcgta

SEQ ID NO: 686475 - DNA, 19 bp, Mus musculus
  siRNA target sequence for Lmnb1 (NM_010721.1,947-965).
ggactctgggcgtcagatt

SEQ ID NO: 686476 - DNA, 19 bp, Mus musculus
  siRNA target sequence for Lmnb1 (NM_010721.1,952-970).
ctgggcgtcagattgagta

SEQ ID NO: 686477 - DNA, 19 bp, Mus musculus
  siRNA target sequence for Lmnb1 (NM_010721.1,955-973).
ggcgtcagattgagtatga

SEQ ID NO: 686478 - DNA, 19 bp, Mus musculus
  siRNA target sequence for Lmnb1 (NM_010721.1,957-975).
cgtcagattgagtatgagt

SEQ ID NO: 686479 - DNA, 19 bp, Mus musculus
  siRNA target sequence for Lmnb1 (NM_010721.1,1021-1039).
cgcaggtgaggctgtacaa

SEQ ID NO: 686480 - DNA, 19 bp, Mus musculus
  siRNA target sequence for Lmnb1 (NM_010721.1,1319-1337).
gcagcagctgagtgattat

SEQ ID NO: 686481 - DNA, 19 bp, Mus musculus
  siRNA target sequence for Lmnb1 (NM_010721.1,1530-1548).
gaggcgagcagcagtgtta

SEQ ID NO: 686482 - DNA, 19 bp, Mus musculus
  siRNA target sequence for Lmnb1 (NM_010721.1,1534-1552).
cgagcagcagtgttagcat

SEQ ID NO: 686483 - DNA, 19 bp, Mus musculus
  siRNA target sequence for Lmnb1 (NM_010721.1,1580-1598).
cgtgtgcattgaagagata

SEQ ID NO: 686484 - DNA, 19 bp, Mus musculus
  siRNA target sequence for Lmnb1 (NM_010721.1,1586-1604).
cattgaagagatagatgtt

SEQ ID NO: 686485 - DNA, 19 bp, Mus musculus
  siRNA target sequence for Lmnb1 (NM_010721.1,1636-1654).
ctgagcaggatcaaccaat

SEQ ID NO: 686486 - DNA, 19 bp, Mus musculus
  siRNA target sequence for Lmnb1 (NM_010721.1,1661-1679).
ctgggagatgatcagaaaa

SEQ ID NO: 686487 - DNA, 19 bp, Mus musculus
  siRNA target sequence for Lmnb1 (NM_010721.1,1667-1685).
gatgatcagaaaaattgga

SEQ ID NO: 686488 - DNA, 19 bp, Mus musculus
  siRNA target sequence for Lmnb1 (NM_010721.1,1684-1702).
gagacacatcagtcagtta

SEQ ID NO: 686489 - DNA, 19 bp, Mus musculus
  siRNA target sequence for Lmnb1 (NM_010721.1,1688-1706).
cacatcagtcagttacaaa

SEQ ID NO: 686490 - DNA, 19 bp, Mus musculus
  siRNA target sequence for Lmnb1 (NM_010721.1,1690-1708).
catcagtcagttacaaata

SEQ ID NO: 686491 - DNA, 19 bp, Mus musculus
  siRNA target sequence for Lmnb1 (NM_010721.1,1695-1713).
gtcagttacaaatatacct

SEQ ID NO: 686492 - DNA, 19 bp, Mus musculus
  siRNA target sequence for Lmnb1 (NM_010721.1,1983-2001).
gccccaagagcatggaata

SEQ ID NO: 686493 - DNA, 19 bp, Mus musculus
  siRNA target sequence for Lmnb1 (NM_010721.1,1984-2002).
ccccaagagcatggaataa

SEQ ID NO: 686494 - DNA, 19 bp, Mus musculus
  siRNA target sequence for Lmnb1 (NM_010721.1,1985-2003).
cccaagagcatggaataaa

SEQ ID NO: 686495 - DNA, 19 bp, Mus musculus
  siRNA target sequence for Lmnb2 (NM_010722.2,715-733).
cagccggcaacaggaatat

SEQ ID NO: 686496 - DNA, 19 bp, Mus musculus
  siRNA target sequence for Lmnb2 (NM_010722.2,717-735).
gccggcaacaggaatatga

SEQ ID NO: 686497 - DNA, 19 bp, Mus musculus
  siRNA target sequence for Lmnb2 (NM_010722.2,792-810).
gcctgtaccgggtagaact

SEQ ID NO: 686498 - DNA, 19 bp, Mus musculus
  siRNA target sequence for Lmnb2 (NM_010722.2,1368-1386).
ccacgggtgttgtgaacat

SEQ ID NO: 686499 - DNA, 19 bp, Mus musculus
  siRNA target sequence for Lmnb2 (NM_010722.2,1415-1433).
gtgcgccttaagaactctt

SEQ ID NO: 686500 - DNA, 19 bp, Mus musculus
  siRNA target sequence for Matn1 (NM_010769.1,170-188).
gacccgtggagtttgagaa

SEQ ID NO: 686501 - DNA, 19 bp, Mus musculus
  siRNA target sequence for Matn1 (NM_010769.1,248-266).
gggtgggcttggtcaacta

SEQ ID NO: 686502 - DNA, 19 bp, Mus musculus
  siRNA target sequence for Matn1 (NM_010769.1,715-733).
gagcagctgtgcgttagtt

SEQ ID NO: 686503 - DNA, 19 bp, Mus musculus
  siRNA target sequence for Matn1 (NM_010769.1,717-735).
gcagctgtgcgttagttct

SEQ ID NO: 686504 - DNA, 19 bp, Mus musculus
  siRNA target sequence for Matn1 (NM_010769.1,787-805).
ggcaagacctgcaatgtct

SEQ ID NO: 686505 - DNA, 19 bp, Mus musculus
  siRNA target sequence for Matn1 (NM_010769.1,866-884).
gcgtgcggcctgagaactt

SEQ ID NO: 686506 - DNA, 19 bp, Mus musculus
  siRNA target sequence for Matn1 (NM_010769.1,867-885).
cgtgcggcctgagaacttt

SEQ ID NO: 686507 - DNA, 19 bp, Mus musculus
  siRNA target sequence for Matn1 (NM_010769.1,912-930).
gattgtggacacgttagat

SEQ ID NO: 686508 - DNA, 19 bp, Mus musculus
  siRNA target sequence for Matn1 (NM_010769.1,1083-1101).
cttgaagtatctcatagat

SEQ ID NO: 686509 - DNA, 19 bp, Mus musculus
  siRNA target sequence for Matn1 (NM_010769.1,1169-1187).
gccggagccaggactacat

SEQ ID NO: 686510 - DNA, 19 bp, Mus musculus
  siRNA target sequence for Matn1 (NM_010769.1,1171-1189).
cggagccaggactacatta

SEQ ID NO: 686511 - DNA, 19 bp, Mus musculus
  siRNA target sequence for Matn1 (NM_010769.1,1215-1233).
ccttggctttaagatgttt

SEQ ID NO: 686512 - DNA, 19 bp, Mus musculus
  siRNA target sequence for Matn1 (NM_010769.1,1289-1307).
ccgtggcagaccactactt

SEQ ID NO: 686513 - DNA, 19 bp, Mus musculus
  siRNA target sequence for Matn1 (NM_010769.1,1290-1308).
cgtggcagaccactacttt

SEQ ID NO: 686514 - DNA, 19 bp, Mus musculus
  siRNA target sequence for Matn1 (NM_010769.1,1291-1309).
gtggcagaccactactttt

SEQ ID NO: 686515 - DNA, 19 bp, Mus musculus
  siRNA target sequence for Matn1 (NM_010769.1,1294-1312).
gcagaccactacttttaca

SEQ ID NO: 686516 - DNA, 19 bp, Mus musculus
  siRNA target sequence for Matn3 (NM_010770.1,320-338).
gttcatcattgatagttct

SEQ ID NO: 686517 - DNA, 19 bp, Mus musculus
  siRNA target sequence for Matn3 (NM_010770.1,343-361).
gcgtccggcctctggaatt

SEQ ID NO: 686518 - DNA, 19 bp, Mus musculus
  siRNA target sequence for Matn3 (NM_010770.1,428-446).
ggtggctgtggtgaactat

SEQ ID NO: 686519 - DNA, 19 bp, Mus musculus
  siRNA target sequence for Matn3 (NM_010770.1,519-537).
cggatcacacccttgtcaa

SEQ ID NO: 686520 - DNA, 19 bp, Mus musculus
  siRNA target sequence for Matn3 (NM_010770.1,544-562).
ccatgtcagggctagctat

SEQ ID NO: 686521 - DNA, 19 bp, Mus musculus
  siRNA target sequence for Matn3 (NM_010770.1,628-646).
ccaaggtagctattatcgt

SEQ ID NO: 686522 - DNA, 19 bp, Mus musculus
  siRNA target sequence for Matn3 (NM_010770.1,661-679).
cgcaggaccaggtgaatga

SEQ ID NO: 686523 - DNA, 19 bp, Mus musculus
  siRNA target sequence for Matn3 (NM_010770.1,805-823).
cctacggggtcattgagaa

SEQ ID NO: 686524 - DNA, 19 bp, Mus musculus
  siRNA target sequence for Matn3 (NM_010770.1,1170-1188).
gggtcccatcactgtgaat

SEQ ID NO: 686525 - DNA, 19 bp, Mus musculus
  siRNA target sequence for Matn3 (NM_010770.1,1338-1356).
gatgacaagaagacatgtt

SEQ ID NO: 686526 - DNA, 19 bp, Mus musculus
  siRNA target sequence for Matn3 (NM_010770.1,1346-1364).
gaagacatgttcagacatt

SEQ ID NO: 686527 - DNA, 19 bp, Mus musculus
  siRNA target sequence for Matn3 (NM_010770.1,1368-1386).
gaagcccgaagcctcattt

SEQ ID NO: 686528 - DNA, 19 bp, Mus musculus
  siRNA target sequence for Matn3 (NM_010770.1,1371-1389).
gcccgaagcctcatttcca

SEQ ID NO: 686529 - DNA, 19 bp, Mus musculus
  siRNA target sequence for Matn3 (NM_010770.1,1463-1481).
caccaaacttgacaacatt

SEQ ID NO: 686530 - DNA, 19 bp, Mus musculus
  siRNA target sequence for Matn4 (NM_013592.2,331-349).
ggggtgatccagtattcta

SEQ ID NO: 686531 - DNA, 19 bp, Mus musculus
  siRNA target sequence for Matn4 (NM_013592.2,333-351).
ggtgatccagtattctagt

SEQ ID NO: 686532 - DNA, 19 bp, Mus musculus
  siRNA target sequence for Matn4 (NM_013592.2,336-354).
gatccagtattctagtcaa

SEQ ID NO: 686533 - DNA, 19 bp, Mus musculus
  siRNA target sequence for Matn4 (NM_013592.2,458-476).
cgatccagtacgctatgaa

SEQ ID NO: 686534 - DNA, 19 bp, Mus musculus
  siRNA target sequence for Matn4 (NM_013592.2,808-826).
gccccaggaacattctact

SEQ ID NO: 686535 - DNA, 19 bp, Mus musculus
  siRNA target sequence for Matn4 (NM_013592.2,933-951).
cgtggactcgtatttctgt

SEQ ID NO: 686536 - DNA, 19 bp, Mus musculus
  siRNA target sequence for Matn4 (NM_013592.2,1298-1316).
gcgtgcgcccacagaactt

SEQ ID NO: 686537 - DNA, 19 bp, Mus musculus
  siRNA target sequence for Matn4 (NM_013592.2,1331-1349).
gcttcgtgaaccagattgt

SEQ ID NO: 686538 - DNA, 19 bp, Mus musculus
  siRNA target sequence for Matn4 (NM_013592.2,1610-1628).
gccgctctcaggatgacat

SEQ ID NO: 686539 - DNA, 19 bp, Mus musculus
  siRNA target sequence for Matn4 (NM_013592.2,1656-1674).
ggaaggcatcgtcatgtat

SEQ ID NO: 686540 - DNA, 19 bp, Mus musculus
  siRNA target sequence for Matn4 (NM_013592.2,1735-1753).
gagttgcacgtgtcctatt

SEQ ID NO: 686541 - DNA, 19 bp, Mus musculus
  siRNA target sequence for Matn4 (NM_013592.2,1737-1755).
gttgcacgtgtcctattct

SEQ ID NO: 686542 - DNA, 19 bp, Mus musculus
  siRNA target sequence for Matn4 (NM_013592.2,1775-1793).
cgcacctgctggagaatct

SEQ ID NO: 686543 - DNA, 19 bp, Mus musculus
  siRNA target sequence for Nef3 (NM_008691.1,287-305).
cccgctctaacgagaaaga

SEQ ID NO: 686544 - DNA, 19 bp, Mus musculus
  siRNA target sequence for Nef3 (NM_008691.1,628-646).
gaagagtcgtcgatggtta

SEQ ID NO: 686545 - DNA, 19 bp, Mus musculus
  siRNA target sequence for Nef3 (NM_008691.1,759-777).
cacggtagagcgcaaagat

SEQ ID NO: 686546 - DNA, 19 bp, Mus musculus
  siRNA target sequence for Nef3 (NM_008691.1,761-779).
cggtagagcgcaaagatta

SEQ ID NO: 686547 - DNA, 19 bp, Mus musculus
  siRNA target sequence for Nef3 (NM_008691.1,1130-1148).
ctcgtcatttgcgagaata

SEQ ID NO: 686548 - DNA, 19 bp, Mus musculus
  siRNA target sequence for Nef3 (NM_008691.1,1215-1233).
gggggaagagaccagattt

SEQ ID NO: 686549 - DNA, 19 bp, Mus musculus
  siRNA target sequence for Nef3 (NM_008691.1,1216-1234).
ggggaagagaccagattta

SEQ ID NO: 686550 - DNA, 19 bp, Mus musculus
  siRNA target sequence for Nef3 (NM_008691.1,1219-1237).
gaagagaccagatttagca

SEQ ID NO: 686551 - DNA, 19 bp, Mus musculus
  siRNA target sequence for Nef3 (NM_008691.1,1224-1242).
gaccagatttagcacattt

SEQ ID NO: 686552 - DNA, 19 bp, Mus musculus
  siRNA target sequence for Nef3 (NM_008691.1,1279-1297).
cagccctcagtcacaatat

SEQ ID NO: 686553 - DNA, 19 bp, Mus musculus
  siRNA target sequence for Nef3 (NM_008691.1,1363-1381).
gagatcatcgaagaaacta

SEQ ID NO: 686554 - DNA, 19 bp, Mus musculus
  siRNA target sequence for Nef3 (NM_008691.1,1365-1383).
gatcatcgaagaaactaaa

SEQ ID NO: 686555 - DNA, 19 bp, Mus musculus
  siRNA target sequence for Nef3 (NM_008691.1,1489-1507).
gaaccagaagccgaaaagt

SEQ ID NO: 686556 - DNA, 19 bp, Mus musculus
  siRNA target sequence for Nef3 (NM_008691.1,1649-1667).
gctccagtgaaaaagatga

SEQ ID NO: 686557 - DNA, 19 bp, Mus musculus
  siRNA target sequence for Nef3 (NM_008691.1,1968-1986).
ggagaagccaaaagatgtt

SEQ ID NO: 686558 - DNA, 19 bp, Mus musculus
  siRNA target sequence for Nef3 (NM_008691.1,2003-2021).
ccgagtccccggtgaaaga

SEQ ID NO: 686559 - DNA, 19 bp, Mus musculus
  siRNA target sequence for Nef3 (NM_008691.1,2005-2023).
gagtccccggtgaaagaga

SEQ ID NO: 686560 - DNA, 19 bp, Mus musculus
  siRNA target sequence for Nef3 (NM_008691.1,2334-2352).
ggatagcagtgatgataaa

SEQ ID NO: 686561 - DNA, 19 bp, Mus musculus
  siRNA target sequence for Nef3 (NM_008691.1,2359-2377).
gtcaccaagaaggtagaaa

SEQ ID NO: 686562 - DNA, 19 bp, Mus musculus
  siRNA target sequence for Nef3 (NM_008691.1,2395-2413).
ggcgatggtgctaccaaat

SEQ ID NO: 686563 - DNA, 19 bp, Mus musculus
  siRNA target sequence for Nef3 (NM_008691.1,2396-2414).
gcgatggtgctaccaaata

SEQ ID NO: 686564 - DNA, 19 bp, Mus musculus
  siRNA target sequence for Nef3 (NM_008691.1,2401-2419).
ggtgctaccaaatacatca

SEQ ID NO: 686565 - DNA, 19 bp, Mus musculus
  siRNA target sequence for Nef3 (NM_008691.1,2473-2491).
gagaagctggtctcaacta

SEQ ID NO: 686566 - DNA, 19 bp, Mus musculus
  siRNA target sequence for Nef3 (NM_008691.1,2475-2493).
gaagctggtctcaactaaa

SEQ ID NO: 686567 - DNA, 19 bp, Mus musculus
  siRNA target sequence for Nef3 (NM_008691.1,2481-2499).
ggtctcaactaaaaaggta

SEQ ID NO: 686568 - DNA, 19 bp, Mus musculus
  siRNA target sequence for Nef3 (NM_008691.1,2510-2528).
cttcacacgccatagtcaa

SEQ ID NO: 686569 - DNA, 19 bp, Mus musculus
  siRNA target sequence for Nefl (NM_010910.1,91-109).
cggctacgatccgtacttt

SEQ ID NO: 686570 - DNA, 19 bp, Mus musculus
  siRNA target sequence for Nefl (NM_010910.1,92-110).
ggctacgatccgtactttt

SEQ ID NO: 686571 - DNA, 19 bp, Mus musculus
  siRNA target sequence for Nefl (NM_010910.1,318-336).
gcaacgacctcaagtctat

SEQ ID NO: 686572 - DNA, 19 bp, Mus musculus
  siRNA target sequence for Nefl (NM_010910.1,449-467).
gtgctgcgccagaaacact

SEQ ID NO: 686573 - DNA, 19 bp, Mus musculus
  siRNA target sequence for Nefl (NM_010910.1,606-624).
ctcgctatgaggaagaagt

SEQ ID NO: 686574 - DNA, 19 bp, Mus musculus
  siRNA target sequence for Nefl (NM_010910.1,725-743).
ctgatggacgagatagctt

SEQ ID NO: 686575 - DNA, 19 bp, Mus musculus
  siRNA target sequence for Nefl (NM_010910.1,1116-1134).
gcgccatgcaggacacaat

SEQ ID NO: 686576 - DNA, 19 bp, Mus musculus
  siRNA target sequence for Nefl (NM_010910.1,1119-1137).
ccatgcaggacacaatcaa

SEQ ID NO: 686577 - DNA, 19 bp, Mus musculus
  siRNA target sequence for Nefl (NM_010910.1,1288-1306).
caccagcgtgggtagcata

SEQ ID NO: 686578 - DNA, 19 bp, Mus musculus
  siRNA target sequence for Nefl (NM_010910.1,1450-1468).
gaccattgaggctacgaaa

SEQ ID NO: 686579 - DNA, 19 bp, Mus musculus
  siRNA target sequence for Nes (NM_016701.2,81-99).
ggttgcgtcggggaagaat

SEQ ID NO: 686580 - DNA, 19 bp, Mus musculus
  siRNA target sequence for Nes (NM_016701.2,85-103).
gcgtcggggaagaatcttt

SEQ ID NO: 686581 - DNA, 19 bp, Mus musculus
  siRNA target sequence for Nes (NM_016701.2,86-104).
cgtcggggaagaatctttt

SEQ ID NO: 686582 - DNA, 19 bp, Mus musculus
  siRNA target sequence for Nes (NM_016701.2,1466-1484).
caaccctcaccactctatt

SEQ ID NO: 686583 - DNA, 19 bp, Mus musculus
  siRNA target sequence for Nes (NM_016701.2,1488-1506).
gaggctaaagatagagaat

SEQ ID NO: 686584 - DNA, 19 bp, Mus musculus
  siRNA target sequence for Nes (NM_016701.2,1514-1532).
gtctagagtttctagcata

SEQ ID NO: 686585 - DNA, 19 bp, Mus musculus
  siRNA target sequence for Nes (NM_016701.2,1528-1546).
gcatattccaggaagaaga

SEQ ID NO: 686586 - DNA, 19 bp, Mus musculus
  siRNA target sequence for Nes (NM_016701.2,1582-1600).
ccacagaggtaaaagtaga

SEQ ID NO: 686587 - DNA, 19 bp, Mus musculus
  siRNA target sequence for Nes (NM_016701.2,1604-1622).
cagcttagcacaggaaata

SEQ ID NO: 686588 - DNA, 19 bp, Mus musculus
  siRNA target sequence for Nes (NM_016701.2,1632-1650).
ggtctggacacagaagaaa

SEQ ID NO: 686589 - DNA, 19 bp, Mus musculus
  siRNA target sequence for Nes (NM_016701.2,1751-1769).
ggagaattgcaattcatct

SEQ ID NO: 686590 - DNA, 19 bp, Mus musculus
  siRNA target sequence for Nes (NM_016701.2,1752-1770).
gagaattgcaattcatcta

SEQ ID NO: 686591 - DNA, 19 bp, Mus musculus
  siRNA target sequence for Nes (NM_016701.2,1754-1772).
gaattgcaattcatctata

SEQ ID NO: 686592 - DNA, 19 bp, Mus musculus
  siRNA target sequence for Nes (NM_016701.2,1875-1893).
ggggttcttgaactatcta

SEQ ID NO: 686593 - DNA, 19 bp, Mus musculus
  siRNA target sequence for Nes (NM_016701.2,1876-1894).
gggttcttgaactatctaa

SEQ ID NO: 686594 - DNA, 19 bp, Mus musculus
  siRNA target sequence for Nes (NM_016701.2,1923-1941).
gaggatcaagaattaatgt

SEQ ID NO: 686595 - DNA, 19 bp, Mus musculus
  siRNA target sequence for Nes (NM_016701.2,1925-1943).
ggatcaagaattaatgtct

SEQ ID NO: 686596 - DNA, 19 bp, Mus musculus
  siRNA target sequence for Nes (NM_016701.2,1952-1970).
cacactagagacagtttca

SEQ ID NO: 686597 - DNA, 19 bp, Mus musculus
  siRNA target sequence for Nes (NM_016701.2,2461-2479).
ggtctcttgatgaaaacca

SEQ ID NO: 686598 - DNA, 19 bp, Mus musculus
  siRNA target sequence for Nes (NM_016701.2,2513-2531).
gaggccactgagatctcta

SEQ ID NO: 686599 - DNA, 19 bp, Mus musculus
  siRNA target sequence for Nes (NM_016701.2,2590-2608).
ccctcgaatctctcgaaaa

SEQ ID NO: 686600 - DNA, 19 bp, Mus musculus
  siRNA target sequence for Nes (NM_016701.2,2693-2711).
gggatctcttgaagataga

SEQ ID NO: 686601 - DNA, 19 bp, Mus musculus
  siRNA target sequence for Nes (NM_016701.2,2785-2803).
ggattgtgaaccatctaga

SEQ ID NO: 686602 - DNA, 19 bp, Mus musculus
  siRNA target sequence for Nes (NM_016701.2,2786-2804).
gattgtgaaccatctagaa

SEQ ID NO: 686603 - DNA, 19 bp, Mus musculus
  siRNA target sequence for Nes (NM_016701.2,3152-3170).
gttaccaaagcctcttaga

SEQ ID NO: 686604 - DNA, 19 bp, Mus musculus
  siRNA target sequence for Nes (NM_016701.2,3264-3282).
gaaacagagaacatagaat

SEQ ID NO: 686605 - DNA, 19 bp, Mus musculus
  siRNA target sequence for Nes (NM_016701.2,3316-3334).
ggaagtctgtagatactca

SEQ ID NO: 686606 - DNA, 19 bp, Mus musculus
  siRNA target sequence for Nes (NM_016701.2,3317-3335).
gaagtctgtagatactcaa

SEQ ID NO: 686607 - DNA, 19 bp, Mus musculus
  siRNA target sequence for Nes (NM_016701.2,3359-3377).
gactagtgagacaatagaa

SEQ ID NO: 686608 - DNA, 19 bp, Mus musculus
  siRNA target sequence for Nes (NM_016701.2,3697-3715).
gagtggaaactgaggataa

SEQ ID NO: 686609 - DNA, 19 bp, Mus musculus
  siRNA target sequence for Nes (NM_016701.2,4179-4197).
cctgaattacccaagacta

SEQ ID NO: 686610 - DNA, 19 bp, Mus musculus
  siRNA target sequence for Nes (NM_016701.2,5116-5134).
gggctgcagctaatgttct

SEQ ID NO: 686611 - DNA, 19 bp, Mus musculus
  siRNA target sequence for Nes (NM_016701.2,5117-5135).
ggctgcagctaatgttctt

SEQ ID NO: 686612 - DNA, 19 bp, Mus musculus
  siRNA target sequence for Nes (NM_016701.2,5224-5242).
gtcaagcgattgaccattt

SEQ ID NO: 686613 - DNA, 19 bp, Mus musculus
  siRNA target sequence for Nes (NM_016701.2,5432-5450).
cctcaaggcccctttagta

SEQ ID NO: 686614 - DNA, 19 bp, Mus musculus
  siRNA target sequence for Nes (NM_016701.2,5473-5491).
caagccagccgctgaagtt

SEQ ID NO: 686615 - DNA, 19 bp, Mus musculus
  siRNA target sequence for Nphp1 (NM_016902.1,60-78).
gaagctgcaggttgatagt

SEQ ID NO: 686616 - DNA, 19 bp, Mus musculus
  siRNA target sequence for Nphp1 (NM_016902.1,160-178).
caggcagtagatgaaaata

SEQ ID NO: 686617 - DNA, 19 bp, Mus musculus
  siRNA target sequence for Nphp1 (NM_016902.1,218-236).
cacctgtggggaactatga

SEQ ID NO: 686618 - DNA, 19 bp, Mus musculus
  siRNA target sequence for Nphp1 (NM_016902.1,314-332).
ggaaagacgctctcaaagt

SEQ ID NO: 686619 - DNA, 19 bp, Mus musculus
  siRNA target sequence for Nphp1 (NM_016902.1,438-456).
gcaagcctccccgaaacaa

SEQ ID NO: 686620 - DNA, 19 bp, Mus musculus
  siRNA target sequence for Nphp1 (NM_016902.1,537-555).
ggacgttctccatataatt

SEQ ID NO: 686621 - DNA, 19 bp, Mus musculus
  siRNA target sequence for Nphp1 (NM_016902.1,540-558).
cgttctccatataattgaa

SEQ ID NO: 686622 - DNA, 19 bp, Mus musculus
  siRNA target sequence for Nphp1 (NM_016902.1,544-562).
ctccatataattgaaaaga

SEQ ID NO: 686623 - DNA, 19 bp, Mus musculus
  siRNA target sequence for Nphp1 (NM_016902.1,623-641).
cctacttggagccctataa

SEQ ID NO: 686624 - DNA, 19 bp, Mus musculus
  siRNA target sequence for Nphp1 (NM_016902.1,624-642).
ctacttggagccctataat

SEQ ID NO: 686625 - DNA, 19 bp, Mus musculus
  siRNA target sequence for Nphp1 (NM_016902.1,627-645).
cttggagccctataataaa

SEQ ID NO: 686626 - DNA, 19 bp, Mus musculus
  siRNA target sequence for Nphp1 (NM_016902.1,780-798).
ctggagtgctgtacgaaaa

SEQ ID NO: 686627 - DNA, 19 bp, Mus musculus
  siRNA target sequence for Nphp1 (NM_016902.1,800-818).
ctatctcagagcagataaa

SEQ ID NO: 686628 - DNA, 19 bp, Mus musculus
  siRNA target sequence for Nphp1 (NM_016902.1,907-925).
cagtttcgagcaagttact

SEQ ID NO: 686629 - DNA, 19 bp, Mus musculus
  siRNA target sequence for Nphp1 (NM_016902.1,1005-1023).
gagaccaagtcgtgtttca

SEQ ID NO: 686630 - DNA, 19 bp, Mus musculus
  siRNA target sequence for Nphp1 (NM_016902.1,1007-1025).
gaccaagtcgtgtttcatt

SEQ ID NO: 686631 - DNA, 19 bp, Mus musculus
  siRNA target sequence for Nphp1 (NM_016902.1,1010-1028).
caagtcgtgtttcattgat

SEQ ID NO: 686632 - DNA, 19 bp, Mus musculus
  siRNA target sequence for Nphp1 (NM_016902.1,1013-1031).
gtcgtgtttcattgattct

SEQ ID NO: 686633 - DNA, 19 bp, Mus musculus
  siRNA target sequence for Nphp1 (NM_016902.1,1015-1033).
cgtgtttcattgattctga

SEQ ID NO: 686634 - DNA, 19 bp, Mus musculus
  siRNA target sequence for Nphp1 (NM_016902.1,1034-1052).
ccctatggagctgtaaaat

SEQ ID NO: 686635 - DNA, 19 bp, Mus musculus
  siRNA target sequence for Nphp1 (NM_016902.1,1036-1054).
ctatggagctgtaaaatga

SEQ ID NO: 686636 - DNA, 19 bp, Mus musculus
  siRNA target sequence for Nphp1 (NM_016902.1,1119-1137).
cagcaaggtcctgagtaat

SEQ ID NO: 686637 - DNA, 19 bp, Mus musculus
  siRNA target sequence for Nphp1 (NM_016902.1,1121-1139).
gcaaggtcctgagtaatat

SEQ ID NO: 686638 - DNA, 19 bp, Mus musculus
  siRNA target sequence for Nphp1 (NM_016902.1,1125-1143).
ggtcctgagtaatatccat

SEQ ID NO: 686639 - DNA, 19 bp, Mus musculus
  siRNA target sequence for Nphp1 (NM_016902.1,1131-1149).
gagtaatatccatacagtt

SEQ ID NO: 686640 - DNA, 19 bp, Mus musculus
  siRNA target sequence for Nphp1 (NM_016902.1,1154-1172).
ccgtgtggcagcctaagaa

SEQ ID NO: 686641 - DNA, 19 bp, Mus musculus
  siRNA target sequence for Nphp1 (NM_016902.1,1224-1242).
gctcgatggtgactgtttt

SEQ ID NO: 686642 - DNA, 19 bp, Mus musculus
  siRNA target sequence for Nphp1 (NM_016902.1,1225-1243).
ctcgatggtgactgtttta

SEQ ID NO: 686643 - DNA, 19 bp, Mus musculus
  siRNA target sequence for Nphp1 (NM_016902.1,1264-1282).
ccagaccttgggatattat

SEQ ID NO: 686644 - DNA, 19 bp, Mus musculus
  siRNA target sequence for Nphp1 (NM_016902.1,1285-1303).
gaacttggaatttcttaca

SEQ ID NO: 686645 - DNA, 19 bp, Mus musculus
  siRNA target sequence for Nphp1 (NM_016902.1,1338-1356).
ctgtggctgggtgtttctt

SEQ ID NO: 686646 - DNA, 19 bp, Mus musculus
  siRNA target sequence for Nphp1 (NM_016902.1,1391-1409).
caaaaacatacgaactctt

SEQ ID NO: 686647 - DNA, 19 bp, Mus musculus
  siRNA target sequence for Nphp1 (NM_016902.1,1397-1415).
catacgaactcttcttgaa

SEQ ID NO: 686648 - DNA, 19 bp, Mus musculus
  siRNA target sequence for Nphp1 (NM_016902.1,1417-1435).
ggcggcactccttacgaaa

SEQ ID NO: 686649 - DNA, 19 bp, Mus musculus
  siRNA target sequence for Nphp1 (NM_016902.1,1418-1436).
gcggcactccttacgaaaa

SEQ ID NO: 686650 - DNA, 19 bp, Mus musculus
  siRNA target sequence for Nphp1 (NM_016902.1,1419-1437).
cggcactccttacgaaaaa

SEQ ID NO: 686651 - DNA, 19 bp, Mus musculus
  siRNA target sequence for Nphp1 (NM_016902.1,1481-1499).
gtgttttccgtcagatgat

SEQ ID NO: 686652 - DNA, 19 bp, Mus musculus
  siRNA target sequence for Nphp1 (NM_016902.1,1483-1501).
gttttccgtcagatgataa

SEQ ID NO: 686653 - DNA, 19 bp, Mus musculus
  siRNA target sequence for Nphp1 (NM_016902.1,1671-1689).
cctgcaaagtgccgattta

SEQ ID NO: 686654 - DNA, 19 bp, Mus musculus
  siRNA target sequence for Nphp1 (NM_016902.1,1672-1690).
ctgcaaagtgccgatttaa

SEQ ID NO: 686655 - DNA, 19 bp, Mus musculus
  siRNA target sequence for Nphp1 (NM_016902.1,1675-1693).
caaagtgccgatttaatca

SEQ ID NO: 686656 - DNA, 19 bp, Mus musculus
  siRNA target sequence for Nphp1 (NM_016902.1,1758-1776).
gagttcctggtctgagaaa

SEQ ID NO: 686657 - DNA, 19 bp, Mus musculus
  siRNA target sequence for Nphp1 (NM_016902.1,2027-2045).
cggagcagacctttgactt

SEQ ID NO: 686658 - DNA, 19 bp, Mus musculus
  siRNA target sequence for Nphp1 (NM_016902.1,2041-2059).
gacttcttgggtgaaataa

SEQ ID NO: 686659 - DNA, 19 bp, Mus musculus
  siRNA target sequence for Nphp1 (NM_016902.1,2043-2061).
cttcttgggtgaaataaga

SEQ ID NO: 686660 - DNA, 19 bp, Mus musculus
  siRNA target sequence for Olfm3 (NM_153458.1,127-145).
gcgaggtccagctttctca

SEQ ID NO: 686661 - DNA, 19 bp, Mus musculus
  siRNA target sequence for Olfm3 (NM_153458.1,128-146).
cgaggtccagctttctcaa

SEQ ID NO: 686662 - DNA, 19 bp, Mus musculus
  siRNA target sequence for Olfm3 (NM_153458.1,161-179).
ctttacttgctggattaga

SEQ ID NO: 686663 - DNA, 19 bp, Mus musculus
  siRNA target sequence for Ppp1r16a (NM_033371.1,710-728).
ccccaacctggccaatgaa

SEQ ID NO: 686664 - DNA, 19 bp, Mus musculus
  siRNA target sequence for Ppp1r16a (NM_033371.1,713-731).
caacctggccaatgaagat

SEQ ID NO: 686665 - DNA, 19 bp, Mus musculus
  siRNA target sequence for Ppp1r16a (NM_033371.1,797-815).
cgctggggctgatgtcaat

SEQ ID NO: 686666 - DNA, 19 bp, Mus musculus
  siRNA target sequence for Ppp1r16a (NM_033371.1,878-896).
ggtggaactccttatttca

SEQ ID NO: 686667 - DNA, 19 bp, Mus musculus
  siRNA target sequence for Ppp1r16a (NM_033371.1,1251-1269).
caggtacacctggtagaat

SEQ ID NO: 686668 - DNA, 19 bp, Mus musculus
  siRNA target sequence for Ppp1r16a (NM_033371.1,1279-1297).
cacatggggctgatctgaa

SEQ ID NO: 686669 - DNA, 19 bp, Mus musculus
  siRNA target sequence for Ppp1r16a (NM_033371.1,1284-1302).
ggggctgatctgaatggaa

SEQ ID NO: 686670 - DNA, 19 bp, Mus musculus
  siRNA target sequence for Ppp1r16a (NM_033371.1,1317-1335).
gagacacccctcgatgtat

SEQ ID NO: 686671 - DNA, 19 bp, Mus musculus
  siRNA target sequence for Ppp1r16a (NM_033371.1,1319-1337).
gacacccctcgatgtatgt

SEQ ID NO: 686672 - DNA, 19 bp, Mus musculus
  siRNA target sequence for Ppp1r16a (NM_033371.1,1637-1655).
ggtggccagaccacacaat

SEQ ID NO: 686673 - DNA, 19 bp, Mus musculus
  siRNA target sequence for Ppp1r16a (NM_033371.1,1898-1916).
ctgtggcttcagcacaatt

SEQ ID NO: 686674 - DNA, 19 bp, Mus musculus
  siRNA target sequence for Prph1 (NM_013639.1,233-251).
cctcggagcgcctcgattt

SEQ ID NO: 686675 - DNA, 19 bp, Mus musculus
  siRNA target sequence for Prph1 (NM_013639.1,296-314).
gcaacgagaagcaagagtt

SEQ ID NO: 686676 - DNA, 19 bp, Mus musculus
  siRNA target sequence for Prph1 (NM_013639.1,635-653).
ctctgtcccgcctagaact

SEQ ID NO: 686677 - DNA, 19 bp, Mus musculus
  siRNA target sequence for Prph1 (NM_013639.1,818-836).
gtgcacagtacgagaacat

SEQ ID NO: 686678 - DNA, 19 bp, Mus musculus
  siRNA target sequence for Prph1 (NM_013639.1,831-849).
gaacatcgcggcaaagaat

SEQ ID NO: 686679 - DNA, 19 bp, Mus musculus
  siRNA target sequence for Prph1 (NM_013639.1,1331-1349).
cagtgccggttcattcctt

SEQ ID NO: 686680 - DNA, 19 bp, Mus musculus
  siRNA target sequence for Prph1 (NM_013639.1,1347-1365).
ctttgcctctctaagttta

SEQ ID NO: 686681 - DNA, 19 bp, Mus musculus
  siRNA target sequence for Prph1 (NM_013639.1,1423-1441).
ctgatcaggacaattgaga

SEQ ID NO: 686682 - DNA, 19 bp, Mus musculus
  siRNA target sequence for Pscd1 (NM_011180.2,221-239).
gatagcagaagttgctaat

SEQ ID NO: 686683 - DNA, 19 bp, Mus musculus
  siRNA target sequence for Pscd1 (NM_011180.2,340-358).
ggatccagttcttaatcga

SEQ ID NO: 686684 - DNA, 19 bp, Mus musculus
  siRNA target sequence for Pscd1 (NM_011180.2,363-381).
ggcctgctgaagaacactt

SEQ ID NO: 686685 - DNA, 19 bp, Mus musculus
  siRNA target sequence for Pscd1 (NM_011180.2,612-630).
cggtactgtcagtgcaata

SEQ ID NO: 686686 - DNA, 19 bp, Mus musculus
  siRNA target sequence for Pscd1 (NM_011180.2,614-632).
gtactgtcagtgcaatact

SEQ ID NO: 686687 - DNA, 19 bp, Mus musculus
  siRNA target sequence for Pscd1 (NM_011180.2,666-684).
ctgtccttcgcaatcataa

SEQ ID NO: 686688 - DNA, 19 bp, Mus musculus
  siRNA target sequence for Pscd1 (NM_011180.2,726-744).
cctacggtggagagattca

SEQ ID NO: 686689 - DNA, 19 bp, Mus musculus
  siRNA target sequence for Pscd1 (NM_011180.2,727-745).
ctacggtggagagattcat

SEQ ID NO: 686690 - DNA, 19 bp, Mus musculus
  siRNA target sequence for Pscd1 (NM_011180.2,804-822).
ctctatgagagcatcaaaa

SEQ ID NO: 686691 - DNA, 19 bp, Mus musculus
  siRNA target sequence for Pscd1 (NM_011180.2,818-836).
caaaaacgagccctttaaa

SEQ ID NO: 686692 - DNA, 19 bp, Mus musculus
  siRNA target sequence for Pscd1 (NM_011180.2,1106-1124).
gattaaggcctgtaagaca

SEQ ID NO: 686693 - DNA, 19 bp, Mus musculus
  siRNA target sequence for Pscd2 (NM_011181.2,883-901).
ccggaacgagcccttcaaa

SEQ ID NO: 686694 - DNA, 19 bp, Mus musculus
  siRNA target sequence for Pscd2 (NM_011181.2,884-902).
cggaacgagcccttcaaaa

SEQ ID NO: 686695 - DNA, 19 bp, Mus musculus
  siRNA target sequence for Pscd2 (NM_011181.2,885-903).
ggaacgagcccttcaaaat

SEQ ID NO: 686696 - DNA, 19 bp, Mus musculus
  siRNA target sequence for Pscd2 (NM_011181.2,1141-1159).
gctttacattcccaacaat

SEQ ID NO: 686697 - DNA, 19 bp, Mus musculus
  siRNA target sequence for Pscd2 (NM_011181.2,1222-1240).
catggtgtaccgaatctca

SEQ ID NO: 686698 - DNA, 19 bp, Mus musculus
  siRNA target sequence for Pscd3 (NM_011182.2,174-192).
gaacttttggacattcgta

SEQ ID NO: 686699 - DNA, 19 bp, Mus musculus
  siRNA target sequence for Pscd3 (NM_011182.2,183-201).
gacattcgtagaagaaaaa

SEQ ID NO: 686700 - DNA, 19 bp, Mus musculus
  siRNA target sequence for Pscd3 (NM_011182.2,207-225).
cttattgatgacattgaga

SEQ ID NO: 686701 - DNA, 19 bp, Mus musculus
  siRNA target sequence for Pscd3 (NM_011182.2,218-236).
cattgagaggctgaaatat

SEQ ID NO: 686702 - DNA, 19 bp, Mus musculus
  siRNA target sequence for Pscd3 (NM_011182.2,358-376).
gcattcagttcctaattga

SEQ ID NO: 686703 - DNA, 19 bp, Mus musculus
  siRNA target sequence for Pscd3 (NM_011182.2,468-486).
ggtgagagggatgacttta

SEQ ID NO: 686704 - DNA, 19 bp, Mus musculus
  siRNA target sequence for Pscd3 (NM_011182.2,549-567).
gccttaaggcagttcctat

SEQ ID NO: 686705 - DNA, 19 bp, Mus musculus
  siRNA target sequence for Pscd3 (NM_011182.2,812-830).
gctgaggaacttgtatgaa

SEQ ID NO: 686706 - DNA, 19 bp, Mus musculus
  siRNA target sequence for Pscd3 (NM_011182.2,813-831).
ctgaggaacttgtatgaaa

SEQ ID NO: 686707 - DNA, 19 bp, Mus musculus
  siRNA target sequence for Pscd3 (NM_011182.2,815-833).
gaggaacttgtatgaaagt

SEQ ID NO: 686708 - DNA, 19 bp, Mus musculus
  siRNA target sequence for Pscd3 (NM_011182.2,1105-1123).
gtcacaaaggtcaagtcat

SEQ ID NO: 686709 - DNA, 19 bp, Mus musculus
  siRNA target sequence for Pscd3 (NM_011182.2,1192-1210).
cccccagcccggaggaaaa

SEQ ID NO: 686710 - DNA, 19 bp, Mus musculus
  siRNA target sequence for Pscd3 (NM_011182.2,1244-1262).
cagtagggacccgttctat

SEQ ID NO: 686711 - DNA, 19 bp, Mus musculus
  siRNA target sequence for Pscd3 (NM_011182.2,1246-1264).
gtagggacccgttctatga

SEQ ID NO: 686712 - DNA, 19 bp, Mus musculus
  siRNA target sequence for Pscd3 (NM_011182.2,1249-1267).
gggacccgttctatgacat

SEQ ID NO: 686713 - DNA, 19 bp, Mus musculus
  siRNA target sequence for Pscd3 (NM_011182.2,1285-1303).
ggaggattgccaataagaa

SEQ ID NO: 686714 - DNA, 19 bp, Mus musculus
  siRNA target sequence for Sav1 (NM_022028.1,317-335).
cccctgctgcggaatctca

SEQ ID NO: 686715 - DNA, 19 bp, Mus musculus
  siRNA target sequence for Sav1 (NM_022028.1,318-336).
ccctgctgcggaatctcat

SEQ ID NO: 686716 - DNA, 19 bp, Mus musculus
  siRNA target sequence for Sav1 (NM_022028.1,327-345).
ggaatctcatgccttcatt

SEQ ID NO: 686717 - DNA, 19 bp, Mus musculus
  siRNA target sequence for Sav1 (NM_022028.1,457-475).
cctgagaactgcaattcaa

SEQ ID NO: 686718 - DNA, 19 bp, Mus musculus
  siRNA target sequence for Sav1 (NM_022028.1,458-476).
ctgagaactgcaattcaaa

SEQ ID NO: 686719 - DNA, 19 bp, Mus musculus
  siRNA target sequence for Sav1 (NM_022028.1,477-495).
ggacacctcatgaagtaat

SEQ ID NO: 686720 - DNA, 19 bp, Mus musculus
  siRNA target sequence for Sav1 (NM_022028.1,567-585).
gtggctcatcacagtcatt

SEQ ID NO: 686721 - DNA, 19 bp, Mus musculus
  siRNA target sequence for Sav1 (NM_022028.1,569-587).
ggctcatcacagtcatttt

SEQ ID NO: 686722 - DNA, 19 bp, Mus musculus
  siRNA target sequence for Sav1 (NM_022028.1,624-642).
ctggctcccgatacttctt

SEQ ID NO: 686723 - DNA, 19 bp, Mus musculus
  siRNA target sequence for Sav1 (NM_022028.1,643-661).
ctcagataacttttttgat

SEQ ID NO: 686724 - DNA, 19 bp, Mus musculus
  siRNA target sequence for Sav1 (NM_022028.1,692-710).
gcacaagaagattacagat

SEQ ID NO: 686725 - DNA, 19 bp, Mus musculus
  siRNA target sequence for Sav1 (NM_022028.1,760-778).
gaggcacacttcaggtatt

SEQ ID NO: 686726 - DNA, 19 bp, Mus musculus
  siRNA target sequence for Sav1 (NM_022028.1,781-799).
gagagtcacggctacatct

SEQ ID NO: 686727 - DNA, 19 bp, Mus musculus
  siRNA target sequence for Sav1 (NM_022028.1,886-904).
ctacatagatcataacaca

SEQ ID NO: 686728 - DNA, 19 bp, Mus musculus
  siRNA target sequence for Sav1 (NM_022028.1,893-911).
gatcataacacaaatacca

SEQ ID NO: 686729 - DNA, 19 bp, Mus musculus
  siRNA target sequence for Sav1 (NM_022028.1,1044-1062).
gtgtacctcggtatgatca

SEQ ID NO: 686730 - DNA, 19 bp, Mus musculus
  siRNA target sequence for Sav1 (NM_022028.1,1121-1139).
cctgcaaatccctaccata

SEQ ID NO: 686731 - DNA, 19 bp, Mus musculus
  siRNA target sequence for Sav1 (NM_022028.1,1172-1190).
gcccgagcccctgtgaaat

SEQ ID NO: 686732 - DNA, 19 bp, Mus musculus
  siRNA target sequence for Sav1 (NM_022028.1,1253-1271).
ctgaagttgctcttcatga

SEQ ID NO: 686733 - DNA, 19 bp, Mus musculus
  siRNA target sequence for Sav1 (NM_022028.1,1280-1298).
gagcagattgtgaagttgt

SEQ ID NO: 686734 - DNA, 19 bp, Mus musculus
  siRNA target sequence for Sav1 (NM_022028.1,1319-1337).
cttctcactgagttggaaa

SEQ ID NO: 686735 - DNA, 19 bp, Mus musculus
  siRNA target sequence for Sav1 (NM_022028.1,1376-1394).
ggcaagacgttcttaagtt

SEQ ID NO: 686736 - DNA, 19 bp, Mus musculus
  siRNA target sequence for Tacc2 (NM_021314.1,470-488).
gtcaacgacccctgtcaaa

SEQ ID NO: 686737 - DNA, 19 bp, Mus musculus
  siRNA target sequence for Tacc2 (NM_021314.1,664-682).
cggcggtgttcgatgaaga

SEQ ID NO: 686738 - DNA, 19 bp, Mus musculus
  siRNA target sequence for Tacc2 (NM_021314.1,693-711).
gccagcagcgggacttaca

SEQ ID NO: 686739 - DNA, 19 bp, Mus musculus
  siRNA target sequence for Tacc2 (NM_021314.1,694-712).
ccagcagcgggacttacaa

SEQ ID NO: 686740 - DNA, 19 bp, Mus musculus
  siRNA target sequence for Tacc2 (NM_021314.1,697-715).
gcagcgggacttacaactt

SEQ ID NO: 686741 - DNA, 19 bp, Mus musculus
  siRNA target sequence for Tacc2 (NM_021314.1,698-716).
cagcgggacttacaactta

SEQ ID NO: 686742 - DNA, 19 bp, Mus musculus
  siRNA target sequence for Tacc2 (NM_021314.1,700-718).
gcgggacttacaacttaga

SEQ ID NO: 686743 - DNA, 19 bp, Mus musculus
  siRNA target sequence for Tacc2 (NM_021314.1,702-720).
gggacttacaacttagact

SEQ ID NO: 686744 - DNA, 19 bp, Mus musculus
  siRNA target sequence for Tacc2 (NM_021314.1,967-985).
gcacccttaagcgaactaa

SEQ ID NO: 686745 - DNA, 19 bp, Mus musculus
  siRNA target sequence for Tacc2 (NM_021314.1,968-986).
cacccttaagcgaactaaa

SEQ ID NO: 686746 - DNA, 19 bp, Mus musculus
  siRNA target sequence for Tacc2 (NM_021314.1,970-988).
cccttaagcgaactaaaaa

SEQ ID NO: 686747 - DNA, 19 bp, Mus musculus
  siRNA target sequence for Tacc2 (NM_021314.1,971-989).
ccttaagcgaactaaaaaa

SEQ ID NO: 686748 - DNA, 19 bp, Mus musculus
  siRNA target sequence for Tacc2 (NM_021314.1,972-990).
cttaagcgaactaaaaaaa

SEQ ID NO: 686749 - DNA, 19 bp, Mus musculus
  siRNA target sequence for Tacc2 (NM_021314.1,993-1011).
cggccaccttccttgaaaa

SEQ ID NO: 686750 - DNA, 19 bp, Mus musculus
  siRNA target sequence for Tacc2 (NM_021314.1,1281-1299).
cccccagttgggaggaaat

SEQ ID NO: 686751 - DNA, 19 bp, Mus musculus
  siRNA target sequence for Tacc2 (NM_021314.1,1394-1412).
gctggagtttgactattct

SEQ ID NO: 686752 - DNA, 19 bp, Mus musculus
  siRNA target sequence for Tacc2 (NM_021314.1,1522-1540).
cccccgagaaacttgacaa

SEQ ID NO: 686753 - DNA, 19 bp, Mus musculus
  siRNA target sequence for Tacc2 (NM_021314.1,1579-1597).
gtgacacccctattgctaa

SEQ ID NO: 686754 - DNA, 19 bp, Mus musculus
  siRNA target sequence for Tacc2 (NM_021314.1,1583-1601).
cacccctattgctaaaggt

SEQ ID NO: 686755 - DNA, 19 bp, Mus musculus
  siRNA target sequence for Tacc2 (NM_021314.1,1599-1617).
ggtacctacacctttgata

SEQ ID NO: 686756 - DNA, 19 bp, Mus musculus
  siRNA target sequence for Tacc2 (NM_021314.1,1600-1618).
gtacctacacctttgatat

SEQ ID NO: 686757 - DNA, 19 bp, Mus musculus
  siRNA target sequence for Tacc2 (NM_021314.1,1627-1645).
gggatgaccccaattttaa

SEQ ID NO: 686758 - DNA, 19 bp, Mus musculus
  siRNA target sequence for Tacc2 (NM_021314.1,1690-1708).
cccaacaatcgtacaactt

SEQ ID NO: 686759 - DNA, 19 bp, Mus musculus
  siRNA target sequence for Tacc2 (NM_021314.1,1691-1709).
ccaacaatcgtacaacttt

SEQ ID NO: 686760 - DNA, 19 bp, Mus musculus
  siRNA target sequence for Tacc2 (NM_021314.1,1823-1841).
ggatggggatgggttgaat

SEQ ID NO: 686761 - DNA, 19 bp, Mus musculus
  siRNA target sequence for Tacc2 (NM_021314.1,1824-1842).
gatggggatgggttgaata

SEQ ID NO: 686762 - DNA, 19 bp, Mus musculus
  siRNA target sequence for Tacc2 (NM_021314.1,1897-1915).
ctgtgtgttctctgtttga

SEQ ID NO: 686763 - DNA, 19 bp, Mus musculus
  siRNA target sequence for Tacc2 (NM_021314.1,2064-2082).
cagaagtggacgtgtatga

SEQ ID NO: 686764 - DNA, 19 bp, Mus musculus
  siRNA target sequence for Tacc2 (NM_021314.1,2122-2140).
cctcggacctgtctaactt

SEQ ID NO: 686765 - DNA, 19 bp, Mus musculus
  siRNA target sequence for Tacc2 (NM_021314.1,2123-2141).
ctcggacctgtctaacttt

SEQ ID NO: 686766 - DNA, 19 bp, Mus musculus
  siRNA target sequence for Tacc2 (NM_021314.1,2125-2143).
cggacctgtctaactttgt

SEQ ID NO: 686767 - DNA, 19 bp, Mus musculus
  siRNA target sequence for Tacc2 (NM_021314.1,2126-2144).
ggacctgtctaactttgta

SEQ ID NO: 686768 - DNA, 19 bp, Mus musculus
  siRNA target sequence for Tacc2 (NM_021314.1,2127-2145).
gacctgtctaactttgtaa

SEQ ID NO: 686769 - DNA, 19 bp, Mus musculus
  siRNA target sequence for Tacc2 (NM_021314.1,2129-2147).
cctgtctaactttgtaaat

SEQ ID NO: 686770 - DNA, 19 bp, Mus musculus
  siRNA target sequence for Tacc2 (NM_021314.1,2194-2212).
cctatgaaattgaatacat

SEQ ID NO: 686771 - DNA, 19 bp, Mus musculus
  siRNA target sequence for Tacc2 (NM_021314.1,2316-2334).
ccagtccggatgtcagatt

SEQ ID NO: 686772 - DNA, 19 bp, Mus musculus
  siRNA target sequence for Tacc2 (NM_021314.1,2347-2365).
gttcagggtcgagttttga

SEQ ID NO: 686773 - DNA, 19 bp, Mus musculus
  siRNA target sequence for Tacc2 (NM_021314.1,2369-2387).
caccgaagcccttgtgaat

SEQ ID NO: 686774 - DNA, 19 bp, Mus musculus
  siRNA target sequence for Tacc2 (NM_021314.1,2619-2637).
cctgacttagcagaaaaga

SEQ ID NO: 686775 - DNA, 19 bp, Mus musculus
  siRNA target sequence for Tacc2 (NM_021314.1,3041-3059).
cctctcccaccaaactgta

SEQ ID NO: 686776 - DNA, 19 bp, Mus musculus
  siRNA target sequence for Tacc2 (NM_021314.1,3158-3176).
ggtcctggaaggttttcga

SEQ ID NO: 686777 - DNA, 19 bp, Mus musculus
  siRNA target sequence for Tacc2 (NM_021314.1,3164-3182).
ggaaggttttcgaaagaat

SEQ ID NO: 686778 - DNA, 19 bp, Mus musculus
  siRNA target sequence for Tacc2 (NM_021314.1,3215-3233).
cctatcccgagtgaagaaa

SEQ ID NO: 686779 - DNA, 19 bp, Mus musculus
  siRNA target sequence for Tacc2 (NM_021314.1,3375-3393).
gtggatgctctggaaagaa

SEQ ID NO: 686780 - DNA, 19 bp, Mus musculus
  siRNA target sequence for Tacc2 (NM_021314.1,3420-3438).
gaagaactcaccaagattt

SEQ ID NO: 686781 - DNA, 19 bp, Mus musculus
  siRNA target sequence for Tnip1 (NM_021327.1,176-194).
ggtgtccgcagcttttgaa

SEQ ID NO: 686782 - DNA, 19 bp, Mus musculus
  siRNA target sequence for Tnip1 (NM_021327.1,195-213).
cgtctagtggaggagaata

SEQ ID NO: 686783 - DNA, 19 bp, Mus musculus
  siRNA target sequence for Tnip1 (NM_021327.1,480-498).
cccgagccagcctccaaat

SEQ ID NO: 686784 - DNA, 19 bp, Mus musculus
  siRNA target sequence for Tnip1 (NM_021327.1,482-500).
cgagccagcctccaaatct

SEQ ID NO: 686785 - DNA, 19 bp, Mus musculus
  siRNA target sequence for Tnip1 (NM_021327.1,511-529).
gcgcctcctcggactttga

SEQ ID NO: 686786 - DNA, 19 bp, Mus musculus
  siRNA target sequence for Tnip1 (NM_021327.1,512-530).
cgcctcctcggactttgaa

SEQ ID NO: 686787 - DNA, 19 bp, Mus musculus
  siRNA target sequence for Tnip1 (NM_021327.1,514-532).
cctcctcggactttgaagt

SEQ ID NO: 686788 - DNA, 19 bp, Mus musculus
  siRNA target sequence for Tnip1 (NM_021327.1,537-555).
cctactgaggagcagaatt

SEQ ID NO: 686789 - DNA, 19 bp, Mus musculus
  siRNA target sequence for Tnip1 (NM_021327.1,571-589).
gccaccctacgaacatgat

SEQ ID NO: 686790 - DNA, 19 bp, Mus musculus
  siRNA target sequence for Tnip1 (NM_021327.1,712-730).
gcatggccctcgagttcaa

SEQ ID NO: 686791 - DNA, 19 bp, Mus musculus
  siRNA target sequence for Tnip1 (NM_021327.1,737-755).
ggcctccaaagtgcataaa

SEQ ID NO: 686792 - DNA, 19 bp, Mus musculus
  siRNA target sequence for Tnip1 (NM_021327.1,797-815).
gctgcgccaggagaatgaa

SEQ ID NO: 686793 - DNA, 19 bp, Mus musculus
  siRNA target sequence for Tnip1 (NM_021327.1,1004-1022).
cagtgtgatggcgagtaaa

SEQ ID NO: 686794 - DNA, 19 bp, Mus musculus
  siRNA target sequence for Tnip1 (NM_021327.1,1006-1024).
gtgtgatggcgagtaaagt

SEQ ID NO: 686795 - DNA, 19 bp, Mus musculus
  siRNA target sequence for Tnip1 (NM_021327.1,1254-1272).
ctcctcctggccaaatcga

SEQ ID NO: 686796 - DNA, 19 bp, Mus musculus
  siRNA target sequence for Tnip1 (NM_021327.1,1518-1536).
ctagtgacacagaatgagt

SEQ ID NO: 686797 - DNA, 19 bp, Mus musculus
  siRNA target sequence for Tnip1 (NM_021327.1,1592-1610).
ccgtgaacgcatgaatgaa

SEQ ID NO: 686798 - DNA, 19 bp, Mus musculus
  siRNA target sequence for Tpd52l1 (NM_009413.1,330-348).
gaagacgaaatcacaacat

SEQ ID NO: 686799 - DNA, 19 bp, Mus musculus
  siRNA target sequence for Tpd52l1 (NM_009413.1,335-353).
cgaaatcacaacattacga

SEQ ID NO: 686800 - DNA, 19 bp, Mus musculus
  siRNA target sequence for Tpd52l1 (NM_009413.1,341-359).
cacaacattacgacaagtt

SEQ ID NO: 686801 - DNA, 19 bp, Mus musculus
  siRNA target sequence for Tpd52l1 (NM_009413.1,376-394).
gacatctggttgagatcaa

SEQ ID NO: 686802 - DNA, 19 bp, Mus musculus
  siRNA target sequence for Tpd52l1 (NM_009413.1,404-422).
cggcatgaatctgatgaat

SEQ ID NO: 686803 - DNA, 19 bp, Mus musculus
  siRNA target sequence for Tpd52l1 (NM_009413.1,406-424).
gcatgaatctgatgaatga

SEQ ID NO: 686804 - DNA, 19 bp, Mus musculus
  siRNA target sequence for Tpd52l1 (NM_009413.1,410-428).
gaatctgatgaatgagtta

SEQ ID NO: 686805 - DNA, 19 bp, Mus musculus
  siRNA target sequence for Tpd52l1 (NM_009413.1,523-541).
cagcagctttcaataacgt

SEQ ID NO: 686806 - DNA, 19 bp, Mus musculus
  siRNA target sequence for Tpd52l1 (NM_009413.1,556-574).
gcaagaagtttggagatat

SEQ ID NO: 686807 - DNA, 19 bp, Mus musculus
  siRNA target sequence for Tpd52l1 (NM_009413.1,616-634).
ggaattcttctactttcaa

SEQ ID NO: 686808 - DNA, 19 bp, Mus musculus
  siRNA target sequence for Tpd52l1 (NM_009413.1,617-635).
gaattcttctactttcaaa

SEQ ID NO: 686809 - DNA, 19 bp, Mus musculus
  siRNA target sequence for Tpd52l1 (NM_009413.1,647-665).
gagggttgagacaactgtt

SEQ ID NO: 686810 - DNA, 19 bp, Mus musculus
  siRNA target sequence for Vamp1 (NM_009496.2,213-231).
ggtcctcctcccaacatga

SEQ ID NO: 686811 - DNA, 19 bp, Mus musculus
  siRNA target sequence for Vamp1 (NM_009496.2,222-240).
cccaacatgaccagtaaca

SEQ ID NO: 686812 - DNA, 19 bp, Mus musculus
  siRNA target sequence for Vamp1 (NM_009496.2,362-380).
gcaggccggagcatcacaa

SEQ ID NO: 686813 - DNA, 19 bp, Mus musculus
  siRNA target sequence for Vamp1 (NM_009496.2,363-381).
caggccggagcatcacaat

SEQ ID NO: 686814 - DNA, 19 bp, Mus musculus
  siRNA target sequence for Vamp1 (NM_009496.2,389-407).
cagtgctgccaagctaaaa

SEQ ID NO: 686815 - DNA, 19 bp, Mus musculus
  siRNA target sequence for Vamp1 (NM_009496.2,463-481).
ccatcatcgtggtagtgat

SEQ ID NO: 686816 - DNA, 19 bp, Mus musculus
  siRNA target sequence for Vamp1 (NM_009496.2,464-482).
catcatcgtggtagtgatt

SEQ ID NO: 686817 - DNA, 19 bp, Mus musculus
  siRNA target sequence for Vamp1 (NM_009496.2,467-485).
catcgtggtagtgattgta

SEQ ID NO: 686818 - DNA, 19 bp, Mus musculus
  siRNA target sequence for Vamp3 (NM_009498.3,113-131).
gccactggcagtaatcgaa

SEQ ID NO: 686819 - DNA, 19 bp, Mus musculus
  siRNA target sequence for Vamp3 (NM_009498.3,142-160).
gacacaaaatcaagtagat

SEQ ID NO: 686820 - DNA, 19 bp, Mus musculus
  siRNA target sequence for Vamp3 (NM_009498.3,180-198).
gagtcaatgtggataaggt

SEQ ID NO: 686821 - DNA, 19 bp, Mus musculus
  siRNA target sequence for Vamp3 (NM_009498.3,276-294).
caagtgctgccaagttgaa

SEQ ID NO: 686822 - DNA, 19 bp, Mus musculus
  siRNA target sequence for Vamp4 (NM_016796.2,119-137).
gttcaagcgccacctaaat

SEQ ID NO: 686823 - DNA, 19 bp, Mus musculus
  siRNA target sequence for Vamp4 (NM_016796.2,125-143).
gcgccacctaaatgatgat

SEQ ID NO: 686824 - DNA, 19 bp, Mus musculus
  siRNA target sequence for Vamp4 (NM_016796.2,146-164).
cgtgaccgggtctgtgaaa

SEQ ID NO: 686825 - DNA, 19 bp, Mus musculus
  siRNA target sequence for Vamp4 (NM_016796.2,147-165).
gtgaccgggtctgtgaaaa

SEQ ID NO: 686826 - DNA, 19 bp, Mus musculus
  siRNA target sequence for Vamp4 (NM_016796.2,149-167).
gaccgggtctgtgaaaagt

SEQ ID NO: 686827 - DNA, 19 bp, Mus musculus
  siRNA target sequence for Vamp4 (NM_016796.2,151-169).
ccgggtctgtgaaaagtga

SEQ ID NO: 686828 - DNA, 19 bp, Mus musculus
  siRNA target sequence for Vamp4 (NM_016796.2,246-264).
ggacctagaaatgataaaa

SEQ ID NO: 686829 - DNA, 19 bp, Mus musculus
  siRNA target sequence for Vamp4 (NM_016796.2,278-296).
gaatcaggtggatgaagtt

SEQ ID NO: 686830 - DNA, 19 bp, Mus musculus
  siRNA target sequence for Vamp4 (NM_016796.2,288-306).
gatgaagttattgatgtaa

SEQ ID NO: 686831 - DNA, 19 bp, Mus musculus
  siRNA target sequence for Vamp4 (NM_016796.2,303-321).
gtaatgcaagagaatatta

SEQ ID NO: 686832 - DNA, 19 bp, Mus musculus
  siRNA target sequence for Vamp4 (NM_016796.2,312-330).
gagaatattacaaaggtaa

SEQ ID NO: 686833 - DNA, 19 bp, Mus musculus
  siRNA target sequence for Vamp4 (NM_016796.2,314-332).
gaatattacaaaggtaatt

SEQ ID NO: 686834 - DNA, 19 bp, Mus musculus
  siRNA target sequence for Vamp4 (NM_016796.2,417-435).
cagcttcgaaggcaaatgt

SEQ ID NO: 686835 - DNA, 19 bp, Mus musculus
  siRNA target sequence for Vamp4 (NM_016796.2,434-452).
gtggtggcgtggatgcaaa

SEQ ID NO: 686836 - DNA, 19 bp, Mus musculus
  siRNA target sequence for Vamp4 (NM_016796.2,436-454).
ggtggcgtggatgcaaaat

SEQ ID NO: 686837 - DNA, 19 bp, Mus musculus
  siRNA target sequence for Vamp4 (NM_016796.2,437-455).
gtggcgtggatgcaaaata

SEQ ID NO: 686838 - DNA, 19 bp, Mus musculus
  siRNA target sequence for Vamp4 (NM_016796.2,477-495).
gcagcgatccttttgctaa

SEQ ID NO: 686839 - DNA, 19 bp, Mus musculus
  siRNA target sequence for Vamp4 (NM_016796.2,478-496).
cagcgatccttttgctaat

SEQ ID NO: 686840 - DNA, 19 bp, Mus musculus
  siRNA target sequence for Vamp4 (NM_016796.2,480-498).
gcgatccttttgctaatga

SEQ ID NO: 686841 - DNA, 19 bp, Mus musculus
  siRNA target sequence for Vamp4 (NM_016796.2,481-499).
cgatccttttgctaatgat

SEQ ID NO: 686842 - DNA, 19 bp, Mus musculus
  siRNA target sequence for Vamp4 (NM_016796.2,509-527).
gatcatcctgcacttgaaa

SEQ ID NO: 686843 - DNA, 19 bp, Mus musculus
  siRNA target sequence for Vim (NM_011701.3,707-725).
gcgtgcggctgcttcaaga

SEQ ID NO: 686844 - DNA, 19 bp, Mus musculus
  siRNA target sequence for Vim (NM_011701.3,742-760).
ctggccgacgccatcaaca

SEQ ID NO: 686845 - DNA, 19 bp, Mus musculus
  siRNA target sequence for Vim (NM_011701.3,1094-1112).
cattcagacaggatgttga

SEQ ID NO: 686846 - DNA, 19 bp, Mus musculus
  siRNA target sequence for Vim (NM_011701.3,1098-1116).
cagacaggatgttgacaat

SEQ ID NO: 686847 - DNA, 19 bp, Mus musculus
  siRNA target sequence for Vim (NM_011701.3,1294-1312).
gtgcgccagcagtatgaaa

SEQ ID NO: 686848 - DNA, 19 bp, Mus musculus
  siRNA target sequence for Vim (NM_011701.3,1610-1628).
ctcgtcaccttcgtgaata

SEQ ID NO: 686849 - DNA, 19 bp, Mus musculus
  siRNA target sequence for Vim (NM_011701.3,1834-1852).
ggacaggtgatcaatgaga

SEQ ID NO: 686850 - DNA, 19 bp, Mus musculus
  siRNA target sequence for 4921511D23Rik (NM_029160.1,147-165).
ctggagcaggtcaccataa

SEQ ID NO: 686851 - DNA, 19 bp, Mus musculus
  siRNA target sequence for 4921511D23Rik (NM_029160.1,166-184).
cggaaacatcggaagatga

SEQ ID NO: 686852 - DNA, 19 bp, Mus musculus
  siRNA target sequence for 4921511D23Rik (NM_029160.1,168-186).
gaaacatcggaagatgaat

SEQ ID NO: 686853 - DNA, 19 bp, Mus musculus
  siRNA target sequence for 4921511D23Rik (NM_029160.1,243-261).
ctggaaaaagcaattcaca

SEQ ID NO: 686854 - DNA, 19 bp, Mus musculus
  siRNA target sequence for 4921511D23Rik (NM_029160.1,276-294).
gccagagacatccatattt

SEQ ID NO: 686855 - DNA, 19 bp, Mus musculus
  siRNA target sequence for 4921511D23Rik (NM_029160.1,280-298).
gagacatccatattttgga

SEQ ID NO: 686856 - DNA, 19 bp, Mus musculus
  siRNA target sequence for 4921511D23Rik (NM_029160.1,332-350).
gcaggaagccatagaagat

SEQ ID NO: 686857 - DNA, 19 bp, Mus musculus
  siRNA target sequence for 4921511D23Rik (NM_029160.1,339-357).
gccatagaagattttctct

SEQ ID NO: 686858 - DNA, 19 bp, Mus musculus
  siRNA target sequence for 4921511D23Rik (NM_029160.1,405-423).
caggccgagtggtatgagt

SEQ ID NO: 686859 - DNA, 19 bp, Mus musculus
  siRNA target sequence for 4921511D23Rik (NM_029160.1,407-425).
ggccgagtggtatgagtta

SEQ ID NO: 686860 - DNA, 19 bp, Mus musculus
  siRNA target sequence for 4921511D23Rik (NM_029160.1,408-426).
gccgagtggtatgagttaa

SEQ ID NO: 686861 - DNA, 19 bp, Mus musculus
  siRNA target sequence for 4921511D23Rik (NM_029160.1,409-427).
ccgagtggtatgagttaat

SEQ ID NO: 686862 - DNA, 19 bp, Mus musculus
  siRNA target sequence for 4921511D23Rik (NM_029160.1,410-428).
cgagtggtatgagttaata

SEQ ID NO: 686863 - DNA, 19 bp, Mus musculus
  siRNA target sequence for 4921511D23Rik (NM_029160.1,460-478).
gtaatgttcccgatgtcta

SEQ ID NO: 686864 - DNA, 19 bp, Mus musculus
  siRNA target sequence for 4921511D23Rik (NM_029160.1,479-497).
cagccaggtgatgctttta

SEQ ID NO: 686865 - DNA, 19 bp, Mus musculus
  siRNA target sequence for 4921511D23Rik (NM_029160.1,679-697).
catcatacgaaccaactat

SEQ ID NO: 686866 - DNA, 19 bp, Mus musculus
  siRNA target sequence for 4921511D23Rik (NM_029160.1,691-709).
caactataagggtgttaca

SEQ ID NO: 686867 - DNA, 19 bp, Mus musculus
  siRNA target sequence for 4921511D23Rik (NM_029160.1,765-783).
cgagctgttgggaagattt

SEQ ID NO: 686868 - DNA, 19 bp, Mus musculus
  siRNA target sequence for 4921511D23Rik (NM_029160.1,831-849).
gttcctgtaattaaaggat

SEQ ID NO: 686869 - DNA, 19 bp, Mus musculus
  siRNA target sequence for 4921511D23Rik (NM_029160.1,928-946).
gcccaactcagaaaagtct

SEQ ID NO: 686870 - DNA, 19 bp, Mus musculus
  siRNA target sequence for 4921511D23Rik (NM_029160.1,969-987).
ggatataaatcaaagttga

SEQ ID NO: 686871 - DNA, 19 bp, Mus musculus
  siRNA target sequence for 4921511D23Rik (NM_029160.1,1032-1050).
gatccaaacgtgacttcat

SEQ ID NO: 686872 - DNA, 19 bp, Mus musculus
  siRNA target sequence for 4921511D23Rik (NM_029160.1,1035-1053).
ccaaacgtgacttcatgta

SEQ ID NO: 686873 - DNA, 19 bp, Mus musculus
  siRNA target sequence for 4921511D23Rik (NM_029160.1,1040-1058).
cgtgacttcatgtacagaa

SEQ ID NO: 686874 - DNA, 19 bp, Mus musculus
  siRNA target sequence for 4921511D23Rik (NM_029160.1,1061-1079).
cgtttctgcagcaaaattt

SEQ ID NO: 686875 - DNA, 19 bp, Mus musculus
  siRNA target sequence for 4921511D23Rik (NM_029160.1,1139-1157).
gcatccctgcagagactat

SEQ ID NO: 686876 - DNA, 19 bp, Mus musculus
  siRNA target sequence for 4921511D23Rik (NM_029160.1,1143-1161).
ccctgcagagactatctca

SEQ ID NO: 686877 - DNA, 19 bp, Mus musculus
  siRNA target sequence for 4921511D23Rik (NM_029160.1,1144-1162).
cctgcagagactatctcat

SEQ ID NO: 686878 - DNA, 19 bp, Mus musculus
  siRNA target sequence for 4921511D23Rik (NM_029160.1,1160-1178).
catctcctgtagtgaagat

SEQ ID NO: 686879 - DNA, 19 bp, Mus musculus
  siRNA target sequence for Sdccag8 (NM_029756.1,392-410).
ccgggaacgtgccaataga

SEQ ID NO: 686880 - DNA, 19 bp, Mus musculus
  siRNA target sequence for Sdccag8 (NM_029756.1,393-411).
cgggaacgtgccaatagaa

SEQ ID NO: 686881 - DNA, 19 bp, Mus musculus
  siRNA target sequence for Sdccag8 (NM_029756.1,409-427).
gaagcattcaccagttgaa

SEQ ID NO: 686882 - DNA, 19 bp, Mus musculus
  siRNA target sequence for Sdccag8 (NM_029756.1,677-695).
caacctcgttcctatcatt

SEQ ID NO: 686883 - DNA, 19 bp, Mus musculus
  siRNA target sequence for Sdccag8 (NM_029756.1,753-771).
gaattgtctggaatgaaaa

SEQ ID NO: 686884 - DNA, 19 bp, Mus musculus
  siRNA target sequence for Sdccag8 (NM_029756.1,775-793).
gggtgcaagtagttgtact

SEQ ID NO: 686885 - DNA, 19 bp, Mus musculus
  siRNA target sequence for Sdccag8 (NM_029756.1,776-794).
ggtgcaagtagttgtactt

SEQ ID NO: 686886 - DNA, 19 bp, Mus musculus
  siRNA target sequence for Sdccag8 (NM_029756.1,844-862).
cattgagggagcaaacatt

SEQ ID NO: 686887 - DNA, 19 bp, Mus musculus
  siRNA target sequence for Sdccag8 (NM_029756.1,887-905).
gaattcttggattatgaca

SEQ ID NO: 686888 - DNA, 19 bp, Mus musculus
  siRNA target sequence for Sdccag8 (NM_029756.1,896-914).
gattatgacacgagaagat

SEQ ID NO: 686889 - DNA, 19 bp, Mus musculus
  siRNA target sequence for Sdccag8 (NM_029756.1,934-952).
caaagagaccattttctca

SEQ ID NO: 686890 - DNA, 19 bp, Mus musculus
  siRNA target sequence for Sdccag8 (NM_029756.1,988-1006).
gtgatgccaataaatggaa

SEQ ID NO: 686891 - DNA, 19 bp, Mus musculus
  siRNA target sequence for Sdccag8 (NM_029756.1,1092-1110).
gctgaataccagaaaacct

SEQ ID NO: 686892 - DNA, 19 bp, Mus musculus
  siRNA target sequence for Sdccag8 (NM_029756.1,1113-1131).
gaggatcttaaggaaagat

SEQ ID NO: 686893 - DNA, 19 bp, Mus musculus
  siRNA target sequence for Sdccag8 (NM_029756.1,1253-1271).
catcgagaggctgactaaa

SEQ ID NO: 686894 - DNA, 19 bp, Mus musculus
  siRNA target sequence for Sdccag8 (NM_029756.1,1383-1401).
gaggaagccaactttgaga

SEQ ID NO: 686895 - DNA, 19 bp, Mus musculus
  siRNA target sequence for Sdccag8 (NM_029756.1,1640-1658).
cagtcacttagaggaaatt

SEQ ID NO: 686896 - DNA, 19 bp, Mus musculus
  siRNA target sequence for Sdccag8 (NM_029756.1,1705-1723).
gagaaatgcgctttcagtt

SEQ ID NO: 686897 - DNA, 19 bp, Mus musculus
  siRNA target sequence for Sdccag8 (NM_029756.1,1788-1806).
cacaaggatcttgaaatga

SEQ ID NO: 686898 - DNA, 19 bp, Mus musculus
  siRNA target sequence for Sdccag8 (NM_029756.1,1957-1975).
gactggaaaaagatagcat

SEQ ID NO: 686899 - DNA, 19 bp, Mus musculus
  siRNA target sequence for Sdccag8 (NM_029756.1,2066-2084).
gacccagcacgacaaaact

SEQ ID NO: 686900 - DNA, 19 bp, Mus musculus
  siRNA target sequence for Sdccag8 (NM_029756.1,2069-2087).
ccagcacgacaaaactgaa

SEQ ID NO: 686901 - DNA, 19 bp, Mus musculus
  siRNA target sequence for Sdccag8 (NM_029756.1,2070-2088).
cagcacgacaaaactgaaa

SEQ ID NO: 686902 - DNA, 19 bp, Mus musculus
  siRNA target sequence for Sdccag8 (NM_029756.1,2189-2207).
gagcagatcgcaaatagtt

SEQ ID NO: 686903 - DNA, 19 bp, Mus musculus
  siRNA target sequence for Sdccag8 (NM_029756.1,2215-2233).
gtcaagagaagagatactt

SEQ ID NO: 686904 - DNA, 19 bp, Mus musculus
  siRNA target sequence for Sdccag8 (NM_029756.1,2261-2279).
gagaaatgacgaactagaa

SEQ ID NO: 686905 - DNA, 19 bp, Mus musculus
  siRNA target sequence for Sdccag8 (NM_029756.1,2263-2281).
gaaatgacgaactagaaga

SEQ ID NO: 686906 - DNA, 19 bp, Mus musculus
  siRNA target sequence for Sdccag8 (NM_029756.1,2326-2344).
gactcaggcagctggataa

SEQ ID NO: 686907 - DNA, 19 bp, Mus musculus
  siRNA target sequence for Sdccag8 (NM_029756.1,2370-2388).
ctggtgcagttgcttaaca

SEQ ID NO: 686908 - DNA, 19 bp, Mus musculus
  siRNA target sequence for Arpc1a (NM_019767.1,205-223).
ccctgagccccaataacca

SEQ ID NO: 686909 - DNA, 19 bp, Mus musculus
  siRNA target sequence for Arpc1a (NM_019767.1,206-224).
cctgagccccaataaccat

SEQ ID NO: 686910 - DNA, 19 bp, Mus musculus
  siRNA target sequence for Arpc1a (NM_019767.1,272-290).
cgagctgaaggaacataat

SEQ ID NO: 686911 - DNA, 19 bp, Mus musculus
  siRNA target sequence for Arpc1a (NM_019767.1,282-300).
gaacataatgggcatatca

SEQ ID NO: 686912 - DNA, 19 bp, Mus musculus
  siRNA target sequence for Arpc1a (NM_019767.1,294-312).
catatcacaggtattgact

SEQ ID NO: 686913 - DNA, 19 bp, Mus musculus
  siRNA target sequence for Arpc1a (NM_019767.1,319-337).
ctaagagcgaccgtattgt

SEQ ID NO: 686914 - DNA, 19 bp, Mus musculus
  siRNA target sequence for Arpc1a (NM_019767.1,402-420).
ctggtgatcctgaggatta

SEQ ID NO: 686915 - DNA, 19 bp, Mus musculus
  siRNA target sequence for Arpc1a (NM_019767.1,423-441).
cgtgcagccacttttgtga

SEQ ID NO: 686916 - DNA, 19 bp, Mus musculus
  siRNA target sequence for Arpc1a (NM_019767.1,424-442).
gtgcagccacttttgtgaa

SEQ ID NO: 686917 - DNA, 19 bp, Mus musculus
  siRNA target sequence for Arpc1a (NM_019767.1,826-844).
ctgatgcctcaaaaagtgt

SEQ ID NO: 686918 - DNA, 19 bp, Mus musculus
  siRNA target sequence for Arpc1a (NM_019767.1,934-952).
gctgcccgatgctctttaa

SEQ ID NO: 686919 - DNA, 19 bp, Mus musculus
  siRNA target sequence for Arpc1a (NM_019767.1,937-955).
gcccgatgctctttaacta

SEQ ID NO: 686920 - DNA, 19 bp, Mus musculus
  siRNA target sequence for Arpc1a (NM_019767.1,957-975).
gatgaccgtggctgtttga

SEQ ID NO: 686921 - DNA, 19 bp, Mus musculus
  siRNA target sequence for Arpc1a (NM_019767.1,1019-1037).
caacatgtctgctatggaa

SEQ ID NO: 686922 - DNA, 19 bp, Mus musculus
  siRNA target sequence for Arpc1a (NM_019767.1,1112-1130).
catcactcaagtgtctatt

SEQ ID NO: 686923 - DNA, 19 bp, Mus musculus
  siRNA target sequence for Arpc1a (NM_019767.1,1115-1133).
cactcaagtgtctatttat

SEQ ID NO: 686924 - DNA, 19 bp, Mus musculus
  siRNA target sequence for Arpc1a (NM_019767.1,1145-1163).
gcaagattgtcgcaaattt

SEQ ID NO: 686925 - DNA, 19 bp, Mus musculus
  siRNA target sequence for Arpc1a (NM_019767.1,1146-1164).
caagattgtcgcaaatttt

SEQ ID NO: 686926 - DNA, 19 bp, Mus musculus
  siRNA target sequence for Arpc1a (NM_019767.1,1149-1167).
gattgtcgcaaattttgca

SEQ ID NO: 686927 - DNA, 19 bp, Mus musculus
  siRNA target sequence for Arpc1a (NM_019767.1,1179-1197).
gatggagccatgacaattt

SEQ ID NO: 686928 - DNA, 19 bp, Mus musculus
  siRNA target sequence for Arpc1b (NM_023142.1,828-846).
cccggtgctgtttacctat

SEQ ID NO: 686929 - DNA, 19 bp, Mus musculus
  siRNA target sequence for Arpc1b (NM_023142.1,832-850).
gtgctgtttacctatgaca

SEQ ID NO: 686930 - DNA, 19 bp, Mus musculus
  siRNA target sequence for Arpc1b (NM_023142.1,834-852).
gctgtttacctatgacaat

SEQ ID NO: 686931 - DNA, 19 bp, Mus musculus
  siRNA target sequence for Arpc3 (NM_019824.2,133-151).
cctccgaagccagttcaaa

SEQ ID NO: 686932 - DNA, 19 bp, Mus musculus
  siRNA target sequence for Arpc3 (NM_019824.2,161-179).
cctcgcgagaccaaagaca

SEQ ID NO: 686933 - DNA, 19 bp, Mus musculus
  siRNA target sequence for Arpc3 (NM_019824.2,223-241).
cttcttcaagaactatgaa

SEQ ID NO: 686934 - DNA, 19 bp, Mus musculus
  siRNA target sequence for Arpc3 (NM_019824.2,254-272).
gcggacaggacattgatct

SEQ ID NO: 686935 - DNA, 19 bp, Mus musculus
  siRNA target sequence for Arpc3 (NM_019824.2,271-289).
ctacatcacactctacatt

SEQ ID NO: 686936 - DNA, 19 bp, Mus musculus
  siRNA target sequence for Arpc3 (NM_019824.2,297-315).
gtctaaagaaactccaaaa

SEQ ID NO: 686937 - DNA, 19 bp, Mus musculus
  siRNA target sequence for Arpc3 (NM_019824.2,330-348).
gccaaggcgagaaggaaat

SEQ ID NO: 686938 - DNA, 19 bp, Mus musculus
  siRNA target sequence for Arpc3 (NM_019824.2,332-350).
caaggcgagaaggaaatgt

SEQ ID NO: 686939 - DNA, 19 bp, Mus musculus
  siRNA target sequence for Arpc3 (NM_019824.2,535-553).
caagtggtggacttgcttt

SEQ ID NO: 686940 - DNA, 19 bp, Mus musculus
  siRNA target sequence for Arpc5 (NM_026369.1,298-316).
caggcagcatcgtcttgaa

SEQ ID NO: 686941 - DNA, 19 bp, Mus musculus
  siRNA target sequence for D15Ertd366e (NM_023063.1,483-501).
cgaaaacacagaaacttca

SEQ ID NO: 686942 - DNA, 19 bp, Mus musculus
  siRNA target sequence for D15Ertd366e (NM_023063.1,639-657).
cctggatgactgggaaata

SEQ ID NO: 686943 - DNA, 19 bp, Mus musculus
  siRNA target sequence for D15Ertd366e (NM_023063.1,658-676).
ggtgcgggtcatttgtctt

SEQ ID NO: 686944 - DNA, 19 bp, Mus musculus
  siRNA target sequence for D15Ertd366e (NM_023063.1,724-742).
ctgccacgcctctcagaaa

SEQ ID NO: 686945 - DNA, 19 bp, Mus musculus
  siRNA target sequence for D15Ertd366e (NM_023063.1,737-755).
cagaaacctccataaagga

SEQ ID NO: 686946 - DNA, 19 bp, Mus musculus
  siRNA target sequence for D15Ertd366e (NM_023063.1,961-979).
gaagatgacacctgtaact

SEQ ID NO: 686947 - DNA, 19 bp, Mus musculus
  siRNA target sequence for D15Ertd366e (NM_023063.1,1157-1175).
ccaaccagcaggtgtttca

SEQ ID NO: 686948 - DNA, 19 bp, Mus musculus
  siRNA target sequence for D15Ertd366e (NM_023063.1,1235-1253).
ccttacatggacgaatcta

SEQ ID NO: 686949 - DNA, 19 bp, Mus musculus
  siRNA target sequence for D15Ertd366e (NM_023063.1,1240-1258).
catggacgaatctactgta

SEQ ID NO: 686950 - DNA, 19 bp, Mus musculus
  siRNA target sequence for D15Ertd366e (NM_023063.1,1340-1358).
caagcaagagcgacaatga

SEQ ID NO: 686951 - DNA, 19 bp, Mus musculus
  siRNA target sequence for D15Ertd366e (NM_023063.1,1448-1466).
gcgtgctggcggcaagtat

SEQ ID NO: 686952 - DNA, 19 bp, Mus musculus
  siRNA target sequence for D15Ertd366e (NM_023063.1,1579-1597).
gaggaagggatcaaagtat

SEQ ID NO: 686953 - DNA, 19 bp, Mus musculus
  siRNA target sequence for D15Ertd366e (NM_023063.1,1825-1843).
gggatagcgacgatggaaa

SEQ ID NO: 686954 - DNA, 19 bp, Mus musculus
  siRNA target sequence for D15Ertd366e (NM_023063.1,1926-1944).
gagcaaggaccgtagttct

SEQ ID NO: 686955 - DNA, 19 bp, Mus musculus
  siRNA target sequence for D15Ertd366e (NM_023063.1,1928-1946).
gcaaggaccgtagttcttt

SEQ ID NO: 686956 - DNA, 19 bp, Mus musculus
  siRNA target sequence for D15Ertd366e (NM_023063.1,1929-1947).
caaggaccgtagttctttt

SEQ ID NO: 686957 - DNA, 19 bp, Mus musculus
  siRNA target sequence for D15Ertd366e (NM_023063.1,2048-2066).
gttggtctggctttgtaga

SEQ ID NO: 686958 - DNA, 19 bp, Mus musculus
  siRNA target sequence for D15Ertd366e (NM_023063.1,2069-2087).
ccacggctgctaaagaatt

SEQ ID NO: 686959 - DNA, 19 bp, Mus musculus
  siRNA target sequence for D15Ertd366e (NM_023063.1,2073-2091).
ggctgctaaagaattcact

SEQ ID NO: 686960 - DNA, 19 bp, Mus musculus
  siRNA target sequence for D15Ertd366e (NM_023063.1,2074-2092).
gctgctaaagaattcacta

SEQ ID NO: 686961 - DNA, 19 bp, Mus musculus
  siRNA target sequence for D15Ertd366e (NM_023063.1,2172-2190).
gagaaaccggtactatgat

SEQ ID NO: 686962 - DNA, 19 bp, Mus musculus
  siRNA target sequence for D15Ertd366e (NM_023063.1,2174-2192).
gaaaccggtactatgatga

SEQ ID NO: 686963 - DNA, 19 bp, Mus musculus
  siRNA target sequence for Myoz1 (NM_021508.2,227-245).
caagcaaactgattatgga

SEQ ID NO: 686964 - DNA, 19 bp, Mus musculus
  siRNA target sequence for Myoz1 (NM_021508.2,373-391).
cagatgcgggtggagaaat

SEQ ID NO: 686965 - DNA, 19 bp, Mus musculus
  siRNA target sequence for Myoz1 (NM_021508.2,379-397).
cgggtggagaaatttatct

SEQ ID NO: 686966 - DNA, 19 bp, Mus musculus
  siRNA target sequence for Myoz1 (NM_021508.2,385-403).
gagaaatttatctatgaga

SEQ ID NO: 686967 - DNA, 19 bp, Mus musculus
  siRNA target sequence for Myoz1 (NM_021508.2,420-438).
ctctgacagctcaatggat

SEQ ID NO: 686968 - DNA, 19 bp, Mus musculus
  siRNA target sequence for Myoz1 (NM_021508.2,706-724).
gtcactgtgttcaagactt

SEQ ID NO: 686969 - DNA, 19 bp, Mus musculus
  siRNA target sequence for Myoz1 (NM_021508.2,811-829).
gctgaactccccaaatata

SEQ ID NO: 686970 - DNA, 19 bp, Mus musculus
  siRNA target sequence for Myoz1 (NM_021508.2,814-832).
gaactccccaaatataagt

SEQ ID NO: 686971 - DNA, 19 bp, Mus musculus
  siRNA target sequence for Myoz1 (NM_021508.2,853-871).
ccctacggtggatatgaga

SEQ ID NO: 686972 - DNA, 19 bp, Mus musculus
  siRNA target sequence for Myoz1 (NM_021508.2,854-872).
cctacggtggatatgagaa

SEQ ID NO: 686973 - DNA, 19 bp, Mus musculus
  siRNA target sequence for Myoz2 (NM_021503.1,233-251).
ggacctgggcaaaaaagtt

SEQ ID NO: 686974 - DNA, 19 bp, Mus musculus
  siRNA target sequence for Myoz2 (NM_021503.1,234-252).
gacctgggcaaaaaagtta

SEQ ID NO: 686975 - DNA, 19 bp, Mus musculus
  siRNA target sequence for Myoz2 (NM_021503.1,260-278).
cagagacatcatgatagaa

SEQ ID NO: 686976 - DNA, 19 bp, Mus musculus
  siRNA target sequence for Myoz2 (NM_021503.1,284-302).
gtcccatttcagtaatcgt

SEQ ID NO: 686977 - DNA, 19 bp, Mus musculus
  siRNA target sequence for Myoz2 (NM_021503.1,300-318).
cgtggggccaggctgttta

SEQ ID NO: 686978 - DNA, 19 bp, Mus musculus
  siRNA target sequence for Myoz2 (NM_021503.1,314-332).
gtttaagatgcgtcaaaga

SEQ ID NO: 686979 - DNA, 19 bp, Mus musculus
  siRNA target sequence for Myoz2 (NM_021503.1,320-338).
gatgcgtcaaagaagatct

SEQ ID NO: 686980 - DNA, 19 bp, Mus musculus
  siRNA target sequence for Myoz2 (NM_021503.1,354-372).
gaaaatttccagtatgaat

SEQ ID NO: 686981 - DNA, 19 bp, Mus musculus
  siRNA target sequence for Myoz2 (NM_021503.1,369-387).
gaatctagagcacaaatta

SEQ ID NO: 686982 - DNA, 19 bp, Mus musculus
  siRNA target sequence for Myoz2 (NM_021503.1,378-396).
gcacaaattaatcacaata

SEQ ID NO: 686983 - DNA, 19 bp, Mus musculus
  siRNA target sequence for Myoz2 (NM_021503.1,493-511).
ccccaaatccagagaacat

SEQ ID NO: 686984 - DNA, 19 bp, Mus musculus
  siRNA target sequence for Myoz2 (NM_021503.1,506-524).
gaacatcgcaccaggatat

SEQ ID NO: 686985 - DNA, 19 bp, Mus musculus
  siRNA target sequence for Myoz2 (NM_021503.1,509-527).
catcgcaccaggatattct

SEQ ID NO: 686986 - DNA, 19 bp, Mus musculus
  siRNA target sequence for Myoz2 (NM_021503.1,565-583).
cgacggccgttcctaagta

SEQ ID NO: 686987 - DNA, 19 bp, Mus musculus
  siRNA target sequence for Myoz2 (NM_021503.1,568-586).
cggccgttcctaagtacta

SEQ ID NO: 686988 - DNA, 19 bp, Mus musculus
  siRNA target sequence for Myoz2 (NM_021503.1,681-699).
cgggattacaggagcttta

SEQ ID NO: 686989 - DNA, 19 bp, Mus musculus
  siRNA target sequence for Myoz2 (NM_021503.1,704-722).
ggttgccactccatttgga

SEQ ID NO: 686990 - DNA, 19 bp, Mus musculus
  siRNA target sequence for Myoz2 (NM_021503.1,823-841).
cgggcagacgatgctttaa

SEQ ID NO: 686991 - DNA, 19 bp, Mus musculus
  siRNA target sequence for Myoz2 (NM_021503.1,910-928).
ccactgtaccggaatcaga

SEQ ID NO: 686992 - DNA, 19 bp, Mus musculus
  siRNA target sequence for Myoz2 (NM_021503.1,911-929).
cactgtaccggaatcagat

SEQ ID NO: 686993 - DNA, 19 bp, Mus musculus
  siRNA target sequence for Krt2-16 (NM_008474.1,158-176).
ggcttgggtggttttggta

SEQ ID NO: 686994 - DNA, 19 bp, Mus musculus
  siRNA target sequence for Krt2-16 (NM_008474.1,174-192).
gtagtcggagcgtcatcaa

SEQ ID NO: 686995 - DNA, 19 bp, Mus musculus
  siRNA target sequence for Krt2-16 (NM_008474.1,177-195).
gtcggagcgtcatcaactt

SEQ ID NO: 686996 - DNA, 19 bp, Mus musculus
  siRNA target sequence for Krt2-16 (NM_008474.1,415-433).
ctacagaatcggaggaatt

SEQ ID NO: 686997 - DNA, 19 bp, Mus musculus
  siRNA target sequence for Krt2-16 (NM_008474.1,418-436).
cagaatcggaggaattgga

SEQ ID NO: 686998 - DNA, 19 bp, Mus musculus
  siRNA target sequence for Krt2-16 (NM_008474.1,643-661).
cctccaagaacagaaatgt

SEQ ID NO: 686999 - DNA, 19 bp, Mus musculus
  siRNA target sequence for Krt2-16 (NM_008474.1,679-697).
gcctctcttcgataactat

SEQ ID NO: 687000 - DNA, 19 bp, Mus musculus
  siRNA target sequence for Krt2-16 (NM_008474.1,680-698).
cctctcttcgataactata

SEQ ID NO: 687001 - DNA, 19 bp, Mus musculus
  siRNA target sequence for Krt2-16 (NM_008474.1,681-699).
ctctcttcgataactatat

SEQ ID NO: 687002 - DNA, 19 bp, Mus musculus
  siRNA target sequence for Krt2-16 (NM_008474.1,683-701).
ctcttcgataactatatca

SEQ ID NO: 687003 - DNA, 19 bp, Mus musculus
  siRNA target sequence for Krt2-16 (NM_008474.1,876-894).
ctttcctgaacaaatctga

SEQ ID NO: 687004 - DNA, 19 bp, Mus musculus
  siRNA target sequence for Krt2-16 (NM_008474.1,967-985).
gatgctgcaatcacacata

SEQ ID NO: 687005 - DNA, 19 bp, Mus musculus
  siRNA target sequence for Krt2-16 (NM_008474.1,970-988).
gctgcaatcacacatatca

SEQ ID NO: 687006 - DNA, 19 bp, Mus musculus
  siRNA target sequence for Krt2-16 (NM_008474.1,1030-1048).
gaacctagatgggatcata

SEQ ID NO: 687007 - DNA, 19 bp, Mus musculus
  siRNA target sequence for Krt2-16 (NM_008474.1,1450-1468).
gctggagggcgaggaaatt

SEQ ID NO: 687008 - DNA, 19 bp, Mus musculus
  siRNA target sequence for Krt2-16 (NM_008474.1,1484-1502).
gttgggccagtaaacatat

SEQ ID NO: 687009 - DNA, 19 bp, Mus musculus
  siRNA target sequence for Krtap6-2 (NM_010673.1,437-455).
ggatatggctcttactaca

SEQ ID NO: 687010 - DNA, 19 bp, Mus musculus
  siRNA target sequence for Krtap6-2 (NM_010673.1,476-494).
ggaccatcttgctacagaa

SEQ ID NO: 687011 - DNA, 19 bp, Mus musculus
  siRNA target sequence for Mns1 (NM_008613.1,203-221).
gagctttagtgaaaagcat

SEQ ID NO: 687012 - DNA, 19 bp, Mus musculus
  siRNA target sequence for Mns1 (NM_008613.1,218-236).
gcatcagaagttagtagat

SEQ ID NO: 687013 - DNA, 19 bp, Mus musculus
  siRNA target sequence for Mns1 (NM_008613.1,245-263).
ccgcaaatcattgaacata

SEQ ID NO: 687014 - DNA, 19 bp, Mus musculus
  siRNA target sequence for Mns1 (NM_008613.1,253-271).
cattgaacatacaagtcat

SEQ ID NO: 687015 - DNA, 19 bp, Mus musculus
  siRNA target sequence for Mns1 (NM_008613.1,257-275).
gaacatacaagtcatgaat

SEQ ID NO: 687016 - DNA, 19 bp, Mus musculus
  siRNA target sequence for Mns1 (NM_008613.1,296-314).
gaaccaagtggtgcaaaat

SEQ ID NO: 687017 - DNA, 19 bp, Mus musculus
  siRNA target sequence for Mns1 (NM_008613.1,608-626).
gaaggacgccatgaagtat

SEQ ID NO: 687018 - DNA, 19 bp, Mus musculus
  siRNA target sequence for Mns1 (NM_008613.1,809-827).
gaaggagaaactcatgata

SEQ ID NO: 687019 - DNA, 19 bp, Mus musculus
  siRNA target sequence for Mns1 (NM_008613.1,989-1007).
catagagtttgcaaacata

SEQ ID NO: 687020 - DNA, 19 bp, Mus musculus
  siRNA target sequence for Mns1 (NM_008613.1,1044-1062).
cacgagatcgaggaaaaga

SEQ ID NO: 687021 - DNA, 19 bp, Mus musculus
  siRNA target sequence for Mns1 (NM_008613.1,1061-1079).
gagggtccagcgtcagaat

SEQ ID NO: 687022 - DNA, 19 bp, Mus musculus
  siRNA target sequence for Mns1 (NM_008613.1,1063-1081).
gggtccagcgtcagaattt

SEQ ID NO: 687023 - DNA, 19 bp, Mus musculus
  siRNA target sequence for Mns1 (NM_008613.1,1340-1358).
ccgcattgagctcatgaat

SEQ ID NO: 687024 - DNA, 19 bp, Mus musculus
  siRNA target sequence for Mns1 (NM_008613.1,1360-1378).
cccagaaacagcgaatgaa

SEQ ID NO: 687025 - DNA, 19 bp, Mus musculus
  siRNA target sequence for Mns1 (NM_008613.1,1433-1451).
gttcctcgcagacaaacaa

SEQ ID NO: 687026 - DNA, 19 bp, Mus musculus
  siRNA target sequence for Mns1 (NM_008613.1,1484-1502).
gcggcagggctgcatcaat

SEQ ID NO: 687027 - DNA, 19 bp, Mus musculus
  siRNA target sequence for Mns1 (NM_008613.1,1490-1508).
gggctgcatcaatgagatt

SEQ ID NO: 687028 - DNA, 19 bp, Mus musculus
  siRNA target sequence for Mns1 (NM_008613.1,1491-1509).
ggctgcatcaatgagatta

SEQ ID NO: 687029 - DNA, 19 bp, Mus musculus
  siRNA target sequence for Mns1 (NM_008613.1,1492-1510).
gctgcatcaatgagattat

SEQ ID NO: 687030 - DNA, 19 bp, Mus musculus
  siRNA target sequence for Mns1 (NM_008613.1,1495-1513).
gcatcaatgagattattga

SEQ ID NO: 687031 - DNA, 19 bp, Mus musculus
  siRNA target sequence for Mns1 (NM_008613.1,1526-1544).
gagactcctcaaagaacat

SEQ ID NO: 687032 - DNA, 19 bp, Mus musculus
  siRNA target sequence for Mns1 (NM_008613.1,1566-1584).
ctccccaaaggagtgttta

SEQ ID NO: 687033 - DNA, 19 bp, Mus musculus
  siRNA target sequence for 1200004M23Rik (NM_026169.3,220-238).
gtgtacctggcggatgata

SEQ ID NO: 687034 - DNA, 19 bp, Mus musculus
  siRNA target sequence for 1200004M23Rik (NM_026169.3,222-240).
gtacctggcggatgataca

SEQ ID NO: 687035 - DNA, 19 bp, Mus musculus
  siRNA target sequence for 1200004M23Rik (NM_026169.3,225-243).
cctggcggatgatacagta

SEQ ID NO: 687036 - DNA, 19 bp, Mus musculus
  siRNA target sequence for 1200004M23Rik (NM_026169.3,259-277).
gagaatttgtcctcaatca

SEQ ID NO: 687037 - DNA, 19 bp, Mus musculus
  siRNA target sequence for 1200004M23Rik (NM_026169.3,261-279).
gaatttgtcctcaatcagt

SEQ ID NO: 687038 - DNA, 19 bp, Mus musculus
  siRNA target sequence for 1200004M23Rik (NM_026169.3,365-383).
ctctcttggaggtgcaatt

SEQ ID NO: 687039 - DNA, 19 bp, Mus musculus
  siRNA target sequence for 1200004M23Rik (NM_026169.3,367-385).
ctcttggaggtgcaattga

SEQ ID NO: 687040 - DNA, 19 bp, Mus musculus
  siRNA target sequence for 1200004M23Rik (NM_026169.3,447-465).
caacgcctccgatgatgat

SEQ ID NO: 687041 - DNA, 19 bp, Mus musculus
  siRNA target sequence for 1200004M23Rik (NM_026169.3,486-504).
ccttcagttccgaaggaat

SEQ ID NO: 687042 - DNA, 19 bp, Mus musculus
  siRNA target sequence for 1200004M23Rik (NM_026169.3,492-510).
gttccgaaggaatgttttt

SEQ ID NO: 687043 - DNA, 19 bp, Mus musculus
  siRNA target sequence for 1200004M23Rik (NM_026169.3,818-836).
cctaccgccaggtaaagga

SEQ ID NO: 687044 - DNA, 19 bp, Mus musculus
  siRNA target sequence for 1200004M23Rik (NM_026169.3,819-837).
ctaccgccaggtaaaggaa

SEQ ID NO: 687045 - DNA, 19 bp, Mus musculus
  siRNA target sequence for 1200004M23Rik (NM_026169.3,1242-1260).
ggctgccgagcctactctt

SEQ ID NO: 687046 - DNA, 19 bp, Mus musculus
  siRNA target sequence for 1200004M23Rik (NM_026169.3,1429-1447).
cgaaccacctccttcttca

SEQ ID NO: 687047 - DNA, 19 bp, Mus musculus
  siRNA target sequence for 4930488L10Rik (NM_028127.3,493-511).
gcaaggtacggcaatacga

SEQ ID NO: 687048 - DNA, 19 bp, Mus musculus
  siRNA target sequence for 4930488L10Rik (NM_028127.3,494-512).
caaggtacggcaatacgaa

SEQ ID NO: 687049 - DNA, 19 bp, Mus musculus
  siRNA target sequence for 5830467P10Rik (NM_198029.1,314-332).
gcatcctttcgtttctcaa

SEQ ID NO: 687050 - DNA, 19 bp, Mus musculus
  siRNA target sequence for 5830467P10Rik (NM_198029.1,319-337).
ctttcgtttctcaagatga

SEQ ID NO: 687051 - DNA, 19 bp, Mus musculus
  siRNA target sequence for 5830467P10Rik (NM_198029.1,360-378).
ggtggcttccagtcttgaa

SEQ ID NO: 687052 - DNA, 19 bp, Mus musculus
  siRNA target sequence for 5830467P10Rik (NM_198029.1,385-403).
gatatgaacccggaatgtt

SEQ ID NO: 687053 - DNA, 19 bp, Mus musculus
  siRNA target sequence for 5830467P10Rik (NM_198029.1,390-408).
gaacccggaatgtttagta

SEQ ID NO: 687054 - DNA, 19 bp, Mus musculus
  siRNA target sequence for 5830467P10Rik (NM_198029.1,554-572).
cctactaccttgtcagatt

SEQ ID NO: 687055 - DNA, 19 bp, Mus musculus
  siRNA target sequence for 5830467P10Rik (NM_198029.1,555-573).
ctactaccttgtcagattt

SEQ ID NO: 687056 - DNA, 19 bp, Mus musculus
  siRNA target sequence for 5830467P10Rik (NM_198029.1,561-579).
ccttgtcagatttaaagga

SEQ ID NO: 687057 - DNA, 19 bp, Mus musculus
  siRNA target sequence for 5830467P10Rik (NM_198029.1,659-677).
cgtggagattcgccaatat

SEQ ID NO: 687058 - DNA, 19 bp, Mus musculus
  siRNA target sequence for 5830467P10Rik (NM_198029.1,662-680).
ggagattcgccaatatgaa

SEQ ID NO: 687059 - DNA, 19 bp, Mus musculus
  siRNA target sequence for 5830467P10Rik (NM_198029.1,755-773).
gcctaagtgcagattgcaa

SEQ ID NO: 687060 - DNA, 19 bp, Mus musculus
  siRNA target sequence for 5830467P10Rik (NM_198029.1,770-788).
gcaagattgtccatgagta

SEQ ID NO: 687061 - DNA, 19 bp, Mus musculus
  siRNA target sequence for 5830467P10Rik (NM_198029.1,774-792).
gattgtccatgagtacatt

SEQ ID NO: 687062 - DNA, 19 bp, Mus musculus
  siRNA target sequence for 5830467P10Rik (NM_198029.1,793-811).
ggtggctacatcttcttgt

SEQ ID NO: 687063 - DNA, 19 bp, Mus musculus
  siRNA target sequence for 5830467P10Rik (NM_198029.1,818-836).
gatccaaggaccaaaacga

SEQ ID NO: 687064 - DNA, 19 bp, Mus musculus
  siRNA target sequence for 6030440G05Rik (NM_145148.1,645-663).
gtactttggaataacgttt

SEQ ID NO: 687065 - DNA, 19 bp, Mus musculus
  siRNA target sequence for 6030440G05Rik (NM_145148.1,712-730).
ctggaacatgatttaccta

SEQ ID NO: 687066 - DNA, 19 bp, Mus musculus
  siRNA target sequence for 6030440G05Rik (NM_145148.1,778-796).
gagagcatatccttcctaa

SEQ ID NO: 687067 - DNA, 19 bp, Mus musculus
  siRNA target sequence for 6030440G05Rik (NM_145148.1,833-851).
caaaggcctgtgtacacaa

SEQ ID NO: 687068 - DNA, 19 bp, Mus musculus
  siRNA target sequence for 6030440G05Rik (NM_145148.1,909-927).
ggaaagcaagggagattat

SEQ ID NO: 687069 - DNA, 19 bp, Mus musculus
  siRNA target sequence for 6030440G05Rik (NM_145148.1,910-928).
gaaagcaagggagattata

SEQ ID NO: 687070 - DNA, 19 bp, Mus musculus
  siRNA target sequence for 6030440G05Rik (NM_145148.1,1025-1043).
gagtgattgagcattattt

SEQ ID NO: 687071 - DNA, 19 bp, Mus musculus
  siRNA target sequence for 6030440G05Rik (NM_145148.1,1069-1087).
caagctgtggtccagtata

SEQ ID NO: 687072 - DNA, 19 bp, Mus musculus
  siRNA target sequence for 6030440G05Rik (NM_145148.1,1072-1090).
gctgtggtccagtatatga

SEQ ID NO: 687073 - DNA, 19 bp, Mus musculus
  siRNA target sequence for 6030440G05Rik (NM_145148.1,1075-1093).
gtggtccagtatatgaaaa

SEQ ID NO: 687074 - DNA, 19 bp, Mus musculus
  siRNA target sequence for 6030440G05Rik (NM_145148.1,1080-1098).
ccagtatatgaaaatagta

SEQ ID NO: 687075 - DNA, 19 bp, Mus musculus
  siRNA target sequence for 6030440G05Rik (NM_145148.1,1109-1127).
caacgtatggagtccatta

SEQ ID NO: 687076 - DNA, 19 bp, Mus musculus
  siRNA target sequence for 6030440G05Rik (NM_145148.1,1112-1130).
cgtatggagtccattacta

SEQ ID NO: 687077 - DNA, 19 bp, Mus musculus
  siRNA target sequence for 6030440G05Rik (NM_145148.1,1113-1131).
gtatggagtccattactat

SEQ ID NO: 687078 - DNA, 19 bp, Mus musculus
  siRNA target sequence for 6030440G05Rik (NM_145148.1,1164-1182).
gcttggtatcagctacaaa

SEQ ID NO: 687079 - DNA, 19 bp, Mus musculus
  siRNA target sequence for 6030440G05Rik (NM_145148.1,1169-1187).
gtatcagctacaaaggaat

SEQ ID NO: 687080 - DNA, 19 bp, Mus musculus
  siRNA target sequence for 6030440G05Rik (NM_145148.1,1212-1230).
ggtgaagcctcgcaaacta

SEQ ID NO: 687081 - DNA, 19 bp, Mus musculus
  siRNA target sequence for 6030440G05Rik (NM_145148.1,1213-1231).
gtgaagcctcgcaaactat

SEQ ID NO: 687082 - DNA, 19 bp, Mus musculus
  siRNA target sequence for 6030440G05Rik (NM_145148.1,1215-1233).
gaagcctcgcaaactattt

SEQ ID NO: 687083 - DNA, 19 bp, Mus musculus
  siRNA target sequence for 6030440G05Rik (NM_145148.1,1218-1236).
gcctcgcaaactatttcaa

SEQ ID NO: 687084 - DNA, 19 bp, Mus musculus
  siRNA target sequence for 6030440G05Rik (NM_145148.1,1219-1237).
cctcgcaaactatttcaat

SEQ ID NO: 687085 - DNA, 19 bp, Mus musculus
  siRNA target sequence for 6030440G05Rik (NM_145148.1,1263-1281).
ccgtgagaagaaatttgct

SEQ ID NO: 687086 - DNA, 19 bp, Mus musculus
  siRNA target sequence for 6030440G05Rik (NM_145148.1,1290-1308).
gcacgatccccgaaggatt

SEQ ID NO: 687087 - DNA, 19 bp, Mus musculus
  siRNA target sequence for 6030440G05Rik (NM_145148.1,1291-1309).
cacgatccccgaaggattt

SEQ ID NO: 687088 - DNA, 19 bp, Mus musculus
  siRNA target sequence for 6030440G05Rik (NM_145148.1,1293-1311).
cgatccccgaaggatttca

SEQ ID NO: 687089 - DNA, 19 bp, Mus musculus
  siRNA target sequence for 6030440G05Rik (NM_145148.1,1335-1353).
gagtggcctgtttgtacaa

SEQ ID NO: 687090 - DNA, 19 bp, Mus musculus
  siRNA target sequence for 6030440G05Rik (NM_145148.1,1348-1366).
gtacaaacctggtatgcaa

SEQ ID NO: 687091 - DNA, 19 bp, Mus musculus
  siRNA target sequence for 6030440G05Rik (NM_145148.1,1364-1382).
caaactcttctctcatcaa

SEQ ID NO: 687092 - DNA, 19 bp, Mus musculus
  siRNA target sequence for 6030440G05Rik (NM_145148.1,1474-1492).
gacatcgccatggacttaa

SEQ ID NO: 687093 - DNA, 19 bp, Mus musculus
  siRNA target sequence for 6030440G05Rik (NM_145148.1,1792-1810).
gtggggaccacgttcaagt

SEQ ID NO: 687094 - DNA, 19 bp, Mus musculus
  siRNA target sequence for 6030440G05Rik (NM_145148.1,1794-1812).
ggggaccacgttcaagtta

SEQ ID NO: 687095 - DNA, 19 bp, Mus musculus
  siRNA target sequence for 6030440G05Rik (NM_145148.1,1796-1814).
ggaccacgttcaagttaga

SEQ ID NO: 687096 - DNA, 19 bp, Mus musculus
  siRNA target sequence for 6030440G05Rik (NM_145148.1,1797-1815).
gaccacgttcaagttagat

SEQ ID NO: 687097 - DNA, 19 bp, Mus musculus
  siRNA target sequence for 6030440G05Rik (NM_145148.1,1802-1820).
cgttcaagttagatgacaa

SEQ ID NO: 687098 - DNA, 19 bp, Mus musculus
  siRNA target sequence for 6030440G05Rik (NM_145148.1,1836-1854).
ggaggatccggctttacaa

SEQ ID NO: 687099 - DNA, 19 bp, Mus musculus
  siRNA target sequence for 6030440G05Rik (NM_145148.1,1839-1857).
ggatccggctttacaagaa

SEQ ID NO: 687100 - DNA, 19 bp, Mus musculus
  siRNA target sequence for 6030440G05Rik (NM_145148.1,1916-1934).
gtgagcccgacctttgtaa

SEQ ID NO: 687101 - DNA, 19 bp, Mus musculus
  siRNA target sequence for 6030440G05Rik (NM_145148.1,1918-1936).
gagcccgacctttgtaaaa

SEQ ID NO: 687102 - DNA, 19 bp, Mus musculus
  siRNA target sequence for 6030440G05Rik (NM_145148.1,1950-1968).
gcgaaagcaagattacaca

SEQ ID NO: 687103 - DNA, 19 bp, Mus musculus
  siRNA target sequence for 6030440G05Rik (NM_145148.1,2081-2099).
catcggaaagcagttcttt

SEQ ID NO: 687104 - DNA, 19 bp, Mus musculus
  siRNA target sequence for 6030440G05Rik (NM_145148.1,2151-2169).
gcagcgaccaagttcagta

SEQ ID NO: 687105 - DNA, 19 bp, Mus musculus
  siRNA target sequence for 6030440G05Rik (NM_145148.1,2195-2213).
ccaagtctctcggaattga

SEQ ID NO: 687106 - DNA, 19 bp, Mus musculus
  siRNA target sequence for 6030440G05Rik (NM_145148.1,2212-2230).
gagcgaatccacttcagaa

SEQ ID NO: 687107 - DNA, 19 bp, Mus musculus
  siRNA target sequence for 6030440G05Rik (NM_145148.1,2215-2233).
cgaatccacttcagaaaat

SEQ ID NO: 687108 - DNA, 19 bp, Mus musculus
  siRNA target sequence for 6030440G05Rik (NM_145148.1,2533-2551).
gacgacgggtcttcgtata

SEQ ID NO: 687109 - DNA, 19 bp, Mus musculus
  siRNA target sequence for 6030440G05Rik (NM_145148.1,2536-2554).
gacgggtcttcgtatacca

SEQ ID NO: 687110 - DNA, 19 bp, Mus musculus
  siRNA target sequence for 6030440G05Rik (NM_145148.1,2588-2606).
ctgctgccagcccttacta

SEQ ID NO: 687111 - DNA, 19 bp, Mus musculus
  siRNA target sequence for 6030440G05Rik (NM_145148.1,2819-2837).
gctacgtctacgagaatga

SEQ ID NO: 687112 - DNA, 19 bp, Mus musculus
  siRNA target sequence for 6030440G05Rik (NM_145148.1,2844-2862).
gggacagtacagtgtcaat

SEQ ID NO: 687113 - DNA, 19 bp, Mus musculus
  siRNA target sequence for 6030440G05Rik (NM_145148.1,2848-2866).
cagtacagtgtcaatcctt

SEQ ID NO: 687114 - DNA, 19 bp, Mus musculus
  siRNA target sequence for 6030440G05Rik (NM_145148.1,2879-2897).
cagctcactatggatatga

SEQ ID NO: 687115 - DNA, 19 bp, Mus musculus
  siRNA target sequence for 6030440G05Rik (NM_145148.1,2915-2933).
gcaggtctttccatgaaga

SEQ ID NO: 687116 - DNA, 19 bp, Mus musculus
  siRNA target sequence for 6030440G05Rik (NM_145148.1,2918-2936).
ggtctttccatgaagatga

SEQ ID NO: 687117 - DNA, 19 bp, Mus musculus
  siRNA target sequence for 6030440G05Rik (NM_145148.1,3233-3251).
ggaggacccagttaaccat

SEQ ID NO: 687118 - DNA, 19 bp, Mus musculus
  siRNA target sequence for 6030440G05Rik (NM_145148.1,3234-3252).
gaggacccagttaaccatt

SEQ ID NO: 687119 - DNA, 19 bp, Mus musculus
  siRNA target sequence for 6030440G05Rik (NM_145148.1,3248-3266).
ccattgggctatctgaata

SEQ ID NO: 687120 - DNA, 19 bp, Mus musculus
  siRNA target sequence for 6030440G05Rik (NM_145148.1,3253-3271).
gggctatctgaatatgaaa

SEQ ID NO: 687121 - DNA, 19 bp, Mus musculus
  siRNA target sequence for 6030440G05Rik (NM_145148.1,3327-3345).
ctctccgagcagacagtat

SEQ ID NO: 687122 - DNA, 19 bp, Mus musculus
  siRNA target sequence for 6030440G05Rik (NM_145148.1,3393-3411).
caacctggagggtagtgaa

SEQ ID NO: 687123 - DNA, 19 bp, Mus musculus
  siRNA target sequence for 9430066I12Rik (NM_172869.1,151-169).
ctatgaagatgattcactt

SEQ ID NO: 687124 - DNA, 19 bp, Mus musculus
  siRNA target sequence for 9430066I12Rik (NM_172869.1,265-283).
cgaaagggcagtttctcat

SEQ ID NO: 687125 - DNA, 19 bp, Mus musculus
  siRNA target sequence for 9430066I12Rik (NM_172869.1,266-284).
gaaagggcagtttctcatt

SEQ ID NO: 687126 - DNA, 19 bp, Mus musculus
  siRNA target sequence for 9430066I12Rik (NM_172869.1,270-288).
gggcagtttctcattgaat

SEQ ID NO: 687127 - DNA, 19 bp, Mus musculus
  siRNA target sequence for 9430066I12Rik (NM_172869.1,271-289).
ggcagtttctcattgaata

SEQ ID NO: 687128 - DNA, 19 bp, Mus musculus
  siRNA target sequence for 9430066I12Rik (NM_172869.1,422-440).
catgtgctttagagtgaaa

SEQ ID NO: 687129 - DNA, 19 bp, Mus musculus
  siRNA target sequence for 9430066I12Rik (NM_172869.1,437-455).
gaaattctacccacatgaa

SEQ ID NO: 687130 - DNA, 19 bp, Mus musculus
  siRNA target sequence for 9430066I12Rik (NM_172869.1,448-466).
cacatgaacccttgaagat

SEQ ID NO: 687131 - DNA, 19 bp, Mus musculus
  siRNA target sequence for 9430066I12Rik (NM_172869.1,474-492).
gagctcacaaggtacctat

SEQ ID NO: 687132 - DNA, 19 bp, Mus musculus
  siRNA target sequence for 9430066I12Rik (NM_172869.1,476-494).
gctcacaaggtacctatta

SEQ ID NO: 687133 - DNA, 19 bp, Mus musculus
  siRNA target sequence for 9430066I12Rik (NM_172869.1,477-495).
ctcacaaggtacctattat

SEQ ID NO: 687134 - DNA, 19 bp, Mus musculus
  siRNA target sequence for 9430066I12Rik (NM_172869.1,479-497).
cacaaggtacctattatat

SEQ ID NO: 687135 - DNA, 19 bp, Mus musculus
  siRNA target sequence for 9430066I12Rik (NM_172869.1,481-499).
caaggtacctattatattt

SEQ ID NO: 687136 - DNA, 19 bp, Mus musculus
  siRNA target sequence for 9430066I12Rik (NM_172869.1,484-502).
ggtacctattatatttgca

SEQ ID NO: 687137 - DNA, 19 bp, Mus musculus
  siRNA target sequence for 9430066I12Rik (NM_172869.1,485-503).
gtacctattatatttgcaa

SEQ ID NO: 687138 - DNA, 19 bp, Mus musculus
  siRNA target sequence for 9430066I12Rik (NM_172869.1,583-601).
ctgagtttggtgattacta

SEQ ID NO: 687139 - DNA, 19 bp, Mus musculus
  siRNA target sequence for 9430066I12Rik (NM_172869.1,606-624).
gatgagcatcctgagaatt

SEQ ID NO: 687140 - DNA, 19 bp, Mus musculus
  siRNA target sequence for 9430066I12Rik (NM_172869.1,620-638).
gaattatatcagtgagttt

SEQ ID NO: 687141 - DNA, 19 bp, Mus musculus
  siRNA target sequence for 9430066I12Rik (NM_172869.1,715-733).
gcccagcaattgctgaatt

SEQ ID NO: 687142 - DNA, 19 bp, Mus musculus
  siRNA target sequence for 9430066I12Rik (NM_172869.1,717-735).
ccagcaattgctgaattca

SEQ ID NO: 687143 - DNA, 19 bp, Mus musculus
  siRNA target sequence for 9430066I12Rik (NM_172869.1,726-744).
gctgaattcaacttactct

SEQ ID NO: 687144 - DNA, 19 bp, Mus musculus
  siRNA target sequence for 9430066I12Rik (NM_172869.1,741-759).
ctcttaaaagctcatacat

SEQ ID NO: 687145 - DNA, 19 bp, Mus musculus
  siRNA target sequence for 9430066I12Rik (NM_172869.1,802-820).
gaggtgctacagcattttt

SEQ ID NO: 687146 - DNA, 19 bp, Mus musculus
  siRNA target sequence for 9430066I12Rik (NM_172869.1,832-850).
ctgcaggtttcgtcgtatt

SEQ ID NO: 687147 - DNA, 19 bp, Mus musculus
  siRNA target sequence for 9430066I12Rik (NM_172869.1,835-853).
caggtttcgtcgtattcca

SEQ ID NO: 687148 - DNA, 19 bp, Mus musculus
  siRNA target sequence for 9430066I12Rik (NM_172869.1,843-861).
gtcgtattccagggaaata

SEQ ID NO: 687149 - DNA, 19 bp, Mus musculus
  siRNA target sequence for 9430066I12Rik (NM_172869.1,883-901).
ggtcagatgtctgcaaatt

SEQ ID NO: 687150 - DNA, 19 bp, Mus musculus
  siRNA target sequence for 9430066I12Rik (NM_172869.1,957-975).
gttttggcattccatacat

SEQ ID NO: 687151 - DNA, 19 bp, Mus musculus
  siRNA target sequence for 9430066I12Rik (NM_172869.1,962-980).
ggcattccatacatcaaca

SEQ ID NO: 687152 - DNA, 19 bp, Mus musculus
  siRNA target sequence for 9430066I12Rik (NM_172869.1,1065-1083).
gtgtcaagcagcaagatat

SEQ ID NO: 687153 - DNA, 19 bp, Mus musculus
  siRNA target sequence for 9430066I12Rik (NM_172869.1,1109-1127).
cagtggtaaagttgctaaa

SEQ ID NO: 687154 - DNA, 19 bp, Mus musculus
  siRNA target sequence for 9430066I12Rik (NM_172869.1,1134-1152).
gtagaggcaagctccaaaa

SEQ ID NO: 687155 - DNA, 19 bp, Mus musculus
  siRNA target sequence for 9430066I12Rik (NM_172869.1,1165-1183).
ctcctgaagtgcatagagt

SEQ ID NO: 687156 - DNA, 19 bp, Mus musculus
  siRNA target sequence for 9430066I12Rik (NM_172869.1,1173-1191).
gtgcatagagtcaacatta

SEQ ID NO: 687157 - DNA, 19 bp, Mus musculus
  siRNA target sequence for 9430066I12Rik (NM_172869.1,1310-1328).
cccactgcctaaaatggat

SEQ ID NO: 687158 - DNA, 19 bp, Mus musculus
  siRNA target sequence for 9430066I12Rik (NM_172869.1,1517-1535).
caggcttgagttagaaaga

SEQ ID NO: 687159 - DNA, 19 bp, Mus musculus
  siRNA target sequence for 9430066I12Rik (NM_172869.1,1534-1552).
gagaagacacggattcatt

SEQ ID NO: 687160 - DNA, 19 bp, Mus musculus
  siRNA target sequence for 9430066I12Rik (NM_172869.1,1790-1808).
ccgtcagacaccagagttt

SEQ ID NO: 687161 - DNA, 19 bp, Mus musculus
  siRNA target sequence for 9430066I12Rik (NM_172869.1,1792-1810).
gtcagacaccagagtttga

SEQ ID NO: 687162 - DNA, 19 bp, Mus musculus
  siRNA target sequence for 9430066I12Rik (NM_172869.1,1805-1823).
gtttgagcagtttcactat

SEQ ID NO: 687163 - DNA, 19 bp, Mus musculus
  siRNA target sequence for 9430066I12Rik (NM_172869.1,1877-1895).
ctacatgctgggttgttca

SEQ ID NO: 687164 - DNA, 19 bp, Mus musculus
  siRNA target sequence for B930041G04 (NM_177750.2,2171-2189).
cccaacgtcctgaaggttt

SEQ ID NO: 687165 - DNA, 19 bp, Mus musculus
  siRNA target sequence for B930041G04 (NM_177750.2,2172-2190).
ccaacgtcctgaaggtttt

SEQ ID NO: 687166 - DNA, 19 bp, Mus musculus
  siRNA target sequence for B930041G04 (NM_177750.2,2180-2198).
ctgaaggttttcctagaaa

SEQ ID NO: 687167 - DNA, 19 bp, Mus musculus
  siRNA target sequence for B930041G04 (NM_177750.2,2182-2200).
gaaggttttcctagaaaat

SEQ ID NO: 687168 - DNA, 19 bp, Mus musculus
  siRNA target sequence for B930041G04 (NM_177750.2,2203-2221).
gcagatcaagtcattcaca

SEQ ID NO: 687169 - DNA, 19 bp, Mus musculus
  siRNA target sequence for B930041G04 (NM_177750.2,2204-2222).
cagatcaagtcattcacat

SEQ ID NO: 687170 - DNA, 19 bp, Mus musculus
  siRNA target sequence for B930041G04 (NM_177750.2,2225-2243).
gatggccggaccactgtta

SEQ ID NO: 687171 - DNA, 19 bp, Mus musculus
  siRNA target sequence for B930041G04 (NM_177750.2,2229-2247).
gccggaccactgttaagga

SEQ ID NO: 687172 - DNA, 19 bp, Mus musculus
  siRNA target sequence for B930041G04 (NM_177750.2,2230-2248).
ccggaccactgttaaggat

SEQ ID NO: 687173 - DNA, 19 bp, Mus musculus
  siRNA target sequence for B930041G04 (NM_177750.2,2235-2253).
ccactgttaaggatgtgat

SEQ ID NO: 687174 - DNA, 19 bp, Mus musculus
  siRNA target sequence for B930041G04 (NM_177750.2,2300-2318).
gctcttgtgcttgagtata

SEQ ID NO: 687175 - DNA, 19 bp, Mus musculus
  siRNA target sequence for B930041G04 (NM_177750.2,2388-2406).
ggacacactaccatggaat

SEQ ID NO: 687176 - DNA, 19 bp, Mus musculus
  siRNA target sequence for B930041G04 (NM_177750.2,2391-2409).
cacactaccatggaatgaa

SEQ ID NO: 687177 - DNA, 19 bp, Mus musculus
  siRNA target sequence for B930041G04 (NM_177750.2,2412-2430).
gcctcttccgaataagctt

SEQ ID NO: 687178 - DNA, 19 bp, Mus musculus
  siRNA target sequence for B930041G04 (NM_177750.2,2474-2492).
gctttcgagtacttataca

SEQ ID NO: 687179 - DNA, 19 bp, Mus musculus
  siRNA target sequence for B930041G04 (NM_177750.2,2475-2493).
ctttcgagtacttatacat

SEQ ID NO: 687180 - DNA, 19 bp, Mus musculus
  siRNA target sequence for BC032204 (NM_153795.1,202-220).
cctccggggactatatcga

SEQ ID NO: 687181 - DNA, 19 bp, Mus musculus
  siRNA target sequence for BC032204 (NM_153795.1,513-531).
cggcttcgggccagtttct

SEQ ID NO: 687182 - DNA, 19 bp, Mus musculus
  siRNA target sequence for BC032204 (NM_153795.1,671-689).
cctgacaaaggttgtctta

SEQ ID NO: 687183 - DNA, 19 bp, Mus musculus
  siRNA target sequence for BC032204 (NM_153795.1,699-717).
gtggcacccactttattca

SEQ ID NO: 687184 - DNA, 19 bp, Mus musculus
  siRNA target sequence for BC032204 (NM_153795.1,701-719).
ggcacccactttattcaga

SEQ ID NO: 687185 - DNA, 19 bp, Mus musculus
  siRNA target sequence for BC032204 (NM_153795.1,748-766).
cccagactgaggcttgtta

SEQ ID NO: 687186 - DNA, 19 bp, Mus musculus
  siRNA target sequence for BC032204 (NM_153795.1,918-936).
gtgctttggctgcgattta

SEQ ID NO: 687187 - DNA, 19 bp, Mus musculus
  siRNA target sequence for BC032204 (NM_153795.1,925-943).
ggctgcgatttaagtacta

SEQ ID NO: 687188 - DNA, 19 bp, Mus musculus
  siRNA target sequence for BC032204 (NM_153795.1,1291-1309).
gccagtactgggtggtatt

SEQ ID NO: 687189 - DNA, 19 bp, Mus musculus
  siRNA target sequence for BC032204 (NM_153795.1,1292-1310).
ccagtactgggtggtattt

SEQ ID NO: 687190 - DNA, 19 bp, Mus musculus
  siRNA target sequence for BC032204 (NM_153795.1,1394-1412).
ggtggtccctgatgtcaat

SEQ ID NO: 687191 - DNA, 19 bp, Mus musculus
  siRNA target sequence for BC032204 (NM_153795.1,1398-1416).
gtccctgatgtcaatgtct

SEQ ID NO: 687192 - DNA, 19 bp, Mus musculus
  siRNA target sequence for BC032204 (NM_153795.1,1610-1628).
gcgggcaggtggtagcaat

SEQ ID NO: 687193 - DNA, 19 bp, Mus musculus
  siRNA target sequence for BC032204 (NM_153795.1,1702-1720).
ctcggttccagcgaaagtt

SEQ ID NO: 687194 - DNA, 19 bp, Mus musculus
  siRNA target sequence for BC032204 (NM_153795.1,1704-1722).
cggttccagcgaaagttca

SEQ ID NO: 687195 - DNA, 19 bp, Mus musculus
  siRNA target sequence for BC032204 (NM_153795.1,1705-1723).
ggttccagcgaaagttcaa

SEQ ID NO: 687196 - DNA, 19 bp, Mus musculus
  siRNA target sequence for BC032204 (NM_153795.1,1792-1810).
cccagctgcgctttatcca

SEQ ID NO: 687197 - DNA, 19 bp, Mus musculus
  siRNA target sequence for BC032204 (NM_153795.1,1904-1922).
ccgactcatccggattgat

SEQ ID NO: 687198 - DNA, 19 bp, Mus musculus
  siRNA target sequence for BC032204 (NM_153795.1,1906-1924).
gactcatccggattgatct

SEQ ID NO: 687199 - DNA, 19 bp, Mus musculus
  siRNA target sequence for BC032204 (NM_153795.1,2012-2030).
gttcgatgaacacatcaat

SEQ ID NO: 687200 - DNA, 19 bp, Mus musculus
  siRNA target sequence for Ccm1 (NM_030675.2,335-353).
cagttattcgtccaaagaa

SEQ ID NO: 687201 - DNA, 19 bp, Mus musculus
  siRNA target sequence for Ccm1 (NM_030675.2,364-382).
ctcaactcccgggagtata

SEQ ID NO: 687202 - DNA, 19 bp, Mus musculus
  siRNA target sequence for Ccm1 (NM_030675.2,366-384).
caactcccgggagtataga

SEQ ID NO: 687203 - DNA, 19 bp, Mus musculus
  siRNA target sequence for Ccm1 (NM_030675.2,497-515).
gcatattggactatgtagt

SEQ ID NO: 687204 - DNA, 19 bp, Mus musculus
  siRNA target sequence for Ccm1 (NM_030675.2,498-516).
catattggactatgtagta

SEQ ID NO: 687205 - DNA, 19 bp, Mus musculus
  siRNA target sequence for Ccm1 (NM_030675.2,504-522).
ggactatgtagtagaaact

SEQ ID NO: 687206 - DNA, 19 bp, Mus musculus
  siRNA target sequence for Ccm1 (NM_030675.2,505-523).
gactatgtagtagaaacta

SEQ ID NO: 687207 - DNA, 19 bp, Mus musculus
  siRNA target sequence for Ccm1 (NM_030675.2,517-535).
gaaactaccaaaccaattt

SEQ ID NO: 687208 - DNA, 19 bp, Mus musculus
  siRNA target sequence for Ccm1 (NM_030675.2,633-651).
cgtgccatcagttgtcaaa

SEQ ID NO: 687209 - DNA, 19 bp, Mus musculus
  siRNA target sequence for Ccm1 (NM_030675.2,636-654).
gccatcagttgtcaaagat

SEQ ID NO: 687210 - DNA, 19 bp, Mus musculus
  siRNA target sequence for Ccm1 (NM_030675.2,637-655).
ccatcagttgtcaaagata

SEQ ID NO: 687211 - DNA, 19 bp, Mus musculus
  siRNA target sequence for Ccm1 (NM_030675.2,638-656).
catcagttgtcaaagataa

SEQ ID NO: 687212 - DNA, 19 bp, Mus musculus
  siRNA target sequence for Ccm1 (NM_030675.2,643-661).
gttgtcaaagataatacta

SEQ ID NO: 687213 - DNA, 19 bp, Mus musculus
  siRNA target sequence for Ccm1 (NM_030675.2,652-670).
gataatactaaatatgcat

SEQ ID NO: 687214 - DNA, 19 bp, Mus musculus
  siRNA target sequence for Ccm1 (NM_030675.2,677-695).
ctggatgcccaatttttta

SEQ ID NO: 687215 - DNA, 19 bp, Mus musculus
  siRNA target sequence for Ccm1 (NM_030675.2,751-769).
cttacagcaaggatgttaa

SEQ ID NO: 687216 - DNA, 19 bp, Mus musculus
  siRNA target sequence for Ccm1 (NM_030675.2,774-792).
cttggataagtggttagat

SEQ ID NO: 687217 - DNA, 19 bp, Mus musculus
  siRNA target sequence for Ccm1 (NM_030675.2,839-857).
ctccccttgaacggataaa

SEQ ID NO: 687218 - DNA, 19 bp, Mus musculus
  siRNA target sequence for Ccm1 (NM_030675.2,841-859).
ccccttgaacggataaaga

SEQ ID NO: 687219 - DNA, 19 bp, Mus musculus
  siRNA target sequence for Ccm1 (NM_030675.2,843-861).
ccttgaacggataaagaca

SEQ ID NO: 687220 - DNA, 19 bp, Mus musculus
  siRNA target sequence for Ccm1 (NM_030675.2,844-862).
cttgaacggataaagacaa

SEQ ID NO: 687221 - DNA, 19 bp, Mus musculus
  siRNA target sequence for Ccm1 (NM_030675.2,875-893).
ctgcgtatgctgctgaatt

SEQ ID NO: 687222 - DNA, 19 bp, Mus musculus
  siRNA target sequence for Ccm1 (NM_030675.2,896-914).
gccaggtagacaattcact

SEQ ID NO: 687223 - DNA, 19 bp, Mus musculus
  siRNA target sequence for Ccm1 (NM_030675.2,901-919).
gtagacaattcactacata

SEQ ID NO: 687224 - DNA, 19 bp, Mus musculus
  siRNA target sequence for Ccm1 (NM_030675.2,921-939).
gggctatagtgcactagaa

SEQ ID NO: 687225 - DNA, 19 bp, Mus musculus
  siRNA target sequence for Ccm1 (NM_030675.2,922-940).
ggctatagtgcactagaaa

SEQ ID NO: 687226 - DNA, 19 bp, Mus musculus
  siRNA target sequence for Ccm1 (NM_030675.2,923-941).
gctatagtgcactagaaat

SEQ ID NO: 687227 - DNA, 19 bp, Mus musculus
  siRNA target sequence for Ccm1 (NM_030675.2,931-949).
gcactagaaataaagagta

SEQ ID NO: 687228 - DNA, 19 bp, Mus musculus
  siRNA target sequence for Ccm1 (NM_030675.2,1000-1018).
ggatcagatcttcagtata

SEQ ID NO: 687229 - DNA, 19 bp, Mus musculus
  siRNA target sequence for Ccm1 (NM_030675.2,1004-1022).
cagatcttcagtatacaaa

SEQ ID NO: 687230 - DNA, 19 bp, Mus musculus
  siRNA target sequence for Ccm1 (NM_030675.2,1019-1037).
caaatcgggtagataaagt

SEQ ID NO: 687231 - DNA, 19 bp, Mus musculus
  siRNA target sequence for Ccm1 (NM_030675.2,1027-1045).
gtagataaagtggtaataa

SEQ ID NO: 687232 - DNA, 19 bp, Mus musculus
  siRNA target sequence for Ccm1 (NM_030675.2,1070-1088).
cagactactcaaaaatcca

SEQ ID NO: 687233 - DNA, 19 bp, Mus musculus
  siRNA target sequence for Ccm1 (NM_030675.2,1148-1166).
gacagtgggttgatgactt

SEQ ID NO: 687234 - DNA, 19 bp, Mus musculus
  siRNA target sequence for Ccm1 (NM_030675.2,1154-1172).
gggttgatgactttccttt

SEQ ID NO: 687235 - DNA, 19 bp, Mus musculus
  siRNA target sequence for Ccm1 (NM_030675.2,1155-1173).
ggttgatgactttccttta

SEQ ID NO: 687236 - DNA, 19 bp, Mus musculus
  siRNA target sequence for Ccm1 (NM_030675.2,1164-1182).
ctttcctttacatcgaaat

SEQ ID NO: 687237 - DNA, 19 bp, Mus musculus
  siRNA target sequence for Ccm1 (NM_030675.2,1209-1227).
gagccatcttctcgataaa

SEQ ID NO: 687238 - DNA, 19 bp, Mus musculus
  siRNA target sequence for Ccm1 (NM_030675.2,1235-1253).
cagtcaaccaactagataa

SEQ ID NO: 687239 - DNA, 19 bp, Mus musculus
  siRNA target sequence for Ccm1 (NM_030675.2,1260-1278).
ctgggcacccattcattat

SEQ ID NO: 687240 - DNA, 19 bp, Mus musculus
  siRNA target sequence for Ccm1 (NM_030675.2,1263-1281).
ggcacccattcattatgca

SEQ ID NO: 687241 - DNA, 19 bp, Mus musculus
  siRNA target sequence for Ccm1 (NM_030675.2,1264-1282).
gcacccattcattatgcat

SEQ ID NO: 687242 - DNA, 19 bp, Mus musculus
  siRNA target sequence for Ccm1 (NM_030675.2,1283-1301).
gctggtatggaaaagttga

SEQ ID NO: 687243 - DNA, 19 bp, Mus musculus
  siRNA target sequence for Ccm1 (NM_030675.2,1300-1318).
gaggccactcgcatattat

SEQ ID NO: 687244 - DNA, 19 bp, Mus musculus
  siRNA target sequence for Ccm1 (NM_030675.2,1304-1322).
ccactcgcatattattaga

SEQ ID NO: 687245 - DNA, 19 bp, Mus musculus
  siRNA target sequence for Ccm1 (NM_030675.2,1307-1325).
ctcgcatattattagagaa

SEQ ID NO: 687246 - DNA, 19 bp, Mus musculus
  siRNA target sequence for Ccm1 (NM_030675.2,1419-1437).
cctgactcacccagacatt

SEQ ID NO: 687247 - DNA, 19 bp, Mus musculus
  siRNA target sequence for Ccm1 (NM_030675.2,1442-1460).
ggcacataacagatcaaca

SEQ ID NO: 687248 - DNA, 19 bp, Mus musculus
  siRNA target sequence for Ccm1 (NM_030675.2,1459-1477).
caaggaagatccccattaa

SEQ ID NO: 687249 - DNA, 19 bp, Mus musculus
  siRNA target sequence for Ccm1 (NM_030675.2,1463-1481).
gaagatccccattaaatgt

SEQ ID NO: 687250 - DNA, 19 bp, Mus musculus
  siRNA target sequence for Ccm1 (NM_030675.2,1470-1488).
cccattaaatgtttgtgaa

SEQ ID NO: 687251 - DNA, 19 bp, Mus musculus
  siRNA target sequence for Ccm1 (NM_030675.2,1513-1531).
gaagctgcaaaattgttga

SEQ ID NO: 687252 - DNA, 19 bp, Mus musculus
  siRNA target sequence for Ccm1 (NM_030675.2,1538-1556).
ccattaacaagccatatga

SEQ ID NO: 687253 - DNA, 19 bp, Mus musculus
  siRNA target sequence for Ccm1 (NM_030675.2,1555-1573).
gaaaaagttcgaatctata

SEQ ID NO: 687254 - DNA, 19 bp, Mus musculus
  siRNA target sequence for Ccm1 (NM_030675.2,1586-1604).
cataccgttctgttgaact

SEQ ID NO: 687255 - DNA, 19 bp, Mus musculus
  siRNA target sequence for Ccm1 (NM_030675.2,1603-1621).
ctaaagcatggcaataata

SEQ ID NO: 687256 - DNA, 19 bp, Mus musculus
  siRNA target sequence for Ccm1 (NM_030675.2,1652-1670).
ggctctctcaggaaactca

SEQ ID NO: 687257 - DNA, 19 bp, Mus musculus
  siRNA target sequence for Ccm1 (NM_030675.2,1660-1678).
caggaaactcagcgatatt

SEQ ID NO: 687258 - DNA, 19 bp, Mus musculus
  siRNA target sequence for Ccm1 (NM_030675.2,1667-1685).
ctcagcgatatttcactat

SEQ ID NO: 687259 - DNA, 19 bp, Mus musculus
  siRNA target sequence for Ccm1 (NM_030675.2,1669-1687).
cagcgatatttcactattt

SEQ ID NO: 687260 - DNA, 19 bp, Mus musculus
  siRNA target sequence for Ccm1 (NM_030675.2,1672-1690).
cgatatttcactatttgga

SEQ ID NO: 687261 - DNA, 19 bp, Mus musculus
  siRNA target sequence for Ccm1 (NM_030675.2,1673-1691).
gatatttcactatttggat

SEQ ID NO: 687262 - DNA, 19 bp, Mus musculus
  siRNA target sequence for Ccm1 (NM_030675.2,1692-1710).
ctgttcagaaaatcttagt

SEQ ID NO: 687263 - DNA, 19 bp, Mus musculus
  siRNA target sequence for Ccm1 (NM_030675.2,1716-1734).
gttcaagccttatcataaa

SEQ ID NO: 687264 - DNA, 19 bp, Mus musculus
  siRNA target sequence for Ccm1 (NM_030675.2,1768-1786).
cttgctgaattgactaatt

SEQ ID NO: 687265 - DNA, 19 bp, Mus musculus
  siRNA target sequence for Ccm1 (NM_030675.2,1772-1790).
ctgaattgactaatttgga

SEQ ID NO: 687266 - DNA, 19 bp, Mus musculus
  siRNA target sequence for Ccm1 (NM_030675.2,1869-1887).
cccactagctattcttatt

SEQ ID NO: 687267 - DNA, 19 bp, Mus musculus
  siRNA target sequence for Ccm1 (NM_030675.2,1871-1889).
cactagctattcttattct

SEQ ID NO: 687268 - DNA, 19 bp, Mus musculus
  siRNA target sequence for Ccm1 (NM_030675.2,1960-1978).
gcaagtctactgttacaaa

SEQ ID NO: 687269 - DNA, 19 bp, Mus musculus
  siRNA target sequence for Ccm1 (NM_030675.2,1964-1982).
gtctactgttacaaatagt

SEQ ID NO: 687270 - DNA, 19 bp, Mus musculus
  siRNA target sequence for Ccm1 (NM_030675.2,2008-2026).
cacaaacaaggtttcttaa

SEQ ID NO: 687271 - DNA, 19 bp, Mus musculus
  siRNA target sequence for Ccm1 (NM_030675.2,2040-2058).
gaaatccatcgtacctatt

SEQ ID NO: 687272 - DNA, 19 bp, Mus musculus
  siRNA target sequence for Ccm1 (NM_030675.2,2045-2063).
ccatcgtacctattactaa

SEQ ID NO: 687273 - DNA, 19 bp, Mus musculus
  siRNA target sequence for Ccm1 (NM_030675.2,2046-2064).
catcgtacctattactaaa

SEQ ID NO: 687274 - DNA, 19 bp, Mus musculus
  siRNA target sequence for Ccm1 (NM_030675.2,2050-2068).
gtacctattactaaactga

SEQ ID NO: 687275 - DNA, 19 bp, Mus musculus
  siRNA target sequence for Ccm1 (NM_030675.2,2131-2149).
gagggcgtcagtaaggaaa

SEQ ID NO: 687276 - DNA, 19 bp, Mus musculus
  siRNA target sequence for Ccm1 (NM_030675.2,2219-2237).
caggacagatatttacaaa

SEQ ID NO: 687277 - DNA, 19 bp, Mus musculus
  siRNA target sequence for Ccm1 (NM_030675.2,2238-2256).
ggcaagcccaagcaatcat

SEQ ID NO: 687278 - DNA, 19 bp, Mus musculus
  siRNA target sequence for Ccm1 (NM_030675.2,2239-2257).
gcaagcccaagcaatcata

SEQ ID NO: 687279 - DNA, 19 bp, Mus musculus
  siRNA target sequence for Ccm1 (NM_030675.2,2245-2263).
ccaagcaatcataaagtca

SEQ ID NO: 687280 - DNA, 19 bp, Mus musculus
  siRNA target sequence for Ccm1 (NM_030675.2,2329-2347).
ctcatcagtctcaagtact

SEQ ID NO: 687281 - DNA, 19 bp, Mus musculus
  siRNA target sequence for Ccm1 (NM_030675.2,2389-2407).
caaatccatagtatggaaa

SEQ ID NO: 687282 - DNA, 19 bp, Mus musculus
  siRNA target sequence for Ccm1 (NM_030675.2,2417-2435).
gctttatagtacacacaaa

SEQ ID NO: 687283 - DNA, 19 bp, Mus musculus
  siRNA target sequence for Ccm1 (NM_030675.2,2418-2436).
ctttatagtacacacaaaa

SEQ ID NO: 687284 - DNA, 19 bp, Mus musculus
  siRNA target sequence for Ccm1 (NM_030675.2,2479-2497).
caactaatgccctctgaaa

SEQ ID NO: 687285 - DNA, 19 bp, Mus musculus
  siRNA target sequence for Cttn (NM_007803.1,423-441).
cagccgtgggccatgagta

SEQ ID NO: 687286 - DNA, 19 bp, Mus musculus
  siRNA target sequence for Cttn (NM_007803.1,597-615).
gtggcttcggtggcaaata

SEQ ID NO: 687287 - DNA, 19 bp, Mus musculus
  siRNA target sequence for Cttn (NM_007803.1,930-948).
ctggtttcggaggcaaatt

SEQ ID NO: 687288 - DNA, 19 bp, Mus musculus
  siRNA target sequence for Cttn (NM_007803.1,976-994).
ctccgctgtggggtttgat

SEQ ID NO: 687289 - DNA, 19 bp, Mus musculus
  siRNA target sequence for Cttn (NM_007803.1,981-999).
ctgtggggtttgattacaa

SEQ ID NO: 687290 - DNA, 19 bp, Mus musculus
  siRNA target sequence for Cttn (NM_007803.1,1076-1094).
cggatggacaagaatgcat

SEQ ID NO: 687291 - DNA, 19 bp, Mus musculus
  siRNA target sequence for Cttn (NM_007803.1,1173-1191).
gtaatatccgtgctaactt

SEQ ID NO: 687292 - DNA, 19 bp, Mus musculus
  siRNA target sequence for Cttn (NM_007803.1,1344-1362).
cccctagtcctcaaccaat

SEQ ID NO: 687293 - DNA, 19 bp, Mus musculus
  siRNA target sequence for Epb4.1l5 (NM_145506.2,300-318).
ccttctggacggtacagat

SEQ ID NO: 687294 - DNA, 19 bp, Mus musculus
  siRNA target sequence for Epb4.1l5 (NM_145506.2,323-341).
gtgtggacttgccgaaaaa

SEQ ID NO: 687295 - DNA, 19 bp, Mus musculus
  siRNA target sequence for Epb4.1l5 (NM_145506.2,375-393).
gtatcacctggacttgatt

SEQ ID NO: 687296 - DNA, 19 bp, Mus musculus
  siRNA target sequence for Epb4.1l5 (NM_145506.2,379-397).
cacctggacttgattgaaa

SEQ ID NO: 687297 - DNA, 19 bp, Mus musculus
  siRNA target sequence for Epb4.1l5 (NM_145506.2,381-399).
cctggacttgattgaaagt

SEQ ID NO: 687298 - DNA, 19 bp, Mus musculus
  siRNA target sequence for Epb4.1l5 (NM_145506.2,400-418).
gactattttggtttgagat

SEQ ID NO: 687299 - DNA, 19 bp, Mus musculus
  siRNA target sequence for Epb4.1l5 (NM_145506.2,409-427).
ggtttgagattcatggatt

SEQ ID NO: 687300 - DNA, 19 bp, Mus musculus
  siRNA target sequence for Epb4.1l5 (NM_145506.2,431-449).
cccaagtagcccattggtt

SEQ ID NO: 687301 - DNA, 19 bp, Mus musculus
  siRNA target sequence for Epb4.1l5 (NM_145506.2,491-509).
caccctattgtcttcatct

SEQ ID NO: 687302 - DNA, 19 bp, Mus musculus
  siRNA target sequence for Epb4.1l5 (NM_145506.2,500-518).
gtcttcatcttcgagttaa

SEQ ID NO: 687303 - DNA, 19 bp, Mus musculus
  siRNA target sequence for Epb4.1l5 (NM_145506.2,502-520).
cttcatcttcgagttaagt

SEQ ID NO: 687304 - DNA, 19 bp, Mus musculus
  siRNA target sequence for Epb4.1l5 (NM_145506.2,505-523).
catcttcgagttaagtttt

SEQ ID NO: 687305 - DNA, 19 bp, Mus musculus
  siRNA target sequence for Epb4.1l5 (NM_145506.2,511-529).
cgagttaagttttattcct

SEQ ID NO: 687306 - DNA, 19 bp, Mus musculus
  siRNA target sequence for Epb4.1l5 (NM_145506.2,527-545).
cctcggaaccaaataatct

SEQ ID NO: 687307 - DNA, 19 bp, Mus musculus
  siRNA target sequence for Epb4.1l5 (NM_145506.2,528-546).
ctcggaaccaaataatctt

SEQ ID NO: 687308 - DNA, 19 bp, Mus musculus
  siRNA target sequence for Epb4.1l5 (NM_145506.2,552-570).
ggagctaacccggtattta

SEQ ID NO: 687309 - DNA, 19 bp, Mus musculus
  siRNA target sequence for Epb4.1l5 (NM_145506.2,553-571).
gagctaacccggtatttat

SEQ ID NO: 687310 - DNA, 19 bp, Mus musculus
  siRNA target sequence for Epb4.1l5 (NM_145506.2,577-595).
cttcagctaaaacaagata

SEQ ID NO: 687311 - DNA, 19 bp, Mus musculus
  siRNA target sequence for Epb4.1l5 (NM_145506.2,598-616).
ctcagtgggaagttagagt

SEQ ID NO: 687312 - DNA, 19 bp, Mus musculus
  siRNA target sequence for Epb4.1l5 (NM_145506.2,634-652).
gttcagttggcagcttata

SEQ ID NO: 687313 - DNA, 19 bp, Mus musculus
  siRNA target sequence for Epb4.1l5 (NM_145506.2,861-879).
cgtggtcaaggctagagat

SEQ ID NO: 687314 - DNA, 19 bp, Mus musculus
  siRNA target sequence for Epb4.1l5 (NM_145506.2,963-981).
caagataaccagattggat

SEQ ID NO: 687315 - DNA, 19 bp, Mus musculus
  siRNA target sequence for Epb4.1l5 (NM_145506.2,966-984).
gataaccagattggatttt

SEQ ID NO: 687316 - DNA, 19 bp, Mus musculus
  siRNA target sequence for Epb4.1l5 (NM_145506.2,1132-1150).
cgaggacctgtccaaaaga

SEQ ID NO: 687317 - DNA, 19 bp, Mus musculus
  siRNA target sequence for Epb4.1l5 (NM_145506.2,1154-1172).
cccatcgatcaggattcat

SEQ ID NO: 687318 - DNA, 19 bp, Mus musculus
  siRNA target sequence for Epb4.1l5 (NM_145506.2,1155-1173).
ccatcgatcaggattcatt

SEQ ID NO: 687319 - DNA, 19 bp, Mus musculus
  siRNA target sequence for Epb4.1l5 (NM_145506.2,1174-1192).
cgactaggatcccgattta

SEQ ID NO: 687320 - DNA, 19 bp, Mus musculus
  siRNA target sequence for Epb4.1l5 (NM_145506.2,1177-1195).
ctaggatcccgatttagat

SEQ ID NO: 687321 - DNA, 19 bp, Mus musculus
  siRNA target sequence for Epb4.1l5 (NM_145506.2,1180-1198).
ggatcccgatttagataca

SEQ ID NO: 687322 - DNA, 19 bp, Mus musculus
  siRNA target sequence for Epb4.1l5 (NM_145506.2,1283-1301).
cccgacggacgctgcaaat

SEQ ID NO: 687323 - DNA, 19 bp, Mus musculus
  siRNA target sequence for Epb4.1l5 (NM_145506.2,1286-1304).
gacggacgctgcaaatgaa

SEQ ID NO: 687324 - DNA, 19 bp, Mus musculus
  siRNA target sequence for Epb4.1l5 (NM_145506.2,1324-1342).
gaagatcttggtgttctta

SEQ ID NO: 687325 - DNA, 19 bp, Mus musculus
  siRNA target sequence for Epb4.1l5 (NM_145506.2,1471-1489).
gagcagcacgacaggaaat

SEQ ID NO: 687326 - DNA, 19 bp, Mus musculus
  siRNA target sequence for Epb4.1l5 (NM_145506.2,1496-1514).
ccctaagcgttgatttgct

SEQ ID NO: 687327 - DNA, 19 bp, Mus musculus
  siRNA target sequence for Epb4.1l5 (NM_145506.2,1521-1539).
cccagacttactagaaaca

SEQ ID NO: 687328 - DNA, 19 bp, Mus musculus
  siRNA target sequence for Epb4.1l5 (NM_145506.2,1527-1545).
cttactagaaacaaccatt

SEQ ID NO: 687329 - DNA, 19 bp, Mus musculus
  siRNA target sequence for Epb4.1l5 (NM_145506.2,1609-1627).
gccaccaggtcaaatgaat

SEQ ID NO: 687330 - DNA, 19 bp, Mus musculus
  siRNA target sequence for Epb4.1l5 (NM_145506.2,1610-1628).
ccaccaggtcaaatgaatt

SEQ ID NO: 687331 - DNA, 19 bp, Mus musculus
  siRNA target sequence for Epb4.1l5 (NM_145506.2,1613-1631).
ccaggtcaaatgaattaga

SEQ ID NO: 687332 - DNA, 19 bp, Mus musculus
  siRNA target sequence for Epb4.1l5 (NM_145506.2,1642-1660).
gctgaatgtgagacattaa

SEQ ID NO: 687333 - DNA, 19 bp, Mus musculus
  siRNA target sequence for Epb4.1l5 (NM_145506.2,1717-1735).
cttcgacctaccattgaca

SEQ ID NO: 687334 - DNA, 19 bp, Mus musculus
  siRNA target sequence for Epb4.1l5 (NM_145506.2,1720-1738).
cgacctaccattgacatta

SEQ ID NO: 687335 - DNA, 19 bp, Mus musculus
  siRNA target sequence for Epb4.1l5 (NM_145506.2,1721-1739).
gacctaccattgacattaa

SEQ ID NO: 687336 - DNA, 19 bp, Mus musculus
  siRNA target sequence for Epb4.1l5 (NM_145506.2,1724-1742).
ctaccattgacattaatgt

SEQ ID NO: 687337 - DNA, 19 bp, Mus musculus
  siRNA target sequence for Epb4.1l5 (NM_145506.2,1783-1801).
cttaataatgccattgaga

SEQ ID NO: 687338 - DNA, 19 bp, Mus musculus
  siRNA target sequence for Epb4.1l5 (NM_145506.2,1831-1849).
cctgacttcaagagtaata

SEQ ID NO: 687339 - DNA, 19 bp, Mus musculus
  siRNA target sequence for Epb4.1l5 (NM_145506.2,1867-1885).
gaagctgtgcataaggtta

SEQ ID NO: 687340 - DNA, 19 bp, Mus musculus
  siRNA target sequence for Epb4.1l5 (NM_145506.2,1870-1888).
gctgtgcataaggttacaa

SEQ ID NO: 687341 - DNA, 19 bp, Mus musculus
  siRNA target sequence for Epb4.1l5 (NM_145506.2,1894-1912).
gatagtttattaactcata

SEQ ID NO: 687342 - DNA, 19 bp, Mus musculus
  siRNA target sequence for Epb4.1l5 (NM_145506.2,1940-1958).
caaacagtactgcattcaa

SEQ ID NO: 687343 - DNA, 19 bp, Mus musculus
  siRNA target sequence for Epb4.1l5 (NM_145506.2,1946-1964).
gtactgcattcaatgaaaa

SEQ ID NO: 687344 - DNA, 19 bp, Mus musculus
  siRNA target sequence for Epb4.1l5 (NM_145506.2,2017-2035).
gacagtgcctctgtactaa

SEQ ID NO: 687345 - DNA, 19 bp, Mus musculus
  siRNA target sequence for Epb4.1l5 (NM_145506.2,2055-2073).
ggacgccttacttctttct

SEQ ID NO: 687346 - DNA, 19 bp, Mus musculus
  siRNA target sequence for Epb4.1l5 (NM_145506.2,2133-2151).
cacaccccggtggattatt

SEQ ID NO: 687347 - DNA, 19 bp, Mus musculus
  siRNA target sequence for Epb4.1l5 (NM_145506.2,2183-2201).
caggatatggagcatcttt

SEQ ID NO: 687348 - DNA, 19 bp, Mus musculus
  siRNA target sequence for Mylip (NM_153789.2,318-336).
gggatcatcgaggttgatt

SEQ ID NO: 687349 - DNA, 19 bp, Mus musculus
  siRNA target sequence for Mylip (NM_153789.2,319-337).
ggatcatcgaggttgatta

SEQ ID NO: 687350 - DNA, 19 bp, Mus musculus
  siRNA target sequence for Mylip (NM_153789.2,320-338).
gatcatcgaggttgattat

SEQ ID NO: 687351 - DNA, 19 bp, Mus musculus
  siRNA target sequence for Mylip (NM_153789.2,323-341).
catcgaggttgattatttt

SEQ ID NO: 687352 - DNA, 19 bp, Mus musculus
  siRNA target sequence for Mylip (NM_153789.2,422-440).
ggcaccttaccgccttaaa

SEQ ID NO: 687353 - DNA, 19 bp, Mus musculus
  siRNA target sequence for Mylip (NM_153789.2,424-442).
caccttaccgccttaaact

SEQ ID NO: 687354 - DNA, 19 bp, Mus musculus
  siRNA target sequence for Mylip (NM_153789.2,426-444).
ccttaccgccttaaactga

SEQ ID NO: 687355 - DNA, 19 bp, Mus musculus
  siRNA target sequence for Mylip (NM_153789.2,461-479).
ggagcctcatctcatctta

SEQ ID NO: 687356 - DNA, 19 bp, Mus musculus
  siRNA target sequence for Mylip (NM_153789.2,483-501).
gagcagacaaggcatatct

SEQ ID NO: 687357 - DNA, 19 bp, Mus musculus
  siRNA target sequence for Mylip (NM_153789.2,485-503).
gcagacaaggcatatcttt

SEQ ID NO: 687358 - DNA, 19 bp, Mus musculus
  siRNA target sequence for Mylip (NM_153789.2,581-599).
cctggctcagaccaaattt

SEQ ID NO: 687359 - DNA, 19 bp, Mus musculus
  siRNA target sequence for Mylip (NM_153789.2,584-602).
ggctcagaccaaatttgga

SEQ ID NO: 687360 - DNA, 19 bp, Mus musculus
  siRNA target sequence for Mylip (NM_153789.2,592-610).
ccaaatttggagactacaa

SEQ ID NO: 687361 - DNA, 19 bp, Mus musculus
  siRNA target sequence for Mylip (NM_153789.2,612-630).
cagaacaccgcccaataca

SEQ ID NO: 687362 - DNA, 19 bp, Mus musculus
  siRNA target sequence for Mylip (NM_153789.2,679-697).
gcatcgttgcgaagcataa

SEQ ID NO: 687363 - DNA, 19 bp, Mus musculus
  siRNA target sequence for Mylip (NM_153789.2,735-753).
caggttctgcagattgtgt

SEQ ID NO: 687364 - DNA, 19 bp, Mus musculus
  siRNA target sequence for Mylip (NM_153789.2,834-852).
gaaggcatctcgatctgta

SEQ ID NO: 687365 - DNA, 19 bp, Mus musculus
  siRNA target sequence for Mylip (NM_153789.2,838-856).
gcatctcgatctgtaaaga

SEQ ID NO: 687366 - DNA, 19 bp, Mus musculus
  siRNA target sequence for Mylip (NM_153789.2,855-873).
gaggactttagccctatta

SEQ ID NO: 687367 - DNA, 19 bp, Mus musculus
  siRNA target sequence for Mylip (NM_153789.2,858-876).
gactttagccctattaaca

SEQ ID NO: 687368 - DNA, 19 bp, Mus musculus
  siRNA target sequence for Mylip (NM_153789.2,867-885).
cctattaacaggatagctt

SEQ ID NO: 687369 - DNA, 19 bp, Mus musculus
  siRNA target sequence for Mylip (NM_153789.2,868-886).
ctattaacaggatagctta

SEQ ID NO: 687370 - DNA, 19 bp, Mus musculus
  siRNA target sequence for Mylip (NM_153789.2,913-931).
caggaaagaatgtctactt

SEQ ID NO: 687371 - DNA, 19 bp, Mus musculus
  siRNA target sequence for Mylip (NM_153789.2,963-981).
gtgctcctgtttaagatga

SEQ ID NO: 687372 - DNA, 19 bp, Mus musculus
  siRNA target sequence for Mylip (NM_153789.2,1118-1136).
gaacgaaaacattaacctt

SEQ ID NO: 687373 - DNA, 19 bp, Mus musculus
  siRNA target sequence for Mylip (NM_153789.2,1157-1175).
catcaagagaacatccaaa

SEQ ID NO: 687374 - DNA, 19 bp, Mus musculus
  siRNA target sequence for Mylip (NM_153789.2,1168-1186).
catccaaagaggtctatga

SEQ ID NO: 687375 - DNA, 19 bp, Mus musculus
  siRNA target sequence for Plekhc1 (NM_146054.1,160-178).
ggcttcgctgtgataacga

SEQ ID NO: 687376 - DNA, 19 bp, Mus musculus
  siRNA target sequence for Plekhc1 (NM_146054.1,368-386).
gcggtacctgaagaagtat

SEQ ID NO: 687377 - DNA, 19 bp, Mus musculus
  siRNA target sequence for Plekhc1 (NM_146054.1,369-387).
cggtacctgaagaagtata

SEQ ID NO: 687378 - DNA, 19 bp, Mus musculus
  siRNA target sequence for Plekhc1 (NM_146054.1,370-388).
ggtacctgaagaagtataa

SEQ ID NO: 687379 - DNA, 19 bp, Mus musculus
  siRNA target sequence for Plekhc1 (NM_146054.1,458-476).
caagatgagattcattcaa

SEQ ID NO: 687380 - DNA, 19 bp, Mus musculus
  siRNA target sequence for Plekhc1 (NM_146054.1,500-518).
cggcatcacacacttcatt

SEQ ID NO: 687381 - DNA, 19 bp, Mus musculus
  siRNA target sequence for Plekhc1 (NM_146054.1,512-530).
cttcattgcgaggtttcaa

SEQ ID NO: 687382 - DNA, 19 bp, Mus musculus
  siRNA target sequence for Plekhc1 (NM_146054.1,532-550).
gcggcaagagagaagaact

SEQ ID NO: 687383 - DNA, 19 bp, Mus musculus
  siRNA target sequence for Plekhc1 (NM_146054.1,533-551).
cggcaagagagaagaactt

SEQ ID NO: 687384 - DNA, 19 bp, Mus musculus
  siRNA target sequence for Plekhc1 (NM_146054.1,693-711).
cggttgtccttcatctgta

SEQ ID NO: 687385 - DNA, 19 bp, Mus musculus
  siRNA target sequence for Plekhc1 (NM_146054.1,724-742).
gcaaggtggtccacgaatt

SEQ ID NO: 687386 - DNA, 19 bp, Mus musculus
  siRNA target sequence for Plekhc1 (NM_146054.1,728-746).
ggtggtccacgaattcatt

SEQ ID NO: 687387 - DNA, 19 bp, Mus musculus
  siRNA target sequence for Plekhc1 (NM_146054.1,743-761).
cattggtggttacatattt

SEQ ID NO: 687388 - DNA, 19 bp, Mus musculus
  siRNA target sequence for Plekhc1 (NM_146054.1,747-765).
ggtggttacatatttctct

SEQ ID NO: 687389 - DNA, 19 bp, Mus musculus
  siRNA target sequence for Plekhc1 (NM_146054.1,769-787).
ctcgtgcgaaagaccaaaa

SEQ ID NO: 687390 - DNA, 19 bp, Mus musculus
  siRNA target sequence for Plekhc1 (NM_146054.1,772-790).
gtgcgaaagaccaaaatga

SEQ ID NO: 687391 - DNA, 19 bp, Mus musculus
  siRNA target sequence for Plekhc1 (NM_146054.1,793-811).
gtttagatgaggagatgtt

SEQ ID NO: 687392 - DNA, 19 bp, Mus musculus
  siRNA target sequence for Sgca (NM_009161.1,319-337).
ggcccagcagacaacttta

SEQ ID NO: 687393 - DNA, 19 bp, Mus musculus
  siRNA target sequence for Sgca (NM_009161.1,330-348).
caactttacacctacttgt

SEQ ID NO: 687394 - DNA, 19 bp, Mus musculus
  siRNA target sequence for Sgca (NM_009161.1,489-507).
cacagcgcagtccctataa

SEQ ID NO: 687395 - DNA, 19 bp, Mus musculus
  siRNA target sequence for Sgca (NM_009161.1,526-544).
ctcccccactccagaagat

SEQ ID NO: 687396 - DNA, 19 bp, Mus musculus
  siRNA target sequence for Sgca (NM_009161.1,562-580).
cgaggtcacagcctacaat

SEQ ID NO: 687397 - DNA, 19 bp, Mus musculus
  siRNA target sequence for Sgca (NM_009161.1,573-591).
cctacaatcgagacagttt

SEQ ID NO: 687398 - DNA, 19 bp, Mus musculus
  siRNA target sequence for Sgca (NM_009161.1,764-782).
cagctgctcaacatcactt

SEQ ID NO: 687399 - DNA, 19 bp, Mus musculus
  siRNA target sequence for Sgca (NM_009161.1,802-820).
ccgagtccctcttcctatt

SEQ ID NO: 687400 - DNA, 19 bp, Mus musculus
  siRNA target sequence for Sgca (NM_009161.1,827-845).
cggaaggaaggggtataca

SEQ ID NO: 687401 - DNA, 19 bp, Mus musculus
  siRNA target sequence for Sgca (NM_009161.1,828-846).
ggaaggaaggggtatacat

SEQ ID NO: 687402 - DNA, 19 bp, Mus musculus
  siRNA target sequence for Sgca (NM_009161.1,977-995).
gttgactggtgcaatgtgt

SEQ ID NO: 687403 - DNA, 19 bp, Mus musculus
  siRNA target sequence for Sgca (NM_009161.1,1167-1185).
ctctgttgctggcttacat

SEQ ID NO: 687404 - DNA, 19 bp, Mus musculus
  siRNA target sequence for Sgca (NM_009161.1,1326-1344).
ccaccttgcccatgtttaa

SEQ ID NO: 687405 - DNA, 19 bp, Mus musculus
  siRNA target sequence for Sgca (NM_009161.1,1383-1401).
gcgcacagatgcctcttat

SEQ ID NO: 687406 - DNA, 19 bp, Mus musculus
  siRNA target sequence for Sgca (NM_009161.1,1386-1404).
cacagatgcctcttatcct

SEQ ID NO: 687407 - DNA, 19 bp, Mus musculus
  siRNA target sequence for Sgcb (NM_011890.2,122-140).
gcggaggaatgttaacaaa

SEQ ID NO: 687408 - DNA, 19 bp, Mus musculus
  siRNA target sequence for Sgcb (NM_011890.2,141-159).
gagcacaacagcaatttca

SEQ ID NO: 687409 - DNA, 19 bp, Mus musculus
  siRNA target sequence for Sgcb (NM_011890.2,152-170).
caatttcaaagctggatat

SEQ ID NO: 687410 - DNA, 19 bp, Mus musculus
  siRNA target sequence for Sgcb (NM_011890.2,183-201).
gaggaccggctccataaga

SEQ ID NO: 687411 - DNA, 19 bp, Mus musculus
  siRNA target sequence for Sgcb (NM_011890.2,240-258).
gtgatcgtcctcctgttta

SEQ ID NO: 687412 - DNA, 19 bp, Mus musculus
  siRNA target sequence for Sgcb (NM_011890.2,269-287).
catcaatctactcattaca

SEQ ID NO: 687413 - DNA, 19 bp, Mus musculus
  siRNA target sequence for Sgcb (NM_011890.2,272-290).
caatctactcattacactt

SEQ ID NO: 687414 - DNA, 19 bp, Mus musculus
  siRNA target sequence for Sgcb (NM_011890.2,315-333).
gggccaaatgggtgtgata

SEQ ID NO: 687415 - DNA, 19 bp, Mus musculus
  siRNA target sequence for Sgcb (NM_011890.2,319-337).
caaatgggtgtgatagcat

SEQ ID NO: 687416 - DNA, 19 bp, Mus musculus
  siRNA target sequence for Sgcb (NM_011890.2,389-407).
cgtcatccacccgctttat

SEQ ID NO: 687417 - DNA, 19 bp, Mus musculus
  siRNA target sequence for Sgcb (NM_011890.2,390-408).
gtcatccacccgctttata

SEQ ID NO: 687418 - DNA, 19 bp, Mus musculus
  siRNA target sequence for Sgcb (NM_011890.2,419-437).
gggaggacggcggaatgaa

SEQ ID NO: 687419 - DNA, 19 bp, Mus musculus
  siRNA target sequence for Sgcb (NM_011890.2,420-438).
ggaggacggcggaatgaaa

SEQ ID NO: 687420 - DNA, 19 bp, Mus musculus
  siRNA target sequence for Sgcb (NM_011890.2,421-439).
gaggacggcggaatgaaaa

SEQ ID NO: 687421 - DNA, 19 bp, Mus musculus
  siRNA target sequence for Sgcb (NM_011890.2,424-442).
gacggcggaatgaaaacct

SEQ ID NO: 687422 - DNA, 19 bp, Mus musculus
  siRNA target sequence for Sgcb (NM_011890.2,454-472).
gcaacaaccagccaattgt

SEQ ID NO: 687423 - DNA, 19 bp, Mus musculus
  siRNA target sequence for Sgcb (NM_011890.2,552-570).
gacccaaggacacacaata

SEQ ID NO: 687424 - DNA, 19 bp, Mus musculus
  siRNA target sequence for Sgcb (NM_011890.2,645-663).
gcatcgactgaaaggatta

SEQ ID NO: 687425 - DNA, 19 bp, Mus musculus
  siRNA target sequence for Sgcb (NM_011890.2,668-686).
caatgctaccagtgactta

SEQ ID NO: 687426 - DNA, 19 bp, Mus musculus
  siRNA target sequence for Sgcb (NM_011890.2,673-691).
ctaccagtgacttaaacat

SEQ ID NO: 687427 - DNA, 19 bp, Mus musculus
  siRNA target sequence for Sgcb (NM_011890.2,677-695).
cagtgacttaaacatcaaa

SEQ ID NO: 687428 - DNA, 19 bp, Mus musculus
  siRNA target sequence for Sgcb (NM_011890.2,721-739).
gcaacgaaggcgtcttcat

SEQ ID NO: 687429 - DNA, 19 bp, Mus musculus
  siRNA target sequence for Sgcb (NM_011890.2,743-761).
gggcaaaaccattgaattt

SEQ ID NO: 687430 - DNA, 19 bp, Mus musculus
  siRNA target sequence for Sgcb (NM_011890.2,745-763).
gcaaaaccattgaatttca

SEQ ID NO: 687431 - DNA, 19 bp, Mus musculus
  siRNA target sequence for Sgcb (NM_011890.2,768-786).
ggaggagatgtggagttaa

SEQ ID NO: 687432 - DNA, 19 bp, Mus musculus
  siRNA target sequence for Sgcb (NM_011890.2,769-787).
gaggagatgtggagttaaa

SEQ ID NO: 687433 - DNA, 19 bp, Mus musculus
  siRNA target sequence for Sgcb (NM_011890.2,910-928).
cagatggcacactcttcaa

SEQ ID NO: 687434 - DNA, 19 bp, Mus musculus
  siRNA target sequence for Sgcb (NM_011890.2,975-993).
ccttgtgggaacactcatt

SEQ ID NO: 687435 - DNA, 19 bp, Mus musculus
  siRNA target sequence for Sgce (NM_011360.2,104-122).
gcgaccactggcacattct

SEQ ID NO: 687436 - DNA, 19 bp, Mus musculus
  siRNA target sequence for Sgce (NM_011360.2,105-123).
cgaccactggcacattctt

SEQ ID NO: 687437 - DNA, 19 bp, Mus musculus
  siRNA target sequence for Sgce (NM_011360.2,106-124).
gaccactggcacattctta

SEQ ID NO: 687438 - DNA, 19 bp, Mus musculus
  siRNA target sequence for Sgce (NM_011360.2,108-126).
ccactggcacattcttact

SEQ ID NO: 687439 - DNA, 19 bp, Mus musculus
  siRNA target sequence for Sgce (NM_011360.2,125-143).
ctgacagtgtacactcttt

SEQ ID NO: 687440 - DNA, 19 bp, Mus musculus
  siRNA target sequence for Sgce (NM_011360.2,226-244).
gggtgaatttccaccttat

SEQ ID NO: 687441 - DNA, 19 bp, Mus musculus
  siRNA target sequence for Sgce (NM_011360.2,230-248).
gaatttccaccttatccaa

SEQ ID NO: 687442 - DNA, 19 bp, Mus musculus
  siRNA target sequence for Sgce (NM_011360.2,264-282).
gtaatgatcccataacatt

SEQ ID NO: 687443 - DNA, 19 bp, Mus musculus
  siRNA target sequence for Sgce (NM_011360.2,269-287).
gatcccataacatttaaca

SEQ ID NO: 687444 - DNA, 19 bp, Mus musculus
  siRNA target sequence for Sgce (NM_011360.2,312-330).
gacctggatggcttcgata

SEQ ID NO: 687445 - DNA, 19 bp, Mus musculus
  siRNA target sequence for Sgce (NM_011360.2,314-332).
cctggatggcttcgatata

SEQ ID NO: 687446 - DNA, 19 bp, Mus musculus
  siRNA target sequence for Sgce (NM_011360.2,315-333).
ctggatggcttcgatatat

SEQ ID NO: 687447 - DNA, 19 bp, Mus musculus
  siRNA target sequence for Sgce (NM_011360.2,318-336).
gatggcttcgatatatcca

SEQ ID NO: 687448 - DNA, 19 bp, Mus musculus
  siRNA target sequence for Sgce (NM_011360.2,372-390).
ctccaacagctgaaaatgt

SEQ ID NO: 687449 - DNA, 19 bp, Mus musculus
  siRNA target sequence for Sgce (NM_011360.2,389-407).
gtggggaaaccaactatta

SEQ ID NO: 687450 - DNA, 19 bp, Mus musculus
  siRNA target sequence for Sgce (NM_011360.2,391-409).
ggggaaaccaactattatt

SEQ ID NO: 687451 - DNA, 19 bp, Mus musculus
  siRNA target sequence for Sgce (NM_011360.2,393-411).
ggaaaccaactattattga

SEQ ID NO: 687452 - DNA, 19 bp, Mus musculus
  siRNA target sequence for Sgce (NM_011360.2,451-469).
gcataacttgataattaat

SEQ ID NO: 687453 - DNA, 19 bp, Mus musculus
  siRNA target sequence for Sgce (NM_011360.2,553-571).
cgaggttcttggagacttt

SEQ ID NO: 687454 - DNA, 19 bp, Mus musculus
  siRNA target sequence for Sgce (NM_011360.2,568-586).
ctttctcggggctgtaaaa

SEQ ID NO: 687455 - DNA, 19 bp, Mus musculus
  siRNA target sequence for Sgce (NM_011360.2,648-666).
gcagagtgccgcttcctat

SEQ ID NO: 687456 - DNA, 19 bp, Mus musculus
  siRNA target sequence for Sgce (NM_011360.2,651-669).
gagtgccgcttcctattaa

SEQ ID NO: 687457 - DNA, 19 bp, Mus musculus
  siRNA target sequence for Sgce (NM_011360.2,656-674).
ccgcttcctattaatgaca

SEQ ID NO: 687458 - DNA, 19 bp, Mus musculus
  siRNA target sequence for Sgce (NM_011360.2,657-675).
cgcttcctattaatgacat

SEQ ID NO: 687459 - DNA, 19 bp, Mus musculus
  siRNA target sequence for Sgce (NM_011360.2,740-758).
gaaaatccacagaatcagt

SEQ ID NO: 687460 - DNA, 19 bp, Mus musculus
  siRNA target sequence for Sgce (NM_011360.2,773-791).
gaaatggagcctgtgataa

SEQ ID NO: 687461 - DNA, 19 bp, Mus musculus
  siRNA target sequence for Sgce (NM_011360.2,785-803).
gtgataacatgcgacaaaa

SEQ ID NO: 687462 - DNA, 19 bp, Mus musculus
  siRNA target sequence for Sgce (NM_011360.2,805-823).
gttccgaactcactttcat

SEQ ID NO: 687463 - DNA, 19 bp, Mus musculus
  siRNA target sequence for Sgce (NM_011360.2,810-828).
gaactcactttcatatcga

SEQ ID NO: 687464 - DNA, 19 bp, Mus musculus
  siRNA target sequence for Sgce (NM_011360.2,826-844).
cgactggtgcaagatttca

SEQ ID NO: 687465 - DNA, 19 bp, Mus musculus
  siRNA target sequence for Sgce (NM_011360.2,931-949).
cccttcggattctttgaaa

SEQ ID NO: 687466 - DNA, 19 bp, Mus musculus
  siRNA target sequence for Sgce (NM_011360.2,1004-1022).
gcactggtgcttttcctaa

SEQ ID NO: 687467 - DNA, 19 bp, Mus musculus
  siRNA target sequence for Sgce (NM_011360.2,1019-1037).
ctaatactcgcttatatca

SEQ ID NO: 687468 - DNA, 19 bp, Mus musculus
  siRNA target sequence for Sgce (NM_011360.2,1049-1067).
cgggaaggagtggaaaaga

SEQ ID NO: 687469 - DNA, 19 bp, Mus musculus
  siRNA target sequence for Sgce (NM_011360.2,1100-1118).
catcacagctcgattcaga

SEQ ID NO: 687470 - DNA, 19 bp, Mus musculus
  siRNA target sequence for Sgce (NM_011360.2,1105-1123).
cagctcgattcagaaatct

SEQ ID NO: 687471 - DNA, 19 bp, Mus musculus
  siRNA target sequence for Sgce (NM_011360.2,1133-1151).
cttcgagacatgtccaaaa

SEQ ID NO: 687472 - DNA, 19 bp, Mus musculus
  siRNA target sequence for Sgce (NM_011360.2,1312-1330).
gactacaggtaaatggtat

SEQ ID NO: 687473 - DNA, 19 bp, Mus musculus
  siRNA target sequence for Sspn (NM_010656.1,186-204).
cctgctagtcagagatact

SEQ ID NO: 687474 - DNA, 19 bp, Mus musculus
  siRNA target sequence for Sspn (NM_010656.1,244-262).
cttggactgttcatgcttt

SEQ ID NO: 687475 - DNA, 19 bp, Mus musculus
  siRNA target sequence for Sspn (NM_010656.1,248-266).
gactgttcatgctttgtgt

SEQ ID NO: 687476 - DNA, 19 bp, Mus musculus
  siRNA target sequence for Sspn (NM_010656.1,263-281).
gtgtctcataccaagttga

SEQ ID NO: 687477 - DNA, 19 bp, Mus musculus
  siRNA target sequence for Sspn (NM_010656.1,305-323).
ctatgaaggtattctactt

SEQ ID NO: 687478 - DNA, 19 bp, Mus musculus
  siRNA target sequence for Sspn (NM_010656.1,412-430).
gagacctccctggattctt

SEQ ID NO: 687479 - DNA, 19 bp, Mus musculus
  siRNA target sequence for Sspn (NM_010656.1,603-621).
caggtaccaggtcttttat

SEQ ID NO: 687480 - DNA, 19 bp, Mus musculus
  siRNA target sequence for Sspn (NM_010656.1,605-623).
ggtaccaggtcttttatgt

SEQ ID NO: 687481 - DNA, 19 bp, Mus musculus
  siRNA target sequence for C1qbp (NM_007573.1,250-268).
gacaaggccttcgttgaat

SEQ ID NO: 687482 - DNA, 19 bp, Mus musculus
  siRNA target sequence for C1qbp (NM_007573.1,265-283).
gaattcttgactgatgaaa

SEQ ID NO: 687483 - DNA, 19 bp, Mus musculus
  siRNA target sequence for C1qbp (NM_007573.1,357-375).
cggcacggaggctaaatta

SEQ ID NO: 687484 - DNA, 19 bp, Mus musculus
  siRNA target sequence for C1qbp (NM_007573.1,358-376).
ggcacggaggctaaattat

SEQ ID NO: 687485 - DNA, 19 bp, Mus musculus
  siRNA target sequence for C1qbp (NM_007573.1,359-377).
gcacggaggctaaattatt

SEQ ID NO: 687486 - DNA, 19 bp, Mus musculus
  siRNA target sequence for C1qbp (NM_007573.1,385-403).
gttgccggagaaaagatca

SEQ ID NO: 687487 - DNA, 19 bp, Mus musculus
  siRNA target sequence for C1qbp (NM_007573.1,404-422).
cggtcactttcaacatcaa

SEQ ID NO: 687488 - DNA, 19 bp, Mus musculus
  siRNA target sequence for C1qbp (NM_007573.1,429-447).
catccctccaacatttgat

SEQ ID NO: 687489 - DNA, 19 bp, Mus musculus
  siRNA target sequence for C1qbp (NM_007573.1,503-521).
catcaactcccaactttgt

SEQ ID NO: 687490 - DNA, 19 bp, Mus musculus
  siRNA target sequence for C1qbp (NM_007573.1,545-563).
gcaagaagacccttgtact

SEQ ID NO: 687491 - DNA, 19 bp, Mus musculus
  siRNA target sequence for C1qbp (NM_007573.1,573-591).
ctatcctgaggatgagatt

SEQ ID NO: 687492 - DNA, 19 bp, Mus musculus
  siRNA target sequence for C1qbp (NM_007573.1,607-625).
gccgagagtgatattttct

SEQ ID NO: 687493 - DNA, 19 bp, Mus musculus
  siRNA target sequence for C1qbp (NM_007573.1,609-627).
cgagagtgatattttctct

SEQ ID NO: 687494 - DNA, 19 bp, Mus musculus
  siRNA target sequence for C1qbp (NM_007573.1,610-628).
gagagtgatattttctcta

SEQ ID NO: 687495 - DNA, 19 bp, Mus musculus
  siRNA target sequence for C1qbp (NM_007573.1,626-644).
ctatcaaggaagttagctt

SEQ ID NO: 687496 - DNA, 19 bp, Mus musculus
  siRNA target sequence for C1qbp (NM_007573.1,662-680).
ctgagtggagggatacaaa

SEQ ID NO: 687497 - DNA, 19 bp, Mus musculus
  siRNA target sequence for C1qbp (NM_007573.1,664-682).
gagtggagggatacaaact

SEQ ID NO: 687498 - DNA, 19 bp, Mus musculus
  siRNA target sequence for C1qbp (NM_007573.1,713-731).
ccttgtatgaccacctaat

SEQ ID NO: 687499 - DNA, 19 bp, Mus musculus
  siRNA target sequence for C1qbp (NM_007573.1,723-741).
ccacctaatggatttcctt

SEQ ID NO: 687500 - DNA, 19 bp, Mus musculus
  siRNA target sequence for C1qbp (NM_007573.1,743-761).
cggaccgaggggtggataa

SEQ ID NO: 687501 - DNA, 19 bp, Mus musculus
  siRNA target sequence for C1qbp (NM_007573.1,745-763).
gaccgaggggtggataaca

SEQ ID NO: 687502 - DNA, 19 bp, Mus musculus
  siRNA target sequence for C1qbp (NM_007573.1,747-765).
ccgaggggtggataacact

SEQ ID NO: 687503 - DNA, 19 bp, Mus musculus
  siRNA target sequence for C1qbp (NM_007573.1,748-766).
cgaggggtggataacactt

SEQ ID NO: 687504 - DNA, 19 bp, Mus musculus
  siRNA target sequence for C1qbp (NM_007573.1,749-767).
gaggggtggataacacttt

SEQ ID NO: 687505 - DNA, 19 bp, Mus musculus
  siRNA target sequence for 2010107E04Rik (NM_027360.1,58-76).
gtttcaaaccttgattcaa

SEQ ID NO: 687506 - DNA, 19 bp, Mus musculus
  siRNA target sequence for 2010107E04Rik (NM_027360.1,88-106).
ccccatgaaaccctactat

SEQ ID NO: 687507 - DNA, 19 bp, Mus musculus
  siRNA target sequence for 2010107E04Rik (NM_027360.1,89-107).
cccatgaaaccctactata

SEQ ID NO: 687508 - DNA, 19 bp, Mus musculus
  siRNA target sequence for 2010107E04Rik (NM_027360.1,148-166).
gagcctcatcgtatataaa

SEQ ID NO: 687509 - DNA, 19 bp, Mus musculus
  siRNA target sequence for 2010107E04Rik (NM_027360.1,150-168).
gcctcatcgtatataaaat

SEQ ID NO: 687510 - DNA, 19 bp, Mus musculus
  siRNA target sequence for 2010107E04Rik (NM_027360.1,172-190).
gagtgctgataaaagaagt

SEQ ID NO: 687511 - DNA, 19 bp, Mus musculus
  siRNA target sequence for Atpi (NM_007512.2,169-187).
cggactcgtcggatagcat

SEQ ID NO: 687512 - DNA, 19 bp, Mus musculus
  siRNA target sequence for Atpi (NM_007512.2,347-365).
gcgtctgcagaagcaaatt

SEQ ID NO: 687513 - DNA, 19 bp, Mus musculus
  siRNA target sequence for Atpi (NM_007512.2,349-367).
gtctgcagaagcaaattga

SEQ ID NO: 687514 - DNA, 19 bp, Mus musculus
  siRNA target sequence for Atpi (NM_007512.2,360-378).
caaattgaacgccataaga

SEQ ID NO: 687515 - DNA, 19 bp, Mus musculus
  siRNA target sequence for D16Wsu109e (NM_138599.2,499-517).
cgcaagcagccaaaaacaa

SEQ ID NO: 687516 - DNA, 19 bp, Mus musculus
  siRNA target sequence for D16Wsu109e (NM_138599.2,566-584).
ctacactgaggctattagt

SEQ ID NO: 687517 - DNA, 19 bp, Mus musculus
  siRNA target sequence for D16Wsu109e (NM_138599.2,587-605).
gtgccctactgagaagaat

SEQ ID NO: 687518 - DNA, 19 bp, Mus musculus
  siRNA target sequence for D16Wsu109e (NM_138599.2,669-687).
gaagtggcccaagattgta

SEQ ID NO: 687519 - DNA, 19 bp, Mus musculus
  siRNA target sequence for D16Wsu109e (NM_138599.2,747-765).
catgagaagctagacaata

SEQ ID NO: 687520 - DNA, 19 bp, Mus musculus
  siRNA target sequence for D16Wsu109e (NM_138599.2,750-768).
gagaagctagacaataaga

SEQ ID NO: 687521 - DNA, 19 bp, Mus musculus
  siRNA target sequence for D16Wsu109e (NM_138599.2,829-847).
gcatgctgttagctgataa

SEQ ID NO: 687522 - DNA, 19 bp, Mus musculus
  siRNA target sequence for D16Wsu109e (NM_138599.2,830-848).
catgctgttagctgataaa

SEQ ID NO: 687523 - DNA, 19 bp, Mus musculus
  siRNA target sequence for D16Wsu109e (NM_138599.2,833-851).
gctgttagctgataaagtt

SEQ ID NO: 687524 - DNA, 19 bp, Mus musculus
  siRNA target sequence for D16Wsu109e (NM_138599.2,836-854).
gttagctgataaagttctt

SEQ ID NO: 687525 - DNA, 19 bp, Mus musculus
  siRNA target sequence for D16Wsu109e (NM_138599.2,911-929).
gccatctccacagtttatt

SEQ ID NO: 687526 - DNA, 19 bp, Mus musculus
  siRNA target sequence for D16Wsu109e (NM_138599.2,946-964).
ctttcaccgatgatataat

SEQ ID NO: 687527 - DNA, 19 bp, Mus musculus
  siRNA target sequence for D16Wsu109e (NM_138599.2,950-968).
caccgatgatataatttct

SEQ ID NO: 687528 - DNA, 19 bp, Mus musculus
  siRNA target sequence for D16Wsu109e (NM_138599.2,952-970).
ccgatgatataatttctca

SEQ ID NO: 687529 - DNA, 19 bp, Mus musculus
  siRNA target sequence for D16Wsu109e (NM_138599.2,953-971).
cgatgatataatttctcaa

SEQ ID NO: 687530 - DNA, 19 bp, Mus musculus
  siRNA target sequence for D16Wsu109e (NM_138599.2,987-1005).
gagaagtctgatgaagata

SEQ ID NO: 687531 - DNA, 19 bp, Mus musculus
  siRNA target sequence for D16Wsu109e (NM_138599.2,1200-1218).
gccaagcctgacttagata

SEQ ID NO: 687532 - DNA, 19 bp, Mus musculus
  siRNA target sequence for D16Wsu109e (NM_138599.2,1201-1219).
ccaagcctgacttagataa

SEQ ID NO: 687533 - DNA, 19 bp, Mus musculus
  siRNA target sequence for D16Wsu109e (NM_138599.2,1254-1272).
cgagcaaatgcccttatca

SEQ ID NO: 687534 - DNA, 19 bp, Mus musculus
  siRNA target sequence for D16Wsu109e (NM_138599.2,1255-1273).
gagcaaatgcccttatcaa

SEQ ID NO: 687535 - DNA, 19 bp, Mus musculus
  siRNA target sequence for D16Wsu109e (NM_138599.2,1336-1354).
ctgccgagatcgatcctat

SEQ ID NO: 687536 - DNA, 19 bp, Mus musculus
  siRNA target sequence for D16Wsu109e (NM_138599.2,1339-1357).
ccgagatcgatcctatgaa

SEQ ID NO: 687537 - DNA, 19 bp, Mus musculus
  siRNA target sequence for D16Wsu109e (NM_138599.2,1341-1359).
gagatcgatcctatgaact

SEQ ID NO: 687538 - DNA, 19 bp, Mus musculus
  siRNA target sequence for D16Wsu109e (NM_138599.2,1374-1392).
caccgaggacagctgaaaa

SEQ ID NO: 687539 - DNA, 19 bp, Mus musculus
  siRNA target sequence for D16Wsu109e (NM_138599.2,1376-1394).
ccgaggacagctgaaaatt

SEQ ID NO: 687540 - DNA, 19 bp, Mus musculus
  siRNA target sequence for D16Wsu109e (NM_138599.2,1397-1415).
gctggatctggttgaagaa

SEQ ID NO: 687541 - DNA, 19 bp, Mus musculus
  siRNA target sequence for D16Wsu109e (NM_138599.2,1478-1496).
gaagtgttttgcattgtat

SEQ ID NO: 687542 - DNA, 19 bp, Mus musculus
  siRNA target sequence for D16Wsu109e (NM_138599.2,1493-1511).
gtatcgccaggcatataca

SEQ ID NO: 687543 - DNA, 19 bp, Mus musculus
  siRNA target sequence for D16Wsu109e (NM_138599.2,1502-1520).
ggcatatacagcaaacaat

SEQ ID NO: 687544 - DNA, 19 bp, Mus musculus
  siRNA target sequence for D16Wsu109e (NM_138599.2,1503-1521).
gcatatacagcaaacaatt

SEQ ID NO: 687545 - DNA, 19 bp, Mus musculus
  siRNA target sequence for D16Wsu109e (NM_138599.2,1537-1555).
cagctatgaaaggttttga

SEQ ID NO: 687546 - DNA, 19 bp, Mus musculus
  siRNA target sequence for D16Wsu109e (NM_138599.2,1548-1566).
ggttttgaagagatcataa

SEQ ID NO: 687547 - DNA, 19 bp, Mus musculus
  siRNA target sequence for D16Wsu109e (NM_138599.2,1599-1617).
ctttatgcccaggcattaa

SEQ ID NO: 687548 - DNA, 19 bp, Mus musculus
  siRNA target sequence for D16Wsu109e (NM_138599.2,1607-1625).
ccaggcattaacagatcaa

SEQ ID NO: 687549 - DNA, 19 bp, Mus musculus
  siRNA target sequence for D16Wsu109e (NM_138599.2,1610-1628).
ggcattaacagatcaacaa

SEQ ID NO: 687550 - DNA, 19 bp, Mus musculus
  siRNA target sequence for D16Wsu109e (NM_138599.2,1620-1638).
gatcaacaacagtttggta

SEQ ID NO: 687551 - DNA, 19 bp, Mus musculus
  siRNA target sequence for D16Wsu109e (NM_138599.2,1686-1704).
gctacaacttatgttcata

SEQ ID NO: 687552 - DNA, 19 bp, Mus musculus
  siRNA target sequence for D16Wsu109e (NM_138599.2,1687-1705).
ctacaacttatgttcataa

SEQ ID NO: 687553 - DNA, 19 bp, Mus musculus
  siRNA target sequence for D16Wsu109e (NM_138599.2,1730-1748).
gcaagatttggataaaggt

SEQ ID NO: 687554 - DNA, 19 bp, Mus musculus
  siRNA target sequence for D16Wsu109e (NM_138599.2,1784-1802).
caaatgtgactttgcatat

SEQ ID NO: 687555 - DNA, 19 bp, Mus musculus
  siRNA target sequence for D16Wsu109e (NM_138599.2,1805-1823).
gaccatggggactattgaa

SEQ ID NO: 687556 - DNA, 19 bp, Mus musculus
  siRNA target sequence for D16Wsu109e (NM_138599.2,1807-1825).
ccatggggactattgaagt

SEQ ID NO: 687557 - DNA, 19 bp, Mus musculus
  siRNA target sequence for D16Wsu109e (NM_138599.2,1950-1968).
gcaaagaaatacggattaa

SEQ ID NO: 687558 - DNA, 19 bp, Mus musculus
  siRNA target sequence for D16Wsu109e (NM_138599.2,1951-1969).
caaagaaatacggattaaa

SEQ ID NO: 687559 - DNA, 19 bp, Mus musculus
  siRNA target sequence for Mtcp1 (NM_010839.2,590-608).
gtttacaagccaacaacta

SEQ ID NO: 687560 - DNA, 19 bp, Mus musculus
  siRNA target sequence for Mtcp1 (NM_010839.2,636-654).
ccaagaacttcgtaagtgt

SEQ ID NO: 687561 - DNA, 19 bp, Mus musculus
  siRNA target sequence for Mtcp1 (NM_010839.2,637-655).
caagaacttcgtaagtgtt

SEQ ID NO: 687562 - DNA, 19 bp, Mus musculus
  siRNA target sequence for Mtcp1 (NM_010839.2,658-676).
gctcgatatcccaaaggaa

SEQ ID NO: 687563 - DNA, 19 bp, Mus musculus
  siRNA target sequence for Mtcp1 (NM_010839.2,685-703).
gtctgctcaggatttgaga

SEQ ID NO: 687564 - DNA, 19 bp, Mus musculus
  siRNA target sequence for AI663987 (NM_033526.1,184-202).
cctcggtcaaggagttcaa

SEQ ID NO: 687565 - DNA, 19 bp, Mus musculus
  siRNA target sequence for AI663987 (NM_033526.1,207-225).
gagatctcccggaggttta

SEQ ID NO: 687566 - DNA, 19 bp, Mus musculus
  siRNA target sequence for AI663987 (NM_033526.1,341-359).
ccctcagaaggctcaagat

SEQ ID NO: 687567 - DNA, 19 bp, Mus musculus
  siRNA target sequence for AI663987 (NM_033526.1,458-476).
cagctctggcaatacaact

SEQ ID NO: 687568 - DNA, 19 bp, Mus musculus
  siRNA target sequence for AI663987 (NM_033526.1,595-613).
gctccgccaactttatgga

SEQ ID NO: 687569 - DNA, 19 bp, Mus musculus
  siRNA target sequence for AI663987 (NM_033526.1,681-699).
cccttggtccaggatatga

SEQ ID NO: 687570 - DNA, 19 bp, Mus musculus
  siRNA target sequence for AI663987 (NM_033526.1,714-732).
ctgatgcgccacatgatca

SEQ ID NO: 687571 - DNA, 19 bp, Mus musculus
  siRNA target sequence for AI663987 (NM_033526.1,968-986).
ggaacagtttggcaacaat

SEQ ID NO: 687572 - DNA, 19 bp, Mus musculus
  siRNA target sequence for AI663987 (NM_033526.1,1005-1023).
gggaactccgacaactcat

SEQ ID NO: 687573 - DNA, 19 bp, Mus musculus
  siRNA target sequence for AI663987 (NM_033526.1,1194-1212).
gggtcagggatgttcaaca

SEQ ID NO: 687574 - DNA, 19 bp, Mus musculus
  siRNA target sequence for AI663987 (NM_033526.1,1732-1750).
cgatgccagaagtgagatt

SEQ ID NO: 687575 - DNA, 19 bp, Mus musculus
  siRNA target sequence for AI663987 (NM_033526.1,1733-1751).
gatgccagaagtgagattt

SEQ ID NO: 687576 - DNA, 19 bp, Mus musculus
  siRNA target sequence for AI663987 (NM_033526.1,1736-1754).
gccagaagtgagatttcaa

SEQ ID NO: 687577 - DNA, 19 bp, Mus musculus
  siRNA target sequence for Pigb (NM_018889.1,157-175).
ggcagctcgggagaaatga

SEQ ID NO: 687578 - DNA, 19 bp, Mus musculus
  siRNA target sequence for Pigb (NM_018889.1,275-293).
ccatcgctctgcgaatact

SEQ ID NO: 687579 - DNA, 19 bp, Mus musculus
  siRNA target sequence for Pigb (NM_018889.1,276-294).
catcgctctgcgaatactt

SEQ ID NO: 687580 - DNA, 19 bp, Mus musculus
  siRNA target sequence for Pigb (NM_018889.1,280-298).
gctctgcgaatacttaact

SEQ ID NO: 687581 - DNA, 19 bp, Mus musculus
  siRNA target sequence for Pigb (NM_018889.1,303-321).
cttagtgcagacaagcttt

SEQ ID NO: 687582 - DNA, 19 bp, Mus musculus
  siRNA target sequence for Pigb (NM_018889.1,360-378).
ccgcatggttttcagttat

SEQ ID NO: 687583 - DNA, 19 bp, Mus musculus
  siRNA target sequence for Pigb (NM_018889.1,406-424).
cgattgagaggctacactt

SEQ ID NO: 687584 - DNA, 19 bp, Mus musculus
  siRNA target sequence for Pigb (NM_018889.1,430-448).
ctcatcttcgccagtattt

SEQ ID NO: 687585 - DNA, 19 bp, Mus musculus
  siRNA target sequence for Pigb (NM_018889.1,677-695).
ctgccctcgcccttttcta

SEQ ID NO: 687586 - DNA, 19 bp, Mus musculus
  siRNA target sequence for Pigb (NM_018889.1,679-697).
gccctcgcccttttctact

SEQ ID NO: 687587 - DNA, 19 bp, Mus musculus
  siRNA target sequence for Pigb (NM_018889.1,680-698).
ccctcgcccttttctacta

SEQ ID NO: 687588 - DNA, 19 bp, Mus musculus
  siRNA target sequence for Pigb (NM_018889.1,926-944).
cgctggtccaattaaattt

SEQ ID NO: 687589 - DNA, 19 bp, Mus musculus
  siRNA target sequence for Pigb (NM_018889.1,928-946).
ctggtccaattaaatttct

SEQ ID NO: 687590 - DNA, 19 bp, Mus musculus
  siRNA target sequence for Pigb (NM_018889.1,934-952).
caattaaatttcttgaaat

SEQ ID NO: 687591 - DNA, 19 bp, Mus musculus
  siRNA target sequence for Pigb (NM_018889.1,964-982).
cagaacctagggacgtttt

SEQ ID NO: 687592 - DNA, 19 bp, Mus musculus
  siRNA target sequence for Pigb (NM_018889.1,966-984).
gaacctagggacgttttat

SEQ ID NO: 687593 - DNA, 19 bp, Mus musculus
  siRNA target sequence for Pigb (NM_018889.1,1040-1058).
cccacttacctttcttcat

SEQ ID NO: 687594 - DNA, 19 bp, Mus musculus
  siRNA target sequence for Pigb (NM_018889.1,1041-1059).
ccacttacctttcttcatt

SEQ ID NO: 687595 - DNA, 19 bp, Mus musculus
  siRNA target sequence for Pigb (NM_018889.1,1278-1296).
ctacactggcctagttcat

SEQ ID NO: 687596 - DNA, 19 bp, Mus musculus
  siRNA target sequence for Pigb (NM_018889.1,1364-1382).
cggcctcagtattcataat

SEQ ID NO: 687597 - DNA, 19 bp, Mus musculus
  siRNA target sequence for Pigb (NM_018889.1,1366-1384).
gcctcagtattcataatga

SEQ ID NO: 687598 - DNA, 19 bp, Mus musculus
  siRNA target sequence for Pigb (NM_018889.1,1391-1409).
gccactccacgccttacta

SEQ ID NO: 687599 - DNA, 19 bp, Mus musculus
  siRNA target sequence for Pigb (NM_018889.1,1455-1473).
cccagacttgactggaaaa

SEQ ID NO: 687600 - DNA, 19 bp, Mus musculus
  siRNA target sequence for Pigb (NM_018889.1,1464-1482).
gactggaaaaactcagtat

SEQ ID NO: 687601 - DNA, 19 bp, Mus musculus
  siRNA target sequence for Pigb (NM_018889.1,1503-1521).
ctacttaaaccccttaaga

SEQ ID NO: 687602 - DNA, 19 bp, Mus musculus
  siRNA target sequence for Pigb (NM_018889.1,1514-1532).
ccttaagatggttacaaca

SEQ ID NO: 687603 - DNA, 19 bp, Mus musculus
  siRNA target sequence for Pigb (NM_018889.1,1520-1538).
gatggttacaacaagaatt

SEQ ID NO: 687604 - DNA, 19 bp, Mus musculus
  siRNA target sequence for Pigb (NM_018889.1,1668-1686).
ccgaactggaagtcacata

SEQ ID NO: 687605 - DNA, 19 bp, Mus musculus
  siRNA target sequence for Pigb (NM_018889.1,1689-1707).
cgtctacgagcgaaggtta

SEQ ID NO: 687606 - DNA, 19 bp, Mus musculus
  siRNA target sequence for Psmd13 (NM_011875.2,139-157).
cgtttggcaccgtttggaa

SEQ ID NO: 687607 - DNA, 19 bp, Mus musculus
  siRNA target sequence for Psmd13 (NM_011875.2,158-176).
gagctgtacacgaagaagt

SEQ ID NO: 687608 - DNA, 19 bp, Mus musculus
  siRNA target sequence for Psmd13 (NM_011875.2,161-179).
ctgtacacgaagaagttgt

SEQ ID NO: 687609 - DNA, 19 bp, Mus musculus
  siRNA target sequence for Psmd13 (NM_011875.2,178-196).
gtggcatcagctaacactt

SEQ ID NO: 687610 - DNA, 19 bp, Mus musculus
  siRNA target sequence for Psmd13 (NM_011875.2,192-210).
cacttgaggtgcttgattt

SEQ ID NO: 687611 - DNA, 19 bp, Mus musculus
  siRNA target sequence for Psmd13 (NM_011875.2,299-317).
ctgtccctggtagaaataa

SEQ ID NO: 687612 - DNA, 19 bp, Mus musculus
  siRNA target sequence for Psmd13 (NM_011875.2,301-319).
gtccctggtagaaataatt

SEQ ID NO: 687613 - DNA, 19 bp, Mus musculus
  siRNA target sequence for Psmd13 (NM_011875.2,303-321).
ccctggtagaaataattct

SEQ ID NO: 687614 - DNA, 19 bp, Mus musculus
  siRNA target sequence for Psmd13 (NM_011875.2,333-351).
gacagatgaccgatcctaa

SEQ ID NO: 687615 - DNA, 19 bp, Mus musculus
  siRNA target sequence for Psmd13 (NM_011875.2,347-365).
cctaatgtggctcttactt

SEQ ID NO: 687616 - DNA, 19 bp, Mus musculus
  siRNA target sequence for Psmd13 (NM_011875.2,348-366).
ctaatgtggctcttacttt

SEQ ID NO: 687617 - DNA, 19 bp, Mus musculus
  siRNA target sequence for Psmd13 (NM_011875.2,359-377).
cttacttttctggaaaaga

SEQ ID NO: 687618 - DNA, 19 bp, Mus musculus
  siRNA target sequence for Psmd13 (NM_011875.2,376-394).
gactcgtgagaaggtaaaa

SEQ ID NO: 687619 - DNA, 19 bp, Mus musculus
  siRNA target sequence for Psmd13 (NM_011875.2,380-398).
cgtgagaaggtaaaaagta

SEQ ID NO: 687620 - DNA, 19 bp, Mus musculus
  siRNA target sequence for Psmd13 (NM_011875.2,385-403).
gaaggtaaaaagtagtgat

SEQ ID NO: 687621 - DNA, 19 bp, Mus musculus
  siRNA target sequence for Psmd13 (NM_011875.2,401-419).
gatgaagccgtgatcttgt

SEQ ID NO: 687622 - DNA, 19 bp, Mus musculus
  siRNA target sequence for Psmd13 (NM_011875.2,404-422).
gaagccgtgatcttgtgta

SEQ ID NO: 687623 - DNA, 19 bp, Mus musculus
  siRNA target sequence for Psmd13 (NM_011875.2,407-425).
gccgtgatcttgtgtaaga

SEQ ID NO: 687624 - DNA, 19 bp, Mus musculus
  siRNA target sequence for Psmd13 (NM_011875.2,426-444).
cggcaatcggagctctaaa

SEQ ID NO: 687625 - DNA, 19 bp, Mus musculus
  siRNA target sequence for Psmd13 (NM_011875.2,427-445).
ggcaatcggagctctaaaa

SEQ ID NO: 687626 - DNA, 19 bp, Mus musculus
  siRNA target sequence for Psmd13 (NM_011875.2,428-446).
gcaatcggagctctaaaat

SEQ ID NO: 687627 - DNA, 19 bp, Mus musculus
  siRNA target sequence for Psmd13 (NM_011875.2,429-447).
caatcggagctctaaaatt

SEQ ID NO: 687628 - DNA, 19 bp, Mus musculus
  siRNA target sequence for Psmd13 (NM_011875.2,456-474).
gcgatctgcaggctacaaa

SEQ ID NO: 687629 - DNA, 19 bp, Mus musculus
  siRNA target sequence for Psmd13 (NM_011875.2,528-546).
ccgttcacagtcgtttcta

SEQ ID NO: 687630 - DNA, 19 bp, Mus musculus
  siRNA target sequence for Psmd13 (NM_011875.2,529-547).
cgttcacagtcgtttctat

SEQ ID NO: 687631 - DNA, 19 bp, Mus musculus
  siRNA target sequence for Psmd13 (NM_011875.2,548-566).
gatctctccagtaaatact

SEQ ID NO: 687632 - DNA, 19 bp, Mus musculus
  siRNA target sequence for Psmd13 (NM_011875.2,586-604).
cgcgtcctactacaaagat

SEQ ID NO: 687633 - DNA, 19 bp, Mus musculus
  siRNA target sequence for Psmd13 (NM_011875.2,784-802).
caccctgtacgctttcaat

SEQ ID NO: 687634 - DNA, 19 bp, Mus musculus
  siRNA target sequence for Psmd13 (NM_011875.2,804-822).
gcggtgctgtggataggtt

SEQ ID NO: 687635 - DNA, 19 bp, Mus musculus
  siRNA target sequence for Psmd13 (NM_011875.2,906-924).
gccttatggagatgacttt

SEQ ID NO: 687636 - DNA, 19 bp, Mus musculus
  siRNA target sequence for Psmd13 (NM_011875.2,940-958).
ccacagacaactcactttt

SEQ ID NO: 687637 - DNA, 19 bp, Mus musculus
  siRNA target sequence for Psmd13 (NM_011875.2,968-986).
gccaaaagtgccaaaatca

SEQ ID NO: 687638 - DNA, 19 bp, Mus musculus
  siRNA target sequence for Psmd13 (NM_011875.2,1092-1110).
cgcgagtgctggatttgca

SEQ ID NO: 687639 - DNA, 19 bp, Mus musculus
  siRNA target sequence for 1500040L08Rik (NM_053267.1,241-259).
ccgaggacattcaactgta

SEQ ID NO: 687640 - DNA, 19 bp, Mus musculus
  siRNA target sequence for 1500040L08Rik (NM_053267.1,297-315).
cccgaactcgtgctgttaa

SEQ ID NO: 687641 - DNA, 19 bp, Mus musculus
  siRNA target sequence for 1500040L08Rik (NM_053267.1,306-324).
gtgctgttaagccgaaatt

SEQ ID NO: 687642 - DNA, 19 bp, Mus musculus
  siRNA target sequence for 1500040L08Rik (NM_053267.1,319-337).
gaaattaccaggaactaga

SEQ ID NO: 687643 - DNA, 19 bp, Mus musculus
  siRNA target sequence for Cln8 (NM_012000.2,372-390).
cttggcggagagcattttt

SEQ ID NO: 687644 - DNA, 19 bp, Mus musculus
  siRNA target sequence for Cln8 (NM_012000.2,399-417).
ctacgcttcgtggaagatt

SEQ ID NO: 687645 - DNA, 19 bp, Mus musculus
  siRNA target sequence for Cln8 (NM_012000.2,430-448).
gcggttgctggctttgtct

SEQ ID NO: 687646 - DNA, 19 bp, Mus musculus
  siRNA target sequence for Cln8 (NM_012000.2,790-808).
ggttcagcgatcaatctca

SEQ ID NO: 687647 - DNA, 19 bp, Mus musculus
  siRNA target sequence for Cln8 (NM_012000.2,807-825).
cagagctggccactatcta

SEQ ID NO: 687648 - DNA, 19 bp, Mus musculus
  siRNA target sequence for Cln8 (NM_012000.2,922-940).
gccaaccagtggctaatga

SEQ ID NO: 687649 - DNA, 19 bp, Mus musculus
  siRNA target sequence for Cln8 (NM_012000.2,923-941).
ccaaccagtggctaatgat

SEQ ID NO: 687650 - DNA, 19 bp, Mus musculus
  siRNA target sequence for Dpm2 (NM_010073.2,92-110).
gtcgccgttagcttgatca

SEQ ID NO: 687651 - DNA, 19 bp, Mus musculus
  siRNA target sequence for Dpm2 (NM_010073.2,95-113).
gccgttagcttgatcatct

SEQ ID NO: 687652 - DNA, 19 bp, Mus musculus
  siRNA target sequence for Dpm2 (NM_010073.2,96-114).
ccgttagcttgatcatctt

SEQ ID NO: 687653 - DNA, 19 bp, Mus musculus
  siRNA target sequence for Dpm2 (NM_010073.2,98-116).
gttagcttgatcatcttca

SEQ ID NO: 687654 - DNA, 19 bp, Mus musculus
  siRNA target sequence for Dpm2 (NM_010073.2,161-179).
cagcatgtcatccacaaat

SEQ ID NO: 687655 - DNA, 19 bp, Mus musculus
  siRNA target sequence for Dpm2 (NM_010073.2,164-182).
catgtcatccacaaatact

SEQ ID NO: 687656 - DNA, 19 bp, Mus musculus
  siRNA target sequence for Erp29 (NM_026129.2,410-428).
ggtggggatctcagactat

SEQ ID NO: 687657 - DNA, 19 bp, Mus musculus
  siRNA target sequence for Erp29 (NM_026129.2,536-554).
caatggggcagttaaggtt

SEQ ID NO: 687658 - DNA, 19 bp, Mus musculus
  siRNA target sequence for Erp29 (NM_026129.2,608-626).
gtgcctgcctgcatacgat

SEQ ID NO: 687659 - DNA, 19 bp, Mus musculus
  siRNA target sequence for Erp29 (NM_026129.2,667-685).
cccgacaggccatcttgaa

SEQ ID NO: 687660 - DNA, 19 bp, Mus musculus
  siRNA target sequence for Erp29 (NM_026129.2,808-826).
ggatcggtaagctgataga

SEQ ID NO: 687661 - DNA, 19 bp, Mus musculus
  siRNA target sequence for Ktn1 (NM_008477.1,1287-1305).
ctcatttgaagcaggaaaa

SEQ ID NO: 687662 - DNA, 19 bp, Mus musculus
  siRNA target sequence for Ktn1 (NM_008477.1,1358-1376).
caatccgcagagctaaata

SEQ ID NO: 687663 - DNA, 19 bp, Mus musculus
  siRNA target sequence for Ktn1 (NM_008477.1,1523-1541).
gaagttcagagctacatca

SEQ ID NO: 687664 - DNA, 19 bp, Mus musculus
  siRNA target sequence for Ktn1 (NM_008477.1,1813-1831).
gacctccgcttcagttcta

SEQ ID NO: 687665 - DNA, 19 bp, Mus musculus
  siRNA target sequence for Ktn1 (NM_008477.1,1899-1917).
cgaatgaacaggatcactt

SEQ ID NO: 687666 - DNA, 19 bp, Mus musculus
  siRNA target sequence for Ktn1 (NM_008477.1,2047-2065).
gagtattcacgtaaaggaa

SEQ ID NO: 687667 - DNA, 19 bp, Mus musculus
  siRNA target sequence for Ktn1 (NM_008477.1,2139-2157).
gtgagcagaataaagcatt

SEQ ID NO: 687668 - DNA, 19 bp, Mus musculus
  siRNA target sequence for Ktn1 (NM_008477.1,2189-2207).
gtttctcagcagcctaata

SEQ ID NO: 687669 - DNA, 19 bp, Mus musculus
  siRNA target sequence for Ktn1 (NM_008477.1,2502-2520).
caaataaggagaaaactgt

SEQ ID NO: 687670 - DNA, 19 bp, Mus musculus
  siRNA target sequence for Ktn1 (NM_008477.1,2534-2552).
caggaaatagaggttctaa

SEQ ID NO: 687671 - DNA, 19 bp, Mus musculus
  siRNA target sequence for Ktn1 (NM_008477.1,2536-2554).
ggaaatagaggttctaaaa

SEQ ID NO: 687672 - DNA, 19 bp, Mus musculus
  siRNA target sequence for Ktn1 (NM_008477.1,2725-2743).
gtgttcgacaccacaattt

SEQ ID NO: 687673 - DNA, 19 bp, Mus musculus
  siRNA target sequence for Ktn1 (NM_008477.1,2727-2745).
gttcgacaccacaatttga

SEQ ID NO: 687674 - DNA, 19 bp, Mus musculus
  siRNA target sequence for Ktn1 (NM_008477.1,2730-2748).
cgacaccacaatttgaaga

SEQ ID NO: 687675 - DNA, 19 bp, Mus musculus
  siRNA target sequence for Ktn1 (NM_008477.1,2812-2830).
cacggagagtgatgtttct

SEQ ID NO: 687676 - DNA, 19 bp, Mus musculus
  siRNA target sequence for Ktn1 (NM_008477.1,2982-3000).
gcaatgagttagagtcttt

SEQ ID NO: 687677 - DNA, 19 bp, Mus musculus
  siRNA target sequence for Ktn1 (NM_008477.1,3038-3056).
gaccttcgggagaaaaact

SEQ ID NO: 687678 - DNA, 19 bp, Mus musculus
  siRNA target sequence for Ktn1 (NM_008477.1,3067-3085).
ggaagctttggcatcaact

SEQ ID NO: 687679 - DNA, 19 bp, Mus musculus
  siRNA target sequence for Ktn1 (NM_008477.1,3133-3151).
gcaacacgtggaagctatt

SEQ ID NO: 687680 - DNA, 19 bp, Mus musculus
  siRNA target sequence for Ktn1 (NM_008477.1,3137-3155).
cacgtggaagctattgagt

SEQ ID NO: 687681 - DNA, 19 bp, Mus musculus
  siRNA target sequence for Ktn1 (NM_008477.1,3139-3157).
cgtggaagctattgagtta

SEQ ID NO: 687682 - DNA, 19 bp, Mus musculus
  siRNA target sequence for Ktn1 (NM_008477.1,3259-3277).
gtgcgtagctggaacttca

SEQ ID NO: 687683 - DNA, 19 bp, Mus musculus
  siRNA target sequence for Ktn1 (NM_008477.1,3450-3468).
ctgacgagtctcaaaggat

SEQ ID NO: 687684 - DNA, 19 bp, Mus musculus
  siRNA target sequence for Ktn1 (NM_008477.1,3455-3473).
gagtctcaaaggatgatta

SEQ ID NO: 687685 - DNA, 19 bp, Mus musculus
  siRNA target sequence for Ktn1 (NM_008477.1,3511-3529).
gctagagcgactaagacaa

SEQ ID NO: 687686 - DNA, 19 bp, Mus musculus
  siRNA target sequence for Ktn1 (NM_008477.1,3518-3536).
cgactaagacaagaaaaca

SEQ ID NO: 687687 - DNA, 19 bp, Mus musculus
  siRNA target sequence for Ktn1 (NM_008477.1,3651-3669).
ctgagttgcagaaaaagct

SEQ ID NO: 687688 - DNA, 19 bp, Mus musculus
  siRNA target sequence for Ktn1 (NM_008477.1,3658-3676).
gcagaaaaagcttgatgat

SEQ ID NO: 687689 - DNA, 19 bp, Mus musculus
  siRNA target sequence for Ktn1 (NM_008477.1,3659-3677).
cagaaaaagcttgatgatt

SEQ ID NO: 687690 - DNA, 19 bp, Mus musculus
  siRNA target sequence for Ktn1 (NM_008477.1,3698-3716).
cagaatgaagagcttaact

SEQ ID NO: 687691 - DNA, 19 bp, Mus musculus
  siRNA target sequence for Ktn1 (NM_008477.1,3715-3733).
cttgctcaagacacagtta

SEQ ID NO: 687692 - DNA, 19 bp, Mus musculus
  siRNA target sequence for Ktn1 (NM_008477.1,3781-3799).
ggtagctgatgatttgcat

SEQ ID NO: 687693 - DNA, 19 bp, Mus musculus
  siRNA target sequence for Ktn1 (NM_008477.1,3817-3835).
gaactctatccactcaaaa

SEQ ID NO: 687694 - DNA, 19 bp, Mus musculus
  siRNA target sequence for Ktn1 (NM_008477.1,3852-3870).
ctggagacactgttgttat

SEQ ID NO: 687695 - DNA, 19 bp, Mus musculus
  siRNA target sequence for Ktn1 (NM_008477.1,3879-3897).
gtgatatttccccagaaat

SEQ ID NO: 687696 - DNA, 19 bp, Mus musculus
  siRNA target sequence for Resp18 (NM_009049.1,244-262).
ccagtacttacaacttata

SEQ ID NO: 687697 - DNA, 19 bp, Mus musculus
  siRNA target sequence for Resp18 (NM_009049.1,275-293).
gtacccgaaggcatgttct

SEQ ID NO: 687698 - DNA, 19 bp, Mus musculus
  siRNA target sequence for Resp18 (NM_009049.1,302-320).
gacatagcctatgagttaa

SEQ ID NO: 687699 - DNA, 19 bp, Mus musculus
  siRNA target sequence for Resp18 (NM_009049.1,431-449).
gagaaacttcaactcttat

SEQ ID NO: 687700 - DNA, 19 bp, Mus musculus
  siRNA target sequence for Resp18 (NM_009049.1,433-451).
gaaacttcaactcttatct

SEQ ID NO: 687701 - DNA, 19 bp, Mus musculus
  siRNA target sequence for Resp18 (NM_009049.1,445-463).
cttatctccccaaaagagt

SEQ ID NO: 687702 - DNA, 19 bp, Mus musculus
  siRNA target sequence for Resp18 (NM_009049.1,478-496).
gaacagggaccgatgcttt

SEQ ID NO: 687703 - DNA, 19 bp, Mus musculus
  siRNA target sequence for Resp18 (NM_009049.1,492-510).
gctttaccaccaaagtaat

SEQ ID NO: 687704 - DNA, 19 bp, Mus musculus
  siRNA target sequence for Sdf2l1 (NM_022324.2,214-232).
gcactcacacgacatcaaa

SEQ ID NO: 687705 - DNA, 19 bp, Mus musculus
  siRNA target sequence for Sdf2l1 (NM_022324.2,277-295).
gtccgacgatgccaatagt

SEQ ID NO: 687706 - DNA, 19 bp, Mus musculus
  siRNA target sequence for Sdf2l1 (NM_022324.2,279-297).
ccgacgatgccaatagtta

SEQ ID NO: 687707 - DNA, 19 bp, Mus musculus
  siRNA target sequence for Sdf2l1 (NM_022324.2,281-299).
gacgatgccaatagttact

SEQ ID NO: 687708 - DNA, 19 bp, Mus musculus
  siRNA target sequence for Sdf2l1 (NM_022324.2,570-588).
cggtcactggtgaacagta

SEQ ID NO: 687709 - DNA, 19 bp, Mus musculus
  siRNA target sequence for Sdf2l1 (NM_022324.2,571-589).
ggtcactggtgaacagtat

SEQ ID NO: 687710 - DNA, 19 bp, Mus musculus
  siRNA target sequence for Sdf2l1 (NM_022324.2,699-717).
ccacgggtcacgatgaact

SEQ ID NO: 687711 - DNA, 19 bp, Mus musculus
  siRNA target sequence for Surf4 (NM_011512.2,749-767).
gagtgagcagcgtgactat

SEQ ID NO: 687712 - DNA, 19 bp, Mus musculus
  siRNA target sequence for Surf4 (NM_011512.2,751-769).
gtgagcagcgtgactatat

SEQ ID NO: 687713 - DNA, 19 bp, Mus musculus
  siRNA target sequence for Surf4 (NM_011512.2,886-904).
gctttgggctgtttggaat

SEQ ID NO: 687714 - DNA, 19 bp, Mus musculus
  siRNA target sequence for Surf4 (NM_011512.2,905-923).
catcgcactgcagacaatt

SEQ ID NO: 687715 - DNA, 19 bp, Mus musculus
  siRNA target sequence for Surf4 (NM_011512.2,915-933).
cagacaattgcctatagca

SEQ ID NO: 687716 - DNA, 19 bp, Mus musculus
  siRNA target sequence for Surf4 (NM_011512.2,917-935).
gacaattgcctatagcatt

SEQ ID NO: 687717 - DNA, 19 bp, Mus musculus
  siRNA target sequence for Surf4 (NM_011512.2,1057-1075).
gctcccccaagcagtacat

SEQ ID NO: 687718 - DNA, 19 bp, Mus musculus
  siRNA target sequence for Surf4 (NM_011512.2,1112-1130).
catgaccctccttcacttt

SEQ ID NO: 687719 - DNA, 19 bp, Mus musculus
  siRNA target sequence for Surf4 (NM_011512.2,1115-1133).
gaccctccttcactttgat

SEQ ID NO: 687720 - DNA, 19 bp, Mus musculus
  siRNA target sequence for Surf4 (NM_011512.2,1245-1263).
gccatcaacgtgtatttca

SEQ ID NO: 687721 - DNA, 19 bp, Mus musculus
  siRNA target sequence for Surf4 (NM_011512.2,1246-1264).
ccatcaacgtgtatttcaa

SEQ ID NO: 687722 - DNA, 19 bp, Mus musculus
  siRNA target sequence for Surf4 (NM_011512.2,1271-1289).
ctggacaatcccggtatat

SEQ ID NO: 687723 - DNA, 19 bp, Mus musculus
  siRNA target sequence for Surf4 (NM_011512.2,1273-1291).
ggacaatcccggtatataa

SEQ ID NO: 687724 - DNA, 19 bp, Mus musculus
  siRNA target sequence for Surf4 (NM_011512.2,1274-1292).
gacaatcccggtatataaa

SEQ ID NO: 687725 - DNA, 19 bp, Mus musculus
  siRNA target sequence for Esrrbl1 (NM_028680.2,148-166).
gagcggcctaccacatgtt

SEQ ID NO: 687726 - DNA, 19 bp, Mus musculus
  siRNA target sequence for Esrrbl1 (NM_028680.2,167-185).
cgtggtgatggaagactta

SEQ ID NO: 687727 - DNA, 19 bp, Mus musculus
  siRNA target sequence for Esrrbl1 (NM_028680.2,225-243).
ctccgaaagagcaatctga

SEQ ID NO: 687728 - DNA, 19 bp, Mus musculus
  siRNA target sequence for Esrrbl1 (NM_028680.2,287-305).
cgagcagttctacatgttt

SEQ ID NO: 687729 - DNA, 19 bp, Mus musculus
  siRNA target sequence for Esrrbl1 (NM_028680.2,315-333).
gctgcgtggctgatcaaca

SEQ ID NO: 687730 - DNA, 19 bp, Mus musculus
  siRNA target sequence for Esrrbl1 (NM_028680.2,316-334).
ctgcgtggctgatcaacaa

SEQ ID NO: 687731 - DNA, 19 bp, Mus musculus
  siRNA target sequence for Esrrbl1 (NM_028680.2,318-336).
gcgtggctgatcaacaaaa

SEQ ID NO: 687732 - DNA, 19 bp, Mus musculus
  siRNA target sequence for Esrrbl1 (NM_028680.2,371-389).
cgatcccaatgcaactata

SEQ ID NO: 687733 - DNA, 19 bp, Mus musculus
  siRNA target sequence for Esrrbl1 (NM_028680.2,375-393).
cccaatgcaactatatcta

SEQ ID NO: 687734 - DNA, 19 bp, Mus musculus
  siRNA target sequence for Esrrbl1 (NM_028680.2,376-394).
ccaatgcaactatatctaa

SEQ ID NO: 687735 - DNA, 19 bp, Mus musculus
  siRNA target sequence for Esrrbl1 (NM_028680.2,382-400).
caactatatctaatatact

SEQ ID NO: 687736 - DNA, 19 bp, Mus musculus
  siRNA target sequence for Esrrbl1 (NM_028680.2,438-456).
cctccttcaaaattaaagt

SEQ ID NO: 687737 - DNA, 19 bp, Mus musculus
  siRNA target sequence for Esrrbl1 (NM_028680.2,457-475).
ctggttacggagaacaagt

SEQ ID NO: 687738 - DNA, 19 bp, Mus musculus
  siRNA target sequence for Esrrbl1 (NM_028680.2,493-511).
gcttagctgaagaagcttt

SEQ ID NO: 687739 - DNA, 19 bp, Mus musculus
  siRNA target sequence for Esrrbl1 (NM_028680.2,494-512).
cttagctgaagaagcttta

SEQ ID NO: 687740 - DNA, 19 bp, Mus musculus
  siRNA target sequence for Esrrbl1 (NM_028680.2,582-600).
gaagatgatgccgagttaa

SEQ ID NO: 687741 - DNA, 19 bp, Mus musculus
  siRNA target sequence for Esrrbl1 (NM_028680.2,585-603).
gatgatgccgagttaacat

SEQ ID NO: 687742 - DNA, 19 bp, Mus musculus
  siRNA target sequence for Esrrbl1 (NM_028680.2,588-606).
gatgccgagttaacattaa

SEQ ID NO: 687743 - DNA, 19 bp, Mus musculus
  siRNA target sequence for Esrrbl1 (NM_028680.2,591-609).
gccgagttaacattaagta

SEQ ID NO: 687744 - DNA, 19 bp, Mus musculus
  siRNA target sequence for Esrrbl1 (NM_028680.2,592-610).
ccgagttaacattaagtaa

SEQ ID NO: 687745 - DNA, 19 bp, Mus musculus
  siRNA target sequence for Esrrbl1 (NM_028680.2,593-611).
cgagttaacattaagtaaa

SEQ ID NO: 687746 - DNA, 19 bp, Mus musculus
  siRNA target sequence for Esrrbl1 (NM_028680.2,710-728).
gtctgccaaacaagaagat

SEQ ID NO: 687747 - DNA, 19 bp, Mus musculus
  siRNA target sequence for Esrrbl1 (NM_028680.2,723-741).
gaagatattttggaatcta

SEQ ID NO: 687748 - DNA, 19 bp, Mus musculus
  siRNA target sequence for Esrrbl1 (NM_028680.2,754-772).
cggaatggagcctagaagt

SEQ ID NO: 687749 - DNA, 19 bp, Mus musculus
  siRNA target sequence for Esrrbl1 (NM_028680.2,789-807).
cagctgaaagtcacgatta

SEQ ID NO: 687750 - DNA, 19 bp, Mus musculus
  siRNA target sequence for Esrrbl1 (NM_028680.2,792-810).
ctgaaagtcacgattagga

SEQ ID NO: 687751 - DNA, 19 bp, Mus musculus
  siRNA target sequence for Esrrbl1 (NM_028680.2,800-818).
cacgattaggactgacaat

SEQ ID NO: 687752 - DNA, 19 bp, Mus musculus
  siRNA target sequence for Esrrbl1 (NM_028680.2,802-820).
cgattaggactgacaataa

SEQ ID NO: 687753 - DNA, 19 bp, Mus musculus
  siRNA target sequence for Esrrbl1 (NM_028680.2,829-847).
ggatccatgttgaccaaat

SEQ ID NO: 687754 - DNA, 19 bp, Mus musculus
  siRNA target sequence for Esrrbl1 (NM_028680.2,925-943).
gcaggactctggaaaagat

SEQ ID NO: 687755 - DNA, 19 bp, Mus musculus
  siRNA target sequence for Esrrbl1 (NM_028680.2,945-963).
ggcagccgagaaaagtaca

SEQ ID NO: 687756 - DNA, 19 bp, Mus musculus
  siRNA target sequence for Esrrbl1 (NM_028680.2,946-964).
gcagccgagaaaagtacat

SEQ ID NO: 687757 - DNA, 19 bp, Mus musculus
  siRNA target sequence for Esrrbl1 (NM_028680.2,947-965).
cagccgagaaaagtacatt

SEQ ID NO: 687758 - DNA, 19 bp, Mus musculus
  siRNA target sequence for Esrrbl1 (NM_028680.2,951-969).
cgagaaaagtacattaaca

SEQ ID NO: 687759 - DNA, 19 bp, Mus musculus
  siRNA target sequence for Esrrbl1 (NM_028680.2,959-977).
gtacattaacaatcaactt

SEQ ID NO: 687760 - DNA, 19 bp, Mus musculus
  siRNA target sequence for Esrrbl1 (NM_028680.2,1006-1024).
cccaagcccagctaagtga

SEQ ID NO: 687761 - DNA, 19 bp, Mus musculus
  siRNA target sequence for Esrrbl1 (NM_028680.2,1046-1064).
gggcaatggcggagtaact

SEQ ID NO: 687762 - DNA, 19 bp, Mus musculus
  siRNA target sequence for Esrrbl1 (NM_028680.2,1048-1066).
gcaatggcggagtaactga

SEQ ID NO: 687763 - DNA, 19 bp, Mus musculus
  siRNA target sequence for Esrrbl1 (NM_028680.2,1089-1107).
gttacagaagaattagaaa

SEQ ID NO: 687764 - DNA, 19 bp, Mus musculus
  siRNA target sequence for Esrrbl1 (NM_028680.2,1153-1171).
gcactcctttggtgaagat

SEQ ID NO: 687765 - DNA, 19 bp, Mus musculus
  siRNA target sequence for Esrrbl1 (NM_028680.2,1243-1261).
cgctacttcagtcaaaact

SEQ ID NO: 687766 - DNA, 19 bp, Mus musculus
  siRNA target sequence for Fcmd (NM_139309.2,137-155).
ggtcttggcccttttaaca

SEQ ID NO: 687767 - DNA, 19 bp, Mus musculus
  siRNA target sequence for Fcmd (NM_139309.2,177-195).
ctgtttcagctgtactact

SEQ ID NO: 687768 - DNA, 19 bp, Mus musculus
  siRNA target sequence for Fcmd (NM_139309.2,218-236).
gaatggaccgggttcatca

SEQ ID NO: 687769 - DNA, 19 bp, Mus musculus
  siRNA target sequence for Fcmd (NM_139309.2,222-240).
ggaccgggttcatcaaaat

SEQ ID NO: 687770 - DNA, 19 bp, Mus musculus
  siRNA target sequence for Fcmd (NM_139309.2,247-265).
ggaatcgagttggatttga

SEQ ID NO: 687771 - DNA, 19 bp, Mus musculus
  siRNA target sequence for Fcmd (NM_139309.2,248-266).
gaatcgagttggatttgat

SEQ ID NO: 687772 - DNA, 19 bp, Mus musculus
  siRNA target sequence for Fcmd (NM_139309.2,271-289).
cacagtggcgtgcagttaa

SEQ ID NO: 687773 - DNA, 19 bp, Mus musculus
  siRNA target sequence for Fcmd (NM_139309.2,273-291).
cagtggcgtgcagttaaga

SEQ ID NO: 687774 - DNA, 19 bp, Mus musculus
  siRNA target sequence for Fcmd (NM_139309.2,275-293).
gtggcgtgcagttaagaaa

SEQ ID NO: 687775 - DNA, 19 bp, Mus musculus
  siRNA target sequence for Fcmd (NM_139309.2,279-297).
cgtgcagttaagaaattta

SEQ ID NO: 687776 - DNA, 19 bp, Mus musculus
  siRNA target sequence for Fcmd (NM_139309.2,302-320).
gctgacatccagccaaaat

SEQ ID NO: 687777 - DNA, 19 bp, Mus musculus
  siRNA target sequence for Fcmd (NM_139309.2,346-364).
ggattctggaatcaattaa

SEQ ID NO: 687778 - DNA, 19 bp, Mus musculus
  siRNA target sequence for Fcmd (NM_139309.2,347-365).
gattctggaatcaattaat

SEQ ID NO: 687779 - DNA, 19 bp, Mus musculus
  siRNA target sequence for Fcmd (NM_139309.2,371-389).
cttcgaacaagtgaaaaat

SEQ ID NO: 687780 - DNA, 19 bp, Mus musculus
  siRNA target sequence for Fcmd (NM_139309.2,448-466).
cgttcgcactgcagtatca

SEQ ID NO: 687781 - DNA, 19 bp, Mus musculus
  siRNA target sequence for Fcmd (NM_139309.2,491-509).
gtttcggatagctgagaat

SEQ ID NO: 687782 - DNA, 19 bp, Mus musculus
  siRNA target sequence for Fcmd (NM_139309.2,513-531).
gggtttcaatgcctaaaga

SEQ ID NO: 687783 - DNA, 19 bp, Mus musculus
  siRNA target sequence for Fcmd (NM_139309.2,515-533).
gtttcaatgcctaaagact

SEQ ID NO: 687784 - DNA, 19 bp, Mus musculus
  siRNA target sequence for Fcmd (NM_139309.2,523-541).
gcctaaagactgaaagcaa

SEQ ID NO: 687785 - DNA, 19 bp, Mus musculus
  siRNA target sequence for Fcmd (NM_139309.2,555-573).
gatggaatagactcacttt

SEQ ID NO: 687786 - DNA, 19 bp, Mus musculus
  siRNA target sequence for Fcmd (NM_139309.2,589-607).
ctctgcactacgtctgtaa

SEQ ID NO: 687787 - DNA, 19 bp, Mus musculus
  siRNA target sequence for Fcmd (NM_139309.2,622-640).
ccatccacttggtagtctt

SEQ ID NO: 687788 - DNA, 19 bp, Mus musculus
  siRNA target sequence for Fcmd (NM_139309.2,714-732).
ccttttcgaaagttacagt

SEQ ID NO: 687789 - DNA, 19 bp, Mus musculus
  siRNA target sequence for Fcmd (NM_139309.2,715-733).
cttttcgaaagttacagtt

SEQ ID NO: 687790 - DNA, 19 bp, Mus musculus
  siRNA target sequence for Fcmd (NM_139309.2,725-743).
gttacagtttggtcgttat

SEQ ID NO: 687791 - DNA, 19 bp, Mus musculus
  siRNA target sequence for Fcmd (NM_139309.2,752-770).
ctttgacaggccagagtta

SEQ ID NO: 687792 - DNA, 19 bp, Mus musculus
  siRNA target sequence for Fcmd (NM_139309.2,820-838).
ggcgctttctagaagaagt

SEQ ID NO: 687793 - DNA, 19 bp, Mus musculus
  siRNA target sequence for Fcmd (NM_139309.2,821-839).
gcgctttctagaagaagta

SEQ ID NO: 687794 - DNA, 19 bp, Mus musculus
  siRNA target sequence for Fcmd (NM_139309.2,837-855).
gtacctcactccagattta

SEQ ID NO: 687795 - DNA, 19 bp, Mus musculus
  siRNA target sequence for Fcmd (NM_139309.2,841-859).
ctcactccagatttatcga

SEQ ID NO: 687796 - DNA, 19 bp, Mus musculus
  siRNA target sequence for Fcmd (NM_139309.2,857-875).
cgagtgcaggtataaggaa

SEQ ID NO: 687797 - DNA, 19 bp, Mus musculus
  siRNA target sequence for Fcmd (NM_139309.2,918-936).
gatgctatggtctttcgaa

SEQ ID NO: 687798 - DNA, 19 bp, Mus musculus
  siRNA target sequence for Fcmd (NM_139309.2,1004-1022).
gagcagtgggacttgtcta

SEQ ID NO: 687799 - DNA, 19 bp, Mus musculus
  siRNA target sequence for Fcmd (NM_139309.2,1013-1031).
gacttgtctaggatggtat

SEQ ID NO: 687800 - DNA, 19 bp, Mus musculus
  siRNA target sequence for Fcmd (NM_139309.2,1034-1052).
gcagtgcggtattattcct

SEQ ID NO: 687801 - DNA, 19 bp, Mus musculus
  siRNA target sequence for Fcmd (NM_139309.2,1035-1053).
cagtgcggtattattcctt

SEQ ID NO: 687802 - DNA, 19 bp, Mus musculus
  siRNA target sequence for Fcmd (NM_139309.2,1067-1085).
cgacttagggatttttata

SEQ ID NO: 687803 - DNA, 19 bp, Mus musculus
  siRNA target sequence for Fcmd (NM_139309.2,1070-1088).
cttagggatttttatacaa

SEQ ID NO: 687804 - DNA, 19 bp, Mus musculus
  siRNA target sequence for Fcmd (NM_139309.2,1074-1092).
gggatttttatacaagatt

SEQ ID NO: 687805 - DNA, 19 bp, Mus musculus
  siRNA target sequence for Fcmd (NM_139309.2,1181-1199).
cttccaggggaaaaatgat

SEQ ID NO: 687806 - DNA, 19 bp, Mus musculus
  siRNA target sequence for Fcmd (NM_139309.2,1197-1215).
gatgtaaaacttgatattt

SEQ ID NO: 687807 - DNA, 19 bp, Mus musculus
  siRNA target sequence for Fcmd (NM_139309.2,1263-1281).
gccagaacgggaaaaaagt

SEQ ID NO: 687808 - DNA, 19 bp, Mus musculus
  siRNA target sequence for Fcmd (NM_139309.2,1264-1282).
ccagaacgggaaaaaagtt

SEQ ID NO: 687809 - DNA, 19 bp, Mus musculus
  siRNA target sequence for Fcmd (NM_139309.2,1348-1366).
cctgtgaaacggttgacta

SEQ ID NO: 687810 - DNA, 19 bp, Mus musculus
  siRNA target sequence for Fcmd (NM_139309.2,1351-1369).
gtgaaacggttgactacat

SEQ ID NO: 687811 - DNA, 19 bp, Mus musculus
  siRNA target sequence for Fcmd (NM_139309.2,1390-1408).
cctggaagattcctatcaa

SEQ ID NO: 687812 - DNA, 19 bp, Mus musculus
  siRNA target sequence for Glg1 (NM_009149.1,111-129).
gggtccggggaccaacttt

SEQ ID NO: 687813 - DNA, 19 bp, Mus musculus
  siRNA target sequence for Glg1 (NM_009149.1,430-448).
gagcccgagaacgagattt

SEQ ID NO: 687814 - DNA, 19 bp, Mus musculus
  siRNA target sequence for Glg1 (NM_009149.1,433-451).
cccgagaacgagatttctt

SEQ ID NO: 687815 - DNA, 19 bp, Mus musculus
  siRNA target sequence for Glg1 (NM_009149.1,435-453).
cgagaacgagatttcttca

SEQ ID NO: 687816 - DNA, 19 bp, Mus musculus
  siRNA target sequence for Glg1 (NM_009149.1,454-472).
gactgcaatcatttgttgt

SEQ ID NO: 687817 - DNA, 19 bp, Mus musculus
  siRNA target sequence for Glg1 (NM_009149.1,539-557).
caactatttccgagattaa

SEQ ID NO: 687818 - DNA, 19 bp, Mus musculus
  siRNA target sequence for Glg1 (NM_009149.1,580-598).
ggaaaaggttacatggttt

SEQ ID NO: 687819 - DNA, 19 bp, Mus musculus
  siRNA target sequence for Glg1 (NM_009149.1,657-675).
caagatgacggccatcatt

SEQ ID NO: 687820 - DNA, 19 bp, Mus musculus
  siRNA target sequence for Glg1 (NM_009149.1,667-685).
gccatcattttcagtgatt

SEQ ID NO: 687821 - DNA, 19 bp, Mus musculus
  siRNA target sequence for Glg1 (NM_009149.1,705-723).
catggatgactgcaaaaat

SEQ ID NO: 687822 - DNA, 19 bp, Mus musculus
  siRNA target sequence for Glg1 (NM_009149.1,781-799).
caaggtgaggtggtatcat

SEQ ID NO: 687823 - DNA, 19 bp, Mus musculus
  siRNA target sequence for Glg1 (NM_009149.1,784-802).
ggtgaggtggtatcatgtt

SEQ ID NO: 687824 - DNA, 19 bp, Mus musculus
  siRNA target sequence for Glg1 (NM_009149.1,789-807).
ggtggtatcatgtttggaa

SEQ ID NO: 687825 - DNA, 19 bp, Mus musculus
  siRNA target sequence for Glg1 (NM_009149.1,792-810).
ggtatcatgtttggaaaaa

SEQ ID NO: 687826 - DNA, 19 bp, Mus musculus
  siRNA target sequence for Glg1 (NM_009149.1,897-915).
gtcctcggatgactttcat

SEQ ID NO: 687827 - DNA, 19 bp, Mus musculus
  siRNA target sequence for Glg1 (NM_009149.1,899-917).
cctcggatgactttcattt

SEQ ID NO: 687828 - DNA, 19 bp, Mus musculus
  siRNA target sequence for Glg1 (NM_009149.1,900-918).
ctcggatgactttcattta

SEQ ID NO: 687829 - DNA, 19 bp, Mus musculus
  siRNA target sequence for Glg1 (NM_009149.1,902-920).
cggatgactttcatttaga

SEQ ID NO: 687830 - DNA, 19 bp, Mus musculus
  siRNA target sequence for Glg1 (NM_009149.1,913-931).
catttagaccggcatttgt

SEQ ID NO: 687831 - DNA, 19 bp, Mus musculus
  siRNA target sequence for Glg1 (NM_009149.1,921-939).
ccggcatttgtattttgct

SEQ ID NO: 687832 - DNA, 19 bp, Mus musculus
  siRNA target sequence for Glg1 (NM_009149.1,955-973).
gagcgcttttgcgagaata

SEQ ID NO: 687833 - DNA, 19 bp, Mus musculus
  siRNA target sequence for Glg1 (NM_009149.1,957-975).
gcgcttttgcgagaataca

SEQ ID NO: 687834 - DNA, 19 bp, Mus musculus
  siRNA target sequence for Glg1 (NM_009149.1,959-977).
gcttttgcgagaatacaca

SEQ ID NO: 687835 - DNA, 19 bp, Mus musculus
  siRNA target sequence for Glg1 (NM_009149.1,960-978).
cttttgcgagaatacacaa

SEQ ID NO: 687836 - DNA, 19 bp, Mus musculus
  siRNA target sequence for Glg1 (NM_009149.1,983-1001).
gtgaaggaagagtgtataa

SEQ ID NO: 687837 - DNA, 19 bp, Mus musculus
  siRNA target sequence for Glg1 (NM_009149.1,985-1003).
gaaggaagagtgtataaat

SEQ ID NO: 687838 - DNA, 19 bp, Mus musculus
  siRNA target sequence for Glg1 (NM_009149.1,1004-1022).
gcctatttaaccataagtt

SEQ ID NO: 687839 - DNA, 19 bp, Mus musculus
  siRNA target sequence for Glg1 (NM_009149.1,1044-1062).
gtgtagagaagcactaact

SEQ ID NO: 687840 - DNA, 19 bp, Mus musculus
  siRNA target sequence for Glg1 (NM_009149.1,1081-1099).
gcccaggattataaagtca

SEQ ID NO: 687841 - DNA, 19 bp, Mus musculus
  siRNA target sequence for Glg1 (NM_009149.1,1087-1105).
gattataaagtcagttact

SEQ ID NO: 687842 - DNA, 19 bp, Mus musculus
  siRNA target sequence for Glg1 (NM_009149.1,1118-1136).
cctgtaagagtgacttgaa

SEQ ID NO: 687843 - DNA, 19 bp, Mus musculus
  siRNA target sequence for Glg1 (NM_009149.1,1119-1137).
ctgtaagagtgacttgaaa

SEQ ID NO: 687844 - DNA, 19 bp, Mus musculus
  siRNA target sequence for Glg1 (NM_009149.1,1121-1139).
gtaagagtgacttgaaaaa

SEQ ID NO: 687845 - DNA, 19 bp, Mus musculus
  siRNA target sequence for Glg1 (NM_009149.1,1323-1341).
ctgtcgaggggagattgaa

SEQ ID NO: 687846 - DNA, 19 bp, Mus musculus
  siRNA target sequence for Glg1 (NM_009149.1,1325-1343).
gtcgaggggagattgaaca

SEQ ID NO: 687847 - DNA, 19 bp, Mus musculus
  siRNA target sequence for Glg1 (NM_009149.1,1376-1394).
ccctccactgtctgatgaa

SEQ ID NO: 687848 - DNA, 19 bp, Mus musculus
  siRNA target sequence for Glg1 (NM_009149.1,1440-1458).
ggcgcttcagacactgatt

SEQ ID NO: 687849 - DNA, 19 bp, Mus musculus
  siRNA target sequence for Glg1 (NM_009149.1,1442-1460).
cgcttcagacactgattca

SEQ ID NO: 687850 - DNA, 19 bp, Mus musculus
  siRNA target sequence for Glg1 (NM_009149.1,1487-1505).
gcattgatcgagctttgaa

SEQ ID NO: 687851 - DNA, 19 bp, Mus musculus
  siRNA target sequence for Glg1 (NM_009149.1,1488-1506).
cattgatcgagctttgaat

SEQ ID NO: 687852 - DNA, 19 bp, Mus musculus
  siRNA target sequence for Glg1 (NM_009149.1,1528-1546).
cagacagcctgcaaacaca

SEQ ID NO: 687853 - DNA, 19 bp, Mus musculus
  siRNA target sequence for Glg1 (NM_009149.1,1534-1552).
gcctgcaaacacatacgat

SEQ ID NO: 687854 - DNA, 19 bp, Mus musculus
  siRNA target sequence for Glg1 (NM_009149.1,1553-1571).
ccggagacccaatgattct

SEQ ID NO: 687855 - DNA, 19 bp, Mus musculus
  siRNA target sequence for Glg1 (NM_009149.1,1555-1573).
ggagacccaatgattctct

SEQ ID NO: 687856 - DNA, 19 bp, Mus musculus
  siRNA target sequence for Glg1 (NM_009149.1,1619-1637).
gtgaacaccggctcttaga

SEQ ID NO: 687857 - DNA, 19 bp, Mus musculus
  siRNA target sequence for Glg1 (NM_009149.1,1629-1647).
gctcttagagctacagtat

SEQ ID NO: 687858 - DNA, 19 bp, Mus musculus
  siRNA target sequence for Glg1 (NM_009149.1,1630-1648).
ctcttagagctacagtatt

SEQ ID NO: 687859 - DNA, 19 bp, Mus musculus
  siRNA target sequence for Glg1 (NM_009149.1,1636-1654).
gagctacagtattttatct

SEQ ID NO: 687860 - DNA, 19 bp, Mus musculus
  siRNA target sequence for Glg1 (NM_009149.1,1665-1683).
gaagttggaccctgtttta

SEQ ID NO: 687861 - DNA, 19 bp, Mus musculus
  siRNA target sequence for Glg1 (NM_009149.1,1675-1693).
cctgttttataccgaaaat

SEQ ID NO: 687862 - DNA, 19 bp, Mus musculus
  siRNA target sequence for Glg1 (NM_009149.1,1719-1737).
ccatacccatggttggaat

SEQ ID NO: 687863 - DNA, 19 bp, Mus musculus
  siRNA target sequence for Glg1 (NM_009149.1,1768-1786).
gtgttttcttgcctataca

SEQ ID NO: 687864 - DNA, 19 bp, Mus musculus
  siRNA target sequence for Glg1 (NM_009149.1,1770-1788).
gttttcttgcctatacaga

SEQ ID NO: 687865 - DNA, 19 bp, Mus musculus
  siRNA target sequence for Glg1 (NM_009149.1,1818-1836).
gaggctctcacgagaatgt

SEQ ID NO: 687866 - DNA, 19 bp, Mus musculus
  siRNA target sequence for Glg1 (NM_009149.1,1864-1882).
cagcgagccatggatgtta

SEQ ID NO: 687867 - DNA, 19 bp, Mus musculus
  siRNA target sequence for Glg1 (NM_009149.1,1977-1995).
ggaccatctcgatgactta

SEQ ID NO: 687868 - DNA, 19 bp, Mus musculus
  siRNA target sequence for Glg1 (NM_009149.1,2034-2052).
gttagagtccgaggatata

SEQ ID NO: 687869 - DNA, 19 bp, Mus musculus
  siRNA target sequence for Glg1 (NM_009149.1,2040-2058).
gtccgaggatatacaaata

SEQ ID NO: 687870 - DNA, 19 bp, Mus musculus
  siRNA target sequence for Glg1 (NM_009149.1,2042-2060).
ccgaggatatacaaataga

SEQ ID NO: 687871 - DNA, 19 bp, Mus musculus
  siRNA target sequence for Glg1 (NM_009149.1,2043-2061).
cgaggatatacaaatagaa

SEQ ID NO: 687872 - DNA, 19 bp, Mus musculus
  siRNA target sequence for Glg1 (NM_009149.1,2075-2093).
gagcctgtgagcctatcat

SEQ ID NO: 687873 - DNA, 19 bp, Mus musculus
  siRNA target sequence for Glg1 (NM_009149.1,2081-2099).
gtgagcctatcattcagaa

SEQ ID NO: 687874 - DNA, 19 bp, Mus musculus
  siRNA target sequence for Glg1 (NM_009149.1,2232-2250).
gaaggattttcgattctct

SEQ ID NO: 687875 - DNA, 19 bp, Mus musculus
  siRNA target sequence for Glg1 (NM_009149.1,2236-2254).
gattttcgattctcttaca

SEQ ID NO: 687876 - DNA, 19 bp, Mus musculus
  siRNA target sequence for Glg1 (NM_009149.1,2242-2260).
cgattctcttacaagttca

SEQ ID NO: 687877 - DNA, 19 bp, Mus musculus
  siRNA target sequence for Glg1 (NM_009149.1,2243-2261).
gattctcttacaagttcaa

SEQ ID NO: 687878 - DNA, 19 bp, Mus musculus
  siRNA target sequence for Glg1 (NM_009149.1,2370-2388).
caaggagcaccgagtatca

SEQ ID NO: 687879 - DNA, 19 bp, Mus musculus
  siRNA target sequence for Glg1 (NM_009149.1,2444-2462).
gtttggaaccagatctgta

SEQ ID NO: 687880 - DNA, 19 bp, Mus musculus
  siRNA target sequence for Glg1 (NM_009149.1,2448-2466).
ggaaccagatctgtatgaa

SEQ ID NO: 687881 - DNA, 19 bp, Mus musculus
  siRNA target sequence for Glg1 (NM_009149.1,2468-2486).
cctgcaagagtgacatcaa

SEQ ID NO: 687882 - DNA, 19 bp, Mus musculus
  siRNA target sequence for Glg1 (NM_009149.1,2479-2497).
gacatcaagaactactgtt

SEQ ID NO: 687883 - DNA, 19 bp, Mus musculus
  siRNA target sequence for Glg1 (NM_009149.1,2484-2502).
caagaactactgttctaca

SEQ ID NO: 687884 - DNA, 19 bp, Mus musculus
  siRNA target sequence for Glg1 (NM_009149.1,2521-2539).
cagattattgaatgtctaa

SEQ ID NO: 687885 - DNA, 19 bp, Mus musculus
  siRNA target sequence for Glg1 (NM_009149.1,2610-2628).
ggacccagagctagactat

SEQ ID NO: 687886 - DNA, 19 bp, Mus musculus
  siRNA target sequence for Glg1 (NM_009149.1,2611-2629).
gacccagagctagactata

SEQ ID NO: 687887 - DNA, 19 bp, Mus musculus
  siRNA target sequence for Glg1 (NM_009149.1,2613-2631).
cccagagctagactatact

SEQ ID NO: 687888 - DNA, 19 bp, Mus musculus
  siRNA target sequence for Glg1 (NM_009149.1,2615-2633).
cagagctagactatactct

SEQ ID NO: 687889 - DNA, 19 bp, Mus musculus
  siRNA target sequence for Glg1 (NM_009149.1,2671-2689).
ccagaagcagattctaaaa

SEQ ID NO: 687890 - DNA, 19 bp, Mus musculus
  siRNA target sequence for Glg1 (NM_009149.1,2739-2757).
caaatgcaaacagatgata

SEQ ID NO: 687891 - DNA, 19 bp, Mus musculus
  siRNA target sequence for Glg1 (NM_009149.1,2805-2823).
gctaaggaaggcctgtaaa

SEQ ID NO: 687892 - DNA, 19 bp, Mus musculus
  siRNA target sequence for Glg1 (NM_009149.1,2878-2896).
gagctagaaggccaagtta

SEQ ID NO: 687893 - DNA, 19 bp, Mus musculus
  siRNA target sequence for Glg1 (NM_009149.1,2904-2922).
cctcaagctgagatatgct

SEQ ID NO: 687894 - DNA, 19 bp, Mus musculus
  siRNA target sequence for Glg1 (NM_009149.1,3131-3149).
gtaaaaaggaagtgttaaa

SEQ ID NO: 687895 - DNA, 19 bp, Mus musculus
  siRNA target sequence for Glg1 (NM_009149.1,3139-3157).
gaagtgttaaacatgttga

SEQ ID NO: 687896 - DNA, 19 bp, Mus musculus
  siRNA target sequence for Glg1 (NM_009149.1,3317-3335).
gcaaaaagcgcctcaatga

SEQ ID NO: 687897 - DNA, 19 bp, Mus musculus
  siRNA target sequence for Glg1 (NM_009149.1,3452-3470).
ggagcatctgcatactctt

SEQ ID NO: 687898 - DNA, 19 bp, Mus musculus
  siRNA target sequence for Golph3 (NM_025673.2,456-474).
cgagagggttacacatcat

SEQ ID NO: 687899 - DNA, 19 bp, Mus musculus
  siRNA target sequence for Golph3 (NM_025673.2,462-480).
ggttacacatcattttgga

SEQ ID NO: 687900 - DNA, 19 bp, Mus musculus
  siRNA target sequence for Golph3 (NM_025673.2,499-517).
gattacgtggctgtatgtt

SEQ ID NO: 687901 - DNA, 19 bp, Mus musculus
  siRNA target sequence for Golph3 (NM_025673.2,586-604).
ccagaaaggtgatctgtaa

SEQ ID NO: 687902 - DNA, 19 bp, Mus musculus
  siRNA target sequence for Golph3 (NM_025673.2,616-634).
caacaggggatgttcttct

SEQ ID NO: 687903 - DNA, 19 bp, Mus musculus
  siRNA target sequence for Golph3 (NM_025673.2,681-699).
gtccagaactggattgagt

SEQ ID NO: 687904 - DNA, 19 bp, Mus musculus
  siRNA target sequence for Golph3 (NM_025673.2,689-707).
ctggattgagttacttagt

SEQ ID NO: 687905 - DNA, 19 bp, Mus musculus
  siRNA target sequence for Golph3 (NM_025673.2,748-766).
gaaacgtacgggaacgatt

SEQ ID NO: 687906 - DNA, 19 bp, Mus musculus
  siRNA target sequence for Golph3 (NM_025673.2,752-770).
cgtacgggaacgattagct

SEQ ID NO: 687907 - DNA, 19 bp, Mus musculus
  siRNA target sequence for Golph3 (NM_025673.2,753-771).
gtacgggaacgattagcta

SEQ ID NO: 687908 - DNA, 19 bp, Mus musculus
  siRNA target sequence for Golph3 (NM_025673.2,756-774).
cgggaacgattagctaaaa

SEQ ID NO: 687909 - DNA, 19 bp, Mus musculus
  siRNA target sequence for Golph3 (NM_025673.2,757-775).
gggaacgattagctaaaaa

SEQ ID NO: 687910 - DNA, 19 bp, Mus musculus
  siRNA target sequence for Golph3 (NM_025673.2,768-786).
gctaaaaacctggtagaaa

SEQ ID NO: 687911 - DNA, 19 bp, Mus musculus
  siRNA target sequence for Golph3 (NM_025673.2,840-858).
catcctctcaccaataaca

SEQ ID NO: 687912 - DNA, 19 bp, Mus musculus
  siRNA target sequence for Golph3 (NM_025673.2,843-861).
cctctcaccaataacaaca

SEQ ID NO: 687913 - DNA, 19 bp, Mus musculus
  siRNA target sequence for Golph3 (NM_025673.2,939-957).
cgcttgctggccctcattt

SEQ ID NO: 687914 - DNA, 19 bp, Mus musculus
  siRNA target sequence for Golph3 (NM_025673.2,940-958).
gcttgctggccctcattta

SEQ ID NO: 687915 - DNA, 19 bp, Mus musculus
  siRNA target sequence for Golph3 (NM_025673.2,944-962).
gctggccctcatttaccta

SEQ ID NO: 687916 - DNA, 19 bp, Mus musculus
  siRNA target sequence for Golph3 (NM_025673.2,963-981).
gcccatgcctcggatgttt

SEQ ID NO: 687917 - DNA, 19 bp, Mus musculus
  siRNA target sequence for Golph3 (NM_025673.2,1007-1025).
ggacgagcagtatgatcta

SEQ ID NO: 687918 - DNA, 19 bp, Mus musculus
  siRNA target sequence for Golph3 (NM_025673.2,1110-1128).
gtggtagctgcgtttacca

SEQ ID NO: 687919 - DNA, 19 bp, Mus musculus
  siRNA target sequence for Nsg1 (NM_010942.2,151-169).
gcttcgacaccattccttt

SEQ ID NO: 687920 - DNA, 19 bp, Mus musculus
  siRNA target sequence for Nsg1 (NM_010942.2,156-174).
gacaccattcctttgatga

SEQ ID NO: 687921 - DNA, 19 bp, Mus musculus
  siRNA target sequence for Nsg1 (NM_010942.2,219-237).
gtcgtggtgaaaactaaga

SEQ ID NO: 687922 - DNA, 19 bp, Mus musculus
  siRNA target sequence for Nsg1 (NM_010942.2,221-239).
cgtggtgaaaactaagact

SEQ ID NO: 687923 - DNA, 19 bp, Mus musculus
  siRNA target sequence for Nsg1 (NM_010942.2,315-333).
ggtgtcaccgagaggttta

SEQ ID NO: 687924 - DNA, 19 bp, Mus musculus
  siRNA target sequence for Nsg1 (NM_010942.2,316-334).
gtgtcaccgagaggtttaa

SEQ ID NO: 687925 - DNA, 19 bp, Mus musculus
  siRNA target sequence for Nsg1 (NM_010942.2,395-413).
ctacaaagtgtacaagtat

SEQ ID NO: 687926 - DNA, 19 bp, Mus musculus
  siRNA target sequence for Nsg1 (NM_010942.2,468-486).
ggcttggagagctactaca

SEQ ID NO: 687927 - DNA, 19 bp, Mus musculus
  siRNA target sequence for Nsg2 (NM_008741.1,243-261).
cacgcccttggaggttaat

SEQ ID NO: 687928 - DNA, 19 bp, Mus musculus
  siRNA target sequence for Nsg2 (NM_008741.1,245-263).
cgcccttggaggttaatca

SEQ ID NO: 687929 - DNA, 19 bp, Mus musculus
  siRNA target sequence for Nsg2 (NM_008741.1,246-264).
gcccttggaggttaatcat

SEQ ID NO: 687930 - DNA, 19 bp, Mus musculus
  siRNA target sequence for Nsg2 (NM_008741.1,247-265).
cccttggaggttaatcatt

SEQ ID NO: 687931 - DNA, 19 bp, Mus musculus
  siRNA target sequence for Nsg2 (NM_008741.1,291-309).
gatcgtgaagacaagaaca

SEQ ID NO: 687932 - DNA, 19 bp, Mus musculus
  siRNA target sequence for Nsg2 (NM_008741.1,351-369).
gccaaagatcgctgaattt

SEQ ID NO: 687933 - DNA, 19 bp, Mus musculus
  siRNA target sequence for Nsg2 (NM_008741.1,352-370).
ccaaagatcgctgaattta

SEQ ID NO: 687934 - DNA, 19 bp, Mus musculus
  siRNA target sequence for Nsg2 (NM_008741.1,503-521).
cctcgctggatgcttacta

SEQ ID NO: 687935 - DNA, 19 bp, Mus musculus
  siRNA target sequence for Tgoln1 (NM_009443.2,328-346).
gctctgccgtccgtttata

SEQ ID NO: 687936 - DNA, 19 bp, Mus musculus
  siRNA target sequence for Tgoln1 (NM_009443.2,329-347).
ctctgccgtccgtttataa

SEQ ID NO: 687937 - DNA, 19 bp, Mus musculus
  siRNA target sequence for Tgoln1 (NM_009443.2,331-349).
ctgccgtccgtttataaga

SEQ ID NO: 687938 - DNA, 19 bp, Mus musculus
  siRNA target sequence for Tgoln1 (NM_009443.2,333-351).
gccgtccgtttataagaga

SEQ ID NO: 687939 - DNA, 19 bp, Mus musculus
  siRNA target sequence for Tgoln1 (NM_009443.2,460-478).
caggggcagaagtcagata

SEQ ID NO: 687940 - DNA, 19 bp, Mus musculus
  siRNA target sequence for Tgoln1 (NM_009443.2,462-480).
ggggcagaagtcagataaa

SEQ ID NO: 687941 - DNA, 19 bp, Mus musculus
  siRNA target sequence for Tgoln1 (NM_009443.2,463-481).
gggcagaagtcagataaaa

SEQ ID NO: 687942 - DNA, 19 bp, Mus musculus
  siRNA target sequence for Tgoln1 (NM_009443.2,595-613).
gatgccgagttgaacgaaa

SEQ ID NO: 687943 - DNA, 19 bp, Mus musculus
  siRNA target sequence for Tgoln1 (NM_009443.2,740-758).
cagaagctggttcgaataa

SEQ ID NO: 687944 - DNA, 19 bp, Mus musculus
  siRNA target sequence for Tgoln1 (NM_009443.2,779-797).
gcaagtccacgaaagttga

SEQ ID NO: 687945 - DNA, 19 bp, Mus musculus
  siRNA target sequence for Tgoln1 (NM_009443.2,780-798).
caagtccacgaaagttgat

SEQ ID NO: 687946 - DNA, 19 bp, Mus musculus
  siRNA target sequence for Tgoln1 (NM_009443.2,837-855).
gacttcgaagactgacaaa

SEQ ID NO: 687947 - DNA, 19 bp, Mus musculus
  siRNA target sequence for Tgoln1 (NM_009443.2,883-901).
ccaacacttacttccaaaa

SEQ ID NO: 687948 - DNA, 19 bp, Mus musculus
  siRNA target sequence for Tgoln1 (NM_009443.2,887-905).
cacttacttccaaaactga

SEQ ID NO: 687949 - DNA, 19 bp, Mus musculus
  siRNA target sequence for Tgoln1 (NM_009443.2,889-907).
cttacttccaaaactgaat

SEQ ID NO: 687950 - DNA, 19 bp, Mus musculus
  siRNA target sequence for Tgoln1 (NM_009443.2,949-967).
ccagagaaaggagataagt

SEQ ID NO: 687951 - DNA, 19 bp, Mus musculus
  siRNA target sequence for Tgoln1 (NM_009443.2,966-984).
gtcttcagagcctactgaa

SEQ ID NO: 687952 - DNA, 19 bp, Mus musculus
  siRNA target sequence for Tgoln1 (NM_009443.2,1097-1115).
ggacacttacagactctat

SEQ ID NO: 687953 - DNA, 19 bp, Mus musculus
  siRNA target sequence for Tgoln1 (NM_009443.2,1100-1118).
cacttacagactctatgaa

SEQ ID NO: 687954 - DNA, 19 bp, Mus musculus
  siRNA target sequence for Tgoln1 (NM_009443.2,1102-1120).
cttacagactctatgaaga

SEQ ID NO: 687955 - DNA, 19 bp, Mus musculus
  siRNA target sequence for Tgoln1 (NM_009443.2,1175-1193).
gccacttctttgcatatct

SEQ ID NO: 687956 - DNA, 19 bp, Mus musculus
  siRNA target sequence for Tgoln1 (NM_009443.2,1236-1254).
ccacaacaaacgaaagatt

SEQ ID NO: 687957 - DNA, 19 bp, Mus musculus
  siRNA target sequence for Tgoln1 (NM_009443.2,1237-1255).
cacaacaaacgaaagatta

SEQ ID NO: 687958 - DNA, 19 bp, Mus musculus
  siRNA target sequence for Tgoln1 (NM_009443.2,1242-1260).
caaacgaaagattattgct

SEQ ID NO: 687959 - DNA, 19 bp, Mus musculus
  siRNA target sequence for Tgoln1 (NM_009443.2,1273-1291).
gggaaaagatccaaagtca

SEQ ID NO: 687960 - DNA, 19 bp, Mus musculus
  siRNA target sequence for Tgoln1 (NM_009443.2,1307-1325).
ccagtgactaccaacgttt

SEQ ID NO: 687961 - DNA, 19 bp, Mus musculus
  siRNA target sequence for Tgoln1 (NM_009443.2,1310-1328).
gtgactaccaacgtttgaa

SEQ ID NO: 687962 - DNA, 19 bp, Mus musculus
  siRNA target sequence for Psmd10 (NM_016883.3,35-53).
ggggtgtgtgtctaacata

SEQ ID NO: 687963 - DNA, 19 bp, Mus musculus
  siRNA target sequence for Psmd10 (NM_016883.3,36-54).
gggtgtgtgtctaacataa

SEQ ID NO: 687964 - DNA, 19 bp, Mus musculus
  siRNA target sequence for Psmd10 (NM_016883.3,46-64).
ctaacataatgatctgtaa

SEQ ID NO: 687965 - DNA, 19 bp, Mus musculus
  siRNA target sequence for Psmd10 (NM_016883.3,101-119).
gcgcattttggctgataaa

SEQ ID NO: 687966 - DNA, 19 bp, Mus musculus
  siRNA target sequence for Psmd10 (NM_016883.3,102-120).
cgcattttggctgataaat

SEQ ID NO: 687967 - DNA, 19 bp, Mus musculus
  siRNA target sequence for Psmd10 (NM_016883.3,172-190).
gctcagctggccatacaga

SEQ ID NO: 687968 - DNA, 19 bp, Mus musculus
  siRNA target sequence for Psmd10 (NM_016883.3,181-199).
gccatacagaaattgttga

SEQ ID NO: 687969 - DNA, 19 bp, Mus musculus
  siRNA target sequence for Psmd10 (NM_016883.3,216-234).
ggagtgccagtgaatgata

SEQ ID NO: 687970 - DNA, 19 bp, Mus musculus
  siRNA target sequence for Psmd10 (NM_016883.3,217-235).
gagtgccagtgaatgataa

SEQ ID NO: 687971 - DNA, 19 bp, Mus musculus
  siRNA target sequence for Psmd10 (NM_016883.3,311-329).
gaaaggtgcacatgtgaat

SEQ ID NO: 687972 - DNA, 19 bp, Mus musculus
  siRNA target sequence for Psmd10 (NM_016883.3,373-391).
cgaagaataggcatgagat

SEQ ID NO: 687973 - DNA, 19 bp, Mus musculus
  siRNA target sequence for Psmd10 (NM_016883.3,382-400).
ggcatgagattgctgttat

SEQ ID NO: 687974 - DNA, 19 bp, Mus musculus
  siRNA target sequence for Psmd10 (NM_016883.3,389-407).
gattgctgttatgttacta

SEQ ID NO: 687975 - DNA, 19 bp, Mus musculus
  siRNA target sequence for Psmd10 (NM_016883.3,424-442).
cagatgcgaaggaccatta

SEQ ID NO: 687976 - DNA, 19 bp, Mus musculus
  siRNA target sequence for Psmd10 (NM_016883.3,466-484).
cagcagccaagggtaactt

SEQ ID NO: 687977 - DNA, 19 bp, Mus musculus
  siRNA target sequence for Psmd10 (NM_016883.3,471-489).
gccaagggtaacttgaaga

SEQ ID NO: 687978 - DNA, 19 bp, Mus musculus
  siRNA target sequence for Psmd10 (NM_016883.3,472-490).
ccaagggtaacttgaagat

SEQ ID NO: 687979 - DNA, 19 bp, Mus musculus
  siRNA target sequence for Psmd10 (NM_016883.3,544-562).
gtaacactcctctacactt

SEQ ID NO: 687980 - DNA, 19 bp, Mus musculus
  siRNA target sequence for Psmd10 (NM_016883.3,609-627).
caaggagcaagtatttaca

SEQ ID NO: 687981 - DNA, 19 bp, Mus musculus
  siRNA target sequence for Psmd12 (NM_025894.1,78-96).
ccgatgggcgcattgtgaa

SEQ ID NO: 687982 - DNA, 19 bp, Mus musculus
  siRNA target sequence for Psmd12 (NM_025894.1,250-268).
cttggttgcagtagtgaaa

SEQ ID NO: 687983 - DNA, 19 bp, Mus musculus
  siRNA target sequence for Psmd12 (NM_025894.1,254-272).
gttgcagtagtgaaaatgt

SEQ ID NO: 687984 - DNA, 19 bp, Mus musculus
  siRNA target sequence for Psmd12 (NM_025894.1,282-300).
ctaaagaatgggacttact

SEQ ID NO: 687985 - DNA, 19 bp, Mus musculus
  siRNA target sequence for Psmd12 (NM_025894.1,292-310).
ggacttacttaatgaaaat

SEQ ID NO: 687986 - DNA, 19 bp, Mus musculus
  siRNA target sequence for Psmd12 (NM_025894.1,412-430).
caagctgcgattgattgat

SEQ ID NO: 687987 - DNA, 19 bp, Mus musculus
  siRNA target sequence for Psmd12 (NM_025894.1,415-433).
gctgcgattgattgatact

SEQ ID NO: 687988 - DNA, 19 bp, Mus musculus
  siRNA target sequence for Psmd12 (NM_025894.1,428-446).
gatactctgcggatggtta

SEQ ID NO: 687989 - DNA, 19 bp, Mus musculus
  siRNA target sequence for Psmd12 (NM_025894.1,442-460).
ggttacagaaggaaagatt

SEQ ID NO: 687990 - DNA, 19 bp, Mus musculus
  siRNA target sequence for Psmd12 (NM_025894.1,475-493).
gcgtgctcggctgactaaa

SEQ ID NO: 687991 - DNA, 19 bp, Mus musculus
  siRNA target sequence for Psmd12 (NM_025894.1,476-494).
cgtgctcggctgactaaaa

SEQ ID NO: 687992 - DNA, 19 bp, Mus musculus
  siRNA target sequence for Psmd12 (NM_025894.1,479-497).
gctcggctgactaaaacct

SEQ ID NO: 687993 - DNA, 19 bp, Mus musculus
  siRNA target sequence for Psmd12 (NM_025894.1,480-498).
ctcggctgactaaaacctt

SEQ ID NO: 687994 - DNA, 19 bp, Mus musculus
  siRNA target sequence for Psmd12 (NM_025894.1,501-519).
caactattaaagagcaaaa

SEQ ID NO: 687995 - DNA, 19 bp, Mus musculus
  siRNA target sequence for Psmd12 (NM_025894.1,556-574).
gttacaggtggaaacctat

SEQ ID NO: 687996 - DNA, 19 bp, Mus musculus
  siRNA target sequence for Psmd12 (NM_025894.1,630-648).
gcctagctgtgaaggatta

SEQ ID NO: 687997 - DNA, 19 bp, Mus musculus
  siRNA target sequence for Psmd12 (NM_025894.1,653-671).
cgcacacagatcattagca

SEQ ID NO: 687998 - DNA, 19 bp, Mus musculus
  siRNA target sequence for Psmd12 (NM_025894.1,710-728).
gagaacttgaagttgaagt

SEQ ID NO: 687999 - DNA, 19 bp, Mus musculus
  siRNA target sequence for Psmd12 (NM_025894.1,715-733).
cttgaagttgaagtactat

SEQ ID NO: 688000 - DNA, 19 bp, Mus musculus
  siRNA target sequence for Psmd12 (NM_025894.1,721-739).
gttgaagtactataactta

SEQ ID NO: 688001 - DNA, 19 bp, Mus musculus
  siRNA target sequence for Psmd12 (NM_025894.1,727-745).
gtactataacttaatgatt

SEQ ID NO: 688002 - DNA, 19 bp, Mus musculus
  siRNA target sequence for Psmd12 (NM_025894.1,816-834).
gcattcaggcagaaagtga

SEQ ID NO: 688003 - DNA, 19 bp, Mus musculus
  siRNA target sequence for Psmd12 (NM_025894.1,918-936).
ggataagcagtgacaagaa

SEQ ID NO: 688004 - DNA, 19 bp, Mus musculus
  siRNA target sequence for Psmd12 (NM_025894.1,1130-1148).
gagcacaacatcagaatta

SEQ ID NO: 688005 - DNA, 19 bp, Mus musculus
  siRNA target sequence for Psmd12 (NM_025894.1,1143-1161).
gaattatggccaagtacta

SEQ ID NO: 688006 - DNA, 19 bp, Mus musculus
  siRNA target sequence for Psmd12 (NM_025894.1,1156-1174).
gtactacactcggataaca

SEQ ID NO: 688007 - DNA, 19 bp, Mus musculus
  siRNA target sequence for Psmd12 (NM_025894.1,1162-1180).
cactcggataacaatgaaa

SEQ ID NO: 688008 - DNA, 19 bp, Mus musculus
  siRNA target sequence for Psmd12 (NM_025894.1,1166-1184).
cggataacaatgaaaagga

SEQ ID NO: 688009 - DNA, 19 bp, Mus musculus
  siRNA target sequence for Psmd12 (NM_025894.1,1177-1195).
gaaaaggatggcacaactt

SEQ ID NO: 688010 - DNA, 19 bp, Mus musculus
  siRNA target sequence for Psmd12 (NM_025894.1,1224-1242).
ctttcctctcgaatctagt

SEQ ID NO: 688011 - DNA, 19 bp, Mus musculus
  siRNA target sequence for Psmd12 (NM_025894.1,1233-1251).
cgaatctagtcgttaacaa

SEQ ID NO: 688012 - DNA, 19 bp, Mus musculus
  siRNA target sequence for Psmd12 (NM_025894.1,1243-1261).
cgttaacaagaccatcttt

SEQ ID NO: 688013 - DNA, 19 bp, Mus musculus
  siRNA target sequence for Psmd12 (NM_025894.1,1275-1293).
ggttggctggagtcatcaa

SEQ ID NO: 688014 - DNA, 19 bp, Mus musculus
  siRNA target sequence for Psmd12 (NM_025894.1,1309-1327).
ggatccaaataatttatta

SEQ ID NO: 688015 - DNA, 19 bp, Mus musculus
  siRNA target sequence for Psmd12 (NM_025894.1,1353-1371).
cgctgatgtctctggttaa

SEQ ID NO: 688016 - DNA, 19 bp, Mus musculus
  siRNA target sequence for Psmd12 (NM_025894.1,1399-1417).
ggagatgatacataatcta

SEQ ID NO: 688017 - DNA, 19 bp, Mus musculus
  siRNA target sequence for Psmd14 (NM_021526.1,343-361).
ccttgctaaagatgttaaa

SEQ ID NO: 688018 - DNA, 19 bp, Mus musculus
  siRNA target sequence for Psmd14 (NM_021526.1,344-362).
cttgctaaagatgttaaaa

SEQ ID NO: 688019 - DNA, 19 bp, Mus musculus
  siRNA target sequence for Psmd14 (NM_021526.1,347-365).
gctaaagatgttaaaacat

SEQ ID NO: 688020 - DNA, 19 bp, Mus musculus
  siRNA target sequence for Psmd14 (NM_021526.1,430-448).
ccgtcagagtgattgatgt

SEQ ID NO: 688021 - DNA, 19 bp, Mus musculus
  siRNA target sequence for Psmd14 (NM_021526.1,499-517).
cagtgttccaagccaaaat

SEQ ID NO: 688022 - DNA, 19 bp, Mus musculus
  siRNA target sequence for Psmd14 (NM_021526.1,501-519).
gtgttccaagccaaaatgt

SEQ ID NO: 688023 - DNA, 19 bp, Mus musculus
  siRNA target sequence for Psmd14 (NM_021526.1,507-525).
caagccaaaatgttggata

SEQ ID NO: 688024 - DNA, 19 bp, Mus musculus
  siRNA target sequence for Psmd14 (NM_021526.1,511-529).
ccaaaatgttggatatgct

SEQ ID NO: 688025 - DNA, 19 bp, Mus musculus
  siRNA target sequence for Psmd14 (NM_021526.1,617-635).
cactcagcagagctttgaa

SEQ ID NO: 688026 - DNA, 19 bp, Mus musculus
  siRNA target sequence for Psmd14 (NM_021526.1,669-687).
gatcccattcagagtgtaa

SEQ ID NO: 688027 - DNA, 19 bp, Mus musculus
  siRNA target sequence for Psmd14 (NM_021526.1,680-698).
gagtgtaaaaggaaaggtt

SEQ ID NO: 688028 - DNA, 19 bp, Mus musculus
  siRNA target sequence for Psmd14 (NM_021526.1,715-733).
gactgatcaatgctaatat

SEQ ID NO: 688029 - DNA, 19 bp, Mus musculus
  siRNA target sequence for Psmd14 (NM_021526.1,717-735).
ctgatcaatgctaatatga

SEQ ID NO: 688030 - DNA, 19 bp, Mus musculus
  siRNA target sequence for Psmd14 (NM_021526.1,734-752).
gatggtcttaggacatgaa

SEQ ID NO: 688031 - DNA, 19 bp, Mus musculus
  siRNA target sequence for Psmd14 (NM_021526.1,757-775).
gacaaacgacttcaaatct

SEQ ID NO: 688032 - DNA, 19 bp, Mus musculus
  siRNA target sequence for Psmd14 (NM_021526.1,792-810).
ccatctatccaggcattaa

SEQ ID NO: 688033 - DNA, 19 bp, Mus musculus
  siRNA target sequence for Psmd14 (NM_021526.1,793-811).
catctatccaggcattaat

SEQ ID NO: 688034 - DNA, 19 bp, Mus musculus
  siRNA target sequence for Psmd14 (NM_021526.1,796-814).
ctatccaggcattaattca

SEQ ID NO: 688035 - DNA, 19 bp, Mus musculus
  siRNA target sequence for Psmd14 (NM_021526.1,805-823).
cattaattcacggactaaa

SEQ ID NO: 688036 - DNA, 19 bp, Mus musculus
  siRNA target sequence for Psmd14 (NM_021526.1,815-833).
cggactaaacagacattat

SEQ ID NO: 688037 - DNA, 19 bp, Mus musculus
  siRNA target sequence for Psmd14 (NM_021526.1,819-837).
ctaaacagacattattact

SEQ ID NO: 688038 - DNA, 19 bp, Mus musculus
  siRNA target sequence for Psmd14 (NM_021526.1,828-846).
cattattactccatcacta

SEQ ID NO: 688039 - DNA, 19 bp, Mus musculus
  siRNA target sequence for Psmd14 (NM_021526.1,844-862).
ctattaattaccggaaaaa

SEQ ID NO: 688040 - DNA, 19 bp, Mus musculus
  siRNA target sequence for Psmd14 (NM_021526.1,878-896).
gatgctgttaaatttgcat

SEQ ID NO: 688041 - DNA, 19 bp, Mus musculus
  siRNA target sequence for Psmd14 (NM_021526.1,882-900).
ctgttaaatttgcataaga

SEQ ID NO: 688042 - DNA, 19 bp, Mus musculus
  siRNA target sequence for Psmd14 (NM_021526.1,932-950).
ctacagtgaacactgtaaa

SEQ ID NO: 688043 - DNA, 19 bp, Mus musculus
  siRNA target sequence for Psmd14 (NM_021526.1,953-971).
caatgaatcggtggtaaaa

SEQ ID NO: 688044 - DNA, 19 bp, Mus musculus
  siRNA target sequence for Psmd14 (NM_021526.1,957-975).
gaatcggtggtaaaagaaa

SEQ ID NO: 688045 - DNA, 19 bp, Mus musculus
  siRNA target sequence for Psmd14 (NM_021526.1,961-979).
cggtggtaaaagaaatgtt

SEQ ID NO: 688046 - DNA, 19 bp, Mus musculus
  siRNA target sequence for Psmd14 (NM_021526.1,977-995).
gttggaattagccaagaat

SEQ ID NO: 688047 - DNA, 19 bp, Mus musculus
  siRNA target sequence for Psmd14 (NM_021526.1,1095-1113).
gtggatgtgcttatgactt

SEQ ID NO: 688048 - DNA, 19 bp, Mus musculus
  siRNA target sequence for Psmd14 (NM_021526.1,1135-1153).
ccgcaatgttggatactgt

SEQ ID NO: 688049 - DNA, 19 bp, Mus musculus
  siRNA target sequence for Psmd14 (NM_021526.1,1136-1154).
cgcaatgttggatactgtt

SEQ ID NO: 688050 - DNA, 19 bp, Mus musculus
  siRNA target sequence for Psmd14 (NM_021526.1,1145-1163).
ggatactgttgtatttaaa

SEQ ID NO: 688051 - DNA, 19 bp, Mus musculus
  siRNA target sequence for Psmd14 (NM_021526.1,1146-1164).
gatactgttgtatttaaat

SEQ ID NO: 688052 - DNA, 19 bp, Mus musculus
  siRNA target sequence for Psmd3 (NM_009439.1,519-537).
ggcttcttcacctccaata

SEQ ID NO: 688053 - DNA, 19 bp, Mus musculus
  siRNA target sequence for Psmd3 (NM_009439.1,520-538).
gcttcttcacctccaataa

SEQ ID NO: 688054 - DNA, 19 bp, Mus musculus
  siRNA target sequence for Psmd3 (NM_009439.1,557-575).
gctacccttcctagaagaa

SEQ ID NO: 688055 - DNA, 19 bp, Mus musculus
  siRNA target sequence for Psmd3 (NM_009439.1,777-795).
ctcgtagctgccaagtgtt

SEQ ID NO: 688056 - DNA, 19 bp, Mus musculus
  siRNA target sequence for Psmd3 (NM_009439.1,783-801).
gctgccaagtgttactatt

SEQ ID NO: 688057 - DNA, 19 bp, Mus musculus
  siRNA target sequence for Psmd3 (NM_009439.1,784-802).
ctgccaagtgttactatta

SEQ ID NO: 688058 - DNA, 19 bp, Mus musculus
  siRNA target sequence for Psmd3 (NM_009439.1,787-805).
ccaagtgttactattatca

SEQ ID NO: 688059 - DNA, 19 bp, Mus musculus
  siRNA target sequence for Psmd3 (NM_009439.1,900-918).
ggacaggctacccttttga

SEQ ID NO: 688060 - DNA, 19 bp, Mus musculus
  siRNA target sequence for Psmd3 (NM_009439.1,901-919).
gacaggctacccttttgaa

SEQ ID NO: 688061 - DNA, 19 bp, Mus musculus
  siRNA target sequence for Psmd3 (NM_009439.1,938-956).
cctgcactacagcttgtat

SEQ ID NO: 688062 - DNA, 19 bp, Mus musculus
  siRNA target sequence for Psmd3 (NM_009439.1,993-1011).
cctgagcaagccaacaaca

SEQ ID NO: 688063 - DNA, 19 bp, Mus musculus
  siRNA target sequence for Psmd3 (NM_009439.1,1018-1036).
gggccaggtacctctatta

SEQ ID NO: 688064 - DNA, 19 bp, Mus musculus
  siRNA target sequence for Psmd3 (NM_009439.1,1020-1038).
gccaggtacctctattaca

SEQ ID NO: 688065 - DNA, 19 bp, Mus musculus
  siRNA target sequence for Psmd3 (NM_009439.1,1022-1040).
caggtacctctattacaca

SEQ ID NO: 688066 - DNA, 19 bp, Mus musculus
  siRNA target sequence for Psmd3 (NM_009439.1,1144-1162).
cggtgcacaagcttctgat

SEQ ID NO: 688067 - DNA, 19 bp, Mus musculus
  siRNA target sequence for Psmd3 (NM_009439.1,1282-1300).
ccaagttcaaccaagttct

SEQ ID NO: 688068 - DNA, 19 bp, Mus musculus
  siRNA target sequence for Psmd3 (NM_009439.1,1332-1350).
gggacctacaccctgatta

SEQ ID NO: 688069 - DNA, 19 bp, Mus musculus
  siRNA target sequence for Psmd3 (NM_009439.1,1353-1371).
cgactgcgacacaatgtga

SEQ ID NO: 688070 - DNA, 19 bp, Mus musculus
  siRNA target sequence for Psmd3 (NM_009439.1,1354-1372).
gactgcgacacaatgtgat

SEQ ID NO: 688071 - DNA, 19 bp, Mus musculus
  siRNA target sequence for Psmd3 (NM_009439.1,1359-1377).
cgacacaatgtgatcaaga

SEQ ID NO: 688072 - DNA, 19 bp, Mus musculus
  siRNA target sequence for Psmd3 (NM_009439.1,1529-1547).
gggatacgtccaatccaaa

SEQ ID NO: 688073 - DNA, 19 bp, Mus musculus
  siRNA target sequence for Psmd3 (NM_009439.1,1548-1566).
gagatgattgacatctatt

SEQ ID NO: 688074 - DNA, 19 bp, Mus musculus
  siRNA target sequence for Psmd3 (NM_009439.1,1612-1630).
gtctggacatccacaacat

SEQ ID NO: 688075 - DNA, 19 bp, Mus musculus
  siRNA target sequence for Psmd4 (NM_008951.1,102-120).
ggatgccgtcaacattgta

SEQ ID NO: 688076 - DNA, 19 bp, Mus musculus
  siRNA target sequence for Psmd4 (NM_008951.1,103-121).
gatgccgtcaacattgtat

SEQ ID NO: 688077 - DNA, 19 bp, Mus musculus
  siRNA target sequence for Psmd4 (NM_008951.1,135-153).
ccgaagcaaccctgagaat

SEQ ID NO: 688078 - DNA, 19 bp, Mus musculus
  siRNA target sequence for Psmd4 (NM_008951.1,306-324).
gcaccggcagggcaagaat

SEQ ID NO: 688079 - DNA, 19 bp, Mus musculus
  siRNA target sequence for Psmd4 (NM_008951.1,310-328).
cggcagggcaagaatcaca

SEQ ID NO: 688080 - DNA, 19 bp, Mus musculus
  siRNA target sequence for Psmd4 (NM_008951.1,391-409).
ctagctaaacgccttaaga

SEQ ID NO: 688081 - DNA, 19 bp, Mus musculus
  siRNA target sequence for Psmd4 (NM_008951.1,641-659).
ccagtgctgatcctgaatt

SEQ ID NO: 688082 - DNA, 19 bp, Mus musculus
  siRNA target sequence for Psmd4 (NM_008951.1,779-797).
cggatgacgccctactgaa

SEQ ID NO: 688083 - DNA, 19 bp, Mus musculus
  siRNA target sequence for Psmd5 (NM_080554.1,194-212).
cgctgttctccttgcttaa

SEQ ID NO: 688084 - DNA, 19 bp, Mus musculus
  siRNA target sequence for Psmd5 (NM_080554.1,363-381).
gtcgcagattggaagaatt

SEQ ID NO: 688085 - DNA, 19 bp, Mus musculus
  siRNA target sequence for Psmd5 (NM_080554.1,365-383).
cgcagattggaagaattgt

SEQ ID NO: 688086 - DNA, 19 bp, Mus musculus
  siRNA target sequence for Psmd5 (NM_080554.1,366-384).
gcagattggaagaattgtt

SEQ ID NO: 688087 - DNA, 19 bp, Mus musculus
  siRNA target sequence for Psmd5 (NM_080554.1,450-468).
cattggcggagagaattta

SEQ ID NO: 688088 - DNA, 19 bp, Mus musculus
  siRNA target sequence for Psmd5 (NM_080554.1,456-474).
cggagagaatttatctgtt

SEQ ID NO: 688089 - DNA, 19 bp, Mus musculus
  siRNA target sequence for Psmd5 (NM_080554.1,472-490).
gttgctaaagcggctatta

SEQ ID NO: 688090 - DNA, 19 bp, Mus musculus
  siRNA target sequence for Psmd5 (NM_080554.1,475-493).
gctaaagcggctattaaat

SEQ ID NO: 688091 - DNA, 19 bp, Mus musculus
  siRNA target sequence for Psmd5 (NM_080554.1,494-512).
ccctgtcgagaatatcact

SEQ ID NO: 688092 - DNA, 19 bp, Mus musculus
  siRNA target sequence for Psmd5 (NM_080554.1,495-513).
cctgtcgagaatatcacta

SEQ ID NO: 688093 - DNA, 19 bp, Mus musculus
  siRNA target sequence for Psmd5 (NM_080554.1,528-546).
ggaagctctgtttgaaagt

SEQ ID NO: 688094 - DNA, 19 bp, Mus musculus
  siRNA target sequence for Psmd5 (NM_080554.1,552-570).
gctggatgatttgaagaat

SEQ ID NO: 688095 - DNA, 19 bp, Mus musculus
  siRNA target sequence for Psmd5 (NM_080554.1,555-573).
ggatgatttgaagaatgta

SEQ ID NO: 688096 - DNA, 19 bp, Mus musculus
  siRNA target sequence for Psmd5 (NM_080554.1,581-599).
caaacgacgttgttcgata

SEQ ID NO: 688097 - DNA, 19 bp, Mus musculus
  siRNA target sequence for Psmd5 (NM_080554.1,600-618).
cagggtctatgagctaatt

SEQ ID NO: 688098 - DNA, 19 bp, Mus musculus
  siRNA target sequence for Psmd5 (NM_080554.1,602-620).
gggtctatgagctaattat

SEQ ID NO: 688099 - DNA, 19 bp, Mus musculus
  siRNA target sequence for Psmd5 (NM_080554.1,603-621).
ggtctatgagctaattata

SEQ ID NO: 688100 - DNA, 19 bp, Mus musculus
  siRNA target sequence for Psmd5 (NM_080554.1,638-656).
catcagaatctttaaacta

SEQ ID NO: 688101 - DNA, 19 bp, Mus musculus
  siRNA target sequence for Psmd5 (NM_080554.1,701-719).
cgggtgaggacgtgttagt

SEQ ID NO: 688102 - DNA, 19 bp, Mus musculus
  siRNA target sequence for Psmd5 (NM_080554.1,703-721).
ggtgaggacgtgttagtca

SEQ ID NO: 688103 - DNA, 19 bp, Mus musculus
  siRNA target sequence for Psmd5 (NM_080554.1,720-738).
cagagccacctgtatagaa

SEQ ID NO: 688104 - DNA, 19 bp, Mus musculus
  siRNA target sequence for Psmd5 (NM_080554.1,761-779).
cccatcacggacgacaata

SEQ ID NO: 688105 - DNA, 19 bp, Mus musculus
  siRNA target sequence for Psmd5 (NM_080554.1,798-816).
cattgaccagatatccaat

SEQ ID NO: 688106 - DNA, 19 bp, Mus musculus
  siRNA target sequence for Psmd5 (NM_080554.1,802-820).
gaccagatatccaatataa

SEQ ID NO: 688107 - DNA, 19 bp, Mus musculus
  siRNA target sequence for Psmd5 (NM_080554.1,804-822).
ccagatatccaatataatt

SEQ ID NO: 688108 - DNA, 19 bp, Mus musculus
  siRNA target sequence for Psmd5 (NM_080554.1,807-825).
gatatccaatataattgtt

SEQ ID NO: 688109 - DNA, 19 bp, Mus musculus
  siRNA target sequence for Psmd5 (NM_080554.1,1053-1071).
gacaggaacccgctttgaa

SEQ ID NO: 688110 - DNA, 19 bp, Mus musculus
  siRNA target sequence for Psmd5 (NM_080554.1,1286-1304).
gtgctgccttgaaagtttt

SEQ ID NO: 688111 - DNA, 19 bp, Mus musculus
  siRNA target sequence for Psmd5 (NM_080554.1,1355-1373).
caggttttgtagagtttgt

SEQ ID NO: 688112 - DNA, 19 bp, Mus musculus
  siRNA target sequence for Psmd5 (NM_080554.1,1406-1424).
caaaggatgccaaatatga

SEQ ID NO: 688113 - DNA, 19 bp, Mus musculus
  siRNA target sequence for Psmd5 (NM_080554.1,1415-1433).
ccaaatatgaactggtaaa

SEQ ID NO: 688114 - DNA, 19 bp, Mus musculus
  siRNA target sequence for Psmd5 (NM_080554.1,1416-1434).
caaatatgaactggtaaaa

SEQ ID NO: 688115 - DNA, 19 bp, Mus musculus
  siRNA target sequence for Psmd5 (NM_080554.1,1464-1482).
gatctttgggaactcaaat

SEQ ID NO: 688116 - DNA, 19 bp, Mus musculus
  siRNA target sequence for Psmd5 (NM_080554.1,1467-1485).
ctttgggaactcaaattat

SEQ ID NO: 688117 - DNA, 19 bp, Mus musculus
  siRNA target sequence for Psmd5 (NM_080554.1,1508-1526).
gtgaaggtccatactatgt

SEQ ID NO: 688118 - DNA, 19 bp, Mus musculus
  siRNA target sequence for Psmd5 (NM_080554.1,1510-1528).
gaaggtccatactatgtga

SEQ ID NO: 688119 - DNA, 19 bp, Mus musculus
  siRNA target sequence for Itmap1 (NM_008411.2,807-825).
ggaaaggctataagataca

SEQ ID NO: 688120 - DNA, 19 bp, Mus musculus
  siRNA target sequence for Itmap1 (NM_008411.2,808-826).
gaaaggctataagatacaa

SEQ ID NO: 688121 - DNA, 19 bp, Mus musculus
  siRNA target sequence for Itmap1 (NM_008411.2,812-830).
ggctataagatacaattga

SEQ ID NO: 688122 - DNA, 19 bp, Mus musculus
  siRNA target sequence for Itmap1 (NM_008411.2,813-831).
gctataagatacaattgaa

SEQ ID NO: 688123 - DNA, 19 bp, Mus musculus
  siRNA target sequence for Itmap1 (NM_008411.2,848-866).
ctagagatggatgaaaact

SEQ ID NO: 688124 - DNA, 19 bp, Mus musculus
  siRNA target sequence for Itmap1 (NM_008411.2,934-952).
cggcgtggaacctacctta

SEQ ID NO: 688125 - DNA, 19 bp, Mus musculus
  siRNA target sequence for Itmap1 (NM_008411.2,938-956).
gtggaacctaccttagaat

SEQ ID NO: 688126 - DNA, 19 bp, Mus musculus
  siRNA target sequence for Itmap1 (NM_008411.2,940-958).
ggaacctaccttagaatct

SEQ ID NO: 688127 - DNA, 19 bp, Mus musculus
  siRNA target sequence for Itmap1 (NM_008411.2,973-991).
gactgtcgtgctatctaca

SEQ ID NO: 688128 - DNA, 19 bp, Mus musculus
  siRNA target sequence for Itmap1 (NM_008411.2,977-995).
gtcgtgctatctacagatt

SEQ ID NO: 688129 - DNA, 19 bp, Mus musculus
  siRNA target sequence for Itmap1 (NM_008411.2,979-997).
cgtgctatctacagattat

SEQ ID NO: 688130 - DNA, 19 bp, Mus musculus
  siRNA target sequence for Itmap1 (NM_008411.2,990-1008).
cagattatgccaattccta

SEQ ID NO: 688131 - DNA, 19 bp, Mus musculus
  siRNA target sequence for Itmap1 (NM_008411.2,1026-1044).
cctacacttcaatttacat

SEQ ID NO: 688132 - DNA, 19 bp, Mus musculus
  siRNA target sequence for Itmap1 (NM_008411.2,1048-1066).
cgatgtcaacactacatct

SEQ ID NO: 688133 - DNA, 19 bp, Mus musculus
  siRNA target sequence for Itmap1 (NM_008411.2,1052-1070).
gtcaacactacatctctaa

SEQ ID NO: 688134 - DNA, 19 bp, Mus musculus
  siRNA target sequence for Itmap1 (NM_008411.2,1054-1072).
caacactacatctctaagt

SEQ ID NO: 688135 - DNA, 19 bp, Mus musculus
  siRNA target sequence for Itmap1 (NM_008411.2,1057-1075).
cactacatctctaagttgt

SEQ ID NO: 688136 - DNA, 19 bp, Mus musculus
  siRNA target sequence for Itmap1 (NM_008411.2,1094-1112).
gtcatcataagcaaatcat

SEQ ID NO: 688137 - DNA, 19 bp, Mus musculus
  siRNA target sequence for Itmap1 (NM_008411.2,1115-1133).
ctaccggcactcaactaca

SEQ ID NO: 688138 - DNA, 19 bp, Mus musculus
  siRNA target sequence for Itmap1 (NM_008411.2,1119-1137).
cggcactcaactacaatga

SEQ ID NO: 688139 - DNA, 19 bp, Mus musculus
  siRNA target sequence for Itmap1 (NM_008411.2,1172-1190).
ccgaatgtatcaaatgtca

SEQ ID NO: 688140 - DNA, 19 bp, Mus musculus
  siRNA target sequence for Itmap1 (NM_008411.2,1213-1231).
cgaatgcggtacagtcaaa

SEQ ID NO: 688141 - DNA, 19 bp, Mus musculus
  siRNA target sequence for Itmap1 (NM_008411.2,1241-1259).
gaccacgcgatcagctata

SEQ ID NO: 688142 - DNA, 19 bp, Mus musculus
  siRNA target sequence for Itmap1 (NM_008411.2,1244-1262).
cacgcgatcagctatacca

SEQ ID NO: 688143 - DNA, 19 bp, Mus musculus
  siRNA target sequence for Itmap1 (NM_008411.2,1356-1374).
ctaccgtggagattatgta

SEQ ID NO: 688144 - DNA, 19 bp, Mus musculus
  siRNA target sequence for Itmap1 (NM_008411.2,1360-1378).
cgtggagattatgtacata

SEQ ID NO: 688145 - DNA, 19 bp, Mus musculus
  siRNA target sequence for Itmap1 (NM_008411.2,1363-1381).
ggagattatgtacataact

SEQ ID NO: 688146 - DNA, 19 bp, Mus musculus
  siRNA target sequence for Itmap1 (NM_008411.2,1407-1425).
gtgtcctgggcaaatacaa

SEQ ID NO: 688147 - DNA, 19 bp, Mus musculus
  siRNA target sequence for Itmap1 (NM_008411.2,1441-1459).
ctatgagtccgactcattt

SEQ ID NO: 688148 - DNA, 19 bp, Mus musculus
  siRNA target sequence for Itmap1 (NM_008411.2,1468-1486).
cgtacaggagtcaccatat

SEQ ID NO: 688149 - DNA, 19 bp, Mus musculus
  siRNA target sequence for Itmap1 (NM_008411.2,1469-1487).
gtacaggagtcaccatatt

SEQ ID NO: 688150 - DNA, 19 bp, Mus musculus
  siRNA target sequence for Itmap1 (NM_008411.2,1474-1492).
ggagtcaccatattatgta

SEQ ID NO: 688151 - DNA, 19 bp, Mus musculus
  siRNA target sequence for Itmap1 (NM_008411.2,1482-1500).
catattatgtagacttgaa

SEQ ID NO: 688152 - DNA, 19 bp, Mus musculus
  siRNA target sequence for Itmap1 (NM_008411.2,1550-1568).
gtggtgtttctggatactt

SEQ ID NO: 688153 - DNA, 19 bp, Mus musculus
  siRNA target sequence for Itmap1 (NM_008411.2,1576-1594).
ctcgcctacgtctgacttt

SEQ ID NO: 688154 - DNA, 19 bp, Mus musculus
  siRNA target sequence for Itmap1 (NM_008411.2,1599-1617).
ctccaacctacgacttaat

SEQ ID NO: 688155 - DNA, 19 bp, Mus musculus
  siRNA target sequence for Itmap1 (NM_008411.2,1601-1619).
ccaacctacgacttaatca

SEQ ID NO: 688156 - DNA, 19 bp, Mus musculus
  siRNA target sequence for Itmap1 (NM_008411.2,1647-1665).
gtaaggtgtatcccttatt

SEQ ID NO: 688157 - DNA, 19 bp, Mus musculus
  siRNA target sequence for Itmap1 (NM_008411.2,1715-1733).
ctcaactctgtgtatctca

SEQ ID NO: 688158 - DNA, 19 bp, Mus musculus
  siRNA target sequence for Itmap1 (NM_008411.2,1722-1740).
ctgtgtatctcaagtgtaa

SEQ ID NO: 688159 - DNA, 19 bp, Mus musculus
  siRNA target sequence for Itmap1 (NM_008411.2,1724-1742).
gtgtatctcaagtgtaaga

SEQ ID NO: 688160 - DNA, 19 bp, Mus musculus
  siRNA target sequence for Itmap1 (NM_008411.2,1726-1744).
gtatctcaagtgtaagatt

SEQ ID NO: 688161 - DNA, 19 bp, Mus musculus
  siRNA target sequence for Itmap1 (NM_008411.2,1732-1750).
caagtgtaagattttgata

SEQ ID NO: 688162 - DNA, 19 bp, Mus musculus
  siRNA target sequence for Itmap1 (NM_008411.2,1754-1772).
gataacaatgaccaaacat

SEQ ID NO: 688163 - DNA, 19 bp, Mus musculus
  siRNA target sequence for Itmap1 (NM_008411.2,1831-1849).
gaagactgactctgttata

SEQ ID NO: 688164 - DNA, 19 bp, Mus musculus
  siRNA target sequence for Itmap1 (NM_008411.2,1870-1888).
ggaccgaagtgcaagtaga

SEQ ID NO: 688165 - DNA, 19 bp, Mus musculus
  siRNA target sequence for Itmap1 (NM_008411.2,1873-1891).
ccgaagtgcaagtagagat

SEQ ID NO: 688166 - DNA, 19 bp, Mus musculus
  siRNA target sequence for Itmap1 (NM_008411.2,1893-1911).
caggacttctgcctcaaat

SEQ ID NO: 688167 - DNA, 19 bp, Mus musculus
  siRNA target sequence for 1700086N05Rik (NM_026457.1,75-93).
ctccacaacctgtacagta

SEQ ID NO: 688168 - DNA, 19 bp, Mus musculus
  siRNA target sequence for 1700086N05Rik (NM_026457.1,165-183).
ctcaaccgcttctcttcta

SEQ ID NO: 688169 - DNA, 19 bp, Mus musculus
  siRNA target sequence for 1700086N05Rik (NM_026457.1,220-238).
ccgacctggaactagacta

SEQ ID NO: 688170 - DNA, 19 bp, Mus musculus
  siRNA target sequence for 1700086N05Rik (NM_026457.1,262-280).
gcgatgagatgtttgtctt

SEQ ID NO: 688171 - DNA, 19 bp, Mus musculus
  siRNA target sequence for 1700086N05Rik (NM_026457.1,315-333).
ctacaaccaccttacttct

SEQ ID NO: 688172 - DNA, 19 bp, Mus musculus
  siRNA target sequence for 1700086N05Rik (NM_026457.1,454-472).
ccctccgcaaggagaacaa

SEQ ID NO: 688173 - DNA, 19 bp, Mus musculus
  siRNA target sequence for 1700086N05Rik (NM_026457.1,526-544).
gtcagacctcctcattgtt

SEQ ID NO: 688174 - DNA, 19 bp, Mus musculus
  siRNA target sequence for 1700086N05Rik (NM_026457.1,596-614).
gcctgcccagcgtagcaaa

SEQ ID NO: 688175 - DNA, 19 bp, Mus musculus
  siRNA target sequence for 1700086N05Rik (NM_026457.1,749-767).
ggaggagtcccataactca

SEQ ID NO: 688176 - DNA, 19 bp, Mus musculus
  siRNA target sequence for 1700086N05Rik (NM_026457.1,864-882).
ctgagggagatggttaaca

SEQ ID NO: 688177 - DNA, 19 bp, Mus musculus
  siRNA target sequence for 1700086N05Rik (NM_026457.1,868-886).
gggagatggttaacaactt

SEQ ID NO: 688178 - DNA, 19 bp, Mus musculus
  siRNA target sequence for 1700086N05Rik (NM_026457.1,902-920).
ggaagaggatggcaaagta

SEQ ID NO: 688179 - DNA, 19 bp, Mus musculus
  siRNA target sequence for 1700086N05Rik (NM_026457.1,1149-1167).
gcccggatggagatgctta

SEQ ID NO: 688180 - DNA, 19 bp, Mus musculus
  siRNA target sequence for 1700086N05Rik (NM_026457.1,1153-1171).
ggatggagatgcttatcga

SEQ ID NO: 688181 - DNA, 19 bp, Mus musculus
  siRNA target sequence for 2410003P15Rik (NM_018888.1,319-337).
ggacctttgaaatacagta

SEQ ID NO: 688182 - DNA, 19 bp, Mus musculus
  siRNA target sequence for 2410003P15Rik (NM_018888.1,419-437).
gtcagatgcccgatacatt

SEQ ID NO: 688183 - DNA, 19 bp, Mus musculus
  siRNA target sequence for 2410003P15Rik (NM_018888.1,503-521).
gccggactgggaagtacat

SEQ ID NO: 688184 - DNA, 19 bp, Mus musculus
  siRNA target sequence for 2410003P15Rik (NM_018888.1,505-523).
cggactgggaagtacatgt

SEQ ID NO: 688185 - DNA, 19 bp, Mus musculus
  siRNA target sequence for 2410003P15Rik (NM_018888.1,519-537).
catgtgccggatcatagtt

SEQ ID NO: 688186 - DNA, 19 bp, Mus musculus
  siRNA target sequence for 2410003P15Rik (NM_018888.1,522-540).
gtgccggatcatagttcat

SEQ ID NO: 688187 - DNA, 19 bp, Mus musculus
  siRNA target sequence for 2410003P15Rik (NM_018888.1,524-542).
gccggatcatagttcattt

SEQ ID NO: 688188 - DNA, 19 bp, Mus musculus
  siRNA target sequence for 2410003P15Rik (NM_018888.1,526-544).
cggatcatagttcatttca

SEQ ID NO: 688189 - DNA, 19 bp, Mus musculus
  siRNA target sequence for 2410003P15Rik (NM_018888.1,574-592).
gtcatgggggttaattcct

SEQ ID NO: 688190 - DNA, 19 bp, Mus musculus
  siRNA target sequence for 2410003P15Rik (NM_018888.1,576-594).
catgggggttaattcctat

SEQ ID NO: 688191 - DNA, 19 bp, Mus musculus
  siRNA target sequence for 2410003P15Rik (NM_018888.1,581-599).
gggttaattcctatatcct

SEQ ID NO: 688192 - DNA, 19 bp, Mus musculus
  siRNA target sequence for 2410003P15Rik (NM_018888.1,582-600).
ggttaattcctatatccta

SEQ ID NO: 688193 - DNA, 19 bp, Mus musculus
  siRNA target sequence for 2410003P15Rik (NM_018888.1,583-601).
gttaattcctatatcctaa

SEQ ID NO: 688194 - DNA, 19 bp, Mus musculus
  siRNA target sequence for 2410003P15Rik (NM_018888.1,613-631).
gccctcatgacgaacaatt

SEQ ID NO: 688195 - DNA, 19 bp, Mus musculus
  siRNA target sequence for 2410003P15Rik (NM_018888.1,730-748).
gaccctcgacagcttgaat

SEQ ID NO: 688196 - DNA, 19 bp, Mus musculus
  siRNA target sequence for 2410003P15Rik (NM_018888.1,734-752).
ctcgacagcttgaattgct

SEQ ID NO: 688197 - DNA, 19 bp, Mus musculus
  siRNA target sequence for 2410003P15Rik (NM_018888.1,875-893).
cccatgctcctacttacaa

SEQ ID NO: 688198 - DNA, 19 bp, Mus musculus
  siRNA target sequence for 2410003P15Rik (NM_018888.1,876-894).
ccatgctcctacttacaat

SEQ ID NO: 688199 - DNA, 19 bp, Mus musculus
  siRNA target sequence for 2410003P15Rik (NM_018888.1,881-899).
ctcctacttacaatgatga

SEQ ID NO: 688200 - DNA, 19 bp, Mus musculus
  siRNA target sequence for Lrba (NM_030695.1,460-478).
gacggggttggttgaagtt

SEQ ID NO: 688201 - DNA, 19 bp, Mus musculus
  siRNA target sequence for Lrba (NM_030695.1,476-494).
gttggagaagtgtccaata

SEQ ID NO: 688202 - DNA, 19 bp, Mus musculus
  siRNA target sequence for Lrba (NM_030695.1,487-505).
gtccaatagggatattgta

SEQ ID NO: 688203 - DNA, 19 bp, Mus musculus
  siRNA target sequence for Lrba (NM_030695.1,495-513).
gggatattgtagaaactgt

SEQ ID NO: 688204 - DNA, 19 bp, Mus musculus
  siRNA target sequence for Lrba (NM_030695.1,526-544).
ggtaggaggccagtttgat

SEQ ID NO: 688205 - DNA, 19 bp, Mus musculus
  siRNA target sequence for Lrba (NM_030695.1,527-545).
gtaggaggccagtttgatt

SEQ ID NO: 688206 - DNA, 19 bp, Mus musculus
  siRNA target sequence for Lrba (NM_030695.1,661-679).
gaagaagagcatacgaaat

SEQ ID NO: 688207 - DNA, 19 bp, Mus musculus
  siRNA target sequence for Lrba (NM_030695.1,664-682).
gaagagcatacgaaatctt

SEQ ID NO: 688208 - DNA, 19 bp, Mus musculus
  siRNA target sequence for Lrba (NM_030695.1,669-687).
gcatacgaaatcttcaagt

SEQ ID NO: 688209 - DNA, 19 bp, Mus musculus
  siRNA target sequence for Lrba (NM_030695.1,702-720).
gcctcgtggaaaaagtact

SEQ ID NO: 688210 - DNA, 19 bp, Mus musculus
  siRNA target sequence for Lrba (NM_030695.1,733-751).
gaaagttgacagtatgatt

SEQ ID NO: 688211 - DNA, 19 bp, Mus musculus
  siRNA target sequence for Lrba (NM_030695.1,753-771).
cagatcttctcgttgacat

SEQ ID NO: 688212 - DNA, 19 bp, Mus musculus
  siRNA target sequence for Lrba (NM_030695.1,782-800).
ctggccagctataatttga

SEQ ID NO: 688213 - DNA, 19 bp, Mus musculus
  siRNA target sequence for Lrba (NM_030695.1,784-802).
ggccagctataatttgaca

SEQ ID NO: 688214 - DNA, 19 bp, Mus musculus
  siRNA target sequence for Lrba (NM_030695.1,801-819).
cagttagagaactaaagct

SEQ ID NO: 688215 - DNA, 19 bp, Mus musculus
  siRNA target sequence for Lrba (NM_030695.1,803-821).
gttagagaactaaagcttt

SEQ ID NO: 688216 - DNA, 19 bp, Mus musculus
  siRNA target sequence for Lrba (NM_030695.1,911-929).
ggtcctgacgcctttttca

SEQ ID NO: 688217 - DNA, 19 bp, Mus musculus
  siRNA target sequence for Lrba (NM_030695.1,912-930).
gtcctgacgcctttttcaa

SEQ ID NO: 688218 - DNA, 19 bp, Mus musculus
  siRNA target sequence for Lrba (NM_030695.1,915-933).
ctgacgcctttttcaactt

SEQ ID NO: 688219 - DNA, 19 bp, Mus musculus
  siRNA target sequence for Lrba (NM_030695.1,945-963).
gcgctgcagctattgcatt

SEQ ID NO: 688220 - DNA, 19 bp, Mus musculus
  siRNA target sequence for Lrba (NM_030695.1,946-964).
cgctgcagctattgcatta

SEQ ID NO: 688221 - DNA, 19 bp, Mus musculus
  siRNA target sequence for Lrba (NM_030695.1,983-1001).
ccttaccagaatggtttta

SEQ ID NO: 688222 - DNA, 19 bp, Mus musculus
  siRNA target sequence for Lrba (NM_030695.1,1009-1027).
cacctggcttagaatggat

SEQ ID NO: 688223 - DNA, 19 bp, Mus musculus
  siRNA target sequence for Lrba (NM_030695.1,1049-1067).
gacaaggataaaccatatt

SEQ ID NO: 688224 - DNA, 19 bp, Mus musculus
  siRNA target sequence for Lrba (NM_030695.1,1087-1105).
caaaggtcttggctattct

SEQ ID NO: 688225 - DNA, 19 bp, Mus musculus
  siRNA target sequence for Lrba (NM_030695.1,1115-1133).
gttggaggctgtttgatta

SEQ ID NO: 688226 - DNA, 19 bp, Mus musculus
  siRNA target sequence for Lrba (NM_030695.1,1118-1136).
ggaggctgtttgattataa

SEQ ID NO: 688227 - DNA, 19 bp, Mus musculus
  siRNA target sequence for Lrba (NM_030695.1,1169-1187).
cattgtgtgaaatttgatt

SEQ ID NO: 688228 - DNA, 19 bp, Mus musculus
  siRNA target sequence for Lrba (NM_030695.1,1201-1219).
gtggtacatggtaactata

SEQ ID NO: 688229 - DNA, 19 bp, Mus musculus
  siRNA target sequence for Lrba (NM_030695.1,1203-1221).
ggtacatggtaactatagt

SEQ ID NO: 688230 - DNA, 19 bp, Mus musculus
  siRNA target sequence for Lrba (NM_030695.1,1204-1222).
gtacatggtaactatagta

SEQ ID NO: 688231 - DNA, 19 bp, Mus musculus
  siRNA target sequence for Lrba (NM_030695.1,1210-1228).
ggtaactatagtacacatt

SEQ ID NO: 688232 - DNA, 19 bp, Mus musculus
  siRNA target sequence for Lrba (NM_030695.1,1319-1337).
gatacctttgacaaatgct

SEQ ID NO: 688233 - DNA, 19 bp, Mus musculus
  siRNA target sequence for Lrba (NM_030695.1,1459-1477).
ggggtacaagggcacattt

SEQ ID NO: 688234 - DNA, 19 bp, Mus musculus
  siRNA target sequence for Lrba (NM_030695.1,1460-1478).
gggtacaagggcacattta

SEQ ID NO: 688235 - DNA, 19 bp, Mus musculus
  siRNA target sequence for Lrba (NM_030695.1,1461-1479).
ggtacaagggcacatttaa

SEQ ID NO: 688236 - DNA, 19 bp, Mus musculus
  siRNA target sequence for Lrba (NM_030695.1,1462-1480).
gtacaagggcacatttaaa

SEQ ID NO: 688237 - DNA, 19 bp, Mus musculus
  siRNA target sequence for Lrba (NM_030695.1,1508-1526).
gctgagcaccataaactgt

SEQ ID NO: 688238 - DNA, 19 bp, Mus musculus
  siRNA target sequence for Lrba (NM_030695.1,1514-1532).
caccataaactgttactgt

SEQ ID NO: 688239 - DNA, 19 bp, Mus musculus
  siRNA target sequence for Lrba (NM_030695.1,1711-1729).
ctccataggaggagtacaa

SEQ ID NO: 688240 - DNA, 19 bp, Mus musculus
  siRNA target sequence for Lrba (NM_030695.1,1713-1731).
ccataggaggagtacaagt

SEQ ID NO: 688241 - DNA, 19 bp, Mus musculus
  siRNA target sequence for Lrba (NM_030695.1,1714-1732).
cataggaggagtacaagtt

SEQ ID NO: 688242 - DNA, 19 bp, Mus musculus
  siRNA target sequence for Lrba (NM_030695.1,1751-1769).
cagctggactacaagcaat

SEQ ID NO: 688243 - DNA, 19 bp, Mus musculus
  siRNA target sequence for Lrba (NM_030695.1,1753-1771).
gctggactacaagcaatat

SEQ ID NO: 688244 - DNA, 19 bp, Mus musculus
  siRNA target sequence for Lrba (NM_030695.1,1754-1772).
ctggactacaagcaatatt

SEQ ID NO: 688245 - DNA, 19 bp, Mus musculus
  siRNA target sequence for Lrba (NM_030695.1,1756-1774).
ggactacaagcaatattta

SEQ ID NO: 688246 - DNA, 19 bp, Mus musculus
  siRNA target sequence for Lrba (NM_030695.1,1762-1780).
caagcaatatttatctgat

SEQ ID NO: 688247 - DNA, 19 bp, Mus musculus
  siRNA target sequence for Lrba (NM_030695.1,1778-1796).
gatgaggttgacttgacta

SEQ ID NO: 688248 - DNA, 19 bp, Mus musculus
  siRNA target sequence for Lrba (NM_030695.1,1783-1801).
ggttgacttgactatctgt

SEQ ID NO: 688249 - DNA, 19 bp, Mus musculus
  siRNA target sequence for Lrba (NM_030695.1,1784-1802).
gttgacttgactatctgta

SEQ ID NO: 688250 - DNA, 19 bp, Mus musculus
  siRNA target sequence for Lrba (NM_030695.1,1803-1821).
caaccttgctggcctttat

SEQ ID NO: 688251 - DNA, 19 bp, Mus musculus
  siRNA target sequence for Lrba (NM_030695.1,1826-1844).
gagttgctgaagaactcaa

SEQ ID NO: 688252 - DNA, 19 bp, Mus musculus
  siRNA target sequence for Lrba (NM_030695.1,1876-1894).
gggctttttggtaataggt

SEQ ID NO: 688253 - DNA, 19 bp, Mus musculus
  siRNA target sequence for Lrba (NM_030695.1,1877-1895).
ggctttttggtaataggtt

SEQ ID NO: 688254 - DNA, 19 bp, Mus musculus
  siRNA target sequence for Lrba (NM_030695.1,1878-1896).
gctttttggtaataggtta

SEQ ID NO: 688255 - DNA, 19 bp, Mus musculus
  siRNA target sequence for Lrba (NM_030695.1,1879-1897).
ctttttggtaataggttat

SEQ ID NO: 688256 - DNA, 19 bp, Mus musculus
  siRNA target sequence for Lrba (NM_030695.1,1946-1964).
ctttgccttgcgttttcaa

SEQ ID NO: 688257 - DNA, 19 bp, Mus musculus
  siRNA target sequence for Lrba (NM_030695.1,1951-1969).
ccttgcgttttcaaagtat

SEQ ID NO: 688258 - DNA, 19 bp, Mus musculus
  siRNA target sequence for Lrba (NM_030695.1,1952-1970).
cttgcgttttcaaagtatt

SEQ ID NO: 688259 - DNA, 19 bp, Mus musculus
  siRNA target sequence for Lrba (NM_030695.1,2066-2084).
cagttgatgctttatactt

SEQ ID NO: 688260 - DNA, 19 bp, Mus musculus
  siRNA target sequence for Lrba (NM_030695.1,2071-2089).
gatgctttatacttatcta

SEQ ID NO: 688261 - DNA, 19 bp, Mus musculus
  siRNA target sequence for Lrba (NM_030695.1,2105-2123).
gggacggtcaacatctata

SEQ ID NO: 688262 - DNA, 19 bp, Mus musculus
  siRNA target sequence for Lrba (NM_030695.1,2106-2124).
ggacggtcaacatctataa

SEQ ID NO: 688263 - DNA, 19 bp, Mus musculus
  siRNA target sequence for Lrba (NM_030695.1,2111-2129).
gtcaacatctataacacta

SEQ ID NO: 688264 - DNA, 19 bp, Mus musculus
  siRNA target sequence for Lrba (NM_030695.1,2113-2131).
caacatctataacactatt

SEQ ID NO: 688265 - DNA, 19 bp, Mus musculus
  siRNA target sequence for Lrba (NM_030695.1,2215-2233).
cacccccaaaggattagat

SEQ ID NO: 688266 - DNA, 19 bp, Mus musculus
  siRNA target sequence for Lrba (NM_030695.1,2234-2252).
ggaccaagacccaatcaga

SEQ ID NO: 688267 - DNA, 19 bp, Mus musculus
  siRNA target sequence for Lrba (NM_030695.1,2235-2253).
gaccaagacccaatcagaa

SEQ ID NO: 688268 - DNA, 19 bp, Mus musculus
  siRNA target sequence for Lrba (NM_030695.1,2267-2285).
ctgcgagcattcttactga

SEQ ID NO: 688269 - DNA, 19 bp, Mus musculus
  siRNA target sequence for Lrba (NM_030695.1,2336-2354).
ctacaggccattcttaact

SEQ ID NO: 688270 - DNA, 19 bp, Mus musculus
  siRNA target sequence for Lrba (NM_030695.1,2353-2371).
ctacctgctgactatgcat

SEQ ID NO: 688271 - DNA, 19 bp, Mus musculus
  siRNA target sequence for Lrba (NM_030695.1,2368-2386).
gcatgaggacgacaatcta

SEQ ID NO: 688272 - DNA, 19 bp, Mus musculus
  siRNA target sequence for Lrba (NM_030695.1,2374-2392).
ggacgacaatctaatggat

SEQ ID NO: 688273 - DNA, 19 bp, Mus musculus
  siRNA target sequence for Lrba (NM_030695.1,2425-2443).
gcatcctaactccatgatt

SEQ ID NO: 688274 - DNA, 19 bp, Mus musculus
  siRNA target sequence for Lrba (NM_030695.1,2445-2463).
cggcttttgaccaaaggaa

SEQ ID NO: 688275 - DNA, 19 bp, Mus musculus
  siRNA target sequence for Lrba (NM_030695.1,2465-2483).
gggctgcgtgttatctata

SEQ ID NO: 688276 - DNA, 19 bp, Mus musculus
  siRNA target sequence for Lrba (NM_030695.1,2466-2484).
ggctgcgtgttatctataa

SEQ ID NO: 688277 - DNA, 19 bp, Mus musculus
  siRNA target sequence for Lrba (NM_030695.1,2467-2485).
gctgcgtgttatctataaa

SEQ ID NO: 688278 - DNA, 19 bp, Mus musculus
  siRNA target sequence for Lrba (NM_030695.1,2472-2490).
gtgttatctataaacttct

SEQ ID NO: 688279 - DNA, 19 bp, Mus musculus
  siRNA target sequence for Lrba (NM_030695.1,2551-2569).
gcatctggcgccaaagaga

SEQ ID NO: 688280 - DNA, 19 bp, Mus musculus
  siRNA target sequence for Lrba (NM_030695.1,2557-2575).
ggcgccaaagagaaaagct

SEQ ID NO: 688281 - DNA, 19 bp, Mus musculus
  siRNA target sequence for Lrba (NM_030695.1,2585-2603).
cttgggcatggattgttct

SEQ ID NO: 688282 - DNA, 19 bp, Mus musculus
  siRNA target sequence for Lrba (NM_030695.1,2606-2624).
ctgctagctgagagactta

SEQ ID NO: 688283 - DNA, 19 bp, Mus musculus
  siRNA target sequence for Lrba (NM_030695.1,2627-2645).
cttcagacaaatctaatca

SEQ ID NO: 688284 - DNA, 19 bp, Mus musculus
  siRNA target sequence for Lrba (NM_030695.1,2644-2662).
cacaatgaccatgtataat

SEQ ID NO: 688285 - DNA, 19 bp, Mus musculus
  siRNA target sequence for Lrba (NM_030695.1,2646-2664).
caatgaccatgtataatgt

SEQ ID NO: 688286 - DNA, 19 bp, Mus musculus
  siRNA target sequence for Lrba (NM_030695.1,2668-2686).
gtttgagattcttatagaa

SEQ ID NO: 688287 - DNA, 19 bp, Mus musculus
  siRNA target sequence for Lrba (NM_030695.1,2717-2735).
catccagatcccgattcta

SEQ ID NO: 688288 - DNA, 19 bp, Mus musculus
  siRNA target sequence for Lrba (NM_030695.1,2723-2741).
gatcccgattctacagtaa

SEQ ID NO: 688289 - DNA, 19 bp, Mus musculus
  siRNA target sequence for Lrba (NM_030695.1,2726-2744).
cccgattctacagtaaaaa

SEQ ID NO: 688290 - DNA, 19 bp, Mus musculus
  siRNA target sequence for Lrba (NM_030695.1,2727-2745).
ccgattctacagtaaaaat

SEQ ID NO: 688291 - DNA, 19 bp, Mus musculus
  siRNA target sequence for Lrba (NM_030695.1,2774-2792).
gcgaccctacttcgaaatt

SEQ ID NO: 688292 - DNA, 19 bp, Mus musculus
  siRNA target sequence for Lrba (NM_030695.1,2776-2794).
gaccctacttcgaaattct

SEQ ID NO: 688293 - DNA, 19 bp, Mus musculus
  siRNA target sequence for Lrba (NM_030695.1,2815-2833).
ggaggttcgccgagcattt

SEQ ID NO: 688294 - DNA, 19 bp, Mus musculus
  siRNA target sequence for Lrba (NM_030695.1,2818-2836).
ggttcgccgagcatttctt

SEQ ID NO: 688295 - DNA, 19 bp, Mus musculus
  siRNA target sequence for Lrba (NM_030695.1,2819-2837).
gttcgccgagcatttcttt

SEQ ID NO: 688296 - DNA, 19 bp, Mus musculus
  siRNA target sequence for Lrba (NM_030695.1,2823-2841).
gccgagcatttctttctga

SEQ ID NO: 688297 - DNA, 19 bp, Mus musculus
  siRNA target sequence for Lrba (NM_030695.1,2974-2992).
ggtgtacgccatattcaga

SEQ ID NO: 688298 - DNA, 19 bp, Mus musculus
  siRNA target sequence for Lrba (NM_030695.1,2975-2993).
gtgtacgccatattcagaa

SEQ ID NO: 688299 - DNA, 19 bp, Mus musculus
  siRNA target sequence for Lrba (NM_030695.1,2977-2995).
gtacgccatattcagaatt

SEQ ID NO: 688300 - DNA, 19 bp, Mus musculus
  siRNA target sequence for Lrba (NM_030695.1,2998-3016).
gctttaccatgcagtcaaa

SEQ ID NO: 688301 - DNA, 19 bp, Mus musculus
  siRNA target sequence for Lrba (NM_030695.1,2999-3017).
ctttaccatgcagtcaaat

SEQ ID NO: 688302 - DNA, 19 bp, Mus musculus
  siRNA target sequence for Lrba (NM_030695.1,3042-3060).
gggtagacaccttatccat

SEQ ID NO: 688303 - DNA, 19 bp, Mus musculus
  siRNA target sequence for Lrba (NM_030695.1,3058-3076).
catcacacattcaaaggtt

SEQ ID NO: 688304 - DNA, 19 bp, Mus musculus
  siRNA target sequence for Lrba (NM_030695.1,3189-3207).
ctactaggggtgttgatgt

SEQ ID NO: 688305 - DNA, 19 bp, Mus musculus
  siRNA target sequence for Lrba (NM_030695.1,3224-3242).
cacgaagatcggaaggatt

SEQ ID NO: 688306 - DNA, 19 bp, Mus musculus
  siRNA target sequence for Lrba (NM_030695.1,3243-3261).
ctcccatctctcctcattt

SEQ ID NO: 688307 - DNA, 19 bp, Mus musculus
  siRNA target sequence for Lrba (NM_030695.1,3245-3263).
cccatctctcctcatttca

SEQ ID NO: 688308 - DNA, 19 bp, Mus musculus
  siRNA target sequence for Lrba (NM_030695.1,3247-3265).
catctctcctcatttcact

SEQ ID NO: 688309 - DNA, 19 bp, Mus musculus
  siRNA target sequence for Lrba (NM_030695.1,3273-3291).
gtgatgagaactcaagtat

SEQ ID NO: 688310 - DNA, 19 bp, Mus musculus
  siRNA target sequence for Lrba (NM_030695.1,3295-3313).
gagggcaagttcaatagat

SEQ ID NO: 688311 - DNA, 19 bp, Mus musculus
  siRNA target sequence for Lrba (NM_030695.1,3334-3352).
gcagacacatgatatgtct

SEQ ID NO: 688312 - DNA, 19 bp, Mus musculus
  siRNA target sequence for Lrba (NM_030695.1,3335-3353).
cagacacatgatatgtcta

SEQ ID NO: 688313 - DNA, 19 bp, Mus musculus
  siRNA target sequence for Lrba (NM_030695.1,3354-3372).
gtgatgaaaagaaagtaga

SEQ ID NO: 688314 - DNA, 19 bp, Mus musculus
  siRNA target sequence for Lrba (NM_030695.1,3364-3382).
gaaagtagagcgagaaaat

SEQ ID NO: 688315 - DNA, 19 bp, Mus musculus
  siRNA target sequence for Lrba (NM_030695.1,3373-3391).
gcgagaaaatcaagagtta

SEQ ID NO: 688316 - DNA, 19 bp, Mus musculus
  siRNA target sequence for Lrba (NM_030695.1,3464-3482).
gcagagccagtgactatta

SEQ ID NO: 688317 - DNA, 19 bp, Mus musculus
  siRNA target sequence for Lrba (NM_030695.1,3471-3489).
cagtgactattaactctaa

SEQ ID NO: 688318 - DNA, 19 bp, Mus musculus
  siRNA target sequence for Lrba (NM_030695.1,3527-3545).
gaagtaagtgcttccataa

SEQ ID NO: 688319 - DNA, 19 bp, Mus musculus
  siRNA target sequence for Lrba (NM_030695.1,3567-3585).
ctgcagagatgccagaatt

SEQ ID NO: 688320 - DNA, 19 bp, Mus musculus
  siRNA target sequence for Lrba (NM_030695.1,3578-3596).
ccagaattactggaaaagt

SEQ ID NO: 688321 - DNA, 19 bp, Mus musculus
  siRNA target sequence for Lrba (NM_030695.1,3685-3703).
ccaaggtgagggtttgtct

SEQ ID NO: 688322 - DNA, 19 bp, Mus musculus
  siRNA target sequence for Lrba (NM_030695.1,3766-3784).
ggaagcacctattactaaa

SEQ ID NO: 688323 - DNA, 19 bp, Mus musculus
  siRNA target sequence for Lrba (NM_030695.1,3771-3789).
cacctattactaaaattca

SEQ ID NO: 688324 - DNA, 19 bp, Mus musculus
  siRNA target sequence for Lrba (NM_030695.1,3815-3833).
gaggattctaggtttccaa

SEQ ID NO: 688325 - DNA, 19 bp, Mus musculus
  siRNA target sequence for Lrba (NM_030695.1,3928-3946).
gatgaaagcaactaacctt

SEQ ID NO: 688326 - DNA, 19 bp, Mus musculus
  siRNA target sequence for Lrba (NM_030695.1,3971-3989).
gattgtgctgataatgtct

SEQ ID NO: 688327 - DNA, 19 bp, Mus musculus
  siRNA target sequence for Lrba (NM_030695.1,4052-4070).
gatactgagaggtttgaat

SEQ ID NO: 688328 - DNA, 19 bp, Mus musculus
  siRNA target sequence for Lrba (NM_030695.1,4056-4074).
ctgagaggtttgaattgaa

SEQ ID NO: 688329 - DNA, 19 bp, Mus musculus
  siRNA target sequence for Lrba (NM_030695.1,4109-4127).
cgacatgggcttgagatat

SEQ ID NO: 688330 - DNA, 19 bp, Mus musculus
  siRNA target sequence for Lrba (NM_030695.1,4112-4130).
catgggcttgagatatcaa

SEQ ID NO: 688331 - DNA, 19 bp, Mus musculus
  siRNA target sequence for Lrba (NM_030695.1,4166-4184).
gatgcagtagaccaacaaa

SEQ ID NO: 688332 - DNA, 19 bp, Mus musculus
  siRNA target sequence for Lrba (NM_030695.1,4319-4337).
gttatggacttcgtgaata

SEQ ID NO: 688333 - DNA, 19 bp, Mus musculus
  siRNA target sequence for Lrba (NM_030695.1,4330-4348).
cgtgaatagcagtgataat

SEQ ID NO: 688334 - DNA, 19 bp, Mus musculus
  siRNA target sequence for Lrba (NM_030695.1,4338-4356).
gcagtgataatgtcatctt

SEQ ID NO: 688335 - DNA, 19 bp, Mus musculus
  siRNA target sequence for Lrba (NM_030695.1,4354-4372).
ctttgtgcacaacacaatt

SEQ ID NO: 688336 - DNA, 19 bp, Mus musculus
  siRNA target sequence for Lrba (NM_030695.1,4643-4661).
gcagtagctgtaaggaatt

SEQ ID NO: 688337 - DNA, 19 bp, Mus musculus
  siRNA target sequence for Lrba (NM_030695.1,4710-4728).
caaagagctcgaaaacaat

SEQ ID NO: 688338 - DNA, 19 bp, Mus musculus
  siRNA target sequence for Lrba (NM_030695.1,4714-4732).
gagctcgaaaacaatacat

SEQ ID NO: 688339 - DNA, 19 bp, Mus musculus
  siRNA target sequence for Lrba (NM_030695.1,4738-4756).
gattcccatggggaaatct

SEQ ID NO: 688340 - DNA, 19 bp, Mus musculus
  siRNA target sequence for Lrba (NM_030695.1,4848-4866).
ggcttcgagcagttgtttt

SEQ ID NO: 688341 - DNA, 19 bp, Mus musculus
  siRNA target sequence for Lrba (NM_030695.1,4850-4868).
cttcgagcagttgttttca

SEQ ID NO: 688342 - DNA, 19 bp, Mus musculus
  siRNA target sequence for Lrba (NM_030695.1,4984-5002).
cagtcagtctcttaaggaa

SEQ ID NO: 688343 - DNA, 19 bp, Mus musculus
  siRNA target sequence for Lrba (NM_030695.1,4988-5006).
cagtctcttaaggaaacta

SEQ ID NO: 688344 - DNA, 19 bp, Mus musculus
  siRNA target sequence for Lrba (NM_030695.1,4999-5017).
ggaaactagtagtgataat

SEQ ID NO: 688345 - DNA, 19 bp, Mus musculus
  siRNA target sequence for Lrba (NM_030695.1,5051-5069).
ccagcagaatttagttctt

SEQ ID NO: 688346 - DNA, 19 bp, Mus musculus
  siRNA target sequence for Lrba (NM_030695.1,5054-5072).
gcagaatttagttctttaa

SEQ ID NO: 688347 - DNA, 19 bp, Mus musculus
  siRNA target sequence for Lrba (NM_030695.1,5075-5093).
ctgtcgtcggtggaagaat

SEQ ID NO: 688348 - DNA, 19 bp, Mus musculus
  siRNA target sequence for Lrba (NM_030695.1,5077-5095).
gtcgtcggtggaagaatca

SEQ ID NO: 688349 - DNA, 19 bp, Mus musculus
  siRNA target sequence for Lrba (NM_030695.1,5079-5097).
cgtcggtggaagaatcatt

SEQ ID NO: 688350 - DNA, 19 bp, Mus musculus
  siRNA target sequence for Lrba (NM_030695.1,5327-5345).
ccagtttcaaaaaatgtca

SEQ ID NO: 688351 - DNA, 19 bp, Mus musculus
  siRNA target sequence for Lrba (NM_030695.1,5459-5477).
ccacccatgcagttcagat

SEQ ID NO: 688352 - DNA, 19 bp, Mus musculus
  siRNA target sequence for Lrba (NM_030695.1,5490-5508).
gtgtcatcattgcaacaaa

SEQ ID NO: 688353 - DNA, 19 bp, Mus musculus
  siRNA target sequence for Lrba (NM_030695.1,5525-5543).
ccttccgcccttactacaa

SEQ ID NO: 688354 - DNA, 19 bp, Mus musculus
  siRNA target sequence for Lrba (NM_030695.1,5690-5708).
gctgcacacatgagtatta

SEQ ID NO: 688355 - DNA, 19 bp, Mus musculus
  siRNA target sequence for Lrba (NM_030695.1,5782-5800).
cctttctcggacactttta

SEQ ID NO: 688356 - DNA, 19 bp, Mus musculus
  siRNA target sequence for Lrba (NM_030695.1,5791-5809).
gacacttttaggtagtcat

SEQ ID NO: 688357 - DNA, 19 bp, Mus musculus
  siRNA target sequence for Lrba (NM_030695.1,5979-5997).
caatgaaggatcatttagt

SEQ ID NO: 688358 - DNA, 19 bp, Mus musculus
  siRNA target sequence for Lrba (NM_030695.1,5983-6001).
gaaggatcatttagtaaga

SEQ ID NO: 688359 - DNA, 19 bp, Mus musculus
  siRNA target sequence for Lrba (NM_030695.1,5986-6004).
ggatcatttagtaagagta

SEQ ID NO: 688360 - DNA, 19 bp, Mus musculus
  siRNA target sequence for Lrba (NM_030695.1,6113-6131).
gagaagatgtgtgatcatt

SEQ ID NO: 688361 - DNA, 19 bp, Mus musculus
  siRNA target sequence for Lrba (NM_030695.1,6133-6151).
gataagagcagctaaatat

SEQ ID NO: 688362 - DNA, 19 bp, Mus musculus
  siRNA target sequence for Lrba (NM_030695.1,6165-6183).
ccgcaactcagttaatcca

SEQ ID NO: 688363 - DNA, 19 bp, Mus musculus
  siRNA target sequence for Lrba (NM_030695.1,6377-6395).
gacatccttgctaaaggaa

SEQ ID NO: 688364 - DNA, 19 bp, Mus musculus
  siRNA target sequence for Lrba (NM_030695.1,6383-6401).
cttgctaaaggaaaacagt

SEQ ID NO: 688365 - DNA, 19 bp, Mus musculus
  siRNA target sequence for Lrba (NM_030695.1,6406-6424).
caagagtcaggctttagga

SEQ ID NO: 688366 - DNA, 19 bp, Mus musculus
  siRNA target sequence for Lrba (NM_030695.1,6475-6493).
gtcatccgtggatgagaaa

SEQ ID NO: 688367 - DNA, 19 bp, Mus musculus
  siRNA target sequence for Lrba (NM_030695.1,6481-6499).
cgtggatgagaaagattta

SEQ ID NO: 688368 - DNA, 19 bp, Mus musculus
  siRNA target sequence for Lrba (NM_030695.1,6619-6637).
ggatcccaacttcaagaaa

SEQ ID NO: 688369 - DNA, 19 bp, Mus musculus
  siRNA target sequence for Lrba (NM_030695.1,6709-6727).
cttttctcgccgttatctt

SEQ ID NO: 688370 - DNA, 19 bp, Mus musculus
  siRNA target sequence for Lrba (NM_030695.1,6714-6732).
ctcgccgttatcttttgca

SEQ ID NO: 688371 - DNA, 19 bp, Mus musculus
  siRNA target sequence for Lrba (NM_030695.1,6716-6734).
cgccgttatcttttgcaaa

SEQ ID NO: 688372 - DNA, 19 bp, Mus musculus
  siRNA target sequence for Lrba (NM_030695.1,6718-6736).
ccgttatcttttgcaaaat

SEQ ID NO: 688373 - DNA, 19 bp, Mus musculus
  siRNA target sequence for Lrba (NM_030695.1,6719-6737).
cgttatcttttgcaaaata

SEQ ID NO: 688374 - DNA, 19 bp, Mus musculus
  siRNA target sequence for Lrba (NM_030695.1,6765-6783).
gagttgctgtaatgttcaa

SEQ ID NO: 688375 - DNA, 19 bp, Mus musculus
  siRNA target sequence for Lrba (NM_030695.1,6767-6785).
gttgctgtaatgttcaact

SEQ ID NO: 688376 - DNA, 19 bp, Mus musculus
  siRNA target sequence for Lrba (NM_030695.1,6808-6826).
gaaagtggtgaactatcta

SEQ ID NO: 688377 - DNA, 19 bp, Mus musculus
  siRNA target sequence for Lrba (NM_030695.1,6841-6859).
gggaaccagttttggatta

SEQ ID NO: 688378 - DNA, 19 bp, Mus musculus
  siRNA target sequence for Lrba (NM_030695.1,6860-6878).
cctcagaccaggcgtattt

SEQ ID NO: 688379 - DNA, 19 bp, Mus musculus
  siRNA target sequence for Lrba (NM_030695.1,6863-6881).
cagaccaggcgtatttcat

SEQ ID NO: 688380 - DNA, 19 bp, Mus musculus
  siRNA target sequence for Lrba (NM_030695.1,6865-6883).
gaccaggcgtatttcatta

SEQ ID NO: 688381 - DNA, 19 bp, Mus musculus
  siRNA target sequence for Lrba (NM_030695.1,6885-6903).
ccactccacgtcagctatt

SEQ ID NO: 688382 - DNA, 19 bp, Mus musculus
  siRNA target sequence for Lrba (NM_030695.1,6888-6906).
ctccacgtcagctattcaa

SEQ ID NO: 688383 - DNA, 19 bp, Mus musculus
  siRNA target sequence for Lrba (NM_030695.1,6893-6911).
cgtcagctattcaaagctt

SEQ ID NO: 688384 - DNA, 19 bp, Mus musculus
  siRNA target sequence for Lrba (NM_030695.1,6898-6916).
gctattcaaagcttcaaat

SEQ ID NO: 688385 - DNA, 19 bp, Mus musculus
  siRNA target sequence for Lrba (NM_030695.1,6899-6917).
ctattcaaagcttcaaata

SEQ ID NO: 688386 - DNA, 19 bp, Mus musculus
  siRNA target sequence for Lrba (NM_030695.1,6948-6966).
caaacttcgagtacttgat

SEQ ID NO: 688387 - DNA, 19 bp, Mus musculus
  siRNA target sequence for Lrba (NM_030695.1,6964-6982).
gatgtttctcaacacaata

SEQ ID NO: 688388 - DNA, 19 bp, Mus musculus
  siRNA target sequence for Lrba (NM_030695.1,6967-6985).
gtttctcaacacaatagca

SEQ ID NO: 688389 - DNA, 19 bp, Mus musculus
  siRNA target sequence for Lrba (NM_030695.1,6984-7002).
cagggcggagttataatga

SEQ ID NO: 688390 - DNA, 19 bp, Mus musculus
  siRNA target sequence for Lrba (NM_030695.1,6990-7008).
ggagttataatgacctaaa

SEQ ID NO: 688391 - DNA, 19 bp, Mus musculus
  siRNA target sequence for Lrba (NM_030695.1,6993-7011).
gttataatgacctaaatca

SEQ ID NO: 688392 - DNA, 19 bp, Mus musculus
  siRNA target sequence for Lrba (NM_030695.1,7027-7045).
ctgggtcatcactaattat

SEQ ID NO: 688393 - DNA, 19 bp, Mus musculus
  siRNA target sequence for Lrba (NM_030695.1,7029-7047).
gggtcatcactaattatga

SEQ ID NO: 688394 - DNA, 19 bp, Mus musculus
  siRNA target sequence for Lrba (NM_030695.1,7031-7049).
gtcatcactaattatgagt

SEQ ID NO: 688395 - DNA, 19 bp, Mus musculus
  siRNA target sequence for Lrba (NM_030695.1,7064-7082).
cttaccttgccaagcaatt

SEQ ID NO: 688396 - DNA, 19 bp, Mus musculus
  siRNA target sequence for Lrba (NM_030695.1,7073-7091).
ccaagcaatttcagagatt

SEQ ID NO: 688397 - DNA, 19 bp, Mus musculus
  siRNA target sequence for Lrba (NM_030695.1,7119-7137).
ccaaacgagcagcattctt

SEQ ID NO: 688398 - DNA, 19 bp, Mus musculus
  siRNA target sequence for Lrba (NM_030695.1,7153-7171).
gtcatgggaagatgatcaa

SEQ ID NO: 688399 - DNA, 19 bp, Mus musculus
  siRNA target sequence for Lrba (NM_030695.1,7175-7193).
ccaaagttccactatggta

SEQ ID NO: 688400 - DNA, 19 bp, Mus musculus
  siRNA target sequence for Lrba (NM_030695.1,7180-7198).
gttccactatggtactcat

SEQ ID NO: 688401 - DNA, 19 bp, Mus musculus
  siRNA target sequence for Lrba (NM_030695.1,7186-7204).
ctatggtactcattactca

SEQ ID NO: 688402 - DNA, 19 bp, Mus musculus
  siRNA target sequence for Lrba (NM_030695.1,7217-7235).
gttcttgcgtggcttctaa

SEQ ID NO: 688403 - DNA, 19 bp, Mus musculus
  siRNA target sequence for Lrba (NM_030695.1,7220-7238).
cttgcgtggcttctaagaa

SEQ ID NO: 688404 - DNA, 19 bp, Mus musculus
  siRNA target sequence for Lrba (NM_030695.1,7224-7242).
cgtggcttctaagaataga

SEQ ID NO: 688405 - DNA, 19 bp, Mus musculus
  siRNA target sequence for Lrba (NM_030695.1,7225-7243).
gtggcttctaagaatagaa

SEQ ID NO: 688406 - DNA, 19 bp, Mus musculus
  siRNA target sequence for Lrba (NM_030695.1,7241-7259).
gaaccttttacaacttact

SEQ ID NO: 688407 - DNA, 19 bp, Mus musculus
  siRNA target sequence for Lrba (NM_030695.1,7339-7357).
gcgcgacacatctgacatt

SEQ ID NO: 688408 - DNA, 19 bp, Mus musculus
  siRNA target sequence for Lrba (NM_030695.1,7340-7358).
cgcgacacatctgacatta

SEQ ID NO: 688409 - DNA, 19 bp, Mus musculus
  siRNA target sequence for Lrba (NM_030695.1,7341-7359).
gcgacacatctgacattaa

SEQ ID NO: 688410 - DNA, 19 bp, Mus musculus
  siRNA target sequence for Lrba (NM_030695.1,7400-7418).
gtcaacttcaataattata

SEQ ID NO: 688411 - DNA, 19 bp, Mus musculus
  siRNA target sequence for Lrba (NM_030695.1,7443-7461).
cagtggtgtctgatgttga

SEQ ID NO: 688412 - DNA, 19 bp, Mus musculus
  siRNA target sequence for Lrba (NM_030695.1,7475-7493).
gccaaaacctcggaagaat

SEQ ID NO: 688413 - DNA, 19 bp, Mus musculus
  siRNA target sequence for Lrba (NM_030695.1,7476-7494).
ccaaaacctcggaagaatt

SEQ ID NO: 688414 - DNA, 19 bp, Mus musculus
  siRNA target sequence for Lrba (NM_030695.1,7490-7508).
gaattcgttcgcataaaca

SEQ ID NO: 688415 - DNA, 19 bp, Mus musculus
  siRNA target sequence for Lrba (NM_030695.1,7615-7633).
gttctattacctaacctat

SEQ ID NO: 688416 - DNA, 19 bp, Mus musculus
  siRNA target sequence for Lrba (NM_030695.1,7618-7636).
ctattacctaacctatgaa

SEQ ID NO: 688417 - DNA, 19 bp, Mus musculus
  siRNA target sequence for Lrba (NM_030695.1,7645-7663).
caacctgaactcaataact

SEQ ID NO: 688418 - DNA, 19 bp, Mus musculus
  siRNA target sequence for Lrba (NM_030695.1,7719-7737).
cttcgcaactgctcataga

SEQ ID NO: 688419 - DNA, 19 bp, Mus musculus
  siRNA target sequence for Lrba (NM_030695.1,7769-7787).
gcgagtccattgatgttca

SEQ ID NO: 688420 - DNA, 19 bp, Mus musculus
  siRNA target sequence for Lrba (NM_030695.1,7808-7826).
gtcatcatggtcctaaagt

SEQ ID NO: 688421 - DNA, 19 bp, Mus musculus
  siRNA target sequence for Lrba (NM_030695.1,7819-7837).
cctaaagttcccttcgaat

SEQ ID NO: 688422 - DNA, 19 bp, Mus musculus
  siRNA target sequence for Lrba (NM_030695.1,7820-7838).
ctaaagttcccttcgaatt

SEQ ID NO: 688423 - DNA, 19 bp, Mus musculus
  siRNA target sequence for Lrba (NM_030695.1,7916-7934).
ctctttgccgtgaacaagt

SEQ ID NO: 688424 - DNA, 19 bp, Mus musculus
  siRNA target sequence for Lrba (NM_030695.1,7993-8011).
ggaaatcgatcctctcata

SEQ ID NO: 688425 - DNA, 19 bp, Mus musculus
  siRNA target sequence for Lrba (NM_030695.1,8081-8099).
cagtgcttcgtcatcactt

SEQ ID NO: 688426 - DNA, 19 bp, Mus musculus
  siRNA target sequence for Lrba (NM_030695.1,8100-8118).
ccgacaaccgctacattct

SEQ ID NO: 688427 - DNA, 19 bp, Mus musculus
  siRNA target sequence for Lrba (NM_030695.1,8126-8144).
ggcttctgggataagagtt

SEQ ID NO: 688428 - DNA, 19 bp, Mus musculus
  siRNA target sequence for Lrba (NM_030695.1,8147-8165).
cgggtctactccacagata

SEQ ID NO: 688429 - DNA, 19 bp, Mus musculus
  siRNA target sequence for Lrba (NM_030695.1,8310-8328).
gcagcgggattggagataa

SEQ ID NO: 688430 - DNA, 19 bp, Mus musculus
  siRNA target sequence for Lrba (NM_030695.1,8410-8428).
gctgggcctggtgttaagt

SEQ ID NO: 688431 - DNA, 19 bp, Mus musculus
  siRNA target sequence for Lrba (NM_030695.1,8505-8523).
gcctgaaaccaaaactcat

SEQ ID NO: 688432 - DNA, 19 bp, Mus musculus
  siRNA target sequence for Lrba (NM_030695.1,8541-8559).
gtcactgtgtcatcttcta

SEQ ID NO: 688433 - DNA, 19 bp, Mus musculus
  siRNA target sequence for Lrba (NM_030695.1,8610-8628).
ccgtggagacggatgatca

SEQ ID NO: 688434 - DNA, 19 bp, Mus musculus
  siRNA target sequence for Lrba (NM_030695.1,8614-8632).
ggagacggatgatcacata

SEQ ID NO: 688435 - DNA, 19 bp, Mus musculus
  siRNA target sequence for Lrba (NM_030695.1,8615-8633).
gagacggatgatcacataa

SEQ ID NO: 688436 - DNA, 19 bp, Mus musculus
  siRNA target sequence for Lrba (NM_030695.1,8780-8798).
gaccagaggtgcatcattt

SEQ ID NO: 688437 - DNA, 19 bp, Mus musculus
  siRNA target sequence for Lrba (NM_030695.1,8814-8832).
gaagcattgtcctgtttta

SEQ ID NO: 688438 - DNA, 19 bp, Mus musculus
  siRNA target sequence for Lrba (NM_030695.1,8817-8835).
gcattgtcctgttttacaa

SEQ ID NO: 688439 - DNA, 19 bp, Mus musculus
  siRNA target sequence for Lrba (NM_030695.1,8822-8840).
gtcctgttttacaatgact

SEQ ID NO: 688440 - DNA, 19 bp, Mus musculus
  siRNA target sequence for Acrv1 (NM_007391.1,164-182).
gcttcggttcagcaacttt

SEQ ID NO: 688441 - DNA, 19 bp, Mus musculus
  siRNA target sequence for Acrv1 (NM_007391.1,213-231).
cagatgccgaggctttata

SEQ ID NO: 688442 - DNA, 19 bp, Mus musculus
  siRNA target sequence for Acrv1 (NM_007391.1,218-236).
gccgaggctttatatgaaa

SEQ ID NO: 688443 - DNA, 19 bp, Mus musculus
  siRNA target sequence for Acrv1 (NM_007391.1,220-238).
cgaggctttatatgaaact

SEQ ID NO: 688444 - DNA, 19 bp, Mus musculus
  siRNA target sequence for Acrv1 (NM_007391.1,253-271).
gactctgagtggtcatagt

SEQ ID NO: 688445 - DNA, 19 bp, Mus musculus
  siRNA target sequence for Acrv1 (NM_007391.1,259-277).
gagtggtcatagttcaagt

SEQ ID NO: 688446 - DNA, 19 bp, Mus musculus
  siRNA target sequence for Acrv1 (NM_007391.1,439-457).
gcacacttcaggtgaacaa

SEQ ID NO: 688447 - DNA, 19 bp, Mus musculus
  siRNA target sequence for Acrv1 (NM_007391.1,487-505).
gccctccgaagcatcttca

SEQ ID NO: 688448 - DNA, 19 bp, Mus musculus
  siRNA target sequence for Acrv1 (NM_007391.1,497-515).
gcatcttcaggtgaagttt

SEQ ID NO: 688449 - DNA, 19 bp, Mus musculus
  siRNA target sequence for Acrv1 (NM_007391.1,538-556).
ggtgtctagcgagacaaat

SEQ ID NO: 688450 - DNA, 19 bp, Mus musculus
  siRNA target sequence for Acrv1 (NM_007391.1,543-561).
ctagcgagacaaatgacaa

SEQ ID NO: 688451 - DNA, 19 bp, Mus musculus
  siRNA target sequence for Acrv1 (NM_007391.1,563-581).
gaaaatgatgctatgagta

SEQ ID NO: 688452 - DNA, 19 bp, Mus musculus
  siRNA target sequence for Acrv1 (NM_007391.1,621-639).
gccacacatgtgcttatat

SEQ ID NO: 688453 - DNA, 19 bp, Mus musculus
  siRNA target sequence for Acrv1 (NM_007391.1,630-648).
gtgcttatatgaatgatga

SEQ ID NO: 688454 - DNA, 19 bp, Mus musculus
  siRNA target sequence for Acrv1 (NM_007391.1,640-658).
gaatgatgatgcaaaatgt

SEQ ID NO: 688455 - DNA, 19 bp, Mus musculus
  siRNA target sequence for Acrv1 (NM_007391.1,671-689).
ggagtatgcaccactcaaa

SEQ ID NO: 688456 - DNA, 19 bp, Mus musculus
  siRNA target sequence for Acrv1 (NM_007391.1,693-711).
cccagcagtgcatgttaaa

SEQ ID NO: 688457 - DNA, 19 bp, Mus musculus
  siRNA target sequence for Acrv1 (NM_007391.1,726-744).
gtggaaaactccagttcat

SEQ ID NO: 688458 - DNA, 19 bp, Mus musculus
  siRNA target sequence for Acrv1 (NM_007391.1,749-767).
caagggtgtgagaacatgt

SEQ ID NO: 688459 - DNA, 19 bp, Mus musculus
  siRNA target sequence for Acrv1 (NM_007391.1,794-812).
ggaacaagaatgcaaatta

SEQ ID NO: 688460 - DNA, 19 bp, Mus musculus
  siRNA target sequence for Acrv1 (NM_007391.1,795-813).
gaacaagaatgcaaattat

SEQ ID NO: 688461 - DNA, 19 bp, Mus musculus
  siRNA target sequence for Cd68 (NM_009853.1,24-42).
cttgctaggaccgcttata

SEQ ID NO: 688462 - DNA, 19 bp, Mus musculus
  siRNA target sequence for Cd68 (NM_009853.1,164-182).
ccaccagtcacggaaatgt

SEQ ID NO: 688463 - DNA, 19 bp, Mus musculus
  siRNA target sequence for Cd68 (NM_009853.1,373-391).
ggggctcttgggaactaca

SEQ ID NO: 688464 - DNA, 19 bp, Mus musculus
  siRNA target sequence for Cd68 (NM_009853.1,402-420).
cggctcccagccttgtgtt

SEQ ID NO: 688465 - DNA, 19 bp, Mus musculus
  siRNA target sequence for Cd68 (NM_009853.1,446-464).
gaatcctatacccaattca

SEQ ID NO: 688466 - DNA, 19 bp, Mus musculus
  siRNA target sequence for Cd68 (NM_009853.1,463-481).
cagggtggaagaaaggtaa

SEQ ID NO: 688467 - DNA, 19 bp, Mus musculus
  siRNA target sequence for Cd68 (NM_009853.1,484-502).
ctaaagtggggcttaaaga

SEQ ID NO: 688468 - DNA, 19 bp, Mus musculus
  siRNA target sequence for Cd68 (NM_009853.1,503-521).
gggcttggggcatatctgt

SEQ ID NO: 688469 - DNA, 19 bp, Mus musculus
  siRNA target sequence for Cd68 (NM_009853.1,504-522).
ggcttggggcatatctgtt

SEQ ID NO: 688470 - DNA, 19 bp, Mus musculus
  siRNA target sequence for Cd68 (NM_009853.1,506-524).
cttggggcatatctgtttt

SEQ ID NO: 688471 - DNA, 19 bp, Mus musculus
  siRNA target sequence for Cd68 (NM_009853.1,509-527).
ggggcatatctgttttgaa

SEQ ID NO: 688472 - DNA, 19 bp, Mus musculus
  siRNA target sequence for Cd68 (NM_009853.1,510-528).
gggcatatctgttttgaat

SEQ ID NO: 688473 - DNA, 19 bp, Mus musculus
  siRNA target sequence for Cd68 (NM_009853.1,599-617).
gacagcttacctttggatt

SEQ ID NO: 688474 - DNA, 19 bp, Mus musculus
  siRNA target sequence for Cd68 (NM_009853.1,667-685).
gcggtggaatacaatgtgt

SEQ ID NO: 688475 - DNA, 19 bp, Mus musculus
  siRNA target sequence for Cd68 (NM_009853.1,717-735).
ggcgcagaattcatctctt

SEQ ID NO: 688476 - DNA, 19 bp, Mus musculus
  siRNA target sequence for Cd68 (NM_009853.1,749-767).
ctcccttgggccaaagctt

SEQ ID NO: 688477 - DNA, 19 bp, Mus musculus
  siRNA target sequence for Cd68 (NM_009853.1,860-878).
gacacttcgggccatgttt

SEQ ID NO: 688478 - DNA, 19 bp, Mus musculus
  siRNA target sequence for Cd68 (NM_009853.1,862-880).
cacttcgggccatgtttct

SEQ ID NO: 688479 - DNA, 19 bp, Mus musculus
  siRNA target sequence for Cd68 (NM_009853.1,864-882).
cttcgggccatgtttctct

SEQ ID NO: 688480 - DNA, 19 bp, Mus musculus
  siRNA target sequence for Cd68 (NM_009853.1,972-990).
cacccgcagacgacaatca

SEQ ID NO: 688481 - DNA, 19 bp, Mus musculus
  siRNA target sequence for Cln3 (NM_009907.2,201-219).
ggcgccttgaggattctga

SEQ ID NO: 688482 - DNA, 19 bp, Mus musculus
  siRNA target sequence for Cln3 (NM_009907.2,245-263).
caggcccctcggttggata

SEQ ID NO: 688483 - DNA, 19 bp, Mus musculus
  siRNA target sequence for Cln3 (NM_009907.2,264-282).
gtcggagtgtcctttggaa

SEQ ID NO: 688484 - DNA, 19 bp, Mus musculus
  siRNA target sequence for Cln3 (NM_009907.2,300-318).
ggatcttgggtctttgcaa

SEQ ID NO: 688485 - DNA, 19 bp, Mus musculus
  siRNA target sequence for Cln3 (NM_009907.2,304-322).
cttgggtctttgcaacaat

SEQ ID NO: 688486 - DNA, 19 bp, Mus musculus
  siRNA target sequence for Cln3 (NM_009907.2,308-326).
ggtctttgcaacaatttct

SEQ ID NO: 688487 - DNA, 19 bp, Mus musculus
  siRNA target sequence for Cln3 (NM_009907.2,427-445).
caacagctcatctcgattt

SEQ ID NO: 688488 - DNA, 19 bp, Mus musculus
  siRNA target sequence for Cln3 (NM_009907.2,495-513).
ccacccttgtcatcaaact

SEQ ID NO: 688489 - DNA, 19 bp, Mus musculus
  siRNA target sequence for Cln3 (NM_009907.2,800-818).
ccgcagcacaccctacttt

SEQ ID NO: 688490 - DNA, 19 bp, Mus musculus
  siRNA target sequence for Cln3 (NM_009907.2,1013-1031).
ggtctcttgtggtacatca

SEQ ID NO: 688491 - DNA, 19 bp, Mus musculus
  siRNA target sequence for Cln3 (NM_009907.2,1014-1032).
gtctcttgtggtacatcat

SEQ ID NO: 688492 - DNA, 19 bp, Mus musculus
  siRNA target sequence for Cln3 (NM_009907.2,1133-1151).
cgatggtaccagatgctat

SEQ ID NO: 688493 - DNA, 19 bp, Mus musculus
  siRNA target sequence for Cln3 (NM_009907.2,1137-1155).
ggtaccagatgctatacca

SEQ ID NO: 688494 - DNA, 19 bp, Mus musculus
  siRNA target sequence for Lamp1 (NM_010684.1,179-197).
gcactctttgaggtgaaaa

SEQ ID NO: 688495 - DNA, 19 bp, Mus musculus
  siRNA target sequence for Lamp1 (NM_010684.1,180-198).
cactctttgaggtgaaaaa

SEQ ID NO: 688496 - DNA, 19 bp, Mus musculus
  siRNA target sequence for Lamp1 (NM_010684.1,199-217).
caatggcacaacgtgtata

SEQ ID NO: 688497 - DNA, 19 bp, Mus musculus
  siRNA target sequence for Lamp1 (NM_010684.1,321-339).
gcagttcttgtggtaaaga

SEQ ID NO: 688498 - DNA, 19 bp, Mus musculus
  siRNA target sequence for Lamp1 (NM_010684.1,359-377).
ctcacaattacttttggaa

SEQ ID NO: 688499 - DNA, 19 bp, Mus musculus
  siRNA target sequence for Lamp1 (NM_010684.1,420-438).
gttacagtgtccagcatat

SEQ ID NO: 688500 - DNA, 19 bp, Mus musculus
  siRNA target sequence for Lamp1 (NM_010684.1,424-442).
cagtgtccagcatatgtat

SEQ ID NO: 688501 - DNA, 19 bp, Mus musculus
  siRNA target sequence for Lamp1 (NM_010684.1,428-446).
gtccagcatatgtatttta

SEQ ID NO: 688502 - DNA, 19 bp, Mus musculus
  siRNA target sequence for Lamp1 (NM_010684.1,561-579).
gtgatatccgggtctacat

SEQ ID NO: 688503 - DNA, 19 bp, Mus musculus
  siRNA target sequence for Lamp1 (NM_010684.1,563-581).
gatatccgggtctacatga

SEQ ID NO: 688504 - DNA, 19 bp, Mus musculus
  siRNA target sequence for Lamp1 (NM_010684.1,626-644).
ctgtcgagtggcaacttca

SEQ ID NO: 688505 - DNA, 19 bp, Mus musculus
  siRNA target sequence for Lamp1 (NM_010684.1,722-740).
cccacaaaccccactgtat

SEQ ID NO: 688506 - DNA, 19 bp, Mus musculus
  siRNA target sequence for Lamp1 (NM_010684.1,732-750).
ccactgtatccaagtacaa

SEQ ID NO: 688507 - DNA, 19 bp, Mus musculus
  siRNA target sequence for Lamp1 (NM_010684.1,735-753).
ctgtatccaagtacaatgt

SEQ ID NO: 688508 - DNA, 19 bp, Mus musculus
  siRNA target sequence for Lamp1 (NM_010684.1,737-755).
gtatccaagtacaatgtta

SEQ ID NO: 688509 - DNA, 19 bp, Mus musculus
  siRNA target sequence for Lamp1 (NM_010684.1,786-804).
ctatggcactgcaactgaa

SEQ ID NO: 688510 - DNA, 19 bp, Mus musculus
  siRNA target sequence for Lamp1 (NM_010684.1,859-877).
cccaaatgacacatctagt

SEQ ID NO: 688511 - DNA, 19 bp, Mus musculus
  siRNA target sequence for Lamp1 (NM_010684.1,876-894).
gtgggagttgcggtatcaa

SEQ ID NO: 688512 - DNA, 19 bp, Mus musculus
  siRNA target sequence for Lamp1 (NM_010684.1,1070-1088).
gtgggaaactcatacaagt

SEQ ID NO: 688513 - DNA, 19 bp, Mus musculus
  siRNA target sequence for Lamp1 (NM_010684.1,1089-1107).
gcaacactgaggaacacat

SEQ ID NO: 688514 - DNA, 19 bp, Mus musculus
  siRNA target sequence for Lamp1 (NM_010684.1,1095-1113).
ctgaggaacacatctttgt

SEQ ID NO: 688515 - DNA, 19 bp, Mus musculus
  siRNA target sequence for Lamp1 (NM_010684.1,1200-1218).
gtgttcaggatggtaacaa

SEQ ID NO: 688516 - DNA, 19 bp, Mus musculus
  siRNA target sequence for Laptm5 (NM_010686.2,91-109).
gccatttaccacatagtca

SEQ ID NO: 688517 - DNA, 19 bp, Mus musculus
  siRNA target sequence for Laptm5 (NM_010686.2,92-110).
ccatttaccacatagtcat

SEQ ID NO: 688518 - DNA, 19 bp, Mus musculus
  siRNA target sequence for Laptm5 (NM_010686.2,229-247).
ggcgtgctcttcatcatca

SEQ ID NO: 688519 - DNA, 19 bp, Mus musculus
  siRNA target sequence for Laptm5 (NM_010686.2,298-316).
cccttcctgtcccttcaaa

SEQ ID NO: 688520 - DNA, 19 bp, Mus musculus
  siRNA target sequence for Laptm5 (NM_010686.2,349-367).
ctgggctcctacatcgaat

SEQ ID NO: 688521 - DNA, 19 bp, Mus musculus
  siRNA target sequence for Laptm5 (NM_010686.2,364-382).
gaattgccagcgtacttga

SEQ ID NO: 688522 - DNA, 19 bp, Mus musculus
  siRNA target sequence for Laptm5 (NM_010686.2,512-530).
ccatgaaccacatgaatta

SEQ ID NO: 688523 - DNA, 19 bp, Mus musculus
  siRNA target sequence for Laptm5 (NM_010686.2,553-571).
ccgcacagccagttcatca

SEQ ID NO: 688524 - DNA, 19 bp, Mus musculus
  siRNA target sequence for Laptm5 (NM_010686.2,647-665).
catgctacaaattcttgaa

SEQ ID NO: 688525 - DNA, 19 bp, Mus musculus
  siRNA target sequence for Mpv17 (NM_008622.1,130-148).
ggcgtaggtgacatgatct

SEQ ID NO: 688526 - DNA, 19 bp, Mus musculus
  siRNA target sequence for Mpv17 (NM_008622.1,243-261).
cgtcggaggctggtacaaa

SEQ ID NO: 688527 - DNA, 19 bp, Mus musculus
  siRNA target sequence for Mpv17 (NM_008622.1,247-265).
ggaggctggtacaaagttt

SEQ ID NO: 688528 - DNA, 19 bp, Mus musculus
  siRNA target sequence for Mpv17 (NM_008622.1,306-324).
gaagaagatgttgttagat

SEQ ID NO: 688529 - DNA, 19 bp, Mus musculus
  siRNA target sequence for Mpv17 (NM_008622.1,364-382).
ccactggtcgggatactca

SEQ ID NO: 688530 - DNA, 19 bp, Mus musculus
  siRNA target sequence for Mpv17 (NM_008622.1,365-383).
cactggtcgggatactcaa

SEQ ID NO: 688531 - DNA, 19 bp, Mus musculus
  siRNA target sequence for Mpv17 (NM_008622.1,370-388).
gtcgggatactcaatggaa

SEQ ID NO: 688532 - DNA, 19 bp, Mus musculus
  siRNA target sequence for Mpv17 (NM_008622.1,375-393).
gatactcaatggaatgtca

SEQ ID NO: 688533 - DNA, 19 bp, Mus musculus
  siRNA target sequence for Mpv17 (NM_008622.1,437-455).
ccctcatcaccaactacta

SEQ ID NO: 688534 - DNA, 19 bp, Mus musculus
  siRNA target sequence for Mpv17 (NM_008622.1,469-487).
gtgcagttagccaacttct

SEQ ID NO: 688535 - DNA, 19 bp, Mus musculus
  siRNA target sequence for Mpv17 (NM_008622.1,490-508).
ctggtccccctgcattaca

SEQ ID NO: 688536 - DNA, 19 bp, Mus musculus
  siRNA target sequence for Pex12 (NM_134025.2,296-314).
cgaccagccatccatcttt

SEQ ID NO: 688537 - DNA, 19 bp, Mus musculus
  siRNA target sequence for Pex12 (NM_134025.2,320-338).
ggtagcacaggacagttta

SEQ ID NO: 688538 - DNA, 19 bp, Mus musculus
  siRNA target sequence for Pex12 (NM_134025.2,321-339).
gtagcacaggacagtttaa

SEQ ID NO: 688539 - DNA, 19 bp, Mus musculus
  siRNA target sequence for Pex12 (NM_134025.2,374-392).
caaggttcttgcagaatca

SEQ ID NO: 688540 - DNA, 19 bp, Mus musculus
  siRNA target sequence for Pex12 (NM_134025.2,413-431).
cctctggcggtggtttgat

SEQ ID NO: 688541 - DNA, 19 bp, Mus musculus
  siRNA target sequence for Pex12 (NM_134025.2,416-434).
ctggcggtggtttgatgaa

SEQ ID NO: 688542 - DNA, 19 bp, Mus musculus
  siRNA target sequence for Pex12 (NM_134025.2,464-482).
gcagcattatctttctaga

SEQ ID NO: 688543 - DNA, 19 bp, Mus musculus
  siRNA target sequence for Pex12 (NM_134025.2,484-502).
ctagtgcctcattttctga

SEQ ID NO: 688544 - DNA, 19 bp, Mus musculus
  siRNA target sequence for Pex12 (NM_134025.2,535-553).
ggagctcgccgcatcttca

SEQ ID NO: 688545 - DNA, 19 bp, Mus musculus
  siRNA target sequence for Pex12 (NM_134025.2,618-636).
cttccctatctgaaagtga

SEQ ID NO: 688546 - DNA, 19 bp, Mus musculus
  siRNA target sequence for Pex12 (NM_134025.2,666-684).
gaagaagacgaatactcta

SEQ ID NO: 688547 - DNA, 19 bp, Mus musculus
  siRNA target sequence for Pex12 (NM_134025.2,697-715).
cttctcgctggaaacgatt

SEQ ID NO: 688548 - DNA, 19 bp, Mus musculus
  siRNA target sequence for Pex12 (NM_134025.2,700-718).
ctcgctggaaacgattcta

SEQ ID NO: 688549 - DNA, 19 bp, Mus musculus
  siRNA target sequence for Pex12 (NM_134025.2,702-720).
cgctggaaacgattctaca

SEQ ID NO: 688550 - DNA, 19 bp, Mus musculus
  siRNA target sequence for Pex12 (NM_134025.2,767-785).
ctggtttcttacacaacaa

SEQ ID NO: 688551 - DNA, 19 bp, Mus musculus
  siRNA target sequence for Pex12 (NM_134025.2,769-787).
ggtttcttacacaacaact

SEQ ID NO: 688552 - DNA, 19 bp, Mus musculus
  siRNA target sequence for Pex12 (NM_134025.2,778-796).
cacaacaactgcgttacat

SEQ ID NO: 688553 - DNA, 19 bp, Mus musculus
  siRNA target sequence for Pex12 (NM_134025.2,780-798).
caacaactgcgttacatct

SEQ ID NO: 688554 - DNA, 19 bp, Mus musculus
  siRNA target sequence for Pex12 (NM_134025.2,865-883).
ctcaggacatgcaagctat

SEQ ID NO: 688555 - DNA, 19 bp, Mus musculus
  siRNA target sequence for Pex12 (NM_134025.2,931-949).
gcgttggtgagaagataaa

SEQ ID NO: 688556 - DNA, 19 bp, Mus musculus
  siRNA target sequence for Pex12 (NM_134025.2,933-951).
gttggtgagaagataaagt

SEQ ID NO: 688557 - DNA, 19 bp, Mus musculus
  siRNA target sequence for Pex12 (NM_134025.2,1055-1073).
gaaccaagaagccatcaaa

SEQ ID NO: 688558 - DNA, 19 bp, Mus musculus
  siRNA target sequence for Pex12 (NM_134025.2,1113-1131).
ctagactacaactctgatt

SEQ ID NO: 688559 - DNA, 19 bp, Mus musculus
  siRNA target sequence for Pex12 (NM_134025.2,1132-1150).
ctcccctcttacccaaaat

SEQ ID NO: 688560 - DNA, 19 bp, Mus musculus
  siRNA target sequence for Pex12 (NM_134025.2,1136-1154).
cctcttacccaaaatgaaa

SEQ ID NO: 688561 - DNA, 19 bp, Mus musculus
  siRNA target sequence for Pex12 (NM_134025.2,1160-1178).
gtgcccactctgtcgtaaa

SEQ ID NO: 688562 - DNA, 19 bp, Mus musculus
  siRNA target sequence for Pex12 (NM_134025.2,1163-1181).
cccactctgtcgtaaaact

SEQ ID NO: 688563 - DNA, 19 bp, Mus musculus
  siRNA target sequence for Pex12 (NM_134025.2,1174-1192).
gtaaaactcgagtgaatga

SEQ ID NO: 688564 - DNA, 19 bp, Mus musculus
  siRNA target sequence for Pex12 (NM_134025.2,1223-1241).
ctgttaccgctgtgtgttt

SEQ ID NO: 688565 - DNA, 19 bp, Mus musculus
  siRNA target sequence for Pex12 (NM_134025.2,1225-1243).
gttaccgctgtgtgtttaa

SEQ ID NO: 688566 - DNA, 19 bp, Mus musculus
  siRNA target sequence for Pex12 (NM_134025.2,1229-1247).
ccgctgtgtgtttaattat

SEQ ID NO: 688567 - DNA, 19 bp, Mus musculus
  siRNA target sequence for Pex12 (NM_134025.2,1290-1308).
gaagtccagcatctaatta

SEQ ID NO: 688568 - DNA, 19 bp, Mus musculus
  siRNA target sequence for Pex12 (NM_134025.2,1296-1314).
cagcatctaattaaactct

SEQ ID NO: 688569 - DNA, 19 bp, Mus musculus
  siRNA target sequence for Pex13 (NM_023651.2,124-142).
ctgggagtctcgcagaatt

SEQ ID NO: 688570 - DNA, 19 bp, Mus musculus
  siRNA target sequence for Pex13 (NM_023651.2,183-201).
cttaccaatctgctgattt

SEQ ID NO: 688571 - DNA, 19 bp, Mus musculus
  siRNA target sequence for Pex13 (NM_023651.2,202-220).
gggccctactttattgaca

SEQ ID NO: 688572 - DNA, 19 bp, Mus musculus
  siRNA target sequence for Pex13 (NM_023651.2,203-221).
ggccctactttattgacaa

SEQ ID NO: 688573 - DNA, 19 bp, Mus musculus
  siRNA target sequence for Pex13 (NM_023651.2,347-365).
gcctacggaaattcatttt

SEQ ID NO: 688574 - DNA, 19 bp, Mus musculus
  siRNA target sequence for Pex13 (NM_023651.2,348-366).
cctacggaaattcatttta

SEQ ID NO: 688575 - DNA, 19 bp, Mus musculus
  siRNA target sequence for Pex13 (NM_023651.2,349-367).
ctacggaaattcattttat

SEQ ID NO: 688576 - DNA, 19 bp, Mus musculus
  siRNA target sequence for Pex13 (NM_023651.2,352-370).
cggaaattcattttatgga

SEQ ID NO: 688577 - DNA, 19 bp, Mus musculus
  siRNA target sequence for Pex13 (NM_023651.2,368-386).
ggaagctatagcccttata

SEQ ID NO: 688578 - DNA, 19 bp, Mus musculus
  siRNA target sequence for Pex13 (NM_023651.2,387-405).
gttatggatacaatggttt

SEQ ID NO: 688579 - DNA, 19 bp, Mus musculus
  siRNA target sequence for Pex13 (NM_023651.2,417-435).
gcctccgtgtagatgatct

SEQ ID NO: 688580 - DNA, 19 bp, Mus musculus
  siRNA target sequence for Pex13 (NM_023651.2,418-436).
cctccgtgtagatgatctt

SEQ ID NO: 688581 - DNA, 19 bp, Mus musculus
  siRNA target sequence for Pex13 (NM_023651.2,438-456).
ctcccagtaggtttgttca

SEQ ID NO: 688582 - DNA, 19 bp, Mus musculus
  siRNA target sequence for Pex13 (NM_023651.2,471-489).
gcagcagaggtgcatttca

SEQ ID NO: 688583 - DNA, 19 bp, Mus musculus
  siRNA target sequence for Pex13 (NM_023651.2,518-536).
gcctctgtcagcatgatga

SEQ ID NO: 688584 - DNA, 19 bp, Mus musculus
  siRNA target sequence for Pex13 (NM_023651.2,519-537).
cctctgtcagcatgatgat

SEQ ID NO: 688585 - DNA, 19 bp, Mus musculus
  siRNA target sequence for Pex13 (NM_023651.2,532-550).
gatgatggatgctaccttt

SEQ ID NO: 688586 - DNA, 19 bp, Mus musculus
  siRNA target sequence for Pex13 (NM_023651.2,546-564).
ccttttcagccgtctataa

SEQ ID NO: 688587 - DNA, 19 bp, Mus musculus
  siRNA target sequence for Pex13 (NM_023651.2,552-570).
cagccgtctataacagttt

SEQ ID NO: 688588 - DNA, 19 bp, Mus musculus
  siRNA target sequence for Pex13 (NM_023651.2,554-572).
gccgtctataacagtttca

SEQ ID NO: 688589 - DNA, 19 bp, Mus musculus
  siRNA target sequence for Pex13 (NM_023651.2,583-601).
ggatgtagcaaatcacttt

SEQ ID NO: 688590 - DNA, 19 bp, Mus musculus
  siRNA target sequence for Pex13 (NM_023651.2,596-614).
cacttttcccggctaaaaa

SEQ ID NO: 688591 - DNA, 19 bp, Mus musculus
  siRNA target sequence for Pex13 (NM_023651.2,603-621).
cccggctaaaaatacactt

SEQ ID NO: 688592 - DNA, 19 bp, Mus musculus
  siRNA target sequence for Pex13 (NM_023651.2,604-622).
ccggctaaaaatacacttt

SEQ ID NO: 688593 - DNA, 19 bp, Mus musculus
  siRNA target sequence for Pex13 (NM_023651.2,605-623).
cggctaaaaatacacttta

SEQ ID NO: 688594 - DNA, 19 bp, Mus musculus
  siRNA target sequence for Pex13 (NM_023651.2,668-686).
ctttatagacggttacagt

SEQ ID NO: 688595 - DNA, 19 bp, Mus musculus
  siRNA target sequence for Pex13 (NM_023651.2,685-703).
gtggatgatgggtttaaga

SEQ ID NO: 688596 - DNA, 19 bp, Mus musculus
  siRNA target sequence for Pex13 (NM_023651.2,769-787).
ggaccaggcaactaactca

SEQ ID NO: 688597 - DNA, 19 bp, Mus musculus
  siRNA target sequence for Pex13 (NM_023651.2,775-793).
ggcaactaactcagcaaaa

SEQ ID NO: 688598 - DNA, 19 bp, Mus musculus
  siRNA target sequence for Pex13 (NM_023651.2,776-794).
gcaactaactcagcaaaat

SEQ ID NO: 688599 - DNA, 19 bp, Mus musculus
  siRNA target sequence for Pex13 (NM_023651.2,788-806).
gcaaaatcttggccaatat

SEQ ID NO: 688600 - DNA, 19 bp, Mus musculus
  siRNA target sequence for Pex13 (NM_023651.2,789-807).
caaaatcttggccaatatt

SEQ ID NO: 688601 - DNA, 19 bp, Mus musculus
  siRNA target sequence for Pex13 (NM_023651.2,798-816).
ggccaatattcctgttctt

SEQ ID NO: 688602 - DNA, 19 bp, Mus musculus
  siRNA target sequence for Pex13 (NM_023651.2,811-829).
gttctttgctgttatcctt

SEQ ID NO: 688603 - DNA, 19 bp, Mus musculus
  siRNA target sequence for Pex13 (NM_023651.2,827-845).
cttggcggtccttatctca

SEQ ID NO: 688604 - DNA, 19 bp, Mus musculus
  siRNA target sequence for Pex13 (NM_023651.2,847-865).
ctggaaacttctatctaca

SEQ ID NO: 688605 - DNA, 19 bp, Mus musculus
  siRNA target sequence for Pex13 (NM_023651.2,926-944).
gcaagagcagagtacgatt

SEQ ID NO: 688606 - DNA, 19 bp, Mus musculus
  siRNA target sequence for Pex13 (NM_023651.2,927-945).
caagagcagagtacgattt

SEQ ID NO: 688607 - DNA, 19 bp, Mus musculus
  siRNA target sequence for Pex13 (NM_023651.2,930-948).
gagcagagtacgattttgt

SEQ ID NO: 688608 - DNA, 19 bp, Mus musculus
  siRNA target sequence for Pex13 (NM_023651.2,972-990).
ctttccgtgctggtgatat

SEQ ID NO: 688609 - DNA, 19 bp, Mus musculus
  siRNA target sequence for Pex13 (NM_023651.2,977-995).
cgtgctggtgatatgctaa

SEQ ID NO: 688610 - DNA, 19 bp, Mus musculus
  siRNA target sequence for Pex13 (NM_023651.2,980-998).
gctggtgatatgctaaatt

SEQ ID NO: 688611 - DNA, 19 bp, Mus musculus
  siRNA target sequence for Pex13 (NM_023651.2,1056-1074).
gtcaaacaacaggacttat

SEQ ID NO: 688612 - DNA, 19 bp, Mus musculus
  siRNA target sequence for Pex13 (NM_023651.2,1067-1085).
ggacttatacctgcaaatt

SEQ ID NO: 688613 - DNA, 19 bp, Mus musculus
  siRNA target sequence for Pex13 (NM_023651.2,1068-1086).
gacttatacctgcaaatta

SEQ ID NO: 688614 - DNA, 19 bp, Mus musculus
  siRNA target sequence for Pex13 (NM_023651.2,1088-1106).
gtcaaaattcttggtaaaa

SEQ ID NO: 688615 - DNA, 19 bp, Mus musculus
  siRNA target sequence for Pex13 (NM_023651.2,1122-1140).
caatagaatcgagtacaat

SEQ ID NO: 688616 - DNA, 19 bp, Mus musculus
  siRNA target sequence for Pex13 (NM_023651.2,1148-1166).
caacaacagtcttttacca

SEQ ID NO: 688617 - DNA, 19 bp, Mus musculus
  siRNA target sequence for Pex13 (NM_023651.2,1158-1176).
cttttaccaacccaacatt

SEQ ID NO: 688618 - DNA, 19 bp, Mus musculus
  siRNA target sequence for Pex13 (NM_023651.2,1168-1186).
cccaacattaattaaagga

SEQ ID NO: 688619 - DNA, 19 bp, Mus musculus
  siRNA target sequence for Pex13 (NM_023651.2,1241-1259).
gttgaaactaataaggttt

SEQ ID NO: 688620 - DNA, 19 bp, Mus musculus
  siRNA target sequence for Pex14 (NM_019781.1,74-92).
gccccgagagccactgatt

SEQ ID NO: 688621 - DNA, 19 bp, Mus musculus
  siRNA target sequence for Pex14 (NM_019781.1,313-331).
gctcccgatggcgagatta

SEQ ID NO: 688622 - DNA, 19 bp, Mus musculus
  siRNA target sequence for Pex14 (NM_019781.1,314-332).
ctcccgatggcgagattat

SEQ ID NO: 688623 - DNA, 19 bp, Mus musculus
  siRNA target sequence for Pex14 (NM_019781.1,317-335).
ccgatggcgagattatggt

SEQ ID NO: 688624 - DNA, 19 bp, Mus musculus
  siRNA target sequence for Pex14 (NM_019781.1,347-365).
catcatggcaggaattgca

SEQ ID NO: 688625 - DNA, 19 bp, Mus musculus
  siRNA target sequence for Pex14 (NM_019781.1,370-388).
gctttcaccaactctacaa

SEQ ID NO: 688626 - DNA, 19 bp, Mus musculus
  siRNA target sequence for Pex14 (NM_019781.1,415-433).
gaggccgagaggacagaaa

SEQ ID NO: 688627 - DNA, 19 bp, Mus musculus
  siRNA target sequence for Pex14 (NM_019781.1,615-633).
ctggagtcccagaatatta

SEQ ID NO: 688628 - DNA, 19 bp, Mus musculus
  siRNA target sequence for Pex14 (NM_019781.1,658-676).
ccttgaaaggacttctttt

SEQ ID NO: 688629 - DNA, 19 bp, Mus musculus
  siRNA target sequence for Pex14 (NM_019781.1,901-919).
gtgaaggggtgctagatgt

SEQ ID NO: 688630 - DNA, 19 bp, Mus musculus
  siRNA target sequence for Pex14 (NM_019781.1,1060-1078).
gcgatgggcagatcaatga

SEQ ID NO: 688631 - DNA, 19 bp, Mus musculus
  siRNA target sequence for Pex3 (NM_019961.2,218-236).
caatgtggaattttctgaa

SEQ ID NO: 688632 - DNA, 19 bp, Mus musculus
  siRNA target sequence for Pex3 (NM_019961.2,238-256).
cgtcacaaaaagaaatgca

SEQ ID NO: 688633 - DNA, 19 bp, Mus musculus
  siRNA target sequence for Pex3 (NM_019961.2,239-257).
gtcacaaaaagaaatgcat

SEQ ID NO: 688634 - DNA, 19 bp, Mus musculus
  siRNA target sequence for Pex3 (NM_019961.2,361-379).
gctcggcgacagtaccatt

SEQ ID NO: 688635 - DNA, 19 bp, Mus musculus
  siRNA target sequence for Pex3 (NM_019961.2,362-380).
ctcggcgacagtaccattt

SEQ ID NO: 688636 - DNA, 19 bp, Mus musculus
  siRNA target sequence for Pex3 (NM_019961.2,365-383).
ggcgacagtaccattttga

SEQ ID NO: 688637 - DNA, 19 bp, Mus musculus
  siRNA target sequence for Pex3 (NM_019961.2,366-384).
gcgacagtaccattttgaa

SEQ ID NO: 688638 - DNA, 19 bp, Mus musculus
  siRNA target sequence for Pex3 (NM_019961.2,367-385).
cgacagtaccattttgaaa

SEQ ID NO: 688639 - DNA, 19 bp, Mus musculus
  siRNA target sequence for Pex3 (NM_019961.2,387-405).
caaccagaggacttgcaat

SEQ ID NO: 688640 - DNA, 19 bp, Mus musculus
  siRNA target sequence for Pex3 (NM_019961.2,391-409).
cagaggacttgcaatatga

SEQ ID NO: 688641 - DNA, 19 bp, Mus musculus
  siRNA target sequence for Pex3 (NM_019961.2,431-449).
cactgagagaggccttaat

SEQ ID NO: 688642 - DNA, 19 bp, Mus musculus
  siRNA target sequence for Pex3 (NM_019961.2,522-540).
ggacctaaagataataagt

SEQ ID NO: 688643 - DNA, 19 bp, Mus musculus
  siRNA target sequence for Pex3 (NM_019961.2,589-607).
cttttgcgagtccagttaa

SEQ ID NO: 688644 - DNA, 19 bp, Mus musculus
  siRNA target sequence for Pex3 (NM_019961.2,594-612).
gcgagtccagttaaacata

SEQ ID NO: 688645 - DNA, 19 bp, Mus musculus
  siRNA target sequence for Pex3 (NM_019961.2,595-613).
cgagtccagttaaacataa

SEQ ID NO: 688646 - DNA, 19 bp, Mus musculus
  siRNA target sequence for Pex3 (NM_019961.2,609-627).
cataattggtggatatatt

SEQ ID NO: 688647 - DNA, 19 bp, Mus musculus
  siRNA target sequence for Pex3 (NM_019961.2,630-648).
cctggataatgcaacagtt

SEQ ID NO: 688648 - DNA, 19 bp, Mus musculus
  siRNA target sequence for Pex3 (NM_019961.2,685-703).
gtacagcagcagtatttat

SEQ ID NO: 688649 - DNA, 19 bp, Mus musculus
  siRNA target sequence for Pex3 (NM_019961.2,691-709).
cagcagtatttatcaagta

SEQ ID NO: 688650 - DNA, 19 bp, Mus musculus
  siRNA target sequence for Pex3 (NM_019961.2,739-757).
gagttggtcactgtcatta

SEQ ID NO: 688651 - DNA, 19 bp, Mus musculus
  siRNA target sequence for Pex3 (NM_019961.2,744-762).
ggtcactgtcattaaacaa

SEQ ID NO: 688652 - DNA, 19 bp, Mus musculus
  siRNA target sequence for Pex3 (NM_019961.2,753-771).
cattaaacaagctgtacaa

SEQ ID NO: 688653 - DNA, 19 bp, Mus musculus
  siRNA target sequence for Pex3 (NM_019961.2,766-784).
gtacaaaggatcttaggaa

SEQ ID NO: 688654 - DNA, 19 bp, Mus musculus
  siRNA target sequence for Pex3 (NM_019961.2,782-800).
gaagtgtctctcttaaaca

SEQ ID NO: 688655 - DNA, 19 bp, Mus musculus
  siRNA target sequence for Pex3 (NM_019961.2,899-917).
cttcactgtgccagtacat

SEQ ID NO: 688656 - DNA, 19 bp, Mus musculus
  siRNA target sequence for Pex3 (NM_019961.2,958-976).
gggctttctcacagagata

SEQ ID NO: 688657 - DNA, 19 bp, Mus musculus
  siRNA target sequence for Pex3 (NM_019961.2,959-977).
ggctttctcacagagatat

SEQ ID NO: 688658 - DNA, 19 bp, Mus musculus
  siRNA target sequence for Pex3 (NM_019961.2,983-1001).
ctattaaacttctcaatga

SEQ ID NO: 688659 - DNA, 19 bp, Mus musculus
  siRNA target sequence for Pex3 (NM_019961.2,1024-1042).
ccagattttagtacagttt

SEQ ID NO: 688660 - DNA, 19 bp, Mus musculus
  siRNA target sequence for Pex3 (NM_019961.2,1044-1062).
gaatacctgtctaaacaga

SEQ ID NO: 688661 - DNA, 19 bp, Mus musculus
  siRNA target sequence for Pex3 (NM_019961.2,1070-1088).
gtcggcttctagacaacat

SEQ ID NO: 688662 - DNA, 19 bp, Mus musculus
  siRNA target sequence for Pex3 (NM_019961.2,1081-1099).
gacaacatggccgaattct

SEQ ID NO: 688663 - DNA, 19 bp, Mus musculus
  siRNA target sequence for Pex3 (NM_019961.2,1123-1141).
cagcatggtaactccataa

SEQ ID NO: 688664 - DNA, 19 bp, Mus musculus
  siRNA target sequence for Pex3 (NM_019961.2,1126-1144).
catggtaactccataaaca

SEQ ID NO: 688665 - DNA, 19 bp, Mus musculus
  siRNA target sequence for Pex3 (NM_019961.2,1156-1174).
gtcagcctgcctttagcta

SEQ ID NO: 688666 - DNA, 19 bp, Mus musculus
  siRNA target sequence for Pex3 (NM_019961.2,1161-1179).
cctgcctttagctaagata

SEQ ID NO: 688667 - DNA, 19 bp, Mus musculus
  siRNA target sequence for Pex3 (NM_019961.2,1162-1180).
ctgcctttagctaagataa

SEQ ID NO: 688668 - DNA, 19 bp, Mus musculus
  siRNA target sequence for Pex3 (NM_019961.2,1189-1207).
gtgaacgggcagatccatt

SEQ ID NO: 688669 - DNA, 19 bp, Mus musculus
  siRNA target sequence for Pex3 (NM_019961.2,1194-1212).
cgggcagatccattcagtt

SEQ ID NO: 688670 - DNA, 19 bp, Mus musculus
  siRNA target sequence for Pex3 (NM_019961.2,1195-1213).
gggcagatccattcagttt

SEQ ID NO: 688671 - DNA, 19 bp, Mus musculus
  siRNA target sequence for Pex3 (NM_019961.2,1284-1302).
cgtgtacgaagcgtttagt

SEQ ID NO: 688672 - DNA, 19 bp, Mus musculus
  siRNA target sequence for Pex3 (NM_019961.2,1285-1303).
gtgtacgaagcgtttagta

SEQ ID NO: 688673 - DNA, 19 bp, Mus musculus
  siRNA target sequence for Pxf (NM_023041.2,73-91).
ggaaagtgctcttgatgat

SEQ ID NO: 688674 - DNA, 19 bp, Mus musculus
  siRNA target sequence for Pxf (NM_023041.2,78-96).
gtgctcttgatgatttcga

SEQ ID NO: 688675 - DNA, 19 bp, Mus musculus
  siRNA target sequence for Pxf (NM_023041.2,199-217).
cgcctcccaagagaaattt

SEQ ID NO: 688676 - DNA, 19 bp, Mus musculus
  siRNA target sequence for Pxf (NM_023041.2,363-381).
caagttctcagcaagagtt

SEQ ID NO: 688677 - DNA, 19 bp, Mus musculus
  siRNA target sequence for Pxf (NM_023041.2,391-409).
cctaaaggagacgttaagt

SEQ ID NO: 688678 - DNA, 19 bp, Mus musculus
  siRNA target sequence for Pxf (NM_023041.2,547-565).
gaacctcctgtctaaggat

SEQ ID NO: 688679 - DNA, 19 bp, Mus musculus
  siRNA target sequence for Pxf (NM_023041.2,671-689).
cacagcgtcatggtcaaaa

SEQ ID NO: 688680 - DNA, 19 bp, Mus musculus
  siRNA target sequence for Pxf (NM_023041.2,885-903).
gcgaacagtgtctgatcat

SEQ ID NO: 688681 - DNA, 19 bp, Mus musculus
  siRNA target sequence for Pxf (NM_023041.2,887-905).
gaacagtgtctgatcatgt

SEQ ID NO: 688682 - DNA, 19 bp, Mus musculus
  siRNA target sequence for Pxmp2 (NM_008993.1,58-76).
cgagcgctcgcccaatact

SEQ ID NO: 688683 - DNA, 19 bp, Mus musculus
  siRNA target sequence for Pxmp2 (NM_008993.1,59-77).
gagcgctcgcccaatactt

SEQ ID NO: 688684 - DNA, 19 bp, Mus musculus
  siRNA target sequence for Pxmp2 (NM_008993.1,115-133).
gtcagcagcggcattttgt

SEQ ID NO: 688685 - DNA, 19 bp, Mus musculus
  siRNA target sequence for Pxmp2 (NM_008993.1,117-135).
cagcagcggcattttgtca

SEQ ID NO: 688686 - DNA, 19 bp, Mus musculus
  siRNA target sequence for Pxmp2 (NM_008993.1,226-244).
gtttatgggttgtttgtca

SEQ ID NO: 688687 - DNA, 19 bp, Mus musculus
  siRNA target sequence for Pxmp2 (NM_008993.1,330-348).
gctggatcgcctgttcttt

SEQ ID NO: 688688 - DNA, 19 bp, Mus musculus
  siRNA target sequence for Pxmp3 (NM_008994.2,571-589).
gagtgctgaggataagtca

SEQ ID NO: 688689 - DNA, 19 bp, Mus musculus
  siRNA target sequence for Pxmp3 (NM_008994.2,593-611).
ggatgcacttgaactgaat

SEQ ID NO: 688690 - DNA, 19 bp, Mus musculus
  siRNA target sequence for Pxmp3 (NM_008994.2,594-612).
gatgcacttgaactgaata

SEQ ID NO: 688691 - DNA, 19 bp, Mus musculus
  siRNA target sequence for Pxmp3 (NM_008994.2,627-645).
cttgtgtggtcccagttta

SEQ ID NO: 688692 - DNA, 19 bp, Mus musculus
  siRNA target sequence for Pxmp3 (NM_008994.2,648-666).
cagtgctttcatggattta

SEQ ID NO: 688693 - DNA, 19 bp, Mus musculus
  siRNA target sequence for Pxmp3 (NM_008994.2,696-714).
gaagtgaaagcatttctgt

SEQ ID NO: 688694 - DNA, 19 bp, Mus musculus
  siRNA target sequence for Pxmp3 (NM_008994.2,868-886).
ggggaaagtggttagaaga

SEQ ID NO: 688695 - DNA, 19 bp, Mus musculus
  siRNA target sequence for Pxmp3 (NM_008994.2,878-896).
gttagaagaacgatgttat

SEQ ID NO: 688696 - DNA, 19 bp, Mus musculus
  siRNA target sequence for Pxmp3 (NM_008994.2,882-900).
gaagaacgatgttatgatt

SEQ ID NO: 688697 - DNA, 19 bp, Mus musculus
  siRNA target sequence for Pxmp3 (NM_008994.2,885-903).
gaacgatgttatgatttgt

SEQ ID NO: 688698 - DNA, 19 bp, Mus musculus
  siRNA target sequence for Pxmp3 (NM_008994.2,902-920).
gtttcgaaaccgtcattta

SEQ ID NO: 688699 - DNA, 19 bp, Mus musculus
  siRNA target sequence for Pxmp3 (NM_008994.2,911-929).
ccgtcatttagcgtctttt

SEQ ID NO: 688700 - DNA, 19 bp, Mus musculus
  siRNA target sequence for Pxmp3 (NM_008994.2,936-954).
gccaaacagttcatgaatt

SEQ ID NO: 688701 - DNA, 19 bp, Mus musculus
  siRNA target sequence for Pxmp3 (NM_008994.2,979-997).
gtgagttgataaacttctt

SEQ ID NO: 688702 - DNA, 19 bp, Mus musculus
  siRNA target sequence for Pxmp3 (NM_008994.2,981-999).
gagttgataaacttcttga

SEQ ID NO: 688703 - DNA, 19 bp, Mus musculus
  siRNA target sequence for Pxmp3 (NM_008994.2,1004-1022).
cctacaaaagggaaagttt

SEQ ID NO: 688704 - DNA, 19 bp, Mus musculus
  siRNA target sequence for Pxmp3 (NM_008994.2,1008-1026).
caaaagggaaagtttgcaa

SEQ ID NO: 688705 - DNA, 19 bp, Mus musculus
  siRNA target sequence for Pxmp3 (NM_008994.2,1038-1056).
cgcctccttggcattcatt

SEQ ID NO: 688706 - DNA, 19 bp, Mus musculus
  siRNA target sequence for Pxmp3 (NM_008994.2,1047-1065).
ggcattcattccgtatttt

SEQ ID NO: 688707 - DNA, 19 bp, Mus musculus
  siRNA target sequence for Pxmp3 (NM_008994.2,1083-1101).
cgcgaagttggctttgagt

SEQ ID NO: 688708 - DNA, 19 bp, Mus musculus
  siRNA target sequence for Pxmp3 (NM_008994.2,1092-1110).
ggctttgagtacatgaata

SEQ ID NO: 688709 - DNA, 19 bp, Mus musculus
  siRNA target sequence for Pxmp3 (NM_008994.2,1152-1170).
ctcttaccacttatcaata

SEQ ID NO: 688710 - DNA, 19 bp, Mus musculus
  siRNA target sequence for Pxmp3 (NM_008994.2,1335-1353).
gttaagagtagcttcctat

SEQ ID NO: 688711 - DNA, 19 bp, Mus musculus
  siRNA target sequence for Pxmp3 (NM_008994.2,1342-1360).
gtagcttcctatttgacat

SEQ ID NO: 688712 - DNA, 19 bp, Mus musculus
  siRNA target sequence for Pxmp3 (NM_008994.2,1345-1363).
gcttcctatttgacatata

SEQ ID NO: 688713 - DNA, 19 bp, Mus musculus
  siRNA target sequence for Pxmp4 (NM_021534.2,119-137).
ctgcgctggccgtgataaa

SEQ ID NO: 688714 - DNA, 19 bp, Mus musculus
  siRNA target sequence for Pxmp4 (NM_021534.2,153-171).
ggctgtctatggagtcaaa

SEQ ID NO: 688715 - DNA, 19 bp, Mus musculus
  siRNA target sequence for Pxmp4 (NM_021534.2,155-173).
ctgtctatggagtcaaaat

SEQ ID NO: 688716 - DNA, 19 bp, Mus musculus
  siRNA target sequence for Pxmp4 (NM_021534.2,540-558).
gctcgtgctgtggcttttt

SEQ ID NO: 688717 - DNA, 19 bp, Mus musculus
  siRNA target sequence for Pxmp4 (NM_021534.2,544-562).
gtgctgtggctttttgagt

SEQ ID NO: 688718 - DNA, 19 bp, Mus musculus
  siRNA target sequence for 1110033C18Rik (NM_133964.1,126-144).
ggtaacggagcaagagata

SEQ ID NO: 688719 - DNA, 19 bp, Mus musculus
  siRNA target sequence for 1110033C18Rik (NM_133964.1,438-456).
cctcctgaagcagtattct

SEQ ID NO: 688720 - DNA, 19 bp, Mus musculus
  siRNA target sequence for 1110033C18Rik (NM_133964.1,648-666).
gcgataccgtgccatgttt

SEQ ID NO: 688721 - DNA, 19 bp, Mus musculus
  siRNA target sequence for 1110033C18Rik (NM_133964.1,952-970).
gccctggacatgtatgagt

SEQ ID NO: 688722 - DNA, 19 bp, Mus musculus
  siRNA target sequence for 1110033C18Rik (NM_133964.1,953-971).
ccctggacatgtatgagta

SEQ ID NO: 688723 - DNA, 19 bp, Mus musculus
  siRNA target sequence for 3200001F09Rik (NM_027935.1,188-206).
cgctgctggcgttctattt

SEQ ID NO: 688724 - DNA, 19 bp, Mus musculus
  siRNA target sequence for 3200001F09Rik (NM_027935.1,189-207).
gctgctggcgttctatttt

SEQ ID NO: 688725 - DNA, 19 bp, Mus musculus
  siRNA target sequence for 3200001F09Rik (NM_027935.1,190-208).
ctgctggcgttctattttt

SEQ ID NO: 688726 - DNA, 19 bp, Mus musculus
  siRNA target sequence for 3200001F09Rik (NM_027935.1,211-229).
cgggatggtggatcatcat

SEQ ID NO: 688727 - DNA, 19 bp, Mus musculus
  siRNA target sequence for 3200001F09Rik (NM_027935.1,212-230).
gggatggtggatcatcata

SEQ ID NO: 688728 - DNA, 19 bp, Mus musculus
  siRNA target sequence for 3200001F09Rik (NM_027935.1,214-232).
gatggtggatcatcataga

SEQ ID NO: 688729 - DNA, 19 bp, Mus musculus
  siRNA target sequence for 3200001F09Rik (NM_027935.1,258-276).
gatcaattcaaccattcat

SEQ ID NO: 688730 - DNA, 19 bp, Mus musculus
  siRNA target sequence for 3200001F09Rik (NM_027935.1,301-319).
ccatagccttcctcatgat

SEQ ID NO: 688731 - DNA, 19 bp, Mus musculus
  siRNA target sequence for 3200001F09Rik (NM_027935.1,462-480).
ggttatgtcgctaaggaaa

SEQ ID NO: 688732 - DNA, 19 bp, Mus musculus
  siRNA target sequence for 3200001F09Rik (NM_027935.1,463-481).
gttatgtcgctaaggaaaa

SEQ ID NO: 688733 - DNA, 19 bp, Mus musculus
  siRNA target sequence for 3200001F09Rik (NM_027935.1,476-494).
ggaaaaggacgtagtgtat

SEQ ID NO: 688734 - DNA, 19 bp, Mus musculus
  siRNA target sequence for 3200001F09Rik (NM_027935.1,537-555).
ggagggctggttttcaagt

SEQ ID NO: 688735 - DNA, 19 bp, Mus musculus
  siRNA target sequence for 3200001F09Rik (NM_027935.1,538-556).
gagggctggttttcaagtt

SEQ ID NO: 688736 - DNA, 19 bp, Mus musculus
  siRNA target sequence for C1qrf (NM_011795.1,53-71).
cggacggccactatgagat

SEQ ID NO: 688737 - DNA, 19 bp, Mus musculus
  siRNA target sequence for C1qrf (NM_011795.1,458-476).
ccaacctaggcaacaacta

SEQ ID NO: 688738 - DNA, 19 bp, Mus musculus
  siRNA target sequence for C1qrf (NM_011795.1,483-501).
ggccagcggcaagtttaca

SEQ ID NO: 688739 - DNA, 19 bp, Mus musculus
  siRNA target sequence for C1qrf (NM_011795.1,492-510).
caagtttacatgcaacatt

SEQ ID NO: 688740 - DNA, 19 bp, Mus musculus
  siRNA target sequence for C1qrf (NM_011795.1,511-529).
cctggcacctactttttca

SEQ ID NO: 688741 - DNA, 19 bp, Mus musculus
  siRNA target sequence for Dnajc3 (NM_008929.2,185-203).
gcgctgagtgtggagtaaa

SEQ ID NO: 688742 - DNA, 19 bp, Mus musculus
  siRNA target sequence for Dnajc3 (NM_008929.2,186-204).
cgctgagtgtggagtaaat

SEQ ID NO: 688743 - DNA, 19 bp, Mus musculus
  siRNA target sequence for Dnajc3 (NM_008929.2,258-276).
gctagccgacgccttatca

SEQ ID NO: 688744 - DNA, 19 bp, Mus musculus
  siRNA target sequence for Dnajc3 (NM_008929.2,264-282).
cgacgccttatcacagttt

SEQ ID NO: 688745 - DNA, 19 bp, Mus musculus
  siRNA target sequence for Dnajc3 (NM_008929.2,279-297).
gtttcacgctgcagttgat

SEQ ID NO: 688746 - DNA, 19 bp, Mus musculus
  siRNA target sequence for Dnajc3 (NM_008929.2,298-316).
ggtgaccccgataactata

SEQ ID NO: 688747 - DNA, 19 bp, Mus musculus
  siRNA target sequence for Dnajc3 (NM_008929.2,299-317).
gtgaccccgataactatat

SEQ ID NO: 688748 - DNA, 19 bp, Mus musculus
  siRNA target sequence for Dnajc3 (NM_008929.2,378-396).
cgacctcaccaaagtgatt

SEQ ID NO: 688749 - DNA, 19 bp, Mus musculus
  siRNA target sequence for Dnajc3 (NM_008929.2,411-429).
ctttactgccgcaagacta

SEQ ID NO: 688750 - DNA, 19 bp, Mus musculus
  siRNA target sequence for Dnajc3 (NM_008929.2,534-552).
cgagtctcagcttgtaaaa

SEQ ID NO: 688751 - DNA, 19 bp, Mus musculus
  siRNA target sequence for Dnajc3 (NM_008929.2,537-555).
gtctcagcttgtaaaagct

SEQ ID NO: 688752 - DNA, 19 bp, Mus musculus
  siRNA target sequence for Dnajc3 (NM_008929.2,606-624).
cgattacactgctgctata

SEQ ID NO: 688753 - DNA, 19 bp, Mus musculus
  siRNA target sequence for Dnajc3 (NM_008929.2,619-637).
gctataaccttccttgata

SEQ ID NO: 688754 - DNA, 19 bp, Mus musculus
  siRNA target sequence for Dnajc3 (NM_008929.2,620-638).
ctataaccttccttgataa

SEQ ID NO: 688755 - DNA, 19 bp, Mus musculus
  siRNA target sequence for Dnajc3 (NM_008929.2,681-699).
gcgagcagaatgcttcata

SEQ ID NO: 688756 - DNA, 19 bp, Mus musculus
  siRNA target sequence for Dnajc3 (NM_008929.2,682-700).
cgagcagaatgcttcataa

SEQ ID NO: 688757 - DNA, 19 bp, Mus musculus
  siRNA target sequence for Dnajc3 (NM_008929.2,683-701).
gagcagaatgcttcataaa

SEQ ID NO: 688758 - DNA, 19 bp, Mus musculus
  siRNA target sequence for Dnajc3 (NM_008929.2,830-848).
gtgaagttcgtgaatgtct

SEQ ID NO: 688759 - DNA, 19 bp, Mus musculus
  siRNA target sequence for Dnajc3 (NM_008929.2,870-888).
gcggtgttttgcacactat

SEQ ID NO: 688760 - DNA, 19 bp, Mus musculus
  siRNA target sequence for Dnajc3 (NM_008929.2,904-922).
cttaacaagctgattgagt

SEQ ID NO: 688761 - DNA, 19 bp, Mus musculus
  siRNA target sequence for Dnajc3 (NM_008929.2,1069-1087).
gtggaagccattaggatat

SEQ ID NO: 688762 - DNA, 19 bp, Mus musculus
  siRNA target sequence for Dnajc3 (NM_008929.2,1071-1089).
ggaagccattaggatatgt

SEQ ID NO: 688763 - DNA, 19 bp, Mus musculus
  siRNA target sequence for Dnajc3 (NM_008929.2,1072-1090).
gaagccattaggatatgtt

SEQ ID NO: 688764 - DNA, 19 bp, Mus musculus
  siRNA target sequence for Dnajc3 (NM_008929.2,1137-1155).
ccgagccgaggcctactta

SEQ ID NO: 688765 - DNA, 19 bp, Mus musculus
  siRNA target sequence for Dnajc3 (NM_008929.2,1138-1156).
cgagccgaggcctacttaa

SEQ ID NO: 688766 - DNA, 19 bp, Mus musculus
  siRNA target sequence for Dnajc3 (NM_008929.2,1139-1157).
gagccgaggcctacttaat

SEQ ID NO: 688767 - DNA, 19 bp, Mus musculus
  siRNA target sequence for Dnajc3 (NM_008929.2,1142-1160).
ccgaggcctacttaataga

SEQ ID NO: 688768 - DNA, 19 bp, Mus musculus
  siRNA target sequence for Dnajc3 (NM_008929.2,1148-1166).
cctacttaatagaggaaat

SEQ ID NO: 688769 - DNA, 19 bp, Mus musculus
  siRNA target sequence for Dnajc3 (NM_008929.2,1198-1216).
gctcaggagcacaatgaaa

SEQ ID NO: 688770 - DNA, 19 bp, Mus musculus
  siRNA target sequence for Dnajc3 (NM_008929.2,1269-1287).
gtcacagaaacgagattat

SEQ ID NO: 688771 - DNA, 19 bp, Mus musculus
  siRNA target sequence for Dnajc3 (NM_008929.2,1271-1289).
cacagaaacgagattatta

SEQ ID NO: 688772 - DNA, 19 bp, Mus musculus
  siRNA target sequence for Dnajc3 (NM_008929.2,1360-1378).
cagtggcatccagataatt

SEQ ID NO: 688773 - DNA, 19 bp, Mus musculus
  siRNA target sequence for Dnajc3 (NM_008929.2,1370-1388).
cagataatttccagaatga

SEQ ID NO: 688774 - DNA, 19 bp, Mus musculus
  siRNA target sequence for Dnajc3 (NM_008929.2,1580-1598).
caggcggaccgttcagatt

SEQ ID NO: 688775 - DNA, 19 bp, Mus musculus
  siRNA target sequence for Dnajc3 (NM_008929.2,1582-1600).
ggcggaccgttcagattta

SEQ ID NO: 688776 - DNA, 19 bp, Mus musculus
  siRNA target sequence for Dnajc3 (NM_008929.2,1583-1601).
gcggaccgttcagatttaa

SEQ ID NO: 688777 - DNA, 19 bp, Mus musculus
  siRNA target sequence for Dnajc3 (NM_008929.2,1585-1603).
ggaccgttcagatttaagt

SEQ ID NO: 688778 - DNA, 19 bp, Mus musculus
  siRNA target sequence for Dnajc3 (NM_008929.2,1586-1604).
gaccgttcagatttaagtt

SEQ ID NO: 688779 - DNA, 19 bp, Mus musculus
  siRNA target sequence for Fbxw2 (NM_013890.2,168-186).
gacatggcttgataacatt

SEQ ID NO: 688780 - DNA, 19 bp, Mus musculus
  siRNA target sequence for Fbxw2 (NM_013890.2,205-223).
ctgacggacttgcagaaaa

SEQ ID NO: 688781 - DNA, 19 bp, Mus musculus
  siRNA target sequence for Fbxw2 (NM_013890.2,272-290).
ggcatctctccaataacct

SEQ ID NO: 688782 - DNA, 19 bp, Mus musculus
  siRNA target sequence for Fbxw2 (NM_013890.2,336-354).
gctcagtttttatttgtta

SEQ ID NO: 688783 - DNA, 19 bp, Mus musculus
  siRNA target sequence for Fbxw2 (NM_013890.2,359-377).
ggctcgatcctcagacttt

SEQ ID NO: 688784 - DNA, 19 bp, Mus musculus
  siRNA target sequence for Fbxw2 (NM_013890.2,360-378).
gctcgatcctcagacttta

SEQ ID NO: 688785 - DNA, 19 bp, Mus musculus
  siRNA target sequence for Fbxw2 (NM_013890.2,364-382).
gatcctcagactttactca

SEQ ID NO: 688786 - DNA, 19 bp, Mus musculus
  siRNA target sequence for Fbxw2 (NM_013890.2,383-401).
catgctgcctggtctctaa

SEQ ID NO: 688787 - DNA, 19 bp, Mus musculus
  siRNA target sequence for Fbxw2 (NM_013890.2,394-412).
gtctctaagcagtggaata

SEQ ID NO: 688788 - DNA, 19 bp, Mus musculus
  siRNA target sequence for Fbxw2 (NM_013890.2,403-421).
cagtggaataaggtgataa

SEQ ID NO: 688789 - DNA, 19 bp, Mus musculus
  siRNA target sequence for Fbxw2 (NM_013890.2,405-423).
gtggaataaggtgataagt

SEQ ID NO: 688790 - DNA, 19 bp, Mus musculus
  siRNA target sequence for Fbxw2 (NM_013890.2,438-456).
gtggcagactgcatgtaaa

SEQ ID NO: 688791 - DNA, 19 bp, Mus musculus
  siRNA target sequence for Fbxw2 (NM_013890.2,440-458).
ggcagactgcatgtaaaaa

SEQ ID NO: 688792 - DNA, 19 bp, Mus musculus
  siRNA target sequence for Fbxw2 (NM_013890.2,463-481).
ggctggcagatagatgatt

SEQ ID NO: 688793 - DNA, 19 bp, Mus musculus
  siRNA target sequence for Fbxw2 (NM_013890.2,467-485).
ggcagatagatgattctgt

SEQ ID NO: 688794 - DNA, 19 bp, Mus musculus
  siRNA target sequence for Fbxw2 (NM_013890.2,468-486).
gcagatagatgattctgtt

SEQ ID NO: 688795 - DNA, 19 bp, Mus musculus
  siRNA target sequence for Fbxw2 (NM_013890.2,511-529).
gtttatttgaaggctattt

SEQ ID NO: 688796 - DNA, 19 bp, Mus musculus
  siRNA target sequence for Fbxw2 (NM_013890.2,550-568).
gaccatgaagcctttgaga

SEQ ID NO: 688797 - DNA, 19 bp, Mus musculus
  siRNA target sequence for Fbxw2 (NM_013890.2,567-585).
gacctcttcgttaattgga

SEQ ID NO: 688798 - DNA, 19 bp, Mus musculus
  siRNA target sequence for Fbxw2 (NM_013890.2,593-611).
ccagagtgtatgcacttta

SEQ ID NO: 688799 - DNA, 19 bp, Mus musculus
  siRNA target sequence for Fbxw2 (NM_013890.2,596-614).
gagtgtatgcactttacta

SEQ ID NO: 688800 - DNA, 19 bp, Mus musculus
  siRNA target sequence for Fbxw2 (NM_013890.2,598-616).
gtgtatgcactttactaca

SEQ ID NO: 688801 - DNA, 19 bp, Mus musculus
  siRNA target sequence for Fbxw2 (NM_013890.2,600-618).
gtatgcactttactacaaa

SEQ ID NO: 688802 - DNA, 19 bp, Mus musculus
  siRNA target sequence for Fbxw2 (NM_013890.2,884-902).
cggacttcgctgtgaaagt

SEQ ID NO: 688803 - DNA, 19 bp, Mus musculus
  siRNA target sequence for Fbxw2 (NM_013890.2,886-904).
gacttcgctgtgaaagtat

SEQ ID NO: 688804 - DNA, 19 bp, Mus musculus
  siRNA target sequence for Fbxw2 (NM_013890.2,897-915).
gaaagtatgggctttatct

SEQ ID NO: 688805 - DNA, 19 bp, Mus musculus
  siRNA target sequence for Fbxw2 (NM_013890.2,916-934).
gctgggacatgcctgaata

SEQ ID NO: 688806 - DNA, 19 bp, Mus musculus
  siRNA target sequence for Fbxw2 (NM_013890.2,935-953).
cactcactgggcatactga

SEQ ID NO: 688807 - DNA, 19 bp, Mus musculus
  siRNA target sequence for Fbxw2 (NM_013890.2,1012-1030).
ggagactacatcctcttaa

SEQ ID NO: 688808 - DNA, 19 bp, Mus musculus
  siRNA target sequence for Fbxw2 (NM_013890.2,1031-1049).
gtgcagacaaatatgagat

SEQ ID NO: 688809 - DNA, 19 bp, Mus musculus
  siRNA target sequence for Fbxw2 (NM_013890.2,1197-1215).
ggactttgccagttatgat

SEQ ID NO: 688810 - DNA, 19 bp, Mus musculus
  siRNA target sequence for Fbxw2 (NM_013890.2,1198-1216).
gactttgccagttatgata

SEQ ID NO: 688811 - DNA, 19 bp, Mus musculus
  siRNA target sequence for Fbxw2 (NM_013890.2,1401-1419).
cgaagcgtcctggttgaat

SEQ ID NO: 688812 - DNA, 19 bp, Mus musculus
  siRNA target sequence for Fbxw2 (NM_013890.2,1405-1423).
gcgtcctggttgaatggat

SEQ ID NO: 688813 - DNA, 19 bp, Mus musculus
  siRNA target sequence for Fbxw2 (NM_013890.2,1421-1439).
gattggatgggcacaatga

SEQ ID NO: 688814 - DNA, 19 bp, Mus musculus
  siRNA target sequence for Fbxw2 (NM_013890.2,1463-1481).
gcatgcctgaccacagtat

SEQ ID NO: 688815 - DNA, 19 bp, Mus musculus
  siRNA target sequence for Gnefr (NM_013789.1,157-175).
caagctgggtgtatcaaga

SEQ ID NO: 688816 - DNA, 19 bp, Mus musculus
  siRNA target sequence for Gnefr (NM_013789.1,212-230).
cagatggaggagatctttt

SEQ ID NO: 688817 - DNA, 19 bp, Mus musculus
  siRNA target sequence for Gnefr (NM_013789.1,277-295).
gaggaagttctgcgtttta

SEQ ID NO: 688818 - DNA, 19 bp, Mus musculus
  siRNA target sequence for Gnefr (NM_013789.1,349-367).
gacttcaccatcatgctta

SEQ ID NO: 688819 - DNA, 19 bp, Mus musculus
  siRNA target sequence for Gnefr (NM_013789.1,360-378).
catgcttacagaaaaaggt

SEQ ID NO: 688820 - DNA, 19 bp, Mus musculus
  siRNA target sequence for Gnefr (NM_013789.1,448-466).
gtcccccaggccattgagt

SEQ ID NO: 688821 - DNA, 19 bp, Mus musculus
  siRNA target sequence for Gnefr (NM_013789.1,471-489).
gagagagaaggttgtttgt

SEQ ID NO: 688822 - DNA, 19 bp, Mus musculus
  siRNA target sequence for Gnefr (NM_013789.1,682-700).
gaccactcggcctcattaa

SEQ ID NO: 688823 - DNA, 19 bp, Mus musculus
  siRNA target sequence for Gnefr (NM_013789.1,684-702).
ccactcggcctcattaaca

SEQ ID NO: 688824 - DNA, 19 bp, Mus musculus
  siRNA target sequence for Gnefr (NM_013789.1,687-705).
ctcggcctcattaacagat

SEQ ID NO: 688825 - DNA, 19 bp, Mus musculus
  siRNA target sequence for Gnefr (NM_013789.1,839-857).
ggacacacctggttgctaa

SEQ ID NO: 688826 - DNA, 19 bp, Mus musculus
  siRNA target sequence for Gnefr (NM_013789.1,1037-1055).
gtggctcggagcacaactt

SEQ ID NO: 688827 - DNA, 19 bp, Mus musculus
  siRNA target sequence for Gnefr (NM_013789.1,1047-1065).
gcacaacttggcagtaatt

SEQ ID NO: 688828 - DNA, 19 bp, Mus musculus
  siRNA target sequence for Gnefr (NM_013789.1,1393-1411).
gagagcgagaccgttcaat

SEQ ID NO: 688829 - DNA, 19 bp, Mus musculus
  siRNA target sequence for Gsdm (NM_021347.2,727-745).
gatggtcaacggcaaagat

SEQ ID NO: 688830 - DNA, 19 bp, Mus musculus
  siRNA target sequence for Gsdm (NM_021347.2,753-771).
gcattccacacatttgcaa

SEQ ID NO: 688831 - DNA, 19 bp, Mus musculus
  siRNA target sequence for Gsdm (NM_021347.2,754-772).
cattccacacatttgcaat

SEQ ID NO: 688832 - DNA, 19 bp, Mus musculus
  siRNA target sequence for Gsdm (NM_021347.2,809-827).
ggagaagggaagttcatat

SEQ ID NO: 688833 - DNA, 19 bp, Mus musculus
  siRNA target sequence for Gsdm (NM_021347.2,1131-1149).
cccaacagaagcttctagt

SEQ ID NO: 688834 - DNA, 19 bp, Mus musculus
  siRNA target sequence for Gsdm (NM_021347.2,1132-1150).
ccaacagaagcttctagta

SEQ ID NO: 688835 - DNA, 19 bp, Mus musculus
  siRNA target sequence for Gsdm (NM_021347.2,1277-1295).
gaggaggaactgatcctaa

SEQ ID NO: 688836 - DNA, 19 bp, Mus musculus
  siRNA target sequence for Halapx (NM_021898.1,263-281).
cttcatccaccgattctca

SEQ ID NO: 688837 - DNA, 19 bp, Mus musculus
  siRNA target sequence for Halapx (NM_021898.1,280-298).
caggaggtgaagcctataa

SEQ ID NO: 688838 - DNA, 19 bp, Mus musculus
  siRNA target sequence for Halapx (NM_021898.1,292-310).
cctataatgccaattagga

SEQ ID NO: 688839 - DNA, 19 bp, Mus musculus
  siRNA target sequence for Halapx (NM_021898.1,312-330).
caaggcagcctgcaagttt

SEQ ID NO: 688840 - DNA, 19 bp, Mus musculus
  siRNA target sequence for Halapx (NM_021898.1,315-333).
ggcagcctgcaagttttat

SEQ ID NO: 688841 - DNA, 19 bp, Mus musculus
  siRNA target sequence for Halapx (NM_021898.1,414-432).
gaaagacatcggagaaact

SEQ ID NO: 688842 - DNA, 19 bp, Mus musculus
  siRNA target sequence for Halapx (NM_021898.1,937-955).
gaagcagtcgctactacaa

SEQ ID NO: 688843 - DNA, 19 bp, Mus musculus
  siRNA target sequence for Hebp2 (NM_019487.2,379-397).
cccagccaggaagttatga

SEQ ID NO: 688844 - DNA, 19 bp, Mus musculus
  siRNA target sequence for Hebp2 (NM_019487.2,583-601).
gtgagtctaccattacgat

SEQ ID NO: 688845 - DNA, 19 bp, Mus musculus
  siRNA target sequence for Hebp2 (NM_019487.2,585-603).
gagtctaccattacgattt

SEQ ID NO: 688846 - DNA, 19 bp, Mus musculus
  siRNA target sequence for Hebp2 (NM_019487.2,692-710).
gttcgtgcggtcttttgat

SEQ ID NO: 688847 - DNA, 19 bp, Mus musculus
  siRNA target sequence for Hebp2 (NM_019487.2,719-737).
cagtggccaaaagaatcaa

SEQ ID NO: 688848 - DNA, 19 bp, Mus musculus
  siRNA target sequence for Hebp2 (NM_019487.2,857-875).
gtggctgattcagaaaaat

SEQ ID NO: 688849 - DNA, 19 bp, Mus musculus
  siRNA target sequence for Hebp2 (NM_019487.2,878-896).
gccctccgtcgagaacaaa

SEQ ID NO: 688850 - DNA, 19 bp, Mus musculus
  siRNA target sequence for Hebp2 (NM_019487.2,879-897).
ccctccgtcgagaacaaat

SEQ ID NO: 688851 - DNA, 19 bp, Mus musculus
  siRNA target sequence for Hrasls (NM_013751.3,236-254).
gatcaacattgcacctata

SEQ ID NO: 688852 - DNA, 19 bp, Mus musculus
  siRNA target sequence for Hrasls (NM_013751.3,239-257).
caacattgcacctatagat

SEQ ID NO: 688853 - DNA, 19 bp, Mus musculus
  siRNA target sequence for Hrasls (NM_013751.3,255-273).
gatggcattcgctcatcat

SEQ ID NO: 688854 - DNA, 19 bp, Mus musculus
  siRNA target sequence for Hrasls (NM_013751.3,258-276).
ggcattcgctcatcattta

SEQ ID NO: 688855 - DNA, 19 bp, Mus musculus
  siRNA target sequence for Hrasls (NM_013751.3,260-278).
cattcgctcatcatttaca

SEQ ID NO: 688856 - DNA, 19 bp, Mus musculus
  siRNA target sequence for Hrasls (NM_013751.3,472-490).
gtgagcattttgtaacctt

SEQ ID NO: 688857 - DNA, 19 bp, Mus musculus
  siRNA target sequence for Hrasls (NM_013751.3,555-573).
gcagctggtattgatatct

SEQ ID NO: 688858 - DNA, 19 bp, Mus musculus
  siRNA target sequence for Hrasls (NM_013751.3,556-574).
cagctggtattgatatctt

SEQ ID NO: 688859 - DNA, 19 bp, Mus musculus
  siRNA target sequence for Hrasls (NM_013751.3,558-576).
gctggtattgatatcttca

SEQ ID NO: 688860 - DNA, 19 bp, Mus musculus
  siRNA target sequence for Hrasls (NM_013751.3,575-593).
cacattcctcggcttgttt

SEQ ID NO: 688861 - DNA, 19 bp, Mus musculus
  siRNA target sequence for Ier2 (NM_010499.2,136-154).
ctgtcggtatggaagatgt

SEQ ID NO: 688862 - DNA, 19 bp, Mus musculus
  siRNA target sequence for Mcm3ap (NM_019434.1,439-457).
ccagcaccacgggaacata

SEQ ID NO: 688863 - DNA, 19 bp, Mus musculus
  siRNA target sequence for Mcm3ap (NM_019434.1,440-458).
cagcaccacgggaacatat

SEQ ID NO: 688864 - DNA, 19 bp, Mus musculus
  siRNA target sequence for Mcm3ap (NM_019434.1,442-460).
gcaccacgggaacatatca

SEQ ID NO: 688865 - DNA, 19 bp, Mus musculus
  siRNA target sequence for Mcm3ap (NM_019434.1,448-466).
cgggaacatatcagactaa

SEQ ID NO: 688866 - DNA, 19 bp, Mus musculus
  siRNA target sequence for Mcm3ap (NM_019434.1,461-479).
gactaaatcaccatttcga

SEQ ID NO: 688867 - DNA, 19 bp, Mus musculus
  siRNA target sequence for Mcm3ap (NM_019434.1,463-481).
ctaaatcaccatttcgatt

SEQ ID NO: 688868 - DNA, 19 bp, Mus musculus
  siRNA target sequence for Mcm3ap (NM_019434.1,521-539).
caagagcctggcgttttca

SEQ ID NO: 688869 - DNA, 19 bp, Mus musculus
  siRNA target sequence for Mcm3ap (NM_019434.1,527-545).
cctggcgttttcacaagta

SEQ ID NO: 688870 - DNA, 19 bp, Mus musculus
  siRNA target sequence for Mcm3ap (NM_019434.1,696-714).
gcattcagctttaagtcaa

SEQ ID NO: 688871 - DNA, 19 bp, Mus musculus
  siRNA target sequence for Mcm3ap (NM_019434.1,734-752).
cccaagtggcgctactttt

SEQ ID NO: 688872 - DNA, 19 bp, Mus musculus
  siRNA target sequence for Mcm3ap (NM_019434.1,755-773).
gccagaaaccggagaagta

SEQ ID NO: 688873 - DNA, 19 bp, Mus musculus
  siRNA target sequence for Mcm3ap (NM_019434.1,789-807).
cggaagacggaattcaagt

SEQ ID NO: 688874 - DNA, 19 bp, Mus musculus
  siRNA target sequence for Mcm3ap (NM_019434.1,794-812).
gacggaattcaagtttaaa

SEQ ID NO: 688875 - DNA, 19 bp, Mus musculus
  siRNA target sequence for Mcm3ap (NM_019434.1,930-948).
ggaggcctgaccccttttt

SEQ ID NO: 688876 - DNA, 19 bp, Mus musculus
  siRNA target sequence for Mcm3ap (NM_019434.1,953-971).
cccacaggtgacaaatagt

SEQ ID NO: 688877 - DNA, 19 bp, Mus musculus
  siRNA target sequence for Mcm3ap (NM_019434.1,954-972).
ccacaggtgacaaatagtt

SEQ ID NO: 688878 - DNA, 19 bp, Mus musculus
  siRNA target sequence for Mcm3ap (NM_019434.1,973-991).
cggtgactagctcaagttt

SEQ ID NO: 688879 - DNA, 19 bp, Mus musculus
  siRNA target sequence for Mcm3ap (NM_019434.1,974-992).
ggtgactagctcaagtttt

SEQ ID NO: 688880 - DNA, 19 bp, Mus musculus
  siRNA target sequence for Mcm3ap (NM_019434.1,975-993).
gtgactagctcaagtttta

SEQ ID NO: 688881 - DNA, 19 bp, Mus musculus
  siRNA target sequence for Mcm3ap (NM_019434.1,1126-1144).
cagcgtcaccaggatcttt

SEQ ID NO: 688882 - DNA, 19 bp, Mus musculus
  siRNA target sequence for Mcm3ap (NM_019434.1,1151-1169).
gcccttcccagctaacaaa

SEQ ID NO: 688883 - DNA, 19 bp, Mus musculus
  siRNA target sequence for Mcm3ap (NM_019434.1,1216-1234).
cacttcccaccctcatgaa

SEQ ID NO: 688884 - DNA, 19 bp, Mus musculus
  siRNA target sequence for Mcm3ap (NM_019434.1,1263-1281).
cgctccccgaggagacatt

SEQ ID NO: 688885 - DNA, 19 bp, Mus musculus
  siRNA target sequence for Mcm3ap (NM_019434.1,1321-1339).
gcgaccatcccccagataa

SEQ ID NO: 688886 - DNA, 19 bp, Mus musculus
  siRNA target sequence for Mcm3ap (NM_019434.1,1322-1340).
cgaccatcccccagataaa

SEQ ID NO: 688887 - DNA, 19 bp, Mus musculus
  siRNA target sequence for Mcm3ap (NM_019434.1,1390-1408).
caatacaggaggtcttcaa

SEQ ID NO: 688888 - DNA, 19 bp, Mus musculus
  siRNA target sequence for Mcm3ap (NM_019434.1,1398-1416).
gaggtcttcaaaagcaata

SEQ ID NO: 688889 - DNA, 19 bp, Mus musculus
  siRNA target sequence for Mcm3ap (NM_019434.1,1778-1796).
gaagctcgccgtgattcat

SEQ ID NO: 688890 - DNA, 19 bp, Mus musculus
  siRNA target sequence for Mcm3ap (NM_019434.1,1781-1799).
gctcgccgtgattcatttt

SEQ ID NO: 688891 - DNA, 19 bp, Mus musculus
  siRNA target sequence for Mcm3ap (NM_019434.1,1782-1800).
ctcgccgtgattcattttt

SEQ ID NO: 688892 - DNA, 19 bp, Mus musculus
  siRNA target sequence for Mcm3ap (NM_019434.1,1786-1804).
ccgtgattcattttttcga

SEQ ID NO: 688893 - DNA, 19 bp, Mus musculus
  siRNA target sequence for Mcm3ap (NM_019434.1,1848-1866).
cataaggacgtggttatct

SEQ ID NO: 688894 - DNA, 19 bp, Mus musculus
  siRNA target sequence for Mcm3ap (NM_019434.1,2321-2339).
ccagctgagcgtgtttgaa

SEQ ID NO: 688895 - DNA, 19 bp, Mus musculus
  siRNA target sequence for Mcm3ap (NM_019434.1,2479-2497).
cccagatcatggaccaaaa

SEQ ID NO: 688896 - DNA, 19 bp, Mus musculus
  siRNA target sequence for Mcm3ap (NM_019434.1,2504-2522).
cagccttcgggattggtat

SEQ ID NO: 688897 - DNA, 19 bp, Mus musculus
  siRNA target sequence for Mcm3ap (NM_019434.1,2614-2632).
gtacccgatttcacattca

SEQ ID NO: 688898 - DNA, 19 bp, Mus musculus
  siRNA target sequence for Mcm3ap (NM_019434.1,2676-2694).
gccaagatcaacaatgaga

SEQ ID NO: 688899 - DNA, 19 bp, Mus musculus
  siRNA target sequence for Mcm3ap (NM_019434.1,2785-2803).
gctacaatgtcctgcttaa

SEQ ID NO: 688900 - DNA, 19 bp, Mus musculus
  siRNA target sequence for Mcm3ap (NM_019434.1,2896-2914).
ctgcattgaacagcaataa

SEQ ID NO: 688901 - DNA, 19 bp, Mus musculus
  siRNA target sequence for Mcm3ap (NM_019434.1,2908-2926).
gcaataattttgtgagatt

SEQ ID NO: 688902 - DNA, 19 bp, Mus musculus
  siRNA target sequence for Mcm3ap (NM_019434.1,2962-2980).
cgtgcctgttacactgtta

SEQ ID NO: 688903 - DNA, 19 bp, Mus musculus
  siRNA target sequence for Mcm3ap (NM_019434.1,2966-2984).
cctgttacactgttacttt

SEQ ID NO: 688904 - DNA, 19 bp, Mus musculus
  siRNA target sequence for Mcm3ap (NM_019434.1,3004-3022).
ccctccgggcactcaatgt

SEQ ID NO: 688905 - DNA, 19 bp, Mus musculus
  siRNA target sequence for Mcm3ap (NM_019434.1,3005-3023).
cctccgggcactcaatgtt

SEQ ID NO: 688906 - DNA, 19 bp, Mus musculus
  siRNA target sequence for Mcm3ap (NM_019434.1,3011-3029).
ggcactcaatgttgcttat

SEQ ID NO: 688907 - DNA, 19 bp, Mus musculus
  siRNA target sequence for Mcm3ap (NM_019434.1,3083-3101).
gctgctgttcagagatagt

SEQ ID NO: 688908 - DNA, 19 bp, Mus musculus
  siRNA target sequence for Mcm3ap (NM_019434.1,3100-3118).
gtgaagaggcgacaaactt

SEQ ID NO: 688909 - DNA, 19 bp, Mus musculus
  siRNA target sequence for Mcm3ap (NM_019434.1,3108-3126).
gcgacaaacttcctcaatt

SEQ ID NO: 688910 - DNA, 19 bp, Mus musculus
  siRNA target sequence for Mcm3ap (NM_019434.1,3112-3130).
caaacttcctcaattacca

SEQ ID NO: 688911 - DNA, 19 bp, Mus musculus
  siRNA target sequence for Mcm3ap (NM_019434.1,3183-3201).
gaaccggagggattatgca

SEQ ID NO: 688912 - DNA, 19 bp, Mus musculus
  siRNA target sequence for Mcm3ap (NM_019434.1,3244-3262).
cagttggggaagttgtgaa

SEQ ID NO: 688913 - DNA, 19 bp, Mus musculus
  siRNA target sequence for Mcm3ap (NM_019434.1,3307-3325).
gcttcaactcccagaataa

SEQ ID NO: 688914 - DNA, 19 bp, Mus musculus
  siRNA target sequence for Mcm3ap (NM_019434.1,3550-3568).
ctgaggtgctgcttccaaa

SEQ ID NO: 688915 - DNA, 19 bp, Mus musculus
  siRNA target sequence for Mcm3ap (NM_019434.1,3732-3750).
gcgaccacgggcattctga

SEQ ID NO: 688916 - DNA, 19 bp, Mus musculus
  siRNA target sequence for Mcm3ap (NM_019434.1,3756-3774).
gttgccgctgaggaagttt

SEQ ID NO: 688917 - DNA, 19 bp, Mus musculus
  siRNA target sequence for Mcm3ap (NM_019434.1,3760-3778).
ccgctgaggaagtttccat

SEQ ID NO: 688918 - DNA, 19 bp, Mus musculus
  siRNA target sequence for Mcm3ap (NM_019434.1,3841-3859).
gagaactgatgttaactca

SEQ ID NO: 688919 - DNA, 19 bp, Mus musculus
  siRNA target sequence for Mcm3ap (NM_019434.1,4000-4018).
cacacctggtggatttgtt

SEQ ID NO: 688920 - DNA, 19 bp, Mus musculus
  siRNA target sequence for Mcm3ap (NM_019434.1,4205-4223).
cgcagagtgccccattact

SEQ ID NO: 688921 - DNA, 19 bp, Mus musculus
  siRNA target sequence for Mcm3ap (NM_019434.1,4207-4225).
cagagtgccccattactga

SEQ ID NO: 688922 - DNA, 19 bp, Mus musculus
  siRNA target sequence for Mcm3ap (NM_019434.1,4256-4274).
gggccacgcaggcaaagta

SEQ ID NO: 688923 - DNA, 19 bp, Mus musculus
  siRNA target sequence for Mcm3ap (NM_019434.1,4291-4309).
ggttgaggcggcttagaaa

SEQ ID NO: 688924 - DNA, 19 bp, Mus musculus
  siRNA target sequence for Mcm3ap (NM_019434.1,4484-4502).
gagtcctggcagaatacta

SEQ ID NO: 688925 - DNA, 19 bp, Mus musculus
  siRNA target sequence for Mcm3ap (NM_019434.1,4488-4506).
cctggcagaatactagaaa

SEQ ID NO: 688926 - DNA, 19 bp, Mus musculus
  siRNA target sequence for Mcm3ap (NM_019434.1,4578-4596).
cagaccctctcagtcttta

SEQ ID NO: 688927 - DNA, 19 bp, Mus musculus
  siRNA target sequence for Mcm3ap (NM_019434.1,4580-4598).
gaccctctcagtctttaat

SEQ ID NO: 688928 - DNA, 19 bp, Mus musculus
  siRNA target sequence for Mcm3ap (NM_019434.1,4583-4601).
cctctcagtctttaataca

SEQ ID NO: 688929 - DNA, 19 bp, Mus musculus
  siRNA target sequence for Mcm3ap (NM_019434.1,4586-4604).
ctcagtctttaatacactt

SEQ ID NO: 688930 - DNA, 19 bp, Mus musculus
  siRNA target sequence for Mcm3ap (NM_019434.1,4590-4608).
gtctttaatacacttagta

SEQ ID NO: 688931 - DNA, 19 bp, Mus musculus
  siRNA target sequence for Mcm3ap (NM_019434.1,4592-4610).
ctttaatacacttagtagt

SEQ ID NO: 688932 - DNA, 19 bp, Mus musculus
  siRNA target sequence for Mcm3ap (NM_019434.1,4630-4648).
ctgtcaacgtgtgtataaa

SEQ ID NO: 688933 - DNA, 19 bp, Mus musculus
  siRNA target sequence for Mcm3ap (NM_019434.1,4654-4672).
ctcatggcacccttagtga

SEQ ID NO: 688934 - DNA, 19 bp, Mus musculus
  siRNA target sequence for Mcm3ap (NM_019434.1,4734-4752).
ctgcttcccccgaaagtga

SEQ ID NO: 688935 - DNA, 19 bp, Mus musculus
  siRNA target sequence for Mcm3ap (NM_019434.1,4929-4947).
gtttcagccaagctgattt

SEQ ID NO: 688936 - DNA, 19 bp, Mus musculus
  siRNA target sequence for Mcm3ap (NM_019434.1,4948-4966).
ccgattacattgttgttga

SEQ ID NO: 688937 - DNA, 19 bp, Mus musculus
  siRNA target sequence for Mcm3ap (NM_019434.1,4965-4983).
gagattcctgactctgtta

SEQ ID NO: 688938 - DNA, 19 bp, Mus musculus
  siRNA target sequence for Mcm3ap (NM_019434.1,4967-4985).
gattcctgactctgttaat

SEQ ID NO: 688939 - DNA, 19 bp, Mus musculus
  siRNA target sequence for Mcm3ap (NM_019434.1,5062-5080).
gctgccagacccttgttca

SEQ ID NO: 688940 - DNA, 19 bp, Mus musculus
  siRNA target sequence for Mcm3ap (NM_019434.1,5168-5186).
ggagcctagcaccattatt

SEQ ID NO: 688941 - DNA, 19 bp, Mus musculus
  siRNA target sequence for Mcm3ap (NM_019434.1,5172-5190).
cctagcaccattattgagt

SEQ ID NO: 688942 - DNA, 19 bp, Mus musculus
  siRNA target sequence for Mcm3ap (NM_019434.1,5176-5194).
gcaccattattgagttgtt

SEQ ID NO: 688943 - DNA, 19 bp, Mus musculus
  siRNA target sequence for Mcm3ap (NM_019434.1,5179-5197).
ccattattgagttgttcaa

SEQ ID NO: 688944 - DNA, 19 bp, Mus musculus
  siRNA target sequence for Mcm3ap (NM_019434.1,5416-5434).
gttccatggtcattcagta

SEQ ID NO: 688945 - DNA, 19 bp, Mus musculus
  siRNA target sequence for Mcm3ap (NM_019434.1,5594-5612).
caccttatgcatcaatcat

SEQ ID NO: 688946 - DNA, 19 bp, Mus musculus
  siRNA target sequence for Mcm3ap (NM_019434.1,5596-5614).
ccttatgcatcaatcataa

SEQ ID NO: 688947 - DNA, 19 bp, Mus musculus
  siRNA target sequence for Mcm3ap (NM_019434.1,5673-5691).
ggtcaaatatgtgtgtatt

SEQ ID NO: 688948 - DNA, 19 bp, Mus musculus
  siRNA target sequence for Mcm3ap (NM_019434.1,5981-5999).
gaacaagaggtttgaagat

SEQ ID NO: 688949 - DNA, 19 bp, Mus musculus
  siRNA target sequence for Mcm3ap (NM_019434.1,6108-6126).
cagaccatggtgaaaacat

SEQ ID NO: 688950 - DNA, 19 bp, Mus musculus
  siRNA target sequence for Mcm3ap (NM_019434.1,6113-6131).
catggtgaaaacatctaca

SEQ ID NO: 688951 - DNA, 19 bp, Mus musculus
  siRNA target sequence for Mcm3ap (NM_019434.1,6187-6205).
catccctgacggaaaagct

SEQ ID NO: 688952 - DNA, 19 bp, Mus musculus
  siRNA target sequence for Nif3l1 (NM_022988.1,1188-1206).
cagacaactttatcagaaa

SEQ ID NO: 688953 - DNA, 19 bp, Mus musculus
  siRNA target sequence for Nif3l1 (NM_022988.1,1201-1219).
cagaaaactgaaattcttt

SEQ ID NO: 688954 - DNA, 19 bp, Mus musculus
  siRNA target sequence for Nif3l1 (NM_022988.1,1265-1283).
gcacactggatgaatctgt

SEQ ID NO: 688955 - DNA, 19 bp, Mus musculus
  siRNA target sequence for Nif3l1 (NM_022988.1,1299-1317).
gatagagcgaatcaaaaca

SEQ ID NO: 688956 - DNA, 19 bp, Mus musculus
  siRNA target sequence for Nif3l1 (NM_022988.1,1354-1372).
gtggggagaacattagagt

SEQ ID NO: 688957 - DNA, 19 bp, Mus musculus
  siRNA target sequence for Nif3l1 (NM_022988.1,1364-1382).
cattagagtcccaagtcaa

SEQ ID NO: 688958 - DNA, 19 bp, Mus musculus
  siRNA target sequence for Nif3l1 (NM_022988.1,1427-1445).
gagtggaggccgaccttta

SEQ ID NO: 688959 - DNA, 19 bp, Mus musculus
  siRNA target sequence for Nif3l1 (NM_022988.1,1487-1505).
cttccaaagggatcaatgt

SEQ ID NO: 688960 - DNA, 19 bp, Mus musculus
  siRNA target sequence for Nif3l1 (NM_022988.1,1495-1513).
gggatcaatgtcatccttt

SEQ ID NO: 688961 - DNA, 19 bp, Mus musculus
  siRNA target sequence for Nif3l1 (NM_022988.1,1566-1584).
gggtgttcactttgagaat

SEQ ID NO: 688962 - DNA, 19 bp, Mus musculus
  siRNA target sequence for Nif3l1 (NM_022988.1,1570-1588).
gttcactttgagaataaga

SEQ ID NO: 688963 - DNA, 19 bp, Mus musculus
  siRNA target sequence for Nif3l1 (NM_022988.1,1573-1591).
cactttgagaataagatta

SEQ ID NO: 688964 - DNA, 19 bp, Mus musculus
  siRNA target sequence for Piwil2 (NM_021308.1,204-222).
cctgtcaggccgttgttca

SEQ ID NO: 688965 - DNA, 19 bp, Mus musculus
  siRNA target sequence for Piwil2 (NM_021308.1,374-392).
ccagccagtacaaaaggat

SEQ ID NO: 688966 - DNA, 19 bp, Mus musculus
  siRNA target sequence for Piwil2 (NM_021308.1,375-393).
cagccagtacaaaaggatt

SEQ ID NO: 688967 - DNA, 19 bp, Mus musculus
  siRNA target sequence for Piwil2 (NM_021308.1,601-619).
ctgttggttggagtagaat

SEQ ID NO: 688968 - DNA, 19 bp, Mus musculus
  siRNA target sequence for Piwil2 (NM_021308.1,790-808).
cccctccggtcctgactat

SEQ ID NO: 688969 - DNA, 19 bp, Mus musculus
  siRNA target sequence for Piwil2 (NM_021308.1,803-821).
gactatggaacgaaaggaa

SEQ ID NO: 688970 - DNA, 19 bp, Mus musculus
  siRNA target sequence for Piwil2 (NM_021308.1,836-854).
caagcaaggatcaaaagga

SEQ ID NO: 688971 - DNA, 19 bp, Mus musculus
  siRNA target sequence for Piwil2 (NM_021308.1,895-913).
gtcataacgaagcagttta

SEQ ID NO: 688972 - DNA, 19 bp, Mus musculus
  siRNA target sequence for Piwil2 (NM_021308.1,1047-1065).
caacaagttgttgagttaa

SEQ ID NO: 688973 - DNA, 19 bp, Mus musculus
  siRNA target sequence for Piwil2 (NM_021308.1,1083-1101).
gacgatgccgagatcagta

SEQ ID NO: 688974 - DNA, 19 bp, Mus musculus
  siRNA target sequence for Piwil2 (NM_021308.1,1089-1107).
gccgagatcagtatcaaga

SEQ ID NO: 688975 - DNA, 19 bp, Mus musculus
  siRNA target sequence for Piwil2 (NM_021308.1,1091-1109).
cgagatcagtatcaagatt

SEQ ID NO: 688976 - DNA, 19 bp, Mus musculus
  siRNA target sequence for Piwil2 (NM_021308.1,1273-1291).
ctggctatgcggctagtat

SEQ ID NO: 688977 - DNA, 19 bp, Mus musculus
  siRNA target sequence for Piwil2 (NM_021308.1,1320-1338).
ctcgctgatgtctctcata

SEQ ID NO: 688978 - DNA, 19 bp, Mus musculus
  siRNA target sequence for Piwil2 (NM_021308.1,1443-1461).
gtcatcacgcgctacaaca

SEQ ID NO: 688979 - DNA, 19 bp, Mus musculus
  siRNA target sequence for Piwil2 (NM_021308.1,1445-1463).
catcacgcgctacaacaat

SEQ ID NO: 688980 - DNA, 19 bp, Mus musculus
  siRNA target sequence for Piwil2 (NM_021308.1,1468-1486).
cctaccgaatcgatgatgt

SEQ ID NO: 688981 - DNA, 19 bp, Mus musculus
  siRNA target sequence for Piwil2 (NM_021308.1,1551-1569).
gaatactacagcaaaaact

SEQ ID NO: 688982 - DNA, 19 bp, Mus musculus
  siRNA target sequence for Piwil2 (NM_021308.1,1616-1634).
gcccagtgagagacagaat

SEQ ID NO: 688983 - DNA, 19 bp, Mus musculus
  siRNA target sequence for Piwil2 (NM_021308.1,1737-1755).
gacttgactcagcagatta

SEQ ID NO: 688984 - DNA, 19 bp, Mus musculus
  siRNA target sequence for Piwil2 (NM_021308.1,1772-1790).
gcaccacggtgctttggaa

SEQ ID NO: 688985 - DNA, 19 bp, Mus musculus
  siRNA target sequence for Piwil2 (NM_021308.1,1773-1791).
caccacggtgctttggaat

SEQ ID NO: 688986 - DNA, 19 bp, Mus musculus
  siRNA target sequence for Piwil2 (NM_021308.1,1796-1814).
gctgcagagaatttcacaa

SEQ ID NO: 688987 - DNA, 19 bp, Mus musculus
  siRNA target sequence for Piwil2 (NM_021308.1,1846-1864).
gggggctcagtctgcataa

SEQ ID NO: 688988 - DNA, 19 bp, Mus musculus
  siRNA target sequence for Piwil2 (NM_021308.1,1847-1865).
ggggctcagtctgcataaa

SEQ ID NO: 688989 - DNA, 19 bp, Mus musculus
  siRNA target sequence for Piwil2 (NM_021308.1,1896-1914).
ccaatggagaggatcaact

SEQ ID NO: 688990 - DNA, 19 bp, Mus musculus
  siRNA target sequence for Piwil2 (NM_021308.1,1897-1915).
caatggagaggatcaactt

SEQ ID NO: 688991 - DNA, 19 bp, Mus musculus
  siRNA target sequence for Piwil2 (NM_021308.1,1946-1964).
cctgaactgggttaaggaa

SEQ ID NO: 688992 - DNA, 19 bp, Mus musculus
  siRNA target sequence for Piwil2 (NM_021308.1,1970-1988).
cagagatgcttccattcta

SEQ ID NO: 688993 - DNA, 19 bp, Mus musculus
  siRNA target sequence for Piwil2 (NM_021308.1,1974-1992).
gatgcttccattctaacta

SEQ ID NO: 688994 - DNA, 19 bp, Mus musculus
  siRNA target sequence for Piwil2 (NM_021308.1,1986-2004).
ctaactattcccatgcatt

SEQ ID NO: 688995 - DNA, 19 bp, Mus musculus
  siRNA target sequence for Piwil2 (NM_021308.1,2006-2024).
ctgggcactcttttatcca

SEQ ID NO: 688996 - DNA, 19 bp, Mus musculus
  siRNA target sequence for Piwil2 (NM_021308.1,2043-2061).
gccagagaactggttaaca

SEQ ID NO: 688997 - DNA, 19 bp, Mus musculus
  siRNA target sequence for Piwil2 (NM_021308.1,2047-2065).
gagaactggttaacatgtt

SEQ ID NO: 688998 - DNA, 19 bp, Mus musculus
  siRNA target sequence for Piwil2 (NM_021308.1,2052-2070).
ctggttaacatgttggaaa

SEQ ID NO: 688999 - DNA, 19 bp, Mus musculus
  siRNA target sequence for Piwil2 (NM_021308.1,2130-2148).
gaccgaatagagacctata

SEQ ID NO: 689000 - DNA, 19 bp, Mus musculus
  siRNA target sequence for Piwil2 (NM_021308.1,2175-2193).
gttgaggggaagatacaaa

SEQ ID NO: 689001 - DNA, 19 bp, Mus musculus
  siRNA target sequence for Piwil2 (NM_021308.1,2210-2228).
catgggcacacgtgatgat

SEQ ID NO: 689002 - DNA, 19 bp, Mus musculus
  siRNA target sequence for Piwil2 (NM_021308.1,2215-2233).
gcacacgtgatgatctcta

SEQ ID NO: 689003 - DNA, 19 bp, Mus musculus
  siRNA target sequence for Piwil2 (NM_021308.1,2216-2234).
cacacgtgatgatctctat

SEQ ID NO: 689004 - DNA, 19 bp, Mus musculus
  siRNA target sequence for Piwil2 (NM_021308.1,2285-2303).
catcaatgtccgaaccatt

SEQ ID NO: 689005 - DNA, 19 bp, Mus musculus
  siRNA target sequence for Piwil2 (NM_021308.1,2322-2340).
cggagcgtggctcagaaaa

SEQ ID NO: 689006 - DNA, 19 bp, Mus musculus
  siRNA target sequence for Piwil2 (NM_021308.1,2323-2341).
ggagcgtggctcagaaaat

SEQ ID NO: 689007 - DNA, 19 bp, Mus musculus
  siRNA target sequence for Piwil2 (NM_021308.1,2326-2344).
gcgtggctcagaaaatttt

SEQ ID NO: 689008 - DNA, 19 bp, Mus musculus
  siRNA target sequence for Piwil2 (NM_021308.1,2327-2345).
cgtggctcagaaaatttta

SEQ ID NO: 689009 - DNA, 19 bp, Mus musculus
  siRNA target sequence for Piwil2 (NM_021308.1,2387-2405).
ggatattccgctgaaacaa

SEQ ID NO: 689010 - DNA, 19 bp, Mus musculus
  siRNA target sequence for Piwil2 (NM_021308.1,2395-2413).
cgctgaaacaactaatggt

SEQ ID NO: 689011 - DNA, 19 bp, Mus musculus
  siRNA target sequence for Piwil2 (NM_021308.1,2466-2484).
ggcttcgtggccagcataa

SEQ ID NO: 689012 - DNA, 19 bp, Mus musculus
  siRNA target sequence for Piwil2 (NM_021308.1,2467-2485).
gcttcgtggccagcataaa

SEQ ID NO: 689013 - DNA, 19 bp, Mus musculus
  siRNA target sequence for Piwil2 (NM_021308.1,2468-2486).
cttcgtggccagcataaat

SEQ ID NO: 689014 - DNA, 19 bp, Mus musculus
  siRNA target sequence for Piwil2 (NM_021308.1,2472-2490).
gtggccagcataaatctca

SEQ ID NO: 689015 - DNA, 19 bp, Mus musculus
  siRNA target sequence for Piwil2 (NM_021308.1,2568-2586).
gtgggttccttgaaaaagt

SEQ ID NO: 689016 - DNA, 19 bp, Mus musculus
  siRNA target sequence for Piwil2 (NM_021308.1,2570-2588).
gggttccttgaaaaagtat

SEQ ID NO: 689017 - DNA, 19 bp, Mus musculus
  siRNA target sequence for Piwil2 (NM_021308.1,2575-2593).
ccttgaaaaagtattatga

SEQ ID NO: 689018 - DNA, 19 bp, Mus musculus
  siRNA target sequence for Piwil2 (NM_021308.1,2605-2623).
gtctcccagagaaaattgt

SEQ ID NO: 689019 - DNA, 19 bp, Mus musculus
  siRNA target sequence for Piwil2 (NM_021308.1,2698-2716).
gttttgaagcctttgataa

SEQ ID NO: 689020 - DNA, 19 bp, Mus musculus
  siRNA target sequence for Piwil2 (NM_021308.1,2726-2744).
caagatggtggtgtttgta

SEQ ID NO: 689021 - DNA, 19 bp, Mus musculus
  siRNA target sequence for Piwil2 (NM_021308.1,2810-2828).
cgggactgtggttgatcat

SEQ ID NO: 689022 - DNA, 19 bp, Mus musculus
  siRNA target sequence for Piwil2 (NM_021308.1,2811-2829).
gggactgtggttgatcata

SEQ ID NO: 689023 - DNA, 19 bp, Mus musculus
  siRNA target sequence for Piwil2 (NM_021308.1,2815-2833).
ctgtggttgatcataccat

SEQ ID NO: 689024 - DNA, 19 bp, Mus musculus
  siRNA target sequence for Piwil2 (NM_021308.1,2820-2838).
gttgatcataccataacca

SEQ ID NO: 689025 - DNA, 19 bp, Mus musculus
  siRNA target sequence for Piwil2 (NM_021308.1,2893-2911).
gcatacctacacactacat

SEQ ID NO: 689026 - DNA, 19 bp, Mus musculus
  siRNA target sequence for Piwil2 (NM_021308.1,2946-2964).
cacatgcagaggttgactt

SEQ ID NO: 689027 - DNA, 19 bp, Mus musculus
  siRNA target sequence for Piwil2 (NM_021308.1,3055-3073).
gacagattttgcatcatga

SEQ ID NO: 689028 - DNA, 19 bp, Mus musculus
  siRNA target sequence for Pmfbp1 (NM_019938.1,100-118).
gcttaaaggagaattacga

SEQ ID NO: 689029 - DNA, 19 bp, Mus musculus
  siRNA target sequence for Pmfbp1 (NM_019938.1,101-119).
cttaaaggagaattacgaa

SEQ ID NO: 689030 - DNA, 19 bp, Mus musculus
  siRNA target sequence for Pmfbp1 (NM_019938.1,159-177).
gggatgtcagcaatctaaa

SEQ ID NO: 689031 - DNA, 19 bp, Mus musculus
  siRNA target sequence for Pmfbp1 (NM_019938.1,192-210).
gcctacaactggacatcaa

SEQ ID NO: 689032 - DNA, 19 bp, Mus musculus
  siRNA target sequence for Pmfbp1 (NM_019938.1,307-325).
gcaagcccagacgttagta

SEQ ID NO: 689033 - DNA, 19 bp, Mus musculus
  siRNA target sequence for Pmfbp1 (NM_019938.1,308-326).
caagcccagacgttagtat

SEQ ID NO: 689034 - DNA, 19 bp, Mus musculus
  siRNA target sequence for Pmfbp1 (NM_019938.1,311-329).
gcccagacgttagtattca

SEQ ID NO: 689035 - DNA, 19 bp, Mus musculus
  siRNA target sequence for Pmfbp1 (NM_019938.1,346-364).
cttccgggtcaataagcaa

SEQ ID NO: 689036 - DNA, 19 bp, Mus musculus
  siRNA target sequence for Pmfbp1 (NM_019938.1,351-369).
gggtcaataagcaatacca

SEQ ID NO: 689037 - DNA, 19 bp, Mus musculus
  siRNA target sequence for Pmfbp1 (NM_019938.1,375-393).
ggcaactccagcaactgaa

SEQ ID NO: 689038 - DNA, 19 bp, Mus musculus
  siRNA target sequence for Pmfbp1 (NM_019938.1,496-514).
gacttccgaccttcttgtt

SEQ ID NO: 689039 - DNA, 19 bp, Mus musculus
  siRNA target sequence for Pmfbp1 (NM_019938.1,518-536).
caccgtcactgcaaactta

SEQ ID NO: 689040 - DNA, 19 bp, Mus musculus
  siRNA target sequence for Pmfbp1 (NM_019938.1,539-557).
gaagatgaggtcattctct

SEQ ID NO: 689041 - DNA, 19 bp, Mus musculus
  siRNA target sequence for Pmfbp1 (NM_019938.1,565-583).
ggagatgggaaatcatagt

SEQ ID NO: 689042 - DNA, 19 bp, Mus musculus
  siRNA target sequence for Pmfbp1 (NM_019938.1,794-812).
ccgaaggttcgaatctaca

SEQ ID NO: 689043 - DNA, 19 bp, Mus musculus
  siRNA target sequence for Pmfbp1 (NM_019938.1,813-831).
cttctccgtgcgtgattca

SEQ ID NO: 689044 - DNA, 19 bp, Mus musculus
  siRNA target sequence for Pmfbp1 (NM_019938.1,816-834).
ctccgtgcgtgattcaaga

SEQ ID NO: 689045 - DNA, 19 bp, Mus musculus
  siRNA target sequence for Pmfbp1 (NM_019938.1,863-881).
gaagtctggcaaaaggttt

SEQ ID NO: 689046 - DNA, 19 bp, Mus musculus
  siRNA target sequence for Pmfbp1 (NM_019938.1,882-900).
ctgaacaggatgacctaat

SEQ ID NO: 689047 - DNA, 19 bp, Mus musculus
  siRNA target sequence for Pmfbp1 (NM_019938.1,949-967).
gcgtgaggaggcgttgata

SEQ ID NO: 689048 - DNA, 19 bp, Mus musculus
  siRNA target sequence for Pmfbp1 (NM_019938.1,950-968).
cgtgaggaggcgttgataa

SEQ ID NO: 689049 - DNA, 19 bp, Mus musculus
  siRNA target sequence for Pmfbp1 (NM_019938.1,951-969).
gtgaggaggcgttgataaa

SEQ ID NO: 689050 - DNA, 19 bp, Mus musculus
  siRNA target sequence for Pmfbp1 (NM_019938.1,955-973).
ggaggcgttgataaaatta

SEQ ID NO: 689051 - DNA, 19 bp, Mus musculus
  siRNA target sequence for Pmfbp1 (NM_019938.1,1427-1445).
gagaagctacagtgtacaa

SEQ ID NO: 689052 - DNA, 19 bp, Mus musculus
  siRNA target sequence for Pmfbp1 (NM_019938.1,1567-1585).
gaaggtgtcagatcagaat

SEQ ID NO: 689053 - DNA, 19 bp, Mus musculus
  siRNA target sequence for Pmfbp1 (NM_019938.1,1571-1589).
gtgtcagatcagaatctaa

SEQ ID NO: 689054 - DNA, 19 bp, Mus musculus
  siRNA target sequence for Pmfbp1 (NM_019938.1,1705-1723).
gagccagttgcataagcta

SEQ ID NO: 689055 - DNA, 19 bp, Mus musculus
  siRNA target sequence for Pmfbp1 (NM_019938.1,1724-1742).
cagaaggagtcttcgaaaa

SEQ ID NO: 689056 - DNA, 19 bp, Mus musculus
  siRNA target sequence for Pmfbp1 (NM_019938.1,1807-1825).
ccagagaaggctttcgaat

SEQ ID NO: 689057 - DNA, 19 bp, Mus musculus
  siRNA target sequence for Pmfbp1 (NM_019938.1,1902-1920).
cccaagtctctgagcaaaa

SEQ ID NO: 689058 - DNA, 19 bp, Mus musculus
  siRNA target sequence for Pmfbp1 (NM_019938.1,1922-1940).
caaagggagctaacaaact

SEQ ID NO: 689059 - DNA, 19 bp, Mus musculus
  siRNA target sequence for Pmfbp1 (NM_019938.1,1928-1946).
gagctaacaaactccataa

SEQ ID NO: 689060 - DNA, 19 bp, Mus musculus
  siRNA target sequence for Pmfbp1 (NM_019938.1,1931-1949).
ctaacaaactccataagga

SEQ ID NO: 689061 - DNA, 19 bp, Mus musculus
  siRNA target sequence for Pmfbp1 (NM_019938.1,1960-1978).
ggaacttctggagataaaa

SEQ ID NO: 689062 - DNA, 19 bp, Mus musculus
  siRNA target sequence for Pmfbp1 (NM_019938.1,2000-2018).
gagcaactgaagaagagta

SEQ ID NO: 689063 - DNA, 19 bp, Mus musculus
  siRNA target sequence for Pmfbp1 (NM_019938.1,2050-2068).
cgaggctttgcgacaagaa

SEQ ID NO: 689064 - DNA, 19 bp, Mus musculus
  siRNA target sequence for Pmfbp1 (NM_019938.1,2060-2078).
cgacaagaagcgaaaagga

SEQ ID NO: 689065 - DNA, 19 bp, Mus musculus
  siRNA target sequence for Pmfbp1 (NM_019938.1,2089-2107).
ggcgaaggaacatttgaga

SEQ ID NO: 689066 - DNA, 19 bp, Mus musculus
  siRNA target sequence for Pmfbp1 (NM_019938.1,2090-2108).
gcgaaggaacatttgagaa

SEQ ID NO: 689067 - DNA, 19 bp, Mus musculus
  siRNA target sequence for Pmfbp1 (NM_019938.1,2167-2185).
ggactcctctctcaacaaa

SEQ ID NO: 689068 - DNA, 19 bp, Mus musculus
  siRNA target sequence for Pmfbp1 (NM_019938.1,2277-2295).
cggctatccagaaagagaa

SEQ ID NO: 689069 - DNA, 19 bp, Mus musculus
  siRNA target sequence for Pmfbp1 (NM_019938.1,2308-2326).
gaacatggttagtaaagaa

SEQ ID NO: 689070 - DNA, 19 bp, Mus musculus
  siRNA target sequence for Pmfbp1 (NM_019938.1,2314-2332).
ggttagtaaagaagcttat

SEQ ID NO: 689071 - DNA, 19 bp, Mus musculus
  siRNA target sequence for Pmfbp1 (NM_019938.1,2661-2679).
cgcagctccgagaattcca

SEQ ID NO: 689072 - DNA, 19 bp, Mus musculus
  siRNA target sequence for Pmfbp1 (NM_019938.1,2780-2798).
cgggagaatgaccagatta

SEQ ID NO: 689073 - DNA, 19 bp, Mus musculus
  siRNA target sequence for Pmfbp1 (NM_019938.1,2781-2799).
gggagaatgaccagattat

SEQ ID NO: 689074 - DNA, 19 bp, Mus musculus
  siRNA target sequence for Pmfbp1 (NM_019938.1,2783-2801).
gagaatgaccagattatga

SEQ ID NO: 689075 - DNA, 19 bp, Mus musculus
  siRNA target sequence for Pmfbp1 (NM_019938.1,2906-2924).
gaccacctccacaatgtaa

SEQ ID NO: 689076 - DNA, 19 bp, Mus musculus
  siRNA target sequence for Pmfbp1 (NM_019938.1,3102-3120).
cgaaaacggaccacaagta

SEQ ID NO: 689077 - DNA, 19 bp, Mus musculus
  siRNA target sequence for Sbsn (NM_172205.1,177-195).
ggcccttgaaggcatcaat

SEQ ID NO: 689078 - DNA, 19 bp, Mus musculus
  siRNA target sequence for Sbsn (NM_172205.1,298-316).
gtagcccacgacatcaaca

SEQ ID NO: 689079 - DNA, 19 bp, Mus musculus
  siRNA target sequence for Sbsn (NM_172205.1,324-342).
cggacacgcaggaaaggaa

SEQ ID NO: 689080 - DNA, 19 bp, Mus musculus
  siRNA target sequence for Sbsn (NM_172205.1,1355-1373).
gtcacgggcatggttatta

SEQ ID NO: 689081 - DNA, 19 bp, Mus musculus
  siRNA target sequence for Sbsn (NM_172205.1,1359-1377).
cgggcatggttattatgct

SEQ ID NO: 689082 - DNA, 19 bp, Mus musculus
  siRNA target sequence for Sbsn (NM_172205.1,1459-1477).
cagggtgtccgccatacta

SEQ ID NO: 689083 - DNA, 19 bp, Mus musculus
  siRNA target sequence for Sbsn (NM_172205.1,1463-1481).
gtgtccgccatactattaa

SEQ ID NO: 689084 - DNA, 19 bp, Mus musculus
  siRNA target sequence for Sbsn (NM_172205.1,1832-1850).
ctggccaaggggtcaacta

SEQ ID NO: 689085 - DNA, 19 bp, Mus musculus
  siRNA target sequence for Sbsn (NM_172205.1,1986-2004).
gctgaatgggtctcatcaa

SEQ ID NO: 689086 - DNA, 19 bp, Mus musculus
  siRNA target sequence for Sbsn (NM_172205.1,2040-2058).
cgcaaccactacagtagta

SEQ ID NO: 689087 - DNA, 19 bp, Mus musculus
  siRNA target sequence for Sbsn (NM_172205.1,2069-2087).
cggtcaacaagccatttat

SEQ ID NO: 689088 - DNA, 19 bp, Mus musculus
  siRNA target sequence for Sca7 (NM_139227.2,507-525).
ggacagtcgtggaatctgt

SEQ ID NO: 689089 - DNA, 19 bp, Mus musculus
  siRNA target sequence for Sca7 (NM_139227.2,554-572).
ggatgggaccgaattggat

SEQ ID NO: 689090 - DNA, 19 bp, Mus musculus
  siRNA target sequence for Sca7 (NM_139227.2,560-578).
gaccgaattggatgaaagt

SEQ ID NO: 689091 - DNA, 19 bp, Mus musculus
  siRNA target sequence for Sca7 (NM_139227.2,592-610).
ggaaaaaccgcgaagtcat

SEQ ID NO: 689092 - DNA, 19 bp, Mus musculus
  siRNA target sequence for Sca7 (NM_139227.2,623-641).
ggaagatatgccgatcttt

SEQ ID NO: 689093 - DNA, 19 bp, Mus musculus
  siRNA target sequence for Sca7 (NM_139227.2,654-672).
gcacatgatgatttctact

SEQ ID NO: 689094 - DNA, 19 bp, Mus musculus
  siRNA target sequence for Sca7 (NM_139227.2,655-673).
cacatgatgatttctactt

SEQ ID NO: 689095 - DNA, 19 bp, Mus musculus
  siRNA target sequence for Sca7 (NM_139227.2,668-686).
ctacttggtggtgtgtaat

SEQ ID NO: 689096 - DNA, 19 bp, Mus musculus
  siRNA target sequence for Sca7 (NM_139227.2,689-707).
ctgcaaccaagttgtcaaa

SEQ ID NO: 689097 - DNA, 19 bp, Mus musculus
  siRNA target sequence for Sca7 (NM_139227.2,713-731).
ggcatttcaatctcactat

SEQ ID NO: 689098 - DNA, 19 bp, Mus musculus
  siRNA target sequence for Sca7 (NM_139227.2,786-804).
gtattttccctcttacctt

SEQ ID NO: 689099 - DNA, 19 bp, Mus musculus
  siRNA target sequence for Sca7 (NM_139227.2,877-895).
cctcaagctccaagttact

SEQ ID NO: 689100 - DNA, 19 bp, Mus musculus
  siRNA target sequence for Sca7 (NM_139227.2,883-901).
gctccaagttactcagatt

SEQ ID NO: 689101 - DNA, 19 bp, Mus musculus
  siRNA target sequence for Sca7 (NM_139227.2,898-916).
gattgcccaaagagaaact

SEQ ID NO: 689102 - DNA, 19 bp, Mus musculus
  siRNA target sequence for Sca7 (NM_139227.2,918-936).
ccgctcaggggaaacatga

SEQ ID NO: 689103 - DNA, 19 bp, Mus musculus
  siRNA target sequence for Sca7 (NM_139227.2,949-967).
ccgtgcaacagattaaagt

SEQ ID NO: 689104 - DNA, 19 bp, Mus musculus
  siRNA target sequence for Sca7 (NM_139227.2,994-1012).
ctgtgaaggtagaaaagat

SEQ ID NO: 689105 - DNA, 19 bp, Mus musculus
  siRNA target sequence for Sca7 (NM_139227.2,1025-1043).
ggatggcacactactgaaa

SEQ ID NO: 689106 - DNA, 19 bp, Mus musculus
  siRNA target sequence for Sca7 (NM_139227.2,1029-1047).
ggcacactactgaaatcca

SEQ ID NO: 689107 - DNA, 19 bp, Mus musculus
  siRNA target sequence for Sca7 (NM_139227.2,1088-1106).
caagcctggccttaactgt

SEQ ID NO: 689108 - DNA, 19 bp, Mus musculus
  siRNA target sequence for Sca7 (NM_139227.2,1097-1115).
ccttaactgtccctcaata

SEQ ID NO: 689109 - DNA, 19 bp, Mus musculus
  siRNA target sequence for Sca7 (NM_139227.2,1130-1148).
gccttcacccggacagatt

SEQ ID NO: 689110 - DNA, 19 bp, Mus musculus
  siRNA target sequence for Sca7 (NM_139227.2,1132-1150).
cttcacccggacagattct

SEQ ID NO: 689111 - DNA, 19 bp, Mus musculus
  siRNA target sequence for Sca7 (NM_139227.2,1135-1153).
cacccggacagattctgaa

SEQ ID NO: 689112 - DNA, 19 bp, Mus musculus
  siRNA target sequence for Sca7 (NM_139227.2,1204-1222).
gttctaataacaggaaatt

SEQ ID NO: 689113 - DNA, 19 bp, Mus musculus
  siRNA target sequence for Sca7 (NM_139227.2,1350-1368).
gctgttcagggtagaagaa

SEQ ID NO: 689114 - DNA, 19 bp, Mus musculus
  siRNA target sequence for Sca7 (NM_139227.2,1351-1369).
ctgttcagggtagaagaaa

SEQ ID NO: 689115 - DNA, 19 bp, Mus musculus
  siRNA target sequence for Sca7 (NM_139227.2,1358-1376).
gggtagaagaaaacgattt

SEQ ID NO: 689116 - DNA, 19 bp, Mus musculus
  siRNA target sequence for Sca7 (NM_139227.2,1724-1742).
gaaactggactgtcactat

SEQ ID NO: 689117 - DNA, 19 bp, Mus musculus
  siRNA target sequence for Sca7 (NM_139227.2,1793-1811).
gattggaagaggttattat

SEQ ID NO: 689118 - DNA, 19 bp, Mus musculus
  siRNA target sequence for Sca7 (NM_139227.2,1803-1821).
ggttattatgtgtttgact

SEQ ID NO: 689119 - DNA, 19 bp, Mus musculus
  siRNA target sequence for Sca7 (NM_139227.2,2038-2056).
gcatctccccaaatagcaa

SEQ ID NO: 689120 - DNA, 19 bp, Mus musculus
  siRNA target sequence for Sca7 (NM_139227.2,2039-2057).
catctccccaaatagcaaa

SEQ ID NO: 689121 - DNA, 19 bp, Mus musculus
  siRNA target sequence for Sca7 (NM_139227.2,2220-2238).
cctcagaaatggaaaccta

SEQ ID NO: 689122 - DNA, 19 bp, Mus musculus
  siRNA target sequence for Sca7 (NM_139227.2,2397-2415).
cattccgtgaactctttta

SEQ ID NO: 689123 - DNA, 19 bp, Mus musculus
  siRNA target sequence for Sca7 (NM_139227.2,2401-2419).
ccgtgaactcttttaggaa

SEQ ID NO: 689124 - DNA, 19 bp, Mus musculus
  siRNA target sequence for Sca7 (NM_139227.2,2482-2500).
gcctcaactgtgtgacaaa

SEQ ID NO: 689125 - DNA, 19 bp, Mus musculus
  siRNA target sequence for Sca7 (NM_139227.2,2486-2504).
caactgtgtgacaaataaa

SEQ ID NO: 689126 - DNA, 19 bp, Mus musculus
  siRNA target sequence for Sca7 (NM_139227.2,2767-2785).
ccaagttgccagctatgaa

SEQ ID NO: 689127 - DNA, 19 bp, Mus musculus
  siRNA target sequence for Sca7 (NM_139227.2,2783-2801).
gaacaacgtccacatgaaa

SEQ ID NO: 689128 - DNA, 19 bp, Mus musculus
  siRNA target sequence for Scel (NM_022886.1,230-248).
gttttcaggacgtgaacaa

SEQ ID NO: 689129 - DNA, 19 bp, Mus musculus
  siRNA target sequence for Scel (NM_022886.1,352-370).
gatgccttggacaggaaat

SEQ ID NO: 689130 - DNA, 19 bp, Mus musculus
  siRNA target sequence for Scel (NM_022886.1,355-373).
gccttggacaggaaattaa

SEQ ID NO: 689131 - DNA, 19 bp, Mus musculus
  siRNA target sequence for Scel (NM_022886.1,356-374).
ccttggacaggaaattaat

SEQ ID NO: 689132 - DNA, 19 bp, Mus musculus
  siRNA target sequence for Scel (NM_022886.1,357-375).
cttggacaggaaattaata

SEQ ID NO: 689133 - DNA, 19 bp, Mus musculus
  siRNA target sequence for Scel (NM_022886.1,385-403).
gagccaaaagccacaatta

SEQ ID NO: 689134 - DNA, 19 bp, Mus musculus
  siRNA target sequence for Scel (NM_022886.1,486-504).
ctccttcaatgcaaacact

SEQ ID NO: 689135 - DNA, 19 bp, Mus musculus
  siRNA target sequence for Scel (NM_022886.1,527-545).
ctaccactcctgtgaagaa

SEQ ID NO: 689136 - DNA, 19 bp, Mus musculus
  siRNA target sequence for Scel (NM_022886.1,796-814).
gcggctgcacttcagaaaa

SEQ ID NO: 689137 - DNA, 19 bp, Mus musculus
  siRNA target sequence for Scel (NM_022886.1,819-837).
caagggtgaagaattggat

SEQ ID NO: 689138 - DNA, 19 bp, Mus musculus
  siRNA target sequence for Scel (NM_022886.1,822-840).
gggtgaagaattggataat

SEQ ID NO: 689139 - DNA, 19 bp, Mus musculus
  siRNA target sequence for Scel (NM_022886.1,824-842).
gtgaagaattggataatct

SEQ ID NO: 689140 - DNA, 19 bp, Mus musculus
  siRNA target sequence for Scel (NM_022886.1,835-853).
gataatctcatcagaatga

SEQ ID NO: 689141 - DNA, 19 bp, Mus musculus
  siRNA target sequence for Scel (NM_022886.1,940-958).
cttgaaagcctgatctata

SEQ ID NO: 689142 - DNA, 19 bp, Mus musculus
  siRNA target sequence for Scel (NM_022886.1,997-1015).
gccttcgggagccttaaga

SEQ ID NO: 689143 - DNA, 19 bp, Mus musculus
  siRNA target sequence for Scel (NM_022886.1,998-1016).
ccttcgggagccttaagaa

SEQ ID NO: 689144 - DNA, 19 bp, Mus musculus
  siRNA target sequence for Scel (NM_022886.1,1057-1075).
ctcagatcagttatcagaa

SEQ ID NO: 689145 - DNA, 19 bp, Mus musculus
  siRNA target sequence for Scel (NM_022886.1,1094-1112).
gaatcggcagaagaaaaca

SEQ ID NO: 689146 - DNA, 19 bp, Mus musculus
  siRNA target sequence for Scel (NM_022886.1,1114-1132).
gacctcgatggactgatta

SEQ ID NO: 689147 - DNA, 19 bp, Mus musculus
  siRNA target sequence for Scel (NM_022886.1,1116-1134).
cctcgatggactgattaaa

SEQ ID NO: 689148 - DNA, 19 bp, Mus musculus
  siRNA target sequence for Scel (NM_022886.1,1175-1193).
gccttgacaatcttatcaa

SEQ ID NO: 689149 - DNA, 19 bp, Mus musculus
  siRNA target sequence for Scel (NM_022886.1,1221-1239).
caaagggggtccaagtctt

SEQ ID NO: 689150 - DNA, 19 bp, Mus musculus
  siRNA target sequence for Scel (NM_022886.1,1226-1244).
ggggtccaagtcttgacaa

SEQ ID NO: 689151 - DNA, 19 bp, Mus musculus
  siRNA target sequence for Scel (NM_022886.1,1227-1245).
gggtccaagtcttgacaat

SEQ ID NO: 689152 - DNA, 19 bp, Mus musculus
  siRNA target sequence for Scel (NM_022886.1,1228-1246).
ggtccaagtcttgacaatt

SEQ ID NO: 689153 - DNA, 19 bp, Mus musculus
  siRNA target sequence for Scel (NM_022886.1,1229-1247).
gtccaagtcttgacaattt

SEQ ID NO: 689154 - DNA, 19 bp, Mus musculus
  siRNA target sequence for Scel (NM_022886.1,1231-1249).
ccaagtcttgacaatttca

SEQ ID NO: 689155 - DNA, 19 bp, Mus musculus
  siRNA target sequence for Scel (NM_022886.1,1317-1335).
gaccccctcagcaaacaga

SEQ ID NO: 689156 - DNA, 19 bp, Mus musculus
  siRNA target sequence for Scel (NM_022886.1,1370-1388).
caagcccccaaactatcaa

SEQ ID NO: 689157 - DNA, 19 bp, Mus musculus
  siRNA target sequence for Scel (NM_022886.1,1394-1412).
ctgctagacaccaagatct

SEQ ID NO: 689158 - DNA, 19 bp, Mus musculus
  siRNA target sequence for Scel (NM_022886.1,1400-1418).
gacaccaagatctcgataa

SEQ ID NO: 689159 - DNA, 19 bp, Mus musculus
  siRNA target sequence for Scel (NM_022886.1,1413-1431).
cgataagttcatcaaagta

SEQ ID NO: 689160 - DNA, 19 bp, Mus musculus
  siRNA target sequence for Scel (NM_022886.1,1419-1437).
gttcatcaaagtaaatcct

SEQ ID NO: 689161 - DNA, 19 bp, Mus musculus
  siRNA target sequence for Scel (NM_022886.1,1511-1529).
gcgagcaaagcgaagagtt

SEQ ID NO: 689162 - DNA, 19 bp, Mus musculus
  siRNA target sequence for Scel (NM_022886.1,1521-1539).
cgaagagttggacaatctt

SEQ ID NO: 689163 - DNA, 19 bp, Mus musculus
  siRNA target sequence for Scel (NM_022886.1,1647-1665).
ccaagccaatggattgact

SEQ ID NO: 689164 - DNA, 19 bp, Mus musculus
  siRNA target sequence for Scel (NM_022886.1,1691-1709).
gagcctcggtctattctta

SEQ ID NO: 689165 - DNA, 19 bp, Mus musculus
  siRNA target sequence for Scel (NM_022886.1,1790-1808).
catatgtggagaacagtaa

SEQ ID NO: 689166 - DNA, 19 bp, Mus musculus
  siRNA target sequence for Scel (NM_022886.1,1822-1840).
ggttatcaggaaaatatct

SEQ ID NO: 689167 - DNA, 19 bp, Mus musculus
  siRNA target sequence for Scel (NM_022886.1,1874-1892).
cagataggtctgtcattga

SEQ ID NO: 689168 - DNA, 19 bp, Mus musculus
  siRNA target sequence for Scel (NM_022886.1,1929-1947).
ggtggaaaccaagatgatt

SEQ ID NO: 689169 - DNA, 19 bp, Mus musculus
  siRNA target sequence for Scel (NM_022886.1,1951-1969).
gatgaattacagatctgtt

SEQ ID NO: 689170 - DNA, 19 bp, Mus musculus
  siRNA target sequence for Scel (NM_022886.1,1980-1998).
ctgctttaagtgtgaaata

SEQ ID NO: 689171 - DNA, 19 bp, Mus musculus
  siRNA target sequence for Scel (NM_022886.1,2023-2041).
caggcaggagacagtattt

SEQ ID NO: 689172 - DNA, 19 bp, Mus musculus
  siRNA target sequence for Scel (NM_022886.1,2066-2084).
gtgagccctgctactctaa

SEQ ID NO: 689173 - DNA, 19 bp, Mus musculus
  siRNA target sequence for Sh3bp5 (NM_011894.1,58-76).
ctggagaagttaaatcaat

SEQ ID NO: 689174 - DNA, 19 bp, Mus musculus
  siRNA target sequence for Sh3bp5 (NM_011894.1,147-165).
cgaggcaacggtgaaacta

SEQ ID NO: 689175 - DNA, 19 bp, Mus musculus
  siRNA target sequence for Sh3bp5 (NM_011894.1,434-452).
caaggagtgagctagtaca

SEQ ID NO: 689176 - DNA, 19 bp, Mus musculus
  siRNA target sequence for Sh3bp5 (NM_011894.1,550-568).
gagctaaaggcaaagtact

SEQ ID NO: 689177 - DNA, 19 bp, Mus musculus
  siRNA target sequence for Sh3bp5 (NM_011894.1,666-684).
gaggatctcagatgagata

SEQ ID NO: 689178 - DNA, 19 bp, Mus musculus
  siRNA target sequence for Sh3bp5 (NM_011894.1,668-686).
ggatctcagatgagataca

SEQ ID NO: 689179 - DNA, 19 bp, Mus musculus
  siRNA target sequence for Sip1 (NM_025656.1,122-140).
gttgatgccacggttgtta

SEQ ID NO: 689180 - DNA, 19 bp, Mus musculus
  siRNA target sequence for Sip1 (NM_025656.1,158-176).
cttgacggaaggtttcgat

SEQ ID NO: 689181 - DNA, 19 bp, Mus musculus
  siRNA target sequence for Sip1 (NM_025656.1,191-209).
caggacgcctcaggaatat

SEQ ID NO: 689182 - DNA, 19 bp, Mus musculus
  siRNA target sequence for Sip1 (NM_025656.1,193-211).
ggacgcctcaggaatatct

SEQ ID NO: 689183 - DNA, 19 bp, Mus musculus
  siRNA target sequence for Sip1 (NM_025656.1,259-277).
cccagattgacccaaagaa

SEQ ID NO: 689184 - DNA, 19 bp, Mus musculus
  siRNA target sequence for Sip1 (NM_025656.1,261-279).
cagattgacccaaagaagt

SEQ ID NO: 689185 - DNA, 19 bp, Mus musculus
  siRNA target sequence for Sip1 (NM_025656.1,374-392).
ggcacatttttcaactgtt

SEQ ID NO: 689186 - DNA, 19 bp, Mus musculus
  siRNA target sequence for Sip1 (NM_025656.1,452-470).
ggcaatgccaaaatctgaa

SEQ ID NO: 689187 - DNA, 19 bp, Mus musculus
  siRNA target sequence for Sip1 (NM_025656.1,458-476).
gccaaaatctgaagatgaa

SEQ ID NO: 689188 - DNA, 19 bp, Mus musculus
  siRNA target sequence for Sip1 (NM_025656.1,550-568).
gccctgggatcgattatgt

SEQ ID NO: 689189 - DNA, 19 bp, Mus musculus
  siRNA target sequence for Sip1 (NM_025656.1,551-569).
ccctgggatcgattatgta

SEQ ID NO: 689190 - DNA, 19 bp, Mus musculus
  siRNA target sequence for Sip1 (NM_025656.1,556-574).
ggatcgattatgtacaagt

SEQ ID NO: 689191 - DNA, 19 bp, Mus musculus
  siRNA target sequence for Sip1 (NM_025656.1,557-575).
gatcgattatgtacaagtt

SEQ ID NO: 689192 - DNA, 19 bp, Mus musculus
  siRNA target sequence for Sip1 (NM_025656.1,611-629).
gaatcagacaaccattact

SEQ ID NO: 689193 - DNA, 19 bp, Mus musculus
  siRNA target sequence for Sip1 (NM_025656.1,628-646).
ctagtgtcttggaatatct

SEQ ID NO: 689194 - DNA, 19 bp, Mus musculus
  siRNA target sequence for Sip1 (NM_025656.1,635-653).
cttggaatatctaagtaat

SEQ ID NO: 689195 - DNA, 19 bp, Mus musculus
  siRNA target sequence for Sip1 (NM_025656.1,639-657).
gaatatctaagtaattggt

SEQ ID NO: 689196 - DNA, 19 bp, Mus musculus
  siRNA target sequence for Sip1 (NM_025656.1,715-733).
gtcttgaaaagcctttatt

SEQ ID NO: 689197 - DNA, 19 bp, Mus musculus
  siRNA target sequence for Sip1 (NM_025656.1,735-753).
cctgaggctcattcactaa

SEQ ID NO: 689198 - DNA, 19 bp, Mus musculus
  siRNA target sequence for Sip1 (NM_025656.1,817-835).
gagtcccagctttgaatct

SEQ ID NO: 689199 - DNA, 19 bp, Mus musculus
  siRNA target sequence for Smpx (NM_025357.1,219-237).
cgaagcagccaatttccaa

SEQ ID NO: 689200 - DNA, 19 bp, Mus musculus
  siRNA target sequence for Smpx (NM_025357.1,243-261).
gagccatccaggcgaatat

SEQ ID NO: 689201 - DNA, 19 bp, Mus musculus
  siRNA target sequence for Smpx (NM_025357.1,245-263).
gccatccaggcgaatatca

SEQ ID NO: 689202 - DNA, 19 bp, Mus musculus
  siRNA target sequence for Smpx (NM_025357.1,246-264).
ccatccaggcgaatatcaa

SEQ ID NO: 689203 - DNA, 19 bp, Mus musculus
  siRNA target sequence for Smpx (NM_025357.1,247-265).
catccaggcgaatatcaat

SEQ ID NO: 689204 - DNA, 19 bp, Mus musculus
  siRNA target sequence for Smpx (NM_025357.1,250-268).
ccaggcgaatatcaatatt

SEQ ID NO: 689205 - DNA, 19 bp, Mus musculus
  siRNA target sequence for Smpx (NM_025357.1,253-271).
ggcgaatatcaatattcca

SEQ ID NO: 689206 - DNA, 19 bp, Mus musculus
  siRNA target sequence for Smpx (NM_025357.1,254-272).
gcgaatatcaatattccaa

SEQ ID NO: 689207 - DNA, 19 bp, Mus musculus
  siRNA target sequence for Smpx (NM_025357.1,255-273).
cgaatatcaatattccaat

SEQ ID NO: 689208 - DNA, 19 bp, Mus musculus
  siRNA target sequence for Smpx (NM_025357.1,419-437).
gagatccaaaatgttaaaa

SEQ ID NO: 689209 - DNA, 19 bp, Mus musculus
  siRNA target sequence for Snca (NM_009221.1,322-340).
cctctatgtaggttccaaa

SEQ ID NO: 689210 - DNA, 19 bp, Mus musculus
  siRNA target sequence for Snca (NM_009221.1,573-591).
gcagtgaggcttatgaaat

SEQ ID NO: 689211 - DNA, 19 bp, Mus musculus
  siRNA target sequence for Sncb (NM_033610.2,380-398).
gccacgggcctggtgaaaa

SEQ ID NO: 689212 - DNA, 19 bp, Mus musculus
  siRNA target sequence for Sncb (NM_033610.2,381-399).
ccacgggcctggtgaaaaa

SEQ ID NO: 689213 - DNA, 19 bp, Mus musculus
  siRNA target sequence for Sncb (NM_033610.2,384-402).
cgggcctggtgaaaaagga

SEQ ID NO: 689214 - DNA, 19 bp, Mus musculus
  siRNA target sequence for Sncb (NM_033610.2,507-525).
caccccaggaggaatacca

SEQ ID NO: 689215 - DNA, 19 bp, Mus musculus
  siRNA target sequence for Sncg (NM_011430.1,166-184).
ccaaggagggggttatgta

SEQ ID NO: 689216 - DNA, 19 bp, Mus musculus
  siRNA target sequence for Sncg (NM_011430.1,167-185).
caaggagggggttatgtat

SEQ ID NO: 689217 - DNA, 19 bp, Mus musculus
  siRNA target sequence for Spats2 (NM_139140.1,344-362).
catcaggattcatttttga

SEQ ID NO: 689218 - DNA, 19 bp, Mus musculus
  siRNA target sequence for Spats2 (NM_139140.1,390-408).
gggaggaacctttgagaat

SEQ ID NO: 689219 - DNA, 19 bp, Mus musculus
  siRNA target sequence for Spats2 (NM_139140.1,426-444).
cgcggtacgtgcgatagtt

SEQ ID NO: 689220 - DNA, 19 bp, Mus musculus
  siRNA target sequence for Spats2 (NM_139140.1,434-452).
gtgcgatagttcccaataa

SEQ ID NO: 689221 - DNA, 19 bp, Mus musculus
  siRNA target sequence for Spats2 (NM_139140.1,436-454).
gcgatagttcccaataaga

SEQ ID NO: 689222 - DNA, 19 bp, Mus musculus
  siRNA target sequence for Spats2 (NM_139140.1,546-564).
gctcaaagaatggatagta

SEQ ID NO: 689223 - DNA, 19 bp, Mus musculus
  siRNA target sequence for Spats2 (NM_139140.1,547-565).
ctcaaagaatggatagtaa

SEQ ID NO: 689224 - DNA, 19 bp, Mus musculus
  siRNA target sequence for Spats2 (NM_139140.1,631-649).
gccccagactccagtaagt

SEQ ID NO: 689225 - DNA, 19 bp, Mus musculus
  siRNA target sequence for Spats2 (NM_139140.1,762-780).
gctggagacgctgtcaata

SEQ ID NO: 689226 - DNA, 19 bp, Mus musculus
  siRNA target sequence for Spats2 (NM_139140.1,881-899).
ctttgactgcgcactctat

SEQ ID NO: 689227 - DNA, 19 bp, Mus musculus
  siRNA target sequence for Spats2 (NM_139140.1,920-938).
ggaacgctgccaaatctct

SEQ ID NO: 689228 - DNA, 19 bp, Mus musculus
  siRNA target sequence for Spats2 (NM_139140.1,953-971).
caggagcacaggtttcaaa

SEQ ID NO: 689229 - DNA, 19 bp, Mus musculus
  siRNA target sequence for Spats2 (NM_139140.1,998-1016).
cttccaccaataaaaagct

SEQ ID NO: 689230 - DNA, 19 bp, Mus musculus
  siRNA target sequence for Spats2 (NM_139140.1,1015-1033).
ctaggttctaatattgaga

SEQ ID NO: 689231 - DNA, 19 bp, Mus musculus
  siRNA target sequence for Spats2 (NM_139140.1,1018-1036).
ggttctaatattgagaaat

SEQ ID NO: 689232 - DNA, 19 bp, Mus musculus
  siRNA target sequence for Spats2 (NM_139140.1,1076-1094).
ggtaccgagttgtcgttaa

SEQ ID NO: 689233 - DNA, 19 bp, Mus musculus
  siRNA target sequence for Spats2 (NM_139140.1,1077-1095).
gtaccgagttgtcgttaaa

SEQ ID NO: 689234 - DNA, 19 bp, Mus musculus
  siRNA target sequence for Spats2 (NM_139140.1,1080-1098).
ccgagttgtcgttaaagaa

SEQ ID NO: 689235 - DNA, 19 bp, Mus musculus
  siRNA target sequence for Spats2 (NM_139140.1,1099-1117).
gagatggatgcgtccatta

SEQ ID NO: 689236 - DNA, 19 bp, Mus musculus
  siRNA target sequence for Spats2 (NM_139140.1,1104-1122).
ggatgcgtccattaagaaa

SEQ ID NO: 689237 - DNA, 19 bp, Mus musculus
  siRNA target sequence for Spats2 (NM_139140.1,1105-1123).
gatgcgtccattaagaaaa

SEQ ID NO: 689238 - DNA, 19 bp, Mus musculus
  siRNA target sequence for Spats2 (NM_139140.1,1108-1126).
gcgtccattaagaaaatga

SEQ ID NO: 689239 - DNA, 19 bp, Mus musculus
  siRNA target sequence for Spats2 (NM_139140.1,1132-1150).
gcgtttgccgaattgcaaa

SEQ ID NO: 689240 - DNA, 19 bp, Mus musculus
  siRNA target sequence for Spats2 (NM_139140.1,1140-1158).
cgaattgcaaagctgttta

SEQ ID NO: 689241 - DNA, 19 bp, Mus musculus
  siRNA target sequence for Spats2 (NM_139140.1,1141-1159).
gaattgcaaagctgtttaa

SEQ ID NO: 689242 - DNA, 19 bp, Mus musculus
  siRNA target sequence for Spats2 (NM_139140.1,1179-1197).
gcttgctgagatggataaa

SEQ ID NO: 689243 - DNA, 19 bp, Mus musculus
  siRNA target sequence for Spats2 (NM_139140.1,1332-1350).
cagtgagcggaaatatgat

SEQ ID NO: 689244 - DNA, 19 bp, Mus musculus
  siRNA target sequence for Spats2 (NM_139140.1,1334-1352).
gtgagcggaaatatgatga

SEQ ID NO: 689245 - DNA, 19 bp, Mus musculus
  siRNA target sequence for Spats2 (NM_139140.1,1426-1444).
gtgtcacatccaaagaaca

SEQ ID NO: 689246 - DNA, 19 bp, Mus musculus
  siRNA target sequence for Spats2 (NM_139140.1,1488-1506).
cttgagtggcccaagtgat

SEQ ID NO: 689247 - DNA, 19 bp, Mus musculus
  siRNA target sequence for Spats2 (NM_139140.1,1555-1573).
ggtgctaacaagagaaact

SEQ ID NO: 689248 - DNA, 19 bp, Mus musculus
  siRNA target sequence for Spats2 (NM_139140.1,1629-1647).
ggctcatcgggaggtattt

SEQ ID NO: 689249 - DNA, 19 bp, Mus musculus
  siRNA target sequence for Spats2 (NM_139140.1,1678-1696).
cgggcacaaagccaaaaga

SEQ ID NO: 689250 - DNA, 19 bp, Mus musculus
  siRNA target sequence for Spats2 (NM_139140.1,1880-1898).
ccaagccttcgttcaaaaa

SEQ ID NO: 689251 - DNA, 19 bp, Mus musculus
  siRNA target sequence for Spats2 (NM_139140.1,1903-1921).
ctcccacagcgcaaaccaa

SEQ ID NO: 689252 - DNA, 19 bp, Mus musculus
  siRNA target sequence for Sync (NM_023485.2,183-201).
caccgaggcgagttttcct

SEQ ID NO: 689253 - DNA, 19 bp, Mus musculus
  siRNA target sequence for Sync (NM_023485.2,279-297).
cctagaggacattctctat

SEQ ID NO: 689254 - DNA, 19 bp, Mus musculus
  siRNA target sequence for Sync (NM_023485.2,302-320).
gggcatcgggggactttga

SEQ ID NO: 689255 - DNA, 19 bp, Mus musculus
  siRNA target sequence for Sync (NM_023485.2,303-321).
ggcatcgggggactttgaa

SEQ ID NO: 689256 - DNA, 19 bp, Mus musculus
  siRNA target sequence for Sync (NM_023485.2,352-370).
ccagcactgacactgttta

SEQ ID NO: 689257 - DNA, 19 bp, Mus musculus
  siRNA target sequence for Sync (NM_023485.2,353-371).
cagcactgacactgtttat

SEQ ID NO: 689258 - DNA, 19 bp, Mus musculus
  siRNA target sequence for Sync (NM_023485.2,458-476).
cgccagatgaggtgcaaat

SEQ ID NO: 689259 - DNA, 19 bp, Mus musculus
  siRNA target sequence for Sync (NM_023485.2,515-533).
cttgtgagggagaaatggt

SEQ ID NO: 689260 - DNA, 19 bp, Mus musculus
  siRNA target sequence for Sync (NM_023485.2,843-861).
ggaatgcgtggcttaccaa

SEQ ID NO: 689261 - DNA, 19 bp, Mus musculus
  siRNA target sequence for Sync (NM_023485.2,844-862).
gaatgcgtggcttaccaat

SEQ ID NO: 689262 - DNA, 19 bp, Mus musculus
  siRNA target sequence for Sync (NM_023485.2,848-866).
gcgtggcttaccaatacca

SEQ ID NO: 689263 - DNA, 19 bp, Mus musculus
  siRNA target sequence for Sync (NM_023485.2,935-953).
cccagctctcggaagaact

SEQ ID NO: 689264 - DNA, 19 bp, Mus musculus
  siRNA target sequence for Sync (NM_023485.2,1062-1080).
gtcgacacagtttgaaaat

SEQ ID NO: 689265 - DNA, 19 bp, Mus musculus
  siRNA target sequence for Sync (NM_023485.2,1278-1296).
cacgctcgtgaggcaaaaa

SEQ ID NO: 689266 - DNA, 19 bp, Mus musculus
  siRNA target sequence for Sync (NM_023485.2,1298-1316).
gcgatgaagaggttcaaca

SEQ ID NO: 689267 - DNA, 19 bp, Mus musculus
  siRNA target sequence for Sync (NM_023485.2,1364-1382).
gcagtggggtgcaagttca

SEQ ID NO: 689268 - DNA, 19 bp, Mus musculus
  siRNA target sequence for Sync (NM_023485.2,1378-1396).
gttcagcaacagaagaaca

SEQ ID NO: 689269 - DNA, 19 bp, Mus musculus
  siRNA target sequence for Sync (NM_023485.2,1440-1458).
cacatataaggctatgcta

SEQ ID NO: 689270 - DNA, 19 bp, Mus musculus
  siRNA target sequence for Sync (NM_023485.2,1516-1534).
caatccccagggactgttt

SEQ ID NO: 689271 - DNA, 19 bp, Mus musculus
  siRNA target sequence for Hemgn (NM_053149.1,259-277).
ctgtgctccagacatcatt

SEQ ID NO: 689272 - DNA, 19 bp, Mus musculus
  siRNA target sequence for Hemgn (NM_053149.1,263-281).
gctccagacatcattggat

SEQ ID NO: 689273 - DNA, 19 bp, Mus musculus
  siRNA target sequence for Hemgn (NM_053149.1,335-353).
gggaggcagacatcacaat

SEQ ID NO: 689274 - DNA, 19 bp, Mus musculus
  siRNA target sequence for Hemgn (NM_053149.1,553-571).
ggtcccatcccccacaaaa

SEQ ID NO: 689275 - DNA, 19 bp, Mus musculus
  siRNA target sequence for Hemgn (NM_053149.1,676-694).
ccaaggaatagcagtactt

SEQ ID NO: 689276 - DNA, 19 bp, Mus musculus
  siRNA target sequence for Hemgn (NM_053149.1,692-710).
cttcaacattctcctaaaa

SEQ ID NO: 689277 - DNA, 19 bp, Mus musculus
  siRNA target sequence for Hemgn (NM_053149.1,695-713).
caacattctcctaaaatgt

SEQ ID NO: 689278 - DNA, 19 bp, Mus musculus
  siRNA target sequence for Hemgn (NM_053149.1,705-723).
ctaaaatgtgccaagatat

SEQ ID NO: 689279 - DNA, 19 bp, Mus musculus
  siRNA target sequence for Hemgn (NM_053149.1,725-743).
gccgaacctgaggtattct

SEQ ID NO: 689280 - DNA, 19 bp, Mus musculus
  siRNA target sequence for Hemgn (NM_053149.1,737-755).
gtattctctcctaacatgt

SEQ ID NO: 689281 - DNA, 19 bp, Mus musculus
  siRNA target sequence for Hemgn (NM_053149.1,996-1014).
ctcctaaaacacatcaaga

SEQ ID NO: 689282 - DNA, 19 bp, Mus musculus
  siRNA target sequence for Hemgn (NM_053149.1,1190-1208).
gtgactgaaggcttctttt

SEQ ID NO: 689283 - DNA, 19 bp, Mus musculus
  siRNA target sequence for Hemgn (NM_053149.1,1229-1247).
gtttctgaaggcgtttcta

SEQ ID NO: 689284 - DNA, 19 bp, Mus musculus
  siRNA target sequence for Hemgn (NM_053149.1,1235-1253).
gaaggcgtttctacaaaga

SEQ ID NO: 689285 - DNA, 19 bp, Mus musculus
  siRNA target sequence for Hemgn (NM_053149.1,1266-1284).
cagttgaacctgaattcat

SEQ ID NO: 689286 - DNA, 19 bp, Mus musculus
  siRNA target sequence for Hemgn (NM_053149.1,1268-1286).
gttgaacctgaattcattt

SEQ ID NO: 689287 - DNA, 19 bp, Mus musculus
  siRNA target sequence for Hemgn (NM_053149.1,1287-1305).
ctcacgagacttataaaga

SEQ ID NO: 689288 - DNA, 19 bp, Mus musculus
  siRNA target sequence for Hemgn (NM_053149.1,1294-1312).
gacttataaagaattcact

SEQ ID NO: 689289 - DNA, 19 bp, Mus musculus
  siRNA target sequence for Hemgn (NM_053149.1,1350-1368).
cacctgagcctgaacaata

SEQ ID NO: 689290 - DNA, 19 bp, Mus musculus
  siRNA target sequence for Hemgn (NM_053149.1,1352-1370).
cctgagcctgaacaatatt

SEQ ID NO: 689291 - DNA, 19 bp, Mus musculus
  siRNA target sequence for Hemgn (NM_053149.1,1364-1382).
caatattcacctgaaacat

SEQ ID NO: 689292 - DNA, 19 bp, Mus musculus
  siRNA target sequence for Hemgn (NM_053149.1,1374-1392).
ctgaaacatgtcaaccaat

SEQ ID NO: 689293 - DNA, 19 bp, Mus musculus
  siRNA target sequence for Hemgn (NM_053149.1,1394-1412).
cctgggcctgagaactatt

SEQ ID NO: 689294 - DNA, 19 bp, Mus musculus
  siRNA target sequence for Hemgn (NM_053149.1,1418-1436).
gaaacctgccatgaaatgt

SEQ ID NO: 689295 - DNA, 19 bp, Mus musculus
  siRNA target sequence for Hemgn (NM_053149.1,1561-1579).
gaacgctggtgctttctct

SEQ ID NO: 689296 - DNA, 19 bp, Mus musculus
  siRNA target sequence for Hemgn (NM_053149.1,1568-1586).
ggtgctttctctcaagatt

SEQ ID NO: 689297 - DNA, 19 bp, Mus musculus
  siRNA target sequence for C77032 (NM_153547.2,136-154).
gttaaagaaagcgagtaaa

SEQ ID NO: 689298 - DNA, 19 bp, Mus musculus
  siRNA target sequence for C77032 (NM_153547.2,162-180).
cctgccataagcgatataa

SEQ ID NO: 689299 - DNA, 19 bp, Mus musculus
  siRNA target sequence for C77032 (NM_153547.2,163-181).
ctgccataagcgatataaa

SEQ ID NO: 689300 - DNA, 19 bp, Mus musculus
  siRNA target sequence for C77032 (NM_153547.2,165-183).
gccataagcgatataaaat

SEQ ID NO: 689301 - DNA, 19 bp, Mus musculus
  siRNA target sequence for C77032 (NM_153547.2,166-184).
ccataagcgatataaaatt

SEQ ID NO: 689302 - DNA, 19 bp, Mus musculus
  siRNA target sequence for C77032 (NM_153547.2,196-214).
ccgagaacatcatcgaaaa

SEQ ID NO: 689303 - DNA, 19 bp, Mus musculus
  siRNA target sequence for C77032 (NM_153547.2,203-221).
catcatcgaaaattaagga

SEQ ID NO: 689304 - DNA, 19 bp, Mus musculus
  siRNA target sequence for C77032 (NM_153547.2,259-277).
ggacccaggtgttccaaat

SEQ ID NO: 689305 - DNA, 19 bp, Mus musculus
  siRNA target sequence for C77032 (NM_153547.2,260-278).
gacccaggtgttccaaata

SEQ ID NO: 689306 - DNA, 19 bp, Mus musculus
  siRNA target sequence for C77032 (NM_153547.2,262-280).
cccaggtgttccaaatagt

SEQ ID NO: 689307 - DNA, 19 bp, Mus musculus
  siRNA target sequence for C77032 (NM_153547.2,273-291).
caaatagtgctccctttaa

SEQ ID NO: 689308 - DNA, 19 bp, Mus musculus
  siRNA target sequence for C77032 (NM_153547.2,408-426).
ctggtgatgagcagtctaa

SEQ ID NO: 689309 - DNA, 19 bp, Mus musculus
  siRNA target sequence for C77032 (NM_153547.2,411-429).
gtgatgagcagtctaatgt

SEQ ID NO: 689310 - DNA, 19 bp, Mus musculus
  siRNA target sequence for C77032 (NM_153547.2,419-437).
cagtctaatgtggaaacta

SEQ ID NO: 689311 - DNA, 19 bp, Mus musculus
  siRNA target sequence for C77032 (NM_153547.2,534-552).
cctcagacattgtgttaga

SEQ ID NO: 689312 - DNA, 19 bp, Mus musculus
  siRNA target sequence for C77032 (NM_153547.2,583-601).
caggtgtcctcagatagaa

SEQ ID NO: 689313 - DNA, 19 bp, Mus musculus
  siRNA target sequence for C77032 (NM_153547.2,624-642).
gtaagaagctgatacttgt

SEQ ID NO: 689314 - DNA, 19 bp, Mus musculus
  siRNA target sequence for C77032 (NM_153547.2,631-649).
gctgatacttgtattaaat

SEQ ID NO: 689315 - DNA, 19 bp, Mus musculus
  siRNA target sequence for C77032 (NM_153547.2,679-697).
ggagaactggctaaattat

SEQ ID NO: 689316 - DNA, 19 bp, Mus musculus
  siRNA target sequence for C77032 (NM_153547.2,680-698).
gagaactggctaaattatt

SEQ ID NO: 689317 - DNA, 19 bp, Mus musculus
  siRNA target sequence for C77032 (NM_153547.2,685-703).
ctggctaaattatttgaat

SEQ ID NO: 689318 - DNA, 19 bp, Mus musculus
  siRNA target sequence for C77032 (NM_153547.2,727-745).
caaagcctcaacaaactta

SEQ ID NO: 689319 - DNA, 19 bp, Mus musculus
  siRNA target sequence for C77032 (NM_153547.2,785-803).
gttccattccaaagcaaaa

SEQ ID NO: 689320 - DNA, 19 bp, Mus musculus
  siRNA target sequence for C77032 (NM_153547.2,850-868).
gcagtcctgtggaaaggat

SEQ ID NO: 689321 - DNA, 19 bp, Mus musculus
  siRNA target sequence for C77032 (NM_153547.2,851-869).
cagtcctgtggaaaggata

SEQ ID NO: 689322 - DNA, 19 bp, Mus musculus
  siRNA target sequence for C77032 (NM_153547.2,853-871).
gtcctgtggaaaggatatt

SEQ ID NO: 689323 - DNA, 19 bp, Mus musculus
  siRNA target sequence for C77032 (NM_153547.2,855-873).
cctgtggaaaggatattca

SEQ ID NO: 689324 - DNA, 19 bp, Mus musculus
  siRNA target sequence for C77032 (NM_153547.2,858-876).
gtggaaaggatattcaagt

SEQ ID NO: 689325 - DNA, 19 bp, Mus musculus
  siRNA target sequence for C77032 (NM_153547.2,872-890).
caagttggagtgattggtt

SEQ ID NO: 689326 - DNA, 19 bp, Mus musculus
  siRNA target sequence for C77032 (NM_153547.2,901-919).
ggggaaaagcagtgtcatt

SEQ ID NO: 689327 - DNA, 19 bp, Mus musculus
  siRNA target sequence for C77032 (NM_153547.2,904-922).
gaaaagcagtgtcattaat

SEQ ID NO: 689328 - DNA, 19 bp, Mus musculus
  siRNA target sequence for C77032 (NM_153547.2,909-927).
gcagtgtcattaatagctt

SEQ ID NO: 689329 - DNA, 19 bp, Mus musculus
  siRNA target sequence for C77032 (NM_153547.2,910-928).
cagtgtcattaatagctta

SEQ ID NO: 689330 - DNA, 19 bp, Mus musculus
  siRNA target sequence for C77032 (NM_153547.2,912-930).
gtgtcattaatagcttaaa

SEQ ID NO: 689331 - DNA, 19 bp, Mus musculus
  siRNA target sequence for C77032 (NM_153547.2,945-963).
gcaatgttgggatttccat

SEQ ID NO: 689332 - DNA, 19 bp, Mus musculus
  siRNA target sequence for C77032 (NM_153547.2,983-1001).
cagattgtccctttagaca

SEQ ID NO: 689333 - DNA, 19 bp, Mus musculus
  siRNA target sequence for C77032 (NM_153547.2,1000-1018).
caagcagatcacaatcata

SEQ ID NO: 689334 - DNA, 19 bp, Mus musculus
  siRNA target sequence for C77032 (NM_153547.2,1019-1037).
gacagtccatgcctaatta

SEQ ID NO: 689335 - DNA, 19 bp, Mus musculus
  siRNA target sequence for C77032 (NM_153547.2,1082-1100).
gcaagcattgaggaactaa

SEQ ID NO: 689336 - DNA, 19 bp, Mus musculus
  siRNA target sequence for C77032 (NM_153547.2,1129-1147).
gtctcaggctgataatgaa

SEQ ID NO: 689337 - DNA, 19 bp, Mus musculus
  siRNA target sequence for C77032 (NM_153547.2,1131-1149).
ctcaggctgataatgaaca

SEQ ID NO: 689338 - DNA, 19 bp, Mus musculus
  siRNA target sequence for C77032 (NM_153547.2,1150-1168).
ggtggtgttaaaatatact

SEQ ID NO: 689339 - DNA, 19 bp, Mus musculus
  siRNA target sequence for C77032 (NM_153547.2,1173-1191).
ctgagtataaggattctct

SEQ ID NO: 689340 - DNA, 19 bp, Mus musculus
  siRNA target sequence for C77032 (NM_153547.2,1188-1206).
ctctgcatttttttactaa

SEQ ID NO: 689341 - DNA, 19 bp, Mus musculus
  siRNA target sequence for C77032 (NM_153547.2,1192-1210).
gcatttttttactaaactt

SEQ ID NO: 689342 - DNA, 19 bp, Mus musculus
  siRNA target sequence for C77032 (NM_153547.2,1285-1303).
gtggacaggtgcctcatta

SEQ ID NO: 689343 - DNA, 19 bp, Mus musculus
  siRNA target sequence for C77032 (NM_153547.2,1293-1311).
gtgcctcattaggttacta

SEQ ID NO: 689344 - DNA, 19 bp, Mus musculus
  siRNA target sequence for C77032 (NM_153547.2,1322-1340).
cctgcatcctggaatcatt

SEQ ID NO: 689345 - DNA, 19 bp, Mus musculus
  siRNA target sequence for C77032 (NM_153547.2,1375-1393).
gaagaagggctttaatcta

SEQ ID NO: 689346 - DNA, 19 bp, Mus musculus
  siRNA target sequence for C77032 (NM_153547.2,1378-1396).
gaagggctttaatctagaa

SEQ ID NO: 689347 - DNA, 19 bp, Mus musculus
  siRNA target sequence for C77032 (NM_153547.2,1381-1399).
gggctttaatctagaagaa

SEQ ID NO: 689348 - DNA, 19 bp, Mus musculus
  siRNA target sequence for C77032 (NM_153547.2,1383-1401).
gctttaatctagaagaact

SEQ ID NO: 689349 - DNA, 19 bp, Mus musculus
  siRNA target sequence for C77032 (NM_153547.2,1384-1402).
ctttaatctagaagaacta

SEQ ID NO: 689350 - DNA, 19 bp, Mus musculus
  siRNA target sequence for C77032 (NM_153547.2,1432-1450).
cctcaagggccctcattta

SEQ ID NO: 689351 - DNA, 19 bp, Mus musculus
  siRNA target sequence for C77032 (NM_153547.2,1433-1451).
ctcaagggccctcatttaa

SEQ ID NO: 689352 - DNA, 19 bp, Mus musculus
  siRNA target sequence for C77032 (NM_153547.2,1438-1456).
gggccctcatttaactaat

SEQ ID NO: 689353 - DNA, 19 bp, Mus musculus
  siRNA target sequence for C77032 (NM_153547.2,1439-1457).
ggccctcatttaactaata

SEQ ID NO: 689354 - DNA, 19 bp, Mus musculus
  siRNA target sequence for C77032 (NM_153547.2,1441-1459).
ccctcatttaactaataga

SEQ ID NO: 689355 - DNA, 19 bp, Mus musculus
  siRNA target sequence for C77032 (NM_153547.2,1442-1460).
cctcatttaactaatagaa

SEQ ID NO: 689356 - DNA, 19 bp, Mus musculus
  siRNA target sequence for C77032 (NM_153547.2,1443-1461).
ctcatttaactaatagaat

SEQ ID NO: 689357 - DNA, 19 bp, Mus musculus
  siRNA target sequence for C77032 (NM_153547.2,1470-1488).
ggtcttcgggcctgacaaa

SEQ ID NO: 689358 - DNA, 19 bp, Mus musculus
  siRNA target sequence for C77032 (NM_153547.2,1476-1494).
cgggcctgacaaatggaat

SEQ ID NO: 689359 - DNA, 19 bp, Mus musculus
  siRNA target sequence for C77032 (NM_153547.2,1477-1495).
gggcctgacaaatggaata

SEQ ID NO: 689360 - DNA, 19 bp, Mus musculus
  siRNA target sequence for C77032 (NM_153547.2,1507-1525).
ggacatagtcgaagaatca

SEQ ID NO: 689361 - DNA, 19 bp, Mus musculus
  siRNA target sequence for C77032 (NM_153547.2,1549-1567).
ggatgctgacgatcaagaa

SEQ ID NO: 689362 - DNA, 19 bp, Mus musculus
  siRNA target sequence for C77032 (NM_153547.2,1631-1649).
ctgtcacctgagcaatcaa

SEQ ID NO: 689363 - DNA, 19 bp, Mus musculus
  siRNA target sequence for C77032 (NM_153547.2,1633-1651).
gtcacctgagcaatcaaca

SEQ ID NO: 689364 - DNA, 19 bp, Mus musculus
  siRNA target sequence for C77032 (NM_153547.2,1670-1688).
gggtcgtctgccttggata

SEQ ID NO: 689365 - DNA, 19 bp, Mus musculus
  siRNA target sequence for C77032 (NM_153547.2,1700-1718).
gaggatgaaacctatgact

SEQ ID NO: 689366 - DNA, 19 bp, Mus musculus
  siRNA target sequence for Midn (NM_021565.1,619-637).
gaagggctgcgcaaaaggt

SEQ ID NO: 689367 - DNA, 19 bp, Mus musculus
  siRNA target sequence for Midn (NM_021565.1,797-815).
cggaacagtccgttatgca

SEQ ID NO: 689368 - DNA, 19 bp, Mus musculus
  siRNA target sequence for Midn (NM_021565.1,798-816).
ggaacagtccgttatgcaa

SEQ ID NO: 689369 - DNA, 19 bp, Mus musculus
  siRNA target sequence for Midn (NM_021565.1,878-896).
gaggaggcttccggaaata

SEQ ID NO: 689370 - DNA, 19 bp, Mus musculus
  siRNA target sequence for Midn (NM_021565.1,888-906).
ccggaaatacagattgatt

SEQ ID NO: 689371 - DNA, 19 bp, Mus musculus
  siRNA target sequence for Midn (NM_021565.1,889-907).
cggaaatacagattgattt

SEQ ID NO: 689372 - DNA, 19 bp, Mus musculus
  siRNA target sequence for Midn (NM_021565.1,1019-1037).
gagtcggggatcacatgat

SEQ ID NO: 689373 - DNA, 19 bp, Mus musculus
  siRNA target sequence for Midn (NM_021565.1,1023-1041).
cggggatcacatgatgttt

SEQ ID NO: 689374 - DNA, 19 bp, Mus musculus
  siRNA target sequence for Midn (NM_021565.1,1369-1387).
cctggtgcggtcattgaga

SEQ ID NO: 689375 - DNA, 19 bp, Mus musculus
  siRNA target sequence for Midn (NM_021565.1,1731-1749).
ccgtgccacacgttgcaaa

SEQ ID NO: 689376 - DNA, 19 bp, Mus musculus
  siRNA target sequence for 1110001J12Rik (NM_027922.1,403-421).
catgatggctcgactgaaa

SEQ ID NO: 689377 - DNA, 19 bp, Mus musculus
  siRNA target sequence for 1110001J12Rik (NM_027922.1,581-599).
gttactgccatggcattta

SEQ ID NO: 689378 - DNA, 19 bp, Mus musculus
  siRNA target sequence for 1110001J12Rik (NM_027922.1,752-770).
gcctctaccaggaatgaca

SEQ ID NO: 689379 - DNA, 19 bp, Mus musculus
  siRNA target sequence for 1110001J12Rik (NM_027922.1,753-771).
cctctaccaggaatgacaa

SEQ ID NO: 689380 - DNA, 19 bp, Mus musculus
  siRNA target sequence for 1110001J12Rik (NM_027922.1,795-813).
ctaaggagccacttgtgta

SEQ ID NO: 689381 - DNA, 19 bp, Mus musculus
  siRNA target sequence for 1110001J12Rik (NM_027922.1,799-817).
ggagccacttgtgtactat

SEQ ID NO: 689382 - DNA, 19 bp, Mus musculus
  siRNA target sequence for 1110001J12Rik (NM_027922.1,854-872).
catgagaggatccatgttt

SEQ ID NO: 689383 - DNA, 19 bp, Mus musculus
  siRNA target sequence for 1110001J12Rik (NM_027922.1,896-914).
caagctgccaagttgatca

SEQ ID NO: 689384 - DNA, 19 bp, Mus musculus
  siRNA target sequence for 1110001J12Rik (NM_027922.1,913-931).
caaagggtcccggtttaaa

SEQ ID NO: 689385 - DNA, 19 bp, Mus musculus
  siRNA target sequence for 1110001J12Rik (NM_027922.1,919-937).
gtcccggtttaaagctttt

SEQ ID NO: 689386 - DNA, 19 bp, Mus musculus
  siRNA target sequence for 1110001J12Rik (NM_027922.1,922-940).
ccggtttaaagcttttcga

SEQ ID NO: 689387 - DNA, 19 bp, Mus musculus
  siRNA target sequence for 1110001J12Rik (NM_027922.1,923-941).
cggtttaaagcttttcgaa

SEQ ID NO: 689388 - DNA, 19 bp, Mus musculus
  siRNA target sequence for 1110001J12Rik (NM_027922.1,966-984).
ctagagggatatgtgatta

SEQ ID NO: 689389 - DNA, 19 bp, Mus musculus
  siRNA target sequence for 1110001J12Rik (NM_027922.1,1047-1065).
gcagtgatgggctgaaaga

SEQ ID NO: 689390 - DNA, 19 bp, Mus musculus
  siRNA target sequence for 1110001J12Rik (NM_027922.1,1048-1066).
cagtgatgggctgaaagat

SEQ ID NO: 689391 - DNA, 19 bp, Mus musculus
  siRNA target sequence for 1110001J12Rik (NM_027922.1,1072-1090).
gtgcctggctgaatcagaa

SEQ ID NO: 689392 - DNA, 19 bp, Mus musculus
  siRNA target sequence for 1110001J12Rik (NM_027922.1,1106-1124).
cgagcaaacagttacaaaa

SEQ ID NO: 689393 - DNA, 19 bp, Mus musculus
  siRNA target sequence for 1110001J12Rik (NM_027922.1,1204-1222).
ctggagtaatcctcgatat

SEQ ID NO: 689394 - DNA, 19 bp, Mus musculus
  siRNA target sequence for 1110001J12Rik (NM_027922.1,1206-1224).
ggagtaatcctcgatatct

SEQ ID NO: 689395 - DNA, 19 bp, Mus musculus
  siRNA target sequence for 1110001J12Rik (NM_027922.1,1207-1225).
gagtaatcctcgatatcta

SEQ ID NO: 689396 - DNA, 19 bp, Mus musculus
  siRNA target sequence for 1110001J12Rik (NM_027922.1,1209-1227).
gtaatcctcgatatctaat

SEQ ID NO: 689397 - DNA, 19 bp, Mus musculus
  siRNA target sequence for 1110001J12Rik (NM_027922.1,1214-1232).
cctcgatatctaattggtt

SEQ ID NO: 689398 - DNA, 19 bp, Mus musculus
  siRNA target sequence for 1110001J12Rik (NM_027922.1,1237-1255).
ggacaacccaaccattgta

SEQ ID NO: 689399 - DNA, 19 bp, Mus musculus
  siRNA target sequence for 1110001J12Rik (NM_027922.1,1240-1258).
caacccaaccattgtacaa

SEQ ID NO: 689400 - DNA, 19 bp, Mus musculus
  siRNA target sequence for 1110001J12Rik (NM_027922.1,1262-1280).
ggatgtaggtacaatgtca

SEQ ID NO: 689401 - DNA, 19 bp, Mus musculus
  siRNA target sequence for 1110001J12Rik (NM_027922.1,1263-1281).
gatgtaggtacaatgtcat

SEQ ID NO: 689402 - DNA, 19 bp, Mus musculus
  siRNA target sequence for 1110001J12Rik (NM_027922.1,1401-1419).
gcatcctctacgttgttga

SEQ ID NO: 689403 - DNA, 19 bp, Mus musculus
  siRNA target sequence for 1110001J12Rik (NM_027922.1,1411-1429).
cgttgttgacctgtatctt

SEQ ID NO: 689404 - DNA, 19 bp, Mus musculus
  siRNA target sequence for 1110001J12Rik (NM_027922.1,1412-1430).
gttgttgacctgtatctta

SEQ ID NO: 689405 - DNA, 19 bp, Mus musculus
  siRNA target sequence for 1110001J12Rik (NM_027922.1,1485-1503).
gaaatgtggatgtagtcaa

SEQ ID NO: 689406 - DNA, 19 bp, Mus musculus
  siRNA target sequence for 1110001J12Rik (NM_027922.1,1517-1535).
caccctttgattgtgaaaa

SEQ ID NO: 689407 - DNA, 19 bp, Mus musculus
  siRNA target sequence for 1110001J12Rik (NM_027922.1,1537-1555).
ccgaaagaataaatatggt

SEQ ID NO: 689408 - DNA, 19 bp, Mus musculus
  siRNA target sequence for 1110001J12Rik (NM_027922.1,1538-1556).
cgaaagaataaatatggta

SEQ ID NO: 689409 - DNA, 19 bp, Mus musculus
  siRNA target sequence for 1110001J12Rik (NM_027922.1,1543-1561).
gaataaatatggtaaaaca

SEQ ID NO: 689410 - DNA, 19 bp, Mus musculus
  siRNA target sequence for 1110001J12Rik (NM_027922.1,1617-1635).
ggattagagaatacttaat

SEQ ID NO: 689411 - DNA, 19 bp, Mus musculus
  siRNA target sequence for 1110001J12Rik (NM_027922.1,1886-1904).
ccagaacgaggcattgaga

SEQ ID NO: 689412 - DNA, 19 bp, Mus musculus
  siRNA target sequence for 1110001J12Rik (NM_027922.1,1945-1963).
ggttgaatactgggaattt

SEQ ID NO: 689413 - DNA, 19 bp, Mus musculus
  siRNA target sequence for 1110001J12Rik (NM_027922.1,2007-2025).
gactagaagaataccttat

SEQ ID NO: 689414 - DNA, 19 bp, Mus musculus
  siRNA target sequence for 1110001J12Rik (NM_027922.1,2047-2065).
ggctcaacaagaaatacga

SEQ ID NO: 689415 - DNA, 19 bp, Mus musculus
  siRNA target sequence for 1110001J12Rik (NM_027922.1,2086-2104).
ggacagaacctcagatttt

SEQ ID NO: 689416 - DNA, 19 bp, Mus musculus
  siRNA target sequence for 1110001J12Rik (NM_027922.1,2134-2152).
ctccgtgggagcatttcta

SEQ ID NO: 689417 - DNA, 19 bp, Mus musculus
  siRNA target sequence for 1110001J12Rik (NM_027922.1,2136-2154).
ccgtgggagcatttctaga

SEQ ID NO: 689418 - DNA, 19 bp, Mus musculus
  siRNA target sequence for 1110001J12Rik (NM_027922.1,2157-2175).
gggatgatgacagtagttt

SEQ ID NO: 689419 - DNA, 19 bp, Mus musculus
  siRNA target sequence for 1110001J12Rik (NM_027922.1,2165-2183).
gacagtagtttggaagaaa

SEQ ID NO: 689420 - DNA, 19 bp, Mus musculus
  siRNA target sequence for 1110001J12Rik (NM_027922.1,2215-2233).
gagtcagcccacaactgat

SEQ ID NO: 689421 - DNA, 19 bp, Mus musculus
  siRNA target sequence for 1110001J12Rik (NM_027922.1,2217-2235).
gtcagcccacaactgataa

SEQ ID NO: 689422 - DNA, 19 bp, Mus musculus
  siRNA target sequence for 1110001J12Rik (NM_027922.1,2219-2237).
cagcccacaactgataagt

SEQ ID NO: 689423 - DNA, 19 bp, Mus musculus
  siRNA target sequence for 1110001J12Rik (NM_027922.1,2236-2254).
gttccaaacctctaaaagt

SEQ ID NO: 689424 - DNA, 19 bp, Mus musculus
  siRNA target sequence for 1110001J12Rik (NM_027922.1,2331-2349).
ggttttgtcaccctctaaa

SEQ ID NO: 689425 - DNA, 19 bp, Mus musculus
  siRNA target sequence for 1110001J12Rik (NM_027922.1,2401-2419).
ccttccaccacctgtttct

SEQ ID NO: 689426 - DNA, 19 bp, Mus musculus
  siRNA target sequence for 1110001J12Rik (NM_027922.1,2418-2436).
ctgttttgactcaagagtt

SEQ ID NO: 689427 - DNA, 19 bp, Mus musculus
  siRNA target sequence for 1110001J12Rik (NM_027922.1,2568-2586).
ccatagcaagccttggaaa

SEQ ID NO: 689428 - DNA, 19 bp, Mus musculus
  siRNA target sequence for 1110001J12Rik (NM_027922.1,2673-2691).
ctggtctggaacctatact

SEQ ID NO: 689429 - DNA, 19 bp, Mus musculus
  siRNA target sequence for 1110001J12Rik (NM_027922.1,2872-2890).
gccaagtcctgcactcaaa

SEQ ID NO: 689430 - DNA, 19 bp, Mus musculus
  siRNA target sequence for 1110001J12Rik (NM_027922.1,2915-2933).
gatctcgattgctctcata

SEQ ID NO: 689431 - DNA, 19 bp, Mus musculus
  siRNA target sequence for 8430438L13Rik (NM_172756.1,1258-1276).
caccagaggacactatcta

SEQ ID NO: 689432 - DNA, 19 bp, Mus musculus
  siRNA target sequence for 8430438L13Rik (NM_172756.1,1297-1315).
ggctagccgtgctgatgta

SEQ ID NO: 689433 - DNA, 19 bp, Mus musculus
  siRNA target sequence for 8430438L13Rik (NM_172756.1,1426-1444).
gtggcgggaaggcattaca

SEQ ID NO: 689434 - DNA, 19 bp, Mus musculus
  siRNA target sequence for 8430438L13Rik (NM_172756.1,1428-1446).
ggcgggaaggcattacaaa

SEQ ID NO: 689435 - DNA, 19 bp, Mus musculus
  siRNA target sequence for 8430438L13Rik (NM_172756.1,1430-1448).
cgggaaggcattacaaagt

SEQ ID NO: 689436 - DNA, 19 bp, Mus musculus
  siRNA target sequence for 8430438L13Rik (NM_172756.1,1447-1465).
gtctagttttacgtatcta

SEQ ID NO: 689437 - DNA, 19 bp, Mus musculus
  siRNA target sequence for 8430438L13Rik (NM_172756.1,1648-1666).
caaggttcgccggatctta

SEQ ID NO: 689438 - DNA, 19 bp, Mus musculus
  siRNA target sequence for 8430438L13Rik (NM_172756.1,1652-1670).
gttcgccggatcttagaca

SEQ ID NO: 689439 - DNA, 19 bp, Mus musculus
  siRNA target sequence for Emd (NM_007927.1,156-174).
cagtgctacgccagtacaa

SEQ ID NO: 689440 - DNA, 19 bp, Mus musculus
  siRNA target sequence for Emd (NM_007927.1,158-176).
gtgctacgccagtacaaca

SEQ ID NO: 689441 - DNA, 19 bp, Mus musculus
  siRNA target sequence for Emd (NM_007927.1,204-222).
ctcgcaagctctacgaaaa

SEQ ID NO: 689442 - DNA, 19 bp, Mus musculus
  siRNA target sequence for Emd (NM_007927.1,212-230).
ctctacgaaaagaaaatct

SEQ ID NO: 689443 - DNA, 19 bp, Mus musculus
  siRNA target sequence for Emd (NM_007927.1,373-391).
ccagagcaaggactataat

SEQ ID NO: 689444 - DNA, 19 bp, Mus musculus
  siRNA target sequence for Emd (NM_007927.1,376-394).
gagcaaggactataatgat

SEQ ID NO: 689445 - DNA, 19 bp, Mus musculus
  siRNA target sequence for Emd (NM_007927.1,385-403).
ctataatgatgactactat

SEQ ID NO: 689446 - DNA, 19 bp, Mus musculus
  siRNA target sequence for Emd (NM_007927.1,397-415).
ctactatgaggagagttat

SEQ ID NO: 689447 - DNA, 19 bp, Mus musculus
  siRNA target sequence for Emd (NM_007927.1,520-538).
gcgtgatgacattttctct

SEQ ID NO: 689448 - DNA, 19 bp, Mus musculus
  siRNA target sequence for Emd (NM_007927.1,640-658).
gagctctctgggcttatca

SEQ ID NO: 689449 - DNA, 19 bp, Mus musculus
  siRNA target sequence for Emd (NM_007927.1,645-663).
ctctgggcttatcatatta

SEQ ID NO: 689450 - DNA, 19 bp, Mus musculus
  siRNA target sequence for Emd (NM_007927.1,649-667).
gggcttatcatattatcct

SEQ ID NO: 689451 - DNA, 19 bp, Mus musculus
  siRNA target sequence for Emd (NM_007927.1,838-856).
ctttgtttactattccata

SEQ ID NO: 689452 - DNA, 19 bp, Mus musculus
  siRNA target sequence for 1110067P07Rik (NM_153085.1,784-802).
ccagcgatgccagtagttt

SEQ ID NO: 689453 - DNA, 19 bp, Mus musculus
  siRNA target sequence for 1110067P07Rik (NM_153085.1,806-824).
cccacagaatattttgtct

SEQ ID NO: 689454 - DNA, 19 bp, Mus musculus
  siRNA target sequence for Tcl1 (NM_009337.2,128-146).
gggagaagcacgtgtactt

SEQ ID NO: 689455 - DNA, 19 bp, Mus musculus
  siRNA target sequence for Tcl1 (NM_009337.2,138-156).
cgtgtacttggatgagttt

SEQ ID NO: 689456 - DNA, 19 bp, Mus musculus
  siRNA target sequence for Tcl1 (NM_009337.2,164-182).
gctggctgcccgtagtcat

SEQ ID NO: 689457 - DNA, 19 bp, Mus musculus
  siRNA target sequence for Tcl1 (NM_009337.2,167-185).
ggctgcccgtagtcatcaa

SEQ ID NO: 689458 - DNA, 19 bp, Mus musculus
  siRNA target sequence for Tcl1 (NM_009337.2,172-190).
cccgtagtcatcaagagta

SEQ ID NO: 689459 - DNA, 19 bp, Mus musculus
  siRNA target sequence for Tcl1 (NM_009337.2,180-198).
catcaagagtaatgaaaaa

SEQ ID NO: 689460 - DNA, 19 bp, Mus musculus
  siRNA target sequence for Tcl1 (NM_009337.2,265-283).
ccttacgagctgcctttaa

SEQ ID NO: 689461 - DNA, 19 bp, Mus musculus
  siRNA target sequence for Tcl1 (NM_009337.2,266-284).
cttacgagctgcctttaat

SEQ ID NO: 689462 - DNA, 19 bp, Mus musculus
  siRNA target sequence for Tcl1 (NM_009337.2,278-296).
ctttaatgtggcaactgta

SEQ ID NO: 689463 - DNA, 19 bp, Mus musculus
  siRNA target sequence for Tcl1 (NM_009337.2,375-393).
catgttgcttgaactgata

SEQ ID NO: 689464 - DNA, 19 bp, Mus musculus
  siRNA target sequence for 1110007C24Rik (NM_025382.3,69-87).
ggatcaccgagggtatcta

SEQ ID NO: 689465 - DNA, 19 bp, Mus musculus
  siRNA target sequence for 1110007C24Rik (NM_025382.3,80-98).
ggtatctacggcagtacat

SEQ ID NO: 689466 - DNA, 19 bp, Mus musculus
  siRNA target sequence for 1110007C24Rik (NM_025382.3,81-99).
gtatctacggcagtacatt

SEQ ID NO: 689467 - DNA, 19 bp, Mus musculus
  siRNA target sequence for 1110007C24Rik (NM_025382.3,85-103).
ctacggcagtacattttta

SEQ ID NO: 689468 - DNA, 19 bp, Mus musculus
  siRNA target sequence for 1110007C24Rik (NM_025382.3,154-172).
cctggagttccgatttgaa

SEQ ID NO: 689469 - DNA, 19 bp, Mus musculus
  siRNA target sequence for 1110007C24Rik (NM_025382.3,180-198).
ggccgttctggcttttcat

SEQ ID NO: 689470 - DNA, 19 bp, Mus musculus
  siRNA target sequence for 1110007C24Rik (NM_025382.3,206-224).
gtctatgattccttcagat

SEQ ID NO: 689471 - DNA, 19 bp, Mus musculus
  siRNA target sequence for 1110007C24Rik (NM_025382.3,231-249).
gactggccttctcagtatt

SEQ ID NO: 689472 - DNA, 19 bp, Mus musculus
  siRNA target sequence for 1110007C24Rik (NM_025382.3,260-278).
gtagcattcacttcaaata

SEQ ID NO: 689473 - DNA, 19 bp, Mus musculus
  siRNA target sequence for 1110007C24Rik (NM_025382.3,263-281).
gcattcacttcaaatatca

SEQ ID NO: 689474 - DNA, 19 bp, Mus musculus
  siRNA target sequence for 1110007C24Rik (NM_025382.3,319-337).
cgctgctagcacatatgta

SEQ ID NO: 689475 - DNA, 19 bp, Mus musculus
  siRNA target sequence for 1110007C24Rik (NM_025382.3,320-338).
gctgctagcacatatgtat

SEQ ID NO: 689476 - DNA, 19 bp, Mus musculus
  siRNA target sequence for 1110007C24Rik (NM_025382.3,416-434).
gaagcagcaattagattta

SEQ ID NO: 689477 - DNA, 19 bp, Mus musculus
  siRNA target sequence for 1110007C24Rik (NM_025382.3,423-441).
caattagatttaaagatct

SEQ ID NO: 689478 - DNA, 19 bp, Mus musculus
  siRNA target sequence for 1110007C24Rik (NM_025382.3,513-531).
gctttggcttcaaaagtta

SEQ ID NO: 689479 - DNA, 19 bp, Mus musculus
  siRNA target sequence for 1110007C24Rik (NM_025382.3,514-532).
ctttggcttcaaaagttat

SEQ ID NO: 689480 - DNA, 19 bp, Mus musculus
  siRNA target sequence for 1110007C24Rik (NM_025382.3,528-546).
gttatgtgagctacaaaat

SEQ ID NO: 689481 - DNA, 19 bp, Mus musculus
  siRNA target sequence for 1110007C24Rik (NM_025382.3,674-692).
ggattgccggacatggatt

SEQ ID NO: 689482 - DNA, 19 bp, Mus musculus
  siRNA target sequence for 1110007C24Rik (NM_025382.3,719-737).
ggcatcccagccaacaaaa

SEQ ID NO: 689483 - DNA, 19 bp, Mus musculus
  siRNA target sequence for 1110007C24Rik (NM_025382.3,720-738).
gcatcccagccaacaaaaa

SEQ ID NO: 689484 - DNA, 19 bp, Mus musculus
  siRNA target sequence for 1110007C24Rik (NM_025382.3,725-743).
ccagccaacaaaaaactgt

SEQ ID NO: 689485 - DNA, 19 bp, Mus musculus
  siRNA target sequence for 1110007C24Rik (NM_025382.3,745-763).
cacaacgttgccagagata

SEQ ID NO: 689486 - DNA, 19 bp, Mus musculus
  siRNA target sequence for 1110007C24Rik (NM_025382.3,747-765).
caacgttgccagagataga

SEQ ID NO: 689487 - DNA, 19 bp, Mus musculus
  siRNA target sequence for 1110007C24Rik (NM_025382.3,750-768).
cgttgccagagatagaata

SEQ ID NO: 689488 - DNA, 19 bp, Mus musculus
  siRNA target sequence for 1110007C24Rik (NM_025382.3,751-769).
gttgccagagatagaatat

SEQ ID NO: 689489 - DNA, 19 bp, Mus musculus
  siRNA target sequence for 1110007C24Rik (NM_025382.3,754-772).
gccagagatagaatatcga

SEQ ID NO: 689490 - DNA, 19 bp, Mus musculus
  siRNA target sequence for 1110007C24Rik (NM_025382.3,805-823).
gaaacacaaccttggaata

SEQ ID NO: 689491 - DNA, 19 bp, Mus musculus
  siRNA target sequence for 1110007C24Rik (NM_025382.3,853-871).
ctctaagatacaagagatt

SEQ ID NO: 689492 - DNA, 19 bp, Mus musculus
  siRNA target sequence for 1110007C24Rik (NM_025382.3,924-942).
gaagtacagaaaatctctt

SEQ ID NO: 689493 - DNA, 19 bp, Mus musculus
  siRNA target sequence for 1110007C24Rik (NM_025382.3,927-945).
gtacagaaaatctcttaaa

SEQ ID NO: 689494 - DNA, 19 bp, Mus musculus
  siRNA target sequence for 1110007C24Rik (NM_025382.3,960-978).
ctgcttcctcaaaaaatta

SEQ ID NO: 689495 - DNA, 19 bp, Mus musculus
  siRNA target sequence for 1110007C24Rik (NM_025382.3,962-980).
gcttcctcaaaaaattaca

SEQ ID NO: 689496 - DNA, 19 bp, Mus musculus
  siRNA target sequence for 1110007C24Rik (NM_025382.3,1024-1042).
cgctacaaatggaagcatt

SEQ ID NO: 689497 - DNA, 19 bp, Mus musculus
  siRNA target sequence for 1110007C24Rik (NM_025382.3,1047-1065).
cctcgtctagtaaaaacga

SEQ ID NO: 689498 - DNA, 19 bp, Mus musculus
  siRNA target sequence for 1110007C24Rik (NM_025382.3,1101-1119).
cacacaaggacttaatgga

SEQ ID NO: 689499 - DNA, 19 bp, Mus musculus
  siRNA target sequence for 1110007C24Rik (NM_025382.3,1269-1287).
gaggcatccgctcagaaat

SEQ ID NO: 689500 - DNA, 19 bp, Mus musculus
  siRNA target sequence for 1110007C24Rik (NM_025382.3,1402-1420).
gcaggaagcccgaagcttt

SEQ ID NO: 689501 - DNA, 19 bp, Mus musculus
  siRNA target sequence for 1110007C24Rik (NM_025382.3,1409-1427).
gcccgaagctttgtagaaa

SEQ ID NO: 689502 - DNA, 19 bp, Mus musculus
  siRNA target sequence for 1110007C24Rik (NM_025382.3,1512-1530).
gagagtgcacggaaacctt

SEQ ID NO: 689503 - DNA, 19 bp, Mus musculus
  siRNA target sequence for 1110007C24Rik (NM_025382.3,1570-1588).
gctcacaatggacatgaaa

SEQ ID NO: 689504 - DNA, 19 bp, Mus musculus
  siRNA target sequence for 1110007C24Rik (NM_025382.3,1633-1651).
gcttcggaagtacaaagaa

SEQ ID NO: 689505 - DNA, 19 bp, Mus musculus
  siRNA target sequence for 1110007C24Rik (NM_025382.3,1634-1652).
cttcggaagtacaaagaaa

SEQ ID NO: 689506 - DNA, 19 bp, Mus musculus
  siRNA target sequence for 1110007C24Rik (NM_025382.3,1687-1705).
ctccgccatgcaagacaaa

SEQ ID NO: 689507 - DNA, 19 bp, Mus musculus
  siRNA target sequence for 1110007C24Rik (NM_025382.3,1868-1886).
gctgtcatgcccagcataa

SEQ ID NO: 689508 - DNA, 19 bp, Mus musculus
  siRNA target sequence for 1110007C24Rik (NM_025382.3,1919-1937).
gtgtccccccactactctt

SEQ ID NO: 689509 - DNA, 19 bp, Mus musculus
  siRNA target sequence for 1110018L13Rik (NM_026780.1,20-38).
ggcggctgtgactgaagtt

SEQ ID NO: 689510 - DNA, 19 bp, Mus musculus
  siRNA target sequence for 1110018L13Rik (NM_026780.1,134-152).
gcatctgaagcggaatgaa

SEQ ID NO: 689511 - DNA, 19 bp, Mus musculus
  siRNA target sequence for 1110018L13Rik (NM_026780.1,371-389).
ccctgacttggggttttca

SEQ ID NO: 689512 - DNA, 19 bp, Mus musculus
  siRNA target sequence for 1110018L13Rik (NM_026780.1,380-398).
ggggttttcagattatgct

SEQ ID NO: 689513 - DNA, 19 bp, Mus musculus
  siRNA target sequence for 1110018L13Rik (NM_026780.1,403-421).
cccaattacgccagtatca

SEQ ID NO: 689514 - DNA, 19 bp, Mus musculus
  siRNA target sequence for 1110018L13Rik (NM_026780.1,533-551).
gccttcctcagaggaaatt

SEQ ID NO: 689515 - DNA, 19 bp, Mus musculus
  siRNA target sequence for 1110018L13Rik (NM_026780.1,535-553).
cttcctcagaggaaattga

SEQ ID NO: 689516 - DNA, 19 bp, Mus musculus
  siRNA target sequence for 1110018L13Rik (NM_026780.1,545-563).
ggaaattgacagaatggtt

SEQ ID NO: 689517 - DNA, 19 bp, Mus musculus
  siRNA target sequence for 1110018L13Rik (NM_026780.1,585-603).
gaaaagcgagacaaataca

SEQ ID NO: 689518 - DNA, 19 bp, Mus musculus
  siRNA target sequence for 1110018L13Rik (NM_026780.1,605-623).
ccgaagacgcccgtacaat

SEQ ID NO: 689519 - DNA, 19 bp, Mus musculus
  siRNA target sequence for 1110018L13Rik (NM_026780.1,607-625).
gaagacgcccgtacaatga

SEQ ID NO: 689520 - DNA, 19 bp, Mus musculus
  siRNA target sequence for 1110018L13Rik (NM_026780.1,610-628).
gacgcccgtacaatgatga

SEQ ID NO: 689521 - DNA, 19 bp, Mus musculus
  siRNA target sequence for 1110018L13Rik (NM_026780.1,630-648).
gccgacatcgactacatca

SEQ ID NO: 689522 - DNA, 19 bp, Mus musculus
  siRNA target sequence for 1110018L13Rik (NM_026780.1,631-649).
ccgacatcgactacatcaa

SEQ ID NO: 689523 - DNA, 19 bp, Mus musculus
  siRNA target sequence for 1110018L13Rik (NM_026780.1,655-673).
ggaacgccaagttcaacaa

SEQ ID NO: 689524 - DNA, 19 bp, Mus musculus
  siRNA target sequence for 1700027M20Rik (NM_030237.2,358-376).
caccaccaaagaatagcat

SEQ ID NO: 689525 - DNA, 19 bp, Mus musculus
  siRNA target sequence for 1700027M20Rik (NM_030237.2,400-418).
gggtacagaaatttagcaa

SEQ ID NO: 689526 - DNA, 19 bp, Mus musculus
  siRNA target sequence for 1700027M20Rik (NM_030237.2,401-419).
ggtacagaaatttagcaat

SEQ ID NO: 689527 - DNA, 19 bp, Mus musculus
  siRNA target sequence for 1700027M20Rik (NM_030237.2,407-425).
gaaatttagcaatctctta

SEQ ID NO: 689528 - DNA, 19 bp, Mus musculus
  siRNA target sequence for 1700027M20Rik (NM_030237.2,422-440).
cttaaaagacgttaaggat

SEQ ID NO: 689529 - DNA, 19 bp, Mus musculus
  siRNA target sequence for 1700027M20Rik (NM_030237.2,431-449).
cgttaaggatgttctcaaa

SEQ ID NO: 689530 - DNA, 19 bp, Mus musculus
  siRNA target sequence for 1700027M20Rik (NM_030237.2,459-477).
ggcgttgaagagaagtcta

SEQ ID NO: 689531 - DNA, 19 bp, Mus musculus
  siRNA target sequence for 1700027M20Rik (NM_030237.2,649-667).
ctaagaacatggtaccaaa

SEQ ID NO: 689532 - DNA, 19 bp, Mus musculus
  siRNA target sequence for 1700027M20Rik (NM_030237.2,759-777).
cttcgcggagagtacagaa

SEQ ID NO: 689533 - DNA, 19 bp, Mus musculus
  siRNA target sequence for 1700027M20Rik (NM_030237.2,763-781).
gcggagagtacagaaaact

SEQ ID NO: 689534 - DNA, 19 bp, Mus musculus
  siRNA target sequence for 1700027M20Rik (NM_030237.2,823-841).
ggagtaaacagcataacga

SEQ ID NO: 689535 - DNA, 19 bp, Mus musculus
  siRNA target sequence for 1700027M20Rik (NM_030237.2,848-866).
cgaactaatgaggtcatat

SEQ ID NO: 689536 - DNA, 19 bp, Mus musculus
  siRNA target sequence for 1700027M20Rik (NM_030237.2,878-896).
gaacgaaacccaagaaact

SEQ ID NO: 689537 - DNA, 19 bp, Mus musculus
  siRNA target sequence for 1700027M20Rik (NM_030237.2,994-1012).
cccacgcgctgcatttgat

SEQ ID NO: 689538 - DNA, 19 bp, Mus musculus
  siRNA target sequence for 1700027M20Rik (NM_030237.2,1019-1037).
cctgctagagaatgaatgt

SEQ ID NO: 689539 - DNA, 19 bp, Mus musculus
  siRNA target sequence for 1700027M20Rik (NM_030237.2,1056-1074).
gtagacatcctcaaggatt

SEQ ID NO: 689540 - DNA, 19 bp, Mus musculus
  siRNA target sequence for 1700027M20Rik (NM_030237.2,1136-1154).
caagaaatgtccgaagtta

SEQ ID NO: 689541 - DNA, 19 bp, Mus musculus
  siRNA target sequence for 1700027M20Rik (NM_030237.2,1197-1215).
gcaacggaaggcacgatta

SEQ ID NO: 689542 - DNA, 19 bp, Mus musculus
  siRNA target sequence for 1700027M20Rik (NM_030237.2,1201-1219).
cggaaggcacgattaggaa

SEQ ID NO: 689543 - DNA, 19 bp, Mus musculus
  siRNA target sequence for 1700027M20Rik (NM_030237.2,1202-1220).
ggaaggcacgattaggaaa

SEQ ID NO: 689544 - DNA, 19 bp, Mus musculus
  siRNA target sequence for 1700027M20Rik (NM_030237.2,1234-1252).
ggagcccggatgtttgctt

SEQ ID NO: 689545 - DNA, 19 bp, Mus musculus
  siRNA target sequence for 1700027M20Rik (NM_030237.2,1235-1253).
gagcccggatgtttgcttt

SEQ ID NO: 689546 - DNA, 19 bp, Mus musculus
  siRNA target sequence for 1700027M20Rik (NM_030237.2,1238-1256).
cccggatgtttgctttact

SEQ ID NO: 689547 - DNA, 19 bp, Mus musculus
  siRNA target sequence for 1700027M20Rik (NM_030237.2,1255-1273).
ctaagaaggctcggaataa

SEQ ID NO: 689548 - DNA, 19 bp, Mus musculus
  siRNA target sequence for 2410003H12Rik (NM_028028.2,748-766).
gatgccttcaactaccaaa

SEQ ID NO: 689549 - DNA, 19 bp, Mus musculus
  siRNA target sequence for 2410003H12Rik (NM_028028.2,793-811).
catttccctgaggtcttat

SEQ ID NO: 689550 - DNA, 19 bp, Mus musculus
  siRNA target sequence for 2410003H12Rik (NM_028028.2,989-1007).
gggagagagtcaataccat

SEQ ID NO: 689551 - DNA, 19 bp, Mus musculus
  siRNA target sequence for 2410003H12Rik (NM_028028.2,1101-1119).
cctccagggtaaattctat

SEQ ID NO: 689552 - DNA, 19 bp, Mus musculus
  siRNA target sequence for 2410003H12Rik (NM_028028.2,1210-1228).
ctgtacacgctcctgaata

SEQ ID NO: 689553 - DNA, 19 bp, Mus musculus
  siRNA target sequence for 2410003H12Rik (NM_028028.2,1609-1627).
cttgcggtcgtccagaaat

SEQ ID NO: 689554 - DNA, 19 bp, Mus musculus
  siRNA target sequence for 2410003H12Rik (NM_028028.2,1612-1630).
gcggtcgtccagaaatcca

SEQ ID NO: 689555 - DNA, 19 bp, Mus musculus
  siRNA target sequence for 2410003H12Rik (NM_028028.2,1718-1736).
gcagctgctactttaacca

SEQ ID NO: 689556 - DNA, 19 bp, Mus musculus
  siRNA target sequence for 2410003H12Rik (NM_028028.2,1842-1860).
cagtctagacagtatccta

SEQ ID NO: 689557 - DNA, 19 bp, Mus musculus
  siRNA target sequence for 2610029D06Rik (NM_030199.2,324-342).
ctgagtctcgggaatttca

SEQ ID NO: 689558 - DNA, 19 bp, Mus musculus
  siRNA target sequence for 2610029D06Rik (NM_030199.2,328-346).
gtctcgggaatttcatgaa

SEQ ID NO: 689559 - DNA, 19 bp, Mus musculus
  siRNA target sequence for 2610029D06Rik (NM_030199.2,330-348).
ctcgggaatttcatgaaga

SEQ ID NO: 689560 - DNA, 19 bp, Mus musculus
  siRNA target sequence for 2610029D06Rik (NM_030199.2,467-485).
gcccaaacgtgcagtaagt

SEQ ID NO: 689561 - DNA, 19 bp, Mus musculus
  siRNA target sequence for 2610029D06Rik (NM_030199.2,469-487).
ccaaacgtgcagtaagtca

SEQ ID NO: 689562 - DNA, 19 bp, Mus musculus
  siRNA target sequence for 2610029D06Rik (NM_030199.2,488-506).
ggaagaaaccccattctca

SEQ ID NO: 689563 - DNA, 19 bp, Mus musculus
  siRNA target sequence for 2610029D06Rik (NM_030199.2,489-507).
gaagaaaccccattctcaa

SEQ ID NO: 689564 - DNA, 19 bp, Mus musculus
  siRNA target sequence for 2610029D06Rik (NM_030199.2,579-597).
gcttcccatttaattcaga

SEQ ID NO: 689565 - DNA, 19 bp, Mus musculus
  siRNA target sequence for 2610029D06Rik (NM_030199.2,580-598).
cttcccatttaattcagat

SEQ ID NO: 689566 - DNA, 19 bp, Mus musculus
  siRNA target sequence for 2610029D06Rik (NM_030199.2,583-601).
cccatttaattcagatgta

SEQ ID NO: 689567 - DNA, 19 bp, Mus musculus
  siRNA target sequence for 2610029D06Rik (NM_030199.2,585-603).
catttaattcagatgtagt

SEQ ID NO: 689568 - DNA, 19 bp, Mus musculus
  siRNA target sequence for 2610029D06Rik (NM_030199.2,921-939).
gtcagagctccttactcat

SEQ ID NO: 689569 - DNA, 19 bp, Mus musculus
  siRNA target sequence for 2610029D06Rik (NM_030199.2,1042-1060).
cacagaagttaaacagtat

SEQ ID NO: 689570 - DNA, 19 bp, Mus musculus
  siRNA target sequence for 2610029D06Rik (NM_030199.2,1044-1062).
cagaagttaaacagtatga

SEQ ID NO: 689571 - DNA, 19 bp, Mus musculus
  siRNA target sequence for 2610029D06Rik (NM_030199.2,1380-1398).
ctggtgaacgggtgtatga

SEQ ID NO: 689572 - DNA, 19 bp, Mus musculus
  siRNA target sequence for 2610029D06Rik (NM_030199.2,1382-1400).
ggtgaacgggtgtatgagt

SEQ ID NO: 689573 - DNA, 19 bp, Mus musculus
  siRNA target sequence for 2610029D06Rik (NM_030199.2,1522-1540).
gctattgctgcatcagatt

SEQ ID NO: 689574 - DNA, 19 bp, Mus musculus
  siRNA target sequence for 2610029D06Rik (NM_030199.2,1637-1655).
gagaagcgctacacgtata

SEQ ID NO: 689575 - DNA, 19 bp, Mus musculus
  siRNA target sequence for 2610029D06Rik (NM_030199.2,1719-1737).
gtgagacctccgttcattt

SEQ ID NO: 689576 - DNA, 19 bp, Mus musculus
  siRNA target sequence for 2610029D06Rik (NM_030199.2,1723-1741).
gacctccgttcatttagga

SEQ ID NO: 689577 - DNA, 19 bp, Mus musculus
  siRNA target sequence for 2810439M05Rik (NM_026046.1,39-57).
ggaacacgagactgaaaat

SEQ ID NO: 689578 - DNA, 19 bp, Mus musculus
  siRNA target sequence for 2810439M05Rik (NM_026046.1,40-58).
gaacacgagactgaaaata

SEQ ID NO: 689579 - DNA, 19 bp, Mus musculus
  siRNA target sequence for 2810439M05Rik (NM_026046.1,43-61).
cacgagactgaaaataaaa

SEQ ID NO: 689580 - DNA, 19 bp, Mus musculus
  siRNA target sequence for 2810439M05Rik (NM_026046.1,101-119).
gtagaaatggagggattta

SEQ ID NO: 689581 - DNA, 19 bp, Mus musculus
  siRNA target sequence for 2810439M05Rik (NM_026046.1,189-207).
ggcaatctcctttaattga

SEQ ID NO: 689582 - DNA, 19 bp, Mus musculus
  siRNA target sequence for 2810439M05Rik (NM_026046.1,230-248).
gcaaattgtggccatgtta

SEQ ID NO: 689583 - DNA, 19 bp, Mus musculus
  siRNA target sequence for 2810439M05Rik (NM_026046.1,254-272).
ggggagcatttgagtacaa

SEQ ID NO: 689584 - DNA, 19 bp, Mus musculus
  siRNA target sequence for 2810439M05Rik (NM_026046.1,255-273).
gggagcatttgagtacaaa

SEQ ID NO: 689585 - DNA, 19 bp, Mus musculus
  siRNA target sequence for 2810439M05Rik (NM_026046.1,320-338).
catgtttttaactcagata

SEQ ID NO: 689586 - DNA, 19 bp, Mus musculus
  siRNA target sequence for 2810439M05Rik (NM_026046.1,323-341).
gtttttaactcagatatta

SEQ ID NO: 689587 - DNA, 19 bp, Mus musculus
  siRNA target sequence for 2810439M05Rik (NM_026046.1,378-396).
ctccaagttatgcagttaa

SEQ ID NO: 689588 - DNA, 19 bp, Mus musculus
  siRNA target sequence for 2810439M05Rik (NM_026046.1,409-427).
cggcgatgcttgtgagaaa

SEQ ID NO: 689589 - DNA, 19 bp, Mus musculus
  siRNA target sequence for 2810439M05Rik (NM_026046.1,445-463).
ggaagccactcaacttgta

SEQ ID NO: 689590 - DNA, 19 bp, Mus musculus
  siRNA target sequence for 2810439M05Rik (NM_026046.1,446-464).
gaagccactcaacttgtaa

SEQ ID NO: 689591 - DNA, 19 bp, Mus musculus
  siRNA target sequence for 2810439M05Rik (NM_026046.1,565-583).
caagagattttataaaggt

SEQ ID NO: 689592 - DNA, 19 bp, Mus musculus
  siRNA target sequence for 2810439M05Rik (NM_026046.1,586-604).
ggactttggggacatctta

SEQ ID NO: 689593 - DNA, 19 bp, Mus musculus
  siRNA target sequence for 2810439M05Rik (NM_026046.1,607-625).
cctgagctcatctcttaat

SEQ ID NO: 689594 - DNA, 19 bp, Mus musculus
  siRNA target sequence for 2810439M05Rik (NM_026046.1,610-628).
gagctcatctcttaatgaa

SEQ ID NO: 689595 - DNA, 19 bp, Mus musculus
  siRNA target sequence for 2810439M05Rik (NM_026046.1,752-770).
gattgcggaaaatcattct

SEQ ID NO: 689596 - DNA, 19 bp, Mus musculus
  siRNA target sequence for 2810439M05Rik (NM_026046.1,775-793).
gaactacaacttgattgta

SEQ ID NO: 689597 - DNA, 19 bp, Mus musculus
  siRNA target sequence for 2810439M05Rik (NM_026046.1,778-796).
ctacaacttgattgtacat

SEQ ID NO: 689598 - DNA, 19 bp, Mus musculus
  siRNA target sequence for 2810439M05Rik (NM_026046.1,901-919).
gaagccttatgcatgtcta

SEQ ID NO: 689599 - DNA, 19 bp, Mus musculus
  siRNA target sequence for 2810439M05Rik (NM_026046.1,904-922).
gccttatgcatgtctagat

SEQ ID NO: 689600 - DNA, 19 bp, Mus musculus
  siRNA target sequence for 2810439M05Rik (NM_026046.1,905-923).
ccttatgcatgtctagatt

SEQ ID NO: 689601 - DNA, 19 bp, Mus musculus
  siRNA target sequence for 2810439M05Rik (NM_026046.1,917-935).
ctagattgcggaaaaacgt

SEQ ID NO: 689602 - DNA, 19 bp, Mus musculus
  siRNA target sequence for 2810439M05Rik (NM_026046.1,927-945).
gaaaaacgttcaacagaaa

SEQ ID NO: 689603 - DNA, 19 bp, Mus musculus
  siRNA target sequence for 2810439M05Rik (NM_026046.1,942-960).
gaaattcatccctgatttt

SEQ ID NO: 689604 - DNA, 19 bp, Mus musculus
  siRNA target sequence for 2810439M05Rik (NM_026046.1,1015-1033).
gcccttcactgacatttct

SEQ ID NO: 689605 - DNA, 19 bp, Mus musculus
  siRNA target sequence for 2810470K21Rik (NM_023323.2,559-577).
gaggccccacagtatcgaa

SEQ ID NO: 689606 - DNA, 19 bp, Mus musculus
  siRNA target sequence for 4432417F03Rik (NM_027547.1,146-164).
gcgtgcgcaagggtgaaaa

SEQ ID NO: 689607 - DNA, 19 bp, Mus musculus
  siRNA target sequence for 4432417F03Rik (NM_027547.1,147-165).
cgtgcgcaagggtgaaaaa

SEQ ID NO: 689608 - DNA, 19 bp, Mus musculus
  siRNA target sequence for 4432417F03Rik (NM_027547.1,148-166).
gtgcgcaagggtgaaaaat

SEQ ID NO: 689609 - DNA, 19 bp, Mus musculus
  siRNA target sequence for 4432417F03Rik (NM_027547.1,150-168).
gcgcaagggtgaaaaattt

SEQ ID NO: 689610 - DNA, 19 bp, Mus musculus
  siRNA target sequence for 4432417F03Rik (NM_027547.1,387-405).
ggcagttgatgatatagaa

SEQ ID NO: 689611 - DNA, 19 bp, Mus musculus
  siRNA target sequence for 4432417F03Rik (NM_027547.1,388-406).
gcagttgatgatatagaaa

SEQ ID NO: 689612 - DNA, 19 bp, Mus musculus
  siRNA target sequence for 4432417F03Rik (NM_027547.1,666-684).
cgagaactgcgggaagaaa

SEQ ID NO: 689613 - DNA, 19 bp, Mus musculus
  siRNA target sequence for 4432417F03Rik (NM_027547.1,809-827).
gaaggcaccaggaaaatgt

SEQ ID NO: 689614 - DNA, 19 bp, Mus musculus
  siRNA target sequence for 4432417F03Rik (NM_027547.1,831-849).
caccggtgatcctaagaga

SEQ ID NO: 689615 - DNA, 19 bp, Mus musculus
  siRNA target sequence for 4432417F03Rik (NM_027547.1,833-851).
ccggtgatcctaagagaaa

SEQ ID NO: 689616 - DNA, 19 bp, Mus musculus
  siRNA target sequence for 4432417F03Rik (NM_027547.1,861-879).
ctcggtgtgcaatagaaaa

SEQ ID NO: 689617 - DNA, 19 bp, Mus musculus
  siRNA target sequence for 4432417F03Rik (NM_027547.1,924-942).
gatatttgattgtcaagaa

SEQ ID NO: 689618 - DNA, 19 bp, Mus musculus
  siRNA target sequence for 4432417F03Rik (NM_027547.1,998-1016).
cagaaaagcggccttataa

SEQ ID NO: 689619 - DNA, 19 bp, Mus musculus
  siRNA target sequence for 4432417F03Rik (NM_027547.1,1000-1018).
gaaaagcggccttataact

SEQ ID NO: 689620 - DNA, 19 bp, Mus musculus
  siRNA target sequence for 4432417F03Rik (NM_027547.1,1127-1145).
ctcacagaaacgtttacaa

SEQ ID NO: 689621 - DNA, 19 bp, Mus musculus
  siRNA target sequence for 4432417F03Rik (NM_027547.1,1182-1200).
ccagtgtgatgcatgtaaa

SEQ ID NO: 689622 - DNA, 19 bp, Mus musculus
  siRNA target sequence for 4432417F03Rik (NM_027547.1,1206-1224).
gttccgcacgcccttttct

SEQ ID NO: 689623 - DNA, 19 bp, Mus musculus
  siRNA target sequence for 4432417F03Rik (NM_027547.1,1298-1316).
ggaaggatacattaaacgt

SEQ ID NO: 689624 - DNA, 19 bp, Mus musculus
  siRNA target sequence for 4432417F03Rik (NM_027547.1,1391-1409).
cagtgcttaggagtcataa

SEQ ID NO: 689625 - DNA, 19 bp, Mus musculus
  siRNA target sequence for 4432417F03Rik (NM_027547.1,1393-1411).
gtgcttaggagtcataaga

SEQ ID NO: 689626 - DNA, 19 bp, Mus musculus
  siRNA target sequence for 4432417F03Rik (NM_027547.1,1434-1452).
gaaagtctgcccatattgt

SEQ ID NO: 689627 - DNA, 19 bp, Mus musculus
  siRNA target sequence for 4432417F03Rik (NM_027547.1,1444-1462).
ccatattgtggccagaaat

SEQ ID NO: 689628 - DNA, 19 bp, Mus musculus
  siRNA target sequence for 4432417F03Rik (NM_027547.1,1445-1463).
catattgtggccagaaatt

SEQ ID NO: 689629 - DNA, 19 bp, Mus musculus
  siRNA target sequence for 4432417F03Rik (NM_027547.1,1475-1493).
ggaccctgagagttcacat

SEQ ID NO: 689630 - DNA, 19 bp, Mus musculus
  siRNA target sequence for 4432417F03Rik (NM_027547.1,1522-1540).
caatgcccgtactgtgaaa

SEQ ID NO: 689631 - DNA, 19 bp, Mus musculus
  siRNA target sequence for 4432417F03Rik (NM_027547.1,1527-1545).
cccgtactgtgaaaaaggt

SEQ ID NO: 689632 - DNA, 19 bp, Mus musculus
  siRNA target sequence for 4432417F03Rik (NM_027547.1,1529-1547).
cgtactgtgaaaaaggttt

SEQ ID NO: 689633 - DNA, 19 bp, Mus musculus
  siRNA target sequence for 4432417F03Rik (NM_027547.1,1718-1736).
gcctgaagaaaatgcttat

SEQ ID NO: 689634 - DNA, 19 bp, Mus musculus
  siRNA target sequence for 4432417F03Rik (NM_027547.1,1788-1806).
ctgccataagaagtttaca

SEQ ID NO: 689635 - DNA, 19 bp, Mus musculus
  siRNA target sequence for 4432417F03Rik (NM_027547.1,1791-1809).
ccataagaagtttacaaga

SEQ ID NO: 689636 - DNA, 19 bp, Mus musculus
  siRNA target sequence for 4921531G14Rik (NM_025736.1,67-85).
ggtcactgagcgttacgat

SEQ ID NO: 689637 - DNA, 19 bp, Mus musculus
  siRNA target sequence for 4921531G14Rik (NM_025736.1,98-116).
gaaatgcgagataaaatga

SEQ ID NO: 689638 - DNA, 19 bp, Mus musculus
  siRNA target sequence for 4921531G14Rik (NM_025736.1,195-213).
ctaagcttggggatgacat

SEQ ID NO: 689639 - DNA, 19 bp, Mus musculus
  siRNA target sequence for 4921531G14Rik (NM_025736.1,238-256).
gattgcagccctagactat

SEQ ID NO: 689640 - DNA, 19 bp, Mus musculus
  siRNA target sequence for 4921531G14Rik (NM_025736.1,263-281).
gatgacttggcattgtttt

SEQ ID NO: 689641 - DNA, 19 bp, Mus musculus
  siRNA target sequence for 4921531G14Rik (NM_025736.1,308-326).
cctggtagtcacagagtta

SEQ ID NO: 689642 - DNA, 19 bp, Mus musculus
  siRNA target sequence for 4921531G14Rik (NM_025736.1,319-337).
cagagttaagcggttaaca

SEQ ID NO: 689643 - DNA, 19 bp, Mus musculus
  siRNA target sequence for 4921531G14Rik (NM_025736.1,339-357).
gcatgcgatttgaagctat

SEQ ID NO: 689644 - DNA, 19 bp, Mus musculus
  siRNA target sequence for 4921531G14Rik (NM_025736.1,370-388).
cgatgctatacaactgtat

SEQ ID NO: 689645 - DNA, 19 bp, Mus musculus
  siRNA target sequence for 4921531G14Rik (NM_025736.1,385-403).
gtatgatcggattttgcaa

SEQ ID NO: 689646 - DNA, 19 bp, Mus musculus
  siRNA target sequence for 4921531G14Rik (NM_025736.1,423-441).
ctgccagaaagcgtaagat

SEQ ID NO: 689647 - DNA, 19 bp, Mus musculus
  siRNA target sequence for 4921531G14Rik (NM_025736.1,434-452).
cgtaagattgccattcgaa

SEQ ID NO: 689648 - DNA, 19 bp, Mus musculus
  siRNA target sequence for 4921531G14Rik (NM_025736.1,435-453).
gtaagattgccattcgaaa

SEQ ID NO: 689649 - DNA, 19 bp, Mus musculus
  siRNA target sequence for 4921531G14Rik (NM_025736.1,496-514).
gtatctggagcagtttgtt

SEQ ID NO: 689650 - DNA, 19 bp, Mus musculus
  siRNA target sequence for 4921531G14Rik (NM_025736.1,543-561).
cagaactttatatcaatga

SEQ ID NO: 689651 - DNA, 19 bp, Mus musculus
  siRNA target sequence for 4921531G14Rik (NM_025736.1,568-586).
ctatgccaaagcagctttt

SEQ ID NO: 689652 - DNA, 19 bp, Mus musculus
  siRNA target sequence for 4921531G14Rik (NM_025736.1,598-616).
gctgatgatgacaaatcca

SEQ ID NO: 689653 - DNA, 19 bp, Mus musculus
  siRNA target sequence for 4921531G14Rik (NM_025736.1,710-728).
gcactgaaactcaacaaca

SEQ ID NO: 689654 - DNA, 19 bp, Mus musculus
  siRNA target sequence for 4921531G14Rik (NM_025736.1,743-761).
ctgtttgggctctacatgt

SEQ ID NO: 689655 - DNA, 19 bp, Mus musculus
  siRNA target sequence for 4921531G14Rik (NM_025736.1,754-772).
ctacatgtctgcaagtcat

SEQ ID NO: 689656 - DNA, 19 bp, Mus musculus
  siRNA target sequence for 4921531G14Rik (NM_025736.1,760-778).
gtctgcaagtcatattgct

SEQ ID NO: 689657 - DNA, 19 bp, Mus musculus
  siRNA target sequence for 4921531G14Rik (NM_025736.1,770-788).
catattgcttctaatccaa

SEQ ID NO: 689658 - DNA, 19 bp, Mus musculus
  siRNA target sequence for 4921531G14Rik (NM_025736.1,883-901).
gaaggaaaccaaatactct

SEQ ID NO: 689659 - DNA, 19 bp, Mus musculus
  siRNA target sequence for 4921531G14Rik (NM_025736.1,887-905).
gaaaccaaatactctctta

SEQ ID NO: 689660 - DNA, 19 bp, Mus musculus
  siRNA target sequence for 4921531G14Rik (NM_025736.1,898-916).
ctctcttaaggcagttgaa

SEQ ID NO: 689661 - DNA, 19 bp, Mus musculus
  siRNA target sequence for 4930488P06Rik (NM_178761.2,848-866).
gacccaggaaagaccttat

SEQ ID NO: 689662 - DNA, 19 bp, Mus musculus
  siRNA target sequence for 4930488P06Rik (NM_178761.2,884-902).
caagagctttcagtatagt

SEQ ID NO: 689663 - DNA, 19 bp, Mus musculus
  siRNA target sequence for 4930488P06Rik (NM_178761.2,1017-1035).
gctggccagaccctctata

SEQ ID NO: 689664 - DNA, 19 bp, Mus musculus
  siRNA target sequence for 4930488P06Rik (NM_178761.2,1018-1036).
ctggccagaccctctatat

SEQ ID NO: 689665 - DNA, 19 bp, Mus musculus
  siRNA target sequence for 4930488P06Rik (NM_178761.2,1020-1038).
ggccagaccctctatatct

SEQ ID NO: 689666 - DNA, 19 bp, Mus musculus
  siRNA target sequence for 4930488P06Rik (NM_178761.2,1270-1288).
cacacccccctgagatcat

SEQ ID NO: 689667 - DNA, 19 bp, Mus musculus
  siRNA target sequence for 4930488P06Rik (NM_178761.2,1413-1431).
ggcactgaggcccatctat

SEQ ID NO: 689668 - DNA, 19 bp, Mus musculus
  siRNA target sequence for 4930488P06Rik (NM_178761.2,1709-1727).
gcagcggtatgatctagta

SEQ ID NO: 689669 - DNA, 19 bp, Mus musculus
  siRNA target sequence for 4930488P06Rik (NM_178761.2,1869-1887).
cgattcacctgcatttcca

SEQ ID NO: 689670 - DNA, 19 bp, Mus musculus
  siRNA target sequence for 4930488P06Rik (NM_178761.2,1879-1897).
gcatttccaacctcaatgt

SEQ ID NO: 689671 - DNA, 19 bp, Mus musculus
  siRNA target sequence for 4930488P06Rik (NM_178761.2,1907-1925).
caaccatgcaggccataaa

SEQ ID NO: 689672 - DNA, 19 bp, Mus musculus
  siRNA target sequence for 4930565N07Rik (NM_175219.2,1336-1354).
caggggtcgagggatacat

SEQ ID NO: 689673 - DNA, 19 bp, Mus musculus
  siRNA target sequence for 8430423A01Rik (NM_175294.2,203-221).
gtctcggcctgtcagaaat

SEQ ID NO: 689674 - DNA, 19 bp, Mus musculus
  siRNA target sequence for 8430423A01Rik (NM_175294.2,207-225).
cggcctgtcagaaatagga

SEQ ID NO: 689675 - DNA, 19 bp, Mus musculus
  siRNA target sequence for 8430423A01Rik (NM_175294.2,245-263).
gtttcaggaatcagatgat

SEQ ID NO: 689676 - DNA, 19 bp, Mus musculus
  siRNA target sequence for 8430423A01Rik (NM_175294.2,292-310).
gccctcctgctaagaagat

SEQ ID NO: 689677 - DNA, 19 bp, Mus musculus
  siRNA target sequence for 8430423A01Rik (NM_175294.2,293-311).
ccctcctgctaagaagatt

SEQ ID NO: 689678 - DNA, 19 bp, Mus musculus
  siRNA target sequence for 8430423A01Rik (NM_175294.2,567-585).
gcgccattccaggagaatt

SEQ ID NO: 689679 - DNA, 19 bp, Mus musculus
  siRNA target sequence for 8430423A01Rik (NM_175294.2,882-900).
gcctcatctggggaagatt

SEQ ID NO: 689680 - DNA, 19 bp, Mus musculus
  siRNA target sequence for A630001G21Rik (NM_177055.2,131-149).
ggaacgttttaatgaagta

SEQ ID NO: 689681 - DNA, 19 bp, Mus musculus
  siRNA target sequence for A630001G21Rik (NM_177055.2,180-198).
gaaattgcccatgcaatta

SEQ ID NO: 689682 - DNA, 19 bp, Mus musculus
  siRNA target sequence for A630001G21Rik (NM_177055.2,236-254).
ctccttcatcacagacaaa

SEQ ID NO: 689683 - DNA, 19 bp, Mus musculus
  siRNA target sequence for A630001G21Rik (NM_177055.2,238-256).
ccttcatcacagacaaaat

SEQ ID NO: 689684 - DNA, 19 bp, Mus musculus
  siRNA target sequence for A630001G21Rik (NM_177055.2,257-275).
ctatgctgattcttacgaa

SEQ ID NO: 689685 - DNA, 19 bp, Mus musculus
  siRNA target sequence for A630001G21Rik (NM_177055.2,338-356).
gttgtcggactcatcgttt

SEQ ID NO: 689686 - DNA, 19 bp, Mus musculus
  siRNA target sequence for A630001G21Rik (NM_177055.2,341-359).
gtcggactcatcgtttcta

SEQ ID NO: 689687 - DNA, 19 bp, Mus musculus
  siRNA target sequence for A630001G21Rik (NM_177055.2,357-375).
ctatgggctctgtttaaca

SEQ ID NO: 689688 - DNA, 19 bp, Mus musculus
  siRNA target sequence for A630001G21Rik (NM_177055.2,380-398).
gaacctgaaggaatatcct

SEQ ID NO: 689689 - DNA, 19 bp, Mus musculus
  siRNA target sequence for A630001G21Rik (NM_177055.2,397-415).
ctgcgttaagagagattca

SEQ ID NO: 689690 - DNA, 19 bp, Mus musculus
  siRNA target sequence for A630001G21Rik (NM_177055.2,399-417).
gcgttaagagagattcata

SEQ ID NO: 689691 - DNA, 19 bp, Mus musculus
  siRNA target sequence for A630001G21Rik (NM_177055.2,427-445).
gaactggaagggacaaact

SEQ ID NO: 689692 - DNA, 19 bp, Mus musculus
  siRNA target sequence for A930014C21Rik (NM_172507.2,301-319).
gtggatgtacaaaaacatt

SEQ ID NO: 689693 - DNA, 19 bp, Mus musculus
  siRNA target sequence for A930014C21Rik (NM_172507.2,390-408).
gagactatgacagtttttt

SEQ ID NO: 689694 - DNA, 19 bp, Mus musculus
  siRNA target sequence for A930014C21Rik (NM_172507.2,427-445).
cacagtcttttcattctta

SEQ ID NO: 689695 - DNA, 19 bp, Mus musculus
  siRNA target sequence for AI854635 (NM_177565.2,169-187).
gccacatgggcaaacagta

SEQ ID NO: 689696 - DNA, 19 bp, Mus musculus
  siRNA target sequence for AI854635 (NM_177565.2,267-285).
gagagtcctcgaaagagat

SEQ ID NO: 689697 - DNA, 19 bp, Mus musculus
  siRNA target sequence for AI854635 (NM_177565.2,269-287).
gagtcctcgaaagagatta

SEQ ID NO: 689698 - DNA, 19 bp, Mus musculus
  siRNA target sequence for AI854635 (NM_177565.2,273-291).
cctcgaaagagattataga

SEQ ID NO: 689699 - DNA, 19 bp, Mus musculus
  siRNA target sequence for AI854635 (NM_177565.2,274-292).
ctcgaaagagattatagaa

SEQ ID NO: 689700 - DNA, 19 bp, Mus musculus
  siRNA target sequence for AI854635 (NM_177565.2,276-294).
cgaaagagattatagaaaa

SEQ ID NO: 689701 - DNA, 19 bp, Mus musculus
  siRNA target sequence for AI854635 (NM_177565.2,324-342).
ctgggttacttatcttcaa

SEQ ID NO: 689702 - DNA, 19 bp, Mus musculus
  siRNA target sequence for AI854635 (NM_177565.2,327-345).
ggttacttatcttcaagaa

SEQ ID NO: 689703 - DNA, 19 bp, Mus musculus
  siRNA target sequence for AI854635 (NM_177565.2,346-364).
gtcgtcctcaggtgagaaa

SEQ ID NO: 689704 - DNA, 19 bp, Mus musculus
  siRNA target sequence for AI854635 (NM_177565.2,373-391).
gaatccgagaggctttaat

SEQ ID NO: 689705 - DNA, 19 bp, Mus musculus
  siRNA target sequence for AI854635 (NM_177565.2,378-396).
cgagaggctttaatcctaa

SEQ ID NO: 689706 - DNA, 19 bp, Mus musculus
  siRNA target sequence for AI854635 (NM_177565.2,392-410).
cctaaccctagtgtattgt

SEQ ID NO: 689707 - DNA, 19 bp, Mus musculus
  siRNA target sequence for AI854635 (NM_177565.2,457-475).
caactgcctggggagtata

SEQ ID NO: 689708 - DNA, 19 bp, Mus musculus
  siRNA target sequence for AI854635 (NM_177565.2,467-485).
gggagtatagagcttacta

SEQ ID NO: 689709 - DNA, 19 bp, Mus musculus
  siRNA target sequence for AI854635 (NM_177565.2,468-486).
ggagtatagagcttactaa

SEQ ID NO: 689710 - DNA, 19 bp, Mus musculus
  siRNA target sequence for AI854635 (NM_177565.2,1064-1082).
gagcttatccgccatcaaa

SEQ ID NO: 689711 - DNA, 19 bp, Mus musculus
  siRNA target sequence for AI854635 (NM_177565.2,1305-1323).
ggcggacctctcatctgat

SEQ ID NO: 689712 - DNA, 19 bp, Mus musculus
  siRNA target sequence for AI854635 (NM_177565.2,1405-1423).
gttgcttcaccagaagatt

SEQ ID NO: 689713 - DNA, 19 bp, Mus musculus
  siRNA target sequence for AI854635 (NM_177565.2,1408-1426).
gcttcaccagaagattcat

SEQ ID NO: 689714 - DNA, 19 bp, Mus musculus
  siRNA target sequence for Anp32b (NM_130889.1,578-596).
gtcactaaccggagtgatt

SEQ ID NO: 689715 - DNA, 19 bp, Mus musculus
  siRNA target sequence for Anp32b (NM_130889.1,591-609).
gtgattaccgagaaactgt

SEQ ID NO: 689716 - DNA, 19 bp, Mus musculus
  siRNA target sequence for AW552001 (NM_031375.2,630-648).
gcgattccagaaaatacga

SEQ ID NO: 689717 - DNA, 19 bp, Mus musculus
  siRNA target sequence for AW552001 (NM_031375.2,702-720).
ggagcagatccggtattta

SEQ ID NO: 689718 - DNA, 19 bp, Mus musculus
  siRNA target sequence for AW552001 (NM_031375.2,706-724).
cagatccggtatttacata

SEQ ID NO: 689719 - DNA, 19 bp, Mus musculus
  siRNA target sequence for AW552001 (NM_031375.2,711-729).
ccggtatttacataaggaa

SEQ ID NO: 689720 - DNA, 19 bp, Mus musculus
  siRNA target sequence for AW552001 (NM_031375.2,712-730).
cggtatttacataaggaat

SEQ ID NO: 689721 - DNA, 19 bp, Mus musculus
  siRNA target sequence for AW552001 (NM_031375.2,713-731).
ggtatttacataaggaatt

SEQ ID NO: 689722 - DNA, 19 bp, Mus musculus
  siRNA target sequence for AW552001 (NM_031375.2,772-790).
gatgtcagcactgatgtta

SEQ ID NO: 689723 - DNA, 19 bp, Mus musculus
  siRNA target sequence for AW552001 (NM_031375.2,846-864).
ggaccaaaaggtcttgaaa

SEQ ID NO: 689724 - DNA, 19 bp, Mus musculus
  siRNA target sequence for AW552001 (NM_031375.2,890-908).
gtcagctccccgtttctga

SEQ ID NO: 689725 - DNA, 19 bp, Mus musculus
  siRNA target sequence for AW552001 (NM_031375.2,899-917).
ccgtttctgaagatacctt

SEQ ID NO: 689726 - DNA, 19 bp, Mus musculus
  siRNA target sequence for AW552001 (NM_031375.2,966-984).
ggatgaagtctcctctaaa

SEQ ID NO: 689727 - DNA, 19 bp, Mus musculus
  siRNA target sequence for AW552001 (NM_031375.2,1054-1072).
cgggaagggagggataaaa

SEQ ID NO: 689728 - DNA, 19 bp, Mus musculus
  siRNA target sequence for AW552001 (NM_031375.2,1062-1080).
gagggataaaagaatccaa

SEQ ID NO: 689729 - DNA, 19 bp, Mus musculus
  siRNA target sequence for AW552001 (NM_031375.2,1126-1144).
cagcgagagcttcagaaat

SEQ ID NO: 689730 - DNA, 19 bp, Mus musculus
  siRNA target sequence for AW552001 (NM_031375.2,1180-1198).
ggcagtgatacgttaccaa

SEQ ID NO: 689731 - DNA, 19 bp, Mus musculus
  siRNA target sequence for AW552001 (NM_031375.2,1271-1289).
gagggcatgacttctttga

SEQ ID NO: 689732 - DNA, 19 bp, Mus musculus
  siRNA target sequence for AW552001 (NM_031375.2,1297-1315).
ggaaacttcctctacagaa

SEQ ID NO: 689733 - DNA, 19 bp, Mus musculus
  siRNA target sequence for Bard1 (NM_007525.1,240-258).
ctgctcccgctgtgctaat

SEQ ID NO: 689734 - DNA, 19 bp, Mus musculus
  siRNA target sequence for Bard1 (NM_007525.1,242-260).
gctcccgctgtgctaatat

SEQ ID NO: 689735 - DNA, 19 bp, Mus musculus
  siRNA target sequence for Bard1 (NM_007525.1,303-321).
ctgtagtggttgtataagt

SEQ ID NO: 689736 - DNA, 19 bp, Mus musculus
  siRNA target sequence for Bard1 (NM_007525.1,305-323).
gtagtggttgtataagtga

SEQ ID NO: 689737 - DNA, 19 bp, Mus musculus
  siRNA target sequence for Bard1 (NM_007525.1,365-383).
ggatcctagacctcaagat

SEQ ID NO: 689738 - DNA, 19 bp, Mus musculus
  siRNA target sequence for Bard1 (NM_007525.1,366-384).
gatcctagacctcaagata

SEQ ID NO: 689739 - DNA, 19 bp, Mus musculus
  siRNA target sequence for Bard1 (NM_007525.1,435-453).
gctccatgacaataaagat

SEQ ID NO: 689740 - DNA, 19 bp, Mus musculus
  siRNA target sequence for Bard1 (NM_007525.1,451-469).
gattcaaaagacaacacat

SEQ ID NO: 689741 - DNA, 19 bp, Mus musculus
  siRNA target sequence for Bard1 (NM_007525.1,465-483).
cacatctagggcaagttta

SEQ ID NO: 689742 - DNA, 19 bp, Mus musculus
  siRNA target sequence for Bard1 (NM_007525.1,467-485).
catctagggcaagtttatt

SEQ ID NO: 689743 - DNA, 19 bp, Mus musculus
  siRNA target sequence for Bard1 (NM_007525.1,524-542).
ggtttagtcctcgaagtaa

SEQ ID NO: 689744 - DNA, 19 bp, Mus musculus
  siRNA target sequence for Bard1 (NM_007525.1,532-550).
cctcgaagtaagaaggtta

SEQ ID NO: 689745 - DNA, 19 bp, Mus musculus
  siRNA target sequence for Bard1 (NM_007525.1,535-553).
cgaagtaagaaggttagat

SEQ ID NO: 689746 - DNA, 19 bp, Mus musculus
  siRNA target sequence for Bard1 (NM_007525.1,539-557).
gtaagaaggttagatatgt

SEQ ID NO: 689747 - DNA, 19 bp, Mus musculus
  siRNA target sequence for Bard1 (NM_007525.1,561-579).
gactaaagtgtcagtacaa

SEQ ID NO: 689748 - DNA, 19 bp, Mus musculus
  siRNA target sequence for Bard1 (NM_007525.1,620-638).
cctcaatgtatgaatttgt

SEQ ID NO: 689749 - DNA, 19 bp, Mus musculus
  siRNA target sequence for Bard1 (NM_007525.1,621-639).
ctcaatgtatgaatttgtt

SEQ ID NO: 689750 - DNA, 19 bp, Mus musculus
  siRNA target sequence for Bard1 (NM_007525.1,661-679).
gttcctaagagtgctaaaa

SEQ ID NO: 689751 - DNA, 19 bp, Mus musculus
  siRNA target sequence for Bard1 (NM_007525.1,673-691).
gctaaaacagcttctagaa

SEQ ID NO: 689752 - DNA, 19 bp, Mus musculus
  siRNA target sequence for Bard1 (NM_007525.1,744-762).
gaatttaaggccagaaaca

SEQ ID NO: 689753 - DNA, 19 bp, Mus musculus
  siRNA target sequence for Bard1 (NM_007525.1,818-836).
gtagccaaataccagttat

SEQ ID NO: 689754 - DNA, 19 bp, Mus musculus
  siRNA target sequence for Bard1 (NM_007525.1,840-858).
gagaccacgggtaaatggt

SEQ ID NO: 689755 - DNA, 19 bp, Mus musculus
  siRNA target sequence for Bard1 (NM_007525.1,845-863).
cacgggtaaatggtgaaat

SEQ ID NO: 689756 - DNA, 19 bp, Mus musculus
  siRNA target sequence for Bard1 (NM_007525.1,850-868).
gtaaatggtgaaatagact

SEQ ID NO: 689757 - DNA, 19 bp, Mus musculus
  siRNA target sequence for Bard1 (NM_007525.1,859-877).
gaaatagacttattagcaa

SEQ ID NO: 689758 - DNA, 19 bp, Mus musculus
  siRNA target sequence for Bard1 (NM_007525.1,911-929).
gcttgactgaagtctcttt

SEQ ID NO: 689759 - DNA, 19 bp, Mus musculus
  siRNA target sequence for Bard1 (NM_007525.1,912-930).
cttgactgaagtctcttta

SEQ ID NO: 689760 - DNA, 19 bp, Mus musculus
  siRNA target sequence for Bard1 (NM_007525.1,1024-1042).
gggagtaatggaaatcgta

SEQ ID NO: 689761 - DNA, 19 bp, Mus musculus
  siRNA target sequence for Bard1 (NM_007525.1,1026-1044).
gagtaatggaaatcgtaaa

SEQ ID NO: 689762 - DNA, 19 bp, Mus musculus
  siRNA target sequence for Bard1 (NM_007525.1,1116-1134).
cggtgagccagcattgctt

SEQ ID NO: 689763 - DNA, 19 bp, Mus musculus
  siRNA target sequence for Bard1 (NM_007525.1,1127-1145).
cattgcttgcagaaaacgt

SEQ ID NO: 689764 - DNA, 19 bp, Mus musculus
  siRNA target sequence for Bard1 (NM_007525.1,1277-1295).
caactcacagacaaatgat

SEQ ID NO: 689765 - DNA, 19 bp, Mus musculus
  siRNA target sequence for Bard1 (NM_007525.1,1355-1373).
gaggagagaccttacttca

SEQ ID NO: 689766 - DNA, 19 bp, Mus musculus
  siRNA target sequence for Bard1 (NM_007525.1,1379-1397).
cttctattaagggtgatat

SEQ ID NO: 689767 - DNA, 19 bp, Mus musculus
  siRNA target sequence for Bard1 (NM_007525.1,1426-1444).
ggaaacgacccaaatgtta

SEQ ID NO: 689768 - DNA, 19 bp, Mus musculus
  siRNA target sequence for Bard1 (NM_007525.1,1427-1445).
gaaacgacccaaatgttaa

SEQ ID NO: 689769 - DNA, 19 bp, Mus musculus
  siRNA target sequence for Bard1 (NM_007525.1,1509-1527).
gttgctgctccagcataat

SEQ ID NO: 689770 - DNA, 19 bp, Mus musculus
  siRNA target sequence for Bard1 (NM_007525.1,1541-1559).
cccctggctatcagaatga

SEQ ID NO: 689771 - DNA, 19 bp, Mus musculus
  siRNA target sequence for Bard1 (NM_007525.1,1584-1602).
gagtggccacatcgatata

SEQ ID NO: 689772 - DNA, 19 bp, Mus musculus
  siRNA target sequence for Bard1 (NM_007525.1,1586-1604).
gtggccacatcgatatagt

SEQ ID NO: 689773 - DNA, 19 bp, Mus musculus
  siRNA target sequence for Bard1 (NM_007525.1,1588-1606).
ggccacatcgatatagtca

SEQ ID NO: 689774 - DNA, 19 bp, Mus musculus
  siRNA target sequence for Bard1 (NM_007525.1,1589-1607).
gccacatcgatatagtcaa

SEQ ID NO: 689775 - DNA, 19 bp, Mus musculus
  siRNA target sequence for Bard1 (NM_007525.1,1635-1653).
gaatgctgttaacatattt

SEQ ID NO: 689776 - DNA, 19 bp, Mus musculus
  siRNA target sequence for Bard1 (NM_007525.1,1659-1677).
gcggcctgtggactataca

SEQ ID NO: 689777 - DNA, 19 bp, Mus musculus
  siRNA target sequence for Bard1 (NM_007525.1,1669-1687).
gactatacagacaatgaga

SEQ ID NO: 689778 - DNA, 19 bp, Mus musculus
  siRNA target sequence for Bard1 (NM_007525.1,1680-1698).
caatgagaatataagatca

SEQ ID NO: 689779 - DNA, 19 bp, Mus musculus
  siRNA target sequence for Bard1 (NM_007525.1,1844-1862).
cagttcttaaggctaaaaa

SEQ ID NO: 689780 - DNA, 19 bp, Mus musculus
  siRNA target sequence for Bard1 (NM_007525.1,1846-1864).
gttcttaaggctaaaaagt

SEQ ID NO: 689781 - DNA, 19 bp, Mus musculus
  siRNA target sequence for Bard1 (NM_007525.1,1849-1867).
cttaaggctaaaaagtgta

SEQ ID NO: 689782 - DNA, 19 bp, Mus musculus
  siRNA target sequence for Bard1 (NM_007525.1,1855-1873).
gctaaaaagtgtatggaat

SEQ ID NO: 689783 - DNA, 19 bp, Mus musculus
  siRNA target sequence for Bard1 (NM_007525.1,1856-1874).
ctaaaaagtgtatggaatt

SEQ ID NO: 689784 - DNA, 19 bp, Mus musculus
  siRNA target sequence for Bard1 (NM_007525.1,1880-1898).
gtacagtaactcatgtcat

SEQ ID NO: 689785 - DNA, 19 bp, Mus musculus
  siRNA target sequence for Bard1 (NM_007525.1,1989-2007).
ctgtctggacagcaaagta

SEQ ID NO: 689786 - DNA, 19 bp, Mus musculus
  siRNA target sequence for Bard1 (NM_007525.1,2005-2023).
gtacgtgagcaggaagaaa

SEQ ID NO: 689787 - DNA, 19 bp, Mus musculus
  siRNA target sequence for Bard1 (NM_007525.1,2135-2153).
caagggatgacctccttaa

SEQ ID NO: 689788 - DNA, 19 bp, Mus musculus
  siRNA target sequence for Bard1 (NM_007525.1,2226-2244).
caacacggttgcataccat

SEQ ID NO: 689789 - DNA, 19 bp, Mus musculus
  siRNA target sequence for Bard1 (NM_007525.1,2267-2285).
gcttctgtacgcagtacat

SEQ ID NO: 689790 - DNA, 19 bp, Mus musculus
  siRNA target sequence for Bard1 (NM_007525.1,2287-2305).
gtctacgaagacctgttta

SEQ ID NO: 689791 - DNA, 19 bp, Mus musculus
  siRNA target sequence for Bard1 (NM_007525.1,2323-2341).
gttcggcagggcaaagtct

SEQ ID NO: 689792 - DNA, 19 bp, Mus musculus
  siRNA target sequence for Bard1 (NM_007525.1,2372-2390).
gtataatggcctttgaatt

SEQ ID NO: 689793 - DNA, 19 bp, Mus musculus
  siRNA target sequence for BC030314 (NM_146259.2,880-898).
gtacaaagacatttccaaa

SEQ ID NO: 689794 - DNA, 19 bp, Mus musculus
  siRNA target sequence for BC030314 (NM_146259.2,915-933).
cgccatgctgctacacata

SEQ ID NO: 689795 - DNA, 19 bp, Mus musculus
  siRNA target sequence for BC030314 (NM_146259.2,1005-1023).
gccagcggagacaaggtat

SEQ ID NO: 689796 - DNA, 19 bp, Mus musculus
  siRNA target sequence for BC030314 (NM_146259.2,1016-1034).
caaggtatcagcttcagta

SEQ ID NO: 689797 - DNA, 19 bp, Mus musculus
  siRNA target sequence for BC030314 (NM_146259.2,1232-1250).
ctgccccaaggcttatggt

SEQ ID NO: 689798 - DNA, 19 bp, Mus musculus
  siRNA target sequence for BC030314 (NM_146259.2,1428-1446).
gacttacgcaaccatgaaa

SEQ ID NO: 689799 - DNA, 19 bp, Mus musculus
  siRNA target sequence for BC030314 (NM_146259.2,1650-1668).
cggtgtggccgcatgtttt

SEQ ID NO: 689800 - DNA, 19 bp, Mus musculus
  siRNA target sequence for BC030314 (NM_146259.2,1654-1672).
gtggccgcatgttttctga

SEQ ID NO: 689801 - DNA, 19 bp, Mus musculus
  siRNA target sequence for BC030314 (NM_146259.2,1719-1737).
ccttaccgctgcgagaaat

SEQ ID NO: 689802 - DNA, 19 bp, Mus musculus
  siRNA target sequence for BC030314 (NM_146259.2,1815-1833).
ctgcagtgtgacaagactt

SEQ ID NO: 689803 - DNA, 19 bp, Mus musculus
  siRNA target sequence for BC030314 (NM_146259.2,1967-1985).
gcgtcctttccactgtaat

SEQ ID NO: 689804 - DNA, 19 bp, Mus musculus
  siRNA target sequence for BC030314 (NM_146259.2,2222-2240).
gcaagtggtgggtatgact

SEQ ID NO: 689805 - DNA, 19 bp, Mus musculus
  siRNA target sequence for BC030314 (NM_146259.2,2351-2369).
gtgtcgcgagtgcaaagaa

SEQ ID NO: 689806 - DNA, 19 bp, Mus musculus
  siRNA target sequence for BC030314 (NM_146259.2,2355-2373).
cgcgagtgcaaagaaactt

SEQ ID NO: 689807 - DNA, 19 bp, Mus musculus
  siRNA target sequence for BC030314 (NM_146259.2,2356-2374).
gcgagtgcaaagaaacttt

SEQ ID NO: 689808 - DNA, 19 bp, Mus musculus
  siRNA target sequence for BC030314 (NM_146259.2,2519-2537).
ctgttcccaatgtcctaaa

SEQ ID NO: 689809 - DNA, 19 bp, Mus musculus
  siRNA target sequence for BC030314 (NM_146259.2,2524-2542).
cccaatgtcctaaagcttt

SEQ ID NO: 689810 - DNA, 19 bp, Mus musculus
  siRNA target sequence for Bcas3 (NM_138681.2,145-163).
gagacccagtcgttgtact

SEQ ID NO: 689811 - DNA, 19 bp, Mus musculus
  siRNA target sequence for Bcas3 (NM_138681.2,293-311).
gtctgggtcagatttgaga

SEQ ID NO: 689812 - DNA, 19 bp, Mus musculus
  siRNA target sequence for Bcas3 (NM_138681.2,477-495).
cagtccgagcagctagaat

SEQ ID NO: 689813 - DNA, 19 bp, Mus musculus
  siRNA target sequence for Bcas3 (NM_138681.2,479-497).
gtccgagcagctagaatct

SEQ ID NO: 689814 - DNA, 19 bp, Mus musculus
  siRNA target sequence for Bcas3 (NM_138681.2,509-527).
cagttgggtgcccaaaagt

SEQ ID NO: 689815 - DNA, 19 bp, Mus musculus
  siRNA target sequence for Bcas3 (NM_138681.2,515-533).
ggtgcccaaaagtgtgata

SEQ ID NO: 689816 - DNA, 19 bp, Mus musculus
  siRNA target sequence for Bcas3 (NM_138681.2,516-534).
gtgcccaaaagtgtgataa

SEQ ID NO: 689817 - DNA, 19 bp, Mus musculus
  siRNA target sequence for Bcas3 (NM_138681.2,519-537).
cccaaaagtgtgataactt

SEQ ID NO: 689818 - DNA, 19 bp, Mus musculus
  siRNA target sequence for Bcas3 (NM_138681.2,520-538).
ccaaaagtgtgataacttt

SEQ ID NO: 689819 - DNA, 19 bp, Mus musculus
  siRNA target sequence for Bcas3 (NM_138681.2,563-581).
gtttgtaagagcattggat

SEQ ID NO: 689820 - DNA, 19 bp, Mus musculus
  siRNA target sequence for Bcas3 (NM_138681.2,609-627).
gtgtggatctgtattcact

SEQ ID NO: 689821 - DNA, 19 bp, Mus musculus
  siRNA target sequence for Bcas3 (NM_138681.2,646-664).
caagtccattcagtttaaa

SEQ ID NO: 689822 - DNA, 19 bp, Mus musculus
  siRNA target sequence for Bcas3 (NM_138681.2,696-714).
ggatcctcgtcgtagtctt

SEQ ID NO: 689823 - DNA, 19 bp, Mus musculus
  siRNA target sequence for Bcas3 (NM_138681.2,731-749).
gcctttgatagctgtactt

SEQ ID NO: 689824 - DNA, 19 bp, Mus musculus
  siRNA target sequence for Bcas3 (NM_138681.2,741-759).
gctgtactttcacaaaaaa

SEQ ID NO: 689825 - DNA, 19 bp, Mus musculus
  siRNA target sequence for Bcas3 (NM_138681.2,783-801).
cttgtcctgggccaaacat

SEQ ID NO: 689826 - DNA, 19 bp, Mus musculus
  siRNA target sequence for Bcas3 (NM_138681.2,820-838).
gagccgctggcttgcttat

SEQ ID NO: 689827 - DNA, 19 bp, Mus musculus
  siRNA target sequence for Bcas3 (NM_138681.2,823-841).
ccgctggcttgcttatgca

SEQ ID NO: 689828 - DNA, 19 bp, Mus musculus
  siRNA target sequence for Bcas3 (NM_138681.2,890-908).
gacaacattcagtcttaca

SEQ ID NO: 689829 - DNA, 19 bp, Mus musculus
  siRNA target sequence for Bcas3 (NM_138681.2,919-937).
ccttagtgctgctaaaaca

SEQ ID NO: 689830 - DNA, 19 bp, Mus musculus
  siRNA target sequence for Bcas3 (NM_138681.2,926-944).
gctgctaaaacactgaaaa

SEQ ID NO: 689831 - DNA, 19 bp, Mus musculus
  siRNA target sequence for Bcas3 (NM_138681.2,1099-1117).
gggccaggtgcttgtaagt

SEQ ID NO: 689832 - DNA, 19 bp, Mus musculus
  siRNA target sequence for Bcas3 (NM_138681.2,1205-1223).
cttttagtcacaacagata

SEQ ID NO: 689833 - DNA, 19 bp, Mus musculus
  siRNA target sequence for Bcas3 (NM_138681.2,1334-1352).
gttcaggacatctgtttca

SEQ ID NO: 689834 - DNA, 19 bp, Mus musculus
  siRNA target sequence for Bcas3 (NM_138681.2,1389-1407).
ggggtacgtcccacgtttt

SEQ ID NO: 689835 - DNA, 19 bp, Mus musculus
  siRNA target sequence for Bcas3 (NM_138681.2,1408-1426).
ccccatcaatccttatggt

SEQ ID NO: 689836 - DNA, 19 bp, Mus musculus
  siRNA target sequence for Bcas3 (NM_138681.2,1453-1471).
gtcaccacgagtagtcaat

SEQ ID NO: 689837 - DNA, 19 bp, Mus musculus
  siRNA target sequence for Bcas3 (NM_138681.2,1497-1515).
ctgggctggaagagattga

SEQ ID NO: 689838 - DNA, 19 bp, Mus musculus
  siRNA target sequence for Bcas3 (NM_138681.2,1609-1627).
cagccaagactcttacaat

SEQ ID NO: 689839 - DNA, 19 bp, Mus musculus
  siRNA target sequence for Bcas3 (NM_138681.2,1613-1631).
caagactcttacaataact

SEQ ID NO: 689840 - DNA, 19 bp, Mus musculus
  siRNA target sequence for Bcas3 (NM_138681.2,1692-1710).
cgcctcttgcgcaaatcaa

SEQ ID NO: 689841 - DNA, 19 bp, Mus musculus
  siRNA target sequence for Bcas3 (NM_138681.2,1742-1760).
cgaacagggccttatctct

SEQ ID NO: 689842 - DNA, 19 bp, Mus musculus
  siRNA target sequence for Bcas3 (NM_138681.2,1743-1761).
gaacagggccttatctctt

SEQ ID NO: 689843 - DNA, 19 bp, Mus musculus
  siRNA target sequence for Bcas3 (NM_138681.2,1759-1777).
ctttggagcggggtgtttt

SEQ ID NO: 689844 - DNA, 19 bp, Mus musculus
  siRNA target sequence for Bcas3 (NM_138681.2,1764-1782).
gagcggggtgtttttccat

SEQ ID NO: 689845 - DNA, 19 bp, Mus musculus
  siRNA target sequence for Bcas3 (NM_138681.2,1766-1784).
gcggggtgtttttccataa

SEQ ID NO: 689846 - DNA, 19 bp, Mus musculus
  siRNA target sequence for Bcas3 (NM_138681.2,1767-1785).
cggggtgtttttccataaa

SEQ ID NO: 689847 - DNA, 19 bp, Mus musculus
  siRNA target sequence for Bcas3 (NM_138681.2,1787-1805).
gctccatgcaaagttaaat

SEQ ID NO: 689848 - DNA, 19 bp, Mus musculus
  siRNA target sequence for Bcas3 (NM_138681.2,1875-1893).
ccaggtcgtggtttgcaaa

SEQ ID NO: 689849 - DNA, 19 bp, Mus musculus
  siRNA target sequence for Bcas3 (NM_138681.2,1878-1896).
ggtcgtggtttgcaaacaa

SEQ ID NO: 689850 - DNA, 19 bp, Mus musculus
  siRNA target sequence for Bcas3 (NM_138681.2,1924-1942).
gtccaaacaagttgtagtt

SEQ ID NO: 689851 - DNA, 19 bp, Mus musculus
  siRNA target sequence for Bcas3 (NM_138681.2,1926-1944).
ccaaacaagttgtagttga

SEQ ID NO: 689852 - DNA, 19 bp, Mus musculus
  siRNA target sequence for Bcas3 (NM_138681.2,1927-1945).
caaacaagttgtagttgaa

SEQ ID NO: 689853 - DNA, 19 bp, Mus musculus
  siRNA target sequence for Bcas3 (NM_138681.2,1934-1952).
gttgtagttgaatctcttt

SEQ ID NO: 689854 - DNA, 19 bp, Mus musculus
  siRNA target sequence for Bcas3 (NM_138681.2,1940-1958).
gttgaatctctttacatca

SEQ ID NO: 689855 - DNA, 19 bp, Mus musculus
  siRNA target sequence for Bcas3 (NM_138681.2,1943-1961).
gaatctctttacatcatca

SEQ ID NO: 689856 - DNA, 19 bp, Mus musculus
  siRNA target sequence for Bcas3 (NM_138681.2,2008-2026).
cagtactgctcccaagata

SEQ ID NO: 689857 - DNA, 19 bp, Mus musculus
  siRNA target sequence for Bcas3 (NM_138681.2,2013-2031).
ctgctcccaagataagtga

SEQ ID NO: 689858 - DNA, 19 bp, Mus musculus
  siRNA target sequence for Bcas3 (NM_138681.2,2033-2051).
gacacaccactggagataa

SEQ ID NO: 689859 - DNA, 19 bp, Mus musculus
  siRNA target sequence for Bcas3 (NM_138681.2,2147-2165).
gcagaagcagtgcagtatt

SEQ ID NO: 689860 - DNA, 19 bp, Mus musculus
  siRNA target sequence for Bcas3 (NM_138681.2,2329-2347).
gatgggcccacaattccat

SEQ ID NO: 689861 - DNA, 19 bp, Mus musculus
  siRNA target sequence for Bcas3 (NM_138681.2,2334-2352).
gcccacaattccatttcaa

SEQ ID NO: 689862 - DNA, 19 bp, Mus musculus
  siRNA target sequence for Bcas3 (NM_138681.2,2369-2387).
ggccagaccacggtcatat

SEQ ID NO: 689863 - DNA, 19 bp, Mus musculus
  siRNA target sequence for Bcas3 (NM_138681.2,2371-2389).
ccagaccacggtcatatca

SEQ ID NO: 689864 - DNA, 19 bp, Mus musculus
  siRNA target sequence for Bcas3 (NM_138681.2,2372-2390).
cagaccacggtcatatcaa

SEQ ID NO: 689865 - DNA, 19 bp, Mus musculus
  siRNA target sequence for Bcas3 (NM_138681.2,2374-2392).
gaccacggtcatatcaact

SEQ ID NO: 689866 - DNA, 19 bp, Mus musculus
  siRNA target sequence for Bcas3 (NM_138681.2,2377-2395).
cacggtcatatcaactagt

SEQ ID NO: 689867 - DNA, 19 bp, Mus musculus
  siRNA target sequence for Bcas3 (NM_138681.2,2380-2398).
ggtcatatcaactagttct

SEQ ID NO: 689868 - DNA, 19 bp, Mus musculus
  siRNA target sequence for Bcas3 (NM_138681.2,2381-2399).
gtcatatcaactagttctt

SEQ ID NO: 689869 - DNA, 19 bp, Mus musculus
  siRNA target sequence for Bcas3 (NM_138681.2,2383-2401).
catatcaactagttcttct

SEQ ID NO: 689870 - DNA, 19 bp, Mus musculus
  siRNA target sequence for Bcas3 (NM_138681.2,2437-2455).
gccgctcttggactttgat

SEQ ID NO: 689871 - DNA, 19 bp, Mus musculus
  siRNA target sequence for Bcas3 (NM_138681.2,2438-2456).
ccgctcttggactttgata

SEQ ID NO: 689872 - DNA, 19 bp, Mus musculus
  siRNA target sequence for Bcas3 (NM_138681.2,2449-2467).
ctttgatacggatgatcta

SEQ ID NO: 689873 - DNA, 19 bp, Mus musculus
  siRNA target sequence for Bcas3 (NM_138681.2,2457-2475).
cggatgatctagatcttaa

SEQ ID NO: 689874 - DNA, 19 bp, Mus musculus
  siRNA target sequence for Bub3 (NM_009774.2,70-88).
ccggttcgaacgaattcaa

SEQ ID NO: 689875 - DNA, 19 bp, Mus musculus
  siRNA target sequence for Bub3 (NM_009774.2,111-129).
ggcatctcctcggttaagt

SEQ ID NO: 689876 - DNA, 19 bp, Mus musculus
  siRNA target sequence for Bub3 (NM_009774.2,112-130).
gcatctcctcggttaagtt

SEQ ID NO: 689877 - DNA, 19 bp, Mus musculus
  siRNA target sequence for Bub3 (NM_009774.2,275-293).
ctggagtggtggattagat

SEQ ID NO: 689878 - DNA, 19 bp, Mus musculus
  siRNA target sequence for Bub3 (NM_009774.2,277-295).
ggagtggtggattagatca

SEQ ID NO: 689879 - DNA, 19 bp, Mus musculus
  siRNA target sequence for Bub3 (NM_009774.2,278-296).
gagtggtggattagatcat

SEQ ID NO: 689880 - DNA, 19 bp, Mus musculus
  siRNA target sequence for Bub3 (NM_009774.2,280-298).
gtggtggattagatcatca

SEQ ID NO: 689881 - DNA, 19 bp, Mus musculus
  siRNA target sequence for Bub3 (NM_009774.2,283-301).
gtggattagatcatcaact

SEQ ID NO: 689882 - DNA, 19 bp, Mus musculus
  siRNA target sequence for Bub3 (NM_009774.2,286-304).
gattagatcatcaactgaa

SEQ ID NO: 689883 - DNA, 19 bp, Mus musculus
  siRNA target sequence for Bub3 (NM_009774.2,300-318).
ctgaaaatgcacgatttga

SEQ ID NO: 689884 - DNA, 19 bp, Mus musculus
  siRNA target sequence for Bub3 (NM_009774.2,311-329).
cgatttgaacactgatcaa

SEQ ID NO: 689885 - DNA, 19 bp, Mus musculus
  siRNA target sequence for Bub3 (NM_009774.2,357-375).
cctatcagatgtgttgaat

SEQ ID NO: 689886 - DNA, 19 bp, Mus musculus
  siRNA target sequence for Bub3 (NM_009774.2,384-402).
gaagtgaacgtgatggtaa

SEQ ID NO: 689887 - DNA, 19 bp, Mus musculus
  siRNA target sequence for Bub3 (NM_009774.2,437-455).
ccccagaactccgtgtaat

SEQ ID NO: 689888 - DNA, 19 bp, Mus musculus
  siRNA target sequence for Bub3 (NM_009774.2,502-520).
ctggggacaggctgattgt

SEQ ID NO: 689889 - DNA, 19 bp, Mus musculus
  siRNA target sequence for Bub3 (NM_009774.2,826-844).
cggatggattcgtcaatat

SEQ ID NO: 689890 - DNA, 19 bp, Mus musculus
  siRNA target sequence for Bub3 (NM_009774.2,827-845).
ggatggattcgtcaatatt

SEQ ID NO: 689891 - DNA, 19 bp, Mus musculus
  siRNA target sequence for Bub3 (NM_009774.2,847-865).
gggacccatttaacaagaa

SEQ ID NO: 689892 - DNA, 19 bp, Mus musculus
  siRNA target sequence for Bub3 (NM_009774.2,926-944).
cggaactacgcttgcaata

SEQ ID NO: 689893 - DNA, 19 bp, Mus musculus
  siRNA target sequence for Bub3 (NM_009774.2,939-957).
gcaatagcatcgtcatata

SEQ ID NO: 689894 - DNA, 19 bp, Mus musculus
  siRNA target sequence for Bub3 (NM_009774.2,940-958).
caatagcatcgtcatatat

SEQ ID NO: 689895 - DNA, 19 bp, Mus musculus
  siRNA target sequence for Bub3 (NM_009774.2,946-964).
catcgtcatatatgtatga

SEQ ID NO: 689896 - DNA, 19 bp, Mus musculus
  siRNA target sequence for C77892 (NM_133780.2,366-384).
cgaagtcgacgcagaacaa

SEQ ID NO: 689897 - DNA, 19 bp, Mus musculus
  siRNA target sequence for C77892 (NM_133780.2,370-388).
gtcgacgcagaacaaactt

SEQ ID NO: 689898 - DNA, 19 bp, Mus musculus
  siRNA target sequence for C77892 (NM_133780.2,372-390).
cgacgcagaacaaacttga

SEQ ID NO: 689899 - DNA, 19 bp, Mus musculus
  siRNA target sequence for C77892 (NM_133780.2,438-456).
ggcacgagaaatttaaggt

SEQ ID NO: 689900 - DNA, 19 bp, Mus musculus
  siRNA target sequence for C77892 (NM_133780.2,462-480).
gtgaacaacaatactttga

SEQ ID NO: 689901 - DNA, 19 bp, Mus musculus
  siRNA target sequence for C77892 (NM_133780.2,509-527).
gagaggcttgtcactgaaa

SEQ ID NO: 689902 - DNA, 19 bp, Mus musculus
  siRNA target sequence for C77892 (NM_133780.2,530-548).
cgggagtgtcagaacttga

SEQ ID NO: 689903 - DNA, 19 bp, Mus musculus
  siRNA target sequence for C77892 (NM_133780.2,553-571).
ggagcttgagaagctaaat

SEQ ID NO: 689904 - DNA, 19 bp, Mus musculus
  siRNA target sequence for C77892 (NM_133780.2,554-572).
gagcttgagaagctaaata

SEQ ID NO: 689905 - DNA, 19 bp, Mus musculus
  siRNA target sequence for C77892 (NM_133780.2,574-592).
ccaagtaaaagtgttaact

SEQ ID NO: 689906 - DNA, 19 bp, Mus musculus
  siRNA target sequence for C77892 (NM_133780.2,586-604).
gttaactgaaaaaaccaaa

SEQ ID NO: 689907 - DNA, 19 bp, Mus musculus
  siRNA target sequence for C77892 (NM_133780.2,615-633).
ctgctcaagaccgtaatct

SEQ ID NO: 689908 - DNA, 19 bp, Mus musculus
  siRNA target sequence for C77892 (NM_133780.2,635-653).
ggcattcagagccagttta

SEQ ID NO: 689909 - DNA, 19 bp, Mus musculus
  siRNA target sequence for C77892 (NM_133780.2,637-655).
cattcagagccagtttaca

SEQ ID NO: 689910 - DNA, 19 bp, Mus musculus
  siRNA target sequence for C77892 (NM_133780.2,712-730).
gttatctcaggaagttgaa

SEQ ID NO: 689911 - DNA, 19 bp, Mus musculus
  siRNA target sequence for C77892 (NM_133780.2,719-737).
caggaagttgaatatttaa

SEQ ID NO: 689912 - DNA, 19 bp, Mus musculus
  siRNA target sequence for C77892 (NM_133780.2,721-739).
ggaagttgaatatttaaca

SEQ ID NO: 689913 - DNA, 19 bp, Mus musculus
  siRNA target sequence for C77892 (NM_133780.2,783-801).
cgacgaagggtgaacttca

SEQ ID NO: 689914 - DNA, 19 bp, Mus musculus
  siRNA target sequence for C77892 (NM_133780.2,786-804).
cgaagggtgaacttcagtt

SEQ ID NO: 689915 - DNA, 19 bp, Mus musculus
  siRNA target sequence for C77892 (NM_133780.2,787-805).
gaagggtgaacttcagtta

SEQ ID NO: 689916 - DNA, 19 bp, Mus musculus
  siRNA target sequence for C77892 (NM_133780.2,802-820).
gttaaagctggatgaactt

SEQ ID NO: 689917 - DNA, 19 bp, Mus musculus
  siRNA target sequence for C77892 (NM_133780.2,849-867).
gagaaaaacgcttagaaca

SEQ ID NO: 689918 - DNA, 19 bp, Mus musculus
  siRNA target sequence for C77892 (NM_133780.2,901-919).
gctgaacacagagttgaaa

SEQ ID NO: 689919 - DNA, 19 bp, Mus musculus
  siRNA target sequence for C77892 (NM_133780.2,965-983).
gaaattctggaacttaagt

SEQ ID NO: 689920 - DNA, 19 bp, Mus musculus
  siRNA target sequence for C77892 (NM_133780.2,973-991).
ggaacttaagtgtaatctt

SEQ ID NO: 689921 - DNA, 19 bp, Mus musculus
  siRNA target sequence for C77892 (NM_133780.2,1070-1088).
catgtagaggatttgttga

SEQ ID NO: 689922 - DNA, 19 bp, Mus musculus
  siRNA target sequence for C77892 (NM_133780.2,1073-1091).
gtagaggatttgttgacaa

SEQ ID NO: 689923 - DNA, 19 bp, Mus musculus
  siRNA target sequence for C77892 (NM_133780.2,1079-1097).
gatttgttgacaaaattaa

SEQ ID NO: 689924 - DNA, 19 bp, Mus musculus
  siRNA target sequence for C77892 (NM_133780.2,1145-1163).
gagttaaatgctcacataa

SEQ ID NO: 689925 - DNA, 19 bp, Mus musculus
  siRNA target sequence for C77892 (NM_133780.2,1166-1184).
ctctctaatctctacaaga

SEQ ID NO: 689926 - DNA, 19 bp, Mus musculus
  siRNA target sequence for C77892 (NM_133780.2,1196-1214).
gactcagaggcaaagagta

SEQ ID NO: 689927 - DNA, 19 bp, Mus musculus
  siRNA target sequence for C77892 (NM_133780.2,1266-1284).
gagaagccaacaaaacaat

SEQ ID NO: 689928 - DNA, 19 bp, Mus musculus
  siRNA target sequence for C77892 (NM_133780.2,1273-1291).
caacaaaacaatacaagat

SEQ ID NO: 689929 - DNA, 19 bp, Mus musculus
  siRNA target sequence for C77892 (NM_133780.2,1366-1384).
ggaattagagaatgcaaat

SEQ ID NO: 689930 - DNA, 19 bp, Mus musculus
  siRNA target sequence for C77892 (NM_133780.2,1406-1424).
cgtaaaggagctatattgt

SEQ ID NO: 689931 - DNA, 19 bp, Mus musculus
  siRNA target sequence for C77892 (NM_133780.2,1416-1434).
ctatattgtctgaagaaga

SEQ ID NO: 689932 - DNA, 19 bp, Mus musculus
  siRNA target sequence for C77892 (NM_133780.2,1455-1473).
ccgcagcagctgtagctaa

SEQ ID NO: 689933 - DNA, 19 bp, Mus musculus
  siRNA target sequence for C77892 (NM_133780.2,1458-1476).
cagcagctgtagctaaaat

SEQ ID NO: 689934 - DNA, 19 bp, Mus musculus
  siRNA target sequence for C77892 (NM_133780.2,1485-1503).
ctggcatgaaattaactga

SEQ ID NO: 689935 - DNA, 19 bp, Mus musculus
  siRNA target sequence for C77892 (NM_133780.2,1492-1510).
gaaattaactgagctatat

SEQ ID NO: 689936 - DNA, 19 bp, Mus musculus
  siRNA target sequence for C77892 (NM_133780.2,1576-1594).
gtatctggatgagatagta

SEQ ID NO: 689937 - DNA, 19 bp, Mus musculus
  siRNA target sequence for C77892 (NM_133780.2,1607-1625).
gccaaagcaccgattttga

SEQ ID NO: 689938 - DNA, 19 bp, Mus musculus
  siRNA target sequence for C77892 (NM_133780.2,1608-1626).
ccaaagcaccgattttgaa

SEQ ID NO: 689939 - DNA, 19 bp, Mus musculus
  siRNA target sequence for C77892 (NM_133780.2,1629-1647).
gccagcgcgaagagtatga

SEQ ID NO: 689940 - DNA, 19 bp, Mus musculus
  siRNA target sequence for C77892 (NM_133780.2,1669-1687).
cagtctttctgcaaagctt

SEQ ID NO: 689941 - DNA, 19 bp, Mus musculus
  siRNA target sequence for C77892 (NM_133780.2,1680-1698).
caaagcttgagcaagctat

SEQ ID NO: 689942 - DNA, 19 bp, Mus musculus
  siRNA target sequence for C77892 (NM_133780.2,1717-1735).
gcaggaggacactgataaa

SEQ ID NO: 689943 - DNA, 19 bp, Mus musculus
  siRNA target sequence for C77892 (NM_133780.2,1730-1748).
gataaagccaacaaacatt

SEQ ID NO: 689944 - DNA, 19 bp, Mus musculus
  siRNA target sequence for C77892 (NM_133780.2,1745-1763).
cattcatcggtacttgaaa

SEQ ID NO: 689945 - DNA, 19 bp, Mus musculus
  siRNA target sequence for C77892 (NM_133780.2,1757-1775).
cttgaaagggacaatcaga

SEQ ID NO: 689946 - DNA, 19 bp, Mus musculus
  siRNA target sequence for C77892 (NM_133780.2,1774-1792).
gagaatggaaatacaaata

SEQ ID NO: 689947 - DNA, 19 bp, Mus musculus
  siRNA target sequence for C77892 (NM_133780.2,1796-1814).
gacctttcgcaacagataa

SEQ ID NO: 689948 - DNA, 19 bp, Mus musculus
  siRNA target sequence for C77892 (NM_133780.2,1798-1816).
cctttcgcaacagataaga

SEQ ID NO: 689949 - DNA, 19 bp, Mus musculus
  siRNA target sequence for C77892 (NM_133780.2,1841-1859).
gccaggggtaaccatgtaa

SEQ ID NO: 689950 - DNA, 19 bp, Mus musculus
  siRNA target sequence for C77892 (NM_133780.2,1842-1860).
ccaggggtaaccatgtaat

SEQ ID NO: 689951 - DNA, 19 bp, Mus musculus
  siRNA target sequence for C77892 (NM_133780.2,1893-1911).
gtagttcgtctgaagtgat

SEQ ID NO: 689952 - DNA, 19 bp, Mus musculus
  siRNA target sequence for C77892 (NM_133780.2,2092-2110).
ccgtgagtcacgacaacat

SEQ ID NO: 689953 - DNA, 19 bp, Mus musculus
  siRNA target sequence for C77892 (NM_133780.2,2094-2112).
gtgagtcacgacaacatca

SEQ ID NO: 689954 - DNA, 19 bp, Mus musculus
  siRNA target sequence for C77892 (NM_133780.2,2116-2134).
gcagcttgttgattccata

SEQ ID NO: 689955 - DNA, 19 bp, Mus musculus
  siRNA target sequence for C77892 (NM_133780.2,2144-2162).
cgtgacatgtaccgaattt

SEQ ID NO: 689956 - DNA, 19 bp, Mus musculus
  siRNA target sequence for C77892 (NM_133780.2,2145-2163).
gtgacatgtaccgaatttt

SEQ ID NO: 689957 - DNA, 19 bp, Mus musculus
  siRNA target sequence for C77892 (NM_133780.2,2147-2165).
gacatgtaccgaattttat

SEQ ID NO: 689958 - DNA, 19 bp, Mus musculus
  siRNA target sequence for C77892 (NM_133780.2,2152-2170).
gtaccgaattttattgtca

SEQ ID NO: 689959 - DNA, 19 bp, Mus musculus
  siRNA target sequence for C77892 (NM_133780.2,2156-2174).
cgaattttattgtcacaaa

SEQ ID NO: 689960 - DNA, 19 bp, Mus musculus
  siRNA target sequence for C77892 (NM_133780.2,2192-2210).
cccttacaagcttcaagtt

SEQ ID NO: 689961 - DNA, 19 bp, Mus musculus
  siRNA target sequence for C77892 (NM_133780.2,2194-2212).
cttacaagcttcaagttta

SEQ ID NO: 689962 - DNA, 19 bp, Mus musculus
  siRNA target sequence for C77892 (NM_133780.2,2201-2219).
gcttcaagtttagatgata

SEQ ID NO: 689963 - DNA, 19 bp, Mus musculus
  siRNA target sequence for C77892 (NM_133780.2,2202-2220).
cttcaagtttagatgatat

SEQ ID NO: 689964 - DNA, 19 bp, Mus musculus
  siRNA target sequence for C77892 (NM_133780.2,2228-2246).
ctctcaactccaaaacgtt

SEQ ID NO: 689965 - DNA, 19 bp, Mus musculus
  siRNA target sequence for C77892 (NM_133780.2,2237-2255).
ccaaaacgttcaagtacat

SEQ ID NO: 689966 - DNA, 19 bp, Mus musculus
  siRNA target sequence for C77892 (NM_133780.2,2277-2295).
ctccggaacccgtcattga

SEQ ID NO: 689967 - DNA, 19 bp, Mus musculus
  siRNA target sequence for C77892 (NM_133780.2,2279-2297).
ccggaacccgtcattgact

SEQ ID NO: 689968 - DNA, 19 bp, Mus musculus
  siRNA target sequence for C77892 (NM_133780.2,2398-2416).
gcagctagagaaacttcaa

SEQ ID NO: 689969 - DNA, 19 bp, Mus musculus
  siRNA target sequence for C77892 (NM_133780.2,2427-2445).
cagacctgcgctcacaaaa

SEQ ID NO: 689970 - DNA, 19 bp, Mus musculus
  siRNA target sequence for C77892 (NM_133780.2,2429-2447).
gacctgcgctcacaaaaca

SEQ ID NO: 689971 - DNA, 19 bp, Mus musculus
  siRNA target sequence for C77892 (NM_133780.2,2435-2453).
cgctcacaaaacaccaaaa

SEQ ID NO: 689972 - DNA, 19 bp, Mus musculus
  siRNA target sequence for C77892 (NM_133780.2,2436-2454).
gctcacaaaacaccaaaat

SEQ ID NO: 689973 - DNA, 19 bp, Mus musculus
  siRNA target sequence for C77892 (NM_133780.2,2437-2455).
ctcacaaaacaccaaaatt

SEQ ID NO: 689974 - DNA, 19 bp, Mus musculus
  siRNA target sequence for C77892 (NM_133780.2,2478-2496).
ctaaacgttatgaaatgct

SEQ ID NO: 689975 - DNA, 19 bp, Mus musculus
  siRNA target sequence for C77892 (NM_133780.2,2513-2531).
ggatatcgtcgagaaataa

SEQ ID NO: 689976 - DNA, 19 bp, Mus musculus
  siRNA target sequence for C77892 (NM_133780.2,2537-2555).
ctacaagagagaaatcaga

SEQ ID NO: 689977 - DNA, 19 bp, Mus musculus
  siRNA target sequence for C77892 (NM_133780.2,2554-2572).
gaaactcactgcaactact

SEQ ID NO: 689978 - DNA, 19 bp, Mus musculus
  siRNA target sequence for C77892 (NM_133780.2,2582-2600).
gaacagatcatcaacacaa

SEQ ID NO: 689979 - DNA, 19 bp, Mus musculus
  siRNA target sequence for C77892 (NM_133780.2,2632-2650).
gctagcagttgcagaagta

SEQ ID NO: 689980 - DNA, 19 bp, Mus musculus
  siRNA target sequence for C77892 (NM_133780.2,2738-2756).
cagagggggcagaacttgt

SEQ ID NO: 689981 - DNA, 19 bp, Mus musculus
  siRNA target sequence for C77892 (NM_133780.2,2749-2767).
gaacttgttgctgactaat

SEQ ID NO: 689982 - DNA, 19 bp, Mus musculus
  siRNA target sequence for C77892 (NM_133780.2,2752-2770).
cttgttgctgactaatcta

SEQ ID NO: 689983 - DNA, 19 bp, Mus musculus
  siRNA target sequence for C77892 (NM_133780.2,2773-2791).
gacaatccagggcatacta

SEQ ID NO: 689984 - DNA, 19 bp, Mus musculus
  siRNA target sequence for C77892 (NM_133780.2,2775-2793).
caatccagggcatactaga

SEQ ID NO: 689985 - DNA, 19 bp, Mus musculus
  siRNA target sequence for C77892 (NM_133780.2,2820-2838).
ggctgaatagccagataga

SEQ ID NO: 689986 - DNA, 19 bp, Mus musculus
  siRNA target sequence for C77892 (NM_133780.2,2821-2839).
gctgaatagccagatagaa

SEQ ID NO: 689987 - DNA, 19 bp, Mus musculus
  siRNA target sequence for C77892 (NM_133780.2,2885-2903).
gaggtggaacaaagacata

SEQ ID NO: 689988 - DNA, 19 bp, Mus musculus
  siRNA target sequence for C77892 (NM_133780.2,2904-2922).
cgcttacgaggaatctaga

SEQ ID NO: 689989 - DNA, 19 bp, Mus musculus
  siRNA target sequence for C77892 (NM_133780.2,2913-2931).
ggaatctagacgttcaact

SEQ ID NO: 689990 - DNA, 19 bp, Mus musculus
  siRNA target sequence for C77892 (NM_133780.2,2914-2932).
gaatctagacgttcaacta

SEQ ID NO: 689991 - DNA, 19 bp, Mus musculus
  siRNA target sequence for C77892 (NM_133780.2,2921-2939).
gacgttcaactattagata

SEQ ID NO: 689992 - DNA, 19 bp, Mus musculus
  siRNA target sequence for C77892 (NM_133780.2,2941-2959).
caagagacagctagataca

SEQ ID NO: 689993 - DNA, 19 bp, Mus musculus
  siRNA target sequence for C77892 (NM_133780.2,2944-2962).
gagacagctagatacagaa

SEQ ID NO: 689994 - DNA, 19 bp, Mus musculus
  siRNA target sequence for C77892 (NM_133780.2,2960-2978).
gaaataaatctccatctta

SEQ ID NO: 689995 - DNA, 19 bp, Mus musculus
  siRNA target sequence for C77892 (NM_133780.2,3031-3049).
gcaccttaataatatggaa

SEQ ID NO: 689996 - DNA, 19 bp, Mus musculus
  siRNA target sequence for C77892 (NM_133780.2,3105-3123).
gagatgacgttgatgatct

SEQ ID NO: 689997 - DNA, 19 bp, Mus musculus
  siRNA target sequence for C77892 (NM_133780.2,3107-3125).
gatgacgttgatgatctta

SEQ ID NO: 689998 - DNA, 19 bp, Mus musculus
  siRNA target sequence for C77892 (NM_133780.2,3110-3128).
gacgttgatgatcttaaaa

SEQ ID NO: 689999 - DNA, 19 bp, Mus musculus
  siRNA target sequence for C77892 (NM_133780.2,3178-3196).
caagacaagtaccagtaat

SEQ ID NO: 690000 - DNA, 19 bp, Mus musculus
  siRNA target sequence for C77892 (NM_133780.2,3217-3235).
ggtgaccagcttagaagat

SEQ ID NO: 690001 - DNA, 19 bp, Mus musculus
  siRNA target sequence for C77892 (NM_133780.2,3265-3283).
ggaggttcataagaacatt

SEQ ID NO: 690002 - DNA, 19 bp, Mus musculus
  siRNA target sequence for C77892 (NM_133780.2,3284-3302).
gaagttcgcttgaaagaat

SEQ ID NO: 690003 - DNA, 19 bp, Mus musculus
  siRNA target sequence for C77892 (NM_133780.2,3397-3415).
catggaacagcaattaagt

SEQ ID NO: 690004 - DNA, 19 bp, Mus musculus
  siRNA target sequence for C77892 (NM_133780.2,3401-3419).
gaacagcaattaagtgaat

SEQ ID NO: 690005 - DNA, 19 bp, Mus musculus
  siRNA target sequence for C77892 (NM_133780.2,3433-3451).
gtctactgttcagaatgaa

SEQ ID NO: 690006 - DNA, 19 bp, Mus musculus
  siRNA target sequence for C77892 (NM_133780.2,3438-3456).
ctgttcagaatgaagtaca

SEQ ID NO: 690007 - DNA, 19 bp, Mus musculus
  siRNA target sequence for C77892 (NM_133780.2,3477-3495).
gcacagctttaagtaatga

SEQ ID NO: 690008 - DNA, 19 bp, Mus musculus
  siRNA target sequence for C77892 (NM_133780.2,3545-3563).
gcccagaataagtatgaga

SEQ ID NO: 690009 - DNA, 19 bp, Mus musculus
  siRNA target sequence for C77892 (NM_133780.2,3633-3651).
catcaatccgtcagcattt

SEQ ID NO: 690010 - DNA, 19 bp, Mus musculus
  siRNA target sequence for C77892 (NM_133780.2,3636-3654).
caatccgtcagcatttgga

SEQ ID NO: 690011 - DNA, 19 bp, Mus musculus
  siRNA target sequence for C77892 (NM_133780.2,3674-3692).
gaatcccagttgttggaat

SEQ ID NO: 690012 - DNA, 19 bp, Mus musculus
  siRNA target sequence for C77892 (NM_133780.2,3678-3696).
cccagttgttggaatgtaa

SEQ ID NO: 690013 - DNA, 19 bp, Mus musculus
  siRNA target sequence for C77892 (NM_133780.2,3720-3738).
gagtgttgaaggatgaagt

SEQ ID NO: 690014 - DNA, 19 bp, Mus musculus
  siRNA target sequence for C77892 (NM_133780.2,3722-3740).
gtgttgaaggatgaagttt

SEQ ID NO: 690015 - DNA, 19 bp, Mus musculus
  siRNA target sequence for C77892 (NM_133780.2,3730-3748).
ggatgaagtttccaaaagt

SEQ ID NO: 690016 - DNA, 19 bp, Mus musculus
  siRNA target sequence for C77892 (NM_133780.2,3781-3799).
ccgactacttcatgatcaa

SEQ ID NO: 690017 - DNA, 19 bp, Mus musculus
  siRNA target sequence for C77892 (NM_133780.2,3782-3800).
cgactacttcatgatcaaa

SEQ ID NO: 690018 - DNA, 19 bp, Mus musculus
  siRNA target sequence for C77892 (NM_133780.2,3783-3801).
gactacttcatgatcaaat

SEQ ID NO: 690019 - DNA, 19 bp, Mus musculus
  siRNA target sequence for C77892 (NM_133780.2,3788-3806).
cttcatgatcaaatcgaaa

SEQ ID NO: 690020 - DNA, 19 bp, Mus musculus
  siRNA target sequence for C77892 (NM_133780.2,3791-3809).
catgatcaaatcgaaaaat

SEQ ID NO: 690021 - DNA, 19 bp, Mus musculus
  siRNA target sequence for C77892 (NM_133780.2,3843-3861).
ctgtgcaagcgccattaaa

SEQ ID NO: 690022 - DNA, 19 bp, Mus musculus
  siRNA target sequence for C77892 (NM_133780.2,3915-3933).
gatttattcgacgagaaaa

SEQ ID NO: 690023 - DNA, 19 bp, Mus musculus
  siRNA target sequence for C77892 (NM_133780.2,3979-3997).
gcggtatcgacaaagagtt

SEQ ID NO: 690024 - DNA, 19 bp, Mus musculus
  siRNA target sequence for C77892 (NM_133780.2,4058-4076).
gtgcaggtaactgcaaaaa

SEQ ID NO: 690025 - DNA, 19 bp, Mus musculus
  siRNA target sequence for C77892 (NM_133780.2,4060-4078).
gcaggtaactgcaaaaaca

SEQ ID NO: 690026 - DNA, 19 bp, Mus musculus
  siRNA target sequence for C77892 (NM_133780.2,4061-4079).
caggtaactgcaaaaacaa

SEQ ID NO: 690027 - DNA, 19 bp, Mus musculus
  siRNA target sequence for C77892 (NM_133780.2,4077-4095).
caatggcgcaacatgaaga

SEQ ID NO: 690028 - DNA, 19 bp, Mus musculus
  siRNA target sequence for C77892 (NM_133780.2,4112-4130).
gaaacaatgaacgttgtta

SEQ ID NO: 690029 - DNA, 19 bp, Mus musculus
  siRNA target sequence for C77892 (NM_133780.2,4116-4134).
caatgaacgttgttatgga

SEQ ID NO: 690030 - DNA, 19 bp, Mus musculus
  siRNA target sequence for C77892 (NM_133780.2,4171-4189).
cgaacagaacctacaacaa

SEQ ID NO: 690031 - DNA, 19 bp, Mus musculus
  siRNA target sequence for C77892 (NM_133780.2,4269-4287).
gtatgctccaggcagaaaa

SEQ ID NO: 690032 - DNA, 19 bp, Mus musculus
  siRNA target sequence for C77892 (NM_133780.2,4292-4310).
ctactggaagaggatgtta

SEQ ID NO: 690033 - DNA, 19 bp, Mus musculus
  siRNA target sequence for C77892 (NM_133780.2,4303-4321).
ggatgttaagcgttggaaa

SEQ ID NO: 690034 - DNA, 19 bp, Mus musculus
  siRNA target sequence for C77892 (NM_133780.2,4322-4340).
gcacggaaccagcaactaa

SEQ ID NO: 690035 - DNA, 19 bp, Mus musculus
  siRNA target sequence for C77892 (NM_133780.2,4325-4343).
cggaaccagcaactaataa

SEQ ID NO: 690036 - DNA, 19 bp, Mus musculus
  siRNA target sequence for C77892 (NM_133780.2,4327-4345).
gaaccagcaactaataaat

SEQ ID NO: 690037 - DNA, 19 bp, Mus musculus
  siRNA target sequence for C77892 (NM_133780.2,4370-4388).
gaatatcgaaagttgcttt

SEQ ID NO: 690038 - DNA, 19 bp, Mus musculus
  siRNA target sequence for C77892 (NM_133780.2,4413-4431).
gaatccaacagctaaatga

SEQ ID NO: 690039 - DNA, 19 bp, Mus musculus
  siRNA target sequence for C77892 (NM_133780.2,4444-4462).
gcttaaggctgaaattgca

SEQ ID NO: 690040 - DNA, 19 bp, Mus musculus
  siRNA target sequence for C77892 (NM_133780.2,4445-4463).
cttaaggctgaaattgcaa

SEQ ID NO: 690041 - DNA, 19 bp, Mus musculus
  siRNA target sequence for C77892 (NM_133780.2,4504-4522).
gagtctgcgggaagactta

SEQ ID NO: 690042 - DNA, 19 bp, Mus musculus
  siRNA target sequence for C77892 (NM_133780.2,4510-4528).
gcgggaagacttaagtaaa

SEQ ID NO: 690043 - DNA, 19 bp, Mus musculus
  siRNA target sequence for C77892 (NM_133780.2,4524-4542).
gtaaagcacggactgaaaa

SEQ ID NO: 690044 - DNA, 19 bp, Mus musculus
  siRNA target sequence for C77892 (NM_133780.2,4630-4648).
caggtacaagactcagttt

SEQ ID NO: 690045 - DNA, 19 bp, Mus musculus
  siRNA target sequence for C77892 (NM_133780.2,4652-4670).
gaactgaaagcgcaacaaa

SEQ ID NO: 690046 - DNA, 19 bp, Mus musculus
  siRNA target sequence for C77892 (NM_133780.2,4760-4778).
ctcagccaatccgaaacaa

SEQ ID NO: 690047 - DNA, 19 bp, Mus musculus
  siRNA target sequence for C77892 (NM_133780.2,4765-4783).
ccaatccgaaacaaagaca

SEQ ID NO: 690048 - DNA, 19 bp, Mus musculus
  siRNA target sequence for C77892 (NM_133780.2,4766-4784).
caatccgaaacaaagacaa

SEQ ID NO: 690049 - DNA, 19 bp, Mus musculus
  siRNA target sequence for C77892 (NM_133780.2,4788-4806).
cacttgagggtcaagtaga

SEQ ID NO: 690050 - DNA, 19 bp, Mus musculus
  siRNA target sequence for C77892 (NM_133780.2,4807-4825).
gaatctgcagaagacatta

SEQ ID NO: 690051 - DNA, 19 bp, Mus musculus
  siRNA target sequence for C77892 (NM_133780.2,4933-4951).
gctccgacagcaaatgaat

SEQ ID NO: 690052 - DNA, 19 bp, Mus musculus
  siRNA target sequence for C77892 (NM_133780.2,4970-4988).
cttgcactagccaaatcaa

SEQ ID NO: 690053 - DNA, 19 bp, Mus musculus
  siRNA target sequence for C77892 (NM_133780.2,4973-4991).
gcactagccaaatcaaaaa

SEQ ID NO: 690054 - DNA, 19 bp, Mus musculus
  siRNA target sequence for C77892 (NM_133780.2,4974-4992).
cactagccaaatcaaaaat

SEQ ID NO: 690055 - DNA, 19 bp, Mus musculus
  siRNA target sequence for C77892 (NM_133780.2,5011-5029).
gaaagatcagctgactaaa

SEQ ID NO: 690056 - DNA, 19 bp, Mus musculus
  siRNA target sequence for C77892 (NM_133780.2,5020-5038).
gctgactaaagaaattgaa

SEQ ID NO: 690057 - DNA, 19 bp, Mus musculus
  siRNA target sequence for C77892 (NM_133780.2,5052-5070).
ggaacggagctctagatca

SEQ ID NO: 690058 - DNA, 19 bp, Mus musculus
  siRNA target sequence for C77892 (NM_133780.2,5083-5101).
gcttgatgtccgaatgact

SEQ ID NO: 690059 - DNA, 19 bp, Mus musculus
  siRNA target sequence for C77892 (NM_133780.2,5116-5134).
gtatgaaggtcggattagt

SEQ ID NO: 690060 - DNA, 19 bp, Mus musculus
  siRNA target sequence for C77892 (NM_133780.2,5126-5144).
cggattagtcgcttagaga

SEQ ID NO: 690061 - DNA, 19 bp, Mus musculus
  siRNA target sequence for C77892 (NM_133780.2,5192-5210).
cctcaagaacccactaata

SEQ ID NO: 690062 - DNA, 19 bp, Mus musculus
  siRNA target sequence for C77892 (NM_133780.2,5193-5211).
ctcaagaacccactaataa

SEQ ID NO: 690063 - DNA, 19 bp, Mus musculus
  siRNA target sequence for C77892 (NM_133780.2,5406-5424).
cacctgcaacggtcacaaa

SEQ ID NO: 690064 - DNA, 19 bp, Mus musculus
  siRNA target sequence for C77892 (NM_133780.2,5506-5524).
ggaacatgttccagtattt

SEQ ID NO: 690065 - DNA, 19 bp, Mus musculus
  siRNA target sequence for C77892 (NM_133780.2,5537-5555).
ggatctgttcgttctacta

SEQ ID NO: 690066 - DNA, 19 bp, Mus musculus
  siRNA target sequence for C77892 (NM_133780.2,5580-5598).
ctcagcccatcctaactgt

SEQ ID NO: 690067 - DNA, 19 bp, Mus musculus
  siRNA target sequence for C77892 (NM_133780.2,5610-5628).
cacaagctacagcttttgt

SEQ ID NO: 690068 - DNA, 19 bp, Mus musculus
  siRNA target sequence for C77892 (NM_133780.2,5653-5671).
gcagattgagcctacaaat

SEQ ID NO: 690069 - DNA, 19 bp, Mus musculus
  siRNA target sequence for C77892 (NM_133780.2,5663-5681).
cctacaaatcaagaattgt

SEQ ID NO: 690070 - DNA, 19 bp, Mus musculus
  siRNA target sequence for C77892 (NM_133780.2,5693-5711).
gttgaggtagtacaaagtt

SEQ ID NO: 690071 - DNA, 19 bp, Mus musculus
  siRNA target sequence for C77892 (NM_133780.2,5741-5759).
gcagtatttggcactgttt

SEQ ID NO: 690072 - DNA, 19 bp, Mus musculus
  siRNA target sequence for C77892 (NM_133780.2,5897-5915).
ggaaccgaggaagaagtta

SEQ ID NO: 690073 - DNA, 19 bp, Mus musculus
  siRNA target sequence for C77892 (NM_133780.2,5898-5916).
gaaccgaggaagaagttat

SEQ ID NO: 690074 - DNA, 19 bp, Mus musculus
  siRNA target sequence for C77892 (NM_133780.2,5912-5930).
gttatggcagaagaaagta

SEQ ID NO: 690075 - DNA, 19 bp, Mus musculus
  siRNA target sequence for C77892 (NM_133780.2,5991-6009).
gagttacccagggagatta

SEQ ID NO: 690076 - DNA, 19 bp, Mus musculus
  siRNA target sequence for C77892 (NM_133780.2,6039-6057).
cacaatctctacaaatcga

SEQ ID NO: 690077 - DNA, 19 bp, Mus musculus
  siRNA target sequence for C77892 (NM_133780.2,6111-6129).
gcaaaggagatgatgtaat

SEQ ID NO: 690078 - DNA, 19 bp, Mus musculus
  siRNA target sequence for C77892 (NM_133780.2,6270-6288).
ctggtagtgcagatggtaa

SEQ ID NO: 690079 - DNA, 19 bp, Mus musculus
  siRNA target sequence for C77892 (NM_133780.2,6273-6291).
gtagtgcagatggtaatga

SEQ ID NO: 690080 - DNA, 19 bp, Mus musculus
  siRNA target sequence for C77892 (NM_133780.2,6328-6346).
gactgatccaggtacagaa

SEQ ID NO: 690081 - DNA, 19 bp, Mus musculus
  siRNA target sequence for C77892 (NM_133780.2,6361-6379).
gggtggagctgaaagtcat

SEQ ID NO: 690082 - DNA, 19 bp, Mus musculus
  siRNA target sequence for C77892 (NM_133780.2,6654-6672).
gtggcatgcaacaacactt

SEQ ID NO: 690083 - DNA, 19 bp, Mus musculus
  siRNA target sequence for C77892 (NM_133780.2,7076-7094).
gacgacggagatgaagtat

SEQ ID NO: 690084 - DNA, 19 bp, Mus musculus
  siRNA target sequence for C77892 (NM_133780.2,7231-7249).
cgtagataccagtagtagt

SEQ ID NO: 690085 - DNA, 19 bp, Mus musculus
  siRNA target sequence for Cited1 (NM_007709.2,486-504).
gcagcttcagaagcttaat

SEQ ID NO: 690086 - DNA, 19 bp, Mus musculus
  siRNA target sequence for Cited1 (NM_007709.2,487-505).
cagcttcagaagcttaata

SEQ ID NO: 690087 - DNA, 19 bp, Mus musculus
  siRNA target sequence for Cited1 (NM_007709.2,654-672).
gagccctgctctcattgat

SEQ ID NO: 690088 - DNA, 19 bp, Mus musculus
  siRNA target sequence for Cited1 (NM_007709.2,659-677).
ctgctctcattgattctga

SEQ ID NO: 690089 - DNA, 19 bp, Mus musculus
  siRNA target sequence for Cops2 (NM_009939.1,80-98).
ctgagcccaatgtggattt

SEQ ID NO: 690090 - DNA, 19 bp, Mus musculus
  siRNA target sequence for Cops2 (NM_009939.1,100-118).
gaaaatcagtactataatt

SEQ ID NO: 690091 - DNA, 19 bp, Mus musculus
  siRNA target sequence for Cops2 (NM_009939.1,161-179).
gcttccaaaaggttttgga

SEQ ID NO: 690092 - DNA, 19 bp, Mus musculus
  siRNA target sequence for Cops2 (NM_009939.1,206-224).
gattcaaagcgctaaaaca

SEQ ID NO: 690093 - DNA, 19 bp, Mus musculus
  siRNA target sequence for Cops2 (NM_009939.1,214-232).
gcgctaaaacagatgatca

SEQ ID NO: 690094 - DNA, 19 bp, Mus musculus
  siRNA target sequence for Cops2 (NM_009939.1,215-233).
cgctaaaacagatgatcaa

SEQ ID NO: 690095 - DNA, 19 bp, Mus musculus
  siRNA target sequence for Cops2 (NM_009939.1,223-241).
cagatgatcaagattaact

SEQ ID NO: 690096 - DNA, 19 bp, Mus musculus
  siRNA target sequence for Cops2 (NM_009939.1,282-300).
gcaactattgacctatatt

SEQ ID NO: 690097 - DNA, 19 bp, Mus musculus
  siRNA target sequence for Cops2 (NM_009939.1,436-454).
gatagactgtggtttaaga

SEQ ID NO: 690098 - DNA, 19 bp, Mus musculus
  siRNA target sequence for Cops2 (NM_009939.1,459-477).
cacaaagcttggaaaatta

SEQ ID NO: 690099 - DNA, 19 bp, Mus musculus
  siRNA target sequence for Cops2 (NM_009939.1,534-552).
gtcttgtcagactgatgat

SEQ ID NO: 690100 - DNA, 19 bp, Mus musculus
  siRNA target sequence for Cops2 (NM_009939.1,575-593).
gtacccagttattagaaat

SEQ ID NO: 690101 - DNA, 19 bp, Mus musculus
  siRNA target sequence for Cops2 (NM_009939.1,579-597).
ccagttattagaaatctat

SEQ ID NO: 690102 - DNA, 19 bp, Mus musculus
  siRNA target sequence for Cops2 (NM_009939.1,594-612).
ctatgctttggaaattcaa

SEQ ID NO: 690103 - DNA, 19 bp, Mus musculus
  siRNA target sequence for Cops2 (NM_009939.1,716-734).
gagaatgcggtggtaagat

SEQ ID NO: 690104 - DNA, 19 bp, Mus musculus
  siRNA target sequence for Cops2 (NM_009939.1,785-803).
ccttcaagaattatgatga

SEQ ID NO: 690105 - DNA, 19 bp, Mus musculus
  siRNA target sequence for Cops2 (NM_009939.1,786-804).
cttcaagaattatgatgaa

SEQ ID NO: 690106 - DNA, 19 bp, Mus musculus
  siRNA target sequence for Cops2 (NM_009939.1,814-832).
ccaagacgaaccacttgtt

SEQ ID NO: 690107 - DNA, 19 bp, Mus musculus
  siRNA target sequence for Cops2 (NM_009939.1,815-833).
caagacgaaccacttgttt

SEQ ID NO: 690108 - DNA, 19 bp, Mus musculus
  siRNA target sequence for Cops2 (NM_009939.1,818-836).
gacgaaccacttgtttaaa

SEQ ID NO: 690109 - DNA, 19 bp, Mus musculus
  siRNA target sequence for Cops2 (NM_009939.1,820-838).
cgaaccacttgtttaaaat

SEQ ID NO: 690110 - DNA, 19 bp, Mus musculus
  siRNA target sequence for Cops2 (NM_009939.1,895-913).
gaggccaagccgtataaaa

SEQ ID NO: 690111 - DNA, 19 bp, Mus musculus
  siRNA target sequence for Cops2 (NM_009939.1,897-915).
ggccaagccgtataaaaat

SEQ ID NO: 690112 - DNA, 19 bp, Mus musculus
  siRNA target sequence for Cops2 (NM_009939.1,899-917).
ccaagccgtataaaaatga

SEQ ID NO: 690113 - DNA, 19 bp, Mus musculus
  siRNA target sequence for Cops2 (NM_009939.1,900-918).
caagccgtataaaaatgat

SEQ ID NO: 690114 - DNA, 19 bp, Mus musculus
  siRNA target sequence for Cops2 (NM_009939.1,946-964).
gtaagtgcctatcagaata

SEQ ID NO: 690115 - DNA, 19 bp, Mus musculus
  siRNA target sequence for Cops2 (NM_009939.1,950-968).
gtgcctatcagaataatga

SEQ ID NO: 690116 - DNA, 19 bp, Mus musculus
  siRNA target sequence for Cops2 (NM_009939.1,982-1000).
gaaaagattctgaaaacaa

SEQ ID NO: 690117 - DNA, 19 bp, Mus musculus
  siRNA target sequence for Cops2 (NM_009939.1,1017-1035).
ggatgatcctttcataaga

SEQ ID NO: 690118 - DNA, 19 bp, Mus musculus
  siRNA target sequence for Cops2 (NM_009939.1,1041-1059).
cattgaagaacttttacga

SEQ ID NO: 690119 - DNA, 19 bp, Mus musculus
  siRNA target sequence for Cops2 (NM_009939.1,1072-1090).
caagtcctcataaagttaa

SEQ ID NO: 690120 - DNA, 19 bp, Mus musculus
  siRNA target sequence for Cops2 (NM_009939.1,1075-1093).
gtcctcataaagttaatta

SEQ ID NO: 690121 - DNA, 19 bp, Mus musculus
  siRNA target sequence for Cops2 (NM_009939.1,1086-1104).
gttaattaagccttacaca

SEQ ID NO: 690122 - DNA, 19 bp, Mus musculus
  siRNA target sequence for Cops2 (NM_009939.1,1096-1114).
ccttacacaagaatacata

SEQ ID NO: 690123 - DNA, 19 bp, Mus musculus
  siRNA target sequence for Cops2 (NM_009939.1,1174-1192).
cagtgcatactggataaca

SEQ ID NO: 690124 - DNA, 19 bp, Mus musculus
  siRNA target sequence for Cops2 (NM_009939.1,1176-1194).
gtgcatactggataacact

SEQ ID NO: 690125 - DNA, 19 bp, Mus musculus
  siRNA target sequence for Cops2 (NM_009939.1,1193-1211).
ctattcatggccgaattga

SEQ ID NO: 690126 - DNA, 19 bp, Mus musculus
  siRNA target sequence for Cops2 (NM_009939.1,1202-1220).
gccgaattgatcaagtcaa

SEQ ID NO: 690127 - DNA, 19 bp, Mus musculus
  siRNA target sequence for Cops2 (NM_009939.1,1251-1269).
gggtggtgcccgatacact

SEQ ID NO: 690128 - DNA, 19 bp, Mus musculus
  siRNA target sequence for Cops2 (NM_009939.1,1261-1279).
cgatacactgcgctagata

SEQ ID NO: 690129 - DNA, 19 bp, Mus musculus
  siRNA target sequence for Cops2 (NM_009939.1,1262-1280).
gatacactgcgctagataa

SEQ ID NO: 690130 - DNA, 19 bp, Mus musculus
  siRNA target sequence for Cops2 (NM_009939.1,1284-1302).
gaccaaccaactaaattct

SEQ ID NO: 690131 - DNA, 19 bp, Mus musculus
  siRNA target sequence for Crlz1 (NM_023054.1,206-224).
caccgccacggacgaaaat

SEQ ID NO: 690132 - DNA, 19 bp, Mus musculus
  siRNA target sequence for Crlz1 (NM_023054.1,208-226).
ccgccacggacgaaaatga

SEQ ID NO: 690133 - DNA, 19 bp, Mus musculus
  siRNA target sequence for Crlz1 (NM_023054.1,380-398).
gctacctctagatattgat

SEQ ID NO: 690134 - DNA, 19 bp, Mus musculus
  siRNA target sequence for Crlz1 (NM_023054.1,517-535).
gtcagagaaaaaagcttta

SEQ ID NO: 690135 - DNA, 19 bp, Mus musculus
  siRNA target sequence for Crlz1 (NM_023054.1,571-589).
gtcagagtcagcaagaagt

SEQ ID NO: 690136 - DNA, 19 bp, Mus musculus
  siRNA target sequence for Crlz1 (NM_023054.1,682-700).
gggtggaggcctttgcaaa

SEQ ID NO: 690137 - DNA, 19 bp, Mus musculus
  siRNA target sequence for Crlz1 (NM_023054.1,749-767).
ggctaaagtctcggtaaaa

SEQ ID NO: 690138 - DNA, 19 bp, Mus musculus
  siRNA target sequence for Crlz1 (NM_023054.1,822-840).
gacctccaagccaagttga

SEQ ID NO: 690139 - DNA, 19 bp, Mus musculus
  siRNA target sequence for Crlz1 (NM_023054.1,882-900).
gagaaaggggtcattccaa

SEQ ID NO: 690140 - DNA, 19 bp, Mus musculus
  siRNA target sequence for Crlz1 (NM_023054.1,915-933).
gaatacctgaagactaagt

SEQ ID NO: 690141 - DNA, 19 bp, Mus musculus
  siRNA target sequence for Crlz1 (NM_023054.1,920-938).
cctgaagactaagtataat

SEQ ID NO: 690142 - DNA, 19 bp, Mus musculus
  siRNA target sequence for Crlz1 (NM_023054.1,947-965).
gaactattgcgccaacatt

SEQ ID NO: 690143 - DNA, 19 bp, Mus musculus
  siRNA target sequence for Crlz1 (NM_023054.1,955-973).
gcgccaacattagctttta

SEQ ID NO: 690144 - DNA, 19 bp, Mus musculus
  siRNA target sequence for Crlz1 (NM_023054.1,956-974).
cgccaacattagcttttat

SEQ ID NO: 690145 - DNA, 19 bp, Mus musculus
  siRNA target sequence for Crlz1 (NM_023054.1,1003-1021).
cacatggacatcctgttat

SEQ ID NO: 690146 - DNA, 19 bp, Mus musculus
  siRNA target sequence for Crlz1 (NM_023054.1,1008-1026).
ggacatcctgttatagaaa

SEQ ID NO: 690147 - DNA, 19 bp, Mus musculus
  siRNA target sequence for Crlz1 (NM_023054.1,1017-1035).
gttatagaaaggcttgtta

SEQ ID NO: 690148 - DNA, 19 bp, Mus musculus
  siRNA target sequence for Crlz1 (NM_023054.1,1036-1054).
cctacagaaatctgatcaa

SEQ ID NO: 690149 - DNA, 19 bp, Mus musculus
  siRNA target sequence for Crlz1 (NM_023054.1,1061-1079).
gtcggttgtggatcagaaa

SEQ ID NO: 690150 - DNA, 19 bp, Mus musculus
  siRNA target sequence for Crlz1 (NM_023054.1,1063-1081).
cggttgtggatcagaaact

SEQ ID NO: 690151 - DNA, 19 bp, Mus musculus
  siRNA target sequence for Crlz1 (NM_023054.1,1227-1245).
ggggctgctctcaagtact

SEQ ID NO: 690152 - DNA, 19 bp, Mus musculus
  siRNA target sequence for Crlz1 (NM_023054.1,1228-1246).
gggctgctctcaagtacta

SEQ ID NO: 690153 - DNA, 19 bp, Mus musculus
  siRNA target sequence for Crlz1 (NM_023054.1,1230-1248).
gctgctctcaagtactata

SEQ ID NO: 690154 - DNA, 19 bp, Mus musculus
  siRNA target sequence for Crlz1 (NM_023054.1,1231-1249).
ctgctctcaagtactataa

SEQ ID NO: 690155 - DNA, 19 bp, Mus musculus
  siRNA target sequence for Crlz1 (NM_023054.1,1310-1328).
ggctctcgaagaacaaaat

SEQ ID NO: 690156 - DNA, 19 bp, Mus musculus
  siRNA target sequence for Crlz1 (NM_023054.1,1345-1363).
cctaccagattgctaaaaa

SEQ ID NO: 690157 - DNA, 19 bp, Mus musculus
  siRNA target sequence for Ctdsp1 (NM_153088.1,318-336).
gacagctcggccgtcatta

SEQ ID NO: 690158 - DNA, 19 bp, Mus musculus
  siRNA target sequence for Ctdsp1 (NM_153088.1,320-338).
cagctcggccgtcattact

SEQ ID NO: 690159 - DNA, 19 bp, Mus musculus
  siRNA target sequence for Ctdsp1 (NM_153088.1,322-340).
gctcggccgtcattactca

SEQ ID NO: 690160 - DNA, 19 bp, Mus musculus
  siRNA target sequence for Ctdsp1 (NM_153088.1,629-647).
cttcaagccagtgaacaat

SEQ ID NO: 690161 - DNA, 19 bp, Mus musculus
  siRNA target sequence for Ctdsp1 (NM_153088.1,736-754).
gaatgggcgagctctttga

SEQ ID NO: 690162 - DNA, 19 bp, Mus musculus
  siRNA target sequence for Ctdsp1 (NM_153088.1,913-931).
ggcgagtgctcattctaga

SEQ ID NO: 690163 - DNA, 19 bp, Mus musculus
  siRNA target sequence for Ctdsp1 (NM_153088.1,916-934).
gagtgctcattctagacaa

SEQ ID NO: 690164 - DNA, 19 bp, Mus musculus
  siRNA target sequence for Ctdsp1 (NM_153088.1,978-996).
gtggcctcgtggtttgaca

SEQ ID NO: 690165 - DNA, 19 bp, Mus musculus
  siRNA target sequence for Ctdsp1 (NM_153088.1,982-1000).
cctcgtggtttgacaacat

SEQ ID NO: 690166 - DNA, 19 bp, Mus musculus
  siRNA target sequence for Ctdsp1 (NM_153088.1,1019-1037).
cgatctcttacccttcttt

SEQ ID NO: 690167 - DNA, 19 bp, Mus musculus
  siRNA target sequence for Ctdsp1 (NM_153088.1,1050-1068).
cgcgtggacgacgtatact

SEQ ID NO: 690168 - DNA, 19 bp, Mus musculus
  siRNA target sequence for Ctdsp1 (NM_153088.1,1052-1070).
cgtggacgacgtatactca

SEQ ID NO: 690169 - DNA, 19 bp, Mus musculus
  siRNA target sequence for Ctdspl (NM_133710.1,412-430).
gacggtccggccatcatca

SEQ ID NO: 690170 - DNA, 19 bp, Mus musculus
  siRNA target sequence for Ctdspl (NM_133710.1,487-505).
gcttcccagcgcaacatca

SEQ ID NO: 690171 - DNA, 19 bp, Mus musculus
  siRNA target sequence for Ctdspl (NM_133710.1,552-570).
ctgcttccgagactacaat

SEQ ID NO: 690172 - DNA, 19 bp, Mus musculus
  siRNA target sequence for Ctdspl (NM_133710.1,554-572).
gcttccgagactacaatgt

SEQ ID NO: 690173 - DNA, 19 bp, Mus musculus
  siRNA target sequence for Ctdspl (NM_133710.1,670-688).
ccaagcccaccagctaaat

SEQ ID NO: 690174 - DNA, 19 bp, Mus musculus
  siRNA target sequence for Ctdspl (NM_133710.1,671-689).
caagcccaccagctaaata

SEQ ID NO: 690175 - DNA, 19 bp, Mus musculus
  siRNA target sequence for Ctdspl (NM_133710.1,674-692).
gcccaccagctaaatacct

SEQ ID NO: 690176 - DNA, 19 bp, Mus musculus
  siRNA target sequence for Ctdspl (NM_133710.1,707-725).
cggtgctcgactatggaaa

SEQ ID NO: 690177 - DNA, 19 bp, Mus musculus
  siRNA target sequence for Ctdspl (NM_133710.1,770-788).
cgtttaagcccattagtaa

SEQ ID NO: 690178 - DNA, 19 bp, Mus musculus
  siRNA target sequence for Ctdspl (NM_133710.1,771-789).
gtttaagcccattagtaat

SEQ ID NO: 690179 - DNA, 19 bp, Mus musculus
  siRNA target sequence for Ctdspl (NM_133710.1,795-813).
cttcattgttcctgttgaa

SEQ ID NO: 690180 - DNA, 19 bp, Mus musculus
  siRNA target sequence for Ctdspl (NM_133710.1,1002-1020).
gttccaccgtgggaactat

SEQ ID NO: 690181 - DNA, 19 bp, Mus musculus
  siRNA target sequence for Ctdspl (NM_133710.1,1006-1024).
caccgtgggaactatgtga

SEQ ID NO: 690182 - DNA, 19 bp, Mus musculus
  siRNA target sequence for Ctdspl (NM_133710.1,1060-1078).
gtgatcatcgtggacaatt

SEQ ID NO: 690183 - DNA, 19 bp, Mus musculus
  siRNA target sequence for Ctnnbl1 (NM_025680.2,72-90).
ggacgtgggcgaactttta

SEQ ID NO: 690184 - DNA, 19 bp, Mus musculus
  siRNA target sequence for Ctnnbl1 (NM_025680.2,73-91).
gacgtgggcgaacttttaa

SEQ ID NO: 690185 - DNA, 19 bp, Mus musculus
  siRNA target sequence for Ctnnbl1 (NM_025680.2,76-94).
gtgggcgaacttttaagct

SEQ ID NO: 690186 - DNA, 19 bp, Mus musculus
  siRNA target sequence for Ctnnbl1 (NM_025680.2,99-117).
gcccaacaggggcacaaaa

SEQ ID NO: 690187 - DNA, 19 bp, Mus musculus
  siRNA target sequence for Ctnnbl1 (NM_025680.2,102-120).
caacaggggcacaaaacga

SEQ ID NO: 690188 - DNA, 19 bp, Mus musculus
  siRNA target sequence for Ctnnbl1 (NM_025680.2,337-355).
gagaagcgatcctacaaaa

SEQ ID NO: 690189 - DNA, 19 bp, Mus musculus
  siRNA target sequence for Ctnnbl1 (NM_025680.2,358-376).
caggagctgcggatcaagt

SEQ ID NO: 690190 - DNA, 19 bp, Mus musculus
  siRNA target sequence for Ctnnbl1 (NM_025680.2,369-387).
gatcaagtttccagacaat

SEQ ID NO: 690191 - DNA, 19 bp, Mus musculus
  siRNA target sequence for Ctnnbl1 (NM_025680.2,388-406).
ccggagaagttcatggaat

SEQ ID NO: 690192 - DNA, 19 bp, Mus musculus
  siRNA target sequence for Ctnnbl1 (NM_025680.2,511-529).
ggcttgctgggacatgata

SEQ ID NO: 690193 - DNA, 19 bp, Mus musculus
  siRNA target sequence for Ctnnbl1 (NM_025680.2,512-530).
gcttgctgggacatgataa

SEQ ID NO: 690194 - DNA, 19 bp, Mus musculus
  siRNA target sequence for Ctnnbl1 (NM_025680.2,513-531).
cttgctgggacatgataat

SEQ ID NO: 690195 - DNA, 19 bp, Mus musculus
  siRNA target sequence for Ctnnbl1 (NM_025680.2,516-534).
gctgggacatgataataca

SEQ ID NO: 690196 - DNA, 19 bp, Mus musculus
  siRNA target sequence for Ctnnbl1 (NM_025680.2,519-537).
gggacatgataatacagat

SEQ ID NO: 690197 - DNA, 19 bp, Mus musculus
  siRNA target sequence for Ctnnbl1 (NM_025680.2,714-732).
ccacaacaccctagctatt

SEQ ID NO: 690198 - DNA, 19 bp, Mus musculus
  siRNA target sequence for Ctnnbl1 (NM_025680.2,724-742).
ctagctattgtggagaata

SEQ ID NO: 690199 - DNA, 19 bp, Mus musculus
  siRNA target sequence for Ctnnbl1 (NM_025680.2,940-958).
cagcagttatccgtattta

SEQ ID NO: 690200 - DNA, 19 bp, Mus musculus
  siRNA target sequence for Ctnnbl1 (NM_025680.2,1015-1033).
gcgctctgttcctgcttaa

SEQ ID NO: 690201 - DNA, 19 bp, Mus musculus
  siRNA target sequence for Ctnnbl1 (NM_025680.2,1016-1034).
cgctctgttcctgcttaat

SEQ ID NO: 690202 - DNA, 19 bp, Mus musculus
  siRNA target sequence for Ctnnbl1 (NM_025680.2,1178-1196).
gccacaagtttgttgacat

SEQ ID NO: 690203 - DNA, 19 bp, Mus musculus
  siRNA target sequence for Ctnnbl1 (NM_025680.2,1179-1197).
ccacaagtttgttgacatt

SEQ ID NO: 690204 - DNA, 19 bp, Mus musculus
  siRNA target sequence for Ctnnbl1 (NM_025680.2,1336-1354).
cggacccggcttctgaata

SEQ ID NO: 690205 - DNA, 19 bp, Mus musculus
  siRNA target sequence for Ctnnbl1 (NM_025680.2,1337-1355).
ggacccggcttctgaataa

SEQ ID NO: 690206 - DNA, 19 bp, Mus musculus
  siRNA target sequence for Ctnnbl1 (NM_025680.2,1390-1408).
ctaatggagctgcatttta

SEQ ID NO: 690207 - DNA, 19 bp, Mus musculus
  siRNA target sequence for Ctnnbl1 (NM_025680.2,1431-1449).
ggccgacaagaagattgaa

SEQ ID NO: 690208 - DNA, 19 bp, Mus musculus
  siRNA target sequence for Ctnnbl1 (NM_025680.2,1470-1488).
gcggcgtggggagatcata

SEQ ID NO: 690209 - DNA, 19 bp, Mus musculus
  siRNA target sequence for Ctnnbl1 (NM_025680.2,1671-1689).
ggagtacgcagagaacatt

SEQ ID NO: 690210 - DNA, 19 bp, Mus musculus
  siRNA target sequence for D8Ertd325e (NM_025804.1,597-615).
catttgaccataatgaaga

SEQ ID NO: 690211 - DNA, 19 bp, Mus musculus
  siRNA target sequence for D8Ertd325e (NM_025804.1,653-671).
gagtccatggagccaaata

SEQ ID NO: 690212 - DNA, 19 bp, Mus musculus
  siRNA target sequence for D8Ertd325e (NM_025804.1,657-675).
ccatggagccaaataacat

SEQ ID NO: 690213 - DNA, 19 bp, Mus musculus
  siRNA target sequence for D8Ertd325e (NM_025804.1,658-676).
catggagccaaataacatt

SEQ ID NO: 690214 - DNA, 19 bp, Mus musculus
  siRNA target sequence for D8Ertd325e (NM_025804.1,688-706).
ccagacaagcccctatcat

SEQ ID NO: 690215 - DNA, 19 bp, Mus musculus
  siRNA target sequence for D8Ertd325e (NM_025804.1,760-778).
gatggctcgagaccttata

SEQ ID NO: 690216 - DNA, 19 bp, Mus musculus
  siRNA target sequence for D8Ertd325e (NM_025804.1,764-782).
gctcgagaccttatagaga

SEQ ID NO: 690217 - DNA, 19 bp, Mus musculus
  siRNA target sequence for D8Ertd325e (NM_025804.1,806-824).
gcattccaccccttgttca

SEQ ID NO: 690218 - DNA, 19 bp, Mus musculus
  siRNA target sequence for D8Ertd325e (NM_025804.1,857-875).
cgcagacctgagaatagga

SEQ ID NO: 690219 - DNA, 19 bp, Mus musculus
  siRNA target sequence for D8Ertd325e (NM_025804.1,1087-1105).
gtcccagctcccaaatttt

SEQ ID NO: 690220 - DNA, 19 bp, Mus musculus
  siRNA target sequence for D8Ertd325e (NM_025804.1,1138-1156).
gagtcagcaaacagactta

SEQ ID NO: 690221 - DNA, 19 bp, Mus musculus
  siRNA target sequence for D8Ertd325e (NM_025804.1,1269-1287).
ctgatgccacggtctcaaa

SEQ ID NO: 690222 - DNA, 19 bp, Mus musculus
  siRNA target sequence for D8Ertd325e (NM_025804.1,1282-1300).
ctcaaaccaccgcttcttt

SEQ ID NO: 690223 - DNA, 19 bp, Mus musculus
  siRNA target sequence for D8Ertd325e (NM_025804.1,1380-1398).
ggaaagaacccgccattat

SEQ ID NO: 690224 - DNA, 19 bp, Mus musculus
  siRNA target sequence for D8Ertd325e (NM_025804.1,1472-1490).
gagaacaggcggaaagtgt

SEQ ID NO: 690225 - DNA, 19 bp, Mus musculus
  siRNA target sequence for D8Ertd325e (NM_025804.1,1517-1535).
caccgccacgtgatactgt

SEQ ID NO: 690226 - DNA, 19 bp, Mus musculus
  siRNA target sequence for D8Ertd325e (NM_025804.1,1661-1679).
gtcagccacggaaacacaa

SEQ ID NO: 690227 - DNA, 19 bp, Mus musculus
  siRNA target sequence for Dnttip1 (NM_133763.1,645-663).
cccagctcggctgaatgaa

SEQ ID NO: 690228 - DNA, 19 bp, Mus musculus
  siRNA target sequence for Dnttip1 (NM_133763.1,646-664).
ccagctcggctgaatgaat

SEQ ID NO: 690229 - DNA, 19 bp, Mus musculus
  siRNA target sequence for Dnttip1 (NM_133763.1,649-667).
gctcggctgaatgaatcta

SEQ ID NO: 690230 - DNA, 19 bp, Mus musculus
  siRNA target sequence for Dnttip1 (NM_133763.1,719-737).
ccagagggagaatctacat

SEQ ID NO: 690231 - DNA, 19 bp, Mus musculus
  siRNA target sequence for Dnttip1 (NM_133763.1,722-740).
gagggagaatctacatcaa

SEQ ID NO: 690232 - DNA, 19 bp, Mus musculus
  siRNA target sequence for Dnttip1 (NM_133763.1,744-762).
cccacacctctttaagtat

SEQ ID NO: 690233 - DNA, 19 bp, Mus musculus
  siRNA target sequence for Dnttip1 (NM_133763.1,812-830).
gggcaacaggcggaaagat

SEQ ID NO: 690234 - DNA, 19 bp, Mus musculus
  siRNA target sequence for Dnttip1 (NM_133763.1,828-846).
gatggcgtaccttctcatt

SEQ ID NO: 690235 - DNA, 19 bp, Mus musculus
  siRNA target sequence for Dnttip1 (NM_133763.1,831-849).
ggcgtaccttctcattgaa

SEQ ID NO: 690236 - DNA, 19 bp, Mus musculus
  siRNA target sequence for Idb4 (NM_031166.1,259-277).
gcctgcagtgcgatatgaa

SEQ ID NO: 690237 - DNA, 19 bp, Mus musculus
  siRNA target sequence for Insm1 (NM_016889.1,904-922).
cggttctggggctcaagat

SEQ ID NO: 690238 - DNA, 19 bp, Mus musculus
  siRNA target sequence for Insm1 (NM_016889.1,1299-1317).
caccactgcgccaagaagt

SEQ ID NO: 690239 - DNA, 19 bp, Mus musculus
  siRNA target sequence for Insm1 (NM_016889.1,1676-1694).
gtgccacccgtctgagaat

SEQ ID NO: 690240 - DNA, 19 bp, Mus musculus
  siRNA target sequence for Insm1 (NM_016889.1,1679-1697).
ccacccgtctgagaataga

SEQ ID NO: 690241 - DNA, 19 bp, Mus musculus
  siRNA target sequence for Lmo2 (NM_008505.3,541-559).
gtggctgccagcagaacat

SEQ ID NO: 690242 - DNA, 19 bp, Mus musculus
  siRNA target sequence for Lmo2 (NM_008505.3,652-670).
ggaggcgcctctactacaa

SEQ ID NO: 690243 - DNA, 19 bp, Mus musculus
  siRNA target sequence for Lmo2 (NM_008505.3,747-765).
cggatccgtgcctatgaga

SEQ ID NO: 690244 - DNA, 19 bp, Mus musculus
  siRNA target sequence for Lmo2 (NM_008505.3,748-766).
ggatccgtgcctatgagat

SEQ ID NO: 690245 - DNA, 19 bp, Mus musculus
  siRNA target sequence for Lmo2 (NM_008505.3,769-787).
cgatgcgggtgaaagacaa

SEQ ID NO: 690246 - DNA, 19 bp, Mus musculus
  siRNA target sequence for Lmo2 (NM_008505.3,770-788).
gatgcgggtgaaagacaaa

SEQ ID NO: 690247 - DNA, 19 bp, Mus musculus
  siRNA target sequence for Lmo2 (NM_008505.3,774-792).
cgggtgaaagacaaagtgt

SEQ ID NO: 690248 - DNA, 19 bp, Mus musculus
  siRNA target sequence for Lmo2 (NM_008505.3,775-793).
gggtgaaagacaaagtgta

SEQ ID NO: 690249 - DNA, 19 bp, Mus musculus
  siRNA target sequence for Lmo2 (NM_008505.3,821-839).
ctgtcagaagcatttctgt

SEQ ID NO: 690250 - DNA, 19 bp, Mus musculus
  siRNA target sequence for Lmo2 (NM_008505.3,844-862).
gtgacagataccttctcat

SEQ ID NO: 690251 - DNA, 19 bp, Mus musculus
  siRNA target sequence for Lmo2 (NM_008505.3,896-914).
cgagtggaccaagatcaat

SEQ ID NO: 690252 - DNA, 19 bp, Mus musculus
  siRNA target sequence for Lpin2 (NM_022882.2,401-419).
ggtccaaggagaaagtgat

SEQ ID NO: 690253 - DNA, 19 bp, Mus musculus
  siRNA target sequence for Lpin2 (NM_022882.2,580-598).
gaaacccctttggtgaaat

SEQ ID NO: 690254 - DNA, 19 bp, Mus musculus
  siRNA target sequence for Lpin2 (NM_022882.2,746-764).
cccctgttgcagaagatgt

SEQ ID NO: 690255 - DNA, 19 bp, Mus musculus
  siRNA target sequence for Lpin2 (NM_022882.2,807-825).
ggcagcaagaggatcttca

SEQ ID NO: 690256 - DNA, 19 bp, Mus musculus
  siRNA target sequence for Lpin2 (NM_022882.2,809-827).
cagcaagaggatcttcaaa

SEQ ID NO: 690257 - DNA, 19 bp, Mus musculus
  siRNA target sequence for Lpin2 (NM_022882.2,902-920).
gagattggtccccattaga

SEQ ID NO: 690258 - DNA, 19 bp, Mus musculus
  siRNA target sequence for Lpin2 (NM_022882.2,904-922).
gattggtccccattagaaa

SEQ ID NO: 690259 - DNA, 19 bp, Mus musculus
  siRNA target sequence for Lpin2 (NM_022882.2,1044-1062).
caaggtcaccaaaagagaa

SEQ ID NO: 690260 - DNA, 19 bp, Mus musculus
  siRNA target sequence for Lpin2 (NM_022882.2,1058-1076).
gagaacggtatgactatca

SEQ ID NO: 690261 - DNA, 19 bp, Mus musculus
  siRNA target sequence for Lpin2 (NM_022882.2,1142-1160).
gcctcataagagaagttga

SEQ ID NO: 690262 - DNA, 19 bp, Mus musculus
  siRNA target sequence for Lpin2 (NM_022882.2,1363-1381).
gactcaccaacaaaaaaga

SEQ ID NO: 690263 - DNA, 19 bp, Mus musculus
  siRNA target sequence for Lpin2 (NM_022882.2,1456-1474).
gaagtggcggctctctatt

SEQ ID NO: 690264 - DNA, 19 bp, Mus musculus
  siRNA target sequence for Lpin2 (NM_022882.2,1465-1483).
gctctctatttccctaaaa

SEQ ID NO: 690265 - DNA, 19 bp, Mus musculus
  siRNA target sequence for Lpin2 (NM_022882.2,1511-1529).
ggcctgagtctgacacatt

SEQ ID NO: 690266 - DNA, 19 bp, Mus musculus
  siRNA target sequence for Lpin2 (NM_022882.2,1570-1588).
gcggacagtggcactgaat

SEQ ID NO: 690267 - DNA, 19 bp, Mus musculus
  siRNA target sequence for Lpin2 (NM_022882.2,1605-1623).
catggacttgcctgatgta

SEQ ID NO: 690268 - DNA, 19 bp, Mus musculus
  siRNA target sequence for Lpin2 (NM_022882.2,1686-1704).
gcatatcatcacttaccat

SEQ ID NO: 690269 - DNA, 19 bp, Mus musculus
  siRNA target sequence for Lpin2 (NM_022882.2,1692-1710).
catcacttaccatgagttt

SEQ ID NO: 690270 - DNA, 19 bp, Mus musculus
  siRNA target sequence for Lpin2 (NM_022882.2,1744-1762).
ctcgtgatccggatatata

SEQ ID NO: 690271 - DNA, 19 bp, Mus musculus
  siRNA target sequence for Lpin2 (NM_022882.2,1786-1804).
gctgctcccatgatcctta

SEQ ID NO: 690272 - DNA, 19 bp, Mus musculus
  siRNA target sequence for Lpin2 (NM_022882.2,1790-1808).
ctcccatgatccttagctt

SEQ ID NO: 690273 - DNA, 19 bp, Mus musculus
  siRNA target sequence for Lpin2 (NM_022882.2,1800-1818).
ccttagcttacaggtattt

SEQ ID NO: 690274 - DNA, 19 bp, Mus musculus
  siRNA target sequence for Lpin2 (NM_022882.2,1842-1860).
cgttgagtcctgggttaaa

SEQ ID NO: 690275 - DNA, 19 bp, Mus musculus
  siRNA target sequence for Lpin2 (NM_022882.2,1889-1907).
ggtggttttggcggaaaaa

SEQ ID NO: 690276 - DNA, 19 bp, Mus musculus
  siRNA target sequence for Lpin2 (NM_022882.2,1937-1955).
ccaaggagggaaaatctga

SEQ ID NO: 690277 - DNA, 19 bp, Mus musculus
  siRNA target sequence for Lpin2 (NM_022882.2,2103-2121).
ctgtgggacggcctcatat

SEQ ID NO: 690278 - DNA, 19 bp, Mus musculus
  siRNA target sequence for Lpin2 (NM_022882.2,2105-2123).
gtgggacggcctcatataa

SEQ ID NO: 690279 - DNA, 19 bp, Mus musculus
  siRNA target sequence for Lpin2 (NM_022882.2,2107-2125).
gggacggcctcatataaga

SEQ ID NO: 690280 - DNA, 19 bp, Mus musculus
  siRNA target sequence for Lpin2 (NM_022882.2,2108-2126).
ggacggcctcatataagaa

SEQ ID NO: 690281 - DNA, 19 bp, Mus musculus
  siRNA target sequence for Lpin2 (NM_022882.2,2142-2160).
ctcggaccagatagcaaaa

SEQ ID NO: 690282 - DNA, 19 bp, Mus musculus
  siRNA target sequence for Lpin2 (NM_022882.2,2198-2216).
gtatcacaacccagtatca

SEQ ID NO: 690283 - DNA, 19 bp, Mus musculus
  siRNA target sequence for Lpin2 (NM_022882.2,2279-2297).
ctgacatcgacggaacaat

SEQ ID NO: 690284 - DNA, 19 bp, Mus musculus
  siRNA target sequence for Lpin2 (NM_022882.2,2281-2299).
gacatcgacggaacaataa

SEQ ID NO: 690285 - DNA, 19 bp, Mus musculus
  siRNA target sequence for Lpin2 (NM_022882.2,2366-2384).
ctaggctctaccattccat

SEQ ID NO: 690286 - DNA, 19 bp, Mus musculus
  siRNA target sequence for Lpin2 (NM_022882.2,2376-2394).
ccattccatcaatgagaat

SEQ ID NO: 690287 - DNA, 19 bp, Mus musculus
  siRNA target sequence for Lpin2 (NM_022882.2,2581-2599).
gagtgtctgaatgatatta

SEQ ID NO: 690288 - DNA, 19 bp, Mus musculus
  siRNA target sequence for Lpin2 (NM_022882.2,2686-2704).
gttccagactgtaggatat

SEQ ID NO: 690289 - DNA, 19 bp, Mus musculus
  siRNA target sequence for Lpin2 (NM_022882.2,2712-2730).
gaatccaaagggtgaatta

SEQ ID NO: 690290 - DNA, 19 bp, Mus musculus
  siRNA target sequence for Lpin2 (NM_022882.2,2717-2735).
caaagggtgaattaatcca

SEQ ID NO: 690291 - DNA, 19 bp, Mus musculus
  siRNA target sequence for Lpin2 (NM_022882.2,2808-2826).
cagtaaggagcagaattct

SEQ ID NO: 690292 - DNA, 19 bp, Mus musculus
  siRNA target sequence for Lpin3 (NM_022883.1,482-500).
cccgtggacctgcatatga

SEQ ID NO: 690293 - DNA, 19 bp, Mus musculus
  siRNA target sequence for Lpin3 (NM_022883.1,483-501).
ccgtggacctgcatatgaa

SEQ ID NO: 690294 - DNA, 19 bp, Mus musculus
  siRNA target sequence for Lpin3 (NM_022883.1,484-502).
cgtggacctgcatatgaaa

SEQ ID NO: 690295 - DNA, 19 bp, Mus musculus
  siRNA target sequence for Lpin3 (NM_022883.1,511-529).
cagcggcgaggccttcttt

SEQ ID NO: 690296 - DNA, 19 bp, Mus musculus
  siRNA target sequence for Lpin3 (NM_022883.1,646-664).
gcctgagggcctagtcatt

SEQ ID NO: 690297 - DNA, 19 bp, Mus musculus
  siRNA target sequence for Lpin3 (NM_022883.1,647-665).
cctgagggcctagtcatta

SEQ ID NO: 690298 - DNA, 19 bp, Mus musculus
  siRNA target sequence for Lpin3 (NM_022883.1,756-774).
cggagagtgagctgacatt

SEQ ID NO: 690299 - DNA, 19 bp, Mus musculus
  siRNA target sequence for Lpin3 (NM_022883.1,831-849).
cgcagcctaaggacataca

SEQ ID NO: 690300 - DNA, 19 bp, Mus musculus
  siRNA target sequence for Lpin3 (NM_022883.1,1033-1051).
ctcgttgatccttgaaagt

SEQ ID NO: 690301 - DNA, 19 bp, Mus musculus
  siRNA target sequence for Lpin3 (NM_022883.1,1156-1174).
cagggctgatacattccat

SEQ ID NO: 690302 - DNA, 19 bp, Mus musculus
  siRNA target sequence for Lpin3 (NM_022883.1,1179-1197).
ctgtggaggcccattgtga

SEQ ID NO: 690303 - DNA, 19 bp, Mus musculus
  siRNA target sequence for Lpin3 (NM_022883.1,1226-1244).
gccccagagagtaaggaaa

SEQ ID NO: 690304 - DNA, 19 bp, Mus musculus
  siRNA target sequence for Lpin3 (NM_022883.1,1550-1568).
ctggactcagtggacaaaa

SEQ ID NO: 690305 - DNA, 19 bp, Mus musculus
  siRNA target sequence for Lpin3 (NM_022883.1,1552-1570).
ggactcagtggacaaaata

SEQ ID NO: 690306 - DNA, 19 bp, Mus musculus
  siRNA target sequence for Lpin3 (NM_022883.1,1595-1613).
gctgacaaccgagatatct

SEQ ID NO: 690307 - DNA, 19 bp, Mus musculus
  siRNA target sequence for Lpin3 (NM_022883.1,1644-1662).
cctatgaagacctcactaa

SEQ ID NO: 690308 - DNA, 19 bp, Mus musculus
  siRNA target sequence for Lpin3 (NM_022883.1,1685-1703).
ccaaacctcgtggtgaaaa

SEQ ID NO: 690309 - DNA, 19 bp, Mus musculus
  siRNA target sequence for Lpin3 (NM_022883.1,1826-1844).
ggtgggcgatggtggtttt

SEQ ID NO: 690310 - DNA, 19 bp, Mus musculus
  siRNA target sequence for Lpin3 (NM_022883.1,2483-2501).
gttgcctgcctgagtgata

SEQ ID NO: 690311 - DNA, 19 bp, Mus musculus
  siRNA target sequence for Lpin3 (NM_022883.1,2487-2505).
cctgcctgagtgatatcca

SEQ ID NO: 690312 - DNA, 19 bp, Mus musculus
  siRNA target sequence for Lpin3 (NM_022883.1,2550-2568).
ggaacaggcccaatgatgt

SEQ ID NO: 690313 - DNA, 19 bp, Mus musculus
  siRNA target sequence for Lpin3 (NM_022883.1,2551-2569).
gaacaggcccaatgatgtt

SEQ ID NO: 690314 - DNA, 19 bp, Mus musculus
  siRNA target sequence for Lpin3 (NM_022883.1,2594-2612).
cctgagtcccgaatcttca

SEQ ID NO: 690315 - DNA, 19 bp, Mus musculus
  siRNA target sequence for Mdm4 (NM_008575.2,263-281).
gaatttcttcggaacaaat

SEQ ID NO: 690316 - DNA, 19 bp, Mus musculus
  siRNA target sequence for Mdm4 (NM_008575.2,269-287).
cttcggaacaaattagtca

SEQ ID NO: 690317 - DNA, 19 bp, Mus musculus
  siRNA target sequence for Mdm4 (NM_008575.2,284-302).
gtcaggtgcggccaaaact

SEQ ID NO: 690318 - DNA, 19 bp, Mus musculus
  siRNA target sequence for Mdm4 (NM_008575.2,331-349).
ggtgcgcagggggaagtat

SEQ ID NO: 690319 - DNA, 19 bp, Mus musculus
  siRNA target sequence for Mdm4 (NM_008575.2,334-352).
gcgcagggggaagtattca

SEQ ID NO: 690320 - DNA, 19 bp, Mus musculus
  siRNA target sequence for Mdm4 (NM_008575.2,370-388).
cactatctaggccagtata

SEQ ID NO: 690321 - DNA, 19 bp, Mus musculus
  siRNA target sequence for Mdm4 (NM_008575.2,372-390).
ctatctaggccagtatata

SEQ ID NO: 690322 - DNA, 19 bp, Mus musculus
  siRNA target sequence for Mdm4 (NM_008575.2,393-411).
ggtgaagcagctctatgat

SEQ ID NO: 690323 - DNA, 19 bp, Mus musculus
  siRNA target sequence for Mdm4 (NM_008575.2,409-427).
gatcaacaggagcaacata

SEQ ID NO: 690324 - DNA, 19 bp, Mus musculus
  siRNA target sequence for Mdm4 (NM_008575.2,415-433).
caggagcaacatatggtat

SEQ ID NO: 690325 - DNA, 19 bp, Mus musculus
  siRNA target sequence for Mdm4 (NM_008575.2,418-436).
gagcaacatatggtatact

SEQ ID NO: 690326 - DNA, 19 bp, Mus musculus
  siRNA target sequence for Mdm4 (NM_008575.2,499-517).
cctctctatgacatgctaa

SEQ ID NO: 690327 - DNA, 19 bp, Mus musculus
  siRNA target sequence for Mdm4 (NM_008575.2,502-520).
ctctatgacatgctaagaa

SEQ ID NO: 690328 - DNA, 19 bp, Mus musculus
  siRNA target sequence for Mdm4 (NM_008575.2,582-600).
ggatcacactatggatttt

SEQ ID NO: 690329 - DNA, 19 bp, Mus musculus
  siRNA target sequence for Mdm4 (NM_008575.2,618-636).
gaagcacggtgcaacagaa

SEQ ID NO: 690330 - DNA, 19 bp, Mus musculus
  siRNA target sequence for Mdm4 (NM_008575.2,684-702).
gcctacctcacgacataaa

SEQ ID NO: 690331 - DNA, 19 bp, Mus musculus
  siRNA target sequence for Mdm4 (NM_008575.2,685-703).
cctacctcacgacataaat

SEQ ID NO: 690332 - DNA, 19 bp, Mus musculus
  siRNA target sequence for Mdm4 (NM_008575.2,727-745).
gacttgatagaacatttat

SEQ ID NO: 690333 - DNA, 19 bp, Mus musculus
  siRNA target sequence for Mdm4 (NM_008575.2,761-779).
ctaggcttgaccttgattt

SEQ ID NO: 690334 - DNA, 19 bp, Mus musculus
  siRNA target sequence for Mdm4 (NM_008575.2,764-782).
ggcttgaccttgattttga

SEQ ID NO: 690335 - DNA, 19 bp, Mus musculus
  siRNA target sequence for Mdm4 (NM_008575.2,809-827).
ggtggtttctagggaattt

SEQ ID NO: 690336 - DNA, 19 bp, Mus musculus
  siRNA target sequence for Mdm4 (NM_008575.2,856-874).
ggctcaactgatttacaga

SEQ ID NO: 690337 - DNA, 19 bp, Mus musculus
  siRNA target sequence for Mdm4 (NM_008575.2,890-908).
gtactgccattgtttcaga

SEQ ID NO: 690338 - DNA, 19 bp, Mus musculus
  siRNA target sequence for Mdm4 (NM_008575.2,905-923).
cagacactacggatgattt

SEQ ID NO: 690339 - DNA, 19 bp, Mus musculus
  siRNA target sequence for Mdm4 (NM_008575.2,939-957).
gaccgtgtcagagcaatta

SEQ ID NO: 690340 - DNA, 19 bp, Mus musculus
  siRNA target sequence for Mdm4 (NM_008575.2,942-960).
cgtgtcagagcaattaggt

SEQ ID NO: 690341 - DNA, 19 bp, Mus musculus
  siRNA target sequence for Mdm4 (NM_008575.2,952-970).
caattaggtgttggaataa

SEQ ID NO: 690342 - DNA, 19 bp, Mus musculus
  siRNA target sequence for Mdm4 (NM_008575.2,982-1000).
gctaattctgagcaaacaa

SEQ ID NO: 690343 - DNA, 19 bp, Mus musculus
  siRNA target sequence for Mdm4 (NM_008575.2,1006-1024).
gtagggaaaacaagtaaca

SEQ ID NO: 690344 - DNA, 19 bp, Mus musculus
  siRNA target sequence for Mdm4 (NM_008575.2,1071-1089).
gtccttgagcgatgatact

SEQ ID NO: 690345 - DNA, 19 bp, Mus musculus
  siRNA target sequence for Mdm4 (NM_008575.2,1073-1091).
ccttgagcgatgatactga

SEQ ID NO: 690346 - DNA, 19 bp, Mus musculus
  siRNA target sequence for Mdm4 (NM_008575.2,1155-1173).
caagaggtactgttttcgt

SEQ ID NO: 690347 - DNA, 19 bp, Mus musculus
  siRNA target sequence for Mdm4 (NM_008575.2,1182-1200).
cttgagaaaggattggtat

SEQ ID NO: 690348 - DNA, 19 bp, Mus musculus
  siRNA target sequence for Mdm4 (NM_008575.2,1192-1210).
gattggtattcggattgtt

SEQ ID NO: 690349 - DNA, 19 bp, Mus musculus
  siRNA target sequence for Mdm4 (NM_008575.2,1196-1214).
ggtattcggattgttctaa

SEQ ID NO: 690350 - DNA, 19 bp, Mus musculus
  siRNA target sequence for Mdm4 (NM_008575.2,1197-1215).
gtattcggattgttctaaa

SEQ ID NO: 690351 - DNA, 19 bp, Mus musculus
  siRNA target sequence for Mdm4 (NM_008575.2,1222-1240).
cattccctatctacatcta

SEQ ID NO: 690352 - DNA, 19 bp, Mus musculus
  siRNA target sequence for Mdm4 (NM_008575.2,1226-1244).
ccctatctacatctaatat

SEQ ID NO: 690353 - DNA, 19 bp, Mus musculus
  siRNA target sequence for Mdm4 (NM_008575.2,1227-1245).
cctatctacatctaatatt

SEQ ID NO: 690354 - DNA, 19 bp, Mus musculus
  siRNA target sequence for Mdm4 (NM_008575.2,1316-1334).
ctgttgttaggcctaaaga

SEQ ID NO: 690355 - DNA, 19 bp, Mus musculus
  siRNA target sequence for Mdm4 (NM_008575.2,1325-1343).
ggcctaaagatggatattt

SEQ ID NO: 690356 - DNA, 19 bp, Mus musculus
  siRNA target sequence for Mdm4 (NM_008575.2,1326-1344).
gcctaaagatggatattta

SEQ ID NO: 690357 - DNA, 19 bp, Mus musculus
  siRNA target sequence for Mdm4 (NM_008575.2,1434-1452).
cgcgagagaacaaacagat

SEQ ID NO: 690358 - DNA, 19 bp, Mus musculus
  siRNA target sequence for Mdm4 (NM_008575.2,1506-1524).
cttgaagccgtgtagctta

SEQ ID NO: 690359 - DNA, 19 bp, Mus musculus
  siRNA target sequence for Mdm4 (NM_008575.2,1512-1530).
gccgtgtagcttatgtgaa

SEQ ID NO: 690360 - DNA, 19 bp, Mus musculus
  siRNA target sequence for Mdm4 (NM_008575.2,1513-1531).
ccgtgtagcttatgtgaaa

SEQ ID NO: 690361 - DNA, 19 bp, Mus musculus
  siRNA target sequence for Mdm4 (NM_008575.2,1514-1532).
cgtgtagcttatgtgaaaa

SEQ ID NO: 690362 - DNA, 19 bp, Mus musculus
  siRNA target sequence for Mdm4 (NM_008575.2,1536-1554).
gcctcgggatgggaacatt

SEQ ID NO: 690363 - DNA, 19 bp, Mus musculus
  siRNA target sequence for Mdm4 (NM_008575.2,1537-1555).
cctcgggatgggaacatta

SEQ ID NO: 690364 - DNA, 19 bp, Mus musculus
  siRNA target sequence for Mdm4 (NM_008575.2,1538-1556).
ctcgggatgggaacattat

SEQ ID NO: 690365 - DNA, 19 bp, Mus musculus
  siRNA target sequence for Mdm4 (NM_008575.2,1541-1559).
gggatgggaacattattca

SEQ ID NO: 690366 - DNA, 19 bp, Mus musculus
  siRNA target sequence for Mdm4 (NM_008575.2,1571-1589).
gccatctgacgacatgttt

SEQ ID NO: 690367 - DNA, 19 bp, Mus musculus
  siRNA target sequence for Mdm4 (NM_008575.2,1622-1640).
cttcgtgtcctgcttgtaa

SEQ ID NO: 690368 - DNA, 19 bp, Mus musculus
  siRNA target sequence for Mdm4 (NM_008575.2,1631-1649).
ctgcttgtaagaaagagat

SEQ ID NO: 690369 - DNA, 19 bp, Mus musculus
  siRNA target sequence for Mdm4 (NM_008575.2,1634-1652).
cttgtaagaaagagattca

SEQ ID NO: 690370 - DNA, 19 bp, Mus musculus
  siRNA target sequence for Mdm4 (NM_008575.2,1651-1669).
cagttggttattaaagttt

SEQ ID NO: 690371 - DNA, 19 bp, Mus musculus
  siRNA target sequence for Men1 (NM_008583.1,661-679).
ggccgacctatccatcatt

SEQ ID NO: 690372 - DNA, 19 bp, Mus musculus
  siRNA target sequence for Men1 (NM_008583.1,743-761).
cgagagggaggtgtttcta

SEQ ID NO: 690373 - DNA, 19 bp, Mus musculus
  siRNA target sequence for Men1 (NM_008583.1,759-777).
ctagtcgcgaactggtaaa

SEQ ID NO: 690374 - DNA, 19 bp, Mus musculus
  siRNA target sequence for Men1 (NM_008583.1,762-780).
gtcgcgaactggtaaaaaa

SEQ ID NO: 690375 - DNA, 19 bp, Mus musculus
  siRNA target sequence for Men1 (NM_008583.1,765-783).
gcgaactggtaaaaaaggt

SEQ ID NO: 690376 - DNA, 19 bp, Mus musculus
  siRNA target sequence for Men1 (NM_008583.1,1314-1332).
cactcaccctttatcacaa

SEQ ID NO: 690377 - DNA, 19 bp, Mus musculus
  siRNA target sequence for Men1 (NM_008583.1,1353-1371).
cctactaccaggatgaaca

SEQ ID NO: 690378 - DNA, 19 bp, Mus musculus
  siRNA target sequence for Men1 (NM_008583.1,1445-1463).
gccgacactgccactgtta

SEQ ID NO: 690379 - DNA, 19 bp, Mus musculus
  siRNA target sequence for Men1 (NM_008583.1,1446-1464).
ccgacactgccactgttat

SEQ ID NO: 690380 - DNA, 19 bp, Mus musculus
  siRNA target sequence for Men1 (NM_008583.1,1460-1478).
gttatccaagactacaact

SEQ ID NO: 690381 - DNA, 19 bp, Mus musculus
  siRNA target sequence for Men1 (NM_008583.1,1657-1675).
cctgctgcgattttatgat

SEQ ID NO: 690382 - DNA, 19 bp, Mus musculus
  siRNA target sequence for Men1 (NM_008583.1,1954-1972).
gtcgggaccacctaggaaa

SEQ ID NO: 690383 - DNA, 19 bp, Mus musculus
  siRNA target sequence for Men1 (NM_008583.1,1958-1976).
ggaccacctaggaaaacgt

SEQ ID NO: 690384 - DNA, 19 bp, Mus musculus
  siRNA target sequence for Men1 (NM_008583.1,2172-2190).
cgcaagtgcagatgaagaa

SEQ ID NO: 690385 - DNA, 19 bp, Mus musculus
  siRNA target sequence for Men1 (NM_008583.1,2215-2233).
ctacacactctctttccta

SEQ ID NO: 690386 - DNA, 19 bp, Mus musculus
  siRNA target sequence for Mlf2 (NM_145385.1,231-249).
gtcaggcggctttggatat

SEQ ID NO: 690387 - DNA, 19 bp, Mus musculus
  siRNA target sequence for Mlf2 (NM_145385.1,588-606).
gtccattgggcatcacatt

SEQ ID NO: 690388 - DNA, 19 bp, Mus musculus
  siRNA target sequence for Mlf2 (NM_145385.1,695-713).
gtgaggcagcagcatttga

SEQ ID NO: 690389 - DNA, 19 bp, Mus musculus
  siRNA target sequence for Mlf2 (NM_145385.1,729-747).
ggagacatcccgatacaga

SEQ ID NO: 690390 - DNA, 19 bp, Mus musculus
  siRNA target sequence for Mlf2 (NM_145385.1,855-873).
ccgacagtcccgtcgttat

SEQ ID NO: 690391 - DNA, 19 bp, Mus musculus
  siRNA target sequence for Mlf2 (NM_145385.1,859-877).
cagtcccgtcgttatgact

SEQ ID NO: 690392 - DNA, 19 bp, Mus musculus
  siRNA target sequence for Mphosph6 (NM_026758.1,33-51).
cgtcggagcgcaagactaa

SEQ ID NO: 690393 - DNA, 19 bp, Mus musculus
  siRNA target sequence for Mphosph6 (NM_026758.1,36-54).
cggagcgcaagactaagtt

SEQ ID NO: 690394 - DNA, 19 bp, Mus musculus
  siRNA target sequence for Mphosph6 (NM_026758.1,37-55).
ggagcgcaagactaagtta

SEQ ID NO: 690395 - DNA, 19 bp, Mus musculus
  siRNA target sequence for Mphosph6 (NM_026758.1,38-56).
gagcgcaagactaagttat

SEQ ID NO: 690396 - DNA, 19 bp, Mus musculus
  siRNA target sequence for Mphosph6 (NM_026758.1,41-59).
cgcaagactaagttatcca

SEQ ID NO: 690397 - DNA, 19 bp, Mus musculus
  siRNA target sequence for Mphosph6 (NM_026758.1,42-60).
gcaagactaagttatccaa

SEQ ID NO: 690398 - DNA, 19 bp, Mus musculus
  siRNA target sequence for Mphosph6 (NM_026758.1,65-83).
ctgctgcgcatgaagttca

SEQ ID NO: 690399 - DNA, 19 bp, Mus musculus
  siRNA target sequence for Mphosph6 (NM_026758.1,93-111).
gcctggactcggaaaccaa

SEQ ID NO: 690400 - DNA, 19 bp, Mus musculus
  siRNA target sequence for Mphosph6 (NM_026758.1,277-295).
ggttgagaagttaatgctt

SEQ ID NO: 690401 - DNA, 19 bp, Mus musculus
  siRNA target sequence for Mphosph6 (NM_026758.1,388-406).
gactttggtgggaacaatt

SEQ ID NO: 690402 - DNA, 19 bp, Mus musculus
  siRNA target sequence for Mphosph6 (NM_026758.1,402-420).
caattggaaaaaagtttgt

SEQ ID NO: 690403 - DNA, 19 bp, Mus musculus
  siRNA target sequence for Mphosph6 (NM_026758.1,429-447).
gggaccgagccaattacga

SEQ ID NO: 690404 - DNA, 19 bp, Mus musculus
  siRNA target sequence for Mphosph6 (NM_026758.1,430-448).
ggaccgagccaattacgaa

SEQ ID NO: 690405 - DNA, 19 bp, Mus musculus
  siRNA target sequence for Mphosph6 (NM_026758.1,462-480).
gaactataaaagccataaa

SEQ ID NO: 690406 - DNA, 19 bp, Mus musculus
  siRNA target sequence for Mphosph6 (NM_026758.1,474-492).
ccataaaacctaagaaaat

SEQ ID NO: 690407 - DNA, 19 bp, Mus musculus
  siRNA target sequence for Nbn (NM_013752.2,135-153).
cggctccaggagaaccata

SEQ ID NO: 690408 - DNA, 19 bp, Mus musculus
  siRNA target sequence for Nbn (NM_013752.2,144-162).
gagaaccataccgactttt

SEQ ID NO: 690409 - DNA, 19 bp, Mus musculus
  siRNA target sequence for Nbn (NM_013752.2,198-216).
gtggcattctgattgaaaa

SEQ ID NO: 690410 - DNA, 19 bp, Mus musculus
  siRNA target sequence for Nbn (NM_013752.2,223-241).
gtcaatcagtcgaaaccat

SEQ ID NO: 690411 - DNA, 19 bp, Mus musculus
  siRNA target sequence for Nbn (NM_013752.2,270-288).
ccagtttgagtcaaacaga

SEQ ID NO: 690412 - DNA, 19 bp, Mus musculus
  siRNA target sequence for Nbn (NM_013752.2,287-305).
gatgaaattcctacattaa

SEQ ID NO: 690413 - DNA, 19 bp, Mus musculus
  siRNA target sequence for Nbn (NM_013752.2,384-402).
caggagatagagttacctt

SEQ ID NO: 690414 - DNA, 19 bp, Mus musculus
  siRNA target sequence for Nbn (NM_013752.2,404-422).
ggggtgtttgaaagtaaat

SEQ ID NO: 690415 - DNA, 19 bp, Mus musculus
  siRNA target sequence for Nbn (NM_013752.2,436-454).
cgagcccttggttgtttgt

SEQ ID NO: 690416 - DNA, 19 bp, Mus musculus
  siRNA target sequence for Nbn (NM_013752.2,437-455).
gagcccttggttgtttgtt

SEQ ID NO: 690417 - DNA, 19 bp, Mus musculus
  siRNA target sequence for Nbn (NM_013752.2,439-457).
gcccttggttgtttgttct

SEQ ID NO: 690418 - DNA, 19 bp, Mus musculus
  siRNA target sequence for Nbn (NM_013752.2,440-458).
cccttggttgtttgttctt

SEQ ID NO: 690419 - DNA, 19 bp, Mus musculus
  siRNA target sequence for Nbn (NM_013752.2,453-471).
gttcttcttgtttagatgt

SEQ ID NO: 690420 - DNA, 19 bp, Mus musculus
  siRNA target sequence for Nbn (NM_013752.2,515-533).
ggacttaccgcaaacaact

SEQ ID NO: 690421 - DNA, 19 bp, Mus musculus
  siRNA target sequence for Nbn (NM_013752.2,529-547).
caactggacggaagaatgt

SEQ ID NO: 690422 - DNA, 19 bp, Mus musculus
  siRNA target sequence for Nbn (NM_013752.2,567-585).
cagttaaagtcaccattaa

SEQ ID NO: 690423 - DNA, 19 bp, Mus musculus
  siRNA target sequence for Nbn (NM_013752.2,601-619).
catttgtggacgtccaatt

SEQ ID NO: 690424 - DNA, 19 bp, Mus musculus
  siRNA target sequence for Nbn (NM_013752.2,606-624).
gtggacgtccaattataaa

SEQ ID NO: 690425 - DNA, 19 bp, Mus musculus
  siRNA target sequence for Nbn (NM_013752.2,615-633).
caattataaaaccagaata

SEQ ID NO: 690426 - DNA, 19 bp, Mus musculus
  siRNA target sequence for Nbn (NM_013752.2,626-644).
ccagaatacttttctgaat

SEQ ID NO: 690427 - DNA, 19 bp, Mus musculus
  siRNA target sequence for Nbn (NM_013752.2,654-672).
cagttgaatctaagaaaca

SEQ ID NO: 690428 - DNA, 19 bp, Mus musculus
  siRNA target sequence for Nbn (NM_013752.2,717-735).
ctattggaagtaaaagtgt

SEQ ID NO: 690429 - DNA, 19 bp, Mus musculus
  siRNA target sequence for Nbn (NM_013752.2,740-758).
ctgtcagggcgacatgaaa

SEQ ID NO: 690430 - DNA, 19 bp, Mus musculus
  siRNA target sequence for Nbn (NM_013752.2,742-760).
gtcagggcgacatgaaaga

SEQ ID NO: 690431 - DNA, 19 bp, Mus musculus
  siRNA target sequence for Nbn (NM_013752.2,744-762).
cagggcgacatgaaagaaa

SEQ ID NO: 690432 - DNA, 19 bp, Mus musculus
  siRNA target sequence for Nbn (NM_013752.2,903-921).
ccggaacctgcgttgttga

SEQ ID NO: 690433 - DNA, 19 bp, Mus musculus
  siRNA target sequence for Nbn (NM_013752.2,904-922).
cggaacctgcgttgttgat

SEQ ID NO: 690434 - DNA, 19 bp, Mus musculus
  siRNA target sequence for Nbn (NM_013752.2,912-930).
gcgttgttgatgtaggaat

SEQ ID NO: 690435 - DNA, 19 bp, Mus musculus
  siRNA target sequence for Nbn (NM_013752.2,913-931).
cgttgttgatgtaggaata

SEQ ID NO: 690436 - DNA, 19 bp, Mus musculus
  siRNA target sequence for Nbn (NM_013752.2,914-932).
gttgttgatgtaggaataa

SEQ ID NO: 690437 - DNA, 19 bp, Mus musculus
  siRNA target sequence for Nbn (NM_013752.2,917-935).
gttgatgtaggaataacga

SEQ ID NO: 690438 - DNA, 19 bp, Mus musculus
  siRNA target sequence for Nbn (NM_013752.2,920-938).
gatgtaggaataacgaata

SEQ ID NO: 690439 - DNA, 19 bp, Mus musculus
  siRNA target sequence for Nbn (NM_013752.2,939-957).
cacagctcataatttcaca

SEQ ID NO: 690440 - DNA, 19 bp, Mus musculus
  siRNA target sequence for Nbn (NM_013752.2,972-990).
ggattcatttgataatgga

SEQ ID NO: 690441 - DNA, 19 bp, Mus musculus
  siRNA target sequence for Nbn (NM_013752.2,973-991).
gattcatttgataatggat

SEQ ID NO: 690442 - DNA, 19 bp, Mus musculus
  siRNA target sequence for Nbn (NM_013752.2,1033-1051).
gattggattggctgttatt

SEQ ID NO: 690443 - DNA, 19 bp, Mus musculus
  siRNA target sequence for Nbn (NM_013752.2,1057-1075).
gactacagagaattactgt

SEQ ID NO: 690444 - DNA, 19 bp, Mus musculus
  siRNA target sequence for Nbn (NM_013752.2,1081-1099).
gcagggccagccttgtaca

SEQ ID NO: 690445 - DNA, 19 bp, Mus musculus
  siRNA target sequence for Nbn (NM_013752.2,1167-1185).
caagtgctccagtgaatat

SEQ ID NO: 690446 - DNA, 19 bp, Mus musculus
  siRNA target sequence for Nbn (NM_013752.2,1180-1198).
gaatatgaccacatacgta

SEQ ID NO: 690447 - DNA, 19 bp, Mus musculus
  siRNA target sequence for Nbn (NM_013752.2,1284-1302).
gctctaggaaactttcaca

SEQ ID NO: 690448 - DNA, 19 bp, Mus musculus
  siRNA target sequence for Nbn (NM_013752.2,1295-1313).
ctttcacaagaaacattca

SEQ ID NO: 690449 - DNA, 19 bp, Mus musculus
  siRNA target sequence for Nbn (NM_013752.2,1299-1317).
cacaagaaacattcaatat

SEQ ID NO: 690450 - DNA, 19 bp, Mus musculus
  siRNA target sequence for Nbn (NM_013752.2,1335-1353).
caagctccaaagctaacaa

SEQ ID NO: 690451 - DNA, 19 bp, Mus musculus
  siRNA target sequence for Nbn (NM_013752.2,1526-1544).
gagctgtcctcgtgcaaat

SEQ ID NO: 690452 - DNA, 19 bp, Mus musculus
  siRNA target sequence for Nbn (NM_013752.2,1528-1546).
gctgtcctcgtgcaaatca

SEQ ID NO: 690453 - DNA, 19 bp, Mus musculus
  siRNA target sequence for Nbn (NM_013752.2,1529-1547).
ctgtcctcgtgcaaatcat

SEQ ID NO: 690454 - DNA, 19 bp, Mus musculus
  siRNA target sequence for Nbn (NM_013752.2,1674-1692).
gtgggatggacatagaact

SEQ ID NO: 690455 - DNA, 19 bp, Mus musculus
  siRNA target sequence for Nbn (NM_013752.2,1992-2010).
ggtcaacaaaacatgaaat

SEQ ID NO: 690456 - DNA, 19 bp, Mus musculus
  siRNA target sequence for Nbn (NM_013752.2,1993-2011).
gtcaacaaaacatgaaata

SEQ ID NO: 690457 - DNA, 19 bp, Mus musculus
  siRNA target sequence for Nbn (NM_013752.2,2230-2248).
ccaccatgctcgaaagaat

SEQ ID NO: 690458 - DNA, 19 bp, Mus musculus
  siRNA target sequence for Nbn (NM_013752.2,2241-2259).
gaaagaataccgagttaga

SEQ ID NO: 690459 - DNA, 19 bp, Mus musculus
  siRNA target sequence for Nbn (NM_013752.2,2254-2272).
gttagaagaatggttgaaa

SEQ ID NO: 690460 - DNA, 19 bp, Mus musculus
  siRNA target sequence for Nfkbib (NM_010908.3,114-132).
cgcgtgcttggggaaaact

SEQ ID NO: 690461 - DNA, 19 bp, Mus musculus
  siRNA target sequence for Nfkbib (NM_010908.3,411-429).
ccttggggaggcatctaca

SEQ ID NO: 690462 - DNA, 19 bp, Mus musculus
  siRNA target sequence for Nfkbib (NM_010908.3,425-443).
ctacagtagagaagttgta

SEQ ID NO: 690463 - DNA, 19 bp, Mus musculus
  siRNA target sequence for Nfkbib (NM_010908.3,566-584).
gagatgcctcagataccta

SEQ ID NO: 690464 - DNA, 19 bp, Mus musculus
  siRNA target sequence for Nfkbib (NM_010908.3,697-715).
caactagaagctgaaaact

SEQ ID NO: 690465 - DNA, 19 bp, Mus musculus
  siRNA target sequence for Nfkbib (NM_010908.3,789-807).
cggagccgacctcaataaa

SEQ ID NO: 690466 - DNA, 19 bp, Mus musculus
  siRNA target sequence for Nnp1 (NM_010925.1,132-150).
ggaagctgcggaagtacat

SEQ ID NO: 690467 - DNA, 19 bp, Mus musculus
  siRNA target sequence for Nnp1 (NM_010925.1,169-187).
ggcgacaggtggtttcact

SEQ ID NO: 690468 - DNA, 19 bp, Mus musculus
  siRNA target sequence for Nnp1 (NM_010925.1,191-209).
gatgaactgctaaaagtat

SEQ ID NO: 690469 - DNA, 19 bp, Mus musculus
  siRNA target sequence for Nnp1 (NM_010925.1,206-224).
gtatggaaaggactgtttt

SEQ ID NO: 690470 - DNA, 19 bp, Mus musculus
  siRNA target sequence for Nnp1 (NM_010925.1,283-301).
ccagcttgtccatgctttt

SEQ ID NO: 690471 - DNA, 19 bp, Mus musculus
  siRNA target sequence for Nnp1 (NM_010925.1,378-396).
gactgcgcctggataagtt

SEQ ID NO: 690472 - DNA, 19 bp, Mus musculus
  siRNA target sequence for Nnp1 (NM_010925.1,380-398).
ctgcgcctggataagttct

SEQ ID NO: 690473 - DNA, 19 bp, Mus musculus
  siRNA target sequence for Nnp1 (NM_010925.1,384-402).
gcctggataagttctacat

SEQ ID NO: 690474 - DNA, 19 bp, Mus musculus
  siRNA target sequence for Nnp1 (NM_010925.1,456-474).
gggacgagagacagattga

SEQ ID NO: 690475 - DNA, 19 bp, Mus musculus
  siRNA target sequence for Nnp1 (NM_010925.1,544-562).
ccacttcctagagatcttt

SEQ ID NO: 690476 - DNA, 19 bp, Mus musculus
  siRNA target sequence for Nnp1 (NM_010925.1,644-662).
gcagcccgcactaaggatt

SEQ ID NO: 690477 - DNA, 19 bp, Mus musculus
  siRNA target sequence for Nnp1 (NM_010925.1,654-672).
ctaaggattcccaggtttt

SEQ ID NO: 690478 - DNA, 19 bp, Mus musculus
  siRNA target sequence for Nnp1 (NM_010925.1,658-676).
ggattcccaggttttgcat

SEQ ID NO: 690479 - DNA, 19 bp, Mus musculus
  siRNA target sequence for Nnp1 (NM_010925.1,663-681).
cccaggttttgcataagat

SEQ ID NO: 690480 - DNA, 19 bp, Mus musculus
  siRNA target sequence for Nnp1 (NM_010925.1,665-683).
caggttttgcataagatca

SEQ ID NO: 690481 - DNA, 19 bp, Mus musculus
  siRNA target sequence for Nnp1 (NM_010925.1,667-685).
ggttttgcataagatcatt

SEQ ID NO: 690482 - DNA, 19 bp, Mus musculus
  siRNA target sequence for Nnp1 (NM_010925.1,679-697).
gatcattcagagcatcttt

SEQ ID NO: 690483 - DNA, 19 bp, Mus musculus
  siRNA target sequence for Nnp1 (NM_010925.1,715-733).
ggctcccttggccatagaa

SEQ ID NO: 690484 - DNA, 19 bp, Mus musculus
  siRNA target sequence for Nnp1 (NM_010925.1,1018-1036).
caggaagcgcctctacaaa

SEQ ID NO: 690485 - DNA, 19 bp, Mus musculus
  siRNA target sequence for Nnp1 (NM_010925.1,1020-1038).
ggaagcgcctctacaaagt

SEQ ID NO: 690486 - DNA, 19 bp, Mus musculus
  siRNA target sequence for Nnp1 (NM_010925.1,1337-1355).
cccaagaagaggatacagt

SEQ ID NO: 690487 - DNA, 19 bp, Mus musculus
  siRNA target sequence for Paxip1 (NM_018878.1,340-358).
catcgacccgcaggttatt

SEQ ID NO: 690488 - DNA, 19 bp, Mus musculus
  siRNA target sequence for Paxip1 (NM_018878.1,403-421).
cctggcctcacacatcatt

SEQ ID NO: 690489 - DNA, 19 bp, Mus musculus
  siRNA target sequence for Paxip1 (NM_018878.1,404-422).
ctggcctcacacatcattt

SEQ ID NO: 690490 - DNA, 19 bp, Mus musculus
  siRNA target sequence for Paxip1 (NM_018878.1,406-424).
ggcctcacacatcatttca

SEQ ID NO: 690491 - DNA, 19 bp, Mus musculus
  siRNA target sequence for Paxip1 (NM_018878.1,455-473).
gcccgtgaggtctttgact

SEQ ID NO: 690492 - DNA, 19 bp, Mus musculus
  siRNA target sequence for Paxip1 (NM_018878.1,617-635).
gccctgtgggccttggtta

SEQ ID NO: 690493 - DNA, 19 bp, Mus musculus
  siRNA target sequence for Paxip1 (NM_018878.1,648-666).
gcagttgccaactaaacct

SEQ ID NO: 690494 - DNA, 19 bp, Mus musculus
  siRNA target sequence for Paxip1 (NM_018878.1,649-667).
cagttgccaactaaacctt

SEQ ID NO: 690495 - DNA, 19 bp, Mus musculus
  siRNA target sequence for Paxip1 (NM_018878.1,654-672).
gccaactaaaccttaacaa

SEQ ID NO: 690496 - DNA, 19 bp, Mus musculus
  siRNA target sequence for Paxip1 (NM_018878.1,656-674).
caactaaaccttaacaaga

SEQ ID NO: 690497 - DNA, 19 bp, Mus musculus
  siRNA target sequence for Paxip1 (NM_018878.1,702-720).
caaagggggagaaatacga

SEQ ID NO: 690498 - DNA, 19 bp, Mus musculus
  siRNA target sequence for Paxip1 (NM_018878.1,718-736).
cgagcgtgctgtcaaaaga

SEQ ID NO: 690499 - DNA, 19 bp, Mus musculus
  siRNA target sequence for Paxip1 (NM_018878.1,719-737).
gagcgtgctgtcaaaagaa

SEQ ID NO: 690500 - DNA, 19 bp, Mus musculus
  siRNA target sequence for Paxip1 (NM_018878.1,722-740).
cgtgctgtcaaaagaacaa

SEQ ID NO: 690501 - DNA, 19 bp, Mus musculus
  siRNA target sequence for Paxip1 (NM_018878.1,795-813).
ggaaggatgaagcgtttta

SEQ ID NO: 690502 - DNA, 19 bp, Mus musculus
  siRNA target sequence for Paxip1 (NM_018878.1,799-817).
ggatgaagcgttttaccat

SEQ ID NO: 690503 - DNA, 19 bp, Mus musculus
  siRNA target sequence for Paxip1 (NM_018878.1,1149-1167).
ctgttccaggggacattct

SEQ ID NO: 690504 - DNA, 19 bp, Mus musculus
  siRNA target sequence for Paxip1 (NM_018878.1,1173-1191).
ctgacatgcggggtaactt

SEQ ID NO: 690505 - DNA, 19 bp, Mus musculus
  siRNA target sequence for Paxip1 (NM_018878.1,1175-1193).
gacatgcggggtaacttga

SEQ ID NO: 690506 - DNA, 19 bp, Mus musculus
  siRNA target sequence for Paxip1 (NM_018878.1,1261-1279).
ccggacgttgcgaaacatt

SEQ ID NO: 690507 - DNA, 19 bp, Mus musculus
  siRNA target sequence for Paxip1 (NM_018878.1,1262-1280).
cggacgttgcgaaacatta

SEQ ID NO: 690508 - DNA, 19 bp, Mus musculus
  siRNA target sequence for Paxip1 (NM_018878.1,1264-1282).
gacgttgcgaaacattaca

SEQ ID NO: 690509 - DNA, 19 bp, Mus musculus
  siRNA target sequence for Paxip1 (NM_018878.1,1266-1284).
cgttgcgaaacattacaaa

SEQ ID NO: 690510 - DNA, 19 bp, Mus musculus
  siRNA target sequence for Paxip1 (NM_018878.1,1306-1324).
caaccggccatccaatgtt

SEQ ID NO: 690511 - DNA, 19 bp, Mus musculus
  siRNA target sequence for Paxip1 (NM_018878.1,1314-1332).
catccaatgttgcacatat

SEQ ID NO: 690512 - DNA, 19 bp, Mus musculus
  siRNA target sequence for Paxip1 (NM_018878.1,1322-1340).
gttgcacatatcttacaat

SEQ ID NO: 690513 - DNA, 19 bp, Mus musculus
  siRNA target sequence for Paxip1 (NM_018878.1,1342-1360).
cctttcagcacccacaaaa

SEQ ID NO: 690514 - DNA, 19 bp, Mus musculus
  siRNA target sequence for Paxip1 (NM_018878.1,1420-1438).
gtttggccaggctaaaggt

SEQ ID NO: 690515 - DNA, 19 bp, Mus musculus
  siRNA target sequence for Paxip1 (NM_018878.1,2111-2129).
gccacctggaaaaggataa

SEQ ID NO: 690516 - DNA, 19 bp, Mus musculus
  siRNA target sequence for Paxip1 (NM_018878.1,2182-2200).
cctcctctgcgcaagtcaa

SEQ ID NO: 690517 - DNA, 19 bp, Mus musculus
  siRNA target sequence for Paxip1 (NM_018878.1,2196-2214).
gtcaagtcagtagtatgta

SEQ ID NO: 690518 - DNA, 19 bp, Mus musculus
  siRNA target sequence for Paxip1 (NM_018878.1,2198-2216).
caagtcagtagtatgtaca

SEQ ID NO: 690519 - DNA, 19 bp, Mus musculus
  siRNA target sequence for Paxip1 (NM_018878.1,2298-2316).
ctcatcgagccctgcattt

SEQ ID NO: 690520 - DNA, 19 bp, Mus musculus
  siRNA target sequence for Paxip1 (NM_018878.1,2345-2363).
ccctgttcacagcatatta

SEQ ID NO: 690521 - DNA, 19 bp, Mus musculus
  siRNA target sequence for Paxip1 (NM_018878.1,2371-2389).
gactggatttgttgacaat

SEQ ID NO: 690522 - DNA, 19 bp, Mus musculus
  siRNA target sequence for Paxip1 (NM_018878.1,2480-2498).
gaaccaagcggcttgaagt

SEQ ID NO: 690523 - DNA, 19 bp, Mus musculus
  siRNA target sequence for Paxip1 (NM_018878.1,2484-2502).
caagcggcttgaagtatga

SEQ ID NO: 690524 - DNA, 19 bp, Mus musculus
  siRNA target sequence for Paxip1 (NM_018878.1,2487-2505).
gcggcttgaagtatgaaaa

SEQ ID NO: 690525 - DNA, 19 bp, Mus musculus
  siRNA target sequence for Paxip1 (NM_018878.1,2601-2619).
ggtacaccgccttcaacat

SEQ ID NO: 690526 - DNA, 19 bp, Mus musculus
  siRNA target sequence for Paxip1 (NM_018878.1,2701-2719).
gctgttgatgggtgtaaga

SEQ ID NO: 690527 - DNA, 19 bp, Mus musculus
  siRNA target sequence for Paxip1 (NM_018878.1,2702-2720).
ctgttgatgggtgtaagat

SEQ ID NO: 690528 - DNA, 19 bp, Mus musculus
  siRNA target sequence for Paxip1 (NM_018878.1,2820-2838).
cagagctgacgcctttagt

SEQ ID NO: 690529 - DNA, 19 bp, Mus musculus
  siRNA target sequence for Paxip1 (NM_018878.1,2864-2882).
caagttcagcagtacatta

SEQ ID NO: 690530 - DNA, 19 bp, Mus musculus
  siRNA target sequence for Paxip1 (NM_018878.1,2958-2976).
cacgcacagtgaaattctt

SEQ ID NO: 690531 - DNA, 19 bp, Mus musculus
  siRNA target sequence for Paxip1 (NM_018878.1,2977-2995).
gacggccatctctgtagta

SEQ ID NO: 690532 - DNA, 19 bp, Mus musculus
  siRNA target sequence for Paxip1 (NM_018878.1,2979-2997).
cggccatctctgtagtaaa

SEQ ID NO: 690533 - DNA, 19 bp, Mus musculus
  siRNA target sequence for Paxip1 (NM_018878.1,3031-3049).
cttcaagcgccagacattt

SEQ ID NO: 690534 - DNA, 19 bp, Mus musculus
  siRNA target sequence for Paxip1 (NM_018878.1,3037-3055).
gcgccagacatttatcgat

SEQ ID NO: 690535 - DNA, 19 bp, Mus musculus
  siRNA target sequence for Paxip1 (NM_018878.1,3186-3204).
gcccaagccttgcaactat

SEQ ID NO: 690536 - DNA, 19 bp, Mus musculus
  siRNA target sequence for Paxip1 (NM_018878.1,3201-3219).
ctatgaaggcaattgtaga

SEQ ID NO: 690537 - DNA, 19 bp, Mus musculus
  siRNA target sequence for Paxip1 (NM_018878.1,3299-3317).
gagatcattttaatatcct

SEQ ID NO: 690538 - DNA, 19 bp, Mus musculus
  siRNA target sequence for Paxip1 (NM_018878.1,3320-3338).
gagaacgacctgcacttat

SEQ ID NO: 690539 - DNA, 19 bp, Mus musculus
  siRNA target sequence for Paxip1 (NM_018878.1,3322-3340).
gaacgacctgcacttatgt

SEQ ID NO: 690540 - DNA, 19 bp, Mus musculus
  siRNA target sequence for Paxip1 (NM_018878.1,3334-3352).
cttatgtcgcgagtacttt

SEQ ID NO: 690541 - DNA, 19 bp, Mus musculus
  siRNA target sequence for Paxip1 (NM_018878.1,3349-3367).
ctttgccaggggaatagat

SEQ ID NO: 690542 - DNA, 19 bp, Mus musculus
  siRNA target sequence for Paxip1 (NM_018878.1,3413-3431).
ctggactatgaatcatata

SEQ ID NO: 690543 - DNA, 19 bp, Mus musculus
  siRNA target sequence for Paxip1 (NM_018878.1,3422-3440).
gaatcatataaatttaact

SEQ ID NO: 690544 - DNA, 19 bp, Mus musculus
  siRNA target sequence for Prkrir (NM_028410.1,140-158).
gtaggagagcagacttaga

SEQ ID NO: 690545 - DNA, 19 bp, Mus musculus
  siRNA target sequence for Prkrir (NM_028410.1,144-162).
gagagcagacttagaagat

SEQ ID NO: 690546 - DNA, 19 bp, Mus musculus
  siRNA target sequence for Prkrir (NM_028410.1,193-211).
cgactttgtgccaaacact

SEQ ID NO: 690547 - DNA, 19 bp, Mus musculus
  siRNA target sequence for Prkrir (NM_028410.1,208-226).
cactttgagacctctatga

SEQ ID NO: 690548 - DNA, 19 bp, Mus musculus
  siRNA target sequence for Prkrir (NM_028410.1,214-232).
gagacctctatgatttgta

SEQ ID NO: 690549 - DNA, 19 bp, Mus musculus
  siRNA target sequence for Prkrir (NM_028410.1,216-234).
gacctctatgatttgtaga

SEQ ID NO: 690550 - DNA, 19 bp, Mus musculus
  siRNA target sequence for Prkrir (NM_028410.1,219-237).
ctctatgatttgtagaact

SEQ ID NO: 690551 - DNA, 19 bp, Mus musculus
  siRNA target sequence for Prkrir (NM_028410.1,253-271).
gtccttcgagataatgcaa

SEQ ID NO: 690552 - DNA, 19 bp, Mus musculus
  siRNA target sequence for Prkrir (NM_028410.1,255-273).
ccttcgagataatgcaata

SEQ ID NO: 690553 - DNA, 19 bp, Mus musculus
  siRNA target sequence for Prkrir (NM_028410.1,259-277).
cgagataatgcaataccaa

SEQ ID NO: 690554 - DNA, 19 bp, Mus musculus
  siRNA target sequence for Prkrir (NM_028410.1,286-304).
gatcttaccagtcatttga

SEQ ID NO: 690555 - DNA, 19 bp, Mus musculus
  siRNA target sequence for Prkrir (NM_028410.1,505-523).
gagtacctcaagtctttat

SEQ ID NO: 690556 - DNA, 19 bp, Mus musculus
  siRNA target sequence for Prkrir (NM_028410.1,650-668).
gcgaggaggtcctaaggaa

SEQ ID NO: 690557 - DNA, 19 bp, Mus musculus
  siRNA target sequence for Prkrir (NM_028410.1,679-697).
gccacagcggtcaacacat

SEQ ID NO: 690558 - DNA, 19 bp, Mus musculus
  siRNA target sequence for Prkrir (NM_028410.1,897-915).
gggatttctgccgtatgaa

SEQ ID NO: 690559 - DNA, 19 bp, Mus musculus
  siRNA target sequence for Prkrir (NM_028410.1,913-931).
gaagctgatgcggagattt

SEQ ID NO: 690560 - DNA, 19 bp, Mus musculus
  siRNA target sequence for Prkrir (NM_028410.1,970-988).
ggattgaatatggagtatt

SEQ ID NO: 690561 - DNA, 19 bp, Mus musculus
  siRNA target sequence for Prkrir (NM_028410.1,989-1007).
gtcgtggtcaggcttacat

SEQ ID NO: 690562 - DNA, 19 bp, Mus musculus
  siRNA target sequence for Prkrir (NM_028410.1,1005-1023).
cattgtgtccagtggattt

SEQ ID NO: 690563 - DNA, 19 bp, Mus musculus
  siRNA target sequence for Prkrir (NM_028410.1,1039-1057).
gttgttgcttcaagacttt

SEQ ID NO: 690564 - DNA, 19 bp, Mus musculus
  siRNA target sequence for Prkrir (NM_028410.1,1078-1096).
gtctataccctctgttctt

SEQ ID NO: 690565 - DNA, 19 bp, Mus musculus
  siRNA target sequence for Prkrir (NM_028410.1,1144-1162).
gtgtccgtggctttaggaa

SEQ ID NO: 690566 - DNA, 19 bp, Mus musculus
  siRNA target sequence for Prkrir (NM_028410.1,1149-1167).
cgtggctttaggaaccatt

SEQ ID NO: 690567 - DNA, 19 bp, Mus musculus
  siRNA target sequence for Prkrir (NM_028410.1,1168-1186).
gaggaggtctgttcttttt

SEQ ID NO: 690568 - DNA, 19 bp, Mus musculus
  siRNA target sequence for Prkrir (NM_028410.1,1587-1605).
ggtcatggaaaatattgaa

SEQ ID NO: 690569 - DNA, 19 bp, Mus musculus
  siRNA target sequence for Prkrir (NM_028410.1,1606-1624).
gtttatcatgagttttggt

SEQ ID NO: 690570 - DNA, 19 bp, Mus musculus
  siRNA target sequence for Prkrir (NM_028410.1,1630-1648).
gaagccacaaatttagcaa

SEQ ID NO: 690571 - DNA, 19 bp, Mus musculus
  siRNA target sequence for Prkrir (NM_028410.1,1646-1664).
caaccaaacttgacattca

SEQ ID NO: 690572 - DNA, 19 bp, Mus musculus
  siRNA target sequence for Prkrir (NM_028410.1,1719-1737).
gctaacctctgagagttat

SEQ ID NO: 690573 - DNA, 19 bp, Mus musculus
  siRNA target sequence for Prkrir (NM_028410.1,1720-1738).
ctaacctctgagagttatt

SEQ ID NO: 690574 - DNA, 19 bp, Mus musculus
  siRNA target sequence for Prkrir (NM_028410.1,1727-1745).
ctgagagttattataaaga

SEQ ID NO: 690575 - DNA, 19 bp, Mus musculus
  siRNA target sequence for Prkrir (NM_028410.1,1729-1747).
gagagttattataaagaca

SEQ ID NO: 690576 - DNA, 19 bp, Mus musculus
  siRNA target sequence for Prkrir (NM_028410.1,1760-1778).
caacagtagagcacattat

SEQ ID NO: 690577 - DNA, 19 bp, Mus musculus
  siRNA target sequence for Prkrir (NM_028410.1,1849-1867).
gtgatggggcagctcaaat

SEQ ID NO: 690578 - DNA, 19 bp, Mus musculus
  siRNA target sequence for Prkrir (NM_028410.1,1992-2010).
cccgtccaccatttatgaa

SEQ ID NO: 690579 - DNA, 19 bp, Mus musculus
  siRNA target sequence for Prkrir (NM_028410.1,2034-2052).
gtttttccctaatgtatat

SEQ ID NO: 690580 - DNA, 19 bp, Mus musculus
  siRNA target sequence for Prkrir (NM_028410.1,2072-2090).
gtattctccctgtgatgaa

SEQ ID NO: 690581 - DNA, 19 bp, Mus musculus
  siRNA target sequence for Prkrir (NM_028410.1,2226-2244).
ggtggacacatacatcaaa

SEQ ID NO: 690582 - DNA, 19 bp, Mus musculus
  siRNA target sequence for Prkrir (NM_028410.1,2230-2248).
gacacatacatcaaactct

SEQ ID NO: 690583 - DNA, 19 bp, Mus musculus
  siRNA target sequence for Prkrir (NM_028410.1,2238-2256).
catcaaactctatacaaat

SEQ ID NO: 690584 - DNA, 19 bp, Mus musculus
  siRNA target sequence for Prkrir (NM_028410.1,2261-2279).
cagagcttcctacaattaa

SEQ ID NO: 690585 - DNA, 19 bp, Mus musculus
  siRNA target sequence for Prkrir (NM_028410.1,2263-2281).
gagcttcctacaattaatt

SEQ ID NO: 690586 - DNA, 19 bp, Mus musculus
  siRNA target sequence for Prkrir (NM_028410.1,2265-2283).
gcttcctacaattaattca

SEQ ID NO: 690587 - DNA, 19 bp, Mus musculus
  siRNA target sequence for Rbbp9 (NM_015754.1,12-30).
caacaaggcagtgattgtt

SEQ ID NO: 690588 - DNA, 19 bp, Mus musculus
  siRNA target sequence for Rbbp9 (NM_015754.1,198-216).
cgagaagaccatcatcata

SEQ ID NO: 690589 - DNA, 19 bp, Mus musculus
  siRNA target sequence for Rbbp9 (NM_015754.1,325-343).
cgtgcaagtgggtacttca

SEQ ID NO: 690590 - DNA, 19 bp, Mus musculus
  siRNA target sequence for Rbbp9 (NM_015754.1,372-390).
ggccaactgccctcacatt

SEQ ID NO: 690591 - DNA, 19 bp, Mus musculus
  siRNA target sequence for Rbbp9 (NM_015754.1,459-477).
gacgccaaattgtacaaat

SEQ ID NO: 690592 - DNA, 19 bp, Mus musculus
  siRNA target sequence for Rbbp9 (NM_015754.1,462-480).
gccaaattgtacaaattca

SEQ ID NO: 690593 - DNA, 19 bp, Mus musculus
  siRNA target sequence for Rbbp9 (NM_015754.1,479-497).
cactgaccgtggtcacttt

SEQ ID NO: 690594 - DNA, 19 bp, Mus musculus
  siRNA target sequence for Rbbp9 (NM_015754.1,483-501).
gaccgtggtcactttcaga

SEQ ID NO: 690595 - DNA, 19 bp, Mus musculus
  siRNA target sequence for Rnf144 (NM_080563.2,401-419).
ccagcggagcagatgacaa

SEQ ID NO: 690596 - DNA, 19 bp, Mus musculus
  siRNA target sequence for Rnf144 (NM_080563.2,447-465).
gtaccctgtgcctgaaaca

SEQ ID NO: 690597 - DNA, 19 bp, Mus musculus
  siRNA target sequence for Rnf144 (NM_080563.2,450-468).
ccctgtgcctgaaacagta

SEQ ID NO: 690598 - DNA, 19 bp, Mus musculus
  siRNA target sequence for Rnf144 (NM_080563.2,451-469).
cctgtgcctgaaacagtat

SEQ ID NO: 690599 - DNA, 19 bp, Mus musculus
  siRNA target sequence for Rnf144 (NM_080563.2,491-509).
gggctagaaactgcaatta

SEQ ID NO: 690600 - DNA, 19 bp, Mus musculus
  siRNA target sequence for Rnf144 (NM_080563.2,494-512).
ctagaaactgcaattagct

SEQ ID NO: 690601 - DNA, 19 bp, Mus musculus
  siRNA target sequence for Rnf144 (NM_080563.2,544-562).
ccttcaggagaatgagatt

SEQ ID NO: 690602 - DNA, 19 bp, Mus musculus
  siRNA target sequence for Rnf144 (NM_080563.2,567-585).
gtatggttgccgcagaaat

SEQ ID NO: 690603 - DNA, 19 bp, Mus musculus
  siRNA target sequence for Rnf144 (NM_080563.2,825-843).
ccagctctgctttcaagat

SEQ ID NO: 690604 - DNA, 19 bp, Mus musculus
  siRNA target sequence for Rnf144 (NM_080563.2,850-868).
gggcgacgcacccatcaaa

SEQ ID NO: 690605 - DNA, 19 bp, Mus musculus
  siRNA target sequence for Rnf144 (NM_080563.2,1066-1084).
ggtggtgggaatttttgct

SEQ ID NO: 690606 - DNA, 19 bp, Mus musculus
  siRNA target sequence for Rnf144 (NM_080563.2,1153-1171).
caaatgcaagtgcagtaaa

SEQ ID NO: 690607 - DNA, 19 bp, Mus musculus
  siRNA target sequence for Sh3bgrl3 (NM_080559.1,127-145).
ggctcccgagaaatcaagt

SEQ ID NO: 690608 - DNA, 19 bp, Mus musculus
  siRNA target sequence for Sh3bgrl3 (NM_080559.1,250-268).
gctggcaaccccaaagcta

SEQ ID NO: 690609 - DNA, 19 bp, Mus musculus
  siRNA target sequence for Sh3bgrl3 (NM_080559.1,302-320).
gtggggactatgaactctt

SEQ ID NO: 690610 - DNA, 19 bp, Mus musculus
  siRNA target sequence for Skiip (NM_025507.1,104-122).
gactgtaaaggaacaacaa

SEQ ID NO: 690611 - DNA, 19 bp, Mus musculus
  siRNA target sequence for Skiip (NM_025507.1,127-145).
ggaagatcccgccttgtat

SEQ ID NO: 690612 - DNA, 19 bp, Mus musculus
  siRNA target sequence for Skiip (NM_025507.1,703-721).
ggagaggtgggaaagatat

SEQ ID NO: 690613 - DNA, 19 bp, Mus musculus
  siRNA target sequence for Surf6 (NM_009298.2,88-106).
ggccaaggatacctatctt

SEQ ID NO: 690614 - DNA, 19 bp, Mus musculus
  siRNA target sequence for Surf6 (NM_009298.2,257-275).
gctatggatcacaagacta

SEQ ID NO: 690615 - DNA, 19 bp, Mus musculus
  siRNA target sequence for Surf6 (NM_009298.2,258-276).
ctatggatcacaagactaa

SEQ ID NO: 690616 - DNA, 19 bp, Mus musculus
  siRNA target sequence for Surf6 (NM_009298.2,316-334).
gaacccaatggtatccaaa

SEQ ID NO: 690617 - DNA, 19 bp, Mus musculus
  siRNA target sequence for Surf6 (NM_009298.2,319-337).
cccaatggtatccaaacaa

SEQ ID NO: 690618 - DNA, 19 bp, Mus musculus
  siRNA target sequence for Surf6 (NM_009298.2,321-339).
caatggtatccaaacaaga

SEQ ID NO: 690619 - DNA, 19 bp, Mus musculus
  siRNA target sequence for Surf6 (NM_009298.2,419-437).
cgacagcggctgcatgaaa

SEQ ID NO: 690620 - DNA, 19 bp, Mus musculus
  siRNA target sequence for Surf6 (NM_009298.2,420-438).
gacagcggctgcatgaaaa

SEQ ID NO: 690621 - DNA, 19 bp, Mus musculus
  siRNA target sequence for Surf6 (NM_009298.2,486-504).
ccactctcgagaaaagaca

SEQ ID NO: 690622 - DNA, 19 bp, Mus musculus
  siRNA target sequence for Surf6 (NM_009298.2,637-655).
ggaatcagggctgatcttt

SEQ ID NO: 690623 - DNA, 19 bp, Mus musculus
  siRNA target sequence for Surf6 (NM_009298.2,638-656).
gaatcagggctgatcttta

SEQ ID NO: 690624 - DNA, 19 bp, Mus musculus
  siRNA target sequence for Surf6 (NM_009298.2,642-660).
cagggctgatctttaacaa

SEQ ID NO: 690625 - DNA, 19 bp, Mus musculus
  siRNA target sequence for Surf6 (NM_009298.2,1065-1083).
ctgagcgacggctacagaa

SEQ ID NO: 690626 - DNA, 19 bp, Mus musculus
  siRNA target sequence for Thrsp (NM_009381.2,161-179).
ggagcccctgatctctata

SEQ ID NO: 690627 - DNA, 19 bp, Mus musculus
  siRNA target sequence for Thrsp (NM_009381.2,164-182).
gcccctgatctctatacct

SEQ ID NO: 690628 - DNA, 19 bp, Mus musculus
  siRNA target sequence for Thrsp (NM_009381.2,423-441).
cgcggaaataccaggaaat

SEQ ID NO: 690629 - DNA, 19 bp, Mus musculus
  siRNA target sequence for Trap1a (NM_011635.1,326-344).
gatgggaataggtgcaatt

SEQ ID NO: 690630 - DNA, 19 bp, Mus musculus
  siRNA target sequence for Trap1a (NM_011635.1,329-347).
gggaataggtgcaatttat

SEQ ID NO: 690631 - DNA, 19 bp, Mus musculus
  siRNA target sequence for Trap1a (NM_011635.1,353-371).
cggtactccctggaagaaa

SEQ ID NO: 690632 - DNA, 19 bp, Mus musculus
  siRNA target sequence for Trap1a (NM_011635.1,400-418).
cgctgttgtcacaacaagt

SEQ ID NO: 690633 - DNA, 19 bp, Mus musculus
  siRNA target sequence for Trap1a (NM_011635.1,402-420).
ctgttgtcacaacaagttt

SEQ ID NO: 690634 - DNA, 19 bp, Mus musculus
  siRNA target sequence for Trap1a (NM_011635.1,422-440).
ctggcgctccagatgttca

SEQ ID NO: 690635 - DNA, 19 bp, Mus musculus
  siRNA target sequence for Trap1a (NM_011635.1,424-442).
ggcgctccagatgttcata

SEQ ID NO: 690636 - DNA, 19 bp, Mus musculus
  siRNA target sequence for Trap1a (NM_011635.1,426-444).
cgctccagatgttcataga

SEQ ID NO: 690637 - DNA, 19 bp, Mus musculus
  siRNA target sequence for Trap1a (NM_011635.1,436-454).
gttcatagacgccctttat

SEQ ID NO: 690638 - DNA, 19 bp, Mus musculus
  siRNA target sequence for Trap1a (NM_011635.1,574-592).
cgacgacgatgccttctat

SEQ ID NO: 690639 - DNA, 19 bp, Mus musculus
  siRNA target sequence for Trap1a (NM_011635.1,577-595).
cgacgatgccttctatgat

SEQ ID NO: 690640 - DNA, 19 bp, Mus musculus
  siRNA target sequence for Trap1a (NM_011635.1,580-598).
cgatgccttctatgatgat

SEQ ID NO: 690641 - DNA, 19 bp, Mus musculus
  siRNA target sequence for Trap1a (NM_011635.1,628-646).
cctgatggatgatgaatca

SEQ ID NO: 690642 - DNA, 19 bp, Mus musculus
  siRNA target sequence for Trap1a (NM_011635.1,703-721).
gggtgctggcgctaactgt

SEQ ID NO: 690643 - DNA, 19 bp, Mus musculus
  siRNA target sequence for Trap1a (NM_011635.1,732-750).
ctggccatcatttaaggaa

SEQ ID NO: 690644 - DNA, 19 bp, Mus musculus
  siRNA target sequence for Trap1a (NM_011635.1,760-778).
gaagtgtaggatgatttat

SEQ ID NO: 690645 - DNA, 19 bp, Mus musculus
  siRNA target sequence for Utx (NM_009483.1,516-534).
cgggttcgtgaggtttcat

SEQ ID NO: 690646 - DNA, 19 bp, Mus musculus
  siRNA target sequence for Utx (NM_009483.1,519-537).
gttcgtgaggtttcatgaa

SEQ ID NO: 690647 - DNA, 19 bp, Mus musculus
  siRNA target sequence for Utx (NM_009483.1,571-589).
gctgttcgctgctacgaat

SEQ ID NO: 690648 - DNA, 19 bp, Mus musculus
  siRNA target sequence for Utx (NM_009483.1,577-595).
cgctgctacgaatctctaa

SEQ ID NO: 690649 - DNA, 19 bp, Mus musculus
  siRNA target sequence for Utx (NM_009483.1,578-596).
gctgctacgaatctctaat

SEQ ID NO: 690650 - DNA, 19 bp, Mus musculus
  siRNA target sequence for Utx (NM_009483.1,581-599).
gctacgaatctctaatctt

SEQ ID NO: 690651 - DNA, 19 bp, Mus musculus
  siRNA target sequence for Utx (NM_009483.1,582-600).
ctacgaatctctaatctta

SEQ ID NO: 690652 - DNA, 19 bp, Mus musculus
  siRNA target sequence for Utx (NM_009483.1,784-802).
cagtgggctattaaagcat

SEQ ID NO: 690653 - DNA, 19 bp, Mus musculus
  siRNA target sequence for Utx (NM_009483.1,836-854).
gtcgagccaaggaaattca

SEQ ID NO: 690654 - DNA, 19 bp, Mus musculus
  siRNA target sequence for Utx (NM_009483.1,865-883).
gggcttatgttcaaagtga

SEQ ID NO: 690655 - DNA, 19 bp, Mus musculus
  siRNA target sequence for Utx (NM_009483.1,947-965).
ctttgtccaatgctgaaat

SEQ ID NO: 690656 - DNA, 19 bp, Mus musculus
  siRNA target sequence for Utx (NM_009483.1,954-972).
caatgctgaaattcagttt

SEQ ID NO: 690657 - DNA, 19 bp, Mus musculus
  siRNA target sequence for Utx (NM_009483.1,1002-1020).
gaagtatcattctgcaaaa

SEQ ID NO: 690658 - DNA, 19 bp, Mus musculus
  siRNA target sequence for Utx (NM_009483.1,1033-1051).
caacttttgcagacagaaa

SEQ ID NO: 690659 - DNA, 19 bp, Mus musculus
  siRNA target sequence for Utx (NM_009483.1,1193-1211).
ctggccagtcctggtattt

SEQ ID NO: 690660 - DNA, 19 bp, Mus musculus
  siRNA target sequence for Utx (NM_009483.1,1216-1234).
ggaaggtgctattcaagta

SEQ ID NO: 690661 - DNA, 19 bp, Mus musculus
  siRNA target sequence for Utx (NM_009483.1,1217-1235).
gaaggtgctattcaagtat

SEQ ID NO: 690662 - DNA, 19 bp, Mus musculus
  siRNA target sequence for Utx (NM_009483.1,1413-1431).
ggatctaggcactctctat

SEQ ID NO: 690663 - DNA, 19 bp, Mus musculus
  siRNA target sequence for Utx (NM_009483.1,1417-1435).
ctaggcactctctatgaat

SEQ ID NO: 690664 - DNA, 19 bp, Mus musculus
  siRNA target sequence for Utx (NM_009483.1,1510-1528).
ggacttgcagcacgaatta

SEQ ID NO: 690665 - DNA, 19 bp, Mus musculus
  siRNA target sequence for Utx (NM_009483.1,1511-1529).
gacttgcagcacgaattaa

SEQ ID NO: 690666 - DNA, 19 bp, Mus musculus
  siRNA target sequence for Utx (NM_009483.1,1516-1534).
gcagcacgaattaagtatt

SEQ ID NO: 690667 - DNA, 19 bp, Mus musculus
  siRNA target sequence for Utx (NM_009483.1,1517-1535).
cagcacgaattaagtattt

SEQ ID NO: 690668 - DNA, 19 bp, Mus musculus
  siRNA target sequence for Utx (NM_009483.1,1720-1738).
gaacaacaaactcattcat

SEQ ID NO: 690669 - DNA, 19 bp, Mus musculus
  siRNA target sequence for Utx (NM_009483.1,1740-1758).
gtgtttgacaccacagaaa

SEQ ID NO: 690670 - DNA, 19 bp, Mus musculus
  siRNA target sequence for Utx (NM_009483.1,1742-1760).
gtttgacaccacagaaatt

SEQ ID NO: 690671 - DNA, 19 bp, Mus musculus
  siRNA target sequence for Utx (NM_009483.1,1776-1794).
gctccgagcaaacagaaat

SEQ ID NO: 690672 - DNA, 19 bp, Mus musculus
  siRNA target sequence for Utx (NM_009483.1,1777-1795).
ctccgagcaaacagaaata

SEQ ID NO: 690673 - DNA, 19 bp, Mus musculus
  siRNA target sequence for Utx (NM_009483.1,1834-1852).
gaaagtcagtttgtcttaa

SEQ ID NO: 690674 - DNA, 19 bp, Mus musculus
  siRNA target sequence for Utx (NM_009483.1,1858-1876).
caacaccaaatgagacaaa

SEQ ID NO: 690675 - DNA, 19 bp, Mus musculus
  siRNA target sequence for Utx (NM_009483.1,1890-1908).
ggtacggcctactggaatt

SEQ ID NO: 690676 - DNA, 19 bp, Mus musculus
  siRNA target sequence for Utx (NM_009483.1,2040-2058).
ggccaatggacccttttct

SEQ ID NO: 690677 - DNA, 19 bp, Mus musculus
  siRNA target sequence for Utx (NM_009483.1,2137-2155).
ggaagtggaagtaatggaa

SEQ ID NO: 690678 - DNA, 19 bp, Mus musculus
  siRNA target sequence for Utx (NM_009483.1,2230-2248).
ccgtggaaaaaccaactat

SEQ ID NO: 690679 - DNA, 19 bp, Mus musculus
  siRNA target sequence for Utx (NM_009483.1,2232-2250).
gtggaaaaaccaactatct

SEQ ID NO: 690680 - DNA, 19 bp, Mus musculus
  siRNA target sequence for Utx (NM_009483.1,2305-2323).
ggtgaacgacctctatctt

SEQ ID NO: 690681 - DNA, 19 bp, Mus musculus
  siRNA target sequence for Utx (NM_009483.1,2353-2371).
gctggctctggtattcaga

SEQ ID NO: 690682 - DNA, 19 bp, Mus musculus
  siRNA target sequence for Utx (NM_009483.1,2360-2378).
ctggtattcagaatcagaa

SEQ ID NO: 690683 - DNA, 19 bp, Mus musculus
  siRNA target sequence for Utx (NM_009483.1,2388-2406).
caccctgcctagcaattca

SEQ ID NO: 690684 - DNA, 19 bp, Mus musculus
  siRNA target sequence for Utx (NM_009483.1,2390-2408).
ccctgcctagcaattcagt

SEQ ID NO: 690685 - DNA, 19 bp, Mus musculus
  siRNA target sequence for Utx (NM_009483.1,2394-2412).
gcctagcaattcagtaaca

SEQ ID NO: 690686 - DNA, 19 bp, Mus musculus
  siRNA target sequence for Utx (NM_009483.1,2396-2414).
ctagcaattcagtaacaca

SEQ ID NO: 690687 - DNA, 19 bp, Mus musculus
  siRNA target sequence for Utx (NM_009483.1,2462-2480).
gacaacaaggcattacctt

SEQ ID NO: 690688 - DNA, 19 bp, Mus musculus
  siRNA target sequence for Utx (NM_009483.1,2464-2482).
caacaaggcattaccttaa

SEQ ID NO: 690689 - DNA, 19 bp, Mus musculus
  siRNA target sequence for Utx (NM_009483.1,2467-2485).
caaggcattaccttaacca

SEQ ID NO: 690690 - DNA, 19 bp, Mus musculus
  siRNA target sequence for Utx (NM_009483.1,2497-2515).
ccttcaggaaacacattga

SEQ ID NO: 690691 - DNA, 19 bp, Mus musculus
  siRNA target sequence for Utx (NM_009483.1,2567-2585).
gtgttgagggacttcctaa

SEQ ID NO: 690692 - DNA, 19 bp, Mus musculus
  siRNA target sequence for Utx (NM_009483.1,2623-2641).
cctagccatggagattcta

SEQ ID NO: 690693 - DNA, 19 bp, Mus musculus
  siRNA target sequence for Utx (NM_009483.1,2685-2703).
cttgttgatgggaaaagct

SEQ ID NO: 690694 - DNA, 19 bp, Mus musculus
  siRNA target sequence for Utx (NM_009483.1,2688-2706).
gttgatgggaaaagctaat

SEQ ID NO: 690695 - DNA, 19 bp, Mus musculus
  siRNA target sequence for Utx (NM_009483.1,2752-2770).
ccaactgtccatacaaaga

SEQ ID NO: 690696 - DNA, 19 bp, Mus musculus
  siRNA target sequence for Utx (NM_009483.1,2765-2783).
caaagactgataattctgt

SEQ ID NO: 690697 - DNA, 19 bp, Mus musculus
  siRNA target sequence for Utx (NM_009483.1,2928-2946).
gagccccattaaaacagat

SEQ ID NO: 690698 - DNA, 19 bp, Mus musculus
  siRNA target sequence for Utx (NM_009483.1,2966-2984).
gacctagtcctcagatcat

SEQ ID NO: 690699 - DNA, 19 bp, Mus musculus
  siRNA target sequence for Utx (NM_009483.1,3050-3068).
gtaaaaacggcctgtctaa

SEQ ID NO: 690700 - DNA, 19 bp, Mus musculus
  siRNA target sequence for Utx (NM_009483.1,3065-3083).
ctaatagtagcattctgtt

SEQ ID NO: 690701 - DNA, 19 bp, Mus musculus
  siRNA target sequence for Utx (NM_009483.1,3071-3089).
gtagcattctgttggataa

SEQ ID NO: 690702 - DNA, 19 bp, Mus musculus
  siRNA target sequence for Utx (NM_009483.1,3128-3146).
ccttgccaaaggacaagtt

SEQ ID NO: 690703 - DNA, 19 bp, Mus musculus
  siRNA target sequence for Utx (NM_009483.1,3262-3280).
ggagctcttaaattagact

SEQ ID NO: 690704 - DNA, 19 bp, Mus musculus
  siRNA target sequence for Utx (NM_009483.1,3263-3281).
gagctcttaaattagactt

SEQ ID NO: 690705 - DNA, 19 bp, Mus musculus
  siRNA target sequence for Utx (NM_009483.1,3399-3417).
ctggcactgtgaaagtaat

SEQ ID NO: 690706 - DNA, 19 bp, Mus musculus
  siRNA target sequence for Utx (NM_009483.1,3405-3423).
ctgtgaaagtaatagatct

SEQ ID NO: 690707 - DNA, 19 bp, Mus musculus
  siRNA target sequence for Utx (NM_009483.1,3409-3427).
gaaagtaatagatctcata

SEQ ID NO: 690708 - DNA, 19 bp, Mus musculus
  siRNA target sequence for Utx (NM_009483.1,3519-3537).
ctcagacagtgaatctaca

SEQ ID NO: 690709 - DNA, 19 bp, Mus musculus
  siRNA target sequence for Utx (NM_009483.1,3572-3590).
cctttaaaaccattaagtt

SEQ ID NO: 690710 - DNA, 19 bp, Mus musculus
  siRNA target sequence for Utx (NM_009483.1,3676-3694).
gtatctgcaggaaatcttt

SEQ ID NO: 690711 - DNA, 19 bp, Mus musculus
  siRNA target sequence for Utx (NM_009483.1,3698-3716).
gccacgttggtcatactat

SEQ ID NO: 690712 - DNA, 19 bp, Mus musculus
  siRNA target sequence for Utx (NM_009483.1,3699-3717).
ccacgttggtcatactata

SEQ ID NO: 690713 - DNA, 19 bp, Mus musculus
  siRNA target sequence for Utx (NM_009483.1,3720-3738).
gggcatgaacacagttcaa

SEQ ID NO: 690714 - DNA, 19 bp, Mus musculus
  siRNA target sequence for Utx (NM_009483.1,3982-4000).
ggagatctggtctggataa

SEQ ID NO: 690715 - DNA, 19 bp, Mus musculus
  siRNA target sequence for Utx (NM_009483.1,3983-4001).
gagatctggtctggataaa

SEQ ID NO: 690716 - DNA, 19 bp, Mus musculus
  siRNA target sequence for Utx (NM_009483.1,4069-4087).
cttacagcctgtcagtata

SEQ ID NO: 690717 - DNA, 19 bp, Mus musculus
  siRNA target sequence for Utx (NM_009483.1,4073-4091).
cagcctgtcagtataagtt

SEQ ID NO: 690718 - DNA, 19 bp, Mus musculus
  siRNA target sequence for Utx (NM_009483.1,4102-4120).
cgttatgaatggaacaagt

SEQ ID NO: 690719 - DNA, 19 bp, Mus musculus
  siRNA target sequence for Utx (NM_009483.1,4228-4246).
ctgagaacgctgaagcaat

SEQ ID NO: 690720 - DNA, 19 bp, Mus musculus
  siRNA target sequence for Utx (NM_009483.1,4232-4250).
gaacgctgaagcaatgtca

SEQ ID NO: 690721 - DNA, 19 bp, Mus musculus
  siRNA target sequence for Utx (NM_009483.1,4253-4271).
cattgagggaagctctaat

SEQ ID NO: 690722 - DNA, 19 bp, Mus musculus
  siRNA target sequence for Utx (NM_009483.1,4257-4275).
gagggaagctctaattgct

SEQ ID NO: 690723 - DNA, 19 bp, Mus musculus
  siRNA target sequence for Utx (NM_009483.1,4276-4294).
gcaggaaaagagatcatat

SEQ ID NO: 690724 - DNA, 19 bp, Mus musculus
  siRNA target sequence for Utx (NM_009483.1,4319-4337).
cagctcattattgtagtat

SEQ ID NO: 690725 - DNA, 19 bp, Mus musculus
  siRNA target sequence for Utx (NM_009483.1,4340-4358).
gtgaggtggaggtttttga

SEQ ID NO: 690726 - DNA, 19 bp, Mus musculus
  siRNA target sequence for Utx (NM_009483.1,4371-4389).
cactaatgagagtaattct

SEQ ID NO: 690727 - DNA, 19 bp, Mus musculus
  siRNA target sequence for Utx (NM_009483.1,4378-4396).
gagagtaattctcgaaaaa

SEQ ID NO: 690728 - DNA, 19 bp, Mus musculus
  siRNA target sequence for Utx (NM_009483.1,4382-4400).
gtaattctcgaaaaaccta

SEQ ID NO: 690729 - DNA, 19 bp, Mus musculus
  siRNA target sequence for Utx (NM_009483.1,4413-4431).
ccaagattgtgcacgaaaa

SEQ ID NO: 690730 - DNA, 19 bp, Mus musculus
  siRNA target sequence for Utx (NM_009483.1,4414-4432).
caagattgtgcacgaaaaa

SEQ ID NO: 690731 - DNA, 19 bp, Mus musculus
  siRNA target sequence for Utx (NM_009483.1,4459-4477).
gtgctagaacagtacaaaa

SEQ ID NO: 690732 - DNA, 19 bp, Mus musculus
  siRNA target sequence for Utx (NM_009483.1,4492-4510).
caagtctatgaccaattta

SEQ ID NO: 690733 - DNA, 19 bp, Mus musculus
  siRNA target sequence for Utx (NM_009483.1,4495-4513).
gtctatgaccaatttacat

SEQ ID NO: 690734 - DNA, 19 bp, Mus musculus
  siRNA target sequence for Utx (NM_009483.1,4497-4515).
ctatgaccaatttacatta

SEQ ID NO: 690735 - DNA, 19 bp, Mus musculus
  siRNA target sequence for Utx (NM_009483.1,4550-4568).
cgcctcatcttgatattgt

SEQ ID NO: 690736 - DNA, 19 bp, Mus musculus
  siRNA target sequence for Uty (NM_009484.1,631-649).
ccctgatcgactgtaatgt

SEQ ID NO: 690737 - DNA, 19 bp, Mus musculus
  siRNA target sequence for Uty (NM_009484.1,662-680).
cagtgtcgaaattcagttt

SEQ ID NO: 690738 - DNA, 19 bp, Mus musculus
  siRNA target sequence for Uty (NM_009484.1,664-682).
gtgtcgaaattcagtttca

SEQ ID NO: 690739 - DNA, 19 bp, Mus musculus
  siRNA target sequence for Uty (NM_009484.1,729-747).
gcagcctatgaacaacttt

SEQ ID NO: 690740 - DNA, 19 bp, Mus musculus
  siRNA target sequence for Uty (NM_009484.1,730-748).
cagcctatgaacaactttt

SEQ ID NO: 690741 - DNA, 19 bp, Mus musculus
  siRNA target sequence for Uty (NM_009484.1,733-751).
cctatgaacaacttttaca

SEQ ID NO: 690742 - DNA, 19 bp, Mus musculus
  siRNA target sequence for Uty (NM_009484.1,760-778).
gcttgccatcacaagtcaa

SEQ ID NO: 690743 - DNA, 19 bp, Mus musculus
  siRNA target sequence for Uty (NM_009484.1,771-789).
caagtcaaagcaactgtat

SEQ ID NO: 690744 - DNA, 19 bp, Mus musculus
  siRNA target sequence for Uty (NM_009484.1,786-804).
gtattgcaacagttaggtt

SEQ ID NO: 690745 - DNA, 19 bp, Mus musculus
  siRNA target sequence for Uty (NM_009484.1,805-823).
ggatgcaccataatatgga

SEQ ID NO: 690746 - DNA, 19 bp, Mus musculus
  siRNA target sequence for Uty (NM_009484.1,806-824).
gatgcaccataatatggat

SEQ ID NO: 690747 - DNA, 19 bp, Mus musculus
  siRNA target sequence for Uty (NM_009484.1,810-828).
caccataatatggatctaa

SEQ ID NO: 690748 - DNA, 19 bp, Mus musculus
  siRNA target sequence for Uty (NM_009484.1,821-839).
ggatctaattggagacaat

SEQ ID NO: 690749 - DNA, 19 bp, Mus musculus
  siRNA target sequence for Uty (NM_009484.1,822-840).
gatctaattggagacaata

SEQ ID NO: 690750 - DNA, 19 bp, Mus musculus
  siRNA target sequence for Uty (NM_009484.1,834-852).
gacaataccaccaaagaga

SEQ ID NO: 690751 - DNA, 19 bp, Mus musculus
  siRNA target sequence for Uty (NM_009484.1,842-860).
caccaaagagagatatgct

SEQ ID NO: 690752 - DNA, 19 bp, Mus musculus
  siRNA target sequence for Uty (NM_009484.1,844-862).
ccaaagagagatatgctat

SEQ ID NO: 690753 - DNA, 19 bp, Mus musculus
  siRNA target sequence for Uty (NM_009484.1,845-863).
caaagagagatatgctatt

SEQ ID NO: 690754 - DNA, 19 bp, Mus musculus
  siRNA target sequence for Uty (NM_009484.1,884-902).
ggaggaagatcctaattct

SEQ ID NO: 690755 - DNA, 19 bp, Mus musculus
  siRNA target sequence for Uty (NM_009484.1,924-942).
ggaaggtgttactcatgta

SEQ ID NO: 690756 - DNA, 19 bp, Mus musculus
  siRNA target sequence for Uty (NM_009484.1,1062-1080).
gccttgcaagcctatatat

SEQ ID NO: 690757 - DNA, 19 bp, Mus musculus
  siRNA target sequence for Uty (NM_009484.1,1064-1082).
cttgcaagcctatatatgt

SEQ ID NO: 690758 - DNA, 19 bp, Mus musculus
  siRNA target sequence for Uty (NM_009484.1,1117-1135).
ggatggacttaggtattct

SEQ ID NO: 690759 - DNA, 19 bp, Mus musculus
  siRNA target sequence for Uty (NM_009484.1,1124-1142).
cttaggtattctttatgaa

SEQ ID NO: 690760 - DNA, 19 bp, Mus musculus
  siRNA target sequence for Uty (NM_009484.1,1128-1146).
ggtattctttatgaatctt

SEQ ID NO: 690761 - DNA, 19 bp, Mus musculus
  siRNA target sequence for Uty (NM_009484.1,1188-1206).
gctcggagcaaatcttgta

SEQ ID NO: 690762 - DNA, 19 bp, Mus musculus
  siRNA target sequence for Uty (NM_009484.1,1189-1207).
ctcggagcaaatcttgtaa

SEQ ID NO: 690763 - DNA, 19 bp, Mus musculus
  siRNA target sequence for Uty (NM_009484.1,1191-1209).
cggagcaaatcttgtaata

SEQ ID NO: 690764 - DNA, 19 bp, Mus musculus
  siRNA target sequence for Uty (NM_009484.1,1192-1210).
ggagcaaatcttgtaataa

SEQ ID NO: 690765 - DNA, 19 bp, Mus musculus
  siRNA target sequence for Uty (NM_009484.1,1216-1234).
ctgcacttacatcaagaat

SEQ ID NO: 690766 - DNA, 19 bp, Mus musculus
  siRNA target sequence for Uty (NM_009484.1,1219-1237).
cacttacatcaagaattaa

SEQ ID NO: 690767 - DNA, 19 bp, Mus musculus
  siRNA target sequence for Uty (NM_009484.1,1412-1430).
gacagcttcacatcattca

SEQ ID NO: 690768 - DNA, 19 bp, Mus musculus
  siRNA target sequence for Uty (NM_009484.1,1456-1474).
gcttcacagcacagaaatt

SEQ ID NO: 690769 - DNA, 19 bp, Mus musculus
  siRNA target sequence for Uty (NM_009484.1,1469-1487).
gaaattacagagttttggt

SEQ ID NO: 690770 - DNA, 19 bp, Mus musculus
  siRNA target sequence for Uty (NM_009484.1,1478-1496).
gagttttggtaaagatcaa

SEQ ID NO: 690771 - DNA, 19 bp, Mus musculus
  siRNA target sequence for Uty (NM_009484.1,1532-1550).
ccaagcagctagcactaat

SEQ ID NO: 690772 - DNA, 19 bp, Mus musculus
  siRNA target sequence for Uty (NM_009484.1,1543-1561).
gcactaatgatcagaatca

SEQ ID NO: 690773 - DNA, 19 bp, Mus musculus
  siRNA target sequence for Uty (NM_009484.1,1572-1590).
catactctgcctcagaatt

SEQ ID NO: 690774 - DNA, 19 bp, Mus musculus
  siRNA target sequence for Uty (NM_009484.1,1591-1609).
caaaaggggatgctcaaaa

SEQ ID NO: 690775 - DNA, 19 bp, Mus musculus
  siRNA target sequence for Uty (NM_009484.1,1605-1623).
caaaatcacttcttacgta

SEQ ID NO: 690776 - DNA, 19 bp, Mus musculus
  siRNA target sequence for Uty (NM_009484.1,1611-1629).
cacttcttacgtattccta

SEQ ID NO: 690777 - DNA, 19 bp, Mus musculus
  siRNA target sequence for Uty (NM_009484.1,1638-1656).
gaacaaaagatcattaact

SEQ ID NO: 690778 - DNA, 19 bp, Mus musculus
  siRNA target sequence for Uty (NM_009484.1,1667-1685).
gagcaaggattcaagaagt

SEQ ID NO: 690779 - DNA, 19 bp, Mus musculus
  siRNA target sequence for Uty (NM_009484.1,1669-1687).
gcaaggattcaagaagtaa

SEQ ID NO: 690780 - DNA, 19 bp, Mus musculus
  siRNA target sequence for Uty (NM_009484.1,1674-1692).
gattcaagaagtaaatcct

SEQ ID NO: 690781 - DNA, 19 bp, Mus musculus
  siRNA target sequence for Uty (NM_009484.1,1747-1765).
caaagaagcattctaatca

SEQ ID NO: 690782 - DNA, 19 bp, Mus musculus
  siRNA target sequence for Uty (NM_009484.1,1788-1806).
ccgatttccagccttaata

SEQ ID NO: 690783 - DNA, 19 bp, Mus musculus
  siRNA target sequence for Uty (NM_009484.1,1789-1807).
cgatttccagccttaataa

SEQ ID NO: 690784 - DNA, 19 bp, Mus musculus
  siRNA target sequence for Uty (NM_009484.1,1790-1808).
gatttccagccttaataat

SEQ ID NO: 690785 - DNA, 19 bp, Mus musculus
  siRNA target sequence for Uty (NM_009484.1,1816-1834).
ctgtgtcaccagatttaat

SEQ ID NO: 690786 - DNA, 19 bp, Mus musculus
  siRNA target sequence for Uty (NM_009484.1,1818-1836).
gtgtcaccagatttaataa

SEQ ID NO: 690787 - DNA, 19 bp, Mus musculus
  siRNA target sequence for Uty (NM_009484.1,1860-1878).
gtcttagttggagaaacta

SEQ ID NO: 690788 - DNA, 19 bp, Mus musculus
  siRNA target sequence for Uty (NM_009484.1,1870-1888).
gagaaactatcgacaatgt

SEQ ID NO: 690789 - DNA, 19 bp, Mus musculus
  siRNA target sequence for Uty (NM_009484.1,1896-1914).
gacattggaacttgtaaca

SEQ ID NO: 690790 - DNA, 19 bp, Mus musculus
  siRNA target sequence for Uty (NM_009484.1,1926-1944).
gttcatctagccattcaca

SEQ ID NO: 690791 - DNA, 19 bp, Mus musculus
  siRNA target sequence for Uty (NM_009484.1,2028-2046).
cacattgttaccagcttta

SEQ ID NO: 690792 - DNA, 19 bp, Mus musculus
  siRNA target sequence for Uty (NM_009484.1,2048-2066).
cagtcctcacagtggatta

SEQ ID NO: 690793 - DNA, 19 bp, Mus musculus
  siRNA target sequence for Uty (NM_009484.1,2057-2075).
cagtggattacacacaatt

SEQ ID NO: 690794 - DNA, 19 bp, Mus musculus
  siRNA target sequence for Uty (NM_009484.1,2059-2077).
gtggattacacacaattaa

SEQ ID NO: 690795 - DNA, 19 bp, Mus musculus
  siRNA target sequence for Uty (NM_009484.1,2127-2145).
ctcagacctagatctcaaa

SEQ ID NO: 690796 - DNA, 19 bp, Mus musculus
  siRNA target sequence for Uty (NM_009484.1,2209-2227).
gtctaggtaaaaatggttt

SEQ ID NO: 690797 - DNA, 19 bp, Mus musculus
  siRNA target sequence for Uty (NM_009484.1,2214-2232).
ggtaaaaatggtttgtcta

SEQ ID NO: 690798 - DNA, 19 bp, Mus musculus
  siRNA target sequence for Uty (NM_009484.1,2230-2248).
ctaatggtcatattctctt

SEQ ID NO: 690799 - DNA, 19 bp, Mus musculus
  siRNA target sequence for Uty (NM_009484.1,2376-2394).
caattttgcatcaatccaa

SEQ ID NO: 690800 - DNA, 19 bp, Mus musculus
  siRNA target sequence for Uty (NM_009484.1,2428-2446).
gagctcttaagttagatct

SEQ ID NO: 690801 - DNA, 19 bp, Mus musculus
  siRNA target sequence for Uty (NM_009484.1,2541-2559).
gatccctctggaacaaaga

SEQ ID NO: 690802 - DNA, 19 bp, Mus musculus
  siRNA target sequence for Uty (NM_009484.1,2558-2576).
gaaaatctggcgatatgaa

SEQ ID NO: 690803 - DNA, 19 bp, Mus musculus
  siRNA target sequence for Uty (NM_009484.1,2694-2712).
gaatcaacatgttcagata

SEQ ID NO: 690804 - DNA, 19 bp, Mus musculus
  siRNA target sequence for Uty (NM_009484.1,2755-2773).
gtgggattaacattgatct

SEQ ID NO: 690805 - DNA, 19 bp, Mus musculus
  siRNA target sequence for Uty (NM_009484.1,2826-2844).
gcttttgtacgtgttgtat

SEQ ID NO: 690806 - DNA, 19 bp, Mus musculus
  siRNA target sequence for Uty (NM_009484.1,2852-2870).
gaatcttctcagtcatgtt

SEQ ID NO: 690807 - DNA, 19 bp, Mus musculus
  siRNA target sequence for Uty (NM_009484.1,2863-2881).
gtcatgttggctatactat

SEQ ID NO: 690808 - DNA, 19 bp, Mus musculus
  siRNA target sequence for Uty (NM_009484.1,2865-2883).
catgttggctatactatat

SEQ ID NO: 690809 - DNA, 19 bp, Mus musculus
  siRNA target sequence for Uty (NM_009484.1,2885-2903).
ggggatgaattcagttcaa

SEQ ID NO: 690810 - DNA, 19 bp, Mus musculus
  siRNA target sequence for Uty (NM_009484.1,3002-3020).
gtttgttgtacctgaagat

SEQ ID NO: 690811 - DNA, 19 bp, Mus musculus
  siRNA target sequence for Uty (NM_009484.1,3141-3159).
cgacctggtgatttggttt

SEQ ID NO: 690812 - DNA, 19 bp, Mus musculus
  siRNA target sequence for Uty (NM_009484.1,3147-3165).
ggtgatttggtttggataa

SEQ ID NO: 690813 - DNA, 19 bp, Mus musculus
  siRNA target sequence for Uty (NM_009484.1,3198-3216).
gggtggtgtaacaacatca

SEQ ID NO: 690814 - DNA, 19 bp, Mus musculus
  siRNA target sequence for Uty (NM_009484.1,3209-3227).
caacatcacctggaatgtt

SEQ ID NO: 690815 - DNA, 19 bp, Mus musculus
  siRNA target sequence for Uty (NM_009484.1,3258-3276).
gcagttgaacgatatcaat

SEQ ID NO: 690816 - DNA, 19 bp, Mus musculus
  siRNA target sequence for Uty (NM_009484.1,3264-3282).
gaacgatatcaatggaata

SEQ ID NO: 690817 - DNA, 19 bp, Mus musculus
  siRNA target sequence for Uty (NM_009484.1,3388-3406).
gtctcctcaagattctaaa

SEQ ID NO: 690818 - DNA, 19 bp, Mus musculus
  siRNA target sequence for Uty (NM_009484.1,3441-3459).
gcagggaaagaggttttgt

SEQ ID NO: 690819 - DNA, 19 bp, Mus musculus
  siRNA target sequence for Uty (NM_009484.1,3458-3476).
gtggcatgggaggataaat

SEQ ID NO: 690820 - DNA, 19 bp, Mus musculus
  siRNA target sequence for Uty (NM_009484.1,3460-3478).
ggcatgggaggataaatga

SEQ ID NO: 690821 - DNA, 19 bp, Mus musculus
  siRNA target sequence for Uty (NM_009484.1,3461-3479).
gcatgggaggataaatgat

SEQ ID NO: 690822 - DNA, 19 bp, Mus musculus
  siRNA target sequence for Uty (NM_009484.1,3609-3627).
ggctccggagacatgcatt

SEQ ID NO: 690823 - DNA, 19 bp, Mus musculus
  siRNA target sequence for Wasbp (NM_030729.1,236-254).
gcagggcatggaacaagat

SEQ ID NO: 690824 - DNA, 19 bp, Mus musculus
  siRNA target sequence for Wasbp (NM_030729.1,306-324).
cgagatggcggcaagtaca

SEQ ID NO: 690825 - DNA, 19 bp, Mus musculus
  siRNA target sequence for Wasbp (NM_030729.1,344-362).
ccttcagaagcttatccat

SEQ ID NO: 690826 - DNA, 19 bp, Mus musculus
  siRNA target sequence for Wasbp (NM_030729.1,479-497).
gtgtcgaactgggtttgaa

SEQ ID NO: 690827 - DNA, 19 bp, Mus musculus
  siRNA target sequence for Wasbp (NM_030729.1,710-728).
ctccatggacacactctat

SEQ ID NO: 690828 - DNA, 19 bp, Mus musculus
  siRNA target sequence for Wasbp (NM_030729.1,996-1014).
gaactcgtgcggagaaaca

SEQ ID NO: 690829 - DNA, 19 bp, Mus musculus
  siRNA target sequence for Wasbp (NM_030729.1,1015-1033).
ccggtctaagccatgagtt

SEQ ID NO: 690830 - DNA, 19 bp, Mus musculus
  siRNA target sequence for Wasbp (NM_030729.1,1016-1034).
cggtctaagccatgagtta

SEQ ID NO: 690831 - DNA, 19 bp, Mus musculus
  siRNA target sequence for Wasbp (NM_030729.1,1017-1035).
ggtctaagccatgagttat

SEQ ID NO: 690832 - DNA, 19 bp, Mus musculus
  siRNA target sequence for Wasbp (NM_030729.1,1082-1100).
cagccagctcacctatcat

SEQ ID NO: 690833 - DNA, 19 bp, Mus musculus
  siRNA target sequence for Wasbp (NM_030729.1,1205-1223).
cctggctcgaagaaaggat

SEQ ID NO: 690834 - DNA, 19 bp, Mus musculus
  siRNA target sequence for Wasbp (NM_030729.1,1309-1327).
cagatcccgaagtttgcaa

SEQ ID NO: 690835 - DNA, 19 bp, Mus musculus
  siRNA target sequence for Wasbp (NM_030729.1,1373-1391).
ggcctattaccaaatggaa

SEQ ID NO: 690836 - DNA, 19 bp, Mus musculus
  siRNA target sequence for Wasbp (NM_030729.1,1446-1464).
ctagatgcagcgatcatct

SEQ ID NO: 690837 - DNA, 19 bp, Mus musculus
  siRNA target sequence for Wasbp (NM_030729.1,1480-1498).
ccgtgctgcctgtggaatt

SEQ ID NO: 690838 - DNA, 19 bp, Mus musculus
  siRNA target sequence for Wasbp (NM_030729.1,1735-1753).
cagctcctgagcagaatgt

SEQ ID NO: 690839 - DNA, 19 bp, Mus musculus
  siRNA target sequence for Wasbp (NM_030729.1,1737-1755).
gctcctgagcagaatgtca

SEQ ID NO: 690840 - DNA, 19 bp, Mus musculus
  siRNA target sequence for Wasbp (NM_030729.1,1738-1756).
ctcctgagcagaatgtcat

SEQ ID NO: 690841 - DNA, 19 bp, Mus musculus
  siRNA target sequence for Wasbp (NM_030729.1,2134-2152).
gccagatggaccgtatgat

SEQ ID NO: 690842 - DNA, 19 bp, Mus musculus
  siRNA target sequence for Wasbp (NM_030729.1,2135-2153).
ccagatggaccgtatgatt

SEQ ID NO: 690843 - DNA, 19 bp, Mus musculus
  siRNA target sequence for Wdr13 (NM_026137.1,8-26).
cggtgtggcagcaagtatt

SEQ ID NO: 690844 - DNA, 19 bp, Mus musculus
  siRNA target sequence for Wdr13 (NM_026137.1,51-69).
ctaccgtacaccaacgttt

SEQ ID NO: 690845 - DNA, 19 bp, Mus musculus
  siRNA target sequence for Wdr13 (NM_026137.1,221-239).
gtgctcgtgcctatagcaa

SEQ ID NO: 690846 - DNA, 19 bp, Mus musculus
  siRNA target sequence for Wdr13 (NM_026137.1,455-473).
cgtcgctgagtgagaacta

SEQ ID NO: 690847 - DNA, 19 bp, Mus musculus
  siRNA target sequence for Wdr13 (NM_026137.1,485-503).
gcatgtaccatgtttttga

SEQ ID NO: 690848 - DNA, 19 bp, Mus musculus
  siRNA target sequence for Wdr13 (NM_026137.1,674-692).
ggtccctctccaatgacat

SEQ ID NO: 690849 - DNA, 19 bp, Mus musculus
  siRNA target sequence for Wdr13 (NM_026137.1,1023-1041).
caaagccaagcgactagta

SEQ ID NO: 690850 - DNA, 19 bp, Mus musculus
  siRNA target sequence for Wdr13 (NM_026137.1,1056-1074).
ccctgtaaccagcatttct

SEQ ID NO: 690851 - DNA, 19 bp, Mus musculus
  siRNA target sequence for Wdr13 (NM_026137.1,1174-1192).
gcgctacagctgaagagaa

SEQ ID NO: 690852 - DNA, 19 bp, Mus musculus
  siRNA target sequence for Wdr13 (NM_026137.1,1190-1208).
gaagcttccccattgaaca

SEQ ID NO: 690853 - DNA, 19 bp, Mus musculus
  siRNA target sequence for Wdr13 (NM_026137.1,1216-1234).
caccctgtacgcagtatct

SEQ ID NO: 690854 - DNA, 19 bp, Mus musculus
  siRNA target sequence for Wdr13 (NM_026137.1,1325-1343).
ccaaggctgctgttaacaa

SEQ ID NO: 690855 - DNA, 19 bp, Mus musculus
  siRNA target sequence for Zap3 (NM_178363.2,259-277).
gcttccgagagcaacactt

SEQ ID NO: 690856 - DNA, 19 bp, Mus musculus
  siRNA target sequence for Zap3 (NM_178363.2,439-457).
gaccagccctcagttatca

SEQ ID NO: 690857 - DNA, 19 bp, Mus musculus
  siRNA target sequence for Zap3 (NM_178363.2,442-460).
cagccctcagttatcagaa

SEQ ID NO: 690858 - DNA, 19 bp, Mus musculus
  siRNA target sequence for Zap3 (NM_178363.2,508-526).
ctccgggtttggttccaat

SEQ ID NO: 690859 - DNA, 19 bp, Mus musculus
  siRNA target sequence for Zap3 (NM_178363.2,533-551).
ggagtcccctcctgaatct

SEQ ID NO: 690860 - DNA, 19 bp, Mus musculus
  siRNA target sequence for Zap3 (NM_178363.2,611-629).
gccaccaccctcgtactat

SEQ ID NO: 690861 - DNA, 19 bp, Mus musculus
  siRNA target sequence for Zap3 (NM_178363.2,707-725).
catcccttctgggaataaa

SEQ ID NO: 690862 - DNA, 19 bp, Mus musculus
  siRNA target sequence for Zap3 (NM_178363.2,844-862).
ggtatcgacagcatctact

SEQ ID NO: 690863 - DNA, 19 bp, Mus musculus
  siRNA target sequence for Zap3 (NM_178363.2,850-868).
gacagcatctacttagttt

SEQ ID NO: 690864 - DNA, 19 bp, Mus musculus
  siRNA target sequence for Zap3 (NM_178363.2,887-905).
gcatttgccgggacataaa

SEQ ID NO: 690865 - DNA, 19 bp, Mus musculus
  siRNA target sequence for Zap3 (NM_178363.2,888-906).
catttgccgggacataaaa

SEQ ID NO: 690866 - DNA, 19 bp, Mus musculus
  siRNA target sequence for Zap3 (NM_178363.2,1101-1119).
gatgctagatttaaacagt

SEQ ID NO: 690867 - DNA, 19 bp, Mus musculus
  siRNA target sequence for Zap3 (NM_178363.2,1183-1201).
gagtcggcttccagtatca

SEQ ID NO: 690868 - DNA, 19 bp, Mus musculus
  siRNA target sequence for Zap3 (NM_178363.2,1262-1280).
ccagcactcaccacacata

SEQ ID NO: 690869 - DNA, 19 bp, Mus musculus
  siRNA target sequence for Zap3 (NM_178363.2,1302-1320).
cagctgcgacattatgaga

SEQ ID NO: 690870 - DNA, 19 bp, Mus musculus
  siRNA target sequence for Zap3 (NM_178363.2,1325-1343).
gcagcaacagtttcaacat

SEQ ID NO: 690871 - DNA, 19 bp, Mus musculus
  siRNA target sequence for Zap3 (NM_178363.2,1391-1409).
ccattcctatcctcataaa

SEQ ID NO: 690872 - DNA, 19 bp, Mus musculus
  siRNA target sequence for Zap3 (NM_178363.2,1474-1492).
cctatctccaggagaaagt

SEQ ID NO: 690873 - DNA, 19 bp, Mus musculus
  siRNA target sequence for Zap3 (NM_178363.2,1842-1860).
cccctcccaccattatctt

SEQ ID NO: 690874 - DNA, 19 bp, Mus musculus
  siRNA target sequence for Zap3 (NM_178363.2,1844-1862).
cctcccaccattatcttca

SEQ ID NO: 690875 - DNA, 19 bp, Mus musculus
  siRNA target sequence for Zap3 (NM_178363.2,1905-1923).
gggatgcctcctcagttaa

SEQ ID NO: 690876 - DNA, 19 bp, Mus musculus
  siRNA target sequence for Zap3 (NM_178363.2,1958-1976).
ctcacagatcccagagaaa

SEQ ID NO: 690877 - DNA, 19 bp, Mus musculus
  siRNA target sequence for Zap3 (NM_178363.2,2020-2038).
ccccaccttcaccatatca

SEQ ID NO: 690878 - DNA, 19 bp, Mus musculus
  siRNA target sequence for Zap3 (NM_178363.2,2053-2071).
cagaacaagtgaattccaa

SEQ ID NO: 690879 - DNA, 19 bp, Mus musculus
  siRNA target sequence for Zap3 (NM_178363.2,2187-2205).
cctcctaagggcagtttct

SEQ ID NO: 690880 - DNA, 19 bp, Mus musculus
  siRNA target sequence for Zap3 (NM_178363.2,2188-2206).
ctcctaagggcagtttctt

SEQ ID NO: 690881 - DNA, 19 bp, Mus musculus
  siRNA target sequence for Zap3 (NM_178363.2,2416-2434).
caccagcaagatcatctat

SEQ ID NO: 690882 - DNA, 19 bp, Mus musculus
  siRNA target sequence for Zap3 (NM_178363.2,2422-2440).
caagatcatctattcctat

SEQ ID NO: 690883 - DNA, 19 bp, Mus musculus
  siRNA target sequence for Zap3 (NM_178363.2,2502-2520).
cctccagttataaagtcaa

SEQ ID NO: 690884 - DNA, 19 bp, Mus musculus
  siRNA target sequence for Zap3 (NM_178363.2,2503-2521).
ctccagttataaagtcaaa

SEQ ID NO: 690885 - DNA, 19 bp, Mus musculus
  siRNA target sequence for Zap3 (NM_178363.2,2505-2523).
ccagttataaagtcaaaaa

SEQ ID NO: 690886 - DNA, 19 bp, Mus musculus
  siRNA target sequence for Zap3 (NM_178363.2,2508-2526).
gttataaagtcaaaaacct

SEQ ID NO: 690887 - DNA, 19 bp, Mus musculus
  siRNA target sequence for Zap3 (NM_178363.2,2548-2566).
gggatgaagattctttctt

SEQ ID NO: 690888 - DNA, 19 bp, Mus musculus
  siRNA target sequence for Zap3 (NM_178363.2,2575-2593).
gggatacaaatgatgatca

SEQ ID NO: 690889 - DNA, 19 bp, Mus musculus
  siRNA target sequence for Zap3 (NM_178363.2,2576-2594).
ggatacaaatgatgatcaa

SEQ ID NO: 690890 - DNA, 19 bp, Mus musculus
  siRNA target sequence for Zap3 (NM_178363.2,2595-2613).
ggactgaattcagaattta

SEQ ID NO: 690891 - DNA, 19 bp, Mus musculus
  siRNA target sequence for Zap3 (NM_178363.2,2615-2633).
gcgagacactgcaacaatt

SEQ ID NO: 690892 - DNA, 19 bp, Mus musculus
  siRNA target sequence for Zap3 (NM_178363.2,2652-2670).
ccacccccacctgttcatt

SEQ ID NO: 690893 - DNA, 19 bp, Mus musculus
  siRNA target sequence for Zap3 (NM_178363.2,2735-2753).
gcagcatacagttgactat

SEQ ID NO: 690894 - DNA, 19 bp, Mus musculus
  siRNA target sequence for Zap3 (NM_178363.2,2761-2779).
gccgagatatgcctactaa

SEQ ID NO: 690895 - DNA, 19 bp, Mus musculus
  siRNA target sequence for Zap3 (NM_178363.2,2762-2780).
ccgagatatgcctactaat

SEQ ID NO: 690896 - DNA, 19 bp, Mus musculus
  siRNA target sequence for Zap3 (NM_178363.2,2763-2781).
cgagatatgcctactaata

SEQ ID NO: 690897 - DNA, 19 bp, Mus musculus
  siRNA target sequence for Zap3 (NM_178363.2,2771-2789).
gcctactaataaagttgaa

SEQ ID NO: 690898 - DNA, 19 bp, Mus musculus
  siRNA target sequence for Zap3 (NM_178363.2,2873-2891).
gcgtgatcgctatgataga

SEQ ID NO: 690899 - DNA, 19 bp, Mus musculus
  siRNA target sequence for Zap3 (NM_178363.2,2875-2893).
gtgatcgctatgatagaga

SEQ ID NO: 690900 - DNA, 19 bp, Mus musculus
  siRNA target sequence for Zap3 (NM_178363.2,2877-2895).
gatcgctatgatagagata

SEQ ID NO: 690901 - DNA, 19 bp, Mus musculus
  siRNA target sequence for Zap3 (NM_178363.2,2881-2899).
gctatgatagagatagaga

SEQ ID NO: 690902 - DNA, 19 bp, Mus musculus
  siRNA target sequence for Zap3 (NM_178363.2,2896-2914).
gagaccgtgaaccttattt

SEQ ID NO: 690903 - DNA, 19 bp, Mus musculus
  siRNA target sequence for Zap3 (NM_178363.2,2916-2934).
gaccgtccaagtaatataa

SEQ ID NO: 690904 - DNA, 19 bp, Mus musculus
  siRNA target sequence for Zap3 (NM_178363.2,2918-2936).
ccgtccaagtaatataaca

SEQ ID NO: 690905 - DNA, 19 bp, Mus musculus
  siRNA target sequence for Zap3 (NM_178363.2,2920-2938).
gtccaagtaatataacaga

SEQ ID NO: 690906 - DNA, 19 bp, Mus musculus
  siRNA target sequence for Zap3 (NM_178363.2,2935-2953).
cagatcatcgagattttaa

SEQ ID NO: 690907 - DNA, 19 bp, Mus musculus
  siRNA target sequence for Zap3 (NM_178363.2,2960-2978).
ccgagagacacatagagat

SEQ ID NO: 690908 - DNA, 19 bp, Mus musculus
  siRNA target sequence for Zap3 (NM_178363.2,2961-2979).
cgagagacacatagagata

SEQ ID NO: 690909 - DNA, 19 bp, Mus musculus
  siRNA target sequence for Zap3 (NM_178363.2,2986-3004).
gagatcgtgttcttgacta

SEQ ID NO: 690910 - DNA, 19 bp, Mus musculus
  siRNA target sequence for Zap3 (NM_178363.2,3006-3024).
gagcgggaccgatttgaca

SEQ ID NO: 690911 - DNA, 19 bp, Mus musculus
  siRNA target sequence for Zap3 (NM_178363.2,3038-3056).
ccgagatgacaggaatcaa

SEQ ID NO: 690912 - DNA, 19 bp, Mus musculus
  siRNA target sequence for Zap3 (NM_178363.2,3039-3057).
cgagatgacaggaatcaat

SEQ ID NO: 690913 - DNA, 19 bp, Mus musculus
  siRNA target sequence for Zap3 (NM_178363.2,3047-3065).
caggaatcaatcatatcga

SEQ ID NO: 690914 - DNA, 19 bp, Mus musculus
  siRNA target sequence for Zap3 (NM_178363.2,3054-3072).
caatcatatcgagacaaaa

SEQ ID NO: 690915 - DNA, 19 bp, Mus musculus
  siRNA target sequence for Zap3 (NM_178363.2,3058-3076).
catatcgagacaaaaaaga

SEQ ID NO: 690916 - DNA, 19 bp, Mus musculus
  siRNA target sequence for Zap3 (NM_178363.2,3066-3084).
gacaaaaaagaccattctt

SEQ ID NO: 690917 - DNA, 19 bp, Mus musculus
  siRNA target sequence for Zap3 (NM_178363.2,3068-3086).
caaaaaagaccattcttca

SEQ ID NO: 690918 - DNA, 19 bp, Mus musculus
  siRNA target sequence for Zap3 (NM_178363.2,3101-3119).
gtttgacaggccatcctat

SEQ ID NO: 690919 - DNA, 19 bp, Mus musculus
  siRNA target sequence for Zap3 (NM_178363.2,3257-3275).
gaagccggagtccaaaaat

SEQ ID NO: 690920 - DNA, 19 bp, Mus musculus
  siRNA target sequence for Zap3 (NM_178363.2,3318-3336).
gaaagaattgttgttataa

SEQ ID NO: 690921 - DNA, 19 bp, Mus musculus
  siRNA target sequence for Zap3 (NM_178363.2,3358-3376).
gaaagacacatgttgcaaa

SEQ ID NO: 690922 - DNA, 19 bp, Mus musculus
  siRNA target sequence for Zap3 (NM_178363.2,3384-3402).
cgggataaggaagtagaat

SEQ ID NO: 690923 - DNA, 19 bp, Mus musculus
  siRNA target sequence for Zap3 (NM_178363.2,3385-3403).
gggataaggaagtagaatt

SEQ ID NO: 690924 - DNA, 19 bp, Mus musculus
  siRNA target sequence for Zap3 (NM_178363.2,3446-3464).
catcgctgaagtagaaaaa

SEQ ID NO: 690925 - DNA, 19 bp, Mus musculus
  siRNA target sequence for Zap3 (NM_178363.2,3580-3598).
ctctagatgacggcttttt

SEQ ID NO: 690926 - DNA, 19 bp, Mus musculus
  siRNA target sequence for Zap3 (NM_178363.2,3618-3636).
gctatcaatgacagagtta

SEQ ID NO: 690927 - DNA, 19 bp, Mus musculus
  siRNA target sequence for Zap3 (NM_178363.2,3623-3641).
caatgacagagttagacat

SEQ ID NO: 690928 - DNA, 19 bp, Mus musculus
  siRNA target sequence for Zap3 (NM_178363.2,3629-3647).
cagagttagacattttgat

SEQ ID NO: 690929 - DNA, 19 bp, Mus musculus
  siRNA target sequence for Zap3 (NM_178363.2,3655-3673).
ggagtgcagcgaaaaccaa

SEQ ID NO: 690930 - DNA, 19 bp, Mus musculus
  siRNA target sequence for Zap3 (NM_178363.2,3664-3682).
cgaaaaccaagggttttga

SEQ ID NO: 690931 - DNA, 19 bp, Mus musculus
  siRNA target sequence for Zap3 (NM_178363.2,3838-3856).
ctgcgattgaagaagtaga

SEQ ID NO: 690932 - DNA, 19 bp, Mus musculus
  siRNA target sequence for Zap3 (NM_178363.2,3841-3859).
cgattgaagaagtagagat

SEQ ID NO: 690933 - DNA, 19 bp, Mus musculus
  siRNA target sequence for Zap3 (NM_178363.2,3997-4015).
gcttgaggactggtactaa

SEQ ID NO: 690934 - DNA, 19 bp, Mus musculus
  siRNA target sequence for Zap3 (NM_178363.2,3998-4016).
cttgaggactggtactaaa

SEQ ID NO: 690935 - DNA, 19 bp, Mus musculus
  siRNA target sequence for Zap3 (NM_178363.2,4176-4194).
gtggtcggacagactgatt

SEQ ID NO: 690936 - DNA, 19 bp, Mus musculus
  siRNA target sequence for Zap3 (NM_178363.2,4236-4254).
gccctcaatcggaccaaat

SEQ ID NO: 690937 - DNA, 19 bp, Mus musculus
  siRNA target sequence for Zap3 (NM_178363.2,4237-4255).
ccctcaatcggaccaaata

SEQ ID NO: 690938 - DNA, 19 bp, Mus musculus
  siRNA target sequence for Zap3 (NM_178363.2,4238-4256).
cctcaatcggaccaaatat

SEQ ID NO: 690939 - DNA, 19 bp, Mus musculus
  siRNA target sequence for Zap3 (NM_178363.2,4239-4257).
ctcaatcggaccaaatata

SEQ ID NO: 690940 - DNA, 19 bp, Mus musculus
  siRNA target sequence for Zfp105 (NM_009544.1,329-347).
ccagccaacaagtgtacta

SEQ ID NO: 690941 - DNA, 19 bp, Mus musculus
  siRNA target sequence for Zfp105 (NM_009544.1,330-348).
cagccaacaagtgtactat

SEQ ID NO: 690942 - DNA, 19 bp, Mus musculus
  siRNA target sequence for Zfp105 (NM_009544.1,332-350).
gccaacaagtgtactatga

SEQ ID NO: 690943 - DNA, 19 bp, Mus musculus
  siRNA target sequence for Zfp105 (NM_009544.1,369-387).
cccaggggagggtccttat

SEQ ID NO: 690944 - DNA, 19 bp, Mus musculus
  siRNA target sequence for Zfp105 (NM_009544.1,515-533).
ctctggccgagagtcaaat

SEQ ID NO: 690945 - DNA, 19 bp, Mus musculus
  siRNA target sequence for Zfp105 (NM_009544.1,560-578).
caacaggtgccaaaagcaa

SEQ ID NO: 690946 - DNA, 19 bp, Mus musculus
  siRNA target sequence for Zfp105 (NM_009544.1,575-593).
gcaagaacctagagttatt

SEQ ID NO: 690947 - DNA, 19 bp, Mus musculus
  siRNA target sequence for Zfp105 (NM_009544.1,579-597).
gaacctagagttattgatt

SEQ ID NO: 690948 - DNA, 19 bp, Mus musculus
  siRNA target sequence for Zfp105 (NM_009544.1,583-601).
ctagagttattgattccta

SEQ ID NO: 690949 - DNA, 19 bp, Mus musculus
  siRNA target sequence for Zfp105 (NM_009544.1,586-604).
gagttattgattcctaaaa

SEQ ID NO: 690950 - DNA, 19 bp, Mus musculus
  siRNA target sequence for Zfp105 (NM_009544.1,666-684).
ccttcaaggacctgagtta

SEQ ID NO: 690951 - DNA, 19 bp, Mus musculus
  siRNA target sequence for Zfp105 (NM_009544.1,681-699).
gttaggagaatcttgtgaa

SEQ ID NO: 690952 - DNA, 19 bp, Mus musculus
  siRNA target sequence for Zfp105 (NM_009544.1,769-787).
gactgtccattgtctgaaa

SEQ ID NO: 690953 - DNA, 19 bp, Mus musculus
  siRNA target sequence for Zfp105 (NM_009544.1,773-791).
gtccattgtctgaaagctt

SEQ ID NO: 690954 - DNA, 19 bp, Mus musculus
  siRNA target sequence for Zfp105 (NM_009544.1,794-812).
gagacgaggaagaatccaa

SEQ ID NO: 690955 - DNA, 19 bp, Mus musculus
  siRNA target sequence for Zfp105 (NM_009544.1,839-857).
gatctactcctggtaaaaa

SEQ ID NO: 690956 - DNA, 19 bp, Mus musculus
  siRNA target sequence for Zfp105 (NM_009544.1,842-860).
ctactcctggtaaaaatca

SEQ ID NO: 690957 - DNA, 19 bp, Mus musculus
  siRNA target sequence for Zfp105 (NM_009544.1,874-892).
gggcaaaaaccgtttacat

SEQ ID NO: 690958 - DNA, 19 bp, Mus musculus
  siRNA target sequence for Zfp105 (NM_009544.1,990-1008).
gaaggccttcattcaaagt

SEQ ID NO: 690959 - DNA, 19 bp, Mus musculus
  siRNA target sequence for Zfp105 (NM_009544.1,1051-1069).
ccctatgtctgtggaaaat

SEQ ID NO: 690960 - DNA, 19 bp, Mus musculus
  siRNA target sequence for Zfp105 (NM_009544.1,1201-1219).
gtccatataaccgagaaat

SEQ ID NO: 690961 - DNA, 19 bp, Mus musculus
  siRNA target sequence for Zfp105 (NM_009544.1,1204-1222).
catataaccgagaaatgct

SEQ ID NO: 690962 - DNA, 19 bp, Mus musculus
  siRNA target sequence for Zfp105 (NM_009544.1,1421-1439).
gttgtttttctcaccttat

SEQ ID NO: 690963 - DNA, 19 bp, Mus musculus
  siRNA target sequence for Zfp105 (NM_009544.1,1498-1516).
gcctttagtcagctatctt

SEQ ID NO: 690964 - DNA, 19 bp, Mus musculus
  siRNA target sequence for Zfp105 (NM_009544.1,1544-1562).
gtggagatctcccttatgt

SEQ ID NO: 690965 - DNA, 19 bp, Mus musculus
  siRNA target sequence for Zfp105 (NM_009544.1,1587-1605).
cacttgtagctcataccta

SEQ ID NO: 690966 - DNA, 19 bp, Mus musculus
  siRNA target sequence for Zfp105 (NM_009544.1,1602-1620).
cctactcattcatcaaaga

SEQ ID NO: 690967 - DNA, 19 bp, Mus musculus
  siRNA target sequence for Zfp105 (NM_009544.1,1745-1763).
gtgcagcttttatttctaa

SEQ ID NO: 690968 - DNA, 19 bp, Mus musculus
  siRNA target sequence for Zfp146 (NM_011980.1,717-735).
cttcagccacaaatcgaat

SEQ ID NO: 690969 - DNA, 19 bp, Mus musculus
  siRNA target sequence for Zfp146 (NM_011980.1,723-741).
ccacaaatcgaatcttaca

SEQ ID NO: 690970 - DNA, 19 bp, Mus musculus
  siRNA target sequence for Zfp146 (NM_011980.1,906-924).
gcttacgcatcagaaaatt

SEQ ID NO: 690971 - DNA, 19 bp, Mus musculus
  siRNA target sequence for Zfp146 (NM_011980.1,1074-1092).
gacggagcacgagaagatt

SEQ ID NO: 690972 - DNA, 19 bp, Mus musculus
  siRNA target sequence for Zfp146 (NM_011980.1,1076-1094).
cggagcacgagaagattca

SEQ ID NO: 690973 - DNA, 19 bp, Mus musculus
  siRNA target sequence for Zfp207 (NM_011751.1,140-158).
gccgtggtgctggtattgt

SEQ ID NO: 690974 - DNA, 19 bp, Mus musculus
  siRNA target sequence for Zfp207 (NM_011751.1,141-159).
ccgtggtgctggtattgta

SEQ ID NO: 690975 - DNA, 19 bp, Mus musculus
  siRNA target sequence for Zfp207 (NM_011751.1,142-160).
cgtggtgctggtattgtaa

SEQ ID NO: 690976 - DNA, 19 bp, Mus musculus
  siRNA target sequence for Zfp207 (NM_011751.1,151-169).
ggtattgtaacagagattt

SEQ ID NO: 690977 - DNA, 19 bp, Mus musculus
  siRNA target sequence for Zfp207 (NM_011751.1,220-238).
gccatatttgtcataagaa

SEQ ID NO: 690978 - DNA, 19 bp, Mus musculus
  siRNA target sequence for Zfp207 (NM_011751.1,247-265).
caggacctggtttagcaat

SEQ ID NO: 690979 - DNA, 19 bp, Mus musculus
  siRNA target sequence for Zfp207 (NM_011751.1,250-268).
gacctggtttagcaattca

SEQ ID NO: 690980 - DNA, 19 bp, Mus musculus
  siRNA target sequence for Zfp207 (NM_011751.1,292-310).
ccatagatgcagtaccaaa

SEQ ID NO: 690981 - DNA, 19 bp, Mus musculus
  siRNA target sequence for Zfp207 (NM_011751.1,293-311).
catagatgcagtaccaaat

SEQ ID NO: 690982 - DNA, 19 bp, Mus musculus
  siRNA target sequence for Zfp207 (NM_011751.1,319-337).
ctgggagaacagacataga

SEQ ID NO: 690983 - DNA, 19 bp, Mus musculus
  siRNA target sequence for Zfp207 (NM_011751.1,321-339).
gggagaacagacatagagt

SEQ ID NO: 690984 - DNA, 19 bp, Mus musculus
  siRNA target sequence for Zfp207 (NM_011751.1,322-340).
ggagaacagacatagagtt

SEQ ID NO: 690985 - DNA, 19 bp, Mus musculus
  siRNA target sequence for Zfp207 (NM_011751.1,388-406).
gacggcgacttcttgaaca

SEQ ID NO: 690986 - DNA, 19 bp, Mus musculus
  siRNA target sequence for Zfp207 (NM_011751.1,392-410).
gcgacttcttgaacagaaa

SEQ ID NO: 690987 - DNA, 19 bp, Mus musculus
  siRNA target sequence for Zfp207 (NM_011751.1,393-411).
cgacttcttgaacagaaaa

SEQ ID NO: 690988 - DNA, 19 bp, Mus musculus
  siRNA target sequence for Zfp207 (NM_011751.1,431-449).
gaaacaacaagatgattct

SEQ ID NO: 690989 - DNA, 19 bp, Mus musculus
  siRNA target sequence for Zfp207 (NM_011751.1,468-486).
gaatctgcagcctcaactt

SEQ ID NO: 690990 - DNA, 19 bp, Mus musculus
  siRNA target sequence for Zfp207 (NM_011751.1,507-525).
caacctcagcaaggttata

SEQ ID NO: 690991 - DNA, 19 bp, Mus musculus
  siRNA target sequence for Zfp207 (NM_011751.1,676-694).
gaaaatacacccagtcatt

SEQ ID NO: 690992 - DNA, 19 bp, Mus musculus
  siRNA target sequence for Zfp207 (NM_011751.1,882-900).
ccacagcctccagttacta

SEQ ID NO: 690993 - DNA, 19 bp, Mus musculus
  siRNA target sequence for Zfp207 (NM_011751.1,945-963).
ggacctgttggtacagatt

SEQ ID NO: 690994 - DNA, 19 bp, Mus musculus
  siRNA target sequence for Zfp207 (NM_011751.1,946-964).
gacctgttggtacagattt

SEQ ID NO: 690995 - DNA, 19 bp, Mus musculus
  siRNA target sequence for Zfp207 (NM_011751.1,948-966).
cctgttggtacagatttta

SEQ ID NO: 690996 - DNA, 19 bp, Mus musculus
  siRNA target sequence for Zfp207 (NM_011751.1,1044-1062).
gcgtcaaccactagtacaa

SEQ ID NO: 690997 - DNA, 19 bp, Mus musculus
  siRNA target sequence for Zfp207 (NM_011751.1,1126-1144).
ccagtgcaaccagtaagtt

SEQ ID NO: 690998 - DNA, 19 bp, Mus musculus
  siRNA target sequence for Zfp207 (NM_011751.1,1129-1147).
gtgcaaccagtaagttgat

SEQ ID NO: 690999 - DNA, 19 bp, Mus musculus
  siRNA target sequence for Zfp207 (NM_011751.1,1148-1166).
ccatccagatgaggatata

SEQ ID NO: 691000 - DNA, 19 bp, Mus musculus
  siRNA target sequence for Zfp207 (NM_011751.1,1149-1167).
catccagatgaggatatat

SEQ ID NO: 691001 - DNA, 19 bp, Mus musculus
  siRNA target sequence for Zfp207 (NM_011751.1,1153-1171).
cagatgaggatatatcact

SEQ ID NO: 691002 - DNA, 19 bp, Mus musculus
  siRNA target sequence for Zfp207 (NM_011751.1,1183-1201).
gggcacagttacctaaata

SEQ ID NO: 691003 - DNA, 19 bp, Mus musculus
  siRNA target sequence for Zfp207 (NM_011751.1,1184-1202).
ggcacagttacctaaatat

SEQ ID NO: 691004 - DNA, 19 bp, Mus musculus
  siRNA target sequence for Zfp207 (NM_011751.1,1255-1273).
gaccaattgggggtatgat

SEQ ID NO: 691005 - DNA, 19 bp, Mus musculus
  siRNA target sequence for Zfp319 (NM_024467.3,1063-1081).
gtctgcggtgtttgcaaaa

SEQ ID NO: 691006 - DNA, 19 bp, Mus musculus
  siRNA target sequence for Zfp319 (NM_024467.3,1707-1725).
gtgccccatgggcttcaaa

SEQ ID NO: 691007 - DNA, 19 bp, Mus musculus
  siRNA target sequence for Zfp319 (NM_024467.3,1709-1727).
gccccatgggcttcaaaca

SEQ ID NO: 691008 - DNA, 19 bp, Mus musculus
  siRNA target sequence for Zfp339 (NM_026924.2,515-533).
ccggttgccaggtcaaaaa

SEQ ID NO: 691009 - DNA, 19 bp, Mus musculus
  siRNA target sequence for Zfp339 (NM_026924.2,521-539).
gccaggtcaaaaatcaagt

SEQ ID NO: 691010 - DNA, 19 bp, Mus musculus
  siRNA target sequence for Zfp339 (NM_026924.2,522-540).
ccaggtcaaaaatcaagtt

SEQ ID NO: 691011 - DNA, 19 bp, Mus musculus
  siRNA target sequence for Zfp339 (NM_026924.2,523-541).
caggtcaaaaatcaagttt

SEQ ID NO: 691012 - DNA, 19 bp, Mus musculus
  siRNA target sequence for Zfp339 (NM_026924.2,555-573).
gcgacaactctgtgattca

SEQ ID NO: 691013 - DNA, 19 bp, Mus musculus
  siRNA target sequence for Zfp339 (NM_026924.2,557-575).
gacaactctgtgattcaca

SEQ ID NO: 691014 - DNA, 19 bp, Mus musculus
  siRNA target sequence for Zfp339 (NM_026924.2,617-635).
ctcaaccgtcaccttaagt

SEQ ID NO: 691015 - DNA, 19 bp, Mus musculus
  siRNA target sequence for Zfp339 (NM_026924.2,783-801).
ccttggagtcccacctaaa

SEQ ID NO: 691016 - DNA, 19 bp, Mus musculus
  siRNA target sequence for Zfp339 (NM_026924.2,839-857).
cagcgtcgcgacaaactct

SEQ ID NO: 691017 - DNA, 19 bp, Mus musculus
  siRNA target sequence for Zfp403 (NM_153144.1,303-321).
gatggaatttcctgacaat

SEQ ID NO: 691018 - DNA, 19 bp, Mus musculus
  siRNA target sequence for Zfp403 (NM_153144.1,345-363).
gaataatggtgcacaacta

SEQ ID NO: 691019 - DNA, 19 bp, Mus musculus
  siRNA target sequence for Zfp403 (NM_153144.1,355-373).
gcacaactaaagcagttta

SEQ ID NO: 691020 - DNA, 19 bp, Mus musculus
  siRNA target sequence for Zfp403 (NM_153144.1,380-398).
gacacagtatgcttaagca

SEQ ID NO: 691021 - DNA, 19 bp, Mus musculus
  siRNA target sequence for Zfp403 (NM_153144.1,386-404).
gtatgcttaagcaacaaga

SEQ ID NO: 691022 - DNA, 19 bp, Mus musculus
  siRNA target sequence for Zfp403 (NM_153144.1,390-408).
gcttaagcaacaagattta

SEQ ID NO: 691023 - DNA, 19 bp, Mus musculus
  siRNA target sequence for Zfp403 (NM_153144.1,396-414).
gcaacaagatttaagtatt

SEQ ID NO: 691024 - DNA, 19 bp, Mus musculus
  siRNA target sequence for Zfp403 (NM_153144.1,492-510).
ggaacgcctcttttctcaa

SEQ ID NO: 691025 - DNA, 19 bp, Mus musculus
  siRNA target sequence for Zfp403 (NM_153144.1,553-571).
gggcccaagggagtactat

SEQ ID NO: 691026 - DNA, 19 bp, Mus musculus
  siRNA target sequence for Zfp403 (NM_153144.1,557-575).
ccaagggagtactatctct

SEQ ID NO: 691027 - DNA, 19 bp, Mus musculus
  siRNA target sequence for Zfp403 (NM_153144.1,625-643).
gtacatgggtccaaactaa

SEQ ID NO: 691028 - DNA, 19 bp, Mus musculus
  siRNA target sequence for Zfp403 (NM_153144.1,651-669).
gatagatgctattccaaaa

SEQ ID NO: 691029 - DNA, 19 bp, Mus musculus
  siRNA target sequence for Zfp403 (NM_153144.1,655-673).
gatgctattccaaaaagta

SEQ ID NO: 691030 - DNA, 19 bp, Mus musculus
  siRNA target sequence for Zfp403 (NM_153144.1,658-676).
gctattccaaaaagtaaga

SEQ ID NO: 691031 - DNA, 19 bp, Mus musculus
  siRNA target sequence for Zfp403 (NM_153144.1,686-704).
gatgtcagttacactcttt

SEQ ID NO: 691032 - DNA, 19 bp, Mus musculus
  siRNA target sequence for Zfp403 (NM_153144.1,691-709).
cagttacactctttagata

SEQ ID NO: 691033 - DNA, 19 bp, Mus musculus
  siRNA target sequence for Zfp403 (NM_153144.1,693-711).
gttacactctttagataca

SEQ ID NO: 691034 - DNA, 19 bp, Mus musculus
  siRNA target sequence for Zfp403 (NM_153144.1,751-769).
gtcagttcagagaagttaa

SEQ ID NO: 691035 - DNA, 19 bp, Mus musculus
  siRNA target sequence for Zfp403 (NM_153144.1,760-778).
gagaagttaagtacagata

SEQ ID NO: 691036 - DNA, 19 bp, Mus musculus
  siRNA target sequence for Zfp403 (NM_153144.1,807-825).
cagcaagtgtaggatcatt

SEQ ID NO: 691037 - DNA, 19 bp, Mus musculus
  siRNA target sequence for Zfp403 (NM_153144.1,809-827).
gcaagtgtaggatcatttt

SEQ ID NO: 691038 - DNA, 19 bp, Mus musculus
  siRNA target sequence for Zfp403 (NM_153144.1,815-833).
gtaggatcattttccatta

SEQ ID NO: 691039 - DNA, 19 bp, Mus musculus
  siRNA target sequence for Zfp403 (NM_153144.1,819-837).
gatcattttccattatgga

SEQ ID NO: 691040 - DNA, 19 bp, Mus musculus
  siRNA target sequence for Zfp403 (NM_153144.1,897-915).
ggaatgcagggatgaagta

SEQ ID NO: 691041 - DNA, 19 bp, Mus musculus
  siRNA target sequence for Zfp403 (NM_153144.1,902-920).
gcagggatgaagtagtttt

SEQ ID NO: 691042 - DNA, 19 bp, Mus musculus
  siRNA target sequence for Zfp403 (NM_153144.1,937-955).
cttttagaaacactagaaa

SEQ ID NO: 691043 - DNA, 19 bp, Mus musculus
  siRNA target sequence for Zfp403 (NM_153144.1,961-979).
cttcgaaagcacaggtttt

SEQ ID NO: 691044 - DNA, 19 bp, Mus musculus
  siRNA target sequence for Zfp403 (NM_153144.1,970-988).
cacaggttttgcactgatt

SEQ ID NO: 691045 - DNA, 19 bp, Mus musculus
  siRNA target sequence for Zfp403 (NM_153144.1,974-992).
ggttttgcactgattgcaa

SEQ ID NO: 691046 - DNA, 19 bp, Mus musculus
  siRNA target sequence for Zfp403 (NM_153144.1,975-993).
gttttgcactgattgcaaa

SEQ ID NO: 691047 - DNA, 19 bp, Mus musculus
  siRNA target sequence for Zfp403 (NM_153144.1,1000-1018).
gtcctccgagcatacaata

SEQ ID NO: 691048 - DNA, 19 bp, Mus musculus
  siRNA target sequence for Zfp403 (NM_153144.1,1033-1051).
cttgactgcagcaaagaga

SEQ ID NO: 691049 - DNA, 19 bp, Mus musculus
  siRNA target sequence for Zfp403 (NM_153144.1,1064-1082).
ctgccctgtatgaaggatt

SEQ ID NO: 691050 - DNA, 19 bp, Mus musculus
  siRNA target sequence for Zfp403 (NM_153144.1,1179-1197).
gtatgagcgaagagaaaga

SEQ ID NO: 691051 - DNA, 19 bp, Mus musculus
  siRNA target sequence for Zfp403 (NM_153144.1,1198-1216).
catgctaagacaatagata

SEQ ID NO: 691052 - DNA, 19 bp, Mus musculus
  siRNA target sequence for Zfp403 (NM_153144.1,1269-1287).
gcatcggatctggcaaaaa

SEQ ID NO: 691053 - DNA, 19 bp, Mus musculus
  siRNA target sequence for Zfp403 (NM_153144.1,1308-1326).
gtggcagatgctcttttat

SEQ ID NO: 691054 - DNA, 19 bp, Mus musculus
  siRNA target sequence for Zfp403 (NM_153144.1,1310-1328).
ggcagatgctcttttatct

SEQ ID NO: 691055 - DNA, 19 bp, Mus musculus
  siRNA target sequence for Zfp403 (NM_153144.1,1329-1347).
cggtgttgacgctttacgt

SEQ ID NO: 691056 - DNA, 19 bp, Mus musculus
  siRNA target sequence for Zfp403 (NM_153144.1,1330-1348).
ggtgttgacgctttacgta

SEQ ID NO: 691057 - DNA, 19 bp, Mus musculus
  siRNA target sequence for Zfp403 (NM_153144.1,1331-1349).
gtgttgacgctttacgtaa

SEQ ID NO: 691058 - DNA, 19 bp, Mus musculus
  siRNA target sequence for Zfp403 (NM_153144.1,1369-1387).
gaaaaagtgcagggtatta

SEQ ID NO: 691059 - DNA, 19 bp, Mus musculus
  siRNA target sequence for Zfp403 (NM_153144.1,1389-1407).
ccgcttggaacaactttgt

SEQ ID NO: 691060 - DNA, 19 bp, Mus musculus
  siRNA target sequence for Zfp403 (NM_153144.1,1608-1626).
cgagacttgtgtagaagta

SEQ ID NO: 691061 - DNA, 19 bp, Mus musculus
  siRNA target sequence for Zfp403 (NM_153144.1,1661-1679).
cgagcagtggcaatctttt

SEQ ID NO: 691062 - DNA, 19 bp, Mus musculus
  siRNA target sequence for Zfp403 (NM_153144.1,1682-1700).
ggtcccctaaaataaagaa

SEQ ID NO: 691063 - DNA, 19 bp, Mus musculus
  siRNA target sequence for Zfp403 (NM_153144.1,1703-1721).
gtatgtctccacactgtaa

SEQ ID NO: 691064 - DNA, 19 bp, Mus musculus
  siRNA target sequence for Zfp403 (NM_153144.1,1707-1725).
gtctccacactgtaatggt

SEQ ID NO: 691065 - DNA, 19 bp, Mus musculus
  siRNA target sequence for Zfp403 (NM_153144.1,1723-1741).
ggtagtgactgtggatatt

SEQ ID NO: 691066 - DNA, 19 bp, Mus musculus
  siRNA target sequence for Zfp403 (NM_153144.1,1792-1810).
gcctgcaccgagggaattt

SEQ ID NO: 691067 - DNA, 19 bp, Mus musculus
  siRNA target sequence for Zfp403 (NM_153144.1,1794-1812).
ctgcaccgagggaatttgt

SEQ ID NO: 691068 - DNA, 19 bp, Mus musculus
  siRNA target sequence for Zfp403 (NM_153144.1,1796-1814).
gcaccgagggaatttgtaa

SEQ ID NO: 691069 - DNA, 19 bp, Mus musculus
  siRNA target sequence for Zfp403 (NM_153144.1,1885-1903).
gttgaatgttgggcaaatt

SEQ ID NO: 691070 - DNA, 19 bp, Mus musculus
  siRNA target sequence for Zfp403 (NM_153144.1,1959-1977).
gttgaaatgcgatgaacat

SEQ ID NO: 691071 - DNA, 19 bp, Mus musculus
  siRNA target sequence for Zfp403 (NM_153144.1,1968-1986).
cgatgaacatatccaaaaa

SEQ ID NO: 691072 - DNA, 19 bp, Mus musculus
  siRNA target sequence for Zfp403 (NM_153144.1,2112-2130).
gcagccattgccttggttt

SEQ ID NO: 691073 - DNA, 19 bp, Mus musculus
  siRNA target sequence for Zfp403 (NM_153144.1,2123-2141).
cttggtttgagcataggaa

SEQ ID NO: 691074 - DNA, 19 bp, Mus musculus
  siRNA target sequence for Zfp403 (NM_153144.1,2201-2219).
gtgccaagagcttagttga

SEQ ID NO: 691075 - DNA, 19 bp, Mus musculus
  siRNA target sequence for Zfp403 (NM_153144.1,2205-2223).
caagagcttagttgaactt

SEQ ID NO: 691076 - DNA, 19 bp, Mus musculus
  siRNA target sequence for Zfp403 (NM_153144.1,2208-2226).
gagcttagttgaacttctt

SEQ ID NO: 691077 - DNA, 19 bp, Mus musculus
  siRNA target sequence for Zfp403 (NM_153144.1,2211-2229).
cttagttgaacttcttgat

SEQ ID NO: 691078 - DNA, 19 bp, Mus musculus
  siRNA target sequence for Zfp403 (NM_153144.1,2221-2239).
cttcttgatgagtctgaat

SEQ ID NO: 691079 - DNA, 19 bp, Mus musculus
  siRNA target sequence for Zfp403 (NM_153144.1,2294-2312).
ctaataaccagtctttcta

SEQ ID NO: 691080 - DNA, 19 bp, Mus musculus
  siRNA target sequence for Zfp403 (NM_153144.1,2302-2320).
cagtctttctacagcaata

SEQ ID NO: 691081 - DNA, 19 bp, Mus musculus
  siRNA target sequence for Zfp403 (NM_153144.1,2366-2384).
gccgcttaaatgatcacaa

SEQ ID NO: 691082 - DNA, 19 bp, Mus musculus
  siRNA target sequence for Zfp403 (NM_153144.1,2380-2398).
cacaagaggcccgtttgta

SEQ ID NO: 691083 - DNA, 19 bp, Mus musculus
  siRNA target sequence for Zfp403 (NM_153144.1,2382-2400).
caagaggcccgtttgtagt

SEQ ID NO: 691084 - DNA, 19 bp, Mus musculus
  siRNA target sequence for Zfp403 (NM_153144.1,2409-2427).
gacaacggctggagcaaat

SEQ ID NO: 691085 - DNA, 19 bp, Mus musculus
  siRNA target sequence for Zfp422 (NM_026057.1,160-178).
gcccaaagggggtatttct

SEQ ID NO: 691086 - DNA, 19 bp, Mus musculus
  siRNA target sequence for Zfp422 (NM_026057.1,317-335).
gctaaatgctccaagagtt

SEQ ID NO: 691087 - DNA, 19 bp, Mus musculus
  siRNA target sequence for Zfp422 (NM_026057.1,351-369).
cgctctttcagcacaagaa

SEQ ID NO: 691088 - DNA, 19 bp, Mus musculus
  siRNA target sequence for Zfp422 (NM_026057.1,401-419).
gccgattgtgggaaaagtt

SEQ ID NO: 691089 - DNA, 19 bp, Mus musculus
  siRNA target sequence for Zfp422 (NM_026057.1,726-744).
cacataagaggggcaaaaa

SEQ ID NO: 691090 - DNA, 19 bp, Mus musculus
  siRNA target sequence for Zfp422 (NM_026057.1,827-845).
gccacttccggccttttta

SEQ ID NO: 691091 - DNA, 19 bp, Mus musculus
  siRNA target sequence for Cenph (NM_021886.1,236-254).
cagctcttagaatataagt

SEQ ID NO: 691092 - DNA, 19 bp, Mus musculus
  siRNA target sequence for Cenph (NM_021886.1,259-277).
gatcgacacaaatgaagaa

SEQ ID NO: 691093 - DNA, 19 bp, Mus musculus
  siRNA target sequence for Cenph (NM_021886.1,282-300).
ctccagaacagattatgca

SEQ ID NO: 691094 - DNA, 19 bp, Mus musculus
  siRNA target sequence for Cenph (NM_021886.1,384-402).
cactgagcaggatgaaact

SEQ ID NO: 691095 - DNA, 19 bp, Mus musculus
  siRNA target sequence for Cenph (NM_021886.1,407-425).
gttgcacttcgggataaca

SEQ ID NO: 691096 - DNA, 19 bp, Mus musculus
  siRNA target sequence for Cenph (NM_021886.1,433-451).
catgggacctgagaattgt

SEQ ID NO: 691097 - DNA, 19 bp, Mus musculus
  siRNA target sequence for Cenph (NM_021886.1,485-503).
ctacaaaagttaataatga

SEQ ID NO: 691098 - DNA, 19 bp, Mus musculus
  siRNA target sequence for Cenph (NM_021886.1,539-557).
ctgcttgatgtcagaaaga

SEQ ID NO: 691099 - DNA, 19 bp, Mus musculus
  siRNA target sequence for Cenph (NM_021886.1,569-587).
ctaaagcaagcttcaagaa

SEQ ID NO: 691100 - DNA, 19 bp, Mus musculus
  siRNA target sequence for Cenph (NM_021886.1,578-596).
gcttcaagaagtaagcttt

SEQ ID NO: 691101 - DNA, 19 bp, Mus musculus
  siRNA target sequence for Cenph (NM_021886.1,588-606).
gtaagcttttagaaataca

SEQ ID NO: 691102 - DNA, 19 bp, Mus musculus
  siRNA target sequence for Cenph (NM_021886.1,700-718).
gatcactacagttgttcaa

SEQ ID NO: 691103 - DNA, 19 bp, Mus musculus
  siRNA target sequence for Cenph (NM_021886.1,703-721).
cactacagttgttcaacat

SEQ ID NO: 691104 - DNA, 19 bp, Mus musculus
  siRNA target sequence for Cenph (NM_021886.1,723-741).
cattccagggccttatttt

SEQ ID NO: 691105 - DNA, 19 bp, Mus musculus
  siRNA target sequence for Odf3 (NM_027019.1,294-312).
ctcttggcggagaattgct

SEQ ID NO: 691106 - DNA, 19 bp, Mus musculus
  siRNA target sequence for Odf3 (NM_027019.1,687-705).
gttcaagtgaccaagttca

SEQ ID NO: 691107 - DNA, 19 bp, Mus musculus
  siRNA target sequence for A230072O16Rik (NM_176966.2,208-226).
ggagttcaggaaaattctt

SEQ ID NO: 691108 - DNA, 19 bp, Mus musculus
  siRNA target sequence for A230072O16Rik (NM_176966.2,263-281).
gcttgtactctatattgga

SEQ ID NO: 691109 - DNA, 19 bp, Mus musculus
  siRNA target sequence for A230072O16Rik (NM_176966.2,264-282).
cttgtactctatattggat

SEQ ID NO: 691110 - DNA, 19 bp, Mus musculus
  siRNA target sequence for A230072O16Rik (NM_176966.2,346-364).
cagagtcagctcagtcaat

SEQ ID NO: 691111 - DNA, 19 bp, Mus musculus
  siRNA target sequence for A230072O16Rik (NM_176966.2,348-366).
gagtcagctcagtcaatgt

SEQ ID NO: 691112 - DNA, 19 bp, Mus musculus
  siRNA target sequence for A230072O16Rik (NM_176966.2,354-372).
gctcagtcaatgtaacaat

SEQ ID NO: 691113 - DNA, 19 bp, Mus musculus
  siRNA target sequence for A230072O16Rik (NM_176966.2,390-408).
ggaactactagaatttgca

SEQ ID NO: 691114 - DNA, 19 bp, Mus musculus
  siRNA target sequence for A230072O16Rik (NM_176966.2,391-409).
gaactactagaatttgcaa

SEQ ID NO: 691115 - DNA, 19 bp, Mus musculus
  siRNA target sequence for A230072O16Rik (NM_176966.2,407-425).
caacaaggtcattagatat

SEQ ID NO: 691116 - DNA, 19 bp, Mus musculus
  siRNA target sequence for A230072O16Rik (NM_176966.2,413-431).
ggtcattagatattaaaga

SEQ ID NO: 691117 - DNA, 19 bp, Mus musculus
  siRNA target sequence for A230072O16Rik (NM_176966.2,414-432).
gtcattagatattaaagaa

SEQ ID NO: 691118 - DNA, 19 bp, Mus musculus
  siRNA target sequence for D030046N04Rik (NM_173189.2,469-487).
gtggcctatgttgaagtat

SEQ ID NO: 691119 - DNA, 19 bp, Mus musculus
  siRNA target sequence for D030046N04Rik (NM_173189.2,582-600).
gacccatgtgatcttcaaa

SEQ ID NO: 691120 - DNA, 19 bp, Mus musculus
  siRNA target sequence for D030046N04Rik (NM_173189.2,584-602).
cccatgtgatcttcaaaga

SEQ ID NO: 691121 - DNA, 19 bp, Mus musculus
  siRNA target sequence for D030046N04Rik (NM_173189.2,656-674).
ccgtcctctgggttgaaaa

SEQ ID NO: 691122 - DNA, 19 bp, Mus musculus
  siRNA target sequence for D030046N04Rik (NM_173189.2,658-676).
gtcctctgggttgaaaaat

SEQ ID NO: 691123 - DNA, 19 bp, Mus musculus
  siRNA target sequence for D030046N04Rik (NM_173189.2,661-679).
ctctgggttgaaaaatgca

SEQ ID NO: 691124 - DNA, 19 bp, Mus musculus
  siRNA target sequence for D030046N04Rik (NM_173189.2,692-710).
cacttgttgatgagtcttt

SEQ ID NO: 691125 - DNA, 19 bp, Mus musculus
  siRNA target sequence for D030046N04Rik (NM_173189.2,719-737).
cagtgaataccgatgaaca

SEQ ID NO: 691126 - DNA, 19 bp, Mus musculus
  siRNA target sequence for D030046N04Rik (NM_173189.2,723-741).
gaataccgatgaacatcta

SEQ ID NO: 691127 - DNA, 19 bp, Mus musculus
  siRNA target sequence for D030046N04Rik (NM_173189.2,728-746).
ccgatgaacatctaccaaa

SEQ ID NO: 691128 - DNA, 19 bp, Mus musculus
  siRNA target sequence for D030046N04Rik (NM_173189.2,733-751).
gaacatctaccaaacttaa

SEQ ID NO: 691129 - DNA, 19 bp, Mus musculus
  siRNA target sequence for D030046N04Rik (NM_173189.2,924-942).
gtacagctccccagtgaat

SEQ ID NO: 691130 - DNA, 19 bp, Mus musculus
  siRNA target sequence for D030046N04Rik (NM_173189.2,1074-1092).
ccaacctttgagttcagat

SEQ ID NO: 691131 - DNA, 19 bp, Mus musculus
  siRNA target sequence for D030046N04Rik (NM_173189.2,1106-1124).
gtggctcccactcatcttt

SEQ ID NO: 691132 - DNA, 19 bp, Mus musculus
  siRNA target sequence for D030046N04Rik (NM_173189.2,1159-1177).
ggaagatctgctaatgaga

SEQ ID NO: 691133 - DNA, 19 bp, Mus musculus
  siRNA target sequence for D030046N04Rik (NM_173189.2,1160-1178).
gaagatctgctaatgagat

SEQ ID NO: 691134 - DNA, 19 bp, Mus musculus
  siRNA target sequence for D030046N04Rik (NM_173189.2,1212-1230).
gagggcaagcagtttttat

SEQ ID NO: 691135 - DNA, 19 bp, Mus musculus
  siRNA target sequence for D030046N04Rik (NM_173189.2,1406-1424).
ctacgatgtccatcataga

SEQ ID NO: 691136 - DNA, 19 bp, Mus musculus
  siRNA target sequence for D030046N04Rik (NM_173189.2,1409-1427).
cgatgtccatcatagaaga

SEQ ID NO: 691137 - DNA, 19 bp, Mus musculus
  siRNA target sequence for D030046N04Rik (NM_173189.2,1540-1558).
ctggcaatacagttattca

SEQ ID NO: 691138 - DNA, 19 bp, Mus musculus
  siRNA target sequence for D030046N04Rik (NM_173189.2,1578-1596).
gtccacaatcagactcatt

SEQ ID NO: 691139 - DNA, 19 bp, Mus musculus
  siRNA target sequence for D030046N04Rik (NM_173189.2,1611-1629).
cgttgaggcttcttcctat

SEQ ID NO: 691140 - DNA, 19 bp, Mus musculus
  siRNA target sequence for D030046N04Rik (NM_173189.2,1762-1780).
gaaatgtgtgattttacct

SEQ ID NO: 691141 - DNA, 19 bp, Mus musculus
  siRNA target sequence for D030046N04Rik (NM_173189.2,1806-1824).
cagcagcattagtgactta

SEQ ID NO: 691142 - DNA, 19 bp, Mus musculus
  siRNA target sequence for D030046N04Rik (NM_173189.2,1808-1826).
gcagcattagtgacttaat

SEQ ID NO: 691143 - DNA, 19 bp, Mus musculus
  siRNA target sequence for D030046N04Rik (NM_173189.2,1858-1876).
gtcaaggaggaagtgaata

SEQ ID NO: 691144 - DNA, 19 bp, Mus musculus
  siRNA target sequence for D030046N04Rik (NM_173189.2,1860-1878).
caaggaggaagtgaataca

SEQ ID NO: 691145 - DNA, 19 bp, Mus musculus
  siRNA target sequence for D030046N04Rik (NM_173189.2,1990-2008).
cctgacaccctgtctagtt

SEQ ID NO: 691146 - DNA, 19 bp, Mus musculus
  siRNA target sequence for D030046N04Rik (NM_173189.2,2016-2034).
ccacatcacacccttgaaa

SEQ ID NO: 691147 - DNA, 19 bp, Mus musculus
  siRNA target sequence for D030046N04Rik (NM_173189.2,2122-2140).
gatgaagtacacatctgta

SEQ ID NO: 691148 - DNA, 19 bp, Mus musculus
  siRNA target sequence for D030046N04Rik (NM_173189.2,2151-2169).
gggagaggattgtaatgta

SEQ ID NO: 691149 - DNA, 19 bp, Mus musculus
  siRNA target sequence for D030046N04Rik (NM_173189.2,2155-2173).
gaggattgtaatgtagaaa

SEQ ID NO: 691150 - DNA, 19 bp, Mus musculus
  siRNA target sequence for D030046N04Rik (NM_173189.2,2193-2211).
gaacatagccacaggatat

SEQ ID NO: 691151 - DNA, 19 bp, Mus musculus
  siRNA target sequence for D030046N04Rik (NM_173189.2,2196-2214).
catagccacaggatatagt

SEQ ID NO: 691152 - DNA, 19 bp, Mus musculus
  siRNA target sequence for D030046N04Rik (NM_173189.2,2200-2218).
gccacaggatatagtgaaa

SEQ ID NO: 691153 - DNA, 19 bp, Mus musculus
  siRNA target sequence for D030046N04Rik (NM_173189.2,2207-2225).
gatatagtgaaagtgttaa

SEQ ID NO: 691154 - DNA, 19 bp, Mus musculus
  siRNA target sequence for D030046N04Rik (NM_173189.2,2388-2406).
cacactgaaaggcttttca

SEQ ID NO: 691155 - DNA, 19 bp, Mus musculus
  siRNA target sequence for D030046N04Rik (NM_173189.2,2499-2517).
ctggattctttcttacgaa

SEQ ID NO: 691156 - DNA, 19 bp, Mus musculus
  siRNA target sequence for D030046N04Rik (NM_173189.2,2510-2528).
cttacgaatgggtactgtt

SEQ ID NO: 691157 - DNA, 19 bp, Mus musculus
  siRNA target sequence for D030046N04Rik (NM_173189.2,2515-2533).
gaatgggtactgttgtctt

SEQ ID NO: 691158 - DNA, 19 bp, Mus musculus
  siRNA target sequence for D030046N04Rik (NM_173189.2,2563-2581).
ccttttgaactctctgaaa

SEQ ID NO: 691159 - DNA, 19 bp, Mus musculus
  siRNA target sequence for D030046N04Rik (NM_173189.2,2604-2622).
ccgacttgaacgccattta

SEQ ID NO: 691160 - DNA, 19 bp, Mus musculus
  siRNA target sequence for D030046N04Rik (NM_173189.2,2605-2623).
cgacttgaacgccatttat

SEQ ID NO: 691161 - DNA, 19 bp, Mus musculus
  siRNA target sequence for D030046N04Rik (NM_173189.2,2608-2626).
cttgaacgccatttatcta

SEQ ID NO: 691162 - DNA, 19 bp, Mus musculus
  siRNA target sequence for D030046N04Rik (NM_173189.2,2642-2660).
gaaccctctttgctaatca

SEQ ID NO: 691163 - DNA, 19 bp, Mus musculus
  siRNA target sequence for D030046N04Rik (NM_173189.2,2653-2671).
gctaatcagccgaagatgt

SEQ ID NO: 691164 - DNA, 19 bp, Mus musculus
  siRNA target sequence for D030046N04Rik (NM_173189.2,2654-2672).
ctaatcagccgaagatgtt

SEQ ID NO: 691165 - DNA, 19 bp, Mus musculus
  siRNA target sequence for D030046N04Rik (NM_173189.2,2692-2710).
cctcccagagccaaactgt

SEQ ID NO: 691166 - DNA, 19 bp, Mus musculus
  siRNA target sequence for D030046N04Rik (NM_173189.2,2819-2837).
cagagaaatgggtcttaga

SEQ ID NO: 691167 - DNA, 19 bp, Mus musculus
  siRNA target sequence for D230014K01Rik (NM_172573.1,147-165).
ggatcaacgaggatcaaga

SEQ ID NO: 691168 - DNA, 19 bp, Mus musculus
  siRNA target sequence for D230014K01Rik (NM_172573.1,195-213).
gtttcaccccggatccttt

SEQ ID NO: 691169 - DNA, 19 bp, Mus musculus
  siRNA target sequence for D230014K01Rik (NM_172573.1,209-227).
cctttaccagctagatatt

SEQ ID NO: 691170 - DNA, 19 bp, Mus musculus
  siRNA target sequence for D230014K01Rik (NM_172573.1,210-228).
ctttaccagctagatatta

SEQ ID NO: 691171 - DNA, 19 bp, Mus musculus
  siRNA target sequence for D230014K01Rik (NM_172573.1,215-233).
ccagctagatattatgaca

SEQ ID NO: 691172 - DNA, 19 bp, Mus musculus
  siRNA target sequence for D230014K01Rik (NM_172573.1,216-234).
cagctagatattatgacaa

SEQ ID NO: 691173 - DNA, 19 bp, Mus musculus
  siRNA target sequence for D230014K01Rik (NM_172573.1,304-322).
ggaggatggcttcaatgta

SEQ ID NO: 691174 - DNA, 19 bp, Mus musculus
  siRNA target sequence for D230014K01Rik (NM_172573.1,468-486).
ggcagtatatcgacatctt

SEQ ID NO: 691175 - DNA, 19 bp, Mus musculus
  siRNA target sequence for D230014K01Rik (NM_172573.1,692-710).
gacggctggctcatcaaca

SEQ ID NO: 691176 - DNA, 19 bp, Mus musculus
  siRNA target sequence for D230014K01Rik (NM_172573.1,847-865).
gtggcaggatgaactgaat

SEQ ID NO: 691177 - DNA, 19 bp, Mus musculus
  siRNA target sequence for D230014K01Rik (NM_172573.1,894-912).
gcgatggcttctttaccaa

SEQ ID NO: 691178 - DNA, 19 bp, Mus musculus
  siRNA target sequence for D230014K01Rik (NM_172573.1,899-917).
ggcttctttaccaactata

SEQ ID NO: 691179 - DNA, 19 bp, Mus musculus
  siRNA target sequence for D230014K01Rik (NM_172573.1,1016-1034).
gtcggaggccgttttgata

SEQ ID NO: 691180 - DNA, 19 bp, Mus musculus
  siRNA target sequence for D230014K01Rik (NM_172573.1,1018-1036).
cggaggccgttttgatact

SEQ ID NO: 691181 - DNA, 19 bp, Mus musculus
  siRNA target sequence for D230014K01Rik (NM_172573.1,1048-1066).
ggagctgatccgcaaacat

SEQ ID NO: 691182 - DNA, 19 bp, Mus musculus
  siRNA target sequence for D230014K01Rik (NM_172573.1,1303-1321).
gcccctctttggtgaacat

SEQ ID NO: 691183 - DNA, 19 bp, Mus musculus
  siRNA target sequence for D230014K01Rik (NM_172573.1,1305-1323).
ccctctttggtgaacataa

SEQ ID NO: 691184 - DNA, 19 bp, Mus musculus
  siRNA target sequence for D230014K01Rik (NM_172573.1,1489-1507).
gtccatggtgtacaagttt

SEQ ID NO: 691185 - DNA, 19 bp, Mus musculus
  siRNA target sequence for D230014K01Rik (NM_172573.1,1492-1510).
catggtgtacaagtttgaa

SEQ ID NO: 691186 - DNA, 19 bp, Mus musculus
  siRNA target sequence for D230014K01Rik (NM_172573.1,1504-1522).
gtttgaaggctcaacagat

SEQ ID NO: 691187 - DNA, 19 bp, Mus musculus
  siRNA target sequence for D230014K01Rik (NM_172573.1,1578-1596).
gcatgttggtgttaaatga

SEQ ID NO: 691188 - DNA, 19 bp, Mus musculus
  siRNA target sequence for D230014K01Rik (NM_172573.1,1701-1719).
gctgctatgaggtaaacct

SEQ ID NO: 691189 - DNA, 19 bp, Mus musculus
  siRNA target sequence for D230014K01Rik (NM_172573.1,1702-1720).
ctgctatgaggtaaacctt

SEQ ID NO: 691190 - DNA, 19 bp, Mus musculus
  siRNA target sequence for Ms4a4b (NM_021718.1,131-149).
gctgtgccttcaaagaatt

SEQ ID NO: 691191 - DNA, 19 bp, Mus musculus
  siRNA target sequence for Ms4a4b (NM_021718.1,297-315).
ccacttcagtgatgttaat

SEQ ID NO: 691192 - DNA, 19 bp, Mus musculus
  siRNA target sequence for Ms4a4b (NM_021718.1,300-318).
cttcagtgatgttaatggt

SEQ ID NO: 691193 - DNA, 19 bp, Mus musculus
  siRNA target sequence for Ms4a4b (NM_021718.1,395-413).
ctgatcgttgccagtctaa

SEQ ID NO: 691194 - DNA, 19 bp, Mus musculus
  siRNA target sequence for Ms4a4b (NM_021718.1,397-415).
gatcgttgccagtctaact

SEQ ID NO: 691195 - DNA, 19 bp, Mus musculus
  siRNA target sequence for Ms4a4b (NM_021718.1,664-682).
gatggcacccccaatgaca

SEQ ID NO: 691196 - DNA, 19 bp, Mus musculus
  siRNA target sequence for Slc24a4 (NM_172152.1,77-95).
gcctccggcctctttggaa

SEQ ID NO: 691197 - DNA, 19 bp, Mus musculus
  siRNA target sequence for Slc24a4 (NM_172152.1,137-155).
ctggacacgtggcgaaata

SEQ ID NO: 691198 - DNA, 19 bp, Mus musculus
  siRNA target sequence for Slc24a4 (NM_172152.1,139-157).
ggacacgtggcgaaataga

SEQ ID NO: 691199 - DNA, 19 bp, Mus musculus
  siRNA target sequence for Slc24a4 (NM_172152.1,140-158).
gacacgtggcgaaatagaa

SEQ ID NO: 691200 - DNA, 19 bp, Mus musculus
  siRNA target sequence for Slc24a4 (NM_172152.1,142-160).
cacgtggcgaaatagaaaa

SEQ ID NO: 691201 - DNA, 19 bp, Mus musculus
  siRNA target sequence for Slc24a4 (NM_172152.1,144-162).
cgtggcgaaatagaaaatt

SEQ ID NO: 691202 - DNA, 19 bp, Mus musculus
  siRNA target sequence for Slc24a4 (NM_172152.1,264-282).
gcgctgtcctgctacacat

SEQ ID NO: 691203 - DNA, 19 bp, Mus musculus
  siRNA target sequence for Slc24a4 (NM_172152.1,341-359).
ccatccctagagaagatct

SEQ ID NO: 691204 - DNA, 19 bp, Mus musculus
  siRNA target sequence for Slc24a4 (NM_172152.1,582-600).
gccgtgactctgtgtacta

SEQ ID NO: 691205 - DNA, 19 bp, Mus musculus
  siRNA target sequence for Slc24a4 (NM_172152.1,617-635).
gtgctcattgcgttcatat

SEQ ID NO: 691206 - DNA, 19 bp, Mus musculus
  siRNA target sequence for Slc24a4 (NM_172152.1,676-694).
catcctgtacgtgttttat

SEQ ID NO: 691207 - DNA, 19 bp, Mus musculus
  siRNA target sequence for Slc24a4 (NM_172152.1,802-820).
cctctatgatggtagctat

SEQ ID NO: 691208 - DNA, 19 bp, Mus musculus
  siRNA target sequence for Slc24a4 (NM_172152.1,873-891).
gcaaaacccccgtggttat

SEQ ID NO: 691209 - DNA, 19 bp, Mus musculus
  siRNA target sequence for Slc24a4 (NM_172152.1,886-904).
ggttatggtggatgagatt

SEQ ID NO: 691210 - DNA, 19 bp, Mus musculus
  siRNA target sequence for Slc24a4 (NM_172152.1,941-959).
gctggcctgcgcatcatga

SEQ ID NO: 691211 - DNA, 19 bp, Mus musculus
  siRNA target sequence for Slc24a4 (NM_172152.1,942-960).
ctggcctgcgcatcatgat

SEQ ID NO: 691212 - DNA, 19 bp, Mus musculus
  siRNA target sequence for Slc24a4 (NM_172152.1,944-962).
ggcctgcgcatcatgatca

SEQ ID NO: 691213 - DNA, 19 bp, Mus musculus
  siRNA target sequence for Slc24a4 (NM_172152.1,955-973).
catgatcaccaacaagttt

SEQ ID NO: 691214 - DNA, 19 bp, Mus musculus
  siRNA target sequence for Slc24a4 (NM_172152.1,999-1017).
ccagcaggatcataattaa

SEQ ID NO: 691215 - DNA, 19 bp, Mus musculus
  siRNA target sequence for Slc24a4 (NM_172152.1,1000-1018).
cagcaggatcataattaat

SEQ ID NO: 691216 - DNA, 19 bp, Mus musculus
  siRNA target sequence for Slc24a4 (NM_172152.1,1002-1020).
gcaggatcataattaatga

SEQ ID NO: 691217 - DNA, 19 bp, Mus musculus
  siRNA target sequence for Slc24a4 (NM_172152.1,1003-1021).
caggatcataattaatgaa

SEQ ID NO: 691218 - DNA, 19 bp, Mus musculus
  siRNA target sequence for Slc24a4 (NM_172152.1,1019-1037).
gaacgacagaggttgatca

SEQ ID NO: 691219 - DNA, 19 bp, Mus musculus
  siRNA target sequence for Slc24a4 (NM_172152.1,1387-1405).
gtggctggtgactattatt

SEQ ID NO: 691220 - DNA, 19 bp, Mus musculus
  siRNA target sequence for Slc24a4 (NM_172152.1,1390-1408).
gctggtgactattattgga

SEQ ID NO: 691221 - DNA, 19 bp, Mus musculus
  siRNA target sequence for Slc24a4 (NM_172152.1,1453-1471).
ggcggcaggcacaagtgtt

SEQ ID NO: 691222 - DNA, 19 bp, Mus musculus
  siRNA target sequence for Slc24a4 (NM_172152.1,1475-1493).
gactgcatggcaagcttaa

SEQ ID NO: 691223 - DNA, 19 bp, Mus musculus
  siRNA target sequence for Slc24a4 (NM_172152.1,1479-1497).
gcatggcaagcttaattgt

SEQ ID NO: 691224 - DNA, 19 bp, Mus musculus
  siRNA target sequence for Slc24a4 (NM_172152.1,1515-1533).
gagacatggcagtctctaa

SEQ ID NO: 691225 - DNA, 19 bp, Mus musculus
  siRNA target sequence for Slc24a4 (NM_172152.1,1540-1558).
cggaagcaacgtgtttgat

SEQ ID NO: 691226 - DNA, 19 bp, Mus musculus
  siRNA target sequence for Slc24a4 (NM_172152.1,1545-1563).
gcaacgtgtttgatatcct

SEQ ID NO: 691227 - DNA, 19 bp, Mus musculus
  siRNA target sequence for Slc24a4 (NM_172152.1,1587-1605).
gcctgcagaccatggttat

SEQ ID NO: 691228 - DNA, 19 bp, Mus musculus
  siRNA target sequence for Slc24a4 (NM_172152.1,1597-1615).
catggttattaattatgga

SEQ ID NO: 691229 - DNA, 19 bp, Mus musculus
  siRNA target sequence for Slc24a4 (NM_172152.1,1766-1784).
ctgtgcttctccataatga

SEQ ID NO: 691230 - DNA, 19 bp, Mus musculus
  siRNA target sequence for Slc24a4 (NM_172152.1,1768-1786).
gtgcttctccataatgata

SEQ ID NO: 691231 - DNA, 19 bp, Mus musculus
  siRNA target sequence for Slc24a4 (NM_172152.1,1774-1792).
ctccataatgatagagttt

SEQ ID NO: 691232 - DNA, 19 bp, Mus musculus
  siRNA target sequence for Slc24a4 (NM_172152.1,1783-1801).
gatagagtttaatgtcttt

SEQ ID NO: 691233 - DNA, 19 bp, Mus musculus
  siRNA target sequence for Slc24a4 (NM_172152.1,1787-1805).
gagtttaatgtctttacct

SEQ ID NO: 691234 - DNA, 19 bp, Mus musculus
  siRNA target sequence for 0610007H07Rik (NM_026617.1,182-200).
ccctgttcctgtatttcca

SEQ ID NO: 691235 - DNA, 19 bp, Mus musculus
  siRNA target sequence for 0610007H07Rik (NM_026617.1,183-201).
cctgttcctgtatttccaa

SEQ ID NO: 691236 - DNA, 19 bp, Mus musculus
  siRNA target sequence for 0610007H07Rik (NM_026617.1,208-226).
cggacatttgtccatgaaa

SEQ ID NO: 691237 - DNA, 19 bp, Mus musculus
  siRNA target sequence for 0610007H07Rik (NM_026617.1,256-274).
ggatctctgggcttgatct

SEQ ID NO: 691238 - DNA, 19 bp, Mus musculus
  siRNA target sequence for 0610007H07Rik (NM_026617.1,315-333).
ctatctactctttgcattt

SEQ ID NO: 691239 - DNA, 19 bp, Mus musculus
  siRNA target sequence for 0610007H07Rik (NM_026617.1,352-370).
gccgtggcagctgttgtta

SEQ ID NO: 691240 - DNA, 19 bp, Mus musculus
  siRNA target sequence for 0610007H07Rik (NM_026617.1,362-380).
ctgttgttaccttctatga

SEQ ID NO: 691241 - DNA, 19 bp, Mus musculus
  siRNA target sequence for 0610007H07Rik (NM_026617.1,371-389).
ccttctatgatgtatatct

SEQ ID NO: 691242 - DNA, 19 bp, Mus musculus
  siRNA target sequence for 0610007H07Rik (NM_026617.1,390-408).
ggttctgcaagcgtttata

SEQ ID NO: 691243 - DNA, 19 bp, Mus musculus
  siRNA target sequence for 0610007H07Rik (NM_026617.1,396-414).
gcaagcgtttataatgact

SEQ ID NO: 691244 - DNA, 19 bp, Mus musculus
  siRNA target sequence for 0610007H07Rik (NM_026617.1,397-415).
caagcgtttataatgacta

SEQ ID NO: 691245 - DNA, 19 bp, Mus musculus
  siRNA target sequence for 0610007H07Rik (NM_026617.1,431-449).
gcttgactgcctatactct

SEQ ID NO: 691246 - DNA, 19 bp, Mus musculus
  siRNA target sequence for 0610007H07Rik (NM_026617.1,432-450).
cttgactgcctatactcta

SEQ ID NO: 691247 - DNA, 19 bp, Mus musculus
  siRNA target sequence for 0610007H07Rik (NM_026617.1,435-453).
gactgcctatactctacaa

SEQ ID NO: 691248 - DNA, 19 bp, Mus musculus
  siRNA target sequence for 0610007H07Rik (NM_026617.1,439-457).
gcctatactctacaatcaa

SEQ ID NO: 691249 - DNA, 19 bp, Mus musculus
  siRNA target sequence for 0610007H07Rik (NM_026617.1,440-458).
cctatactctacaatcaaa

SEQ ID NO: 691250 - DNA, 19 bp, Mus musculus
  siRNA target sequence for 0610007H07Rik (NM_026617.1,512-530).
gcttggcaggattcttgaa

SEQ ID NO: 691251 - DNA, 19 bp, Mus musculus
  siRNA target sequence for 0610007H07Rik (NM_026617.1,597-615).
gttcatcatctatgataca

SEQ ID NO: 691252 - DNA, 19 bp, Mus musculus
  siRNA target sequence for 0610007H07Rik (NM_026617.1,632-650).
gactctctcccgaagagta

SEQ ID NO: 691253 - DNA, 19 bp, Mus musculus
  siRNA target sequence for 0610007H07Rik (NM_026617.1,668-686).
gtctctacatggatatcat

SEQ ID NO: 691254 - DNA, 19 bp, Mus musculus
  siRNA target sequence for 0610007H07Rik (NM_026617.1,670-688).
ctctacatggatatcatca

SEQ ID NO: 691255 - DNA, 19 bp, Mus musculus
  siRNA target sequence for 1110001M20Rik (NM_029565.2,332-350).
gcgtgcacagaagcatatt

SEQ ID NO: 691256 - DNA, 19 bp, Mus musculus
  siRNA target sequence for 1110001M20Rik (NM_029565.2,849-867).
ctgagaagctgagtatcta

SEQ ID NO: 691257 - DNA, 19 bp, Mus musculus
  siRNA target sequence for 1110001M20Rik (NM_029565.2,870-888).
gtgacttggaatttatgaa

SEQ ID NO: 691258 - DNA, 19 bp, Mus musculus
  siRNA target sequence for 1110001M20Rik (NM_029565.2,912-930).
cagctccttctcttgtgat

SEQ ID NO: 691259 - DNA, 19 bp, Mus musculus
  siRNA target sequence for 1110001M20Rik (NM_029565.2,915-933).
ctccttctcttgtgattgt

SEQ ID NO: 691260 - DNA, 19 bp, Mus musculus
  siRNA target sequence for 1110017I01Rik (NM_022322.2,227-245).
gagggctgtcacattctaa

SEQ ID NO: 691261 - DNA, 19 bp, Mus musculus
  siRNA target sequence for 1110017I01Rik (NM_022322.2,229-247).
gggctgtcacattctaaat

SEQ ID NO: 691262 - DNA, 19 bp, Mus musculus
  siRNA target sequence for 1110017I01Rik (NM_022322.2,248-266).
gcagaagctctgaaatcta

SEQ ID NO: 691263 - DNA, 19 bp, Mus musculus
  siRNA target sequence for 1110017I01Rik (NM_022322.2,294-312).
gtggactagtgtttggtat

SEQ ID NO: 691264 - DNA, 19 bp, Mus musculus
  siRNA target sequence for 1110017I01Rik (NM_022322.2,309-327).
gtatcctggccttaactct

SEQ ID NO: 691265 - DNA, 19 bp, Mus musculus
  siRNA target sequence for 1110017I01Rik (NM_022322.2,361-379).
gcccgaggtatccaagaaa

SEQ ID NO: 691266 - DNA, 19 bp, Mus musculus
  siRNA target sequence for 1110017I01Rik (NM_022322.2,362-380).
cccgaggtatccaagaaaa

SEQ ID NO: 691267 - DNA, 19 bp, Mus musculus
  siRNA target sequence for 1110017I01Rik (NM_022322.2,365-383).
gaggtatccaagaaaacct

SEQ ID NO: 691268 - DNA, 19 bp, Mus musculus
  siRNA target sequence for 1110017I01Rik (NM_022322.2,367-385).
ggtatccaagaaaacctat

SEQ ID NO: 691269 - DNA, 19 bp, Mus musculus
  siRNA target sequence for 1110017I01Rik (NM_022322.2,412-430).
cggcgagaagaagaagatt

SEQ ID NO: 691270 - DNA, 19 bp, Mus musculus
  siRNA target sequence for 1110017I01Rik (NM_022322.2,437-455).
gaaattgatcccataacca

SEQ ID NO: 691271 - DNA, 19 bp, Mus musculus
  siRNA target sequence for 1110017I01Rik (NM_022322.2,526-544).
cactggcatctactttgta

SEQ ID NO: 691272 - DNA, 19 bp, Mus musculus
  siRNA target sequence for 1110017I01Rik (NM_022322.2,535-553).
ctactttgtaggtcttcaa

SEQ ID NO: 691273 - DNA, 19 bp, Mus musculus
  siRNA target sequence for 1110017I01Rik (NM_022322.2,672-690).
ccgcagaaaagcctattga

SEQ ID NO: 691274 - DNA, 19 bp, Mus musculus
  siRNA target sequence for 1110017I01Rik (NM_022322.2,673-691).
cgcagaaaagcctattgaa

SEQ ID NO: 691275 - DNA, 19 bp, Mus musculus
  siRNA target sequence for 1110017I01Rik (NM_022322.2,675-693).
cagaaaagcctattgaaaa

SEQ ID NO: 691276 - DNA, 19 bp, Mus musculus
  siRNA target sequence for 1110017I01Rik (NM_022322.2,725-743).
gagatttgcgataatgtga

SEQ ID NO: 691277 - DNA, 19 bp, Mus musculus
  siRNA target sequence for 1110017I01Rik (NM_022322.2,742-760).
gaccatgtactggatcaat

SEQ ID NO: 691278 - DNA, 19 bp, Mus musculus
  siRNA target sequence for 1110017I01Rik (NM_022322.2,753-771).
ggatcaatcccactctaat

SEQ ID NO: 691279 - DNA, 19 bp, Mus musculus
  siRNA target sequence for 1110017I01Rik (NM_022322.2,754-772).
gatcaatcccactctaata

SEQ ID NO: 691280 - DNA, 19 bp, Mus musculus
  siRNA target sequence for 1110017I01Rik (NM_022322.2,757-775).
caatcccactctaatagca

SEQ ID NO: 691281 - DNA, 19 bp, Mus musculus
  siRNA target sequence for 1110017I01Rik (NM_022322.2,763-781).
cactctaatagcagtttca

SEQ ID NO: 691282 - DNA, 19 bp, Mus musculus
  siRNA target sequence for 1110017I01Rik (NM_022322.2,765-783).
ctctaatagcagtttcaga

SEQ ID NO: 691283 - DNA, 19 bp, Mus musculus
  siRNA target sequence for 1110017I01Rik (NM_022322.2,780-798).
cagaattacaggactttga

SEQ ID NO: 691284 - DNA, 19 bp, Mus musculus
  siRNA target sequence for 1110017I01Rik (NM_022322.2,805-823).
cggtgaagatcttcacttt

SEQ ID NO: 691285 - DNA, 19 bp, Mus musculus
  siRNA target sequence for 1110017I01Rik (NM_022322.2,809-827).
gaagatcttcactttccta

SEQ ID NO: 691286 - DNA, 19 bp, Mus musculus
  siRNA target sequence for 1110017I01Rik (NM_022322.2,818-836).
cactttcctaccagtgaaa

SEQ ID NO: 691287 - DNA, 19 bp, Mus musculus
  siRNA target sequence for 1110017I01Rik (NM_022322.2,864-882).
gggtggtcccgcaagtgaa

SEQ ID NO: 691288 - DNA, 19 bp, Mus musculus
  siRNA target sequence for 1110017I01Rik (NM_022322.2,915-933).
gcgaggaagaccttcctat

SEQ ID NO: 691289 - DNA, 19 bp, Mus musculus
  siRNA target sequence for 1110017I01Rik (NM_022322.2,926-944).
cttcctataaatgactata

SEQ ID NO: 691290 - DNA, 19 bp, Mus musculus
  siRNA target sequence for 1110017I01Rik (NM_022322.2,977-995).
gatgagagaggttactgtt

SEQ ID NO: 691291 - DNA, 19 bp, Mus musculus
  siRNA target sequence for 1110017I01Rik (NM_022322.2,982-1000).
gagaggttactgttgtatt

SEQ ID NO: 691292 - DNA, 19 bp, Mus musculus
  siRNA target sequence for 1110017I01Rik (NM_022322.2,986-1004).
ggttactgttgtatttact

SEQ ID NO: 691293 - DNA, 19 bp, Mus musculus
  siRNA target sequence for 1110017I01Rik (NM_022322.2,1030-1048).
ccgtgtctgtgaaccttta

SEQ ID NO: 691294 - DNA, 19 bp, Mus musculus
  siRNA target sequence for 1110019C08Rik (NM_171826.1,143-161).
cggacttctggtatgagta

SEQ ID NO: 691295 - DNA, 19 bp, Mus musculus
  siRNA target sequence for 1110019C08Rik (NM_171826.1,159-177).
gtatcgaagtcccattcaa

SEQ ID NO: 691296 - DNA, 19 bp, Mus musculus
  siRNA target sequence for 1110019C08Rik (NM_171826.1,185-203).
caagtgactcgaataaaat

SEQ ID NO: 691297 - DNA, 19 bp, Mus musculus
  siRNA target sequence for 1110019C08Rik (NM_171826.1,229-247).
gaggcggatgagaagactt

SEQ ID NO: 691298 - DNA, 19 bp, Mus musculus
  siRNA target sequence for 1110019C08Rik (NM_171826.1,232-250).
gcggatgagaagacttaca

SEQ ID NO: 691299 - DNA, 19 bp, Mus musculus
  siRNA target sequence for 1110019C08Rik (NM_171826.1,245-263).
cttacaacgatgttctgtt

SEQ ID NO: 691300 - DNA, 19 bp, Mus musculus
  siRNA target sequence for 1110019C08Rik (NM_171826.1,364-382).
gttaccaaatgcatgagtt

SEQ ID NO: 691301 - DNA, 19 bp, Mus musculus
  siRNA target sequence for 1110019C08Rik (NM_171826.1,369-387).
caaatgcatgagtttcaca

SEQ ID NO: 691302 - DNA, 19 bp, Mus musculus
  siRNA target sequence for 1110019C08Rik (NM_171826.1,386-404).
cactaaacgagcagttcat

SEQ ID NO: 691303 - DNA, 19 bp, Mus musculus
  siRNA target sequence for 1110019C08Rik (NM_171826.1,467-485).
ggcgctgccagttcctttt

SEQ ID NO: 691304 - DNA, 19 bp, Mus musculus
  siRNA target sequence for 1110019C08Rik (NM_171826.1,468-486).
gcgctgccagttcctttta

SEQ ID NO: 691305 - DNA, 19 bp, Mus musculus
  siRNA target sequence for 1110019C08Rik (NM_171826.1,510-528).
gtgctttggggcgttgatt

SEQ ID NO: 691306 - DNA, 19 bp, Mus musculus
  siRNA target sequence for 1110019C08Rik (NM_171826.1,612-630).
gggctccgtgagttgctat

SEQ ID NO: 691307 - DNA, 19 bp, Mus musculus
  siRNA target sequence for 1110019C08Rik (NM_171826.1,615-633).
ctccgtgagttgctatgtt

SEQ ID NO: 691308 - DNA, 19 bp, Mus musculus
  siRNA target sequence for 1110019C08Rik (NM_171826.1,627-645).
ctatgttgccggcattgaa

SEQ ID NO: 691309 - DNA, 19 bp, Mus musculus
  siRNA target sequence for 1110019C08Rik (NM_171826.1,664-682).
gagctgcccaaggatgtat

SEQ ID NO: 691310 - DNA, 19 bp, Mus musculus
  siRNA target sequence for 1110019C08Rik (NM_171826.1,666-684).
gctgcccaaggatgtatct

SEQ ID NO: 691311 - DNA, 19 bp, Mus musculus
  siRNA target sequence for 1110019C08Rik (NM_171826.1,718-736).
gtctcggctcccttacagt

SEQ ID NO: 691312 - DNA, 19 bp, Mus musculus
  siRNA target sequence for 1110019C08Rik (NM_171826.1,722-740).
cggctcccttacagttcat

SEQ ID NO: 691313 - DNA, 19 bp, Mus musculus
  siRNA target sequence for 1110019C08Rik (NM_171826.1,769-787).
cacaccaaccggaaagagt

SEQ ID NO: 691314 - DNA, 19 bp, Mus musculus
  siRNA target sequence for 1110019C08Rik (NM_171826.1,778-796).
cggaaagagtacaccttaa

SEQ ID NO: 691315 - DNA, 19 bp, Mus musculus
  siRNA target sequence for 1110019C08Rik (NM_171826.1,779-797).
ggaaagagtacaccttaat

SEQ ID NO: 691316 - DNA, 19 bp, Mus musculus
  siRNA target sequence for 1110019C08Rik (NM_171826.1,792-810).
cttaatgaaggcttatcgt

SEQ ID NO: 691317 - DNA, 19 bp, Mus musculus
  siRNA target sequence for 1110025G12Rik (NM_029844.1,269-287).
ccgctcaccagctatgagt

SEQ ID NO: 691318 - DNA, 19 bp, Mus musculus
  siRNA target sequence for 1110025G12Rik (NM_029844.1,270-288).
cgctcaccagctatgagta

SEQ ID NO: 691319 - DNA, 19 bp, Mus musculus
  siRNA target sequence for 1110025G12Rik (NM_029844.1,271-289).
gctcaccagctatgagtat

SEQ ID NO: 691320 - DNA, 19 bp, Mus musculus
  siRNA target sequence for 1110025G12Rik (NM_029844.1,272-290).
ctcaccagctatgagtatt

SEQ ID NO: 691321 - DNA, 19 bp, Mus musculus
  siRNA target sequence for 1110025G12Rik (NM_029844.1,557-575).
ggcactgaccagtggttaa

SEQ ID NO: 691322 - DNA, 19 bp, Mus musculus
  siRNA target sequence for 1110060F11Rik (NM_026395.1,144-162).
cctcggtggtgtacagatt

SEQ ID NO: 691323 - DNA, 19 bp, Mus musculus
  siRNA target sequence for 1110060F11Rik (NM_026395.1,151-169).
ggtgtacagatttttctca

SEQ ID NO: 691324 - DNA, 19 bp, Mus musculus
  siRNA target sequence for 1110060F11Rik (NM_026395.1,166-184).
ctcacggcttggacagatt

SEQ ID NO: 691325 - DNA, 19 bp, Mus musculus
  siRNA target sequence for 1110060F11Rik (NM_026395.1,168-186).
cacggcttggacagattta

SEQ ID NO: 691326 - DNA, 19 bp, Mus musculus
  siRNA target sequence for 1110060F11Rik (NM_026395.1,171-189).
ggcttggacagatttatca

SEQ ID NO: 691327 - DNA, 19 bp, Mus musculus
  siRNA target sequence for 1110060F11Rik (NM_026395.1,257-275).
gtctacatgattagagttt

SEQ ID NO: 691328 - DNA, 19 bp, Mus musculus
  siRNA target sequence for 1110060F11Rik (NM_026395.1,280-298).
gttacaaggttggtacatt

SEQ ID NO: 691329 - DNA, 19 bp, Mus musculus
  siRNA target sequence for 1110060F11Rik (NM_026395.1,303-321).
cctacgccttgggaattta

SEQ ID NO: 691330 - DNA, 19 bp, Mus musculus
  siRNA target sequence for 1110060F11Rik (NM_026395.1,384-402).
cagatgacggcccttcatt

SEQ ID NO: 691331 - DNA, 19 bp, Mus musculus
  siRNA target sequence for 1110060F11Rik (NM_026395.1,389-407).
gacggcccttcattaccaa

SEQ ID NO: 691332 - DNA, 19 bp, Mus musculus
  siRNA target sequence for 1110060F11Rik (NM_026395.1,394-412).
cccttcattaccaaccaaa

SEQ ID NO: 691333 - DNA, 19 bp, Mus musculus
  siRNA target sequence for 1110060F11Rik (NM_026395.1,399-417).
cattaccaaccaaacagaa

SEQ ID NO: 691334 - DNA, 19 bp, Mus musculus
  siRNA target sequence for 1110060F11Rik (NM_026395.1,421-439).
ggaatttcgtcccttcatt

SEQ ID NO: 691335 - DNA, 19 bp, Mus musculus
  siRNA target sequence for 1110060F11Rik (NM_026395.1,440-458).
cgaaggcttccagaattca

SEQ ID NO: 691336 - DNA, 19 bp, Mus musculus
  siRNA target sequence for 1110060F11Rik (NM_026395.1,507-525).
ccttcttcgaggcttttaa

SEQ ID NO: 691337 - DNA, 19 bp, Mus musculus
  siRNA target sequence for 1110060F11Rik (NM_026395.1,542-560).
ccgatcctggtgatgtact

SEQ ID NO: 691338 - DNA, 19 bp, Mus musculus
  siRNA target sequence for 1110060F11Rik (NM_026395.1,543-561).
cgatcctggtgatgtactt

SEQ ID NO: 691339 - DNA, 19 bp, Mus musculus
  siRNA target sequence for 1110060F11Rik (NM_026395.1,548-566).
ctggtgatgtacttcatca

SEQ ID NO: 691340 - DNA, 19 bp, Mus musculus
  siRNA target sequence for 1110060F11Rik (NM_026395.1,593-611).
caaatcaagcacatgatta

SEQ ID NO: 691341 - DNA, 19 bp, Mus musculus
  siRNA target sequence for 1110060F11Rik (NM_026395.1,607-625).
gattaaataccggtacata

SEQ ID NO: 691342 - DNA, 19 bp, Mus musculus
  siRNA target sequence for 1110060F11Rik (NM_026395.1,667-685).
cgtgggcaagacatttgct

SEQ ID NO: 691343 - DNA, 19 bp, Mus musculus
  siRNA target sequence for 1110060F11Rik (NM_026395.1,668-686).
gtgggcaagacatttgcta

SEQ ID NO: 691344 - DNA, 19 bp, Mus musculus
  siRNA target sequence for 1300010A20Rik (NM_146173.1,239-257).
gtcagcccgctggtgaaat

SEQ ID NO: 691345 - DNA, 19 bp, Mus musculus
  siRNA target sequence for 1300010A20Rik (NM_146173.1,243-261).
gcccgctggtgaaatacct

SEQ ID NO: 691346 - DNA, 19 bp, Mus musculus
  siRNA target sequence for 1300010A20Rik (NM_146173.1,307-325).
ggtggccgtgggtgtctat

SEQ ID NO: 691347 - DNA, 19 bp, Mus musculus
  siRNA target sequence for 1300010A20Rik (NM_146173.1,441-459).
gatcccttcgggagaacat

SEQ ID NO: 691348 - DNA, 19 bp, Mus musculus
  siRNA target sequence for 1300010A20Rik (NM_146173.1,558-576).
ggaaagtgagcgagatcat

SEQ ID NO: 691349 - DNA, 19 bp, Mus musculus
  siRNA target sequence for 1300010A20Rik (NM_146173.1,563-581).
gtgagcgagatcatcaaca

SEQ ID NO: 691350 - DNA, 19 bp, Mus musculus
  siRNA target sequence for 1300010A20Rik (NM_146173.1,565-583).
gagcgagatcatcaacaat

SEQ ID NO: 691351 - DNA, 19 bp, Mus musculus
  siRNA target sequence for 1300010A20Rik (NM_146173.1,580-598).
caatgctatcgtgcattat

SEQ ID NO: 691352 - DNA, 19 bp, Mus musculus
  siRNA target sequence for 1300010A20Rik (NM_146173.1,684-702).
ctcagaatatgtacttcaa

SEQ ID NO: 691353 - DNA, 19 bp, Mus musculus
  siRNA target sequence for 1300010A20Rik (NM_146173.1,844-862).
ctacaccaatggctgtatt

SEQ ID NO: 691354 - DNA, 19 bp, Mus musculus
  siRNA target sequence for 1300010A20Rik (NM_146173.1,959-977).
caggtcctcgtgaatcaaa

SEQ ID NO: 691355 - DNA, 19 bp, Mus musculus
  siRNA target sequence for 1300010A20Rik (NM_146173.1,962-980).
gtcctcgtgaatcaaataa

SEQ ID NO: 691356 - DNA, 19 bp, Mus musculus
  siRNA target sequence for 1300010A20Rik (NM_146173.1,967-985).
cgtgaatcaaataaaagat

SEQ ID NO: 691357 - DNA, 19 bp, Mus musculus
  siRNA target sequence for 1500001H12Rik (NM_021316.2,206-224).
ggaatcccgaggaaagtca

SEQ ID NO: 691358 - DNA, 19 bp, Mus musculus
  siRNA target sequence for 1500001H12Rik (NM_021316.2,232-250).
gccccaagccagataccaa

SEQ ID NO: 691359 - DNA, 19 bp, Mus musculus
  siRNA target sequence for 1500001H12Rik (NM_021316.2,398-416).
caaggcagatcctgtactt

SEQ ID NO: 691360 - DNA, 19 bp, Mus musculus
  siRNA target sequence for 1500001H12Rik (NM_021316.2,550-568).
cctggccttgtgagaactt

SEQ ID NO: 691361 - DNA, 19 bp, Mus musculus
  siRNA target sequence for 1500001H12Rik (NM_021316.2,631-649).
cctttctagcccggaaaaa

SEQ ID NO: 691362 - DNA, 19 bp, Mus musculus
  siRNA target sequence for 1500001H12Rik (NM_021316.2,632-650).
ctttctagcccggaaaaaa

SEQ ID NO: 691363 - DNA, 19 bp, Mus musculus
  siRNA target sequence for 1500004C10Rik (NM_023824.2,355-373).
cgcacctgcagttcaataa

SEQ ID NO: 691364 - DNA, 19 bp, Mus musculus
  siRNA target sequence for 1500004C10Rik (NM_023824.2,363-381).
cagttcaataagttcgtat

SEQ ID NO: 691365 - DNA, 19 bp, Mus musculus
  siRNA target sequence for 1500004C10Rik (NM_023824.2,418-436).
gtctgcgcagccttttcta

SEQ ID NO: 691366 - DNA, 19 bp, Mus musculus
  siRNA target sequence for 1500004C10Rik (NM_023824.2,646-664).
ggctccttgccttggatat

SEQ ID NO: 691367 - DNA, 19 bp, Mus musculus
  siRNA target sequence for 1500004C10Rik (NM_023824.2,650-668).
ccttgccttggatatgtgt

SEQ ID NO: 691368 - DNA, 19 bp, Mus musculus
  siRNA target sequence for 1500004C10Rik (NM_023824.2,822-840).
cggcttcgagcctttggtt

SEQ ID NO: 691369 - DNA, 19 bp, Mus musculus
  siRNA target sequence for 1700019B16Rik (NM_028829.3,310-328).
gcctgagcaccctgtcaat

SEQ ID NO: 691370 - DNA, 19 bp, Mus musculus
  siRNA target sequence for 1700019B16Rik (NM_028829.3,346-364).
gccgtctgcccaagattct

SEQ ID NO: 691371 - DNA, 19 bp, Mus musculus
  siRNA target sequence for 1700019B16Rik (NM_028829.3,408-426).
gacgtgccccagctcttta

SEQ ID NO: 691372 - DNA, 19 bp, Mus musculus
  siRNA target sequence for 1700019B16Rik (NM_028829.3,463-481).
ggcacgagtggcgttacta

SEQ ID NO: 691373 - DNA, 19 bp, Mus musculus
  siRNA target sequence for 1700019B16Rik (NM_028829.3,465-483).
cacgagtggcgttactact

SEQ ID NO: 691374 - DNA, 19 bp, Mus musculus
  siRNA target sequence for 1700019B16Rik (NM_028829.3,468-486).
gagtggcgttactacttct

SEQ ID NO: 691375 - DNA, 19 bp, Mus musculus
  siRNA target sequence for 1700019B16Rik (NM_028829.3,541-559).
ctgctctagcggtcctttt

SEQ ID NO: 691376 - DNA, 19 bp, Mus musculus
  siRNA target sequence for 1700019B16Rik (NM_028829.3,703-721).
cccactacacgttctactt

SEQ ID NO: 691377 - DNA, 19 bp, Mus musculus
  siRNA target sequence for 1700019B16Rik (NM_028829.3,704-722).
ccactacacgttctacttt

SEQ ID NO: 691378 - DNA, 19 bp, Mus musculus
  siRNA target sequence for 1700019B16Rik (NM_028829.3,856-874).
cctgcgctggctgttgtta

SEQ ID NO: 691379 - DNA, 19 bp, Mus musculus
  siRNA target sequence for 1700019B16Rik (NM_028829.3,857-875).
ctgcgctggctgttgttat

SEQ ID NO: 691380 - DNA, 19 bp, Mus musculus
  siRNA target sequence for 1700019B16Rik (NM_028829.3,866-884).
ctgttgttatgccaagtat

SEQ ID NO: 691381 - DNA, 19 bp, Mus musculus
  siRNA target sequence for 1700019B16Rik (NM_028829.3,887-905).
ctaccgacggccttatcca

SEQ ID NO: 691382 - DNA, 19 bp, Mus musculus
  siRNA target sequence for 1700019B16Rik (NM_028829.3,892-910).
gacggccttatccagttat

SEQ ID NO: 691383 - DNA, 19 bp, Mus musculus
  siRNA target sequence for 1700019B16Rik (NM_028829.3,894-912).
cggccttatccagttatga

SEQ ID NO: 691384 - DNA, 19 bp, Mus musculus
  siRNA target sequence for 1700019B16Rik (NM_028829.3,911-929).
gaggaagatctgtcaagta

SEQ ID NO: 691385 - DNA, 19 bp, Mus musculus
  siRNA target sequence for 1700019B16Rik (NM_028829.3,1024-1042).
ggtaccacacccttcagat

SEQ ID NO: 691386 - DNA, 19 bp, Mus musculus
  siRNA target sequence for 1700019B16Rik (NM_028829.3,1053-1071).
ctcgtcagcgcatacttct

SEQ ID NO: 691387 - DNA, 19 bp, Mus musculus
  siRNA target sequence for 1700019B16Rik (NM_028829.3,1081-1099).
ctgtccccgagaagtactt

SEQ ID NO: 691388 - DNA, 19 bp, Mus musculus
  siRNA target sequence for 1700019B16Rik (NM_028829.3,1100-1118).
ccccggttcctgtgacatt

SEQ ID NO: 691389 - DNA, 19 bp, Mus musculus
  siRNA target sequence for 1700019B16Rik (NM_028829.3,1122-1140).
ggccacggacatcaaatct

SEQ ID NO: 691390 - DNA, 19 bp, Mus musculus
  siRNA target sequence for 1700019B16Rik (NM_028829.3,1123-1141).
gccacggacatcaaatctt

SEQ ID NO: 691391 - DNA, 19 bp, Mus musculus
  siRNA target sequence for 1810018L02Rik (NM_025453.1,75-93).
gcttcagcctgctcattct

SEQ ID NO: 691392 - DNA, 19 bp, Mus musculus
  siRNA target sequence for 1810018L02Rik (NM_025453.1,100-118).
gctaggagtggttatcaat

SEQ ID NO: 691393 - DNA, 19 bp, Mus musculus
  siRNA target sequence for 1810018L02Rik (NM_025453.1,101-119).
ctaggagtggttatcaatt

SEQ ID NO: 691394 - DNA, 19 bp, Mus musculus
  siRNA target sequence for 1810018L02Rik (NM_025453.1,104-122).
ggagtggttatcaattgta

SEQ ID NO: 691395 - DNA, 19 bp, Mus musculus
  siRNA target sequence for 1810018L02Rik (NM_025453.1,105-123).
gagtggttatcaattgtat

SEQ ID NO: 691396 - DNA, 19 bp, Mus musculus
  siRNA target sequence for 1810018L02Rik (NM_025453.1,148-166).
ggcagactcgacttctcaa

SEQ ID NO: 691397 - DNA, 19 bp, Mus musculus
  siRNA target sequence for 1810018L02Rik (NM_025453.1,149-167).
gcagactcgacttctcaaa

SEQ ID NO: 691398 - DNA, 19 bp, Mus musculus
  siRNA target sequence for 1810018L02Rik (NM_025453.1,150-168).
cagactcgacttctcaaaa

SEQ ID NO: 691399 - DNA, 19 bp, Mus musculus
  siRNA target sequence for 1810018L02Rik (NM_025453.1,189-207).
ggtggtttccaggaattat

SEQ ID NO: 691400 - DNA, 19 bp, Mus musculus
  siRNA target sequence for 1810018L02Rik (NM_025453.1,326-344).
gttggtgctgtgtattgca

SEQ ID NO: 691401 - DNA, 19 bp, Mus musculus
  siRNA target sequence for 1810018L02Rik (NM_025453.1,371-389).
gaaggacctctaatttgta

SEQ ID NO: 691402 - DNA, 19 bp, Mus musculus
  siRNA target sequence for 1810018L02Rik (NM_025453.1,535-553).
ggtcagtaactggaaaata

SEQ ID NO: 691403 - DNA, 19 bp, Mus musculus
  siRNA target sequence for 1810018L02Rik (NM_025453.1,643-661).
gtttgggctcagtcagata

SEQ ID NO: 691404 - DNA, 19 bp, Mus musculus
  siRNA target sequence for 1810018L02Rik (NM_025453.1,647-665).
gggctcagtcagatactca

SEQ ID NO: 691405 - DNA, 19 bp, Mus musculus
  siRNA target sequence for 1810018L02Rik (NM_025453.1,648-666).
ggctcagtcagatactcat

SEQ ID NO: 691406 - DNA, 19 bp, Mus musculus
  siRNA target sequence for 1810018L02Rik (NM_025453.1,658-676).
gatactcattggtttcctt

SEQ ID NO: 691407 - DNA, 19 bp, Mus musculus
  siRNA target sequence for 1810018L02Rik (NM_025453.1,696-714).
ctcagcgacggagtcaaat

SEQ ID NO: 691408 - DNA, 19 bp, Mus musculus
  siRNA target sequence for 1810018L02Rik (NM_025453.1,700-718).
gcgacggagtcaaattgta

SEQ ID NO: 691409 - DNA, 19 bp, Mus musculus
  siRNA target sequence for 1810018L02Rik (NM_025453.1,701-719).
cgacggagtcaaattgtat

SEQ ID NO: 691410 - DNA, 19 bp, Mus musculus
  siRNA target sequence for 2010003F10Rik (NM_029360.1,389-407).
cgaattggacccaaatgct

SEQ ID NO: 691411 - DNA, 19 bp, Mus musculus
  siRNA target sequence for 2010003F10Rik (NM_029360.1,396-414).
gacccaaatgcttaataga

SEQ ID NO: 691412 - DNA, 19 bp, Mus musculus
  siRNA target sequence for 2010003F10Rik (NM_029360.1,399-417).
ccaaatgcttaatagacaa

SEQ ID NO: 691413 - DNA, 19 bp, Mus musculus
  siRNA target sequence for 2010003F10Rik (NM_029360.1,427-445).
ctaccacttccaagaaaca

SEQ ID NO: 691414 - DNA, 19 bp, Mus musculus
  siRNA target sequence for 2010003F10Rik (NM_029360.1,462-480).
gaaatgacactctttggaa

SEQ ID NO: 691415 - DNA, 19 bp, Mus musculus
  siRNA target sequence for 2010003F10Rik (NM_029360.1,535-553).
cctggtggtcgcatcaagt

SEQ ID NO: 691416 - DNA, 19 bp, Mus musculus
  siRNA target sequence for 2010100O12Rik (NM_025946.2,165-183).
gcttcgaccgcgtgaagat

SEQ ID NO: 691417 - DNA, 19 bp, Mus musculus
  siRNA target sequence for 2010100O12Rik (NM_025946.2,314-332).
ggcacgtttggcactttca

SEQ ID NO: 691418 - DNA, 19 bp, Mus musculus
  siRNA target sequence for 2010100O12Rik (NM_025946.2,327-345).
ctttcatggccattggaat

SEQ ID NO: 691419 - DNA, 19 bp, Mus musculus
  siRNA target sequence for 2310004K06Rik (NM_020050.1,219-237).
gcatctgccctccctataa

SEQ ID NO: 691420 - DNA, 19 bp, Mus musculus
  siRNA target sequence for 2310004K06Rik (NM_020050.1,220-238).
catctgccctccctataaa

SEQ ID NO: 691421 - DNA, 19 bp, Mus musculus
  siRNA target sequence for 2310004K06Rik (NM_020050.1,241-259).
gaatcctgggcacatttat

SEQ ID NO: 691422 - DNA, 19 bp, Mus musculus
  siRNA target sequence for 2310004K06Rik (NM_020050.1,248-266).
gggcacatttataataaga

SEQ ID NO: 691423 - DNA, 19 bp, Mus musculus
  siRNA target sequence for 2310004K06Rik (NM_020050.1,249-267).
ggcacatttataataagaa

SEQ ID NO: 691424 - DNA, 19 bp, Mus musculus
  siRNA target sequence for 2310004K06Rik (NM_020050.1,345-363).
gtctacgctgtgaatgcaa

SEQ ID NO: 691425 - DNA, 19 bp, Mus musculus
  siRNA target sequence for 2310004K06Rik (NM_020050.1,347-365).
ctacgctgtgaatgcaaat

SEQ ID NO: 691426 - DNA, 19 bp, Mus musculus
  siRNA target sequence for 2310004K06Rik (NM_020050.1,385-403).
cacaatcaaggttaccatt

SEQ ID NO: 691427 - DNA, 19 bp, Mus musculus
  siRNA target sequence for 2310004K06Rik (NM_020050.1,387-405).
caatcaaggttaccattat

SEQ ID NO: 691428 - DNA, 19 bp, Mus musculus
  siRNA target sequence for 2310004K06Rik (NM_020050.1,431-449).
ctgcttctgtacatggtat

SEQ ID NO: 691429 - DNA, 19 bp, Mus musculus
  siRNA target sequence for 2310004K06Rik (NM_020050.1,437-455).
ctgtacatggtatatctta

SEQ ID NO: 691430 - DNA, 19 bp, Mus musculus
  siRNA target sequence for 2310004K06Rik (NM_020050.1,442-460).
catggtatatcttacctta

SEQ ID NO: 691431 - DNA, 19 bp, Mus musculus
  siRNA target sequence for 2310004K06Rik (NM_020050.1,445-463).
ggtatatcttaccttagtt

SEQ ID NO: 691432 - DNA, 19 bp, Mus musculus
  siRNA target sequence for 2310004K06Rik (NM_020050.1,530-548).
gatcaccagccttttgcaa

SEQ ID NO: 691433 - DNA, 19 bp, Mus musculus
  siRNA target sequence for 2310004K06Rik (NM_020050.1,577-595).
cagccgagccaatgttcta

SEQ ID NO: 691434 - DNA, 19 bp, Mus musculus
  siRNA target sequence for 2310004K06Rik (NM_020050.1,579-597).
gccgagccaatgttctaaa

SEQ ID NO: 691435 - DNA, 19 bp, Mus musculus
  siRNA target sequence for 2310004K06Rik (NM_020050.1,581-599).
cgagccaatgttctaaaca

SEQ ID NO: 691436 - DNA, 19 bp, Mus musculus
  siRNA target sequence for 2310004K06Rik (NM_020050.1,637-655).
ccaggagcagcgaaagtct

SEQ ID NO: 691437 - DNA, 19 bp, Mus musculus
  siRNA target sequence for 2310046K01Rik (NM_027172.1,307-325).
gtgcctgtgatcttcctta

SEQ ID NO: 691438 - DNA, 19 bp, Mus musculus
  siRNA target sequence for 2310046K01Rik (NM_027172.1,486-504).
ccagctgcctacgtactat

SEQ ID NO: 691439 - DNA, 19 bp, Mus musculus
  siRNA target sequence for 2310046K01Rik (NM_027172.1,489-507).
gctgcctacgtactatctt

SEQ ID NO: 691440 - DNA, 19 bp, Mus musculus
  siRNA target sequence for 2310046K01Rik (NM_027172.1,490-508).
ctgcctacgtactatctta

SEQ ID NO: 691441 - DNA, 19 bp, Mus musculus
  siRNA target sequence for 2310046K01Rik (NM_027172.1,614-632).
ggaccaccttgaacactat

SEQ ID NO: 691442 - DNA, 19 bp, Mus musculus
  siRNA target sequence for 2310046K01Rik (NM_027172.1,844-862).
gtcaccctgcactctatca

SEQ ID NO: 691443 - DNA, 19 bp, Mus musculus
  siRNA target sequence for 2310046K01Rik (NM_027172.1,1132-1150).
cctaacaggtcgctgttat

SEQ ID NO: 691444 - DNA, 19 bp, Mus musculus
  siRNA target sequence for 2310046K01Rik (NM_027172.1,1247-1265).
gtggagaagtccttatcgt

SEQ ID NO: 691445 - DNA, 19 bp, Mus musculus
  siRNA target sequence for 2310046K01Rik (NM_027172.1,1289-1307).
cctgtctcagctatgtcaa

SEQ ID NO: 691446 - DNA, 19 bp, Mus musculus
  siRNA target sequence for 2310046K01Rik (NM_027172.1,1407-1425).
gttcccactggttaatgta

SEQ ID NO: 691447 - DNA, 19 bp, Mus musculus
  siRNA target sequence for 2810031L11Rik (NM_028320.2,476-494).
gagagtcatcccgtatgat

SEQ ID NO: 691448 - DNA, 19 bp, Mus musculus
  siRNA target sequence for 2810031L11Rik (NM_028320.2,478-496).
gagtcatcccgtatgatgt

SEQ ID NO: 691449 - DNA, 19 bp, Mus musculus
  siRNA target sequence for 2810031L11Rik (NM_028320.2,645-663).
ctctttctgggaatcttga

SEQ ID NO: 691450 - DNA, 19 bp, Mus musculus
  siRNA target sequence for 2810031L11Rik (NM_028320.2,662-680).
gacgatgctgagaccaaat

SEQ ID NO: 691451 - DNA, 19 bp, Mus musculus
  siRNA target sequence for 2810031L11Rik (NM_028320.2,664-682).
cgatgctgagaccaaatat

SEQ ID NO: 691452 - DNA, 19 bp, Mus musculus
  siRNA target sequence for 2810031L11Rik (NM_028320.2,673-691).
gaccaaatatgtacttcat

SEQ ID NO: 691453 - DNA, 19 bp, Mus musculus
  siRNA target sequence for 2810031L11Rik (NM_028320.2,711-729).
gtggtcttcgggatgttct

SEQ ID NO: 691454 - DNA, 19 bp, Mus musculus
  siRNA target sequence for 2810031L11Rik (NM_028320.2,771-789).
cacactgtctactgtcatt

SEQ ID NO: 691455 - DNA, 19 bp, Mus musculus
  siRNA target sequence for 2810031L11Rik (NM_028320.2,794-812).
gaaggtctctcggactttt

SEQ ID NO: 691456 - DNA, 19 bp, Mus musculus
  siRNA target sequence for 2810031L11Rik (NM_028320.2,800-818).
ctctcggactttttccaaa

SEQ ID NO: 691457 - DNA, 19 bp, Mus musculus
  siRNA target sequence for 2810031L11Rik (NM_028320.2,861-879).
gttccctggctctattact

SEQ ID NO: 691458 - DNA, 19 bp, Mus musculus
  siRNA target sequence for 2810031L11Rik (NM_028320.2,1041-1059).
cccaccatgcactttacta

SEQ ID NO: 691459 - DNA, 19 bp, Mus musculus
  siRNA target sequence for 2810031L11Rik (NM_028320.2,1042-1060).
ccaccatgcactttactat

SEQ ID NO: 691460 - DNA, 19 bp, Mus musculus
  siRNA target sequence for 2810031L11Rik (NM_028320.2,1240-1258).
cagctttcgtccacttcta

SEQ ID NO: 691461 - DNA, 19 bp, Mus musculus
  siRNA target sequence for 2810439K08Rik (NM_028343.2,23-41).
gcaagtccatccctcataa

SEQ ID NO: 691462 - DNA, 19 bp, Mus musculus
  siRNA target sequence for 2810439K08Rik (NM_028343.2,247-265).
gccttgtacattactttct

SEQ ID NO: 691463 - DNA, 19 bp, Mus musculus
  siRNA target sequence for 2810439K08Rik (NM_028343.2,248-266).
ccttgtacattactttctt

SEQ ID NO: 691464 - DNA, 19 bp, Mus musculus
  siRNA target sequence for 2810439K08Rik (NM_028343.2,286-304).
cttggaaaattctactcat

SEQ ID NO: 691465 - DNA, 19 bp, Mus musculus
  siRNA target sequence for 2810439K08Rik (NM_028343.2,345-363).
ggccattctaattgaaaga

SEQ ID NO: 691466 - DNA, 19 bp, Mus musculus
  siRNA target sequence for 2810439K08Rik (NM_028343.2,376-394).
gggctgctcacaatttata

SEQ ID NO: 691467 - DNA, 19 bp, Mus musculus
  siRNA target sequence for 2810439K08Rik (NM_028343.2,377-395).
ggctgctcacaatttatat

SEQ ID NO: 691468 - DNA, 19 bp, Mus musculus
  siRNA target sequence for 2810439K08Rik (NM_028343.2,446-464).
ccatcacgacgttaagaaa

SEQ ID NO: 691469 - DNA, 19 bp, Mus musculus
  siRNA target sequence for 2810439K08Rik (NM_028343.2,447-465).
catcacgacgttaagaaat

SEQ ID NO: 691470 - DNA, 19 bp, Mus musculus
  siRNA target sequence for 2810439K08Rik (NM_028343.2,450-468).
cacgacgttaagaaatgga

SEQ ID NO: 691471 - DNA, 19 bp, Mus musculus
  siRNA target sequence for 2810439K08Rik (NM_028343.2,491-509).
cagcggccatgtacatgtt

SEQ ID NO: 691472 - DNA, 19 bp, Mus musculus
  siRNA target sequence for 2810439K08Rik (NM_028343.2,493-511).
gcggccatgtacatgttct

SEQ ID NO: 691473 - DNA, 19 bp, Mus musculus
  siRNA target sequence for 2810439K08Rik (NM_028343.2,545-563).
cattttctgcacttaggtt

SEQ ID NO: 691474 - DNA, 19 bp, Mus musculus
  siRNA target sequence for 2810439K08Rik (NM_028343.2,551-569).
ctgcacttaggtttatcgt

SEQ ID NO: 691475 - DNA, 19 bp, Mus musculus
  siRNA target sequence for 2810439K08Rik (NM_028343.2,758-776).
gcatttcctactgcattaa

SEQ ID NO: 691476 - DNA, 19 bp, Mus musculus
  siRNA target sequence for 2810439K08Rik (NM_028343.2,836-854).
ctgcgtttaggcatctgtt

SEQ ID NO: 691477 - DNA, 19 bp, Mus musculus
  siRNA target sequence for 2810439K08Rik (NM_028343.2,838-856).
gcgtttaggcatctgttta

SEQ ID NO: 691478 - DNA, 19 bp, Mus musculus
  siRNA target sequence for 2810439K08Rik (NM_028343.2,1022-1040).
gtgtgtcgatgatgtttta

SEQ ID NO: 691479 - DNA, 19 bp, Mus musculus
  siRNA target sequence for 2810439K08Rik (NM_028343.2,1081-1099).
gtggagacaatgtatttca

SEQ ID NO: 691480 - DNA, 19 bp, Mus musculus
  siRNA target sequence for 2810439K08Rik (NM_028343.2,1112-1130).
ctggaaaggttccctattt

SEQ ID NO: 691481 - DNA, 19 bp, Mus musculus
  siRNA target sequence for 2810439K08Rik (NM_028343.2,1135-1153).
caagcagatacgatcatct

SEQ ID NO: 691482 - DNA, 19 bp, Mus musculus
  siRNA target sequence for 2810439K08Rik (NM_028343.2,1138-1156).
gcagatacgatcatctatt

SEQ ID NO: 691483 - DNA, 19 bp, Mus musculus
  siRNA target sequence for 2810439K08Rik (NM_028343.2,1141-1159).
gatacgatcatctattcca

SEQ ID NO: 691484 - DNA, 19 bp, Mus musculus
  siRNA target sequence for 2810439K08Rik (NM_028343.2,1175-1193).
gtttccacgcagctgttat

SEQ ID NO: 691485 - DNA, 19 bp, Mus musculus
  siRNA target sequence for 2810439K08Rik (NM_028343.2,1179-1197).
ccacgcagctgttatggaa

SEQ ID NO: 691486 - DNA, 19 bp, Mus musculus
  siRNA target sequence for 2810439K08Rik (NM_028343.2,1298-1316).
gcgcatctagagagtttca

SEQ ID NO: 691487 - DNA, 19 bp, Mus musculus
  siRNA target sequence for 2810439K08Rik (NM_028343.2,1300-1318).
gcatctagagagtttcaca

SEQ ID NO: 691488 - DNA, 19 bp, Mus musculus
  siRNA target sequence for 2810439K08Rik (NM_028343.2,1301-1319).
catctagagagtttcacaa

SEQ ID NO: 691489 - DNA, 19 bp, Mus musculus
  siRNA target sequence for 2810439K08Rik (NM_028343.2,1304-1322).
ctagagagtttcacaactt

SEQ ID NO: 691490 - DNA, 19 bp, Mus musculus
  siRNA target sequence for 5830458K16Rik (NM_023386.3,73-91).
cccgatgacttcagtactt

SEQ ID NO: 691491 - DNA, 19 bp, Mus musculus
  siRNA target sequence for 5830458K16Rik (NM_023386.3,141-159).
gtggagcctgcatttggat

SEQ ID NO: 691492 - DNA, 19 bp, Mus musculus
  siRNA target sequence for 5830458K16Rik (NM_023386.3,262-280).
gctcaggtgatgatcttgt

SEQ ID NO: 691493 - DNA, 19 bp, Mus musculus
  siRNA target sequence for 5830458K16Rik (NM_023386.3,288-306).
gtacccggacactttgaaa

SEQ ID NO: 691494 - DNA, 19 bp, Mus musculus
  siRNA target sequence for 5830458K16Rik (NM_023386.3,318-336).
ggcacgcatgaggatcttt

SEQ ID NO: 691495 - DNA, 19 bp, Mus musculus
  siRNA target sequence for 5830458K16Rik (NM_023386.3,414-432).
gaataacctagttaattat

SEQ ID NO: 691496 - DNA, 19 bp, Mus musculus
  siRNA target sequence for 5830458K16Rik (NM_023386.3,466-484).
gcattgacctcgaatgcat

SEQ ID NO: 691497 - DNA, 19 bp, Mus musculus
  siRNA target sequence for 5830458K16Rik (NM_023386.3,533-551).
gtgaggcatgcagtctaaa

SEQ ID NO: 691498 - DNA, 19 bp, Mus musculus
  siRNA target sequence for 5830458K16Rik (NM_023386.3,537-555).
ggcatgcagtctaaactct

SEQ ID NO: 691499 - DNA, 19 bp, Mus musculus
  siRNA target sequence for 5830458K16Rik (NM_023386.3,568-586).
gcccttgcacacaaagtaa

SEQ ID NO: 691500 - DNA, 19 bp, Mus musculus
  siRNA target sequence for 5830458K16Rik (NM_023386.3,657-675).
gacccggaatacggatttt

SEQ ID NO: 691501 - DNA, 19 bp, Mus musculus
  siRNA target sequence for 5830458K16Rik (NM_023386.3,750-768).
gccaccactatttctgttt

SEQ ID NO: 691502 - DNA, 19 bp, Mus musculus
  siRNA target sequence for 5830458K16Rik (NM_023386.3,778-796).
gctgcatttgcccttttta

SEQ ID NO: 691503 - DNA, 19 bp, Mus musculus
  siRNA target sequence for 6330415F13Rik (NM_027533.1,49-67).
ggcctgcggtgcatcaagt

SEQ ID NO: 691504 - DNA, 19 bp, Mus musculus
  siRNA target sequence for 6330415F13Rik (NM_027533.1,50-68).
gcctgcggtgcatcaagta

SEQ ID NO: 691505 - DNA, 19 bp, Mus musculus
  siRNA target sequence for 6330415F13Rik (NM_027533.1,51-69).
cctgcggtgcatcaagtat

SEQ ID NO: 691506 - DNA, 19 bp, Mus musculus
  siRNA target sequence for 6330415F13Rik (NM_027533.1,105-123).
cggatcagccgttattgca

SEQ ID NO: 691507 - DNA, 19 bp, Mus musculus
  siRNA target sequence for 6330415F13Rik (NM_027533.1,106-124).
ggatcagccgttattgcat

SEQ ID NO: 691508 - DNA, 19 bp, Mus musculus
  siRNA target sequence for 6330415F13Rik (NM_027533.1,145-163).
ggaggtaccatgaaggatt

SEQ ID NO: 691509 - DNA, 19 bp, Mus musculus
  siRNA target sequence for 6330415F13Rik (NM_027533.1,146-164).
gaggtaccatgaaggattt

SEQ ID NO: 691510 - DNA, 19 bp, Mus musculus
  siRNA target sequence for 6330415F13Rik (NM_027533.1,180-198).
gtccccagagtatttctat

SEQ ID NO: 691511 - DNA, 19 bp, Mus musculus
  siRNA target sequence for 6330415F13Rik (NM_027533.1,289-307).
gtgctcggatcatttttta

SEQ ID NO: 691512 - DNA, 19 bp, Mus musculus
  siRNA target sequence for 6330415F13Rik (NM_027533.1,292-310).
ctcggatcattttttacct

SEQ ID NO: 691513 - DNA, 19 bp, Mus musculus
  siRNA target sequence for 6330415F13Rik (NM_027533.1,366-384).
caaggatgtagctatacga

SEQ ID NO: 691514 - DNA, 19 bp, Mus musculus
  siRNA target sequence for 6330415F13Rik (NM_027533.1,409-427).
gcctacagcgactacctta

SEQ ID NO: 691515 - DNA, 19 bp, Mus musculus
  siRNA target sequence for 6330415F13Rik (NM_027533.1,410-428).
cctacagcgactaccttaa

SEQ ID NO: 691516 - DNA, 19 bp, Mus musculus
  siRNA target sequence for 6330415F13Rik (NM_027533.1,411-429).
ctacagcgactaccttaaa

SEQ ID NO: 691517 - DNA, 19 bp, Mus musculus
  siRNA target sequence for 6330415F13Rik (NM_027533.1,536-554).
caggccacaagaattgcat

SEQ ID NO: 691518 - DNA, 19 bp, Mus musculus
  siRNA target sequence for 6330415F13Rik (NM_027533.1,546-564).
gaattgcatcgacaaaatt

SEQ ID NO: 691519 - DNA, 19 bp, Mus musculus
  siRNA target sequence for 6330415F13Rik (NM_027533.1,569-587).
ccgtaatcagtgctaaact

SEQ ID NO: 691520 - DNA, 19 bp, Mus musculus
  siRNA target sequence for 6330415F13Rik (NM_027533.1,627-645).
cacgatctttggcatgata

SEQ ID NO: 691521 - DNA, 19 bp, Mus musculus
  siRNA target sequence for 6330415F13Rik (NM_027533.1,654-672).
ggtgctttgctgtgcaata

SEQ ID NO: 691522 - DNA, 19 bp, Mus musculus
  siRNA target sequence for 6330415F13Rik (NM_027533.1,674-692).
ggaactcacgcgatgtgat

SEQ ID NO: 691523 - DNA, 19 bp, Mus musculus
  siRNA target sequence for 6330527O06Rik (NM_029530.1,123-141).
gacttcggattctcctaat

SEQ ID NO: 691524 - DNA, 19 bp, Mus musculus
  siRNA target sequence for 6330527O06Rik (NM_029530.1,125-143).
cttcggattctcctaatgt

SEQ ID NO: 691525 - DNA, 19 bp, Mus musculus
  siRNA target sequence for 6330527O06Rik (NM_029530.1,160-178).
ccaaaccgtggcagaacaa

SEQ ID NO: 691526 - DNA, 19 bp, Mus musculus
  siRNA target sequence for 6330527O06Rik (NM_029530.1,165-183).
ccgtggcagaacaagaagt

SEQ ID NO: 691527 - DNA, 19 bp, Mus musculus
  siRNA target sequence for 6330527O06Rik (NM_029530.1,204-222).
ccacgaaccccgagaaaga

SEQ ID NO: 691528 - DNA, 19 bp, Mus musculus
  siRNA target sequence for 6330527O06Rik (NM_029530.1,207-225).
cgaaccccgagaaagacat

SEQ ID NO: 691529 - DNA, 19 bp, Mus musculus
  siRNA target sequence for 6330527O06Rik (NM_029530.1,208-226).
gaaccccgagaaagacata

SEQ ID NO: 691530 - DNA, 19 bp, Mus musculus
  siRNA target sequence for 6330527O06Rik (NM_029530.1,211-229).
ccccgagaaagacatattt

SEQ ID NO: 691531 - DNA, 19 bp, Mus musculus
  siRNA target sequence for 6330527O06Rik (NM_029530.1,253-271).
gtgtctcatggcagagttt

SEQ ID NO: 691532 - DNA, 19 bp, Mus musculus
  siRNA target sequence for 6330527O06Rik (NM_029530.1,276-294).
ccaaatttattgtacctta

SEQ ID NO: 691533 - DNA, 19 bp, Mus musculus
  siRNA target sequence for 6330527O06Rik (NM_029530.1,434-452).
ctcagaatgctctttgtaa

SEQ ID NO: 691534 - DNA, 19 bp, Mus musculus
  siRNA target sequence for 6330527O06Rik (NM_029530.1,482-500).
gaggcgacttggaatctga

SEQ ID NO: 691535 - DNA, 19 bp, Mus musculus
  siRNA target sequence for 6330527O06Rik (NM_029530.1,502-520).
caaggtgcattttgtctat

SEQ ID NO: 691536 - DNA, 19 bp, Mus musculus
  siRNA target sequence for 6330527O06Rik (NM_029530.1,505-523).
ggtgcattttgtctatgat

SEQ ID NO: 691537 - DNA, 19 bp, Mus musculus
  siRNA target sequence for 6330527O06Rik (NM_029530.1,506-524).
gtgcattttgtctatgatt

SEQ ID NO: 691538 - DNA, 19 bp, Mus musculus
  siRNA target sequence for 6330527O06Rik (NM_029530.1,526-544).
ctcggagaagactcacttt

SEQ ID NO: 691539 - DNA, 19 bp, Mus musculus
  siRNA target sequence for 6330527O06Rik (NM_029530.1,528-546).
cggagaagactcactttaa

SEQ ID NO: 691540 - DNA, 19 bp, Mus musculus
  siRNA target sequence for 6330527O06Rik (NM_029530.1,551-569).
cctgtgaaggttaataagt

SEQ ID NO: 691541 - DNA, 19 bp, Mus musculus
  siRNA target sequence for 6330527O06Rik (NM_029530.1,610-628).
gctgggatgtcctatgagt

SEQ ID NO: 691542 - DNA, 19 bp, Mus musculus
  siRNA target sequence for 6530409L22Rik (NM_024270.1,210-228).
caggattgagtcctatgaa

SEQ ID NO: 691543 - DNA, 19 bp, Mus musculus
  siRNA target sequence for 6530409L22Rik (NM_024270.1,284-302).
cctttgacctcttatttgt

SEQ ID NO: 691544 - DNA, 19 bp, Mus musculus
  siRNA target sequence for 6530409L22Rik (NM_024270.1,291-309).
cctcttatttgtaacgtta

SEQ ID NO: 691545 - DNA, 19 bp, Mus musculus
  siRNA target sequence for 6530409L22Rik (NM_024270.1,305-323).
cgttactgtggataataga

SEQ ID NO: 691546 - DNA, 19 bp, Mus musculus
  siRNA target sequence for 6530409L22Rik (NM_024270.1,360-378).
gaaggaagtgattcactat

SEQ ID NO: 691547 - DNA, 19 bp, Mus musculus
  siRNA target sequence for 6530409L22Rik (NM_024270.1,381-399).
ctactactcctcttacttt

SEQ ID NO: 691548 - DNA, 19 bp, Mus musculus
  siRNA target sequence for 6530409L22Rik (NM_024270.1,384-402).
ctactcctcttactttgat

SEQ ID NO: 691549 - DNA, 19 bp, Mus musculus
  siRNA target sequence for 6530409L22Rik (NM_024270.1,416-434).
cagtttttcgattcaaagt

SEQ ID NO: 691550 - DNA, 19 bp, Mus musculus
  siRNA target sequence for 6530409L22Rik (NM_024270.1,425-443).
gattcaaagtgctgatact

SEQ ID NO: 691551 - DNA, 19 bp, Mus musculus
  siRNA target sequence for 6530409L22Rik (NM_024270.1,474-492).
gtgggcaatagcgttaaca

SEQ ID NO: 691552 - DNA, 19 bp, Mus musculus
  siRNA target sequence for 6530409L22Rik (NM_024270.1,477-495).
ggcaatagcgttaacaaca

SEQ ID NO: 691553 - DNA, 19 bp, Mus musculus
  siRNA target sequence for 6530409L22Rik (NM_024270.1,501-519).
gaccagtgcctttctatta

SEQ ID NO: 691554 - DNA, 19 bp, Mus musculus
  siRNA target sequence for 6530409L22Rik (NM_024270.1,506-524).
gtgcctttctattagcaaa

SEQ ID NO: 691555 - DNA, 19 bp, Mus musculus
  siRNA target sequence for 6530409L22Rik (NM_024270.1,526-544).
gtgatcctctcaaagcttt

SEQ ID NO: 691556 - DNA, 19 bp, Mus musculus
  siRNA target sequence for 6530409L22Rik (NM_024270.1,711-729).
gctctctgatggtcagttt

SEQ ID NO: 691557 - DNA, 19 bp, Mus musculus
  siRNA target sequence for 9130013K24Rik (NM_029001.2,163-181).
ggactgtgcgtttttatga

SEQ ID NO: 691558 - DNA, 19 bp, Mus musculus
  siRNA target sequence for 9130013K24Rik (NM_029001.2,164-182).
gactgtgcgtttttatgat

SEQ ID NO: 691559 - DNA, 19 bp, Mus musculus
  siRNA target sequence for 9130013K24Rik (NM_029001.2,166-184).
ctgtgcgtttttatgataa

SEQ ID NO: 691560 - DNA, 19 bp, Mus musculus
  siRNA target sequence for 9130013K24Rik (NM_029001.2,171-189).
cgtttttatgataattgga

SEQ ID NO: 691561 - DNA, 19 bp, Mus musculus
  siRNA target sequence for 9130013K24Rik (NM_029001.2,235-253).
cgcctctgccacaaaccat

SEQ ID NO: 691562 - DNA, 19 bp, Mus musculus
  siRNA target sequence for 9130013K24Rik (NM_029001.2,264-282).
ctctatgtctattttgtta

SEQ ID NO: 691563 - DNA, 19 bp, Mus musculus
  siRNA target sequence for 9130013K24Rik (NM_029001.2,313-331).
ggaagccctttgaactcaa

SEQ ID NO: 691564 - DNA, 19 bp, Mus musculus
  siRNA target sequence for 9130013K24Rik (NM_029001.2,327-345).
ctcaagaaagcgatgataa

SEQ ID NO: 691565 - DNA, 19 bp, Mus musculus
  siRNA target sequence for 9130013K24Rik (NM_029001.2,336-354).
gcgatgataacgtacaatt

SEQ ID NO: 691566 - DNA, 19 bp, Mus musculus
  siRNA target sequence for 9130013K24Rik (NM_029001.2,337-355).
cgatgataacgtacaattt

SEQ ID NO: 691567 - DNA, 19 bp, Mus musculus
  siRNA target sequence for 9130013K24Rik (NM_029001.2,338-356).
gatgataacgtacaatttt

SEQ ID NO: 691568 - DNA, 19 bp, Mus musculus
  siRNA target sequence for 9130013K24Rik (NM_029001.2,422-440).
ctcgtttcgatgtgacatt

SEQ ID NO: 691569 - DNA, 19 bp, Mus musculus
  siRNA target sequence for 9130013K24Rik (NM_029001.2,424-442).
cgtttcgatgtgacattgt

SEQ ID NO: 691570 - DNA, 19 bp, Mus musculus
  siRNA target sequence for 9130013K24Rik (NM_029001.2,425-443).
gtttcgatgtgacattgtt

SEQ ID NO: 691571 - DNA, 19 bp, Mus musculus
  siRNA target sequence for 9130013K24Rik (NM_029001.2,516-534).
gagctgttagacactatct

SEQ ID NO: 691572 - DNA, 19 bp, Mus musculus
  siRNA target sequence for 9130013K24Rik (NM_029001.2,540-558).
gttctgcgtaagaaaaaca

SEQ ID NO: 691573 - DNA, 19 bp, Mus musculus
  siRNA target sequence for 9130013K24Rik (NM_029001.2,634-652).
caggtggtctgggaacatt

SEQ ID NO: 691574 - DNA, 19 bp, Mus musculus
  siRNA target sequence for 9130013K24Rik (NM_029001.2,675-693).
gtgcacgtggtcatgtatt

SEQ ID NO: 691575 - DNA, 19 bp, Mus musculus
  siRNA target sequence for 9130013K24Rik (NM_029001.2,677-695).
gcacgtggtcatgtattct

SEQ ID NO: 691576 - DNA, 19 bp, Mus musculus
  siRNA target sequence for 9130013K24Rik (NM_029001.2,678-696).
cacgtggtcatgtattctt

SEQ ID NO: 691577 - DNA, 19 bp, Mus musculus
  siRNA target sequence for 9130013K24Rik (NM_029001.2,852-870).
ctgtatatcatcatgagtt

SEQ ID NO: 691578 - DNA, 19 bp, Mus musculus
  siRNA target sequence for 9130013K24Rik (NM_029001.2,888-906).
ctgctctttctccactttt

SEQ ID NO: 691579 - DNA, 19 bp, Mus musculus
  siRNA target sequence for 9130013K24Rik (NM_029001.2,932-950).
gaggttgcccaaaactcta

SEQ ID NO: 691580 - DNA, 19 bp, Mus musculus
  siRNA target sequence for 9130013K24Rik (NM_029001.2,938-956).
gcccaaaactctagaaaat

SEQ ID NO: 691581 - DNA, 19 bp, Mus musculus
  siRNA target sequence for 9430068N19Rik (NM_021607.2,113-131).
cagtggagaggaaaatcta

SEQ ID NO: 691582 - DNA, 19 bp, Mus musculus
  siRNA target sequence for 9430068N19Rik (NM_021607.2,132-150).
cattcccttaaataaaaca

SEQ ID NO: 691583 - DNA, 19 bp, Mus musculus
  siRNA target sequence for 9430068N19Rik (NM_021607.2,171-189).
caacgccactcatcagatt

SEQ ID NO: 691584 - DNA, 19 bp, Mus musculus
  siRNA target sequence for 9430068N19Rik (NM_021607.2,275-293).
gccccaaccccccttacat

SEQ ID NO: 691585 - DNA, 19 bp, Mus musculus
  siRNA target sequence for 9430068N19Rik (NM_021607.2,430-448).
ccaaatgatgggtttggta

SEQ ID NO: 691586 - DNA, 19 bp, Mus musculus
  siRNA target sequence for 9430068N19Rik (NM_021607.2,431-449).
caaatgatgggtttggtat

SEQ ID NO: 691587 - DNA, 19 bp, Mus musculus
  siRNA target sequence for 9430068N19Rik (NM_021607.2,436-454).
gatgggtttggtatttact

SEQ ID NO: 691588 - DNA, 19 bp, Mus musculus
  siRNA target sequence for 9430068N19Rik (NM_021607.2,787-805).
cttaagcctataaatacat

SEQ ID NO: 691589 - DNA, 19 bp, Mus musculus
  siRNA target sequence for 9430068N19Rik (NM_021607.2,853-871).
ctggatagccggtcctttt

SEQ ID NO: 691590 - DNA, 19 bp, Mus musculus
  siRNA target sequence for 9430068N19Rik (NM_021607.2,856-874).
gatagccggtcctttttct

SEQ ID NO: 691591 - DNA, 19 bp, Mus musculus
  siRNA target sequence for 9430068N19Rik (NM_021607.2,955-973).
cctgatgtgaccactctat

SEQ ID NO: 691592 - DNA, 19 bp, Mus musculus
  siRNA target sequence for 9430068N19Rik (NM_021607.2,965-983).
ccactctatcccgaaatgt

SEQ ID NO: 691593 - DNA, 19 bp, Mus musculus
  siRNA target sequence for 9430068N19Rik (NM_021607.2,968-986).
ctctatcccgaaatgtgat

SEQ ID NO: 691594 - DNA, 19 bp, Mus musculus
  siRNA target sequence for 9430068N19Rik (NM_021607.2,1000-1018).
cagggggaaacttttgact

SEQ ID NO: 691595 - DNA, 19 bp, Mus musculus
  siRNA target sequence for 9430068N19Rik (NM_021607.2,1004-1022).
gggaaacttttgactacat

SEQ ID NO: 691596 - DNA, 19 bp, Mus musculus
  siRNA target sequence for 9430068N19Rik (NM_021607.2,1005-1023).
ggaaacttttgactacatt

SEQ ID NO: 691597 - DNA, 19 bp, Mus musculus
  siRNA target sequence for 9430068N19Rik (NM_021607.2,1031-1049).
cacggatggtctatgatat

SEQ ID NO: 691598 - DNA, 19 bp, Mus musculus
  siRNA target sequence for 9430068N19Rik (NM_021607.2,1108-1126).
caggtggccctaagaactt

SEQ ID NO: 691599 - DNA, 19 bp, Mus musculus
  siRNA target sequence for 9430068N19Rik (NM_021607.2,1113-1131).
ggccctaagaacttcacta

SEQ ID NO: 691600 - DNA, 19 bp, Mus musculus
  siRNA target sequence for 9430068N19Rik (NM_021607.2,1300-1318).
cttcgggctcgaaacatct

SEQ ID NO: 691601 - DNA, 19 bp, Mus musculus
  siRNA target sequence for 9430068N19Rik (NM_021607.2,1349-1367).
ccttccacaatcggtatta

SEQ ID NO: 691602 - DNA, 19 bp, Mus musculus
  siRNA target sequence for 9430068N19Rik (NM_021607.2,1360-1378).
cggtattaccagagcattt

SEQ ID NO: 691603 - DNA, 19 bp, Mus musculus
  siRNA target sequence for 9430068N19Rik (NM_021607.2,1361-1379).
ggtattaccagagcattta

SEQ ID NO: 691604 - DNA, 19 bp, Mus musculus
  siRNA target sequence for 9430068N19Rik (NM_021607.2,1362-1380).
gtattaccagagcatttat

SEQ ID NO: 691605 - DNA, 19 bp, Mus musculus
  siRNA target sequence for 9430068N19Rik (NM_021607.2,1381-1399).
gacacggctgagaacatta

SEQ ID NO: 691606 - DNA, 19 bp, Mus musculus
  siRNA target sequence for 9430068N19Rik (NM_021607.2,1383-1401).
cacggctgagaacattaat

SEQ ID NO: 691607 - DNA, 19 bp, Mus musculus
  siRNA target sequence for 9430068N19Rik (NM_021607.2,1385-1403).
cggctgagaacattaatgt

SEQ ID NO: 691608 - DNA, 19 bp, Mus musculus
  siRNA target sequence for 9430068N19Rik (NM_021607.2,1488-1506).
gctggcgcgtgcactgtat

SEQ ID NO: 691609 - DNA, 19 bp, Mus musculus
  siRNA target sequence for 9430068N19Rik (NM_021607.2,1546-1564).
gctgatccccagacagtta

SEQ ID NO: 691610 - DNA, 19 bp, Mus musculus
  siRNA target sequence for 9430068N19Rik (NM_021607.2,1627-1645).
catgacctaaggtcctatt

SEQ ID NO: 691611 - DNA, 19 bp, Mus musculus
  siRNA target sequence for 9430068N19Rik (NM_021607.2,1632-1650).
cctaaggtcctatttggat

SEQ ID NO: 691612 - DNA, 19 bp, Mus musculus
  siRNA target sequence for 9430068N19Rik (NM_021607.2,1647-1665).
ggatgacaggcctcttcaa

SEQ ID NO: 691613 - DNA, 19 bp, Mus musculus
  siRNA target sequence for 9430068N19Rik (NM_021607.2,1775-1793).
caagtaaagtcccaaatga

SEQ ID NO: 691614 - DNA, 19 bp, Mus musculus
  siRNA target sequence for 9430068N19Rik (NM_021607.2,1977-1995).
ccaagctcggatattccta

SEQ ID NO: 691615 - DNA, 19 bp, Mus musculus
  siRNA target sequence for 9430068N19Rik (NM_021607.2,2003-2021).
gcaaagagcttgagttcat

SEQ ID NO: 691616 - DNA, 19 bp, Mus musculus
  siRNA target sequence for 9430068N19Rik (NM_021607.2,2064-2082).
cgtcacctactgcatcaat

SEQ ID NO: 691617 - DNA, 19 bp, Mus musculus
  siRNA target sequence for 9430068N19Rik (NM_021607.2,2084-2102).
ccaaagccgacgtcctttt

SEQ ID NO: 691618 - DNA, 19 bp, Mus musculus
  siRNA target sequence for 9430068N19Rik (NM_021607.2,2119-2137).
ccaggagctgtgtcttact

SEQ ID NO: 691619 - DNA, 19 bp, Mus musculus
  siRNA target sequence for 9530098M12Rik (NM_172465.1,360-378).
cacggaaatgggagaaact

SEQ ID NO: 691620 - DNA, 19 bp, Mus musculus
  siRNA target sequence for 9530098M12Rik (NM_172465.1,468-486).
ggacatgtacactcttctt

SEQ ID NO: 691621 - DNA, 19 bp, Mus musculus
  siRNA target sequence for 9530098M12Rik (NM_172465.1,688-706).
gcgaccacctcctcgtatt

SEQ ID NO: 691622 - DNA, 19 bp, Mus musculus
  siRNA target sequence for 9530098M12Rik (NM_172465.1,689-707).
cgaccacctcctcgtatta

SEQ ID NO: 691623 - DNA, 19 bp, Mus musculus
  siRNA target sequence for 9530098M12Rik (NM_172465.1,690-708).
gaccacctcctcgtattaa

SEQ ID NO: 691624 - DNA, 19 bp, Mus musculus
  siRNA target sequence for 9530098M12Rik (NM_172465.1,693-711).
cacctcctcgtattaagaa

SEQ ID NO: 691625 - DNA, 19 bp, Mus musculus
  siRNA target sequence for 9530098M12Rik (NM_172465.1,695-713).
cctcctcgtattaagaatt

SEQ ID NO: 691626 - DNA, 19 bp, Mus musculus
  siRNA target sequence for 9530098M12Rik (NM_172465.1,699-717).
ctcgtattaagaatttcca

SEQ ID NO: 691627 - DNA, 19 bp, Mus musculus
  siRNA target sequence for 9530098M12Rik (NM_172465.1,903-921).
ccctcctcacaatttatgt

SEQ ID NO: 691628 - DNA, 19 bp, Mus musculus
  siRNA target sequence for 9530098M12Rik (NM_172465.1,927-945).
cctttaacatcgtctatgt

SEQ ID NO: 691629 - DNA, 19 bp, Mus musculus
  siRNA target sequence for 9530098M12Rik (NM_172465.1,946-964).
ggccctcaaatccttgaaa

SEQ ID NO: 691630 - DNA, 19 bp, Mus musculus
  siRNA target sequence for 9530098M12Rik (NM_172465.1,947-965).
gccctcaaatccttgaaaa

SEQ ID NO: 691631 - DNA, 19 bp, Mus musculus
  siRNA target sequence for 9530098M12Rik (NM_172465.1,1007-1025).
ctggaagtactcatttgct

SEQ ID NO: 691632 - DNA, 19 bp, Mus musculus
  siRNA target sequence for 9530098M12Rik (NM_172465.1,1013-1031).
gtactcatttgcttcttca

SEQ ID NO: 691633 - DNA, 19 bp, Mus musculus
  siRNA target sequence for 9530098M12Rik (NM_172465.1,1147-1165).
gtacagccacggcaacatt

SEQ ID NO: 691634 - DNA, 19 bp, Mus musculus
  siRNA target sequence for 9530098M12Rik (NM_172465.1,1307-1325).
gcctccacagagcatatga

SEQ ID NO: 691635 - DNA, 19 bp, Mus musculus
  siRNA target sequence for 9530098M12Rik (NM_172465.1,1308-1326).
cctccacagagcatatgaa

SEQ ID NO: 691636 - DNA, 19 bp, Mus musculus
  siRNA target sequence for 9530098M12Rik (NM_172465.1,1319-1337).
catatgaactctaatgaga

SEQ ID NO: 691637 - DNA, 19 bp, Mus musculus
  siRNA target sequence for A730017C20Rik (NM_173759.2,210-228).
gcgaatcaagggatttggt

SEQ ID NO: 691638 - DNA, 19 bp, Mus musculus
  siRNA target sequence for A730017C20Rik (NM_173759.2,262-280).
gcatccatgtcttcagtta

SEQ ID NO: 691639 - DNA, 19 bp, Mus musculus
  siRNA target sequence for A730017C20Rik (NM_173759.2,282-300).
gaagaacaacccgttgtat

SEQ ID NO: 691640 - DNA, 19 bp, Mus musculus
  siRNA target sequence for A730017C20Rik (NM_173759.2,291-309).
cccgttgtatggtgacata

SEQ ID NO: 691641 - DNA, 19 bp, Mus musculus
  siRNA target sequence for A730017C20Rik (NM_173759.2,292-310).
ccgttgtatggtgacataa

SEQ ID NO: 691642 - DNA, 19 bp, Mus musculus
  siRNA target sequence for A730017C20Rik (NM_173759.2,353-371).
ggaccattgaggagtatga

SEQ ID NO: 691643 - DNA, 19 bp, Mus musculus
  siRNA target sequence for A730017C20Rik (NM_173759.2,375-393).
gcattctgtgcatacaaat

SEQ ID NO: 691644 - DNA, 19 bp, Mus musculus
  siRNA target sequence for A730017C20Rik (NM_173759.2,493-511).
cgcaacaagcgatcaaaat

SEQ ID NO: 691645 - DNA, 19 bp, Mus musculus
  siRNA target sequence for A730017C20Rik (NM_173759.2,494-512).
gcaacaagcgatcaaaatt

SEQ ID NO: 691646 - DNA, 19 bp, Mus musculus
  siRNA target sequence for A730017C20Rik (NM_173759.2,513-531).
gtgtcacatgggtctgatt

SEQ ID NO: 691647 - DNA, 19 bp, Mus musculus
  siRNA target sequence for A730017C20Rik (NM_173759.2,565-583).
gtgactctcagcaccatat

SEQ ID NO: 691648 - DNA, 19 bp, Mus musculus
  siRNA target sequence for Adpn (NM_054088.1,150-168).
cgcgatgcgcgcactttct

SEQ ID NO: 691649 - DNA, 19 bp, Mus musculus
  siRNA target sequence for Adpn (NM_054088.1,151-169).
gcgatgcgcgcactttctt

SEQ ID NO: 691650 - DNA, 19 bp, Mus musculus
  siRNA target sequence for Adpn (NM_054088.1,216-234).
ctccctctcggccgtataa

SEQ ID NO: 691651 - DNA, 19 bp, Mus musculus
  siRNA target sequence for Adpn (NM_054088.1,220-238).
ctctcggccgtataatgga

SEQ ID NO: 691652 - DNA, 19 bp, Mus musculus
  siRNA target sequence for Adpn (NM_054088.1,286-304).
ccctccacccgttcttcaa

SEQ ID NO: 691653 - DNA, 19 bp, Mus musculus
  siRNA target sequence for Adpn (NM_054088.1,288-306).
ctccacccgttcttcaaca

SEQ ID NO: 691654 - DNA, 19 bp, Mus musculus
  siRNA target sequence for Adpn (NM_054088.1,294-312).
ccgttcttcaacattaaca

SEQ ID NO: 691655 - DNA, 19 bp, Mus musculus
  siRNA target sequence for Adpn (NM_054088.1,420-438).
ctggtgtctgagttccatt

SEQ ID NO: 691656 - DNA, 19 bp, Mus musculus
  siRNA target sequence for Adpn (NM_054088.1,740-758).
gggagagctgtgctatcaa

SEQ ID NO: 691657 - DNA, 19 bp, Mus musculus
  siRNA target sequence for Adpn (NM_054088.1,887-905).
gccagtcagcctatgcttt

SEQ ID NO: 691658 - DNA, 19 bp, Mus musculus
  siRNA target sequence for Adpn (NM_054088.1,888-906).
ccagtcagcctatgcttta

SEQ ID NO: 691659 - DNA, 19 bp, Mus musculus
  siRNA target sequence for Adpn (NM_054088.1,893-911).
cagcctatgctttacagat

SEQ ID NO: 691660 - DNA, 19 bp, Mus musculus
  siRNA target sequence for Adpn (NM_054088.1,981-999).
ggctacctgagcaaagtct

SEQ ID NO: 691661 - DNA, 19 bp, Mus musculus
  siRNA target sequence for Adpn (NM_054088.1,1101-1119).
cctgatatccaggatgata

SEQ ID NO: 691662 - DNA, 19 bp, Mus musculus
  siRNA target sequence for Adpn (NM_054088.1,1102-1120).
ctgatatccaggatgatat

SEQ ID NO: 691663 - DNA, 19 bp, Mus musculus
  siRNA target sequence for Adpn (NM_054088.1,1116-1134).
gatatccagtggctacaat

SEQ ID NO: 691664 - DNA, 19 bp, Mus musculus
  siRNA target sequence for AF261233 (NM_133221.1,230-248).
cggagacccatccacaaaa

SEQ ID NO: 691665 - DNA, 19 bp, Mus musculus
  siRNA target sequence for AF261233 (NM_133221.1,336-354).
gatcgctgtgactttgtca

SEQ ID NO: 691666 - DNA, 19 bp, Mus musculus
  siRNA target sequence for AF261233 (NM_133221.1,444-462).
gccatcaccctctacgttt

SEQ ID NO: 691667 - DNA, 19 bp, Mus musculus
  siRNA target sequence for AF261233 (NM_133221.1,445-463).
ccatcaccctctacgtttt

SEQ ID NO: 691668 - DNA, 19 bp, Mus musculus
  siRNA target sequence for AF261233 (NM_133221.1,468-486).
ctgctttacctctttctga

SEQ ID NO: 691669 - DNA, 19 bp, Mus musculus
  siRNA target sequence for AF261233 (NM_133221.1,656-674).
ggccatcggggctctgttt

SEQ ID NO: 691670 - DNA, 19 bp, Mus musculus
  siRNA target sequence for AF261233 (NM_133221.1,1123-1141).
gggtcctgaaggtagtcaa

SEQ ID NO: 691671 - DNA, 19 bp, Mus musculus
  siRNA target sequence for AF261233 (NM_133221.1,1196-1214).
ggacgatcggaattggaaa

SEQ ID NO: 691672 - DNA, 19 bp, Mus musculus
  siRNA target sequence for AF261233 (NM_133221.1,1367-1385).
ctttgccacgtctaacaga

SEQ ID NO: 691673 - DNA, 19 bp, Mus musculus
  siRNA target sequence for AF261233 (NM_133221.1,1433-1451).
cagtgccctgtggatcaat

SEQ ID NO: 691674 - DNA, 19 bp, Mus musculus
  siRNA target sequence for AF261233 (NM_133221.1,1558-1576).
gagatgccttctcagattt

SEQ ID NO: 691675 - DNA, 19 bp, Mus musculus
  siRNA target sequence for AF261233 (NM_133221.1,1783-1801).
ccgtgccgcttcagtgttt

SEQ ID NO: 691676 - DNA, 19 bp, Mus musculus
  siRNA target sequence for AF529169 (NM_153509.1,445-463).
ccctctttttggtgaagat

SEQ ID NO: 691677 - DNA, 19 bp, Mus musculus
  siRNA target sequence for AF529169 (NM_153509.1,449-467).
ctttttggtgaagatctta

SEQ ID NO: 691678 - DNA, 19 bp, Mus musculus
  siRNA target sequence for AF529169 (NM_153509.1,476-494).
ggacagtaaacaaaatact

SEQ ID NO: 691679 - DNA, 19 bp, Mus musculus
  siRNA target sequence for AF529169 (NM_153509.1,479-497).
cagtaaacaaaatactgtt

SEQ ID NO: 691680 - DNA, 19 bp, Mus musculus
  siRNA target sequence for AF529169 (NM_153509.1,558-576).
ctgagaagtgtgcttttct

SEQ ID NO: 691681 - DNA, 19 bp, Mus musculus
  siRNA target sequence for AF529169 (NM_153509.1,604-622).
cagcaactttattcaaaga

SEQ ID NO: 691682 - DNA, 19 bp, Mus musculus
  siRNA target sequence for AF529169 (NM_153509.1,606-624).
gcaactttattcaaagaca

SEQ ID NO: 691683 - DNA, 19 bp, Mus musculus
  siRNA target sequence for AF529169 (NM_153509.1,669-687).
gtggcagcagatatcgtaa

SEQ ID NO: 691684 - DNA, 19 bp, Mus musculus
  siRNA target sequence for AF529169 (NM_153509.1,672-690).
gcagcagatatcgtaacaa

SEQ ID NO: 691685 - DNA, 19 bp, Mus musculus
  siRNA target sequence for AF529169 (NM_153509.1,673-691).
cagcagatatcgtaacaat

SEQ ID NO: 691686 - DNA, 19 bp, Mus musculus
  siRNA target sequence for AF529169 (NM_153509.1,675-693).
gcagatatcgtaacaatct

SEQ ID NO: 691687 - DNA, 19 bp, Mus musculus
  siRNA target sequence for AF529169 (NM_153509.1,676-694).
cagatatcgtaacaatctt

SEQ ID NO: 691688 - DNA, 19 bp, Mus musculus
  siRNA target sequence for AF529169 (NM_153509.1,678-696).
gatatcgtaacaatcttca

SEQ ID NO: 691689 - DNA, 19 bp, Mus musculus
  siRNA target sequence for AF529169 (NM_153509.1,804-822).
gtgtgcagcccgacagttt

SEQ ID NO: 691690 - DNA, 19 bp, Mus musculus
  siRNA target sequence for AF529169 (NM_153509.1,875-893).
caccaggcagtcatccaaa

SEQ ID NO: 691691 - DNA, 19 bp, Mus musculus
  siRNA target sequence for AF529169 (NM_153509.1,1012-1030).
ccctgtccccctattctgt

SEQ ID NO: 691692 - DNA, 19 bp, Mus musculus
  siRNA target sequence for AF529169 (NM_153509.1,1063-1081).
cctatttccccatgaatat

SEQ ID NO: 691693 - DNA, 19 bp, Mus musculus
  siRNA target sequence for AF529169 (NM_153509.1,1064-1082).
ctatttccccatgaatatt

SEQ ID NO: 691694 - DNA, 19 bp, Mus musculus
  siRNA target sequence for AF529169 (NM_153509.1,1238-1256).
cagtttggttggtacaact

SEQ ID NO: 691695 - DNA, 19 bp, Mus musculus
  siRNA target sequence for AF529169 (NM_153509.1,1240-1258).
gtttggttggtacaactaa

SEQ ID NO: 691696 - DNA, 19 bp, Mus musculus
  siRNA target sequence for AF529169 (NM_153509.1,1342-1360).
cttaccacaaccaatacct

SEQ ID NO: 691697 - DNA, 19 bp, Mus musculus
  siRNA target sequence for AF529169 (NM_153509.1,1421-1439).
ccttcaagcctctacctat

SEQ ID NO: 691698 - DNA, 19 bp, Mus musculus
  siRNA target sequence for AF529169 (NM_153509.1,1422-1440).
cttcaagcctctacctatt

SEQ ID NO: 691699 - DNA, 19 bp, Mus musculus
  siRNA target sequence for AF529169 (NM_153509.1,1486-1504).
cagggaggtccagtaaaca

SEQ ID NO: 691700 - DNA, 19 bp, Mus musculus
  siRNA target sequence for AF529169 (NM_153509.1,1488-1506).
gggaggtccagtaaacaga

SEQ ID NO: 691701 - DNA, 19 bp, Mus musculus
  siRNA target sequence for AF529169 (NM_153509.1,1540-1558).
cggaggaagtgcctgattt

SEQ ID NO: 691702 - DNA, 19 bp, Mus musculus
  siRNA target sequence for AF529169 (NM_153509.1,1544-1562).
ggaagtgcctgatttcgaa

SEQ ID NO: 691703 - DNA, 19 bp, Mus musculus
  siRNA target sequence for AF529169 (NM_153509.1,1560-1578).
gaacgctcctttttcaata

SEQ ID NO: 691704 - DNA, 19 bp, Mus musculus
  siRNA target sequence for AF529169 (NM_153509.1,1563-1581).
cgctcctttttcaatagaa

SEQ ID NO: 691705 - DNA, 19 bp, Mus musculus
  siRNA target sequence for AF529169 (NM_153509.1,1565-1583).
ctcctttttcaatagaaat

SEQ ID NO: 691706 - DNA, 19 bp, Mus musculus
  siRNA target sequence for AF529169 (NM_153509.1,1593-1611).
gagaagctacgctatccaa

SEQ ID NO: 691707 - DNA, 19 bp, Mus musculus
  siRNA target sequence for AF529169 (NM_153509.1,1595-1613).
gaagctacgctatccaaat

SEQ ID NO: 691708 - DNA, 19 bp, Mus musculus
  siRNA target sequence for AF529169 (NM_153509.1,1598-1616).
gctacgctatccaaattct

SEQ ID NO: 691709 - DNA, 19 bp, Mus musculus
  siRNA target sequence for AF529169 (NM_153509.1,1622-1640).
ccagactcccaatttctca

SEQ ID NO: 691710 - DNA, 19 bp, Mus musculus
  siRNA target sequence for AF529169 (NM_153509.1,1716-1734).
ccaaatggactcaaatcga

SEQ ID NO: 691711 - DNA, 19 bp, Mus musculus
  siRNA target sequence for AF529169 (NM_153509.1,1722-1740).
ggactcaaatcgaaagaga

SEQ ID NO: 691712 - DNA, 19 bp, Mus musculus
  siRNA target sequence for AF529169 (NM_153509.1,1747-1765).
cccctgttgacctagagaa

SEQ ID NO: 691713 - DNA, 19 bp, Mus musculus
  siRNA target sequence for AF529169 (NM_153509.1,1871-1889).
ggatccccccaaatgcaaa

SEQ ID NO: 691714 - DNA, 19 bp, Mus musculus
  siRNA target sequence for AF529169 (NM_153509.1,2020-2038).
gctccacaggagtgataca

SEQ ID NO: 691715 - DNA, 19 bp, Mus musculus
  siRNA target sequence for AF529169 (NM_153509.1,2069-2087).
gtctcagcttcataagtca

SEQ ID NO: 691716 - DNA, 19 bp, Mus musculus
  siRNA target sequence for AF529169 (NM_153509.1,2079-2097).
cataagtcagactgtgata

SEQ ID NO: 691717 - DNA, 19 bp, Mus musculus
  siRNA target sequence for AF529169 (NM_153509.1,2109-2127).
caccacctcgccaaaatca

SEQ ID NO: 691718 - DNA, 19 bp, Mus musculus
  siRNA target sequence for AF529169 (NM_153509.1,2161-2179).
gtaaccggcctgaaaacgt

SEQ ID NO: 691719 - DNA, 19 bp, Mus musculus
  siRNA target sequence for AF529169 (NM_153509.1,2266-2284).
ctggggtccgagaggaaat

SEQ ID NO: 691720 - DNA, 19 bp, Mus musculus
  siRNA target sequence for AF529169 (NM_153509.1,2375-2393).
gagtgaggcaccttctgat

SEQ ID NO: 691721 - DNA, 19 bp, Mus musculus
  siRNA target sequence for AF529169 (NM_153509.1,2478-2496).
gatgccagtggaagtaaca

SEQ ID NO: 691722 - DNA, 19 bp, Mus musculus
  siRNA target sequence for AF529169 (NM_153509.1,2508-2526).
cgtgtcaaggccttaaaga

SEQ ID NO: 691723 - DNA, 19 bp, Mus musculus
  siRNA target sequence for AF529169 (NM_153509.1,2573-2591).
cagtgccacagagtctaaa

SEQ ID NO: 691724 - DNA, 19 bp, Mus musculus
  siRNA target sequence for AF529169 (NM_153509.1,2575-2593).
gtgccacagagtctaaaat

SEQ ID NO: 691725 - DNA, 19 bp, Mus musculus
  siRNA target sequence for AF529169 (NM_153509.1,2619-2637).
gactggcgaaccatcacat

SEQ ID NO: 691726 - DNA, 19 bp, Mus musculus
  siRNA target sequence for AF529169 (NM_153509.1,2762-2780).
gcccaagcagcccaaagat

SEQ ID NO: 691727 - DNA, 19 bp, Mus musculus
  siRNA target sequence for AF529169 (NM_153509.1,2846-2864).
gagcaaccccctgtataca

SEQ ID NO: 691728 - DNA, 19 bp, Mus musculus
  siRNA target sequence for AF529169 (NM_153509.1,3040-3058).
gctatgattcattactaaa

SEQ ID NO: 691729 - DNA, 19 bp, Mus musculus
  siRNA target sequence for AF529169 (NM_153509.1,3079-3097).
gacgagccaaggtttgcaa

SEQ ID NO: 691730 - DNA, 19 bp, Mus musculus
  siRNA target sequence for AF529169 (NM_153509.1,3094-3112).
gcaagatcgctgctcttat

SEQ ID NO: 691731 - DNA, 19 bp, Mus musculus
  siRNA target sequence for AF529169 (NM_153509.1,3124-3142).
catgcacggtcattcttgt

SEQ ID NO: 691732 - DNA, 19 bp, Mus musculus
  siRNA target sequence for AF529169 (NM_153509.1,3127-3145).
gcacggtcattcttgtcat

SEQ ID NO: 691733 - DNA, 19 bp, Mus musculus
  siRNA target sequence for AF529169 (NM_153509.1,3128-3146).
cacggtcattcttgtcatt

SEQ ID NO: 691734 - DNA, 19 bp, Mus musculus
  siRNA target sequence for AF529169 (NM_153509.1,3130-3148).
cggtcattcttgtcattgt

SEQ ID NO: 691735 - DNA, 19 bp, Mus musculus
  siRNA target sequence for AF529169 (NM_153509.1,3153-3171).
ccaatctgcacgatgaagt

SEQ ID NO: 691736 - DNA, 19 bp, Mus musculus
  siRNA target sequence for Ager (NM_007425.1,142-160).
cccagcagctagaatggaa

SEQ ID NO: 691737 - DNA, 19 bp, Mus musculus
  siRNA target sequence for Ager (NM_007425.1,147-165).
cagctagaatggaaactga

SEQ ID NO: 691738 - DNA, 19 bp, Mus musculus
  siRNA target sequence for Ager (NM_007425.1,294-312).
cggtgtcgggcaactaaca

SEQ ID NO: 691739 - DNA, 19 bp, Mus musculus
  siRNA target sequence for Ager (NM_007425.1,406-424).
ccagtgtccctaataaggt

SEQ ID NO: 691740 - DNA, 19 bp, Mus musculus
  siRNA target sequence for Ager (NM_007425.1,494-512).
gattcccgatggcaaagaa

SEQ ID NO: 691741 - DNA, 19 bp, Mus musculus
  siRNA target sequence for Ager (NM_007425.1,499-517).
ccgatggcaaagaaacact

SEQ ID NO: 691742 - DNA, 19 bp, Mus musculus
  siRNA target sequence for Ager (NM_007425.1,542-560).
ccctgagacgggactcttt

SEQ ID NO: 691743 - DNA, 19 bp, Mus musculus
  siRNA target sequence for Ager (NM_007425.1,543-561).
cctgagacgggactcttta

SEQ ID NO: 691744 - DNA, 19 bp, Mus musculus
  siRNA target sequence for Ager (NM_007425.1,806-824).
ggtccactggataaaggat

SEQ ID NO: 691745 - DNA, 19 bp, Mus musculus
  siRNA target sequence for AI415330 (NM_178114.2,436-454).
cctgcctagagctgtcaaa

SEQ ID NO: 691746 - DNA, 19 bp, Mus musculus
  siRNA target sequence for AI415330 (NM_178114.2,557-575).
gtcagctgcaccaacaaaa

SEQ ID NO: 691747 - DNA, 19 bp, Mus musculus
  siRNA target sequence for AI415330 (NM_178114.2,598-616).
ccttttcagactgattaaa

SEQ ID NO: 691748 - DNA, 19 bp, Mus musculus
  siRNA target sequence for AI415330 (NM_178114.2,618-636).
gactggatctgagctataa

SEQ ID NO: 691749 - DNA, 19 bp, Mus musculus
  siRNA target sequence for AI415330 (NM_178114.2,680-698).
gtcaagctgagcaccttaa

SEQ ID NO: 691750 - DNA, 19 bp, Mus musculus
  siRNA target sequence for AI415330 (NM_178114.2,682-700).
caagctgagcaccttaatt

SEQ ID NO: 691751 - DNA, 19 bp, Mus musculus
  siRNA target sequence for AI415330 (NM_178114.2,742-760).
ctccacaaccccaaattta

SEQ ID NO: 691752 - DNA, 19 bp, Mus musculus
  siRNA target sequence for AI415330 (NM_178114.2,836-854).
gtactgctgctgtacaaca

SEQ ID NO: 691753 - DNA, 19 bp, Mus musculus
  siRNA target sequence for AI415330 (NM_178114.2,845-863).
ctgtacaacaaccacattt

SEQ ID NO: 691754 - DNA, 19 bp, Mus musculus
  siRNA target sequence for AI415330 (NM_178114.2,913-931).
ctatctgagtgggaacttt

SEQ ID NO: 691755 - DNA, 19 bp, Mus musculus
  siRNA target sequence for AI415330 (NM_178114.2,936-954).
cacagttccctatggattt

SEQ ID NO: 691756 - DNA, 19 bp, Mus musculus
  siRNA target sequence for AI415330 (NM_178114.2,943-961).
ccctatggatttgtatact

SEQ ID NO: 691757 - DNA, 19 bp, Mus musculus
  siRNA target sequence for AI415330 (NM_178114.2,995-1013).
gatgtttcctataatcgaa

SEQ ID NO: 691758 - DNA, 19 bp, Mus musculus
  siRNA target sequence for AI415330 (NM_178114.2,1021-1039).
cataccgatgcaccatata

SEQ ID NO: 691759 - DNA, 19 bp, Mus musculus
  siRNA target sequence for AI415330 (NM_178114.2,1025-1043).
ccgatgcaccatataaact

SEQ ID NO: 691760 - DNA, 19 bp, Mus musculus
  siRNA target sequence for AI415330 (NM_178114.2,1026-1044).
cgatgcaccatataaactt

SEQ ID NO: 691761 - DNA, 19 bp, Mus musculus
  siRNA target sequence for AI415330 (NM_178114.2,1027-1045).
gatgcaccatataaactta

SEQ ID NO: 691762 - DNA, 19 bp, Mus musculus
  siRNA target sequence for AI415330 (NM_178114.2,1081-1099).
cgggaacccatttgtatgt

SEQ ID NO: 691763 - DNA, 19 bp, Mus musculus
  siRNA target sequence for AI415330 (NM_178114.2,1111-1129).
gtactcgttgctgatcttt

SEQ ID NO: 691764 - DNA, 19 bp, Mus musculus
  siRNA target sequence for AI415330 (NM_178114.2,1116-1134).
cgttgctgatcttttggta

SEQ ID NO: 691765 - DNA, 19 bp, Mus musculus
  siRNA target sequence for AI415330 (NM_178114.2,1153-1171).
cgtgatggattttaagaat

SEQ ID NO: 691766 - DNA, 19 bp, Mus musculus
  siRNA target sequence for AI415330 (NM_178114.2,1226-1244).
ctccaggagagctttctga

SEQ ID NO: 691767 - DNA, 19 bp, Mus musculus
  siRNA target sequence for AI415330 (NM_178114.2,1660-1678).
gacgccgtgcccatgcaaa

SEQ ID NO: 691768 - DNA, 19 bp, Mus musculus
  siRNA target sequence for AI415330 (NM_178114.2,1665-1683).
cgtgcccatgcaaatgcaa

SEQ ID NO: 691769 - DNA, 19 bp, Mus musculus
  siRNA target sequence for AI415330 (NM_178114.2,1721-1739).
gcccactcgtccattctca

SEQ ID NO: 691770 - DNA, 19 bp, Mus musculus
  siRNA target sequence for AI415330 (NM_178114.2,1771-1789).
cgatcggaaggcaggtaaa

SEQ ID NO: 691771 - DNA, 19 bp, Mus musculus
  siRNA target sequence for AI415330 (NM_178114.2,1772-1790).
gatcggaaggcaggtaaaa

SEQ ID NO: 691772 - DNA, 19 bp, Mus musculus
  siRNA target sequence for AI415330 (NM_178114.2,1776-1794).
ggaaggcaggtaaaagagt

SEQ ID NO: 691773 - DNA, 19 bp, Mus musculus
  siRNA target sequence for AI415330 (NM_178114.2,1785-1803).
gtaaaagagtcgtgtttct

SEQ ID NO: 691774 - DNA, 19 bp, Mus musculus
  siRNA target sequence for AI415330 (NM_178114.2,1855-1873).
ccccagtgagaccgttata

SEQ ID NO: 691775 - DNA, 19 bp, Mus musculus
  siRNA target sequence for AI415330 (NM_178114.2,1874-1892).
gccgagggcatcttaaagt

SEQ ID NO: 691776 - DNA, 19 bp, Mus musculus
  siRNA target sequence for AI415330 (NM_178114.2,1891-1909).
gtccaccagggcaaagtct

SEQ ID NO: 691777 - DNA, 19 bp, Mus musculus
  siRNA target sequence for AI415330 (NM_178114.2,1910-1928).
gactcagactcagtcaatt

SEQ ID NO: 691778 - DNA, 19 bp, Mus musculus
  siRNA target sequence for Amigo (NM_146137.1,548-566).
ccaatgtgccccaatcttt

SEQ ID NO: 691779 - DNA, 19 bp, Mus musculus
  siRNA target sequence for Amigo (NM_146137.1,673-691).
cacaaccacctgaacttca

SEQ ID NO: 691780 - DNA, 19 bp, Mus musculus
  siRNA target sequence for Amigo (NM_146137.1,801-819).
gtgctgttgctctacaata

SEQ ID NO: 691781 - DNA, 19 bp, Mus musculus
  siRNA target sequence for B230114J08Rik (NM_030018.2,172-190).
ggccggagtgtgagtgtat

SEQ ID NO: 691782 - DNA, 19 bp, Mus musculus
  siRNA target sequence for B230114J08Rik (NM_030018.2,173-191).
gccggagtgtgagtgtatt

SEQ ID NO: 691783 - DNA, 19 bp, Mus musculus
  siRNA target sequence for B230114J08Rik (NM_030018.2,223-241).
ctgtggtcgcagggatatt

SEQ ID NO: 691784 - DNA, 19 bp, Mus musculus
  siRNA target sequence for B230114J08Rik (NM_030018.2,225-243).
gtggtcgcagggatattgt

SEQ ID NO: 691785 - DNA, 19 bp, Mus musculus
  siRNA target sequence for B230114J08Rik (NM_030018.2,253-271).
gctggtggataatgattga

SEQ ID NO: 691786 - DNA, 19 bp, Mus musculus
  siRNA target sequence for B230114J08Rik (NM_030018.2,317-335).
ccacacgtgcggtgtgttt

SEQ ID NO: 691787 - DNA, 19 bp, Mus musculus
  siRNA target sequence for B230114J08Rik (NM_030018.2,318-336).
cacacgtgcggtgtgtttt

SEQ ID NO: 691788 - DNA, 19 bp, Mus musculus
  siRNA target sequence for B230114J08Rik (NM_030018.2,384-402).
cgaggtgacagctatgaaa

SEQ ID NO: 691789 - DNA, 19 bp, Mus musculus
  siRNA target sequence for B230114J08Rik (NM_030018.2,492-510).
ctttttggtgcatatgtta

SEQ ID NO: 691790 - DNA, 19 bp, Mus musculus
  siRNA target sequence for B230114J08Rik (NM_030018.2,574-592).
gcactctgatctacaaatt

SEQ ID NO: 691791 - DNA, 19 bp, Mus musculus
  siRNA target sequence for B430119L13Rik (NM_177303.3,735-753).
cacgagcctagaaagagtt

SEQ ID NO: 691792 - DNA, 19 bp, Mus musculus
  siRNA target sequence for B430119L13Rik (NM_177303.3,1104-1122).
gtgtgagcctgctttagga

SEQ ID NO: 691793 - DNA, 19 bp, Mus musculus
  siRNA target sequence for B430119L13Rik (NM_177303.3,1217-1235).
gccgcttcgatcattcagt

SEQ ID NO: 691794 - DNA, 19 bp, Mus musculus
  siRNA target sequence for B430119L13Rik (NM_177303.3,1218-1236).
ccgcttcgatcattcagtt

SEQ ID NO: 691795 - DNA, 19 bp, Mus musculus
  siRNA target sequence for B430119L13Rik (NM_177303.3,1219-1237).
cgcttcgatcattcagttt

SEQ ID NO: 691796 - DNA, 19 bp, Mus musculus
  siRNA target sequence for B430119L13Rik (NM_177303.3,1248-1266).
gatacaggggccttccatt

SEQ ID NO: 691797 - DNA, 19 bp, Mus musculus
  siRNA target sequence for B430119L13Rik (NM_177303.3,1358-1376).
gatcatggatgtataaaga

SEQ ID NO: 691798 - DNA, 19 bp, Mus musculus
  siRNA target sequence for B430119L13Rik (NM_177303.3,1407-1425).
ctctgagctagtttatagt

SEQ ID NO: 691799 - DNA, 19 bp, Mus musculus
  siRNA target sequence for B430119L13Rik (NM_177303.3,1465-1483).
gagcagactgccacacata

SEQ ID NO: 691800 - DNA, 19 bp, Mus musculus
  siRNA target sequence for B430119L13Rik (NM_177303.3,1485-1503).
ccttgagcctaatatttca

SEQ ID NO: 691801 - DNA, 19 bp, Mus musculus
  siRNA target sequence for B430119L13Rik (NM_177303.3,1643-1661).
cagttttgctgttagatga

SEQ ID NO: 691802 - DNA, 19 bp, Mus musculus
  siRNA target sequence for B430119L13Rik (NM_177303.3,1933-1951).
ggacgatctgggaatcaat

SEQ ID NO: 691803 - DNA, 19 bp, Mus musculus
  siRNA target sequence for B430119L13Rik (NM_177303.3,1954-1972).
gtagtggacatctatgcta

SEQ ID NO: 691804 - DNA, 19 bp, Mus musculus
  siRNA target sequence for B430119L13Rik (NM_177303.3,2085-2103).
gtcatgtgccactttcaca

SEQ ID NO: 691805 - DNA, 19 bp, Mus musculus
  siRNA target sequence for B430119L13Rik (NM_177303.3,2144-2162).
ccgccagtggcctgttact

SEQ ID NO: 691806 - DNA, 19 bp, Mus musculus
  siRNA target sequence for B430119L13Rik (NM_177303.3,2236-2254).
cacctggtggccttcaaaa

SEQ ID NO: 691807 - DNA, 19 bp, Mus musculus
  siRNA target sequence for BC010462 (NM_145373.1,238-256).
cagtgatgacctgtaacat

SEQ ID NO: 691808 - DNA, 19 bp, Mus musculus
  siRNA target sequence for BC010462 (NM_145373.1,306-324).
gacaagaccatcttcgata

SEQ ID NO: 691809 - DNA, 19 bp, Mus musculus
  siRNA target sequence for BC010462 (NM_145373.1,414-432).
gaccacacagggatatact

SEQ ID NO: 691810 - DNA, 19 bp, Mus musculus
  siRNA target sequence for BC010462 (NM_145373.1,417-435).
cacacagggatatacttgt

SEQ ID NO: 691811 - DNA, 19 bp, Mus musculus
  siRNA target sequence for BC010462 (NM_145373.1,470-488).
catcaccctgaatatctta

SEQ ID NO: 691812 - DNA, 19 bp, Mus musculus
  siRNA target sequence for BC010462 (NM_145373.1,513-531).
ccagacactacgctcttta

SEQ ID NO: 691813 - DNA, 19 bp, Mus musculus
  siRNA target sequence for BC010462 (NM_145373.1,516-534).
gacactacgctctttacat

SEQ ID NO: 691814 - DNA, 19 bp, Mus musculus
  siRNA target sequence for BC010462 (NM_145373.1,548-566).
cgcgaagagctctccaata

SEQ ID NO: 691815 - DNA, 19 bp, Mus musculus
  siRNA target sequence for BC010462 (NM_145373.1,550-568).
cgaagagctctccaataga

SEQ ID NO: 691816 - DNA, 19 bp, Mus musculus
  siRNA target sequence for BC010462 (NM_145373.1,621-639).
gtcgccggattcattacgt

SEQ ID NO: 691817 - DNA, 19 bp, Mus musculus
  siRNA target sequence for BC010462 (NM_145373.1,623-641).
cgccggattcattacgttt

SEQ ID NO: 691818 - DNA, 19 bp, Mus musculus
  siRNA target sequence for BC010462 (NM_145373.1,624-642).
gccggattcattacgttta

SEQ ID NO: 691819 - DNA, 19 bp, Mus musculus
  siRNA target sequence for BC010462 (NM_145373.1,625-643).
ccggattcattacgtttat

SEQ ID NO: 691820 - DNA, 19 bp, Mus musculus
  siRNA target sequence for BC010462 (NM_145373.1,627-645).
ggattcattacgtttatct

SEQ ID NO: 691821 - DNA, 19 bp, Mus musculus
  siRNA target sequence for BC010462 (NM_145373.1,628-646).
gattcattacgtttatcta

SEQ ID NO: 691822 - DNA, 19 bp, Mus musculus
  siRNA target sequence for BC012256 (NM_145532.2,257-275).
cctgatgtcctacttgttt

SEQ ID NO: 691823 - DNA, 19 bp, Mus musculus
  siRNA target sequence for BC012256 (NM_145532.2,265-283).
cctacttgtttgggtttta

SEQ ID NO: 691824 - DNA, 19 bp, Mus musculus
  siRNA target sequence for BC012256 (NM_145532.2,277-295).
ggttttacaaacgatttga

SEQ ID NO: 691825 - DNA, 19 bp, Mus musculus
  siRNA target sequence for BC012256 (NM_145532.2,328-346).
gcaccacaggcattctgta

SEQ ID NO: 691826 - DNA, 19 bp, Mus musculus
  siRNA target sequence for BC012256 (NM_145532.2,356-374).
ctctgtcctgcaagcatat

SEQ ID NO: 691827 - DNA, 19 bp, Mus musculus
  siRNA target sequence for BC012256 (NM_145532.2,407-425).
ccactactacatcaatgtt

SEQ ID NO: 691828 - DNA, 19 bp, Mus musculus
  siRNA target sequence for BC012256 (NM_145532.2,447-465).
ctcactacactgctctata

SEQ ID NO: 691829 - DNA, 19 bp, Mus musculus
  siRNA target sequence for BC012256 (NM_145532.2,475-493).
ctttcagcatctattacca

SEQ ID NO: 691830 - DNA, 19 bp, Mus musculus
  siRNA target sequence for Bsg (NM_009768.1,242-260).
ggctggaccgtgttcacat

SEQ ID NO: 691831 - DNA, 19 bp, Mus musculus
  siRNA target sequence for Bsg (NM_009768.1,288-306).
cagttcgctctctgttgat

SEQ ID NO: 691832 - DNA, 19 bp, Mus musculus
  siRNA target sequence for Bsg (NM_009768.1,457-475).
caggaagtcaactccaaaa

SEQ ID NO: 691833 - DNA, 19 bp, Mus musculus
  siRNA target sequence for Bsg (NM_009768.1,571-589).
gacctgcatacgaagtaca

SEQ ID NO: 691834 - DNA, 19 bp, Mus musculus
  siRNA target sequence for Bsg (NM_009768.1,573-591).
cctgcatacgaagtacata

SEQ ID NO: 691835 - DNA, 19 bp, Mus musculus
  siRNA target sequence for Bsg (NM_009768.1,604-622).
gaccgctctggggaatatt

SEQ ID NO: 691836 - DNA, 19 bp, Mus musculus
  siRNA target sequence for Bsg (NM_009768.1,607-625).
cgctctggggaatattcct

SEQ ID NO: 691837 - DNA, 19 bp, Mus musculus
  siRNA target sequence for Bsg (NM_009768.1,648-666).
gggcagaagcgagatcaat

SEQ ID NO: 691838 - DNA, 19 bp, Mus musculus
  siRNA target sequence for Bsg (NM_009768.1,683-701).
ggatcaaggtcggaaagaa

SEQ ID NO: 691839 - DNA, 19 bp, Mus musculus
  siRNA target sequence for Bsg (NM_009768.1,687-705).
caaggtcggaaagaaatca

SEQ ID NO: 691840 - DNA, 19 bp, Mus musculus
  siRNA target sequence for Bsg (NM_009768.1,754-772).
gcatcctaccctcctatta

SEQ ID NO: 691841 - DNA, 19 bp, Mus musculus
  siRNA target sequence for Bsg (NM_009768.1,758-776).
cctaccctcctattacaga

SEQ ID NO: 691842 - DNA, 19 bp, Mus musculus
  siRNA target sequence for Bsg (NM_009768.1,811-829).
gaagaggcaatcaccaata

SEQ ID NO: 691843 - DNA, 19 bp, Mus musculus
  siRNA target sequence for Bsg (NM_009768.1,891-909).
cagcaaccttgacgtaaat

SEQ ID NO: 691844 - DNA, 19 bp, Mus musculus
  siRNA target sequence for Bsg (NM_009768.1,893-911).
gcaaccttgacgtaaatgt

SEQ ID NO: 691845 - DNA, 19 bp, Mus musculus
  siRNA target sequence for Bsg (NM_009768.1,953-971).
gcactactcgggaaaccat

SEQ ID NO: 691846 - DNA, 19 bp, Mus musculus
  siRNA target sequence for Bsg (NM_009768.1,1041-1059).
gttggttaccatcatcttt

SEQ ID NO: 691847 - DNA, 19 bp, Mus musculus
  siRNA target sequence for Bsg (NM_009768.1,1133-1151).
gtggaactcacatgaatga

SEQ ID NO: 691848 - DNA, 19 bp, Mus musculus
  siRNA target sequence for Bsg (NM_009768.1,1136-1154).
gaactcacatgaatgacaa

SEQ ID NO: 691849 - DNA, 19 bp, Mus musculus
  siRNA target sequence for Btn1a1 (NM_013483.1,475-493).
ccaaacgcgagctcagaat

SEQ ID NO: 691850 - DNA, 19 bp, Mus musculus
  siRNA target sequence for Btn1a1 (NM_013483.1,476-494).
caaacgcgagctcagaata

SEQ ID NO: 691851 - DNA, 19 bp, Mus musculus
  siRNA target sequence for Btn1a1 (NM_013483.1,527-545).
cgacagcggtacttctata

SEQ ID NO: 691852 - DNA, 19 bp, Mus musculus
  siRNA target sequence for Btn1a1 (NM_013483.1,676-694).
gagtaccggtgccttttca

SEQ ID NO: 691853 - DNA, 19 bp, Mus musculus
  siRNA target sequence for Btn1a1 (NM_013483.1,678-696).
gtaccggtgccttttcaaa

SEQ ID NO: 691854 - DNA, 19 bp, Mus musculus
  siRNA target sequence for Btn1a1 (NM_013483.1,748-766).
ggttcagatcctcaaatca

SEQ ID NO: 691855 - DNA, 19 bp, Mus musculus
  siRNA target sequence for Btn1a1 (NM_013483.1,767-785).
gtatgacggttcaagagaa

SEQ ID NO: 691856 - DNA, 19 bp, Mus musculus
  siRNA target sequence for Btn1a1 (NM_013483.1,943-961).
gacagctccataaagaaca

SEQ ID NO: 691857 - DNA, 19 bp, Mus musculus
  siRNA target sequence for Btn1a1 (NM_013483.1,1074-1092).
cttactggccttaggattt

SEQ ID NO: 691858 - DNA, 19 bp, Mus musculus
  siRNA target sequence for Btn1a1 (NM_013483.1,1095-1113).
caccattgggtccatattt

SEQ ID NO: 691859 - DNA, 19 bp, Mus musculus
  siRNA target sequence for Btn1a1 (NM_013483.1,1097-1115).
ccattgggtccatattttt

SEQ ID NO: 691860 - DNA, 19 bp, Mus musculus
  siRNA target sequence for Btn1a1 (NM_013483.1,1189-1207).
gaactcagatgcaaaaaga

SEQ ID NO: 691861 - DNA, 19 bp, Mus musculus
  siRNA target sequence for Btn1a1 (NM_013483.1,1206-1224).
gactgtactgcatgaagtt

SEQ ID NO: 691862 - DNA, 19 bp, Mus musculus
  siRNA target sequence for Btn1a1 (NM_013483.1,1208-1226).
ctgtactgcatgaagttga

SEQ ID NO: 691863 - DNA, 19 bp, Mus musculus
  siRNA target sequence for Btn1a1 (NM_013483.1,1319-1337).
ctgatagaccagagagatt

SEQ ID NO: 691864 - DNA, 19 bp, Mus musculus
  siRNA target sequence for Btn1a1 (NM_013483.1,1359-1377).
gggccgtgagacctttact

SEQ ID NO: 691865 - DNA, 19 bp, Mus musculus
  siRNA target sequence for Btn1a1 (NM_013483.1,1360-1378).
ggccgtgagacctttactt

SEQ ID NO: 691866 - DNA, 19 bp, Mus musculus
  siRNA target sequence for Btn1a1 (NM_013483.1,1401-1419).
ggaggtgggagatagaact

SEQ ID NO: 691867 - DNA, 19 bp, Mus musculus
  siRNA target sequence for Btn1a1 (NM_013483.1,1470-1488).
ccccatgactcctgataat

SEQ ID NO: 691868 - DNA, 19 bp, Mus musculus
  siRNA target sequence for Btn1a1 (NM_013483.1,1545-1563).
gacctctctccgattagca

SEQ ID NO: 691869 - DNA, 19 bp, Mus musculus
  siRNA target sequence for Btn1a1 (NM_013483.1,1626-1644).
catgagtaacggatctctt

SEQ ID NO: 691870 - DNA, 19 bp, Mus musculus
  siRNA target sequence for Btn1a1 (NM_013483.1,1631-1649).
gtaacggatctcttatcta

SEQ ID NO: 691871 - DNA, 19 bp, Mus musculus
  siRNA target sequence for Btn1a1 (NM_013483.1,1699-1717).
ctgtggtcctgtggtaaaa

SEQ ID NO: 691872 - DNA, 19 bp, Mus musculus
  siRNA target sequence for Btn1a1 (NM_013483.1,1722-1740).
cctgaccatctgttcaact

SEQ ID NO: 691873 - DNA, 19 bp, Mus musculus
  siRNA target sequence for Btn1a1 (NM_013483.1,1817-1835).
gtacttctggagacaaaga

SEQ ID NO: 691874 - DNA, 19 bp, Mus musculus
  siRNA target sequence for Btn1a1 (NM_013483.1,1838-1856).
ctctccattctaaactgat

SEQ ID NO: 691875 - DNA, 19 bp, Mus musculus
  siRNA target sequence for Bzrpl1 (NM_027292.1,377-395).
cacctcacaaggtcatatt

SEQ ID NO: 691876 - DNA, 19 bp, Mus musculus
  siRNA target sequence for Bzrpl1 (NM_027292.1,400-418).
gtgtgggtgaccatctact

SEQ ID NO: 691877 - DNA, 19 bp, Mus musculus
  siRNA target sequence for Bzrpl1 (NM_027292.1,490-508).
ccccttggtctctactctt

SEQ ID NO: 691878 - DNA, 19 bp, Mus musculus
  siRNA target sequence for Bzrpl1 (NM_027292.1,491-509).
cccttggtctctactcttt

SEQ ID NO: 691879 - DNA, 19 bp, Mus musculus
  siRNA target sequence for Bzrpl1 (NM_027292.1,517-535).
gccctcagctggactttct

SEQ ID NO: 691880 - DNA, 19 bp, Mus musculus
  siRNA target sequence for Bzrpl1 (NM_027292.1,604-622).
gtagcaagcctggtgttta

SEQ ID NO: 691881 - DNA, 19 bp, Mus musculus
  siRNA target sequence for Bzrpl1 (NM_027292.1,607-625).
gcaagcctggtgtttatct

SEQ ID NO: 691882 - DNA, 19 bp, Mus musculus
  siRNA target sequence for C630002M10Rik (NM_019631.2,414-432).
ggtggactatgaagaacat

SEQ ID NO: 691883 - DNA, 19 bp, Mus musculus
  siRNA target sequence for C630002M10Rik (NM_019631.2,459-477).
ctcgaacctgctaccttaa

SEQ ID NO: 691884 - DNA, 19 bp, Mus musculus
  siRNA target sequence for C630002M10Rik (NM_019631.2,461-479).
cgaacctgctaccttaact

SEQ ID NO: 691885 - DNA, 19 bp, Mus musculus
  siRNA target sequence for C630002M10Rik (NM_019631.2,465-483).
cctgctaccttaactctaa

SEQ ID NO: 691886 - DNA, 19 bp, Mus musculus
  siRNA target sequence for C630002M10Rik (NM_019631.2,466-484).
ctgctaccttaactctaaa

SEQ ID NO: 691887 - DNA, 19 bp, Mus musculus
  siRNA target sequence for C630002M10Rik (NM_019631.2,546-564).
gtatagctggtgaacagtt

SEQ ID NO: 691888 - DNA, 19 bp, Mus musculus
  siRNA target sequence for C630002M10Rik (NM_019631.2,582-600).
ccttgatcttgcataaaga

SEQ ID NO: 691889 - DNA, 19 bp, Mus musculus
  siRNA target sequence for C630002M10Rik (NM_019631.2,583-601).
cttgatcttgcataaagat

SEQ ID NO: 691890 - DNA, 19 bp, Mus musculus
  siRNA target sequence for C630002M10Rik (NM_019631.2,662-680).
cagggtataacccaaatca

SEQ ID NO: 691891 - DNA, 19 bp, Mus musculus
  siRNA target sequence for C630002M10Rik (NM_019631.2,664-682).
gggtataacccaaatcata

SEQ ID NO: 691892 - DNA, 19 bp, Mus musculus
  siRNA target sequence for C630002M10Rik (NM_019631.2,665-683).
ggtataacccaaatcatat

SEQ ID NO: 691893 - DNA, 19 bp, Mus musculus
  siRNA target sequence for C630002M10Rik (NM_019631.2,684-702).
gtttcactactaatgtact

SEQ ID NO: 691894 - DNA, 19 bp, Mus musculus
  siRNA target sequence for C630002M10Rik (NM_019631.2,718-736).
caagttaatgttatcaatt

SEQ ID NO: 691895 - DNA, 19 bp, Mus musculus
  siRNA target sequence for C630002M10Rik (NM_019631.2,727-745).
gttatcaattgccatcttt

SEQ ID NO: 691896 - DNA, 19 bp, Mus musculus
  siRNA target sequence for C630002M10Rik (NM_019631.2,746-764).
gtggagacatttatgttct

SEQ ID NO: 691897 - DNA, 19 bp, Mus musculus
  siRNA target sequence for C630002M10Rik (NM_019631.2,774-792).
cacacggtcgggaaatgat

SEQ ID NO: 691898 - DNA, 19 bp, Mus musculus
  siRNA target sequence for C630002M10Rik (NM_019631.2,779-797).
ggtcgggaaatgattgaca

SEQ ID NO: 691899 - DNA, 19 bp, Mus musculus
  siRNA target sequence for C630002M10Rik (NM_019631.2,780-798).
gtcgggaaatgattgacat

SEQ ID NO: 691900 - DNA, 19 bp, Mus musculus
  siRNA target sequence for C630002M10Rik (NM_019631.2,782-800).
cgggaaatgattgacattt

SEQ ID NO: 691901 - DNA, 19 bp, Mus musculus
  siRNA target sequence for C630002M10Rik (NM_019631.2,817-835).
ggtcttcgttggcacattt

SEQ ID NO: 691902 - DNA, 19 bp, Mus musculus
  siRNA target sequence for C630002M10Rik (NM_019631.2,857-875).
gagttcctcgtaaagaaca

SEQ ID NO: 691903 - DNA, 19 bp, Mus musculus
  siRNA target sequence for C630002M10Rik (NM_019631.2,975-993).
catggaacctgtcagatat

SEQ ID NO: 691904 - DNA, 19 bp, Mus musculus
  siRNA target sequence for C630002M10Rik (NM_019631.2,1010-1028).
ctctcaatgtgcttttgct

SEQ ID NO: 691905 - DNA, 19 bp, Mus musculus
  siRNA target sequence for C630002M10Rik (NM_019631.2,1021-1039).
cttttgctggcattatgca

SEQ ID NO: 691906 - DNA, 19 bp, Mus musculus
  siRNA target sequence for C630002M10Rik (NM_019631.2,1142-1160).
gctgaccgtgagcaagaat

SEQ ID NO: 691907 - DNA, 19 bp, Mus musculus
  siRNA target sequence for C78915 (NM_019704.1,612-630).
gtgcgccgtggtactgttt

SEQ ID NO: 691908 - DNA, 19 bp, Mus musculus
  siRNA target sequence for C78915 (NM_019704.1,614-632).
gcgccgtggtactgtttct

SEQ ID NO: 691909 - DNA, 19 bp, Mus musculus
  siRNA target sequence for C78915 (NM_019704.1,970-988).
ctggtagccctcaagcaaa

SEQ ID NO: 691910 - DNA, 19 bp, Mus musculus
  siRNA target sequence for C78915 (NM_019704.1,973-991).
gtagccctcaagcaaacta

SEQ ID NO: 691911 - DNA, 19 bp, Mus musculus
  siRNA target sequence for C78915 (NM_019704.1,1266-1284).
cggcctcctggtgaaagta

SEQ ID NO: 691912 - DNA, 19 bp, Mus musculus
  siRNA target sequence for C78915 (NM_019704.1,1267-1285).
ggcctcctggtgaaagtaa

SEQ ID NO: 691913 - DNA, 19 bp, Mus musculus
  siRNA target sequence for C78915 (NM_019704.1,1268-1286).
gcctcctggtgaaagtaaa

SEQ ID NO: 691914 - DNA, 19 bp, Mus musculus
  siRNA target sequence for C78915 (NM_019704.1,1324-1342).
gcgccgtcgtccatcacta

SEQ ID NO: 691915 - DNA, 19 bp, Mus musculus
  siRNA target sequence for C78915 (NM_019704.1,1325-1343).
cgccgtcgtccatcactat

SEQ ID NO: 691916 - DNA, 19 bp, Mus musculus
  siRNA target sequence for C78915 (NM_019704.1,1327-1345).
ccgtcgtccatcactatca

SEQ ID NO: 691917 - DNA, 19 bp, Mus musculus
  siRNA target sequence for Caml (NM_007596.1,189-207).
ggagcggctcggaagaaga

SEQ ID NO: 691918 - DNA, 19 bp, Mus musculus
  siRNA target sequence for Caml (NM_007596.1,190-208).
gagcggctcggaagaagaa

SEQ ID NO: 691919 - DNA, 19 bp, Mus musculus
  siRNA target sequence for Caml (NM_007596.1,195-213).
gctcggaagaagaaaatca

SEQ ID NO: 691920 - DNA, 19 bp, Mus musculus
  siRNA target sequence for Caml (NM_007596.1,280-298).
ggtagtgcttggtgattca

SEQ ID NO: 691921 - DNA, 19 bp, Mus musculus
  siRNA target sequence for Caml (NM_007596.1,360-378).
gagacaaactggactcatt

SEQ ID NO: 691922 - DNA, 19 bp, Mus musculus
  siRNA target sequence for Caml (NM_007596.1,370-388).
ggactcattcattaaagca

SEQ ID NO: 691923 - DNA, 19 bp, Mus musculus
  siRNA target sequence for Caml (NM_007596.1,387-405).
caccagagtgcagtagtaa

SEQ ID NO: 691924 - DNA, 19 bp, Mus musculus
  siRNA target sequence for Caml (NM_007596.1,471-489).
ctcaccacggcctagaaca

SEQ ID NO: 691925 - DNA, 19 bp, Mus musculus
  siRNA target sequence for Caml (NM_007596.1,490-508).
gtacctttccagattcgaa

SEQ ID NO: 691926 - DNA, 19 bp, Mus musculus
  siRNA target sequence for Caml (NM_007596.1,564-582).
gaagtaccgcggaagagtt

SEQ ID NO: 691927 - DNA, 19 bp, Mus musculus
  siRNA target sequence for Caml (NM_007596.1,567-585).
gtaccgcggaagagtttga

SEQ ID NO: 691928 - DNA, 19 bp, Mus musculus
  siRNA target sequence for Caml (NM_007596.1,578-596).
gagtttgactcttttcgaa

SEQ ID NO: 691929 - DNA, 19 bp, Mus musculus
  siRNA target sequence for Caml (NM_007596.1,580-598).
gtttgactcttttcgaata

SEQ ID NO: 691930 - DNA, 19 bp, Mus musculus
  siRNA target sequence for Caml (NM_007596.1,588-606).
cttttcgaatatttcgatt

SEQ ID NO: 691931 - DNA, 19 bp, Mus musculus
  siRNA target sequence for Caml (NM_007596.1,695-713).
gcatacatgggactataca

SEQ ID NO: 691932 - DNA, 19 bp, Mus musculus
  siRNA target sequence for Caml (NM_007596.1,845-863).
gacctctgcgtctacttct

SEQ ID NO: 691933 - DNA, 19 bp, Mus musculus
  siRNA target sequence for Cav2 (NM_016900.2,205-223).
ctacacactcctttgacaa

SEQ ID NO: 691934 - DNA, 19 bp, Mus musculus
  siRNA target sequence for Cav2 (NM_016900.2,208-226).
cacactcctttgacaaagt

SEQ ID NO: 691935 - DNA, 19 bp, Mus musculus
  siRNA target sequence for Cav2 (NM_016900.2,399-417).
ccttccgtgcagacaatat

SEQ ID NO: 691936 - DNA, 19 bp, Mus musculus
  siRNA target sequence for Cav2 (NM_016900.2,438-456).
gtcattggcccattgtgta

SEQ ID NO: 691937 - DNA, 19 bp, Mus musculus
  siRNA target sequence for Cav3 (NM_007617.2,352-370).
ggatcatcaaggacattca

SEQ ID NO: 691938 - DNA, 19 bp, Mus musculus
  siRNA target sequence for Cav3 (NM_007617.2,396-414).
cgcgaccccaagaacatca

SEQ ID NO: 691939 - DNA, 19 bp, Mus musculus
  siRNA target sequence for Cav3 (NM_007617.2,420-438).
gacattgtgaaggtagatt

SEQ ID NO: 691940 - DNA, 19 bp, Mus musculus
  siRNA target sequence for Cav3 (NM_007617.2,475-493).
gcttcgacggtgtatggaa

SEQ ID NO: 691941 - DNA, 19 bp, Mus musculus
  siRNA target sequence for Cav3 (NM_007617.2,621-639).
gccgtggtgccctgcatta

SEQ ID NO: 691942 - DNA, 19 bp, Mus musculus
  siRNA target sequence for Cav3 (NM_007617.2,622-640).
ccgtggtgccctgcattaa

SEQ ID NO: 691943 - DNA, 19 bp, Mus musculus
  siRNA target sequence for Cav3 (NM_007617.2,624-642).
gtggtgccctgcattaaga

SEQ ID NO: 691944 - DNA, 19 bp, Mus musculus
  siRNA target sequence for Cd151 (NM_009842.1,382-400).
ctgctctttacctacaact

SEQ ID NO: 691945 - DNA, 19 bp, Mus musculus
  siRNA target sequence for Cd151 (NM_009842.1,459-477).
caagagtgactacattagt

SEQ ID NO: 691946 - DNA, 19 bp, Mus musculus
  siRNA target sequence for Cd151 (NM_009842.1,503-521).
ccacggcctacatcttagt

SEQ ID NO: 691947 - DNA, 19 bp, Mus musculus
  siRNA target sequence for Cd151 (NM_009842.1,592-610).
ctgttacgcttgtacttca

SEQ ID NO: 691948 - DNA, 19 bp, Mus musculus
  siRNA target sequence for Cd151 (NM_009842.1,709-727).
gacaccatggtcaagagat

SEQ ID NO: 691949 - DNA, 19 bp, Mus musculus
  siRNA target sequence for Cd151 (NM_009842.1,876-894).
ctgctgtaagactatggta

SEQ ID NO: 691950 - DNA, 19 bp, Mus musculus
  siRNA target sequence for Cd151 (NM_009842.1,913-931).
gaccatgcctccaacatct

SEQ ID NO: 691951 - DNA, 19 bp, Mus musculus
  siRNA target sequence for Cd151 (NM_009842.1,937-955).
gtggagggtggctgtatca

SEQ ID NO: 691952 - DNA, 19 bp, Mus musculus
  siRNA target sequence for Cd151 (NM_009842.1,939-957).
ggagggtggctgtatcact

SEQ ID NO: 691953 - DNA, 19 bp, Mus musculus
  siRNA target sequence for Cd151 (NM_009842.1,940-958).
gagggtggctgtatcacta

SEQ ID NO: 691954 - DNA, 19 bp, Mus musculus
  siRNA target sequence for Cd151 (NM_009842.1,1067-1085).
gcctcaagctggaacacta

SEQ ID NO: 691955 - DNA, 19 bp, Mus musculus
  siRNA target sequence for Cd19 (NM_009844.1,30-48).
cctctttcttaccttagta

SEQ ID NO: 691956 - DNA, 19 bp, Mus musculus
  siRNA target sequence for Cd19 (NM_009844.1,240-258).
cttgctagtgattgtcaat

SEQ ID NO: 691957 - DNA, 19 bp, Mus musculus
  siRNA target sequence for Cd19 (NM_009844.1,244-262).
ctagtgattgtcaatgtct

SEQ ID NO: 691958 - DNA, 19 bp, Mus musculus
  siRNA target sequence for Cd19 (NM_009844.1,489-507).
gggaacaaagcctgtatgt

SEQ ID NO: 691959 - DNA, 19 bp, Mus musculus
  siRNA target sequence for Cd19 (NM_009844.1,642-660).
gcatcctaggagacctaat

SEQ ID NO: 691960 - DNA, 19 bp, Mus musculus
  siRNA target sequence for Cd19 (NM_009844.1,646-664).
cctaggagacctaatgttt

SEQ ID NO: 691961 - DNA, 19 bp, Mus musculus
  siRNA target sequence for Cd19 (NM_009844.1,650-668).
ggagacctaatgtttcact

SEQ ID NO: 691962 - DNA, 19 bp, Mus musculus
  siRNA target sequence for Cd19 (NM_009844.1,651-669).
gagacctaatgtttcacta

SEQ ID NO: 691963 - DNA, 19 bp, Mus musculus
  siRNA target sequence for Cd19 (NM_009844.1,805-823).
cacgtgaaggtcattgcaa

SEQ ID NO: 691964 - DNA, 19 bp, Mus musculus
  siRNA target sequence for Cd19 (NM_009844.1,849-867).
gagaactggtggatggata

SEQ ID NO: 691965 - DNA, 19 bp, Mus musculus
  siRNA target sequence for Cd19 (NM_009844.1,870-888).
cccagtggtgactttagta

SEQ ID NO: 691966 - DNA, 19 bp, Mus musculus
  siRNA target sequence for Cd19 (NM_009844.1,872-890).
cagtggtgactttagtata

SEQ ID NO: 691967 - DNA, 19 bp, Mus musculus
  siRNA target sequence for Cd19 (NM_009844.1,881-899).
ctttagtatatgtcatctt

SEQ ID NO: 691968 - DNA, 19 bp, Mus musculus
  siRNA target sequence for Cd19 (NM_009844.1,892-910).
gtcatcttctgtatggttt

SEQ ID NO: 691969 - DNA, 19 bp, Mus musculus
  siRNA target sequence for Cd19 (NM_009844.1,918-936).
ggcttttctctattgtcaa

SEQ ID NO: 691970 - DNA, 19 bp, Mus musculus
  siRNA target sequence for Cd19 (NM_009844.1,932-950).
gtcaaagagcctttatcct

SEQ ID NO: 691971 - DNA, 19 bp, Mus musculus
  siRNA target sequence for Cd19 (NM_009844.1,981-999).
cgccaggagattcttcaaa

SEQ ID NO: 691972 - DNA, 19 bp, Mus musculus
  siRNA target sequence for Cd19 (NM_009844.1,1130-1148).
gaaatccacgcattcaagt

SEQ ID NO: 691973 - DNA, 19 bp, Mus musculus
  siRNA target sequence for Cd19 (NM_009844.1,1224-1242).
ggagggctctgaattctat

SEQ ID NO: 691974 - DNA, 19 bp, Mus musculus
  siRNA target sequence for Cd19 (NM_009844.1,1282-1300).
gatgggagtggctatgaga

SEQ ID NO: 691975 - DNA, 19 bp, Mus musculus
  siRNA target sequence for Cd19 (NM_009844.1,1344-1362).
ctccaatgctgagtcttat

SEQ ID NO: 691976 - DNA, 19 bp, Mus musculus
  siRNA target sequence for Cd19 (NM_009844.1,1346-1364).
ccaatgctgagtcttatga

SEQ ID NO: 691977 - DNA, 19 bp, Mus musculus
  siRNA target sequence for Cd19 (NM_009844.1,1467-1485).
gtcccagtcctatgaagat

SEQ ID NO: 691978 - DNA, 19 bp, Mus musculus
  siRNA target sequence for Cd19 (NM_009844.1,1469-1487).
cccagtcctatgaagatat

SEQ ID NO: 691979 - DNA, 19 bp, Mus musculus
  siRNA target sequence for Cd19 (NM_009844.1,1471-1489).
cagtcctatgaagatatga

SEQ ID NO: 691980 - DNA, 19 bp, Mus musculus
  siRNA target sequence for Cd19 (NM_009844.1,1473-1491).
gtcctatgaagatatgaga

SEQ ID NO: 691981 - DNA, 19 bp, Mus musculus
  siRNA target sequence for Cd19 (NM_009844.1,1508-1526).
ctcctcagctccactcaat

SEQ ID NO: 691982 - DNA, 19 bp, Mus musculus
  siRNA target sequence for Cd19 (NM_009844.1,1532-1550).
ccggtcccagtcatgaaga

SEQ ID NO: 691983 - DNA, 19 bp, Mus musculus
  siRNA target sequence for Cd19 (NM_009844.1,1533-1551).
cggtcccagtcatgaagaa

SEQ ID NO: 691984 - DNA, 19 bp, Mus musculus
  siRNA target sequence for Cd19 (NM_009844.1,1562-1580).
cttatgaaaacatggataa

SEQ ID NO: 691985 - DNA, 19 bp, Mus musculus
  siRNA target sequence for Cd1d2 (NM_007640.1,725-743).
gagattccggggaacatct

SEQ ID NO: 691986 - DNA, 19 bp, Mus musculus
  siRNA target sequence for Cd37 (NM_007645.2,165-183).
gttgcctcagcctcatcaa

SEQ ID NO: 691987 - DNA, 19 bp, Mus musculus
  siRNA target sequence for Cd37 (NM_007645.2,205-223).
cctcttcttctttgtacta

SEQ ID NO: 691988 - DNA, 19 bp, Mus musculus
  siRNA target sequence for Cd37 (NM_007645.2,372-390).
gctgtgtgggggctctaaa

SEQ ID NO: 691989 - DNA, 19 bp, Mus musculus
  siRNA target sequence for Cd37 (NM_007645.2,713-731).
gactccaccgtctttgata

SEQ ID NO: 691990 - DNA, 19 bp, Mus musculus
  siRNA target sequence for Cd37 (NM_007645.2,911-929).
cttgagctcggcttcatga

SEQ ID NO: 691991 - DNA, 19 bp, Mus musculus
  siRNA target sequence for Cd37 (NM_007645.2,921-939).
gcttcatgacgctctcaat

SEQ ID NO: 691992 - DNA, 19 bp, Mus musculus
  siRNA target sequence for Cd37 (NM_007645.2,922-940).
cttcatgacgctctcaata

SEQ ID NO: 691993 - DNA, 19 bp, Mus musculus
  siRNA target sequence for Cd53 (NM_007651.2,137-155).
gctgaaatatgttctgttt

SEQ ID NO: 691994 - DNA, 19 bp, Mus musculus
  siRNA target sequence for Cd53 (NM_007651.2,138-156).
ctgaaatatgttctgttta

SEQ ID NO: 691995 - DNA, 19 bp, Mus musculus
  siRNA target sequence for Cd53 (NM_007651.2,147-165).
gttctgtttatctttaact

SEQ ID NO: 691996 - DNA, 19 bp, Mus musculus
  siRNA target sequence for Cd53 (NM_007651.2,176-194).
ggtctgtggctgttgcatt

SEQ ID NO: 691997 - DNA, 19 bp, Mus musculus
  siRNA target sequence for Cd53 (NM_007651.2,209-227).
ctatttcctggtccaaaat

SEQ ID NO: 691998 - DNA, 19 bp, Mus musculus
  siRNA target sequence for Cd53 (NM_007651.2,260-278).
cctgacacttggcaacatt

SEQ ID NO: 691999 - DNA, 19 bp, Mus musculus
  siRNA target sequence for Cd53 (NM_007651.2,281-299).
ggtcattgtgggatccatt

SEQ ID NO: 692000 - DNA, 19 bp, Mus musculus
  siRNA target sequence for Cd53 (NM_007651.2,282-300).
gtcattgtgggatccatta

SEQ ID NO: 692001 - DNA, 19 bp, Mus musculus
  siRNA target sequence for Cd53 (NM_007651.2,321-339).
ggttgcatgggctcaatca

SEQ ID NO: 692002 - DNA, 19 bp, Mus musculus
  siRNA target sequence for Cd53 (NM_007651.2,322-340).
gttgcatgggctcaatcaa

SEQ ID NO: 692003 - DNA, 19 bp, Mus musculus
  siRNA target sequence for Cd53 (NM_007651.2,329-347).
gggctcaatcaaggaaaat

SEQ ID NO: 692004 - DNA, 19 bp, Mus musculus
  siRNA target sequence for Cd53 (NM_007651.2,330-348).
ggctcaatcaaggaaaata

SEQ ID NO: 692005 - DNA, 19 bp, Mus musculus
  siRNA target sequence for Cd53 (NM_007651.2,356-374).
gcttatgtcgttctttgtt

SEQ ID NO: 692006 - DNA, 19 bp, Mus musculus
  siRNA target sequence for Cd53 (NM_007651.2,426-444).
gtgtatgaacaaaaactca

SEQ ID NO: 692007 - DNA, 19 bp, Mus musculus
  siRNA target sequence for Cd53 (NM_007651.2,539-557).
gcagtgttgtggtgtaaat

SEQ ID NO: 692008 - DNA, 19 bp, Mus musculus
  siRNA target sequence for Cd53 (NM_007651.2,633-651).
gcaaaatcgtggtttcact

SEQ ID NO: 692009 - DNA, 19 bp, Mus musculus
  siRNA target sequence for Cd53 (NM_007651.2,640-658).
cgtggtttcactccaattt

SEQ ID NO: 692010 - DNA, 19 bp, Mus musculus
  siRNA target sequence for Cd53 (NM_007651.2,643-661).
ggtttcactccaatttctt

SEQ ID NO: 692011 - DNA, 19 bp, Mus musculus
  siRNA target sequence for Cd53 (NM_007651.2,674-692).
cattaccatctgtgtatgt

SEQ ID NO: 692012 - DNA, 19 bp, Mus musculus
  siRNA target sequence for Cd53 (NM_007651.2,727-745).
cactcaactgccagattga

SEQ ID NO: 692013 - DNA, 19 bp, Mus musculus
  siRNA target sequence for Cd53 (NM_007651.2,734-752).
ctgccagattgacaaaaca

SEQ ID NO: 692014 - DNA, 19 bp, Mus musculus
  siRNA target sequence for Cd81 (NM_133655.1,386-404).
gggcatctacattctcatt

SEQ ID NO: 692015 - DNA, 19 bp, Mus musculus
  siRNA target sequence for Cd81 (NM_133655.1,532-550).
gcatctggggcttcgtaaa

SEQ ID NO: 692016 - DNA, 19 bp, Mus musculus
  siRNA target sequence for Cd81 (NM_133655.1,536-554).
ctggggcttcgtaaacaaa

SEQ ID NO: 692017 - DNA, 19 bp, Mus musculus
  siRNA target sequence for Cd81 (NM_133655.1,657-675).
catgagacgctcaactgtt

SEQ ID NO: 692018 - DNA, 19 bp, Mus musculus
  siRNA target sequence for Cd81 (NM_133655.1,699-717).
ctgactaccaccatactga

SEQ ID NO: 692019 - DNA, 19 bp, Mus musculus
  siRNA target sequence for Cd81 (NM_133655.1,733-751).
cctcaggcggcaacatact

SEQ ID NO: 692020 - DNA, 19 bp, Mus musculus
  siRNA target sequence for Cd81 (NM_133655.1,812-830).
gtacctcattggaattgca

SEQ ID NO: 692021 - DNA, 19 bp, Mus musculus
  siRNA target sequence for Cd81 (NM_133655.1,840-858).
gtagctgtcattatgatct

SEQ ID NO: 692022 - DNA, 19 bp, Mus musculus
  siRNA target sequence for Cd81 (NM_133655.1,846-864).
gtcattatgatctttgaga

SEQ ID NO: 692023 - DNA, 19 bp, Mus musculus
  siRNA target sequence for Clptm1 (NM_019649.1,283-301).
gtcgccagccgaaacctat

SEQ ID NO: 692024 - DNA, 19 bp, Mus musculus
  siRNA target sequence for Clptm1 (NM_019649.1,304-322).
cccaaagacactctaatga

SEQ ID NO: 692025 - DNA, 19 bp, Mus musculus
  siRNA target sequence for Clptm1 (NM_019649.1,489-507).
gcagaatggctccatctat

SEQ ID NO: 692026 - DNA, 19 bp, Mus musculus
  siRNA target sequence for Clptm1 (NM_019649.1,490-508).
cagaatggctccatctata

SEQ ID NO: 692027 - DNA, 19 bp, Mus musculus
  siRNA target sequence for Clptm1 (NM_019649.1,586-604).
cacatgtcccggatgatca

SEQ ID NO: 692028 - DNA, 19 bp, Mus musculus
  siRNA target sequence for Clptm1 (NM_019649.1,591-609).
gtcccggatgatcaacaaa

SEQ ID NO: 692029 - DNA, 19 bp, Mus musculus
  siRNA target sequence for Clptm1 (NM_019649.1,593-611).
cccggatgatcaacaaata

SEQ ID NO: 692030 - DNA, 19 bp, Mus musculus
  siRNA target sequence for Clptm1 (NM_019649.1,620-638).
ggcgatttcagaaaaccaa

SEQ ID NO: 692031 - DNA, 19 bp, Mus musculus
  siRNA target sequence for Clptm1 (NM_019649.1,661-679).
gaagctgacccagaaatga

SEQ ID NO: 692032 - DNA, 19 bp, Mus musculus
  siRNA target sequence for Clptm1 (NM_019649.1,788-806).
cacccccactggaccaata

SEQ ID NO: 692033 - DNA, 19 bp, Mus musculus
  siRNA target sequence for Clptm1 (NM_019649.1,791-809).
ccccactggaccaatatgt

SEQ ID NO: 692034 - DNA, 19 bp, Mus musculus
  siRNA target sequence for Clptm1 (NM_019649.1,793-811).
ccactggaccaatatgtga

SEQ ID NO: 692035 - DNA, 19 bp, Mus musculus
  siRNA target sequence for Clptm1 (NM_019649.1,821-839).
ccgtgagtggtgactacta

SEQ ID NO: 692036 - DNA, 19 bp, Mus musculus
  siRNA target sequence for Clptm1 (NM_019649.1,879-897).
ggattactaccccattaat

SEQ ID NO: 692037 - DNA, 19 bp, Mus musculus
  siRNA target sequence for Clptm1 (NM_019649.1,1062-1080).
ggaaaccagcccgtatctt

SEQ ID NO: 692038 - DNA, 19 bp, Mus musculus
  siRNA target sequence for Clptm1 (NM_019649.1,1123-1141).
gagttcctggctttcaaaa

SEQ ID NO: 692039 - DNA, 19 bp, Mus musculus
  siRNA target sequence for Clptm1 (NM_019649.1,1131-1149).
ggctttcaaaaatgacatt

SEQ ID NO: 692040 - DNA, 19 bp, Mus musculus
  siRNA target sequence for Clptm1 (NM_019649.1,1245-1263).
ggacaatgagaccaacttt

SEQ ID NO: 692041 - DNA, 19 bp, Mus musculus
  siRNA target sequence for Clptm1 (NM_019649.1,1296-1314).
catcgacctctggaagatt

SEQ ID NO: 692042 - DNA, 19 bp, Mus musculus
  siRNA target sequence for Clptm1 (NM_019649.1,1307-1325).
ggaagattaccaaagtcat

SEQ ID NO: 692043 - DNA, 19 bp, Mus musculus
  siRNA target sequence for Clptm1 (NM_019649.1,1368-1386).
cccttgcccaaccttcaaa

SEQ ID NO: 692044 - DNA, 19 bp, Mus musculus
  siRNA target sequence for Clptm1 (NM_019649.1,1370-1388).
cttgcccaaccttcaaaga

SEQ ID NO: 692045 - DNA, 19 bp, Mus musculus
  siRNA target sequence for Clptm1 (NM_019649.1,1389-1407).
caagtccacctatattgaa

SEQ ID NO: 692046 - DNA, 19 bp, Mus musculus
  siRNA target sequence for Clptm1 (NM_019649.1,1392-1410).
gtccacctatattgaatct

SEQ ID NO: 692047 - DNA, 19 bp, Mus musculus
  siRNA target sequence for Clptm1 (NM_019649.1,1395-1413).
cacctatattgaatcttca

SEQ ID NO: 692048 - DNA, 19 bp, Mus musculus
  siRNA target sequence for Clptm1 (NM_019649.1,1405-1423).
gaatcttcaaccaaagtat

SEQ ID NO: 692049 - DNA, 19 bp, Mus musculus
  siRNA target sequence for Clptm1 (NM_019649.1,1415-1433).
ccaaagtatatgatgatat

SEQ ID NO: 692050 - DNA, 19 bp, Mus musculus
  siRNA target sequence for Clptm1 (NM_019649.1,1483-1501).
ccgtctacagccttctgta

SEQ ID NO: 692051 - DNA, 19 bp, Mus musculus
  siRNA target sequence for D930001I22Rik (NM_173397.1,323-341).
ggcacagccatctggtata

SEQ ID NO: 692052 - DNA, 19 bp, Mus musculus
  siRNA target sequence for D930001I22Rik (NM_173397.1,324-342).
gcacagccatctggtatat

SEQ ID NO: 692053 - DNA, 19 bp, Mus musculus
  siRNA target sequence for D930001I22Rik (NM_173397.1,504-522).
ccttctgtgcgctcatgat

SEQ ID NO: 692054 - DNA, 19 bp, Mus musculus
  siRNA target sequence for D930001I22Rik (NM_173397.1,644-662).
ctgtgcacagccgtttatt

SEQ ID NO: 692055 - DNA, 19 bp, Mus musculus
  siRNA target sequence for D930001I22Rik (NM_173397.1,648-666).
gcacagccgtttatttcca

SEQ ID NO: 692056 - DNA, 19 bp, Mus musculus
  siRNA target sequence for D930001I22Rik (NM_173397.1,668-686).
gacttgacccagaaagtgt

SEQ ID NO: 692057 - DNA, 19 bp, Mus musculus
  siRNA target sequence for D930001I22Rik (NM_173397.1,764-782).
cctccccagagttgtagtt

SEQ ID NO: 692058 - DNA, 19 bp, Mus musculus
  siRNA target sequence for D930001I22Rik (NM_173397.1,765-783).
ctccccagagttgtagttt

SEQ ID NO: 692059 - DNA, 19 bp, Mus musculus
  siRNA target sequence for D930001I22Rik (NM_173397.1,767-785).
ccccagagttgtagtttga

SEQ ID NO: 692060 - DNA, 19 bp, Mus musculus
  siRNA target sequence for D930001I22Rik (NM_173397.1,769-787).
ccagagttgtagtttgact

SEQ ID NO: 692061 - DNA, 19 bp, Mus musculus
  siRNA target sequence for D930001I22Rik (NM_173397.1,770-788).
cagagttgtagtttgactt

SEQ ID NO: 692062 - DNA, 19 bp, Mus musculus
  siRNA target sequence for D930001I22Rik (NM_173397.1,794-812).
cgagatacttacaagaaat

SEQ ID NO: 692063 - DNA, 19 bp, Mus musculus
  siRNA target sequence for Dysf (NM_021469.1,154-172).
gagtgggacctcaaaggta

SEQ ID NO: 692064 - DNA, 19 bp, Mus musculus
  siRNA target sequence for Dysf (NM_021469.1,156-174).
gtgggacctcaaaggtatt

SEQ ID NO: 692065 - DNA, 19 bp, Mus musculus
  siRNA target sequence for Dysf (NM_021469.1,595-613).
cactatccaggggcaaaaa

SEQ ID NO: 692066 - DNA, 19 bp, Mus musculus
  siRNA target sequence for Dysf (NM_021469.1,623-641).
gctctgccccacctagaaa

SEQ ID NO: 692067 - DNA, 19 bp, Mus musculus
  siRNA target sequence for Dysf (NM_021469.1,700-718).
cagctgcctggggtgaata

SEQ ID NO: 692068 - DNA, 19 bp, Mus musculus
  siRNA target sequence for Dysf (NM_021469.1,766-784).
cggatccagaagggaaata

SEQ ID NO: 692069 - DNA, 19 bp, Mus musculus
  siRNA target sequence for Dysf (NM_021469.1,1347-1365).
caccttgcctgcgatgttt

SEQ ID NO: 692070 - DNA, 19 bp, Mus musculus
  siRNA target sequence for Dysf (NM_021469.1,1357-1375).
gcgatgtttccctctatgt

SEQ ID NO: 692071 - DNA, 19 bp, Mus musculus
  siRNA target sequence for Dysf (NM_021469.1,1407-1425).
ggaccgcctcactcacaat

SEQ ID NO: 692072 - DNA, 19 bp, Mus musculus
  siRNA target sequence for Dysf (NM_021469.1,1411-1429).
cgcctcactcacaatgaca

SEQ ID NO: 692073 - DNA, 19 bp, Mus musculus
  siRNA target sequence for Dysf (NM_021469.1,1449-1467).
gggtatgtcgaaaatctct

SEQ ID NO: 692074 - DNA, 19 bp, Mus musculus
  siRNA target sequence for Dysf (NM_021469.1,1565-1583).
cgggcttcccagatcctta

SEQ ID NO: 692075 - DNA, 19 bp, Mus musculus
  siRNA target sequence for Dysf (NM_021469.1,1566-1584).
gggcttcccagatccttat

SEQ ID NO: 692076 - DNA, 19 bp, Mus musculus
  siRNA target sequence for Dysf (NM_021469.1,1687-1705).
gaccttcctgcggatgata

SEQ ID NO: 692077 - DNA, 19 bp, Mus musculus
  siRNA target sequence for Dysf (NM_021469.1,1725-1743).
cctgcggaggcgcaaatat

SEQ ID NO: 692078 - DNA, 19 bp, Mus musculus
  siRNA target sequence for Dysf (NM_021469.1,1726-1744).
ctgcggaggcgcaaatatt

SEQ ID NO: 692079 - DNA, 19 bp, Mus musculus
  siRNA target sequence for Dysf (NM_021469.1,2143-2161).
gacatccacgagatacctt

SEQ ID NO: 692080 - DNA, 19 bp, Mus musculus
  siRNA target sequence for Dysf (NM_021469.1,2390-2408).
gggtgcctgcccatgaagt

SEQ ID NO: 692081 - DNA, 19 bp, Mus musculus
  siRNA target sequence for Dysf (NM_021469.1,2594-2612).
ctgtctttgccgaaacgta

SEQ ID NO: 692082 - DNA, 19 bp, Mus musculus
  siRNA target sequence for Dysf (NM_021469.1,2609-2627).
cgtatgagaaccagacaaa

SEQ ID NO: 692083 - DNA, 19 bp, Mus musculus
  siRNA target sequence for Dysf (NM_021469.1,2688-2706).
cacaggcaagatcaaacta

SEQ ID NO: 692084 - DNA, 19 bp, Mus musculus
  siRNA target sequence for Dysf (NM_021469.1,2693-2711).
gcaagatcaaactaccaaa

SEQ ID NO: 692085 - DNA, 19 bp, Mus musculus
  siRNA target sequence for Dysf (NM_021469.1,2697-2715).
gatcaaactaccaaaggat

SEQ ID NO: 692086 - DNA, 19 bp, Mus musculus
  siRNA target sequence for Dysf (NM_021469.1,2741-2759).
cctgggcaggagattggtt

SEQ ID NO: 692087 - DNA, 19 bp, Mus musculus
  siRNA target sequence for Dysf (NM_021469.1,2854-2872).
ggccagtggatttacatga

SEQ ID NO: 692088 - DNA, 19 bp, Mus musculus
  siRNA target sequence for Dysf (NM_021469.1,2905-2923).
gtacttccgaaggatgata

SEQ ID NO: 692089 - DNA, 19 bp, Mus musculus
  siRNA target sequence for Dysf (NM_021469.1,2911-2929).
ccgaaggatgatattgaat

SEQ ID NO: 692090 - DNA, 19 bp, Mus musculus
  siRNA target sequence for Dysf (NM_021469.1,2973-2991).
cctcaatcgggctgttgat

SEQ ID NO: 692091 - DNA, 19 bp, Mus musculus
  siRNA target sequence for Dysf (NM_021469.1,3052-3070).
cctgttgagaagatgtatt

SEQ ID NO: 692092 - DNA, 19 bp, Mus musculus
  siRNA target sequence for Dysf (NM_021469.1,3053-3071).
ctgttgagaagatgtatta

SEQ ID NO: 692093 - DNA, 19 bp, Mus musculus
  siRNA target sequence for Dysf (NM_021469.1,3340-3358).
gaagactccatgtctgttt

SEQ ID NO: 692094 - DNA, 19 bp, Mus musculus
  siRNA target sequence for Dysf (NM_021469.1,3376-3394).
gttaacagacccacaatct

SEQ ID NO: 692095 - DNA, 19 bp, Mus musculus
  siRNA target sequence for Dysf (NM_021469.1,3563-3581).
gggatcaaaccctcatctt

SEQ ID NO: 692096 - DNA, 19 bp, Mus musculus
  siRNA target sequence for Dysf (NM_021469.1,3573-3591).
cctcatcttctatgagatt

SEQ ID NO: 692097 - DNA, 19 bp, Mus musculus
  siRNA target sequence for Dysf (NM_021469.1,3681-3699).
gttcatgggtcgctgtatt

SEQ ID NO: 692098 - DNA, 19 bp, Mus musculus
  siRNA target sequence for Dysf (NM_021469.1,3782-3800).
cagcgttcgagcttatcca

SEQ ID NO: 692099 - DNA, 19 bp, Mus musculus
  siRNA target sequence for Dysf (NM_021469.1,3838-3856).
gagatgcatgaaacttcaa

SEQ ID NO: 692100 - DNA, 19 bp, Mus musculus
  siRNA target sequence for Dysf (NM_021469.1,3843-3861).
gcatgaaacttcaaggatt

SEQ ID NO: 692101 - DNA, 19 bp, Mus musculus
  siRNA target sequence for Dysf (NM_021469.1,3868-3886).
gagacggaggacacagatt

SEQ ID NO: 692102 - DNA, 19 bp, Mus musculus
  siRNA target sequence for Dysf (NM_021469.1,3924-3942).
catggttccccagaacatt

SEQ ID NO: 692103 - DNA, 19 bp, Mus musculus
  siRNA target sequence for Dysf (NM_021469.1,4122-4140).
cttcatggaagtgatgtta

SEQ ID NO: 692104 - DNA, 19 bp, Mus musculus
  siRNA target sequence for Dysf (NM_021469.1,4251-4269).
cctgtgcgacccatactca

SEQ ID NO: 692105 - DNA, 19 bp, Mus musculus
  siRNA target sequence for Dysf (NM_021469.1,4300-4318).
gatgatgtgagcttactca

SEQ ID NO: 692106 - DNA, 19 bp, Mus musculus
  siRNA target sequence for Dysf (NM_021469.1,4517-4535).
gcctgtccgacttttgtaa

SEQ ID NO: 692107 - DNA, 19 bp, Mus musculus
  siRNA target sequence for Dysf (NM_021469.1,4519-4537).
ctgtccgacttttgtaaca

SEQ ID NO: 692108 - DNA, 19 bp, Mus musculus
  siRNA target sequence for Dysf (NM_021469.1,4583-4601).
catctgtcatcggagaatt

SEQ ID NO: 692109 - DNA, 19 bp, Mus musculus
  siRNA target sequence for Dysf (NM_021469.1,4700-4718).
gcttggtccgtatttatat

SEQ ID NO: 692110 - DNA, 19 bp, Mus musculus
  siRNA target sequence for Dysf (NM_021469.1,4801-4819).
gtgagtgaccaggataact

SEQ ID NO: 692111 - DNA, 19 bp, Mus musculus
  siRNA target sequence for Dysf (NM_021469.1,4805-4823).
gtgaccaggataactacat

SEQ ID NO: 692112 - DNA, 19 bp, Mus musculus
  siRNA target sequence for Dysf (NM_021469.1,5021-5039).
gtgtctctggaccaaacaa

SEQ ID NO: 692113 - DNA, 19 bp, Mus musculus
  siRNA target sequence for Dysf (NM_021469.1,5359-5377).
ggacctcccttcaacatca

SEQ ID NO: 692114 - DNA, 19 bp, Mus musculus
  siRNA target sequence for Dysf (NM_021469.1,5396-5414).
ggttttttctgcgttgtat

SEQ ID NO: 692115 - DNA, 19 bp, Mus musculus
  siRNA target sequence for Dysf (NM_021469.1,5397-5415).
gttttttctgcgttgtatt

SEQ ID NO: 692116 - DNA, 19 bp, Mus musculus
  siRNA target sequence for Dysf (NM_021469.1,5985-6003).
ggatgaacccaacatgaat

SEQ ID NO: 692117 - DNA, 19 bp, Mus musculus
  siRNA target sequence for Dysf (NM_021469.1,6190-6208).
ctggtgaagccctttcgat

SEQ ID NO: 692118 - DNA, 19 bp, Mus musculus
  siRNA target sequence for E430007K15Rik (NM_145832.1,76-94).
gcgggaacaagccatttct

SEQ ID NO: 692119 - DNA, 19 bp, Mus musculus
  siRNA target sequence for E430007K15Rik (NM_145832.1,345-363).
ccgctgtcagtggtcttta

SEQ ID NO: 692120 - DNA, 19 bp, Mus musculus
  siRNA target sequence for E430007K15Rik (NM_145832.1,346-364).
cgctgtcagtggtctttat

SEQ ID NO: 692121 - DNA, 19 bp, Mus musculus
  siRNA target sequence for E430007K15Rik (NM_145832.1,357-375).
gtctttatcggcatgataa

SEQ ID NO: 692122 - DNA, 19 bp, Mus musculus
  siRNA target sequence for E430007K15Rik (NM_145832.1,365-383).
cggcatgataaccttcaat

SEQ ID NO: 692123 - DNA, 19 bp, Mus musculus
  siRNA target sequence for E430007K15Rik (NM_145832.1,366-384).
ggcatgataaccttcaata

SEQ ID NO: 692124 - DNA, 19 bp, Mus musculus
  siRNA target sequence for E430007K15Rik (NM_145832.1,367-385).
gcatgataaccttcaataa

SEQ ID NO: 692125 - DNA, 19 bp, Mus musculus
  siRNA target sequence for E430007K15Rik (NM_145832.1,402-420).
gtaggggtgcccttctaca

SEQ ID NO: 692126 - DNA, 19 bp, Mus musculus
  siRNA target sequence for E430007K15Rik (NM_145832.1,433-451).
cgctcaccaccgtgttcaa

SEQ ID NO: 692127 - DNA, 19 bp, Mus musculus
  siRNA target sequence for E430007K15Rik (NM_145832.1,442-460).
ccgtgttcaacgttcttct

SEQ ID NO: 692128 - DNA, 19 bp, Mus musculus
  siRNA target sequence for E430007K15Rik (NM_145832.1,506-524).
cacctgcggcgtcatcatt

SEQ ID NO: 692129 - DNA, 19 bp, Mus musculus
  siRNA target sequence for E430007K15Rik (NM_145832.1,529-547).
gtttctggctgggtataga

SEQ ID NO: 692130 - DNA, 19 bp, Mus musculus
  siRNA target sequence for E430007K15Rik (NM_145832.1,654-672).
gcagtagaccacagtatct

SEQ ID NO: 692131 - DNA, 19 bp, Mus musculus
  siRNA target sequence for E430007K15Rik (NM_145832.1,667-685).
gtatctggcgcctaacctt

SEQ ID NO: 692132 - DNA, 19 bp, Mus musculus
  siRNA target sequence for E430007K15Rik (NM_145832.1,671-689).
ctggcgcctaaccttctat

SEQ ID NO: 692133 - DNA, 19 bp, Mus musculus
  siRNA target sequence for E430007K15Rik (NM_145832.1,673-691).
ggcgcctaaccttctataa

SEQ ID NO: 692134 - DNA, 19 bp, Mus musculus
  siRNA target sequence for E430007K15Rik (NM_145832.1,675-693).
cgcctaaccttctataaca

SEQ ID NO: 692135 - DNA, 19 bp, Mus musculus
  siRNA target sequence for E430007K15Rik (NM_145832.1,676-694).
gcctaaccttctataacaa

SEQ ID NO: 692136 - DNA, 19 bp, Mus musculus
  siRNA target sequence for E430007K15Rik (NM_145832.1,677-695).
cctaaccttctataacaat

SEQ ID NO: 692137 - DNA, 19 bp, Mus musculus
  siRNA target sequence for E430007K15Rik (NM_145832.1,865-883).
gtcccctgacccataacgt

SEQ ID NO: 692138 - DNA, 19 bp, Mus musculus
  siRNA target sequence for E430007K15Rik (NM_145832.1,926-944).
gctctactacgaagagatt

SEQ ID NO: 692139 - DNA, 19 bp, Mus musculus
  siRNA target sequence for E430007K15Rik (NM_145832.1,927-945).
ctctactacgaagagatta

SEQ ID NO: 692140 - DNA, 19 bp, Mus musculus
  siRNA target sequence for Elovl5 (NM_134255.2,183-201).
gcgtcactcagtacctatt

SEQ ID NO: 692141 - DNA, 19 bp, Mus musculus
  siRNA target sequence for Elovl5 (NM_134255.2,184-202).
cgtcactcagtacctattt

SEQ ID NO: 692142 - DNA, 19 bp, Mus musculus
  siRNA target sequence for Elovl5 (NM_134255.2,352-370).
gaggcatcctgcagttgta

SEQ ID NO: 692143 - DNA, 19 bp, Mus musculus
  siRNA target sequence for Elovl5 (NM_134255.2,424-442).
gtgtgtgggaaggcaaata

SEQ ID NO: 692144 - DNA, 19 bp, Mus musculus
  siRNA target sequence for Elovl5 (NM_134255.2,472-490).
cgggagaatccgatatgaa

SEQ ID NO: 692145 - DNA, 19 bp, Mus musculus
  siRNA target sequence for Elovl5 (NM_134255.2,474-492).
ggagaatccgatatgaaga

SEQ ID NO: 692146 - DNA, 19 bp, Mus musculus
  siRNA target sequence for Elovl5 (NM_134255.2,475-493).
gagaatccgatatgaagat

SEQ ID NO: 692147 - DNA, 19 bp, Mus musculus
  siRNA target sequence for Elovl5 (NM_134255.2,477-495).
gaatccgatatgaagatca

SEQ ID NO: 692148 - DNA, 19 bp, Mus musculus
  siRNA target sequence for Elovl5 (NM_134255.2,652-670).
cctgcggccattcatattt

SEQ ID NO: 692149 - DNA, 19 bp, Mus musculus
  siRNA target sequence for Elovl5 (NM_134255.2,653-671).
ctgcggccattcatatttt

SEQ ID NO: 692150 - DNA, 19 bp, Mus musculus
  siRNA target sequence for Elovl5 (NM_134255.2,656-674).
cggccattcatattttggt

SEQ ID NO: 692151 - DNA, 19 bp, Mus musculus
  siRNA target sequence for Elovl5 (NM_134255.2,869-887).
ccagattggatacatgatt

SEQ ID NO: 692152 - DNA, 19 bp, Mus musculus
  siRNA target sequence for Emb (NM_010330.2,345-363).
ctacctgttcgagaagaaa

SEQ ID NO: 692153 - DNA, 19 bp, Mus musculus
  siRNA target sequence for Emb (NM_010330.2,360-378).
gaaatgatggcgaaatact

SEQ ID NO: 692154 - DNA, 19 bp, Mus musculus
  siRNA target sequence for Emb (NM_010330.2,368-386).
ggcgaaatactcaaacctt

SEQ ID NO: 692155 - DNA, 19 bp, Mus musculus
  siRNA target sequence for Emb (NM_010330.2,369-387).
gcgaaatactcaaaccttt

SEQ ID NO: 692156 - DNA, 19 bp, Mus musculus
  siRNA target sequence for Emb (NM_010330.2,388-406).
ccttaaagagctgtaatat

SEQ ID NO: 692157 - DNA, 19 bp, Mus musculus
  siRNA target sequence for Emb (NM_010330.2,413-431).
gacggaaaagtccaatgta

SEQ ID NO: 692158 - DNA, 19 bp, Mus musculus
  siRNA target sequence for Emb (NM_010330.2,416-434).
ggaaaagtccaatgtatca

SEQ ID NO: 692159 - DNA, 19 bp, Mus musculus
  siRNA target sequence for Emb (NM_010330.2,422-440).
gtccaatgtatcagtagaa

SEQ ID NO: 692160 - DNA, 19 bp, Mus musculus
  siRNA target sequence for Emb (NM_010330.2,435-453).
gtagaagagaacgtaattt

SEQ ID NO: 692161 - DNA, 19 bp, Mus musculus
  siRNA target sequence for Emb (NM_010330.2,484-502).
gcgtgtacacagcaactaa

SEQ ID NO: 692162 - DNA, 19 bp, Mus musculus
  siRNA target sequence for Emb (NM_010330.2,560-578).
gggtgacttcaatacaact

SEQ ID NO: 692163 - DNA, 19 bp, Mus musculus
  siRNA target sequence for Emb (NM_010330.2,562-580).
gtgacttcaatacaactaa

SEQ ID NO: 692164 - DNA, 19 bp, Mus musculus
  siRNA target sequence for Emb (NM_010330.2,603-621).
cagtacaggttcatcgttt

SEQ ID NO: 692165 - DNA, 19 bp, Mus musculus
  siRNA target sequence for Emb (NM_010330.2,605-623).
gtacaggttcatcgttttt

SEQ ID NO: 692166 - DNA, 19 bp, Mus musculus
  siRNA target sequence for Emb (NM_010330.2,633-651).
caattgggaaaatattctt

SEQ ID NO: 692167 - DNA, 19 bp, Mus musculus
  siRNA target sequence for Emb (NM_010330.2,669-687).
gaactaagagggaccttta

SEQ ID NO: 692168 - DNA, 19 bp, Mus musculus
  siRNA target sequence for Emb (NM_010330.2,758-776).
gaagtgtgtatgtcaagat

SEQ ID NO: 692169 - DNA, 19 bp, Mus musculus
  siRNA target sequence for Emb (NM_010330.2,761-779).
gtgtgtatgtcaagattgt

SEQ ID NO: 692170 - DNA, 19 bp, Mus musculus
  siRNA target sequence for Emb (NM_010330.2,763-781).
gtgtatgtcaagattgtct

SEQ ID NO: 692171 - DNA, 19 bp, Mus musculus
  siRNA target sequence for Emb (NM_010330.2,838-856).
ctcactcgaatgaaaagta

SEQ ID NO: 692172 - DNA, 19 bp, Mus musculus
  siRNA target sequence for Emb (NM_010330.2,840-858).
cactcgaatgaaaagtata

SEQ ID NO: 692173 - DNA, 19 bp, Mus musculus
  siRNA target sequence for Emb (NM_010330.2,844-862).
cgaatgaaaagtatatcat

SEQ ID NO: 692174 - DNA, 19 bp, Mus musculus
  siRNA target sequence for Emb (NM_010330.2,886-904).
caaggctcaagattaagca

SEQ ID NO: 692175 - DNA, 19 bp, Mus musculus
  siRNA target sequence for Emb (NM_010330.2,891-909).
ctcaagattaagcatcttt

SEQ ID NO: 692176 - DNA, 19 bp, Mus musculus
  siRNA target sequence for Emb (NM_010330.2,1024-1042).
ccatacttgccgaagtcat

SEQ ID NO: 692177 - DNA, 19 bp, Mus musculus
  siRNA target sequence for Emb (NM_010330.2,1055-1073).
catcattctgctttgtgaa

SEQ ID NO: 692178 - DNA, 19 bp, Mus musculus
  siRNA target sequence for Emb (NM_010330.2,1101-1119).
ccagatgctgggaaagaat

SEQ ID NO: 692179 - DNA, 19 bp, Mus musculus
  siRNA target sequence for Emb (NM_010330.2,1134-1152).
cagctgaaatcagatgata

SEQ ID NO: 692180 - DNA, 19 bp, Mus musculus
  siRNA target sequence for Emp1 (NM_010128.3,296-314).
gcagattacgcaaatgcat

SEQ ID NO: 692181 - DNA, 19 bp, Mus musculus
  siRNA target sequence for Emp1 (NM_010128.3,361-379).
cctgtcctacggcaatgaa

SEQ ID NO: 692182 - DNA, 19 bp, Mus musculus
  siRNA target sequence for Emp1 (NM_010128.3,364-382).
gtcctacggcaatgaagat

SEQ ID NO: 692183 - DNA, 19 bp, Mus musculus
  siRNA target sequence for Emp1 (NM_010128.3,372-390).
gcaatgaagatgctatcaa

SEQ ID NO: 692184 - DNA, 19 bp, Mus musculus
  siRNA target sequence for Emp1 (NM_010128.3,533-551).
ctggttggagtgtcaatct

SEQ ID NO: 692185 - DNA, 19 bp, Mus musculus
  siRNA target sequence for Emp1 (NM_010128.3,536-554).
gttggagtgtcaatctaca

SEQ ID NO: 692186 - DNA, 19 bp, Mus musculus
  siRNA target sequence for Emp1 (NM_010128.3,544-562).
gtcaatctacactcatcat

SEQ ID NO: 692187 - DNA, 19 bp, Mus musculus
  siRNA target sequence for Emp2 (NM_007929.1,251-269).
gtgattcttgccttcatca

SEQ ID NO: 692188 - DNA, 19 bp, Mus musculus
  siRNA target sequence for Emp2 (NM_007929.1,289-307).
cacggcactcctgttcatt

SEQ ID NO: 692189 - DNA, 19 bp, Mus musculus
  siRNA target sequence for Emp2 (NM_007929.1,381-399).
caaactgtaccgagatcaa

SEQ ID NO: 692190 - DNA, 19 bp, Mus musculus
  siRNA target sequence for Emp2 (NM_007929.1,414-432).
ctgaagcgtttgaaggtta

SEQ ID NO: 692191 - DNA, 19 bp, Mus musculus
  siRNA target sequence for Emp2 (NM_007929.1,416-434).
gaagcgtttgaaggttatt

SEQ ID NO: 692192 - DNA, 19 bp, Mus musculus
  siRNA target sequence for Emp2 (NM_007929.1,420-438).
cgtttgaaggttattctgt

SEQ ID NO: 692193 - DNA, 19 bp, Mus musculus
  siRNA target sequence for Emp2 (NM_007929.1,589-607).
gatcggagcttccatctat

SEQ ID NO: 692194 - DNA, 19 bp, Mus musculus
  siRNA target sequence for Emp2 (NM_007929.1,592-610).
cggagcttccatctataca

SEQ ID NO: 692195 - DNA, 19 bp, Mus musculus
  siRNA target sequence for Emp2 (NM_007929.1,594-612).
gagcttccatctatacaga

SEQ ID NO: 692196 - DNA, 19 bp, Mus musculus
  siRNA target sequence for Emp2 (NM_007929.1,640-658).
cagaaaactctattaccta

SEQ ID NO: 692197 - DNA, 19 bp, Mus musculus
  siRNA target sequence for Emp2 (NM_007929.1,672-690).
gctacggctactctttcat

SEQ ID NO: 692198 - DNA, 19 bp, Mus musculus
  siRNA target sequence for Emp2 (NM_007929.1,727-745).
gcggcctcatgtacatgat

SEQ ID NO: 692199 - DNA, 19 bp, Mus musculus
  siRNA target sequence for Emp3 (NM_010129.1,310-328).
ctgaacctgtggtatgact

SEQ ID NO: 692200 - DNA, 19 bp, Mus musculus
  siRNA target sequence for Epb7.2 (NM_013515.1,192-210).
ggtggctgcctcgttcttt

SEQ ID NO: 692201 - DNA, 19 bp, Mus musculus
  siRNA target sequence for Epb7.2 (NM_013515.1,193-211).
gtggctgcctcgttctttt

SEQ ID NO: 692202 - DNA, 19 bp, Mus musculus
  siRNA target sequence for Epb7.2 (NM_013515.1,199-217).
gcctcgttctttttcgtaa

SEQ ID NO: 692203 - DNA, 19 bp, Mus musculus
  siRNA target sequence for Epb7.2 (NM_013515.1,200-218).
cctcgttctttttcgtaat

SEQ ID NO: 692204 - DNA, 19 bp, Mus musculus
  siRNA target sequence for Epb7.2 (NM_013515.1,201-219).
ctcgttctttttcgtaatt

SEQ ID NO: 692205 - DNA, 19 bp, Mus musculus
  siRNA target sequence for Epb7.2 (NM_013515.1,203-221).
cgttctttttcgtaattat

SEQ ID NO: 692206 - DNA, 19 bp, Mus musculus
  siRNA target sequence for Epb7.2 (NM_013515.1,236-254).
caatatggatttgcataaa

SEQ ID NO: 692207 - DNA, 19 bp, Mus musculus
  siRNA target sequence for Epb7.2 (NM_013515.1,275-293).
gagtcatcatctttagact

SEQ ID NO: 692208 - DNA, 19 bp, Mus musculus
  siRNA target sequence for Epb7.2 (NM_013515.1,322-340).
ggaccaggtttgtttttta

SEQ ID NO: 692209 - DNA, 19 bp, Mus musculus
  siRNA target sequence for Epb7.2 (NM_013515.1,404-422).
cgcaggaggtcctcactaa

SEQ ID NO: 692210 - DNA, 19 bp, Mus musculus
  siRNA target sequence for Epb7.2 (NM_013515.1,423-441).
ggactcggtgacaatcagt

SEQ ID NO: 692211 - DNA, 19 bp, Mus musculus
  siRNA target sequence for Epb7.2 (NM_013515.1,520-538).
cgtcttttggcacaaacta

SEQ ID NO: 692212 - DNA, 19 bp, Mus musculus
  siRNA target sequence for Epb7.2 (NM_013515.1,758-776).
cagctgaaggggaaatgaa

SEQ ID NO: 692213 - DNA, 19 bp, Mus musculus
  siRNA target sequence for Epb7.2 (NM_013515.1,779-797).
cgtccagagctctgaaaga

SEQ ID NO: 692214 - DNA, 19 bp, Mus musculus
  siRNA target sequence for Epb7.2 (NM_013515.1,796-814).
gaagcgtccatggttatca

SEQ ID NO: 692215 - DNA, 19 bp, Mus musculus
  siRNA target sequence for Evc (NM_021292.1,214-232).
gcgcacggctccagaaaga

SEQ ID NO: 692216 - DNA, 19 bp, Mus musculus
  siRNA target sequence for Evc (NM_021292.1,215-233).
cgcacggctccagaaagat

SEQ ID NO: 692217 - DNA, 19 bp, Mus musculus
  siRNA target sequence for Evc (NM_021292.1,217-235).
cacggctccagaaagatga

SEQ ID NO: 692218 - DNA, 19 bp, Mus musculus
  siRNA target sequence for Evc (NM_021292.1,383-401).
cacggcatttgcactgaaa

SEQ ID NO: 692219 - DNA, 19 bp, Mus musculus
  siRNA target sequence for Evc (NM_021292.1,463-481).
catcgctgcatgaaaacct

SEQ ID NO: 692220 - DNA, 19 bp, Mus musculus
  siRNA target sequence for Evc (NM_021292.1,770-788).
gatgttcattcagattctt

SEQ ID NO: 692221 - DNA, 19 bp, Mus musculus
  siRNA target sequence for Evc (NM_021292.1,776-794).
cattcagattcttaaagca

SEQ ID NO: 692222 - DNA, 19 bp, Mus musculus
  siRNA target sequence for Evc (NM_021292.1,792-810).
gcatgcctcctggattttt

SEQ ID NO: 692223 - DNA, 19 bp, Mus musculus
  siRNA target sequence for Evc (NM_021292.1,800-818).
cctggatttttttcctaaa

SEQ ID NO: 692224 - DNA, 19 bp, Mus musculus
  siRNA target sequence for Evc (NM_021292.1,908-926).
ggcgaacacagaaatgtta

SEQ ID NO: 692225 - DNA, 19 bp, Mus musculus
  siRNA target sequence for Evc (NM_021292.1,933-951).
ggcgactctggctacgttt

SEQ ID NO: 692226 - DNA, 19 bp, Mus musculus
  siRNA target sequence for Evc (NM_021292.1,1078-1096).
ccaaagctcggcagttcat

SEQ ID NO: 692227 - DNA, 19 bp, Mus musculus
  siRNA target sequence for Evc (NM_021292.1,1371-1389).
cgttttggcagggaattca

SEQ ID NO: 692228 - DNA, 19 bp, Mus musculus
  siRNA target sequence for Evc (NM_021292.1,1654-1672).
gaaccttccaaaagtttgt

SEQ ID NO: 692229 - DNA, 19 bp, Mus musculus
  siRNA target sequence for Evc (NM_021292.1,1805-1823).
gtggggactcctatgtgat

SEQ ID NO: 692230 - DNA, 19 bp, Mus musculus
  siRNA target sequence for Evc (NM_021292.1,1920-1938).
ggcgtcctgagcagattca

SEQ ID NO: 692231 - DNA, 19 bp, Mus musculus
  siRNA target sequence for Evc (NM_021292.1,1922-1940).
cgtcctgagcagattcagt

SEQ ID NO: 692232 - DNA, 19 bp, Mus musculus
  siRNA target sequence for Evc (NM_021292.1,2315-2333).
ggtacatgctaggaatgtt

SEQ ID NO: 692233 - DNA, 19 bp, Mus musculus
  siRNA target sequence for Evc (NM_021292.1,2568-2586).
ccgtcgttggagagtcaaa

SEQ ID NO: 692234 - DNA, 19 bp, Mus musculus
  siRNA target sequence for Evc (NM_021292.1,2847-2865).
ccagaaaagccagtaagaa

SEQ ID NO: 692235 - DNA, 19 bp, Mus musculus
  siRNA target sequence for Evc (NM_021292.1,2903-2921).
cctggggacaccaaacgat

SEQ ID NO: 692236 - DNA, 19 bp, Mus musculus
  siRNA target sequence for F630045L20Rik (NM_175034.2,249-267).
cacggatggaggtatcgta

SEQ ID NO: 692237 - DNA, 19 bp, Mus musculus
  siRNA target sequence for F630045L20Rik (NM_175034.2,251-269).
cggatggaggtatcgtaat

SEQ ID NO: 692238 - DNA, 19 bp, Mus musculus
  siRNA target sequence for F630045L20Rik (NM_175034.2,253-271).
gatggaggtatcgtaatct

SEQ ID NO: 692239 - DNA, 19 bp, Mus musculus
  siRNA target sequence for F630045L20Rik (NM_175034.2,256-274).
ggaggtatcgtaatctact

SEQ ID NO: 692240 - DNA, 19 bp, Mus musculus
  siRNA target sequence for F630045L20Rik (NM_175034.2,257-275).
gaggtatcgtaatctactt

SEQ ID NO: 692241 - DNA, 19 bp, Mus musculus
  siRNA target sequence for F630045L20Rik (NM_175034.2,265-283).
gtaatctacttcctcatta

SEQ ID NO: 692242 - DNA, 19 bp, Mus musculus
  siRNA target sequence for F630045L20Rik (NM_175034.2,277-295).
ctcattatcctctacatgt

SEQ ID NO: 692243 - DNA, 19 bp, Mus musculus
  siRNA target sequence for F630045L20Rik (NM_175034.2,313-331).
gtctgcgacaagtacttct

SEQ ID NO: 692244 - DNA, 19 bp, Mus musculus
  siRNA target sequence for F630045L20Rik (NM_175034.2,379-397).
gttgcaggtgcaactttca

SEQ ID NO: 692245 - DNA, 19 bp, Mus musculus
  siRNA target sequence for F630045L20Rik (NM_175034.2,438-456).
cttgggtgtatttatcaca

SEQ ID NO: 692246 - DNA, 19 bp, Mus musculus
  siRNA target sequence for F630045L20Rik (NM_175034.2,576-594).
ccgagactgtgcagtgtat

SEQ ID NO: 692247 - DNA, 19 bp, Mus musculus
  siRNA target sequence for F630045L20Rik (NM_175034.2,659-677).
cagggctgctactgatata

SEQ ID NO: 692248 - DNA, 19 bp, Mus musculus
  siRNA target sequence for F630045L20Rik (NM_175034.2,672-690).
gatatatgggctctatgtt

SEQ ID NO: 692249 - DNA, 19 bp, Mus musculus
  siRNA target sequence for F630045L20Rik (NM_175034.2,713-731).
cgatcagccggcatgtcat

SEQ ID NO: 692250 - DNA, 19 bp, Mus musculus
  siRNA target sequence for F630045L20Rik (NM_175034.2,717-735).
cagccggcatgtcatgaaa

SEQ ID NO: 692251 - DNA, 19 bp, Mus musculus
  siRNA target sequence for F630045L20Rik (NM_175034.2,720-738).
ccggcatgtcatgaaaaca

SEQ ID NO: 692252 - DNA, 19 bp, Mus musculus
  siRNA target sequence for F630045L20Rik (NM_175034.2,721-739).
cggcatgtcatgaaaacat

SEQ ID NO: 692253 - DNA, 19 bp, Mus musculus
  siRNA target sequence for F630045L20Rik (NM_175034.2,848-866).
ggacagacagtggaatatt

SEQ ID NO: 692254 - DNA, 19 bp, Mus musculus
  siRNA target sequence for F630045L20Rik (NM_175034.2,879-897).
cggttactcccaactttct

SEQ ID NO: 692255 - DNA, 19 bp, Mus musculus
  siRNA target sequence for F630045L20Rik (NM_175034.2,931-949).
gatccaccaagtgttttca

SEQ ID NO: 692256 - DNA, 19 bp, Mus musculus
  siRNA target sequence for F630045L20Rik (NM_175034.2,954-972).
gccagaagcagacttaaga

SEQ ID NO: 692257 - DNA, 19 bp, Mus musculus
  siRNA target sequence for F630045L20Rik (NM_175034.2,958-976).
gaagcagacttaagaagaa

SEQ ID NO: 692258 - DNA, 19 bp, Mus musculus
  siRNA target sequence for F630045L20Rik (NM_175034.2,961-979).
gcagacttaagaagaattt

SEQ ID NO: 692259 - DNA, 19 bp, Mus musculus
  siRNA target sequence for F630045L20Rik (NM_175034.2,1063-1081).
gtgataacctttttcatgt

SEQ ID NO: 692260 - DNA, 19 bp, Mus musculus
  siRNA target sequence for F630045L20Rik (NM_175034.2,1091-1109).
ggatatctgcattcacata

SEQ ID NO: 692261 - DNA, 19 bp, Mus musculus
  siRNA target sequence for F630045L20Rik (NM_175034.2,1117-1135).
gtttggatggtcacagtaa

SEQ ID NO: 692262 - DNA, 19 bp, Mus musculus
  siRNA target sequence for F630045L20Rik (NM_175034.2,1130-1148).
cagtaacaggggaaacact

SEQ ID NO: 692263 - DNA, 19 bp, Mus musculus
  siRNA target sequence for F630045L20Rik (NM_175034.2,1185-1203).
ggcagcagggacaagcata

SEQ ID NO: 692264 - DNA, 19 bp, Mus musculus
  siRNA target sequence for F630045L20Rik (NM_175034.2,1196-1214).
caagcataccagatacagt

SEQ ID NO: 692265 - DNA, 19 bp, Mus musculus
  siRNA target sequence for F630045L20Rik (NM_175034.2,1211-1229).
cagtcacaagtgtgttagt

SEQ ID NO: 692266 - DNA, 19 bp, Mus musculus
  siRNA target sequence for F630045L20Rik (NM_175034.2,1224-1242).
gttagttgcaagaaaaggt

SEQ ID NO: 692267 - DNA, 19 bp, Mus musculus
  siRNA target sequence for F630045L20Rik (NM_175034.2,1246-1264).
ggagacatggctatatcta

SEQ ID NO: 692268 - DNA, 19 bp, Mus musculus
  siRNA target sequence for F630045L20Rik (NM_175034.2,1247-1265).
gagacatggctatatctaa

SEQ ID NO: 692269 - DNA, 19 bp, Mus musculus
  siRNA target sequence for F630045L20Rik (NM_175034.2,1272-1290).
gggatccaatgtgtttgat

SEQ ID NO: 692270 - DNA, 19 bp, Mus musculus
  siRNA target sequence for F630045L20Rik (NM_175034.2,1304-1322).
gtcttccctggtttattaa

SEQ ID NO: 692271 - DNA, 19 bp, Mus musculus
  siRNA target sequence for F630045L20Rik (NM_175034.2,1335-1353).
gaatgcatctgctcctata

SEQ ID NO: 692272 - DNA, 19 bp, Mus musculus
  siRNA target sequence for F630045L20Rik (NM_175034.2,1340-1358).
catctgctcctatagaagt

SEQ ID NO: 692273 - DNA, 19 bp, Mus musculus
  siRNA target sequence for F630045L20Rik (NM_175034.2,1345-1363).
gctcctatagaagtgaata

SEQ ID NO: 692274 - DNA, 19 bp, Mus musculus
  siRNA target sequence for F630045L20Rik (NM_175034.2,1348-1366).
cctatagaagtgaatagca

SEQ ID NO: 692275 - DNA, 19 bp, Mus musculus
  siRNA target sequence for F630045L20Rik (NM_175034.2,1349-1367).
ctatagaagtgaatagcaa

SEQ ID NO: 692276 - DNA, 19 bp, Mus musculus
  siRNA target sequence for F630045L20Rik (NM_175034.2,1368-1386).
gggactcacatatataaca

SEQ ID NO: 692277 - DNA, 19 bp, Mus musculus
  siRNA target sequence for F630045L20Rik (NM_175034.2,1370-1388).
gactcacatatataacaat

SEQ ID NO: 692278 - DNA, 19 bp, Mus musculus
  siRNA target sequence for F630045L20Rik (NM_175034.2,1391-1409).
ctctcaacatttcaatttt

SEQ ID NO: 692279 - DNA, 19 bp, Mus musculus
  siRNA target sequence for F630045L20Rik (NM_175034.2,1414-1432).
ctgttcttagcagttcatt

SEQ ID NO: 692280 - DNA, 19 bp, Mus musculus
  siRNA target sequence for F630045L20Rik (NM_175034.2,1442-1460).
ggaaactagaccgaaagtt

SEQ ID NO: 692281 - DNA, 19 bp, Mus musculus
  siRNA target sequence for F630045L20Rik (NM_175034.2,1485-1503).
cttaggacttgctacttta

SEQ ID NO: 692282 - DNA, 19 bp, Mus musculus
  siRNA target sequence for F630045L20Rik (NM_175034.2,1499-1517).
ctttatcagttctatatga

SEQ ID NO: 692283 - DNA, 19 bp, Mus musculus
  siRNA target sequence for Flot1 (NM_008027.1,231-249).
ggccggaggccgagtgttt

SEQ ID NO: 692284 - DNA, 19 bp, Mus musculus
  siRNA target sequence for Flot1 (NM_008027.1,307-325).
gtcaagagtgaaaaggttt

SEQ ID NO: 692285 - DNA, 19 bp, Mus musculus
  siRNA target sequence for Flot1 (NM_008027.1,358-376).
ggcattgcccaggtgaaaa

SEQ ID NO: 692286 - DNA, 19 bp, Mus musculus
  siRNA target sequence for Flot1 (NM_008027.1,359-377).
gcattgcccaggtgaaaat

SEQ ID NO: 692287 - DNA, 19 bp, Mus musculus
  siRNA target sequence for Flot1 (NM_008027.1,511-529).
gaggagatctataaggata

SEQ ID NO: 692288 - DNA, 19 bp, Mus musculus
  siRNA target sequence for Flot1 (NM_008027.1,566-584).
cctccgacctggtcaacat

SEQ ID NO: 692289 - DNA, 19 bp, Mus musculus
  siRNA target sequence for Flot1 (NM_008027.1,593-611).
gcgtggttagctacacttt

SEQ ID NO: 692290 - DNA, 19 bp, Mus musculus
  siRNA target sequence for Flot1 (NM_008027.1,595-613).
gtggttagctacactttga

SEQ ID NO: 692291 - DNA, 19 bp, Mus musculus
  siRNA target sequence for Flot1 (NM_008027.1,603-621).
ctacactttgaaggatatt

SEQ ID NO: 692292 - DNA, 19 bp, Mus musculus
  siRNA target sequence for Flot1 (NM_008027.1,606-624).
cactttgaaggatattcat

SEQ ID NO: 692293 - DNA, 19 bp, Mus musculus
  siRNA target sequence for Flot1 (NM_008027.1,608-626).
ctttgaaggatattcatga

SEQ ID NO: 692294 - DNA, 19 bp, Mus musculus
  siRNA target sequence for Flot1 (NM_008027.1,628-646).
gaccaggattacttacact

SEQ ID NO: 692295 - DNA, 19 bp, Mus musculus
  siRNA target sequence for Flot1 (NM_008027.1,662-680).
gcacggcacaagtccaaaa

SEQ ID NO: 692296 - DNA, 19 bp, Mus musculus
  siRNA target sequence for Flot1 (NM_008027.1,663-681).
cacggcacaagtccaaaaa

SEQ ID NO: 692297 - DNA, 19 bp, Mus musculus
  siRNA target sequence for Flot1 (NM_008027.1,665-683).
cggcacaagtccaaaaaga

SEQ ID NO: 692298 - DNA, 19 bp, Mus musculus
  siRNA target sequence for Flot1 (NM_008027.1,761-779).
cacagtgcctcagtgaaat

SEQ ID NO: 692299 - DNA, 19 bp, Mus musculus
  siRNA target sequence for Flot1 (NM_008027.1,1154-1172).
gtgctgaggctgagcaaat

SEQ ID NO: 692300 - DNA, 19 bp, Mus musculus
  siRNA target sequence for Flot1 (NM_008027.1,1320-1338).
catgggggcagccaaagtt

SEQ ID NO: 692301 - DNA, 19 bp, Mus musculus
  siRNA target sequence for Flot1 (NM_008027.1,1323-1341).
gggggcagccaaagttact

SEQ ID NO: 692302 - DNA, 19 bp, Mus musculus
  siRNA target sequence for Flot1 (NM_008027.1,1420-1438).
cacaacaagcctttaagga

SEQ ID NO: 692303 - DNA, 19 bp, Mus musculus
  siRNA target sequence for Gp49b (NM_013532.1,830-848).
cagtatgggcacaaaaaga

SEQ ID NO: 692304 - DNA, 19 bp, Mus musculus
  siRNA target sequence for Gpa33 (NM_021610.1,163-181).
gctcttaccgtggaaacta

SEQ ID NO: 692305 - DNA, 19 bp, Mus musculus
  siRNA target sequence for Gpa33 (NM_021610.1,234-252).
ctacaacacctatgtttca

SEQ ID NO: 692306 - DNA, 19 bp, Mus musculus
  siRNA target sequence for Gpa33 (NM_021610.1,256-274).
cgagaggggttcattcagt

SEQ ID NO: 692307 - DNA, 19 bp, Mus musculus
  siRNA target sequence for Gpa33 (NM_021610.1,267-285).
cattcagtgggataagctt

SEQ ID NO: 692308 - DNA, 19 bp, Mus musculus
  siRNA target sequence for Gpa33 (NM_021610.1,290-308).
gaagtcagacggaaagagt

SEQ ID NO: 692309 - DNA, 19 bp, Mus musculus
  siRNA target sequence for Gpa33 (NM_021610.1,305-323).
gagtggtcacctggaattt

SEQ ID NO: 692310 - DNA, 19 bp, Mus musculus
  siRNA target sequence for Gpa33 (NM_021610.1,360-378).
gaatcgagtgagagtatct

SEQ ID NO: 692311 - DNA, 19 bp, Mus musculus
  siRNA target sequence for Gpa33 (NM_021610.1,381-399).
cgatgctgagttgtcaaat

SEQ ID NO: 692312 - DNA, 19 bp, Mus musculus
  siRNA target sequence for Gpa33 (NM_021610.1,602-620).
gctctccgagcccacaata

SEQ ID NO: 692313 - DNA, 19 bp, Mus musculus
  siRNA target sequence for Gpa33 (NM_021610.1,710-728).
cggagacagcgggttacta

SEQ ID NO: 692314 - DNA, 19 bp, Mus musculus
  siRNA target sequence for Gpa33 (NM_021610.1,712-730).
gagacagcgggttactaca

SEQ ID NO: 692315 - DNA, 19 bp, Mus musculus
  siRNA target sequence for Gpa33 (NM_021610.1,885-903).
ccgggaaaaggatgacaaa

SEQ ID NO: 692316 - DNA, 19 bp, Mus musculus
  siRNA target sequence for Gpa33 (NM_021610.1,940-958).
gcttaccaagtgcctaaaa

SEQ ID NO: 692317 - DNA, 19 bp, Mus musculus
  siRNA target sequence for Gpa33 (NM_021610.1,941-959).
cttaccaagtgcctaaaaa

SEQ ID NO: 692318 - DNA, 19 bp, Mus musculus
  siRNA target sequence for Gpm6a (NM_153581.2,479-497).
cttcgagtgctgcattaaa

SEQ ID NO: 692319 - DNA, 19 bp, Mus musculus
  siRNA target sequence for Gpm6a (NM_153581.2,504-522).
ggaggtattccctatgctt

SEQ ID NO: 692320 - DNA, 19 bp, Mus musculus
  siRNA target sequence for Gpm6a (NM_153581.2,642-660).
ggagacacactggatgttt

SEQ ID NO: 692321 - DNA, 19 bp, Mus musculus
  siRNA target sequence for Gpm6a (NM_153581.2,662-680).
cactatgattgacatcttt

SEQ ID NO: 692322 - DNA, 19 bp, Mus musculus
  siRNA target sequence for Gpm6a (NM_153581.2,717-735).
gtctatggcattttactga

SEQ ID NO: 692323 - DNA, 19 bp, Mus musculus
  siRNA target sequence for Gpm6a (NM_153581.2,738-756).
gtagaaggtttcttcacaa

SEQ ID NO: 692324 - DNA, 19 bp, Mus musculus
  siRNA target sequence for Gpm6a (NM_153581.2,752-770).
cacaactggggctatcaaa

SEQ ID NO: 692325 - DNA, 19 bp, Mus musculus
  siRNA target sequence for Gpm6a (NM_153581.2,757-775).
ctggggctatcaaagatct

SEQ ID NO: 692326 - DNA, 19 bp, Mus musculus
  siRNA target sequence for Gpm6a (NM_153581.2,760-778).
gggctatcaaagatctcta

SEQ ID NO: 692327 - DNA, 19 bp, Mus musculus
  siRNA target sequence for Gpm6a (NM_153581.2,761-779).
ggctatcaaagatctctat

SEQ ID NO: 692328 - DNA, 19 bp, Mus musculus
  siRNA target sequence for Gpm6a (NM_153581.2,823-841).
ggtttatcatgctgacata

SEQ ID NO: 692329 - DNA, 19 bp, Mus musculus
  siRNA target sequence for Gpm6a (NM_153581.2,834-852).
ctgacatacctcttcatgt

SEQ ID NO: 692330 - DNA, 19 bp, Mus musculus
  siRNA target sequence for Gpm6a (NM_153581.2,883-901).
cactgcccgtgtacatgta

SEQ ID NO: 692331 - DNA, 19 bp, Mus musculus
  siRNA target sequence for Gpm6a (NM_153581.2,885-903).
ctgcccgtgtacatgtatt

SEQ ID NO: 692332 - DNA, 19 bp, Mus musculus
  siRNA target sequence for Gpm6a (NM_153581.2,888-906).
cccgtgtacatgtatttca

SEQ ID NO: 692333 - DNA, 19 bp, Mus musculus
  siRNA target sequence for Gpm6a (NM_153581.2,889-907).
ccgtgtacatgtatttcaa

SEQ ID NO: 692334 - DNA, 19 bp, Mus musculus
  siRNA target sequence for Gpm6a (NM_153581.2,890-908).
cgtgtacatgtatttcaat

SEQ ID NO: 692335 - DNA, 19 bp, Mus musculus
  siRNA target sequence for Gpm6a (NM_153581.2,998-1016).
ggaaaagaaaatttgtact

SEQ ID NO: 692336 - DNA, 19 bp, Mus musculus
  siRNA target sequence for Gpm6a (NM_153581.2,1034-1052).
gaggatgtgtgaatctact

SEQ ID NO: 692337 - DNA, 19 bp, Mus musculus
  siRNA target sequence for Gpm6a (NM_153581.2,1044-1062).
gaatctactgagctgaata

SEQ ID NO: 692338 - DNA, 19 bp, Mus musculus
  siRNA target sequence for Gpm6a (NM_153581.2,1218-1236).
gagctgcacgacatccatt

SEQ ID NO: 692339 - DNA, 19 bp, Mus musculus
  siRNA target sequence for Gpm6a (NM_153581.2,1221-1239).
ctgcacgacatccattcta

SEQ ID NO: 692340 - DNA, 19 bp, Mus musculus
  siRNA target sequence for Gpm6a (NM_153581.2,1223-1241).
gcacgacatccattctact

SEQ ID NO: 692341 - DNA, 19 bp, Mus musculus
  siRNA target sequence for Gpm6a (NM_153581.2,1254-1272).
cggctcaatgcgtacacat

SEQ ID NO: 692342 - DNA, 19 bp, Mus musculus
  siRNA target sequence for Gpm6b (NM_023122.1,216-234).
ctggtggccaccatcctat

SEQ ID NO: 692343 - DNA, 19 bp, Mus musculus
  siRNA target sequence for Gpm6b (NM_023122.1,222-240).
gccaccatcctatgtttct

SEQ ID NO: 692344 - DNA, 19 bp, Mus musculus
  siRNA target sequence for Gpm6b (NM_023122.1,283-301).
caggcaccgtggcaattct

SEQ ID NO: 692345 - DNA, 19 bp, Mus musculus
  siRNA target sequence for Gpm6b (NM_023122.1,286-304).
gcaccgtggcaattcttga

SEQ ID NO: 692346 - DNA, 19 bp, Mus musculus
  siRNA target sequence for Gpm6b (NM_023122.1,337-355).
ccttgctgagtgaagtgat

SEQ ID NO: 692347 - DNA, 19 bp, Mus musculus
  siRNA target sequence for Gpm6b (NM_023122.1,346-364).
gtgaagtgatccaactgat

SEQ ID NO: 692348 - DNA, 19 bp, Mus musculus
  siRNA target sequence for Gpm6b (NM_023122.1,357-375).
caactgatgcagtatgtta

SEQ ID NO: 692349 - DNA, 19 bp, Mus musculus
  siRNA target sequence for Gpm6b (NM_023122.1,362-380).
gatgcagtatgttatctat

SEQ ID NO: 692350 - DNA, 19 bp, Mus musculus
  siRNA target sequence for Gpm6b (NM_023122.1,439-457).
ccacaagtgcagtgaaaga

SEQ ID NO: 692351 - DNA, 19 bp, Mus musculus
  siRNA target sequence for Gpm6b (NM_023122.1,458-476).
gctgcacggtgagtttaaa

SEQ ID NO: 692352 - DNA, 19 bp, Mus musculus
  siRNA target sequence for Gpm6b (NM_023122.1,459-477).
ctgcacggtgagtttaaaa

SEQ ID NO: 692353 - DNA, 19 bp, Mus musculus
  siRNA target sequence for Gpm6b (NM_023122.1,461-479).
gcacggtgagtttaaaaca

SEQ ID NO: 692354 - DNA, 19 bp, Mus musculus
  siRNA target sequence for Gpm6b (NM_023122.1,462-480).
cacggtgagtttaaaacaa

SEQ ID NO: 692355 - DNA, 19 bp, Mus musculus
  siRNA target sequence for Gpm6b (NM_023122.1,464-482).
cggtgagtttaaaacaact

SEQ ID NO: 692356 - DNA, 19 bp, Mus musculus
  siRNA target sequence for Gpm6b (NM_023122.1,565-583).
ccgcagtgccagtgtttat

SEQ ID NO: 692357 - DNA, 19 bp, Mus musculus
  siRNA target sequence for Gpm6b (NM_023122.1,567-585).
gcagtgccagtgtttatgt

SEQ ID NO: 692358 - DNA, 19 bp, Mus musculus
  siRNA target sequence for Gpm6b (NM_023122.1,568-586).
cagtgccagtgtttatgtt

SEQ ID NO: 692359 - DNA, 19 bp, Mus musculus
  siRNA target sequence for Gpm6b (NM_023122.1,570-588).
gtgccagtgtttatgttct

SEQ ID NO: 692360 - DNA, 19 bp, Mus musculus
  siRNA target sequence for Gpm6b (NM_023122.1,665-683).
ggatgtccggcaatatggt

SEQ ID NO: 692361 - DNA, 19 bp, Mus musculus
  siRNA target sequence for Gpm6b (NM_023122.1,666-684).
gatgtccggcaatatggta

SEQ ID NO: 692362 - DNA, 19 bp, Mus musculus
  siRNA target sequence for Gpm6b (NM_023122.1,671-689).
ccggcaatatggtatcatt

SEQ ID NO: 692363 - DNA, 19 bp, Mus musculus
  siRNA target sequence for Gpm6b (NM_023122.1,675-693).
caatatggtatcattcctt

SEQ ID NO: 692364 - DNA, 19 bp, Mus musculus
  siRNA target sequence for Gpm6b (NM_023122.1,721-739).
gctcggccttggagaacat

SEQ ID NO: 692365 - DNA, 19 bp, Mus musculus
  siRNA target sequence for Gpm6b (NM_023122.1,742-760).
gcaacacgaatgagttcta

SEQ ID NO: 692366 - DNA, 19 bp, Mus musculus
  siRNA target sequence for Gpm6b (NM_023122.1,766-784).
cctatcacctgttcattgt

SEQ ID NO: 692367 - DNA, 19 bp, Mus musculus
  siRNA target sequence for Gpm6b (NM_023122.1,825-843).
cacttcctcatgatactgt

SEQ ID NO: 692368 - DNA, 19 bp, Mus musculus
  siRNA target sequence for Gpm6b (NM_023122.1,847-865).
ctaactgggcttacttaaa

SEQ ID NO: 692369 - DNA, 19 bp, Mus musculus
  siRNA target sequence for Gpm6b (NM_023122.1,932-950).
ccagtctcgctcaaaagaa

SEQ ID NO: 692370 - DNA, 19 bp, Mus musculus
  siRNA target sequence for Gpm6b (NM_023122.1,935-953).
gtctcgctcaaaagaacaa

SEQ ID NO: 692371 - DNA, 19 bp, Mus musculus
  siRNA target sequence for Gpm6b (NM_023122.1,940-958).
gctcaaaagaacaactcaa

SEQ ID NO: 692372 - DNA, 19 bp, Mus musculus
  siRNA target sequence for Grcc3f (NM_145130.1,151-169).
gaggatctgagccttaaca

SEQ ID NO: 692373 - DNA, 19 bp, Mus musculus
  siRNA target sequence for Grcc3f (NM_145130.1,249-267).
gttttaccggcattacctt

SEQ ID NO: 692374 - DNA, 19 bp, Mus musculus
  siRNA target sequence for Grcc3f (NM_145130.1,305-323).
ccttcacgggcctctcaat

SEQ ID NO: 692375 - DNA, 19 bp, Mus musculus
  siRNA target sequence for Grcc3f (NM_145130.1,309-327).
cacgggcctctcaattgct

SEQ ID NO: 692376 - DNA, 19 bp, Mus musculus
  siRNA target sequence for Grcc3f (NM_145130.1,311-329).
cgggcctctcaattgctta

SEQ ID NO: 692377 - DNA, 19 bp, Mus musculus
  siRNA target sequence for Grcc3f (NM_145130.1,312-330).
gggcctctcaattgcttat

SEQ ID NO: 692378 - DNA, 19 bp, Mus musculus
  siRNA target sequence for Grcc3f (NM_145130.1,313-331).
ggcctctcaattgcttatt

SEQ ID NO: 692379 - DNA, 19 bp, Mus musculus
  siRNA target sequence for Grcc3f (NM_145130.1,408-426).
caccgtcactgccgttatt

SEQ ID NO: 692380 - DNA, 19 bp, Mus musculus
  siRNA target sequence for Grcc3f (NM_145130.1,411-429).
cgtcactgccgttattact

SEQ ID NO: 692381 - DNA, 19 bp, Mus musculus
  siRNA target sequence for Grcc3f (NM_145130.1,412-430).
gtcactgccgttattacta

SEQ ID NO: 692382 - DNA, 19 bp, Mus musculus
  siRNA target sequence for Grcc3f (NM_145130.1,457-475).
cttgccggatattactaca

SEQ ID NO: 692383 - DNA, 19 bp, Mus musculus
  siRNA target sequence for Grcc3f (NM_145130.1,478-496).
gccaccggtgactacgata

SEQ ID NO: 692384 - DNA, 19 bp, Mus musculus
  siRNA target sequence for Grcc3f (NM_145130.1,479-497).
ccaccggtgactacgatat

SEQ ID NO: 692385 - DNA, 19 bp, Mus musculus
  siRNA target sequence for Grcc3f (NM_145130.1,482-500).
ccggtgactacgatatcaa

SEQ ID NO: 692386 - DNA, 19 bp, Mus musculus
  siRNA target sequence for Grcc3f (NM_145130.1,484-502).
ggtgactacgatatcaagt

SEQ ID NO: 692387 - DNA, 19 bp, Mus musculus
  siRNA target sequence for Grcc3f (NM_145130.1,501-519).
gtggacaatgccacattgt

SEQ ID NO: 692388 - DNA, 19 bp, Mus musculus
  siRNA target sequence for Grcc3f (NM_145130.1,520-538).
gtcttgacactgaagctaa

SEQ ID NO: 692389 - DNA, 19 bp, Mus musculus
  siRNA target sequence for Grcc3f (NM_145130.1,542-560).
ggctgtgtattgactacta

SEQ ID NO: 692390 - DNA, 19 bp, Mus musculus
  siRNA target sequence for Grcc3f (NM_145130.1,568-586).
ggcaaagacgggaattcct

SEQ ID NO: 692391 - DNA, 19 bp, Mus musculus
  siRNA target sequence for Grcc3f (NM_145130.1,692-710).
caatgaaccactacatgaa

SEQ ID NO: 692392 - DNA, 19 bp, Mus musculus
  siRNA target sequence for Grcc3f (NM_145130.1,900-918).
gctgatctggggcaaattt

SEQ ID NO: 692393 - DNA, 19 bp, Mus musculus
  siRNA target sequence for Grcc3f (NM_145130.1,972-990).
gtcgggcctgggctttaat

SEQ ID NO: 692394 - DNA, 19 bp, Mus musculus
  siRNA target sequence for Grcc3f (NM_145130.1,1075-1093).
ggcaccatcgcctctttca

SEQ ID NO: 692395 - DNA, 19 bp, Mus musculus
  siRNA target sequence for Grcc3f (NM_145130.1,1076-1094).
gcaccatcgcctctttcaa

SEQ ID NO: 692396 - DNA, 19 bp, Mus musculus
  siRNA target sequence for Grcc3f (NM_145130.1,1079-1097).
ccatcgcctctttcaacat

SEQ ID NO: 692397 - DNA, 19 bp, Mus musculus
  siRNA target sequence for Grcc3f (NM_145130.1,1109-1127).
cctgggtagcccgttacat

SEQ ID NO: 692398 - DNA, 19 bp, Mus musculus
  siRNA target sequence for Grcc3f (NM_145130.1,1112-1130).
gggtagcccgttacatctt

SEQ ID NO: 692399 - DNA, 19 bp, Mus musculus
  siRNA target sequence for Grcc3f (NM_145130.1,1114-1132).
gtagcccgttacatcttca

SEQ ID NO: 692400 - DNA, 19 bp, Mus musculus
  siRNA target sequence for Grcc3f (NM_145130.1,1210-1228).
cactcaggatacctgattt

SEQ ID NO: 692401 - DNA, 19 bp, Mus musculus
  siRNA target sequence for Grcc3f (NM_145130.1,1236-1254).
gatggaattcctcattgtt

SEQ ID NO: 692402 - DNA, 19 bp, Mus musculus
  siRNA target sequence for Grcc3f (NM_145130.1,1266-1284).
gcaggtcagcagtctaatt

SEQ ID NO: 692403 - DNA, 19 bp, Mus musculus
  siRNA target sequence for Grcc3f (NM_145130.1,1325-1343).
ccctacagcccttctacta

SEQ ID NO: 692404 - DNA, 19 bp, Mus musculus
  siRNA target sequence for Grcc3f (NM_145130.1,1368-1386).
gctgttcatgggttactct

SEQ ID NO: 692405 - DNA, 19 bp, Mus musculus
  siRNA target sequence for Grcc3f (NM_145130.1,1369-1387).
ctgttcatgggttactcta

SEQ ID NO: 692406 - DNA, 19 bp, Mus musculus
  siRNA target sequence for Grcc3f (NM_145130.1,1453-1471).
ggacatgtcttcttcttga

SEQ ID NO: 692407 - DNA, 19 bp, Mus musculus
  siRNA target sequence for Grcc3f (NM_145130.1,1490-1508).
cttatatccacaaagcaat

SEQ ID NO: 692408 - DNA, 19 bp, Mus musculus
  siRNA target sequence for Gypa (NM_010369.2,665-683).
ctgtaggtaacccaaatca

SEQ ID NO: 692409 - DNA, 19 bp, Mus musculus
  siRNA target sequence for Gypa (NM_010369.2,803-821).
ctgaagtgcaacacgattt

SEQ ID NO: 692410 - DNA, 19 bp, Mus musculus
  siRNA target sequence for Gypa (NM_010369.2,854-872).
gcgtgatggcagggattat

SEQ ID NO: 692411 - DNA, 19 bp, Mus musculus
  siRNA target sequence for Gypa (NM_010369.2,867-885).
gattatcggaactatcctt

SEQ ID NO: 692412 - DNA, 19 bp, Mus musculus
  siRNA target sequence for Gypa (NM_010369.2,886-904).
cttatctcttactgtatca

SEQ ID NO: 692413 - DNA, 19 bp, Mus musculus
  siRNA target sequence for Gypa (NM_010369.2,897-915).
ctgtatcagccgaatgaca

SEQ ID NO: 692414 - DNA, 19 bp, Mus musculus
  siRNA target sequence for Gypa (NM_010369.2,899-917).
gtatcagccgaatgacaaa

SEQ ID NO: 692415 - DNA, 19 bp, Mus musculus
  siRNA target sequence for Hcst (NM_011827.1,111-129).
catgtcactcctaattgta

SEQ ID NO: 692416 - DNA, 19 bp, Mus musculus
  siRNA target sequence for Hcst (NM_011827.1,182-200).
gtagagtctacatcaacat

SEQ ID NO: 692417 - DNA, 19 bp, Mus musculus
  siRNA target sequence for Hpvc2 (NM_008283.1,58-76).
ggagagactaacttgtttt

SEQ ID NO: 692418 - DNA, 19 bp, Mus musculus
  siRNA target sequence for Hpvc2 (NM_008283.1,59-77).
gagagactaacttgtttta

SEQ ID NO: 692419 - DNA, 19 bp, Mus musculus
  siRNA target sequence for Hpvc2 (NM_008283.1,122-140).
cgctcacgtgcatgtgtaa

SEQ ID NO: 692420 - DNA, 19 bp, Mus musculus
  siRNA target sequence for Hpvc2 (NM_008283.1,124-142).
ctcacgtgcatgtgtaagt

SEQ ID NO: 692421 - DNA, 19 bp, Mus musculus
  siRNA target sequence for Ier3 (NM_133662.1,442-460).
gcgctggatcttaaagctt

SEQ ID NO: 692422 - DNA, 19 bp, Mus musculus
  siRNA target sequence for Ier3 (NM_133662.1,443-461).
cgctggatcttaaagcttt

SEQ ID NO: 692423 - DNA, 19 bp, Mus musculus
  siRNA target sequence for Itm2a (NM_008409.1,170-188).
cccctacggcggtgcaaaa

SEQ ID NO: 692424 - DNA, 19 bp, Mus musculus
  siRNA target sequence for Itm2a (NM_008409.1,173-191).
ctacggcggtgcaaaagga

SEQ ID NO: 692425 - DNA, 19 bp, Mus musculus
  siRNA target sequence for Itm2a (NM_008409.1,227-245).
gcactgtccgagctcaaat

SEQ ID NO: 692426 - DNA, 19 bp, Mus musculus
  siRNA target sequence for Itm2a (NM_008409.1,230-248).
ctgtccgagctcaaatcct

SEQ ID NO: 692427 - DNA, 19 bp, Mus musculus
  siRNA target sequence for Itm2a (NM_008409.1,299-317).
ggagatgcatgcttactct

SEQ ID NO: 692428 - DNA, 19 bp, Mus musculus
  siRNA target sequence for Itm2a (NM_008409.1,333-351).
catcttggcaggactgatt

SEQ ID NO: 692429 - DNA, 19 bp, Mus musculus
  siRNA target sequence for Itm2a (NM_008409.1,336-354).
cttggcaggactgattgtt

SEQ ID NO: 692430 - DNA, 19 bp, Mus musculus
  siRNA target sequence for Itm2a (NM_008409.1,362-380).
cctgcatttacaagtactt

SEQ ID NO: 692431 - DNA, 19 bp, Mus musculus
  siRNA target sequence for Itm2a (NM_008409.1,365-383).
gcatttacaagtacttcat

SEQ ID NO: 692432 - DNA, 19 bp, Mus musculus
  siRNA target sequence for Itm2a (NM_008409.1,432-450).
ggatcctgtcaattccatt

SEQ ID NO: 692433 - DNA, 19 bp, Mus musculus
  siRNA target sequence for Itm2a (NM_008409.1,498-516).
ccgtgaggatgacaacatt

SEQ ID NO: 692434 - DNA, 19 bp, Mus musculus
  siRNA target sequence for Itm2a (NM_008409.1,531-549).
gcctgtgcccagtttctct

SEQ ID NO: 692435 - DNA, 19 bp, Mus musculus
  siRNA target sequence for Itm2a (NM_008409.1,631-649).
ctgatgcccctcaatactt

SEQ ID NO: 692436 - DNA, 19 bp, Mus musculus
  siRNA target sequence for Itm2a (NM_008409.1,636-654).
gcccctcaatacttccatt

SEQ ID NO: 692437 - DNA, 19 bp, Mus musculus
  siRNA target sequence for Itm2a (NM_008409.1,639-657).
cctcaatacttccattgtt

SEQ ID NO: 692438 - DNA, 19 bp, Mus musculus
  siRNA target sequence for Itm2a (NM_008409.1,640-658).
ctcaatacttccattgtta

SEQ ID NO: 692439 - DNA, 19 bp, Mus musculus
  siRNA target sequence for Itm2a (NM_008409.1,708-726).
gtatttgcctcatacttat

SEQ ID NO: 692440 - DNA, 19 bp, Mus musculus
  siRNA target sequence for Itm2a (NM_008409.1,753-771).
ggaagaaattcgtgatgtt

SEQ ID NO: 692441 - DNA, 19 bp, Mus musculus
  siRNA target sequence for Itm2a (NM_008409.1,757-775).
gaaattcgtgatgttagta

SEQ ID NO: 692442 - DNA, 19 bp, Mus musculus
  siRNA target sequence for Itm2a (NM_008409.1,799-817).
ctttgcaacaaccgaaaat

SEQ ID NO: 692443 - DNA, 19 bp, Mus musculus
  siRNA target sequence for Itm2a (NM_008409.1,858-876).
caagcgtgccattgacaaa

SEQ ID NO: 692444 - DNA, 19 bp, Mus musculus
  siRNA target sequence for Kai1 (NM_007656.1,109-127).
gcaggctgtgtcaaagtca

SEQ ID NO: 692445 - DNA, 19 bp, Mus musculus
  siRNA target sequence for Kai1 (NM_007656.1,147-165).
cttcaacttgctgttcttt

SEQ ID NO: 692446 - DNA, 19 bp, Mus musculus
  siRNA target sequence for Kai1 (NM_007656.1,189-207).
cttcggggtgtggattctt

SEQ ID NO: 692447 - DNA, 19 bp, Mus musculus
  siRNA target sequence for Kai1 (NM_007656.1,404-422).
ccgtaggggtcctcttcta

SEQ ID NO: 692448 - DNA, 19 bp, Mus musculus
  siRNA target sequence for Kai1 (NM_007656.1,554-572).
gctgggtcagccactacaa

SEQ ID NO: 692449 - DNA, 19 bp, Mus musculus
  siRNA target sequence for Kai1 (NM_007656.1,589-607).
gagctcatgggctttacca

SEQ ID NO: 692450 - DNA, 19 bp, Mus musculus
  siRNA target sequence for Kai1 (NM_007656.1,649-667).
gacaaccagctcattgtga

SEQ ID NO: 692451 - DNA, 19 bp, Mus musculus
  siRNA target sequence for Kai1 (NM_007656.1,695-713).
gcactgtgagcgaaaacaa

SEQ ID NO: 692452 - DNA, 19 bp, Mus musculus
  siRNA target sequence for Kai1 (NM_007656.1,834-852).
gttgttcctgtccatatgt

SEQ ID NO: 692453 - DNA, 19 bp, Mus musculus
  siRNA target sequence for Kai1 (NM_007656.1,851-869).
gtttgtgccggtacattca

SEQ ID NO: 692454 - DNA, 19 bp, Mus musculus
  siRNA target sequence for Kai1 (NM_007656.1,857-875).
gccggtacattcattctga

SEQ ID NO: 692455 - DNA, 19 bp, Mus musculus
  siRNA target sequence for Kai1 (NM_007656.1,858-876).
ccggtacattcattctgaa

SEQ ID NO: 692456 - DNA, 19 bp, Mus musculus
  siRNA target sequence for Lag3 (NM_008479.1,503-521).
caacctggatcctaacttt

SEQ ID NO: 692457 - DNA, 19 bp, Mus musculus
  siRNA target sequence for Lag3 (NM_008479.1,506-524).
cctggatcctaactttcta

SEQ ID NO: 692458 - DNA, 19 bp, Mus musculus
  siRNA target sequence for Lag3 (NM_008479.1,535-553).
gggttatctggcaacatca

SEQ ID NO: 692459 - DNA, 19 bp, Mus musculus
  siRNA target sequence for Lag3 (NM_008479.1,605-623).
gatgccctcgcctagacaa

SEQ ID NO: 692460 - DNA, 19 bp, Mus musculus
  siRNA target sequence for Lag3 (NM_008479.1,846-864).
caggcctcgatgattgcta

SEQ ID NO: 692461 - DNA, 19 bp, Mus musculus
  siRNA target sequence for Lag3 (NM_008479.1,891-909).
gattgggtccttttgaact

SEQ ID NO: 692462 - DNA, 19 bp, Mus musculus
  siRNA target sequence for Lag3 (NM_008479.1,966-984).
cgagtgcctgtctacaact

SEQ ID NO: 692463 - DNA, 19 bp, Mus musculus
  siRNA target sequence for Lag3 (NM_008479.1,980-998).
caactcaccgcgtcatttt

SEQ ID NO: 692464 - DNA, 19 bp, Mus musculus
  siRNA target sequence for Lag3 (NM_008479.1,983-1001).
ctcaccgcgtcatttttta

SEQ ID NO: 692465 - DNA, 19 bp, Mus musculus
  siRNA target sequence for Lag3 (NM_008479.1,1259-1277).
ccccgtggctggaaagagt

SEQ ID NO: 692466 - DNA, 19 bp, Mus musculus
  siRNA target sequence for Lag3 (NM_008479.1,1267-1285).
ctggaaagagtggcaattt

SEQ ID NO: 692467 - DNA, 19 bp, Mus musculus
  siRNA target sequence for Lag3 (NM_008479.1,1269-1287).
ggaaagagtggcaatttta

SEQ ID NO: 692468 - DNA, 19 bp, Mus musculus
  siRNA target sequence for Lag3 (NM_008479.1,1481-1499).
gtggcgtcccctgaacaat

SEQ ID NO: 692469 - DNA, 19 bp, Mus musculus
  siRNA target sequence for Lag3 (NM_008479.1,1640-1658).
cagtgctaggagaatctca

SEQ ID NO: 692470 - DNA, 19 bp, Mus musculus
  siRNA target sequence for Lag3 (NM_008479.1,1777-1795).
gattttctgccttagaaca

SEQ ID NO: 692471 - DNA, 19 bp, Mus musculus
  siRNA target sequence for Lancl1 (NM_021295.1,117-135).
gggcctttccgaatcctta

SEQ ID NO: 692472 - DNA, 19 bp, Mus musculus
  siRNA target sequence for Lancl1 (NM_021295.1,127-145).
gaatccttatgccgattat

SEQ ID NO: 692473 - DNA, 19 bp, Mus musculus
  siRNA target sequence for Lancl1 (NM_021295.1,132-150).
cttatgccgattataacaa

SEQ ID NO: 692474 - DNA, 19 bp, Mus musculus
  siRNA target sequence for Lancl1 (NM_021295.1,153-171).
cgctggccgaaaactactt

SEQ ID NO: 692475 - DNA, 19 bp, Mus musculus
  siRNA target sequence for Lancl1 (NM_021295.1,160-178).
cgaaaactactttgattct

SEQ ID NO: 692476 - DNA, 19 bp, Mus musculus
  siRNA target sequence for Lancl1 (NM_021295.1,206-224).
catcgcttgaccaataaga

SEQ ID NO: 692477 - DNA, 19 bp, Mus musculus
  siRNA target sequence for Lancl1 (NM_021295.1,345-363).
gggacccagcctatctaca

SEQ ID NO: 692478 - DNA, 19 bp, Mus musculus
  siRNA target sequence for Lancl1 (NM_021295.1,364-382).
gatggcgcacagctatgta

SEQ ID NO: 692479 - DNA, 19 bp, Mus musculus
  siRNA target sequence for Lancl1 (NM_021295.1,369-387).
cgcacagctatgtaaagca

SEQ ID NO: 692480 - DNA, 19 bp, Mus musculus
  siRNA target sequence for Lancl1 (NM_021295.1,370-388).
gcacagctatgtaaagcaa

SEQ ID NO: 692481 - DNA, 19 bp, Mus musculus
  siRNA target sequence for Lancl1 (NM_021295.1,459-477).
ctgtgctgtaccacaagat

SEQ ID NO: 692482 - DNA, 19 bp, Mus musculus
  siRNA target sequence for Lancl1 (NM_021295.1,512-530).
cggctcattcacctaaata

SEQ ID NO: 692483 - DNA, 19 bp, Mus musculus
  siRNA target sequence for Lancl1 (NM_021295.1,539-557).
ccccacgtaccaaatgaaa

SEQ ID NO: 692484 - DNA, 19 bp, Mus musculus
  siRNA target sequence for Lancl1 (NM_021295.1,567-585).
gccgcataggctacatctt

SEQ ID NO: 692485 - DNA, 19 bp, Mus musculus
  siRNA target sequence for Lancl1 (NM_021295.1,568-586).
ccgcataggctacatcttt

SEQ ID NO: 692486 - DNA, 19 bp, Mus musculus
  siRNA target sequence for Lancl1 (NM_021295.1,590-608).
ctgctttttgtcaataaga

SEQ ID NO: 692487 - DNA, 19 bp, Mus musculus
  siRNA target sequence for Lancl1 (NM_021295.1,647-665).
cagatttgtgaaaacatct

SEQ ID NO: 692488 - DNA, 19 bp, Mus musculus
  siRNA target sequence for Lancl1 (NM_021295.1,708-726).
caaagtctccactgatgta

SEQ ID NO: 692489 - DNA, 19 bp, Mus musculus
  siRNA target sequence for Lancl1 (NM_021295.1,728-746).
gagtggtaccaggaatatt

SEQ ID NO: 692490 - DNA, 19 bp, Mus musculus
  siRNA target sequence for Lancl1 (NM_021295.1,732-750).
ggtaccaggaatattacgt

SEQ ID NO: 692491 - DNA, 19 bp, Mus musculus
  siRNA target sequence for Lancl1 (NM_021295.1,815-833).
caaggaaagttgcatagtt

SEQ ID NO: 692492 - DNA, 19 bp, Mus musculus
  siRNA target sequence for Lancl1 (NM_021295.1,838-856).
gaagcccagtgtagacttt

SEQ ID NO: 692493 - DNA, 19 bp, Mus musculus
  siRNA target sequence for Lancl1 (NM_021295.1,945-963).
ctggggtcatctatatgct

SEQ ID NO: 692494 - DNA, 19 bp, Mus musculus
  siRNA target sequence for Lancl1 (NM_021295.1,1035-1053).
ggcagtacgggctactgaa

SEQ ID NO: 692495 - DNA, 19 bp, Mus musculus
  siRNA target sequence for Lancl1 (NM_021295.1,1122-1140).
cacaggatctgaagtatct

SEQ ID NO: 692496 - DNA, 19 bp, Mus musculus
  siRNA target sequence for Lancl1 (NM_021295.1,1160-1178).
gctgagtggtgcttagact

SEQ ID NO: 692497 - DNA, 19 bp, Mus musculus
  siRNA target sequence for Lancl1 (NM_021295.1,1161-1179).
ctgagtggtgcttagacta

SEQ ID NO: 692498 - DNA, 19 bp, Mus musculus
  siRNA target sequence for Lancl1 (NM_021295.1,1230-1248).
ggatggctggaacaatata

SEQ ID NO: 692499 - DNA, 19 bp, Mus musculus
  siRNA target sequence for Lancl1 (NM_021295.1,1231-1249).
gatggctggaacaatatat

SEQ ID NO: 692500 - DNA, 19 bp, Mus musculus
  siRNA target sequence for Lancl1 (NM_021295.1,1279-1297).
ggccaagttccctgcattt

SEQ ID NO: 692501 - DNA, 19 bp, Mus musculus
  siRNA target sequence for Lancl1 (NM_021295.1,1282-1300).
caagttccctgcatttgaa

SEQ ID NO: 692502 - DNA, 19 bp, Mus musculus
  siRNA target sequence for Lect1 (NM_010701.1,201-219).
ggcctgaggacgttgagtt

SEQ ID NO: 692503 - DNA, 19 bp, Mus musculus
  siRNA target sequence for Lect1 (NM_010701.1,203-221).
cctgaggacgttgagtttt

SEQ ID NO: 692504 - DNA, 19 bp, Mus musculus
  siRNA target sequence for Lect1 (NM_010701.1,206-224).
gaggacgttgagttttgca

SEQ ID NO: 692505 - DNA, 19 bp, Mus musculus
  siRNA target sequence for Lect1 (NM_010701.1,357-375).
ggaaggggaatgacaatca

SEQ ID NO: 692506 - DNA, 19 bp, Mus musculus
  siRNA target sequence for Lect1 (NM_010701.1,361-379).
ggggaatgacaatcacatt

SEQ ID NO: 692507 - DNA, 19 bp, Mus musculus
  siRNA target sequence for Lect1 (NM_010701.1,363-381).
ggaatgacaatcacattta

SEQ ID NO: 692508 - DNA, 19 bp, Mus musculus
  siRNA target sequence for Lect1 (NM_010701.1,386-404).
gttcattacagtatgagta

SEQ ID NO: 692509 - DNA, 19 bp, Mus musculus
  siRNA target sequence for Lect1 (NM_010701.1,389-407).
cattacagtatgagtatca

SEQ ID NO: 692510 - DNA, 19 bp, Mus musculus
  siRNA target sequence for Lect1 (NM_010701.1,402-420).
gtatcaatgggaaactaca

SEQ ID NO: 692511 - DNA, 19 bp, Mus musculus
  siRNA target sequence for Lect1 (NM_010701.1,491-509).
gcaattgaagtcaacgatt

SEQ ID NO: 692512 - DNA, 19 bp, Mus musculus
  siRNA target sequence for Lect1 (NM_010701.1,523-541).
cactgggatccgttttgct

SEQ ID NO: 692513 - DNA, 19 bp, Mus musculus
  siRNA target sequence for Lect1 (NM_010701.1,656-674).
gaagagaactcgctgattt

SEQ ID NO: 692514 - DNA, 19 bp, Mus musculus
  siRNA target sequence for Lect1 (NM_010701.1,708-726).
gcttcttgagctctaaaat

SEQ ID NO: 692515 - DNA, 19 bp, Mus musculus
  siRNA target sequence for Lect1 (NM_010701.1,712-730).
cttgagctctaaaatcctt

SEQ ID NO: 692516 - DNA, 19 bp, Mus musculus
  siRNA target sequence for Lect1 (NM_010701.1,738-756).
gtggcgacctgccgatttt

SEQ ID NO: 692517 - DNA, 19 bp, Mus musculus
  siRNA target sequence for Lect1 (NM_010701.1,740-758).
ggcgacctgccgattttct

SEQ ID NO: 692518 - DNA, 19 bp, Mus musculus
  siRNA target sequence for Lect1 (NM_010701.1,766-784).
gcccatgtatccaaaagaa

SEQ ID NO: 692519 - DNA, 19 bp, Mus musculus
  siRNA target sequence for Lect1 (NM_010701.1,891-909).
gaaccagacccaatgttca

SEQ ID NO: 692520 - DNA, 19 bp, Mus musculus
  siRNA target sequence for Lect1 (NM_010701.1,956-974).
gaaggagaaagcatgacat

SEQ ID NO: 692521 - DNA, 19 bp, Mus musculus
  siRNA target sequence for Lect1 (NM_010701.1,998-1016).
gggatctgctgtatagaat

SEQ ID NO: 692522 - DNA, 19 bp, Mus musculus
  siRNA target sequence for Lect1 (NM_010701.1,1074-1092).
catggccttacaattacca

SEQ ID NO: 692523 - DNA, 19 bp, Mus musculus
  siRNA target sequence for Lrrtm1 (NM_028880.2,834-852).
gctgtatttggatcacaat

SEQ ID NO: 692524 - DNA, 19 bp, Mus musculus
  siRNA target sequence for Lrrtm1 (NM_028880.2,977-995).
gcgtggacctgtcctataa

SEQ ID NO: 692525 - DNA, 19 bp, Mus musculus
  siRNA target sequence for Lrrtm1 (NM_028880.2,1007-1025).
cgctagctccggatctctt

SEQ ID NO: 692526 - DNA, 19 bp, Mus musculus
  siRNA target sequence for Lrrtm1 (NM_028880.2,1064-1082).
ccaatgccatccaattcgt

SEQ ID NO: 692527 - DNA, 19 bp, Mus musculus
  siRNA target sequence for Lrrtm1 (NM_028880.2,1080-1098).
cgtgccggtgcgcatcttt

SEQ ID NO: 692528 - DNA, 19 bp, Mus musculus
  siRNA target sequence for Lrrtm1 (NM_028880.2,1104-1122).
ctgccgcagcctcaagttt

SEQ ID NO: 692529 - DNA, 19 bp, Mus musculus
  siRNA target sequence for Lrrtm1 (NM_028880.2,1204-1222).
gagcataatgacttgatca

SEQ ID NO: 692530 - DNA, 19 bp, Mus musculus
  siRNA target sequence for Lrrtm1 (NM_028880.2,1272-1290).
cctgaggcggaataaggtt

SEQ ID NO: 692531 - DNA, 19 bp, Mus musculus
  siRNA target sequence for Lrrtm1 (NM_028880.2,1307-1325).
ctctcgactgggtttggaa

SEQ ID NO: 692532 - DNA, 19 bp, Mus musculus
  siRNA target sequence for Lrrtm1 (NM_028880.2,1309-1327).
ctcgactgggtttggaatt

SEQ ID NO: 692533 - DNA, 19 bp, Mus musculus
  siRNA target sequence for Lrrtm1 (NM_028880.2,1346-1364).
ctgggaacgagatcgaata

SEQ ID NO: 692534 - DNA, 19 bp, Mus musculus
  siRNA target sequence for Lrrtm1 (NM_028880.2,1349-1367).
ggaacgagatcgaatacat

SEQ ID NO: 692535 - DNA, 19 bp, Mus musculus
  siRNA target sequence for Lrrtm1 (NM_028880.2,1422-1440).
caaccgcctcacctacatt

SEQ ID NO: 692536 - DNA, 19 bp, Mus musculus
  siRNA target sequence for Lrrtm1 (NM_028880.2,1548-1566).
cttccagggacgttacgat

SEQ ID NO: 692537 - DNA, 19 bp, Mus musculus
  siRNA target sequence for Lrrtm1 (NM_028880.2,1556-1574).
gacgttacgatgctaactt

SEQ ID NO: 692538 - DNA, 19 bp, Mus musculus
  siRNA target sequence for Lrrtm1 (NM_028880.2,1611-1629).
cgtcttggatgcagtgtat

SEQ ID NO: 692539 - DNA, 19 bp, Mus musculus
  siRNA target sequence for Lrrtm1 (NM_028880.2,1882-1900).
gtcctcgtactctacgtat

SEQ ID NO: 692540 - DNA, 19 bp, Mus musculus
  siRNA target sequence for Lrrtm1 (NM_028880.2,2000-2018).
ctatgtctgcccaggaata

SEQ ID NO: 692541 - DNA, 19 bp, Mus musculus
  siRNA target sequence for Lrrtm1 (NM_028880.2,2010-2028).
ccaggaatactatgttgat

SEQ ID NO: 692542 - DNA, 19 bp, Mus musculus
  siRNA target sequence for Lrrtm1 (NM_028880.2,2011-2029).
caggaatactatgttgatt

SEQ ID NO: 692543 - DNA, 19 bp, Mus musculus
  siRNA target sequence for Lrrtm2 (NM_178005.1,356-374).
ccctatgctggcagcaata

SEQ ID NO: 692544 - DNA, 19 bp, Mus musculus
  siRNA target sequence for Lrrtm2 (NM_178005.1,357-375).
cctatgctggcagcaatat

SEQ ID NO: 692545 - DNA, 19 bp, Mus musculus
  siRNA target sequence for Lrrtm2 (NM_178005.1,358-376).
ctatgctggcagcaatata

SEQ ID NO: 692546 - DNA, 19 bp, Mus musculus
  siRNA target sequence for Lrrtm2 (NM_178005.1,363-381).
ctggcagcaatatatgcaa

SEQ ID NO: 692547 - DNA, 19 bp, Mus musculus
  siRNA target sequence for Lrrtm2 (NM_178005.1,378-396).
gcaatgagtgtggtattaa

SEQ ID NO: 692548 - DNA, 19 bp, Mus musculus
  siRNA target sequence for Lrrtm2 (NM_178005.1,385-403).
gtgtggtattaaaaatgct

SEQ ID NO: 692549 - DNA, 19 bp, Mus musculus
  siRNA target sequence for Lrrtm2 (NM_178005.1,444-462).
gagaagctgctattctact

SEQ ID NO: 692550 - DNA, 19 bp, Mus musculus
  siRNA target sequence for Lrrtm2 (NM_178005.1,523-541).
ccctgaggcacaatcacat

SEQ ID NO: 692551 - DNA, 19 bp, Mus musculus
  siRNA target sequence for Lrrtm2 (NM_178005.1,537-555).
cacatcacagcgcttgaaa

SEQ ID NO: 692552 - DNA, 19 bp, Mus musculus
  siRNA target sequence for Lrrtm2 (NM_178005.1,542-560).
cacagcgcttgaaagagat

SEQ ID NO: 692553 - DNA, 19 bp, Mus musculus
  siRNA target sequence for Lrrtm2 (NM_178005.1,547-565).
cgcttgaaagagatcaatt

SEQ ID NO: 692554 - DNA, 19 bp, Mus musculus
  siRNA target sequence for Lrrtm2 (NM_178005.1,586-604).
cctggctccacttagatca

SEQ ID NO: 692555 - DNA, 19 bp, Mus musculus
  siRNA target sequence for Lrrtm2 (NM_178005.1,589-607).
ggctccacttagatcacaa

SEQ ID NO: 692556 - DNA, 19 bp, Mus musculus
  siRNA target sequence for Lrrtm2 (NM_178005.1,590-608).
gctccacttagatcacaat

SEQ ID NO: 692557 - DNA, 19 bp, Mus musculus
  siRNA target sequence for Lrrtm2 (NM_178005.1,594-612).
cacttagatcacaatcaaa

SEQ ID NO: 692558 - DNA, 19 bp, Mus musculus
  siRNA target sequence for Lrrtm2 (NM_178005.1,632-650).
cgctttccaaggactgtat

SEQ ID NO: 692559 - DNA, 19 bp, Mus musculus
  siRNA target sequence for Lrrtm2 (NM_178005.1,633-651).
gctttccaaggactgtata

SEQ ID NO: 692560 - DNA, 19 bp, Mus musculus
  siRNA target sequence for Lrrtm2 (NM_178005.1,634-652).
ctttccaaggactgtataa

SEQ ID NO: 692561 - DNA, 19 bp, Mus musculus
  siRNA target sequence for Lrrtm2 (NM_178005.1,643-661).
gactgtataaactaaagga

SEQ ID NO: 692562 - DNA, 19 bp, Mus musculus
  siRNA target sequence for Lrrtm2 (NM_178005.1,654-672).
ctaaaggagttaatcttaa

SEQ ID NO: 692563 - DNA, 19 bp, Mus musculus
  siRNA target sequence for Lrrtm2 (NM_178005.1,668-686).
cttaagttccaacaaaata

SEQ ID NO: 692564 - DNA, 19 bp, Mus musculus
  siRNA target sequence for Lrrtm2 (NM_178005.1,692-710).
cttgccaaacacaactttt

SEQ ID NO: 692565 - DNA, 19 bp, Mus musculus
  siRNA target sequence for Lrrtm2 (NM_178005.1,706-724).
cttttacccaactgattaa

SEQ ID NO: 692566 - DNA, 19 bp, Mus musculus
  siRNA target sequence for Lrrtm2 (NM_178005.1,717-735).
ctgattaatctgcaaaatt

SEQ ID NO: 692567 - DNA, 19 bp, Mus musculus
  siRNA target sequence for Lrrtm2 (NM_178005.1,767-785).
gcatcctgagctcttctat

SEQ ID NO: 692568 - DNA, 19 bp, Mus musculus
  siRNA target sequence for Lrrtm2 (NM_178005.1,800-818).
gcagaccttgcatttacgt

SEQ ID NO: 692569 - DNA, 19 bp, Mus musculus
  siRNA target sequence for Lrrtm2 (NM_178005.1,801-819).
cagaccttgcatttacgtt

SEQ ID NO: 692570 - DNA, 19 bp, Mus musculus
  siRNA target sequence for Lrrtm2 (NM_178005.1,854-872).
ctgggactgtcgtagtcta

SEQ ID NO: 692571 - DNA, 19 bp, Mus musculus
  siRNA target sequence for Lrrtm2 (NM_178005.1,860-878).
ctgtcgtagtctagagttt

SEQ ID NO: 692572 - DNA, 19 bp, Mus musculus
  siRNA target sequence for Lrrtm2 (NM_178005.1,862-880).
gtcgtagtctagagtttct

SEQ ID NO: 692573 - DNA, 19 bp, Mus musculus
  siRNA target sequence for Lrrtm2 (NM_178005.1,892-910).
caaaccgtttgcgaagttt

SEQ ID NO: 692574 - DNA, 19 bp, Mus musculus
  siRNA target sequence for Lrrtm2 (NM_178005.1,902-920).
gcgaagtttggctcgaaat

SEQ ID NO: 692575 - DNA, 19 bp, Mus musculus
  siRNA target sequence for Lrrtm2 (NM_178005.1,907-925).
gtttggctcgaaatggatt

SEQ ID NO: 692576 - DNA, 19 bp, Mus musculus
  siRNA target sequence for Lrrtm2 (NM_178005.1,921-939).
ggatttgcaggattaatca

SEQ ID NO: 692577 - DNA, 19 bp, Mus musculus
  siRNA target sequence for Lrrtm2 (NM_178005.1,922-940).
gatttgcaggattaatcaa

SEQ ID NO: 692578 - DNA, 19 bp, Mus musculus
  siRNA target sequence for Lrrtm2 (NM_178005.1,965-983).
caatcagctgacgaagatt

SEQ ID NO: 692579 - DNA, 19 bp, Mus musculus
  siRNA target sequence for Lrrtm2 (NM_178005.1,969-987).
cagctgacgaagattaatt

SEQ ID NO: 692580 - DNA, 19 bp, Mus musculus
  siRNA target sequence for Lrrtm2 (NM_178005.1,974-992).
gacgaagattaattttgct

SEQ ID NO: 692581 - DNA, 19 bp, Mus musculus
  siRNA target sequence for Lrrtm2 (NM_178005.1,1021-1039).
cactcttcttacaatggaa

SEQ ID NO: 692582 - DNA, 19 bp, Mus musculus
  siRNA target sequence for Lrrtm2 (NM_178005.1,1072-1090).
ggacctggagcactttaga

SEQ ID NO: 692583 - DNA, 19 bp, Mus musculus
  siRNA target sequence for Lrrtm2 (NM_178005.1,1073-1091).
gacctggagcactttagaa

SEQ ID NO: 692584 - DNA, 19 bp, Mus musculus
  siRNA target sequence for Lrrtm2 (NM_178005.1,1098-1116).
gacctaactggaaatgaaa

SEQ ID NO: 692585 - DNA, 19 bp, Mus musculus
  siRNA target sequence for Lrrtm2 (NM_178005.1,1142-1160).
cgagaccatgcctaatctt

SEQ ID NO: 692586 - DNA, 19 bp, Mus musculus
  siRNA target sequence for Lrrtm2 (NM_178005.1,1151-1169).
gcctaatcttaaaatactt

SEQ ID NO: 692587 - DNA, 19 bp, Mus musculus
  siRNA target sequence for Lrrtm2 (NM_178005.1,1172-1190).
catggataacaacaagtta

SEQ ID NO: 692588 - DNA, 19 bp, Mus musculus
  siRNA target sequence for Lrrtm2 (NM_178005.1,1357-1375).
cccaaggagaggatattct

SEQ ID NO: 692589 - DNA, 19 bp, Mus musculus
  siRNA target sequence for Lrrtm2 (NM_178005.1,1426-1444).
ctgccatggctacaactta

SEQ ID NO: 692590 - DNA, 19 bp, Mus musculus
  siRNA target sequence for Lrrtm2 (NM_178005.1,1428-1446).
gccatggctacaacttata

SEQ ID NO: 692591 - DNA, 19 bp, Mus musculus
  siRNA target sequence for Lrrtm2 (NM_178005.1,1430-1448).
catggctacaacttataga

SEQ ID NO: 692592 - DNA, 19 bp, Mus musculus
  siRNA target sequence for Lrrtm2 (NM_178005.1,1453-1471).
caaccactgaatatacaaa

SEQ ID NO: 692593 - DNA, 19 bp, Mus musculus
  siRNA target sequence for Lrrtm2 (NM_178005.1,1502-1520).
caaagaaattccaactact

SEQ ID NO: 692594 - DNA, 19 bp, Mus musculus
  siRNA target sequence for Lrrtm2 (NM_178005.1,1574-1592).
ctttactcagagagtaatt

SEQ ID NO: 692595 - DNA, 19 bp, Mus musculus
  siRNA target sequence for Lrrtm2 (NM_178005.1,1687-1705).
ggcagtgctcaatgattca

SEQ ID NO: 692596 - DNA, 19 bp, Mus musculus
  siRNA target sequence for Lrrtm2 (NM_178005.1,1689-1707).
cagtgctcaatgattcaga

SEQ ID NO: 692597 - DNA, 19 bp, Mus musculus
  siRNA target sequence for Lrrtm2 (NM_178005.1,1726-1744).
cccaaacacgactccatat

SEQ ID NO: 692598 - DNA, 19 bp, Mus musculus
  siRNA target sequence for Lrrtm2 (NM_178005.1,1728-1746).
caaacacgactccatatgt

SEQ ID NO: 692599 - DNA, 19 bp, Mus musculus
  siRNA target sequence for Lrrtm2 (NM_178005.1,1732-1750).
cacgactccatatgtcaaa

SEQ ID NO: 692600 - DNA, 19 bp, Mus musculus
  siRNA target sequence for Lrrtm2 (NM_178005.1,1756-1774).
cagaccaaggaccgtataa

SEQ ID NO: 692601 - DNA, 19 bp, Mus musculus
  siRNA target sequence for Lrrtm2 (NM_178005.1,1761-1779).
caaggaccgtataatgagt

SEQ ID NO: 692602 - DNA, 19 bp, Mus musculus
  siRNA target sequence for Lrrtm2 (NM_178005.1,1765-1783).
gaccgtataatgagtatga

SEQ ID NO: 692603 - DNA, 19 bp, Mus musculus
  siRNA target sequence for Lrrtm2 (NM_178005.1,1797-1815).
ggacctttcatcatcatta

SEQ ID NO: 692604 - DNA, 19 bp, Mus musculus
  siRNA target sequence for Lrrtm2 (NM_178005.1,1798-1816).
gacctttcatcatcattaa

SEQ ID NO: 692605 - DNA, 19 bp, Mus musculus
  siRNA target sequence for Lrrtm2 (NM_178005.1,1837-1855).
gtcagcagctgccatacaa

SEQ ID NO: 692606 - DNA, 19 bp, Mus musculus
  siRNA target sequence for Lrrtm2 (NM_178005.1,1847-1865).
gccatacaaagaatgtgaa

SEQ ID NO: 692607 - DNA, 19 bp, Mus musculus
  siRNA target sequence for Lrrtm3 (NM_178678.2,659-677).
ggtgtgaaggcaaaatggt

SEQ ID NO: 692608 - DNA, 19 bp, Mus musculus
  siRNA target sequence for Lrrtm3 (NM_178678.2,660-678).
gtgtgaaggcaaaatggta

SEQ ID NO: 692609 - DNA, 19 bp, Mus musculus
  siRNA target sequence for Lrrtm3 (NM_178678.2,662-680).
gtgaaggcaaaatggtata

SEQ ID NO: 692610 - DNA, 19 bp, Mus musculus
  siRNA target sequence for Lrrtm3 (NM_178678.2,664-682).
gaaggcaaaatggtatact

SEQ ID NO: 692611 - DNA, 19 bp, Mus musculus
  siRNA target sequence for Lrrtm3 (NM_178678.2,702-720).
ggagataccctcgagtata

SEQ ID NO: 692612 - DNA, 19 bp, Mus musculus
  siRNA target sequence for Lrrtm3 (NM_178678.2,703-721).
gagataccctcgagtatat

SEQ ID NO: 692613 - DNA, 19 bp, Mus musculus
  siRNA target sequence for Lrrtm3 (NM_178678.2,705-723).
gataccctcgagtatatct

SEQ ID NO: 692614 - DNA, 19 bp, Mus musculus
  siRNA target sequence for Lrrtm3 (NM_178678.2,724-742).
gccggttgcttgggtttat

SEQ ID NO: 692615 - DNA, 19 bp, Mus musculus
  siRNA target sequence for Lrrtm3 (NM_178678.2,760-778).
ctccaaaaacttaagtata

SEQ ID NO: 692616 - DNA, 19 bp, Mus musculus
  siRNA target sequence for Lrrtm3 (NM_178678.2,762-780).
ccaaaaacttaagtataat

SEQ ID NO: 692617 - DNA, 19 bp, Mus musculus
  siRNA target sequence for Lrrtm3 (NM_178678.2,843-861).
cgacgagaatgctttcaat

SEQ ID NO: 692618 - DNA, 19 bp, Mus musculus
  siRNA target sequence for Lrrtm3 (NM_178678.2,874-892).
ctcaaagagttgattctga

SEQ ID NO: 692619 - DNA, 19 bp, Mus musculus
  siRNA target sequence for Lrrtm3 (NM_178678.2,902-920).
gaatctcctatttccttaa

SEQ ID NO: 692620 - DNA, 19 bp, Mus musculus
  siRNA target sequence for Lrrtm3 (NM_178678.2,930-948).
cagacctgtgaccaattta

SEQ ID NO: 692621 - DNA, 19 bp, Mus musculus
  siRNA target sequence for Lrrtm3 (NM_178678.2,983-1001).
ctctgggatcggaacagtt

SEQ ID NO: 692622 - DNA, 19 bp, Mus musculus
  siRNA target sequence for Lrrtm3 (NM_178678.2,1013-1031).
ggaagctgcttagtttaca

SEQ ID NO: 692623 - DNA, 19 bp, Mus musculus
  siRNA target sequence for Lrrtm3 (NM_178678.2,1082-1100).
gtcgcaacctggaacttct

SEQ ID NO: 692624 - DNA, 19 bp, Mus musculus
  siRNA target sequence for Lrrtm3 (NM_178678.2,1113-1131).
caaccggatccgaagttta

SEQ ID NO: 692625 - DNA, 19 bp, Mus musculus
  siRNA target sequence for Lrrtm3 (NM_178678.2,1228-1246).
gtgagccttcagaacttgt

SEQ ID NO: 692626 - DNA, 19 bp, Mus musculus
  siRNA target sequence for Lrrtm3 (NM_178678.2,1245-1263).
gtacatgcagtggaataaa

SEQ ID NO: 692627 - DNA, 19 bp, Mus musculus
  siRNA target sequence for Lrrtm3 (NM_178678.2,1268-1286).
gtgtcatagggcaaaccat

SEQ ID NO: 692628 - DNA, 19 bp, Mus musculus
  siRNA target sequence for Lrrtm3 (NM_178678.2,1314-1332).
gctcgacctgtctggtaat

SEQ ID NO: 692629 - DNA, 19 bp, Mus musculus
  siRNA target sequence for Lrrtm3 (NM_178678.2,1407-1425).
caagctcacatttattgga

SEQ ID NO: 692630 - DNA, 19 bp, Mus musculus
  siRNA target sequence for Lrrtm3 (NM_178678.2,1415-1433).
catttattggacaagagat

SEQ ID NO: 692631 - DNA, 19 bp, Mus musculus
  siRNA target sequence for Lrrtm3 (NM_178678.2,1445-1463).
ggatctctctcaatgacat

SEQ ID NO: 692632 - DNA, 19 bp, Mus musculus
  siRNA target sequence for Lrrtm3 (NM_178678.2,1521-1539).
gctgagaagttttaaaggt

SEQ ID NO: 692633 - DNA, 19 bp, Mus musculus
  siRNA target sequence for Lrrtm3 (NM_178678.2,1966-1984).
ccaggcacccaggaatttt

SEQ ID NO: 692634 - DNA, 19 bp, Mus musculus
  siRNA target sequence for Lrrtm3 (NM_178678.2,1977-1995).
ggaattttatgtagattat

SEQ ID NO: 692635 - DNA, 19 bp, Mus musculus
  siRNA target sequence for Lrrtm3 (NM_178678.2,2046-2064).
ctgcacctatagcaaatca

SEQ ID NO: 692636 - DNA, 19 bp, Mus musculus
  siRNA target sequence for Lrrtm3 (NM_178678.2,2073-2091).
ggaatgtgagataccttta

SEQ ID NO: 692637 - DNA, 19 bp, Mus musculus
  siRNA target sequence for Lrrtm3 (NM_178678.2,2074-2092).
gaatgtgagatacctttat

SEQ ID NO: 692638 - DNA, 19 bp, Mus musculus
  siRNA target sequence for Lrrtm3 (NM_178678.2,2078-2096).
gtgagatacctttatcaat

SEQ ID NO: 692639 - DNA, 19 bp, Mus musculus
  siRNA target sequence for Lrrtm3 (NM_178678.2,2105-2123).
caacctttctggcatatga

SEQ ID NO: 692640 - DNA, 19 bp, Mus musculus
  siRNA target sequence for Lrrtm3 (NM_178678.2,2122-2140).
gaccagcccacaataagtt

SEQ ID NO: 692641 - DNA, 19 bp, Mus musculus
  siRNA target sequence for Lrrtm3 (NM_178678.2,2127-2145).
gcccacaataagttactgt

SEQ ID NO: 692642 - DNA, 19 bp, Mus musculus
  siRNA target sequence for Lrrtm4 (NM_178731.2,1090-1108).
gcatctgtcctctattcta

SEQ ID NO: 692643 - DNA, 19 bp, Mus musculus
  siRNA target sequence for Lrrtm4 (NM_178731.2,1194-1212).
gccgtggagacttacaaca

SEQ ID NO: 692644 - DNA, 19 bp, Mus musculus
  siRNA target sequence for Lrrtm4 (NM_178731.2,1195-1213).
ccgtggagacttacaacat

SEQ ID NO: 692645 - DNA, 19 bp, Mus musculus
  siRNA target sequence for Lrrtm4 (NM_178731.2,1281-1299).
ccgttcatccccaaaccta

SEQ ID NO: 692646 - DNA, 19 bp, Mus musculus
  siRNA target sequence for Lrrtm4 (NM_178731.2,1369-1387).
caggtacggatcatgagta

SEQ ID NO: 692647 - DNA, 19 bp, Mus musculus
  siRNA target sequence for Lrrtm4 (NM_178731.2,1389-1407).
gagcacgtgtcgtttcaca

SEQ ID NO: 692648 - DNA, 19 bp, Mus musculus
  siRNA target sequence for Lrrtm4 (NM_178731.2,1395-1413).
gtgtcgtttcacaaaatca

SEQ ID NO: 692649 - DNA, 19 bp, Mus musculus
  siRNA target sequence for Lrrtm4 (NM_178731.2,1451-1469).
gattctcctggtgatctat

SEQ ID NO: 692650 - DNA, 19 bp, Mus musculus
  siRNA target sequence for Lrrtm4 (NM_178731.2,1506-1524).
ctccaacagcactcactta

SEQ ID NO: 692651 - DNA, 19 bp, Mus musculus
  siRNA target sequence for Lrrtm4 (NM_178731.2,1622-1640).
catggatatatcggttaat

SEQ ID NO: 692652 - DNA, 19 bp, Mus musculus
  siRNA target sequence for Lrrtm4 (NM_178731.2,1626-1644).
gatatatcggttaatggat

SEQ ID NO: 692653 - DNA, 19 bp, Mus musculus
  siRNA target sequence for Lrrtm4 (NM_178731.2,1647-1665).
ggtccctgcacatatacca

SEQ ID NO: 692654 - DNA, 19 bp, Mus musculus
  siRNA target sequence for Lrrtm4 (NM_178731.2,1648-1666).
gtccctgcacatataccat

SEQ ID NO: 692655 - DNA, 19 bp, Mus musculus
  siRNA target sequence for Ly64 (NM_010739.1,233-251).
ggtgaccgtgggtagttca

SEQ ID NO: 692656 - DNA, 19 bp, Mus musculus
  siRNA target sequence for Ly64 (NM_010739.1,234-252).
gtgaccgtgggtagttcat

SEQ ID NO: 692657 - DNA, 19 bp, Mus musculus
  siRNA target sequence for Ly64 (NM_010739.1,236-254).
gaccgtgggtagttcatct

SEQ ID NO: 692658 - DNA, 19 bp, Mus musculus
  siRNA target sequence for Ly64 (NM_010739.1,908-926).
ccctaacccctgtaaagga

SEQ ID NO: 692659 - DNA, 19 bp, Mus musculus
  siRNA target sequence for Ly64 (NM_010739.1,909-927).
cctaacccctgtaaaggaa

SEQ ID NO: 692660 - DNA, 19 bp, Mus musculus
  siRNA target sequence for Ly64 (NM_010739.1,924-942).
ggaactgcttcttgtgtta

SEQ ID NO: 692661 - DNA, 19 bp, Mus musculus
  siRNA target sequence for Ly64 (NM_010739.1,925-943).
gaactgcttcttgtgttaa

SEQ ID NO: 692662 - DNA, 19 bp, Mus musculus
  siRNA target sequence for Ly64 (NM_010739.1,1084-1102).
ctgtgggctatcaagagtt

SEQ ID NO: 692663 - DNA, 19 bp, Mus musculus
  siRNA target sequence for Ly64 (NM_010739.1,1090-1108).
gctatcaagagttgtacaa

SEQ ID NO: 692664 - DNA, 19 bp, Mus musculus
  siRNA target sequence for Ly64 (NM_010739.1,1098-1116).
gagttgtacaacagtgtta

SEQ ID NO: 692665 - DNA, 19 bp, Mus musculus
  siRNA target sequence for Ly64 (NM_010739.1,1106-1124).
caacagtgttaccgatttt

SEQ ID NO: 692666 - DNA, 19 bp, Mus musculus
  siRNA target sequence for Ly64 (NM_010739.1,1118-1136).
cgatttttttgaaacaaca

SEQ ID NO: 692667 - DNA, 19 bp, Mus musculus
  siRNA target sequence for Ly64 (NM_010739.1,1149-1167).
gactatggacagactgtaa

SEQ ID NO: 692668 - DNA, 19 bp, Mus musculus
  siRNA target sequence for Ly64 (NM_010739.1,1233-1251).
gtcagtgtatccgtagtaa

SEQ ID NO: 692669 - DNA, 19 bp, Mus musculus
  siRNA target sequence for Ly64 (NM_010739.1,1235-1253).
cagtgtatccgtagtaaat

SEQ ID NO: 692670 - DNA, 19 bp, Mus musculus
  siRNA target sequence for Ly64 (NM_010739.1,1237-1255).
gtgtatccgtagtaaatat

SEQ ID NO: 692671 - DNA, 19 bp, Mus musculus
  siRNA target sequence for Ly64 (NM_010739.1,1239-1257).
gtatccgtagtaaatatat

SEQ ID NO: 692672 - DNA, 19 bp, Mus musculus
  siRNA target sequence for Ly64 (NM_010739.1,1290-1308).
gtatcttctgcaatcgaaa

SEQ ID NO: 692673 - DNA, 19 bp, Mus musculus
  siRNA target sequence for Ly64 (NM_010739.1,1299-1317).
gcaatcgaaactgcaatta

SEQ ID NO: 692674 - DNA, 19 bp, Mus musculus
  siRNA target sequence for Ly64 (NM_010739.1,1304-1322).
cgaaactgcaattaagact

SEQ ID NO: 692675 - DNA, 19 bp, Mus musculus
  siRNA target sequence for Ly64 (NM_010739.1,1305-1323).
gaaactgcaattaagacta

SEQ ID NO: 692676 - DNA, 19 bp, Mus musculus
  siRNA target sequence for Ly64 (NM_010739.1,1334-1352).
gaaagactatgtcagtata

SEQ ID NO: 692677 - DNA, 19 bp, Mus musculus
  siRNA target sequence for Ly64 (NM_010739.1,1338-1356).
gactatgtcagtataaatt

SEQ ID NO: 692678 - DNA, 19 bp, Mus musculus
  siRNA target sequence for Ly64 (NM_010739.1,1371-1389).
ggttgtgtagggaatgaca

SEQ ID NO: 692679 - DNA, 19 bp, Mus musculus
  siRNA target sequence for Ly64 (NM_010739.1,1512-1530).
cagtgcttaaagatggata

SEQ ID NO: 692680 - DNA, 19 bp, Mus musculus
  siRNA target sequence for Ly64 (NM_010739.1,1526-1544).
ggataacggagtaatggat

SEQ ID NO: 692681 - DNA, 19 bp, Mus musculus
  siRNA target sequence for Ly64 (NM_010739.1,1527-1545).
gataacggagtaatggatt

SEQ ID NO: 692682 - DNA, 19 bp, Mus musculus
  siRNA target sequence for Ly64 (NM_010739.1,1608-1626).
ggctacagcgggatgaatt

SEQ ID NO: 692683 - DNA, 19 bp, Mus musculus
  siRNA target sequence for Ly64 (NM_010739.1,1710-1728).
gtctctgcgaggtcaaaga

SEQ ID NO: 692684 - DNA, 19 bp, Mus musculus
  siRNA target sequence for Ly64 (NM_010739.1,1766-1784).
ggatgacttccataaccta

SEQ ID NO: 692685 - DNA, 19 bp, Mus musculus
  siRNA target sequence for Mal (NM_010762.2,216-234).
cctgacttgctcttcgttt

SEQ ID NO: 692686 - DNA, 19 bp, Mus musculus
  siRNA target sequence for Mal (NM_010762.2,224-242).
gctcttcgtttgtgagttt

SEQ ID NO: 692687 - DNA, 19 bp, Mus musculus
  siRNA target sequence for Mal (NM_010762.2,352-370).
ccctgatgatcttgtacat

SEQ ID NO: 692688 - DNA, 19 bp, Mus musculus
  siRNA target sequence for Mal (NM_010762.2,353-371).
cctgatgatcttgtacata

SEQ ID NO: 692689 - DNA, 19 bp, Mus musculus
  siRNA target sequence for Mal (NM_010762.2,354-372).
ctgatgatcttgtacataa

SEQ ID NO: 692690 - DNA, 19 bp, Mus musculus
  siRNA target sequence for Mal (NM_010762.2,359-377).
gatcttgtacataattggt

SEQ ID NO: 692691 - DNA, 19 bp, Mus musculus
  siRNA target sequence for Mal (NM_010762.2,365-383).
gtacataattggtactcat

SEQ ID NO: 692692 - DNA, 19 bp, Mus musculus
  siRNA target sequence for Mog (NM_010814.1,55-73).
cttctcctccagttgtcat

SEQ ID NO: 692693 - DNA, 19 bp, Mus musculus
  siRNA target sequence for Mog (NM_010814.1,320-338).
gaaaggttacccttaggat

SEQ ID NO: 692694 - DNA, 19 bp, Mus musculus
  siRNA target sequence for Mog (NM_010814.1,325-343).
gttacccttaggattcaga

SEQ ID NO: 692695 - DNA, 19 bp, Mus musculus
  siRNA target sequence for Mog (NM_010814.1,335-353).
ggattcagaacgtgagatt

SEQ ID NO: 692696 - DNA, 19 bp, Mus musculus
  siRNA target sequence for Mog (NM_010814.1,345-363).
cgtgagattctcagatgaa

SEQ ID NO: 692697 - DNA, 19 bp, Mus musculus
  siRNA target sequence for Mog (NM_010814.1,410-428).
cagcaatggagttgaaagt

SEQ ID NO: 692698 - DNA, 19 bp, Mus musculus
  siRNA target sequence for Mog (NM_010814.1,607-625).
gtgccctgctggaagataa

SEQ ID NO: 692699 - DNA, 19 bp, Mus musculus
  siRNA target sequence for Mox2 (NM_010818.2,126-144).
ggtgacccaggatgaaaga

SEQ ID NO: 692700 - DNA, 19 bp, Mus musculus
  siRNA target sequence for Mox2 (NM_010818.2,172-190).
cgatgttctctaaaaacat

SEQ ID NO: 692701 - DNA, 19 bp, Mus musculus
  siRNA target sequence for Mox2 (NM_010818.2,191-209).
cccaggaacccttgattgt

SEQ ID NO: 692702 - DNA, 19 bp, Mus musculus
  siRNA target sequence for Mox2 (NM_010818.2,193-211).
caggaacccttgattgtga

SEQ ID NO: 692703 - DNA, 19 bp, Mus musculus
  siRNA target sequence for Mox2 (NM_010818.2,289-307).
gcctacaaagacaggataa

SEQ ID NO: 692704 - DNA, 19 bp, Mus musculus
  siRNA target sequence for Mox2 (NM_010818.2,388-406).
ctcttcaacacgtttggtt

SEQ ID NO: 692705 - DNA, 19 bp, Mus musculus
  siRNA target sequence for Mox2 (NM_010818.2,441-459).
ctatgtacagcccatagta

SEQ ID NO: 692706 - DNA, 19 bp, Mus musculus
  siRNA target sequence for Mox2 (NM_010818.2,460-478).
caccttcactacaactatt

SEQ ID NO: 692707 - DNA, 19 bp, Mus musculus
  siRNA target sequence for Mox2 (NM_010818.2,552-570).
gacaggaattgagaatagt

SEQ ID NO: 692708 - DNA, 19 bp, Mus musculus
  siRNA target sequence for Mox2 (NM_010818.2,576-594).
gagtcacttccattcaaat

SEQ ID NO: 692709 - DNA, 19 bp, Mus musculus
  siRNA target sequence for Mox2 (NM_010818.2,586-604).
cattcaaatgggactacat

SEQ ID NO: 692710 - DNA, 19 bp, Mus musculus
  siRNA target sequence for Mox2 (NM_010818.2,614-632).
gcatcctccgggtcaaaga

SEQ ID NO: 692711 - DNA, 19 bp, Mus musculus
  siRNA target sequence for Mox2 (NM_010818.2,624-642).
ggtcaaagaccccaaaact

SEQ ID NO: 692712 - DNA, 19 bp, Mus musculus
  siRNA target sequence for Mox2 (NM_010818.2,627-645).
caaagaccccaaaactcaa

SEQ ID NO: 692713 - DNA, 19 bp, Mus musculus
  siRNA target sequence for Mox2 (NM_010818.2,679-697).
ctggggaatgtgattgact

SEQ ID NO: 692714 - DNA, 19 bp, Mus musculus
  siRNA target sequence for Mox2 (NM_010818.2,714-732).
caaaggattttggttttca

SEQ ID NO: 692715 - DNA, 19 bp, Mus musculus
  siRNA target sequence for Mox2 (NM_010818.2,763-781).
gtaattcttctgatcttga

SEQ ID NO: 692716 - DNA, 19 bp, Mus musculus
  siRNA target sequence for Mox2 (NM_010818.2,774-792).
gatcttgatctccatctta

SEQ ID NO: 692717 - DNA, 19 bp, Mus musculus
  siRNA target sequence for Mox2 (NM_010818.2,800-818).
ggaaacgtcaccgaaatca

SEQ ID NO: 692718 - DNA, 19 bp, Mus musculus
  siRNA target sequence for Mox2 (NM_010818.2,817-835).
caggagcggggtgaatcat

SEQ ID NO: 692719 - DNA, 19 bp, Mus musculus
  siRNA target sequence for Mox2 (NM_010818.2,819-837).
ggagcggggtgaatcatca

SEQ ID NO: 692720 - DNA, 19 bp, Mus musculus
  siRNA target sequence for Mox2 (NM_010818.2,838-856).
caggggatgcaaagaatga

SEQ ID NO: 692721 - DNA, 19 bp, Mus musculus
  siRNA target sequence for Mpdu1 (NM_011900.2,243-261).
caagctgccccaggtattt

SEQ ID NO: 692722 - DNA, 19 bp, Mus musculus
  siRNA target sequence for Mpdu1 (NM_011900.2,246-264).
gctgccccaggtatttaaa

SEQ ID NO: 692723 - DNA, 19 bp, Mus musculus
  siRNA target sequence for Mpdu1 (NM_011900.2,629-647).
cagccattacagtgtttat

SEQ ID NO: 692724 - DNA, 19 bp, Mus musculus
  siRNA target sequence for Mpdu1 (NM_011900.2,632-650).
ccattacagtgtttatgct

SEQ ID NO: 692725 - DNA, 19 bp, Mus musculus
  siRNA target sequence for Mpdu1 (NM_011900.2,669-687).
ccgaatcttcacttctgtt

SEQ ID NO: 692726 - DNA, 19 bp, Mus musculus
  siRNA target sequence for Mpdu1 (NM_011900.2,787-805).
gctccccacaaacagaaaa

SEQ ID NO: 692727 - DNA, 19 bp, Mus musculus
  siRNA target sequence for Ms4a1 (NM_007641.2,254-272).
gggctgtccaaatcatgaa

SEQ ID NO: 692728 - DNA, 19 bp, Mus musculus
  siRNA target sequence for Ms4a1 (NM_007641.2,255-273).
ggctgtccaaatcatgaat

SEQ ID NO: 692729 - DNA, 19 bp, Mus musculus
  siRNA target sequence for Ms4a1 (NM_007641.2,327-345).
cgcacccatctgtttgagt

SEQ ID NO: 692730 - DNA, 19 bp, Mus musculus
  siRNA target sequence for Ms4a1 (NM_007641.2,363-381).
gggaggcattatgtacatt

SEQ ID NO: 692731 - DNA, 19 bp, Mus musculus
  siRNA target sequence for Ms4a1 (NM_007641.2,365-383).
gaggcattatgtacattat

SEQ ID NO: 692732 - DNA, 19 bp, Mus musculus
  siRNA target sequence for Ms4a1 (NM_007641.2,448-466).
gtgataatgagctctctaa

SEQ ID NO: 692733 - DNA, 19 bp, Mus musculus
  siRNA target sequence for Ms4a1 (NM_007641.2,569-587).
cttccaagccgtatgttga

SEQ ID NO: 692734 - DNA, 19 bp, Mus musculus
  siRNA target sequence for Ms4a1 (NM_007641.2,572-590).
ccaagccgtatgttgatat

SEQ ID NO: 692735 - DNA, 19 bp, Mus musculus
  siRNA target sequence for Ms4a1 (NM_007641.2,594-612).
cgactgtgaaccatctaat

SEQ ID NO: 692736 - DNA, 19 bp, Mus musculus
  siRNA target sequence for Ms4a1 (NM_007641.2,595-613).
gactgtgaaccatctaatt

SEQ ID NO: 692737 - DNA, 19 bp, Mus musculus
  siRNA target sequence for Ms4a1 (NM_007641.2,621-639).
gaaaaactccccatctaca

SEQ ID NO: 692738 - DNA, 19 bp, Mus musculus
  siRNA target sequence for Ms4a1 (NM_007641.2,725-743).
ctggtattgtggagaatga

SEQ ID NO: 692739 - DNA, 19 bp, Mus musculus
  siRNA target sequence for Ms4a1 (NM_007641.2,727-745).
ggtattgtggagaatgagt

SEQ ID NO: 692740 - DNA, 19 bp, Mus musculus
  siRNA target sequence for Ms4a1 (NM_007641.2,756-774).
gtgtaccagatccaaatct

SEQ ID NO: 692741 - DNA, 19 bp, Mus musculus
  siRNA target sequence for Ms4a1 (NM_007641.2,758-776).
gtaccagatccaaatctaa

SEQ ID NO: 692742 - DNA, 19 bp, Mus musculus
  siRNA target sequence for Ms4a1 (NM_007641.2,761-779).
ccagatccaaatctaatgt

SEQ ID NO: 692743 - DNA, 19 bp, Mus musculus
  siRNA target sequence for Ms4a1 (NM_007641.2,810-828).
gcagacgattaaaatgaaa

SEQ ID NO: 692744 - DNA, 19 bp, Mus musculus
  siRNA target sequence for Myadm (NM_016969.1,287-305).
cgcctcctgcagctaatat

SEQ ID NO: 692745 - DNA, 19 bp, Mus musculus
  siRNA target sequence for Myadm (NM_016969.1,290-308).
ctcctgcagctaatatcca

SEQ ID NO: 692746 - DNA, 19 bp, Mus musculus
  siRNA target sequence for Myadm (NM_016969.1,453-471).
ccctgtcatggcgaaactt

SEQ ID NO: 692747 - DNA, 19 bp, Mus musculus
  siRNA target sequence for Myadm (NM_016969.1,687-705).
cagggctgctcaaagtttt

SEQ ID NO: 692748 - DNA, 19 bp, Mus musculus
  siRNA target sequence for Myadm (NM_016969.1,715-733).
cgtagcctgtatcatcttt

SEQ ID NO: 692749 - DNA, 19 bp, Mus musculus
  siRNA target sequence for Myadm (NM_016969.1,744-762).
gtgagccgctcctgtataa

SEQ ID NO: 692750 - DNA, 19 bp, Mus musculus
  siRNA target sequence for Myadm (NM_016969.1,749-767).
ccgctcctgtataatcaga

SEQ ID NO: 692751 - DNA, 19 bp, Mus musculus
  siRNA target sequence for Myadm (NM_016969.1,750-768).
cgctcctgtataatcagaa

SEQ ID NO: 692752 - DNA, 19 bp, Mus musculus
  siRNA target sequence for Myadm (NM_016969.1,781-799).
gtggtgtgtggcagtctat

SEQ ID NO: 692753 - DNA, 19 bp, Mus musculus
  siRNA target sequence for Myadm (NM_016969.1,939-957).
ctggcccctctaccaattt

SEQ ID NO: 692754 - DNA, 19 bp, Mus musculus
  siRNA target sequence for Myadm (NM_016969.1,941-959).
ggcccctctaccaatttga

SEQ ID NO: 692755 - DNA, 19 bp, Mus musculus
  siRNA target sequence for Myadm (NM_016969.1,942-960).
gcccctctaccaatttgat

SEQ ID NO: 692756 - DNA, 19 bp, Mus musculus
  siRNA target sequence for Myadm (NM_016969.1,944-962).
ccctctaccaatttgatca

SEQ ID NO: 692757 - DNA, 19 bp, Mus musculus
  siRNA target sequence for Myadm (NM_016969.1,951-969).
ccaatttgatcagagatat

SEQ ID NO: 692758 - DNA, 19 bp, Mus musculus
  siRNA target sequence for Myadm (NM_016969.1,998-1016).
caagctgcactcgtagtat

SEQ ID NO: 692759 - DNA, 19 bp, Mus musculus
  siRNA target sequence for Myadm (NM_016969.1,1002-1020).
ctgcactcgtagtattagt

SEQ ID NO: 692760 - DNA, 19 bp, Mus musculus
  siRNA target sequence for Myadm (NM_016969.1,1004-1022).
gcactcgtagtattagtta

SEQ ID NO: 692761 - DNA, 19 bp, Mus musculus
  siRNA target sequence for Myadm (NM_016969.1,1005-1023).
cactcgtagtattagttat

SEQ ID NO: 692762 - DNA, 19 bp, Mus musculus
  siRNA target sequence for Myadm (NM_016969.1,1007-1025).
ctcgtagtattagttatat

SEQ ID NO: 692763 - DNA, 19 bp, Mus musculus
  siRNA target sequence for Myadm (NM_016969.1,1010-1028).
gtagtattagttatataca

SEQ ID NO: 692764 - DNA, 19 bp, Mus musculus
  siRNA target sequence for Myadm (NM_016969.1,1030-1048).
cccaacacggtgtgtttct

SEQ ID NO: 692765 - DNA, 19 bp, Mus musculus
  siRNA target sequence for Nckap1 (NM_016965.1,127-145).
gctaaaccctcctacctta

SEQ ID NO: 692766 - DNA, 19 bp, Mus musculus
  siRNA target sequence for Nckap1 (NM_016965.1,128-146).
ctaaaccctcctaccttat

SEQ ID NO: 692767 - DNA, 19 bp, Mus musculus
  siRNA target sequence for Nckap1 (NM_016965.1,199-217).
gtagaaacgcgcaacaaca

SEQ ID NO: 692768 - DNA, 19 bp, Mus musculus
  siRNA target sequence for Nckap1 (NM_016965.1,206-224).
cgcgcaacaacaatcaaca

SEQ ID NO: 692769 - DNA, 19 bp, Mus musculus
  siRNA target sequence for Nckap1 (NM_016965.1,261-279).
gaaaaatctggcgttgtat

SEQ ID NO: 692770 - DNA, 19 bp, Mus musculus
  siRNA target sequence for Nckap1 (NM_016965.1,268-286).
ctggcgttgtattacttta

SEQ ID NO: 692771 - DNA, 19 bp, Mus musculus
  siRNA target sequence for Nckap1 (NM_016965.1,271-289).
gcgttgtattactttacat

SEQ ID NO: 692772 - DNA, 19 bp, Mus musculus
  siRNA target sequence for Nckap1 (NM_016965.1,272-290).
cgttgtattactttacatt

SEQ ID NO: 692773 - DNA, 19 bp, Mus musculus
  siRNA target sequence for Nckap1 (NM_016965.1,321-339).
ctgtgacttgctgaatact

SEQ ID NO: 692774 - DNA, 19 bp, Mus musculus
  siRNA target sequence for Nckap1 (NM_016965.1,323-341).
gtgacttgctgaatactat

SEQ ID NO: 692775 - DNA, 19 bp, Mus musculus
  siRNA target sequence for Nckap1 (NM_016965.1,403-421).
gacttgactgtaacctata

SEQ ID NO: 692776 - DNA, 19 bp, Mus musculus
  siRNA target sequence for Nckap1 (NM_016965.1,405-423).
cttgactgtaacctataca

SEQ ID NO: 692777 - DNA, 19 bp, Mus musculus
  siRNA target sequence for Nckap1 (NM_016965.1,408-426).
gactgtaacctatacaaca

SEQ ID NO: 692778 - DNA, 19 bp, Mus musculus
  siRNA target sequence for Nckap1 (NM_016965.1,412-430).
gtaacctatacaacattaa

SEQ ID NO: 692779 - DNA, 19 bp, Mus musculus
  siRNA target sequence for Nckap1 (NM_016965.1,416-434).
cctatacaacattaatgat

SEQ ID NO: 692780 - DNA, 19 bp, Mus musculus
  siRNA target sequence for Nckap1 (NM_016965.1,417-435).
ctatacaacattaatgata

SEQ ID NO: 692781 - DNA, 19 bp, Mus musculus
  siRNA target sequence for Nckap1 (NM_016965.1,506-524).
gagcaagtgaccgagaata

SEQ ID NO: 692782 - DNA, 19 bp, Mus musculus
  siRNA target sequence for Nckap1 (NM_016965.1,527-545).
cacgccttggtcagatgat

SEQ ID NO: 692783 - DNA, 19 bp, Mus musculus
  siRNA target sequence for Nckap1 (NM_016965.1,530-548).
gccttggtcagatgattgt

SEQ ID NO: 692784 - DNA, 19 bp, Mus musculus
  siRNA target sequence for Nckap1 (NM_016965.1,540-558).
gatgattgtggactatgaa

SEQ ID NO: 692785 - DNA, 19 bp, Mus musculus
  siRNA target sequence for Nckap1 (NM_016965.1,550-568).
gactatgaaaaccctttaa

SEQ ID NO: 692786 - DNA, 19 bp, Mus musculus
  siRNA target sequence for Nckap1 (NM_016965.1,592-610).
ccccatagcaagtctcttt

SEQ ID NO: 692787 - DNA, 19 bp, Mus musculus
  siRNA target sequence for Nckap1 (NM_016965.1,594-612).
ccatagcaagtctctttca

SEQ ID NO: 692788 - DNA, 19 bp, Mus musculus
  siRNA target sequence for Nckap1 (NM_016965.1,607-625).
ctttcagatgcgctaattt

SEQ ID NO: 692789 - DNA, 19 bp, Mus musculus
  siRNA target sequence for Nckap1 (NM_016965.1,617-635).
cgctaatttctcttcagat

SEQ ID NO: 692790 - DNA, 19 bp, Mus musculus
  siRNA target sequence for Nckap1 (NM_016965.1,703-721).
gcacccagcacaatgctta

SEQ ID NO: 692791 - DNA, 19 bp, Mus musculus
  siRNA target sequence for Nckap1 (NM_016965.1,725-743).
ctgcgcagtcggacactat

SEQ ID NO: 692792 - DNA, 19 bp, Mus musculus
  siRNA target sequence for Nckap1 (NM_016965.1,740-758).
ctatgccttgtgaatatct

SEQ ID NO: 692793 - DNA, 19 bp, Mus musculus
  siRNA target sequence for Nckap1 (NM_016965.1,833-851).
ccgcactgaacctttggaa

SEQ ID NO: 692794 - DNA, 19 bp, Mus musculus
  siRNA target sequence for Nckap1 (NM_016965.1,883-901).
ctctttcgggatgaagttt

SEQ ID NO: 692795 - DNA, 19 bp, Mus musculus
  siRNA target sequence for Nckap1 (NM_016965.1,912-930).
caaagctgcagaagactta

SEQ ID NO: 692796 - DNA, 19 bp, Mus musculus
  siRNA target sequence for Nckap1 (NM_016965.1,939-957).
cattcggggctacaataaa

SEQ ID NO: 692797 - DNA, 19 bp, Mus musculus
  siRNA target sequence for Nckap1 (NM_016965.1,943-961).
cggggctacaataaacgta

SEQ ID NO: 692798 - DNA, 19 bp, Mus musculus
  siRNA target sequence for Nckap1 (NM_016965.1,944-962).
ggggctacaataaacgtat

SEQ ID NO: 692799 - DNA, 19 bp, Mus musculus
  siRNA target sequence for Nckap1 (NM_016965.1,945-963).
gggctacaataaacgtatt

SEQ ID NO: 692800 - DNA, 19 bp, Mus musculus
  siRNA target sequence for Nckap1 (NM_016965.1,946-964).
ggctacaataaacgtatta

SEQ ID NO: 692801 - DNA, 19 bp, Mus musculus
  siRNA target sequence for Nckap1 (NM_016965.1,1017-1035).
cagagaaagacgcaagttt

SEQ ID NO: 692802 - DNA, 19 bp, Mus musculus
  siRNA target sequence for Nckap1 (NM_016965.1,1019-1037).
gagaaagacgcaagttttt

SEQ ID NO: 692803 - DNA, 19 bp, Mus musculus
  siRNA target sequence for Nckap1 (NM_016965.1,1127-1145).
cttttgcccgtgatgaaat

SEQ ID NO: 692804 - DNA, 19 bp, Mus musculus
  siRNA target sequence for Nckap1 (NM_016965.1,1132-1150).
gcccgtgatgaaattatct

SEQ ID NO: 692805 - DNA, 19 bp, Mus musculus
  siRNA target sequence for Nckap1 (NM_016965.1,1185-1203).
gagtgcagatgactttata

SEQ ID NO: 692806 - DNA, 19 bp, Mus musculus
  siRNA target sequence for Nckap1 (NM_016965.1,1210-1228).
cacattgctgagctaatat

SEQ ID NO: 692807 - DNA, 19 bp, Mus musculus
  siRNA target sequence for Nckap1 (NM_016965.1,1283-1301).
ggtactacgtgcaatacct

SEQ ID NO: 692808 - DNA, 19 bp, Mus musculus
  siRNA target sequence for Nckap1 (NM_016965.1,1336-1354).
gtgcagaacctgtctgttt

SEQ ID NO: 692809 - DNA, 19 bp, Mus musculus
  siRNA target sequence for Nckap1 (NM_016965.1,1355-1373).
gccctgaggatgaatcgat

SEQ ID NO: 692810 - DNA, 19 bp, Mus musculus
  siRNA target sequence for Nckap1 (NM_016965.1,1360-1378).
gaggatgaatcgatcatca

SEQ ID NO: 692811 - DNA, 19 bp, Mus musculus
  siRNA target sequence for Nckap1 (NM_016965.1,1363-1381).
gatgaatcgatcatcatgt

SEQ ID NO: 692812 - DNA, 19 bp, Mus musculus
  siRNA target sequence for Nckap1 (NM_016965.1,1371-1389).
gatcatcatgtcctctttt

SEQ ID NO: 692813 - DNA, 19 bp, Mus musculus
  siRNA target sequence for Nckap1 (NM_016965.1,1454-1472).
ggatgagattagattggtt

SEQ ID NO: 692814 - DNA, 19 bp, Mus musculus
  siRNA target sequence for Nckap1 (NM_016965.1,1460-1478).
gattagattggtttaggtt

SEQ ID NO: 692815 - DNA, 19 bp, Mus musculus
  siRNA target sequence for Nckap1 (NM_016965.1,1494-1512).
cgtctccaaagcttcactt

SEQ ID NO: 692816 - DNA, 19 bp, Mus musculus
  siRNA target sequence for Nckap1 (NM_016965.1,1495-1513).
gtctccaaagcttcactta

SEQ ID NO: 692817 - DNA, 19 bp, Mus musculus
  siRNA target sequence for Nckap1 (NM_016965.1,1568-1586).
caaaaatggtagattcctt

SEQ ID NO: 692818 - DNA, 19 bp, Mus musculus
  siRNA target sequence for Nckap1 (NM_016965.1,1607-1625).
catccgatctctccatatt

SEQ ID NO: 692819 - DNA, 19 bp, Mus musculus
  siRNA target sequence for Nckap1 (NM_016965.1,1678-1696).
ccctctcagtcaagatact

SEQ ID NO: 692820 - DNA, 19 bp, Mus musculus
  siRNA target sequence for Nckap1 (NM_016965.1,1784-1802).
gcctttccctgtgcaatat

SEQ ID NO: 692821 - DNA, 19 bp, Mus musculus
  siRNA target sequence for Nckap1 (NM_016965.1,1786-1804).
ctttccctgtgcaatatgt

SEQ ID NO: 692822 - DNA, 19 bp, Mus musculus
  siRNA target sequence for Nckap1 (NM_016965.1,1820-1838).
ccaaacaagctcgaaatct

SEQ ID NO: 692823 - DNA, 19 bp, Mus musculus
  siRNA target sequence for Nckap1 (NM_016965.1,1921-1939).
gtgaataagaagtcaaaaa

SEQ ID NO: 692824 - DNA, 19 bp, Mus musculus
  siRNA target sequence for Nckap1 (NM_016965.1,2011-2029).
gtagtgaccaaccttgata

SEQ ID NO: 692825 - DNA, 19 bp, Mus musculus
  siRNA target sequence for Nckap1 (NM_016965.1,2014-2032).
gtgaccaaccttgataagt

SEQ ID NO: 692826 - DNA, 19 bp, Mus musculus
  siRNA target sequence for Nckap1 (NM_016965.1,2041-2059).
gcactttcggagttatgct

SEQ ID NO: 692827 - DNA, 19 bp, Mus musculus
  siRNA target sequence for Nckap1 (NM_016965.1,2042-2060).
cactttcggagttatgctt

SEQ ID NO: 692828 - DNA, 19 bp, Mus musculus
  siRNA target sequence for Nckap1 (NM_016965.1,2050-2068).
gagttatgcttctccataa

SEQ ID NO: 692829 - DNA, 19 bp, Mus musculus
  siRNA target sequence for Nckap1 (NM_016965.1,2052-2070).
gttatgcttctccataaat

SEQ ID NO: 692830 - DNA, 19 bp, Mus musculus
  siRNA target sequence for Nckap1 (NM_016965.1,2134-2152).
ctggaaatccggttcacta

SEQ ID NO: 692831 - DNA, 19 bp, Mus musculus
  siRNA target sequence for Nckap1 (NM_016965.1,2142-2160).
ccggttcactaaatcaatt

SEQ ID NO: 692832 - DNA, 19 bp, Mus musculus
  siRNA target sequence for Nckap1 (NM_016965.1,2144-2162).
ggttcactaaatcaattgt

SEQ ID NO: 692833 - DNA, 19 bp, Mus musculus
  siRNA target sequence for Nckap1 (NM_016965.1,2145-2163).
gttcactaaatcaattgtt

SEQ ID NO: 692834 - DNA, 19 bp, Mus musculus
  siRNA target sequence for Nckap1 (NM_016965.1,2165-2183).
gaatgactatgtataatca

SEQ ID NO: 692835 - DNA, 19 bp, Mus musculus
  siRNA target sequence for Nckap1 (NM_016965.1,2205-2223).
gccatcagagcttctaaca

SEQ ID NO: 692836 - DNA, 19 bp, Mus musculus
  siRNA target sequence for Nckap1 (NM_016965.1,2206-2224).
ccatcagagcttctaacaa

SEQ ID NO: 692837 - DNA, 19 bp, Mus musculus
  siRNA target sequence for Nckap1 (NM_016965.1,2245-2263).
gtactccagtccatagaga

SEQ ID NO: 692838 - DNA, 19 bp, Mus musculus
  siRNA target sequence for Nckap1 (NM_016965.1,2250-2268).
ccagtccatagagaactat

SEQ ID NO: 692839 - DNA, 19 bp, Mus musculus
  siRNA target sequence for Nckap1 (NM_016965.1,2285-2303).
ccagagtatttaataatgt

SEQ ID NO: 692840 - DNA, 19 bp, Mus musculus
  siRNA target sequence for Nckap1 (NM_016965.1,2349-2367).
catcacgagtctgtataca

SEQ ID NO: 692841 - DNA, 19 bp, Mus musculus
  siRNA target sequence for Nckap1 (NM_016965.1,2370-2388).
ctggtacttggaaacttta

SEQ ID NO: 692842 - DNA, 19 bp, Mus musculus
  siRNA target sequence for Nckap1 (NM_016965.1,2372-2390).
ggtacttggaaactttatt

SEQ ID NO: 692843 - DNA, 19 bp, Mus musculus
  siRNA target sequence for Nckap1 (NM_016965.1,2402-2420).
gcaatggccatatagctta

SEQ ID NO: 692844 - DNA, 19 bp, Mus musculus
  siRNA target sequence for Nckap1 (NM_016965.1,2403-2421).
caatggccatatagcttat

SEQ ID NO: 692845 - DNA, 19 bp, Mus musculus
  siRNA target sequence for Nckap1 (NM_016965.1,2409-2427).
ccatatagcttattttcct

SEQ ID NO: 692846 - DNA, 19 bp, Mus musculus
  siRNA target sequence for Nckap1 (NM_016965.1,2428-2446).
gcaatgaaagcatttgtga

SEQ ID NO: 692847 - DNA, 19 bp, Mus musculus
  siRNA target sequence for Nckap1 (NM_016965.1,2471-2489).
cattcaatgcagaggaata

SEQ ID NO: 692848 - DNA, 19 bp, Mus musculus
  siRNA target sequence for Nckap1 (NM_016965.1,2484-2502).
ggaatattctgatatatca

SEQ ID NO: 692849 - DNA, 19 bp, Mus musculus
  siRNA target sequence for Nckap1 (NM_016965.1,2494-2512).
gatatatcagaaatgagat

SEQ ID NO: 692850 - DNA, 19 bp, Mus musculus
  siRNA target sequence for Nckap1 (NM_016965.1,2530-2548).
ggcccatatgggatgaagt

SEQ ID NO: 692851 - DNA, 19 bp, Mus musculus
  siRNA target sequence for Nckap1 (NM_016965.1,2531-2549).
gcccatatgggatgaagtt

SEQ ID NO: 692852 - DNA, 19 bp, Mus musculus
  siRNA target sequence for Nckap1 (NM_016965.1,2568-2586).
gtggcacatttcatcacaa

SEQ ID NO: 692853 - DNA, 19 bp, Mus musculus
  siRNA target sequence for Nckap1 (NM_016965.1,2571-2589).
gcacatttcatcacaagta

SEQ ID NO: 692854 - DNA, 19 bp, Mus musculus
  siRNA target sequence for Nckap1 (NM_016965.1,2610-2628).
ggtggagaatgttgatgtt

SEQ ID NO: 692855 - DNA, 19 bp, Mus musculus
  siRNA target sequence for Nckap1 (NM_016965.1,2616-2634).
gaatgttgatgttctaaca

SEQ ID NO: 692856 - DNA, 19 bp, Mus musculus
  siRNA target sequence for Nckap1 (NM_016965.1,2623-2641).
gatgttctaacacaaatga

SEQ ID NO: 692857 - DNA, 19 bp, Mus musculus
  siRNA target sequence for Nckap1 (NM_016965.1,2665-2683).
cagatggctgcactcttta

SEQ ID NO: 692858 - DNA, 19 bp, Mus musculus
  siRNA target sequence for Nckap1 (NM_016965.1,2671-2689).
gctgcactctttaaaagat

SEQ ID NO: 692859 - DNA, 19 bp, Mus musculus
  siRNA target sequence for Nckap1 (NM_016965.1,2674-2692).
gcactctttaaaagattat

SEQ ID NO: 692860 - DNA, 19 bp, Mus musculus
  siRNA target sequence for Nckap1 (NM_016965.1,2679-2697).
ctttaaaagattatcatct

SEQ ID NO: 692861 - DNA, 19 bp, Mus musculus
  siRNA target sequence for Nckap1 (NM_016965.1,2723-2741).
cgataattggtgttatttt

SEQ ID NO: 692862 - DNA, 19 bp, Mus musculus
  siRNA target sequence for Nckap1 (NM_016965.1,2805-2823).
cgtgagctccattgaagat

SEQ ID NO: 692863 - DNA, 19 bp, Mus musculus
  siRNA target sequence for Nckap1 (NM_016965.1,2835-2853).
cattcctcgggaaactgat

SEQ ID NO: 692864 - DNA, 19 bp, Mus musculus
  siRNA target sequence for Nckap1 (NM_016965.1,2849-2867).
ctgatatgaaggttgcaat

SEQ ID NO: 692865 - DNA, 19 bp, Mus musculus
  siRNA target sequence for Nckap1 (NM_016965.1,2859-2877).
ggttgcaatgaatgtgtat

SEQ ID NO: 692866 - DNA, 19 bp, Mus musculus
  siRNA target sequence for Nckap1 (NM_016965.1,2897-2915).
ggttaccatgtgagattga

SEQ ID NO: 692867 - DNA, 19 bp, Mus musculus
  siRNA target sequence for Nckap1 (NM_016965.1,2898-2916).
gttaccatgtgagattgat

SEQ ID NO: 692868 - DNA, 19 bp, Mus musculus
  siRNA target sequence for Nckap1 (NM_016965.1,2929-2947).
gtagctctttcctcacaaa

SEQ ID NO: 692869 - DNA, 19 bp, Mus musculus
  siRNA target sequence for Nckap1 (NM_016965.1,3028-3046).
ctggccagcaatgtaatgt

SEQ ID NO: 692870 - DNA, 19 bp, Mus musculus
  siRNA target sequence for Nckap1 (NM_016965.1,3030-3048).
ggccagcaatgtaatgtca

SEQ ID NO: 692871 - DNA, 19 bp, Mus musculus
  siRNA target sequence for Nckap1 (NM_016965.1,3073-3091).
cactgcaacaatatacatt

SEQ ID NO: 692872 - DNA, 19 bp, Mus musculus
  siRNA target sequence for Nckap1 (NM_016965.1,3075-3093).
ctgcaacaatatacattgt

SEQ ID NO: 692873 - DNA, 19 bp, Mus musculus
  siRNA target sequence for Nckap1 (NM_016965.1,3077-3095).
gcaacaatatacattgttt

SEQ ID NO: 692874 - DNA, 19 bp, Mus musculus
  siRNA target sequence for Nckap1 (NM_016965.1,3118-3136).
gctgcagctttgtttacaa

SEQ ID NO: 692875 - DNA, 19 bp, Mus musculus
  siRNA target sequence for Nckap1 (NM_016965.1,3149-3167).
gtattgaagaccgacttaa

SEQ ID NO: 692876 - DNA, 19 bp, Mus musculus
  siRNA target sequence for Nckap1 (NM_016965.1,3210-3228).
ccaagagacagataaaact

SEQ ID NO: 692877 - DNA, 19 bp, Mus musculus
  siRNA target sequence for Nckap1 (NM_016965.1,3233-3251).
caagaaatagagaatctgt

SEQ ID NO: 692878 - DNA, 19 bp, Mus musculus
  siRNA target sequence for Nckap1 (NM_016965.1,3264-3282).
ggatatgattgtacaagaa

SEQ ID NO: 692879 - DNA, 19 bp, Mus musculus
  siRNA target sequence for Nckap1 (NM_016965.1,3301-3319).
gatctcttggaatcttgtt

SEQ ID NO: 692880 - DNA, 19 bp, Mus musculus
  siRNA target sequence for Nckap1 (NM_016965.1,3328-3346).
gtgttgctgagaaatgcat

SEQ ID NO: 692881 - DNA, 19 bp, Mus musculus
  siRNA target sequence for Nckap1 (NM_016965.1,3344-3362).
cataccatgctgtctacaa

SEQ ID NO: 692882 - DNA, 19 bp, Mus musculus
  siRNA target sequence for Nckap1 (NM_016965.1,3353-3371).
ctgtctacaaacaaagtgt

SEQ ID NO: 692883 - DNA, 19 bp, Mus musculus
  siRNA target sequence for Nckap1 (NM_016965.1,3355-3373).
gtctacaaacaaagtgtta

SEQ ID NO: 692884 - DNA, 19 bp, Mus musculus
  siRNA target sequence for Nckap1 (NM_016965.1,3357-3375).
ctacaaacaaagtgttaca

SEQ ID NO: 692885 - DNA, 19 bp, Mus musculus
  siRNA target sequence for Nckap1 (NM_016965.1,3360-3378).
caaacaaagtgttacatct

SEQ ID NO: 692886 - DNA, 19 bp, Mus musculus
  siRNA target sequence for Npdc1 (NM_008721.2,409-427).
ccaaggaaacacctatctt

SEQ ID NO: 692887 - DNA, 19 bp, Mus musculus
  siRNA target sequence for Npdc1 (NM_008721.2,454-472).
ctggaagaggagatcgatt

SEQ ID NO: 692888 - DNA, 19 bp, Mus musculus
  siRNA target sequence for Npdc1 (NM_008721.2,652-670).
ccccatacttccttgagtt

SEQ ID NO: 692889 - DNA, 19 bp, Mus musculus
  siRNA target sequence for Npdc1 (NM_008721.2,920-938).
cacacagtgctgagatgta

SEQ ID NO: 692890 - DNA, 19 bp, Mus musculus
  siRNA target sequence for Npdc1 (NM_008721.2,929-947).
ctgagatgtatcattatca

SEQ ID NO: 692891 - DNA, 19 bp, Mus musculus
  siRNA target sequence for Npdc1 (NM_008721.2,971-989).
gcctggagcggcataagga

SEQ ID NO: 692892 - DNA, 19 bp, Mus musculus
  siRNA target sequence for Npdc1 (NM_008721.2,972-990).
cctggagcggcataaggaa

SEQ ID NO: 692893 - DNA, 19 bp, Mus musculus
  siRNA target sequence for Npdc1 (NM_008721.2,1013-1031).
cttcctccgatgaggaaaa

SEQ ID NO: 692894 - DNA, 19 bp, Mus musculus
  siRNA target sequence for Npdc1 (NM_008721.2,1016-1034).
cctccgatgaggaaaatga

SEQ ID NO: 692895 - DNA, 19 bp, Mus musculus
  siRNA target sequence for Npdc1 (NM_008721.2,1017-1035).
ctccgatgaggaaaatgaa

SEQ ID NO: 692896 - DNA, 19 bp, Mus musculus
  siRNA target sequence for Npdc1 (NM_008721.2,1040-1058).
gcgacttcactgtgtatga

SEQ ID NO: 692897 - DNA, 19 bp, Mus musculus
  siRNA target sequence for Npdc1 (NM_008721.2,1092-1110).
ggtgcgcaacccactgttt

SEQ ID NO: 692898 - DNA, 19 bp, Mus musculus
  siRNA target sequence for ORF31 (NM_030890.1,653-671).
gtccgccacacgactacat

SEQ ID NO: 692899 - DNA, 19 bp, Mus musculus
  siRNA target sequence for ORF31 (NM_030890.1,794-812).
cacgcgaagcccggaattt

SEQ ID NO: 692900 - DNA, 19 bp, Mus musculus
  siRNA target sequence for ORF31 (NM_030890.1,796-814).
cgcgaagcccggaatttct

SEQ ID NO: 692901 - DNA, 19 bp, Mus musculus
  siRNA target sequence for ORF31 (NM_030890.1,860-878).
ccatcctcactgtagtcat

SEQ ID NO: 692902 - DNA, 19 bp, Mus musculus
  siRNA target sequence for ORF31 (NM_030890.1,889-907).
gcccagcaccacgaaaact

SEQ ID NO: 692903 - DNA, 19 bp, Mus musculus
  siRNA target sequence for Otof (NM_031875.1,894-912).
cagctggtgggcttgaaca

SEQ ID NO: 692904 - DNA, 19 bp, Mus musculus
  siRNA target sequence for Otof (NM_031875.1,976-994).
caaactgcccttactacaa

SEQ ID NO: 692905 - DNA, 19 bp, Mus musculus
  siRNA target sequence for Otof (NM_031875.1,985-1003).
cttactacaacgagtactt

SEQ ID NO: 692906 - DNA, 19 bp, Mus musculus
  siRNA target sequence for Otof (NM_031875.1,1052-1070).
caagatctcggttatccat

SEQ ID NO: 692907 - DNA, 19 bp, Mus musculus
  siRNA target sequence for Otof (NM_031875.1,1060-1078).
cggttatccattctaagaa

SEQ ID NO: 692908 - DNA, 19 bp, Mus musculus
  siRNA target sequence for Otof (NM_031875.1,1343-1361).
gcagtgggcacggttctat

SEQ ID NO: 692909 - DNA, 19 bp, Mus musculus
  siRNA target sequence for Otof (NM_031875.1,1349-1367).
ggcacggttctatgtgaaa

SEQ ID NO: 692910 - DNA, 19 bp, Mus musculus
  siRNA target sequence for Otof (NM_031875.1,1350-1368).
gcacggttctatgtgaaaa

SEQ ID NO: 692911 - DNA, 19 bp, Mus musculus
  siRNA target sequence for Otof (NM_031875.1,1353-1371).
cggttctatgtgaaaattt

SEQ ID NO: 692912 - DNA, 19 bp, Mus musculus
  siRNA target sequence for Otof (NM_031875.1,1485-1503).
ggacaaaagggcaaaacat

SEQ ID NO: 692913 - DNA, 19 bp, Mus musculus
  siRNA target sequence for Otof (NM_031875.1,1519-1537).
gctatgagccgctatggaa

SEQ ID NO: 692914 - DNA, 19 bp, Mus musculus
  siRNA target sequence for Otof (NM_031875.1,1520-1538).
ctatgagccgctatggaat

SEQ ID NO: 692915 - DNA, 19 bp, Mus musculus
  siRNA target sequence for Otof (NM_031875.1,1722-1740).
ggctccacgcgcaactaca

SEQ ID NO: 692916 - DNA, 19 bp, Mus musculus
  siRNA target sequence for Otof (NM_031875.1,1949-1967).
cttggaagcctcaatgatt

SEQ ID NO: 692917 - DNA, 19 bp, Mus musculus
  siRNA target sequence for Otof (NM_031875.1,1960-1978).
caatgattgaccggaaaaa

SEQ ID NO: 692918 - DNA, 19 bp, Mus musculus
  siRNA target sequence for Otof (NM_031875.1,1981-1999).
gggacaagccaattacctt

SEQ ID NO: 692919 - DNA, 19 bp, Mus musculus
  siRNA target sequence for Otof (NM_031875.1,2014-2032).
gaaactacggcaatgaagt

SEQ ID NO: 692920 - DNA, 19 bp, Mus musculus
  siRNA target sequence for Otof (NM_031875.1,2091-2109).
gaggtagacctgattcaga

SEQ ID NO: 692921 - DNA, 19 bp, Mus musculus
  siRNA target sequence for Otof (NM_031875.1,2188-2206).
cggacaggaactatttcca

SEQ ID NO: 692922 - DNA, 19 bp, Mus musculus
  siRNA target sequence for Otof (NM_031875.1,2222-2240).
gcgcaagccctgcatctat

SEQ ID NO: 692923 - DNA, 19 bp, Mus musculus
  siRNA target sequence for Otof (NM_031875.1,2223-2241).
cgcaagccctgcatctata

SEQ ID NO: 692924 - DNA, 19 bp, Mus musculus
  siRNA target sequence for Otof (NM_031875.1,2472-2490).
gatcgagagcgtcttaagt

SEQ ID NO: 692925 - DNA, 19 bp, Mus musculus
  siRNA target sequence for Otof (NM_031875.1,2565-2583).
cgggacaagctgaggttat

SEQ ID NO: 692926 - DNA, 19 bp, Mus musculus
  siRNA target sequence for Otof (NM_031875.1,2578-2596).
ggttatgccagaactttct

SEQ ID NO: 692927 - DNA, 19 bp, Mus musculus
  siRNA target sequence for Otof (NM_031875.1,2641-2659).
ctgatgtgttcatttggat

SEQ ID NO: 692928 - DNA, 19 bp, Mus musculus
  siRNA target sequence for Otof (NM_031875.1,2646-2664).
gtgttcatttggatgatga

SEQ ID NO: 692929 - DNA, 19 bp, Mus musculus
  siRNA target sequence for Otof (NM_031875.1,2657-2675).
gatgatgagcaacaacaaa

SEQ ID NO: 692930 - DNA, 19 bp, Mus musculus
  siRNA target sequence for Otof (NM_031875.1,2944-2962).
cgcccatcagcctagtcta

SEQ ID NO: 692931 - DNA, 19 bp, Mus musculus
  siRNA target sequence for Otof (NM_031875.1,2984-3002).
gctccgagcacacatgtat

SEQ ID NO: 692932 - DNA, 19 bp, Mus musculus
  siRNA target sequence for Otof (NM_031875.1,3183-3201).
gatccccccatcattgtca

SEQ ID NO: 692933 - DNA, 19 bp, Mus musculus
  siRNA target sequence for Otof (NM_031875.1,3187-3205).
cccccatcattgtcattga

SEQ ID NO: 692934 - DNA, 19 bp, Mus musculus
  siRNA target sequence for Otof (NM_031875.1,3188-3206).
ccccatcattgtcattgaa

SEQ ID NO: 692935 - DNA, 19 bp, Mus musculus
  siRNA target sequence for Otof (NM_031875.1,3603-3621).
caatcctccctgattcaca

SEQ ID NO: 692936 - DNA, 19 bp, Mus musculus
  siRNA target sequence for Otof (NM_031875.1,3607-3625).
cctccctgattcacaatta

SEQ ID NO: 692937 - DNA, 19 bp, Mus musculus
  siRNA target sequence for Otof (NM_031875.1,3608-3626).
ctccctgattcacaattat

SEQ ID NO: 692938 - DNA, 19 bp, Mus musculus
  siRNA target sequence for Otof (NM_031875.1,3610-3628).
ccctgattcacaattataa

SEQ ID NO: 692939 - DNA, 19 bp, Mus musculus
  siRNA target sequence for Otof (NM_031875.1,3890-3908).
cacaggggaggttgtagta

SEQ ID NO: 692940 - DNA, 19 bp, Mus musculus
  siRNA target sequence for Otof (NM_031875.1,4104-4122).
gcctccatcgacacaatga

SEQ ID NO: 692941 - DNA, 19 bp, Mus musculus
  siRNA target sequence for Otof (NM_031875.1,4105-4123).
cctccatcgacacaatgaa

SEQ ID NO: 692942 - DNA, 19 bp, Mus musculus
  siRNA target sequence for Otof (NM_031875.1,4312-4330).
ccaagatcgatgagcttaa

SEQ ID NO: 692943 - DNA, 19 bp, Mus musculus
  siRNA target sequence for Otof (NM_031875.1,4405-4423).
gcaagacgggggatgatga

SEQ ID NO: 692944 - DNA, 19 bp, Mus musculus
  siRNA target sequence for Otof (NM_031875.1,4447-4465).
gcatagtaggccgattcaa

SEQ ID NO: 692945 - DNA, 19 bp, Mus musculus
  siRNA target sequence for Otof (NM_031875.1,4684-4702).
gagacaaggagaactacat

SEQ ID NO: 692946 - DNA, 19 bp, Mus musculus
  siRNA target sequence for Otof (NM_031875.1,4820-4838).
catcggagaaaccaagatt

SEQ ID NO: 692947 - DNA, 19 bp, Mus musculus
  siRNA target sequence for Otof (NM_031875.1,4823-4841).
cggagaaaccaagattgat

SEQ ID NO: 692948 - DNA, 19 bp, Mus musculus
  siRNA target sequence for Otof (NM_031875.1,4825-4843).
gagaaaccaagattgatct

SEQ ID NO: 692949 - DNA, 19 bp, Mus musculus
  siRNA target sequence for Otof (NM_031875.1,4881-4899).
ggcatcgcacagacctatt

SEQ ID NO: 692950 - DNA, 19 bp, Mus musculus
  siRNA target sequence for Otof (NM_031875.1,4900-4918).
ccatacatggctacaatat

SEQ ID NO: 692951 - DNA, 19 bp, Mus musculus
  siRNA target sequence for Otof (NM_031875.1,5337-5355).
gtcctggaagacgatgatt

SEQ ID NO: 692952 - DNA, 19 bp, Mus musculus
  siRNA target sequence for Otof (NM_031875.1,5340-5358).
ctggaagacgatgatttct

SEQ ID NO: 692953 - DNA, 19 bp, Mus musculus
  siRNA target sequence for Otof (NM_031875.1,5508-5526).
gccgaagagaagatcgtta

SEQ ID NO: 692954 - DNA, 19 bp, Mus musculus
  siRNA target sequence for Otof (NM_031875.1,5509-5527).
ccgaagagaagatcgttat

SEQ ID NO: 692955 - DNA, 19 bp, Mus musculus
  siRNA target sequence for Otof (NM_031875.1,5511-5529).
gaagagaagatcgttatgt

SEQ ID NO: 692956 - DNA, 19 bp, Mus musculus
  siRNA target sequence for Otof (NM_031875.1,5530-5548).
ccaaaaaggagtctatgtt

SEQ ID NO: 692957 - DNA, 19 bp, Mus musculus
  siRNA target sequence for Otof (NM_031875.1,5554-5572).
gggatgagacggagtacaa

SEQ ID NO: 692958 - DNA, 19 bp, Mus musculus
  siRNA target sequence for Otof (NM_031875.1,5788-5806).
gcaatgagaatgatgagtt

SEQ ID NO: 692959 - DNA, 19 bp, Mus musculus
  siRNA target sequence for Otof (NM_031875.1,5892-5910).
gaacctgatcccctagaaa

SEQ ID NO: 692960 - DNA, 19 bp, Mus musculus
  siRNA target sequence for Otof (NM_031875.1,5991-6009).
cgctggctactcctcaaat

SEQ ID NO: 692961 - DNA, 19 bp, Mus musculus
  siRNA target sequence for Panx1 (NM_019482.1,144-162).
caagatggtcacatgtatt

SEQ ID NO: 692962 - DNA, 19 bp, Mus musculus
  siRNA target sequence for Panx1 (NM_019482.1,236-254).
gcttctccccgagttcttt

SEQ ID NO: 692963 - DNA, 19 bp, Mus musculus
  siRNA target sequence for Panx1 (NM_019482.1,509-527).
ccaagagtgctcgagattt

SEQ ID NO: 692964 - DNA, 19 bp, Mus musculus
  siRNA target sequence for Panx1 (NM_019482.1,581-599).
gtctgtgggagatatctga

SEQ ID NO: 692965 - DNA, 19 bp, Mus musculus
  siRNA target sequence for Panx1 (NM_019482.1,617-635).
caatcgtggagcagtactt

SEQ ID NO: 692966 - DNA, 19 bp, Mus musculus
  siRNA target sequence for Panx1 (NM_019482.1,656-674).
gtcatttaatcatgaaata

SEQ ID NO: 692967 - DNA, 19 bp, Mus musculus
  siRNA target sequence for Panx1 (NM_019482.1,681-699).
ctgccggctggtgacattt

SEQ ID NO: 692968 - DNA, 19 bp, Mus musculus
  siRNA target sequence for Panx1 (NM_019482.1,683-701).
gccggctggtgacatttgt

SEQ ID NO: 692969 - DNA, 19 bp, Mus musculus
  siRNA target sequence for Panx1 (NM_019482.1,709-727).
ctgttggcatgtatctact

SEQ ID NO: 692970 - DNA, 19 bp, Mus musculus
  siRNA target sequence for Panx1 (NM_019482.1,719-737).
gtatctacttgagctatta

SEQ ID NO: 692971 - DNA, 19 bp, Mus musculus
  siRNA target sequence for Panx1 (NM_019482.1,752-770).
cactctcggacgagtttct

SEQ ID NO: 692972 - DNA, 19 bp, Mus musculus
  siRNA target sequence for Panx1 (NM_019482.1,754-772).
ctctcggacgagtttctgt

SEQ ID NO: 692973 - DNA, 19 bp, Mus musculus
  siRNA target sequence for Panx1 (NM_019482.1,765-783).
gtttctgtgcagcatcaaa

SEQ ID NO: 692974 - DNA, 19 bp, Mus musculus
  siRNA target sequence for Panx1 (NM_019482.1,944-962).
cggacattctcaaagtgta

SEQ ID NO: 692975 - DNA, 19 bp, Mus musculus
  siRNA target sequence for Panx1 (NM_019482.1,945-963).
ggacattctcaaagtgtat

SEQ ID NO: 692976 - DNA, 19 bp, Mus musculus
  siRNA target sequence for Panx1 (NM_019482.1,972-990).
gcccaccttcgatgttcta

SEQ ID NO: 692977 - DNA, 19 bp, Mus musculus
  siRNA target sequence for Panx1 (NM_019482.1,974-992).
ccaccttcgatgttctaca

SEQ ID NO: 692978 - DNA, 19 bp, Mus musculus
  siRNA target sequence for Panx1 (NM_019482.1,975-993).
caccttcgatgttctacat

SEQ ID NO: 692979 - DNA, 19 bp, Mus musculus
  siRNA target sequence for Panx1 (NM_019482.1,977-995).
ccttcgatgttctacattt

SEQ ID NO: 692980 - DNA, 19 bp, Mus musculus
  siRNA target sequence for Panx1 (NM_019482.1,1057-1075).
gagctcaaatcgtacaagt

SEQ ID NO: 692981 - DNA, 19 bp, Mus musculus
  siRNA target sequence for Panx1 (NM_019482.1,1124-1142).
ccatgctactcctgacaaa

SEQ ID NO: 692982 - DNA, 19 bp, Mus musculus
  siRNA target sequence for Panx1 (NM_019482.1,1139-1157).
caaacctgggcatgattaa

SEQ ID NO: 692983 - DNA, 19 bp, Mus musculus
  siRNA target sequence for Panx1 (NM_019482.1,1152-1170).
gattaagatggacatcatt

SEQ ID NO: 692984 - DNA, 19 bp, Mus musculus
  siRNA target sequence for Panx1 (NM_019482.1,1161-1179).
ggacatcattgatggaaaa

SEQ ID NO: 692985 - DNA, 19 bp, Mus musculus
  siRNA target sequence for Pigr (NM_011082.2,164-182).
cacaaaaagccccatattt

SEQ ID NO: 692986 - DNA, 19 bp, Mus musculus
  siRNA target sequence for Pigr (NM_011082.2,186-204).
ccccaggaggtgagtagta

SEQ ID NO: 692987 - DNA, 19 bp, Mus musculus
  siRNA target sequence for Pigr (NM_011082.2,187-205).
cccaggaggtgagtagtat

SEQ ID NO: 692988 - DNA, 19 bp, Mus musculus
  siRNA target sequence for Pigr (NM_011082.2,188-206).
ccaggaggtgagtagtata

SEQ ID NO: 692989 - DNA, 19 bp, Mus musculus
  siRNA target sequence for Pigr (NM_011082.2,258-276).
cggcacacccggaaatact

SEQ ID NO: 692990 - DNA, 19 bp, Mus musculus
  siRNA target sequence for Pigr (NM_011082.2,423-441).
gacactgggagctacaagt

SEQ ID NO: 692991 - DNA, 19 bp, Mus musculus
  siRNA target sequence for Pigr (NM_011082.2,628-646).
cctgcgaacttgtcattga

SEQ ID NO: 692992 - DNA, 19 bp, Mus musculus
  siRNA target sequence for Pigr (NM_011082.2,659-677).
ggtgaaccccagctatata

SEQ ID NO: 692993 - DNA, 19 bp, Mus musculus
  siRNA target sequence for Pigr (NM_011082.2,671-689).
ctatataggcagagcaaaa

SEQ ID NO: 692994 - DNA, 19 bp, Mus musculus
  siRNA target sequence for Pigr (NM_011082.2,678-696).
ggcagagcaaaacttttta

SEQ ID NO: 692995 - DNA, 19 bp, Mus musculus
  siRNA target sequence for Pigr (NM_011082.2,702-720).
gggaccgacctaactgtat

SEQ ID NO: 692996 - DNA, 19 bp, Mus musculus
  siRNA target sequence for Pigr (NM_011082.2,703-721).
ggaccgacctaactgtatt

SEQ ID NO: 692997 - DNA, 19 bp, Mus musculus
  siRNA target sequence for Pigr (NM_011082.2,706-724).
ccgacctaactgtattcta

SEQ ID NO: 692998 - DNA, 19 bp, Mus musculus
  siRNA target sequence for Pigr (NM_011082.2,707-725).
cgacctaactgtattctat

SEQ ID NO: 692999 - DNA, 19 bp, Mus musculus
  siRNA target sequence for Pigr (NM_011082.2,715-733).
ctgtattctatgtcaacat

SEQ ID NO: 693000 - DNA, 19 bp, Mus musculus
  siRNA target sequence for Pigr (NM_011082.2,717-735).
gtattctatgtcaacatta

SEQ ID NO: 693001 - DNA, 19 bp, Mus musculus
  siRNA target sequence for Pigr (NM_011082.2,736-754).
gtcacctaacgcacaatga

SEQ ID NO: 693002 - DNA, 19 bp, Mus musculus
  siRNA target sequence for Pigr (NM_011082.2,834-852).
gagccagagctgctttata

SEQ ID NO: 693003 - DNA, 19 bp, Mus musculus
  siRNA target sequence for Pigr (NM_011082.2,1027-1045).
gccgcttcagtgtgttgat

SEQ ID NO: 693004 - DNA, 19 bp, Mus musculus
  siRNA target sequence for Pigr (NM_011082.2,1127-1145).
ccagacttggcaactcttt

SEQ ID NO: 693005 - DNA, 19 bp, Mus musculus
  siRNA target sequence for Pigr (NM_011082.2,1135-1153).
ggcaactctttgtcaatga

SEQ ID NO: 693006 - DNA, 19 bp, Mus musculus
  siRNA target sequence for Pigr (NM_011082.2,1136-1154).
gcaactctttgtcaatgaa

SEQ ID NO: 693007 - DNA, 19 bp, Mus musculus
  siRNA target sequence for Pigr (NM_011082.2,1213-1231).
ccatcgcctgtccctataa

SEQ ID NO: 693008 - DNA, 19 bp, Mus musculus
  siRNA target sequence for Pigr (NM_011082.2,1224-1242).
ccctataaccccaaggaaa

SEQ ID NO: 693009 - DNA, 19 bp, Mus musculus
  siRNA target sequence for Pigr (NM_011082.2,1319-1337).
ccaggtgcaagaagagtat

SEQ ID NO: 693010 - DNA, 19 bp, Mus musculus
  siRNA target sequence for Pigr (NM_011082.2,1342-1360).
gccgactggcactgtttga

SEQ ID NO: 693011 - DNA, 19 bp, Mus musculus
  siRNA target sequence for Pigr (NM_011082.2,1343-1361).
ccgactggcactgtttgat

SEQ ID NO: 693012 - DNA, 19 bp, Mus musculus
  siRNA target sequence for Pigr (NM_011082.2,1359-1377).
gatcagccaggcaatggta

SEQ ID NO: 693013 - DNA, 19 bp, Mus musculus
  siRNA target sequence for Pigr (NM_011082.2,1456-1474).
ggagaaccacaatagaact

SEQ ID NO: 693014 - DNA, 19 bp, Mus musculus
  siRNA target sequence for Pigr (NM_011082.2,1523-1541).
gaacgcaacagcagtacta

SEQ ID NO: 693015 - DNA, 19 bp, Mus musculus
  siRNA target sequence for Pigr (NM_011082.2,1564-1582).
gccactatccgtgcaaatt

SEQ ID NO: 693016 - DNA, 19 bp, Mus musculus
  siRNA target sequence for Pigr (NM_011082.2,1566-1584).
cactatccgtgcaaattct

SEQ ID NO: 693017 - DNA, 19 bp, Mus musculus
  siRNA target sequence for Pigr (NM_011082.2,1708-1726).
ccctgaacccggtcagtaa

SEQ ID NO: 693018 - DNA, 19 bp, Mus musculus
  siRNA target sequence for Pigr (NM_011082.2,1712-1730).
gaacccggtcagtaaggaa

SEQ ID NO: 693019 - DNA, 19 bp, Mus musculus
  siRNA target sequence for Pigr (NM_011082.2,1745-1763).
ctggtgtggggtaaagcaa

SEQ ID NO: 693020 - DNA, 19 bp, Mus musculus
  siRNA target sequence for Pigr (NM_011082.2,1779-1797).
gaaactaccgccatctata

SEQ ID NO: 693021 - DNA, 19 bp, Mus musculus
  siRNA target sequence for Pigr (NM_011082.2,1790-1808).
catctatatagcagttgaa

SEQ ID NO: 693022 - DNA, 19 bp, Mus musculus
  siRNA target sequence for Pigr (NM_011082.2,1890-1908).
gactcctccatcagtgaaa

SEQ ID NO: 693023 - DNA, 19 bp, Mus musculus
  siRNA target sequence for Pigr (NM_011082.2,1945-1963).
ccaacgaaagagagataca

SEQ ID NO: 693024 - DNA, 19 bp, Mus musculus
  siRNA target sequence for Pigr (NM_011082.2,1949-1967).
cgaaagagagatacagaat

SEQ ID NO: 693025 - DNA, 19 bp, Mus musculus
  siRNA target sequence for Pigr (NM_011082.2,2084-2102).
gctggcagtgggtgctata

SEQ ID NO: 693026 - DNA, 19 bp, Mus musculus
  siRNA target sequence for Pigr (NM_011082.2,2087-2105).
ggcagtgggtgctatagct

SEQ ID NO: 693027 - DNA, 19 bp, Mus musculus
  siRNA target sequence for Pigr (NM_011082.2,2123-2141).
ccgacatcggaagaatgta

SEQ ID NO: 693028 - DNA, 19 bp, Mus musculus
  siRNA target sequence for Pigr (NM_011082.2,2125-2143).
gacatcggaagaatgtaga

SEQ ID NO: 693029 - DNA, 19 bp, Mus musculus
  siRNA target sequence for Pigr (NM_011082.2,2139-2157).
gtagaccgcatgtcaatca

SEQ ID NO: 693030 - DNA, 19 bp, Mus musculus
  siRNA target sequence for Podxl (NM_013723.2,347-365).
cacatctgctatcaaatct

SEQ ID NO: 693031 - DNA, 19 bp, Mus musculus
  siRNA target sequence for Podxl (NM_013723.2,381-399).
caccaaagtgccacaacat

SEQ ID NO: 693032 - DNA, 19 bp, Mus musculus
  siRNA target sequence for Podxl (NM_013723.2,383-401).
ccaaagtgccacaacatca

SEQ ID NO: 693033 - DNA, 19 bp, Mus musculus
  siRNA target sequence for Podxl (NM_013723.2,384-402).
caaagtgccacaacatcaa

SEQ ID NO: 693034 - DNA, 19 bp, Mus musculus
  siRNA target sequence for Podxl (NM_013723.2,531-549).
caaagcggtggcaatctga

SEQ ID NO: 693035 - DNA, 19 bp, Mus musculus
  siRNA target sequence for Podxl (NM_013723.2,566-584).
ggtggacaagactaaaaca

SEQ ID NO: 693036 - DNA, 19 bp, Mus musculus
  siRNA target sequence for Podxl (NM_013723.2,567-585).
gtggacaagactaaaacaa

SEQ ID NO: 693037 - DNA, 19 bp, Mus musculus
  siRNA target sequence for Podxl (NM_013723.2,643-661).
gcaagagcggtgacagttt

SEQ ID NO: 693038 - DNA, 19 bp, Mus musculus
  siRNA target sequence for Podxl (NM_013723.2,644-662).
caagagcggtgacagtttt

SEQ ID NO: 693039 - DNA, 19 bp, Mus musculus
  siRNA target sequence for Podxl (NM_013723.2,679-697).
ccactttggggctaatcaa

SEQ ID NO: 693040 - DNA, 19 bp, Mus musculus
  siRNA target sequence for Podxl (NM_013723.2,896-914).
gaagcccactacacacaaa

SEQ ID NO: 693041 - DNA, 19 bp, Mus musculus
  siRNA target sequence for Podxl (NM_013723.2,1018-1036).
gaactacgactgaagagtt

SEQ ID NO: 693042 - DNA, 19 bp, Mus musculus
  siRNA target sequence for Podxl (NM_013723.2,1097-1115).
catctgggcctttggaaat

SEQ ID NO: 693043 - DNA, 19 bp, Mus musculus
  siRNA target sequence for Podxl (NM_013723.2,1102-1120).
gggcctttggaaattacca

SEQ ID NO: 693044 - DNA, 19 bp, Mus musculus
  siRNA target sequence for Podxl (NM_013723.2,1152-1170).
gaggaactccttattctga

SEQ ID NO: 693045 - DNA, 19 bp, Mus musculus
  siRNA target sequence for Podxl (NM_013723.2,1235-1253).
gctgtgtcactcagtcaaa

SEQ ID NO: 693046 - DNA, 19 bp, Mus musculus
  siRNA target sequence for Podxl (NM_013723.2,1293-1311).
gtggcccctattctagata

SEQ ID NO: 693047 - DNA, 19 bp, Mus musculus
  siRNA target sequence for Podxl (NM_013723.2,1322-1340).
ggcagtgaagagaatcatt

SEQ ID NO: 693048 - DNA, 19 bp, Mus musculus
  siRNA target sequence for Podxl (NM_013723.2,1357-1375).
ctcctaaggccgtgtatga

SEQ ID NO: 693049 - DNA, 19 bp, Mus musculus
  siRNA target sequence for Podxl (NM_013723.2,1411-1429).
ccggagtcagtgacatgaa

SEQ ID NO: 693050 - DNA, 19 bp, Mus musculus
  siRNA target sequence for Podxl (NM_013723.2,1444-1462).
ggcctccagaggtcaatga

SEQ ID NO: 693051 - DNA, 19 bp, Mus musculus
  siRNA target sequence for Podxl (NM_013723.2,1673-1691).
gaaggtggtcaaccttaat

SEQ ID NO: 693052 - DNA, 19 bp, Mus musculus
  siRNA target sequence for Podxl (NM_013723.2,1716-1734).
gtccctctggacaacttga

SEQ ID NO: 693053 - DNA, 19 bp, Mus musculus
  siRNA target sequence for Ptprcap (NM_016933.2,366-384).
cagaagattttgtgataga

SEQ ID NO: 693054 - DNA, 19 bp, Mus musculus
  siRNA target sequence for Sectm1 (NM_026907.2,235-253).
gctggcctactctgtaaca

SEQ ID NO: 693055 - DNA, 19 bp, Mus musculus
  siRNA target sequence for Sectm1 (NM_026907.2,236-254).
ctggcctactctgtaacat

SEQ ID NO: 693056 - DNA, 19 bp, Mus musculus
  siRNA target sequence for Sectm1 (NM_026907.2,307-325).
cctgaatgcctataaccat

SEQ ID NO: 693057 - DNA, 19 bp, Mus musculus
  siRNA target sequence for Sectm1 (NM_026907.2,346-364).
cactgagcatgaagtatct

SEQ ID NO: 693058 - DNA, 19 bp, Mus musculus
  siRNA target sequence for Sectm1 (NM_026907.2,348-366).
ctgagcatgaagtatctgt

SEQ ID NO: 693059 - DNA, 19 bp, Mus musculus
  siRNA target sequence for Sectm1 (NM_026907.2,350-368).
gagcatgaagtatctgtaa

SEQ ID NO: 693060 - DNA, 19 bp, Mus musculus
  siRNA target sequence for Sectm1 (NM_026907.2,353-371).
catgaagtatctgtaaaca

SEQ ID NO: 693061 - DNA, 19 bp, Mus musculus
  siRNA target sequence for Sectm1 (NM_026907.2,394-412).
ctgtaatatctccaacaat

SEQ ID NO: 693062 - DNA, 19 bp, Mus musculus
  siRNA target sequence for Sectm1 (NM_026907.2,396-414).
gtaatatctccaacaatct

SEQ ID NO: 693063 - DNA, 19 bp, Mus musculus
  siRNA target sequence for Sectm1 (NM_026907.2,422-440).
gtcaccattgagttggtta

SEQ ID NO: 693064 - DNA, 19 bp, Mus musculus
  siRNA target sequence for Sectm1 (NM_026907.2,436-454).
ggttaccagtaaaaagact

SEQ ID NO: 693065 - DNA, 19 bp, Mus musculus
  siRNA target sequence for Sectm1 (NM_026907.2,476-494).
cctccaggaaactactcta

SEQ ID NO: 693066 - DNA, 19 bp, Mus musculus
  siRNA target sequence for Sectm1 (NM_026907.2,477-495).
ctccaggaaactactctaa

SEQ ID NO: 693067 - DNA, 19 bp, Mus musculus
  siRNA target sequence for Sectm1 (NM_026907.2,482-500).
ggaaactactctaaggatt

SEQ ID NO: 693068 - DNA, 19 bp, Mus musculus
  siRNA target sequence for Sectm1 (NM_026907.2,497-515).
gattcatggcagcttcata

SEQ ID NO: 693069 - DNA, 19 bp, Mus musculus
  siRNA target sequence for Sectm1 (NM_026907.2,699-717).
cagtgcggacagaagttat

SEQ ID NO: 693070 - DNA, 19 bp, Mus musculus
  siRNA target sequence for Sectm1 (NM_026907.2,701-719).
gtgcggacagaagttatca

SEQ ID NO: 693071 - DNA, 19 bp, Mus musculus
  siRNA target sequence for Sectm1 (NM_026907.2,704-722).
cggacagaagttatcatca

SEQ ID NO: 693072 - DNA, 19 bp, Mus musculus
  siRNA target sequence for Sectm1 (NM_026907.2,753-771).
caggaatcggtgtattcgt

SEQ ID NO: 693073 - DNA, 19 bp, Mus musculus
  siRNA target sequence for Sectm1 (NM_026907.2,755-773).
ggaatcggtgtattcgttt

SEQ ID NO: 693074 - DNA, 19 bp, Mus musculus
  siRNA target sequence for Sectm1 (NM_026907.2,811-829).
gtcagtaccttgtctgatt

SEQ ID NO: 693075 - DNA, 19 bp, Mus musculus
  siRNA target sequence for Sectm1 (NM_026907.2,813-831).
cagtaccttgtctgattca

SEQ ID NO: 693076 - DNA, 19 bp, Mus musculus
  siRNA target sequence for Slc24a2 (NM_172426.1,404-422).
gagcactgtcccattttca

SEQ ID NO: 693077 - DNA, 19 bp, Mus musculus
  siRNA target sequence for Slc24a2 (NM_172426.1,498-516).
cagggtcaccgtcaaagaa

SEQ ID NO: 693078 - DNA, 19 bp, Mus musculus
  siRNA target sequence for Slc24a2 (NM_172426.1,510-528).
caaagaactctcttagact

SEQ ID NO: 693079 - DNA, 19 bp, Mus musculus
  siRNA target sequence for Slc24a2 (NM_172426.1,534-552).
gacaagattcgagattaca

SEQ ID NO: 693080 - DNA, 19 bp, Mus musculus
  siRNA target sequence for Slc24a2 (NM_172426.1,579-597).
gaccaagctgagaacagta

SEQ ID NO: 693081 - DNA, 19 bp, Mus musculus
  siRNA target sequence for Slc24a2 (NM_172426.1,672-690).
catgtcattgggatgatct

SEQ ID NO: 693082 - DNA, 19 bp, Mus musculus
  siRNA target sequence for Slc24a2 (NM_172426.1,681-699).
gggatgatctatatgttca

SEQ ID NO: 693083 - DNA, 19 bp, Mus musculus
  siRNA target sequence for Slc24a2 (NM_172426.1,682-700).
ggatgatctatatgttcat

SEQ ID NO: 693084 - DNA, 19 bp, Mus musculus
  siRNA target sequence for Slc24a2 (NM_172426.1,683-701).
gatgatctatatgttcata

SEQ ID NO: 693085 - DNA, 19 bp, Mus musculus
  siRNA target sequence for Slc24a2 (NM_172426.1,689-707).
ctatatgttcatagcatta

SEQ ID NO: 693086 - DNA, 19 bp, Mus musculus
  siRNA target sequence for Slc24a2 (NM_172426.1,709-727).
ccatcgtctgtgatgagtt

SEQ ID NO: 693087 - DNA, 19 bp, Mus musculus
  siRNA target sequence for Slc24a2 (NM_172426.1,713-731).
cgtctgtgatgagttcttt

SEQ ID NO: 693088 - DNA, 19 bp, Mus musculus
  siRNA target sequence for Slc24a2 (NM_172426.1,741-759).
ctaactgtcatcactgaaa

SEQ ID NO: 693089 - DNA, 19 bp, Mus musculus
  siRNA target sequence for Slc24a2 (NM_172426.1,809-827).
cgggtcagccccagaactt

SEQ ID NO: 693090 - DNA, 19 bp, Mus musculus
  siRNA target sequence for Slc24a2 (NM_172426.1,822-840).
gaacttttcacgtctctta

SEQ ID NO: 693091 - DNA, 19 bp, Mus musculus
  siRNA target sequence for Slc24a2 (NM_172426.1,835-853).
ctcttataggggtcttcat

SEQ ID NO: 693092 - DNA, 19 bp, Mus musculus
  siRNA target sequence for Slc24a2 (NM_172426.1,887-905).
gggttccgccgtgttcaat

SEQ ID NO: 693093 - DNA, 19 bp, Mus musculus
  siRNA target sequence for Slc24a2 (NM_172426.1,888-906).
ggttccgccgtgttcaata

SEQ ID NO: 693094 - DNA, 19 bp, Mus musculus
  siRNA target sequence for Slc24a2 (NM_172426.1,889-907).
gttccgccgtgttcaatat

SEQ ID NO: 693095 - DNA, 19 bp, Mus musculus
  siRNA target sequence for Slc24a2 (NM_172426.1,892-910).
ccgccgtgttcaatattct

SEQ ID NO: 693096 - DNA, 19 bp, Mus musculus
  siRNA target sequence for Slc24a2 (NM_172426.1,894-912).
gccgtgttcaatattctct

SEQ ID NO: 693097 - DNA, 19 bp, Mus musculus
  siRNA target sequence for Slc24a2 (NM_172426.1,895-913).
ccgtgttcaatattctctt

SEQ ID NO: 693098 - DNA, 19 bp, Mus musculus
  siRNA target sequence for Slc24a2 (NM_172426.1,896-914).
cgtgttcaatattctcttt

SEQ ID NO: 693099 - DNA, 19 bp, Mus musculus
  siRNA target sequence for Slc24a2 (NM_172426.1,926-944).
gtgtgctctgttttctaga

SEQ ID NO: 693100 - DNA, 19 bp, Mus musculus
  siRNA target sequence for Slc24a2 (NM_172426.1,1007-1025).
gctcatgttgatcacattt

SEQ ID NO: 693101 - DNA, 19 bp, Mus musculus
  siRNA target sequence for Slc24a2 (NM_172426.1,1021-1039).
catttttcctggataacgt

SEQ ID NO: 693102 - DNA, 19 bp, Mus musculus
  siRNA target sequence for Slc24a2 (NM_172426.1,1029-1047).
ctggataacgttatcatgt

SEQ ID NO: 693103 - DNA, 19 bp, Mus musculus
  siRNA target sequence for Slc24a2 (NM_172426.1,1053-1071).
gaaagcttactcctcttaa

SEQ ID NO: 693104 - DNA, 19 bp, Mus musculus
  siRNA target sequence for Slc24a2 (NM_172426.1,1139-1157).
gatatctcgcaataatgtt

SEQ ID NO: 693105 - DNA, 19 bp, Mus musculus
  siRNA target sequence for Slc24a2 (NM_172426.1,1325-1343).
cccactcgctgaagaactt

SEQ ID NO: 693106 - DNA, 19 bp, Mus musculus
  siRNA target sequence for Slc24a2 (NM_172426.1,1333-1351).
ctgaagaacttggatcata

SEQ ID NO: 693107 - DNA, 19 bp, Mus musculus
  siRNA target sequence for Slc24a2 (NM_172426.1,1344-1362).
ggatcatatggaaaactaa

SEQ ID NO: 693108 - DNA, 19 bp, Mus musculus
  siRNA target sequence for Slc24a2 (NM_172426.1,1466-1484).
gaatggggctgccaatcat

SEQ ID NO: 693109 - DNA, 19 bp, Mus musculus
  siRNA target sequence for Slc24a2 (NM_172426.1,1574-1592).
cctctcccacaacattgaa

SEQ ID NO: 693110 - DNA, 19 bp, Mus musculus
  siRNA target sequence for Slc24a2 (NM_172426.1,1684-1702).
ccaccttcctaatcgtttt

SEQ ID NO: 693111 - DNA, 19 bp, Mus musculus
  siRNA target sequence for Slc24a2 (NM_172426.1,1685-1703).
caccttcctaatcgttttt

SEQ ID NO: 693112 - DNA, 19 bp, Mus musculus
  siRNA target sequence for Slc24a2 (NM_172426.1,1796-1814).
ctggattgcagttttctca

SEQ ID NO: 693113 - DNA, 19 bp, Mus musculus
  siRNA target sequence for Slc24a2 (NM_172426.1,1850-1868).
gacaatcggcattagtgaa

SEQ ID NO: 693114 - DNA, 19 bp, Mus musculus
  siRNA target sequence for Slc24a2 (NM_172426.1,1857-1875).
ggcattagtgaagaaatca

SEQ ID NO: 693115 - DNA, 19 bp, Mus musculus
  siRNA target sequence for Slc24a2 (NM_172426.1,1858-1876).
gcattagtgaagaaatcat

SEQ ID NO: 693116 - DNA, 19 bp, Mus musculus
  siRNA target sequence for Slc24a2 (NM_172426.1,2143-2161).
gcaaatggcggatgaacaa

SEQ ID NO: 693117 - DNA, 19 bp, Mus musculus
  siRNA target sequence for Slc24a2 (NM_172426.1,2144-2162).
caaatggcggatgaacaaa

SEQ ID NO: 693118 - DNA, 19 bp, Mus musculus
  siRNA target sequence for Slc24a2 (NM_172426.1,2149-2167).
ggcggatgaacaaaatcct

SEQ ID NO: 693119 - DNA, 19 bp, Mus musculus
  siRNA target sequence for Slc24a2 (NM_172426.1,2165-2183).
cctcggcttcatcatgttt

SEQ ID NO: 693120 - DNA, 19 bp, Mus musculus
  siRNA target sequence for Slc24a2 (NM_172426.1,2213-2231).
cgtcctcctggaagacaaa

SEQ ID NO: 693121 - DNA, 19 bp, Mus musculus
  siRNA target sequence for Slitrk6 (NM_175499.2,554-572).
ggctcttgcgacactcttt

SEQ ID NO: 693122 - DNA, 19 bp, Mus musculus
  siRNA target sequence for Slitrk6 (NM_175499.2,556-574).
ctcttgcgacactctttgt

SEQ ID NO: 693123 - DNA, 19 bp, Mus musculus
  siRNA target sequence for Slitrk6 (NM_175499.2,558-576).
cttgcgacactctttgtaa

SEQ ID NO: 693124 - DNA, 19 bp, Mus musculus
  siRNA target sequence for Slitrk6 (NM_175499.2,562-580).
cgacactctttgtaattgt

SEQ ID NO: 693125 - DNA, 19 bp, Mus musculus
  siRNA target sequence for Slitrk6 (NM_175499.2,590-608).
gatggcataatgataataa

SEQ ID NO: 693126 - DNA, 19 bp, Mus musculus
  siRNA target sequence for Slitrk6 (NM_175499.2,662-680).
cgacctttccacttaagtt

SEQ ID NO: 693127 - DNA, 19 bp, Mus musculus
  siRNA target sequence for Slitrk6 (NM_175499.2,670-688).
ccacttaagtttattaaat

SEQ ID NO: 693128 - DNA, 19 bp, Mus musculus
  siRNA target sequence for Slitrk6 (NM_175499.2,704-722).
cttcacacgaacgactttt

SEQ ID NO: 693129 - DNA, 19 bp, Mus musculus
  siRNA target sequence for Slitrk6 (NM_175499.2,728-746).
cttaccaatgccctttcaa

SEQ ID NO: 693130 - DNA, 19 bp, Mus musculus
  siRNA target sequence for Slitrk6 (NM_175499.2,732-750).
ccaatgccctttcaataca

SEQ ID NO: 693131 - DNA, 19 bp, Mus musculus
  siRNA target sequence for Slitrk6 (NM_175499.2,744-762).
caatacaccttggatttaa

SEQ ID NO: 693132 - DNA, 19 bp, Mus musculus
  siRNA target sequence for Slitrk6 (NM_175499.2,749-767).
caccttggatttaacaata

SEQ ID NO: 693133 - DNA, 19 bp, Mus musculus
  siRNA target sequence for Slitrk6 (NM_175499.2,775-793).
catagagactggtgcattt

SEQ ID NO: 693134 - DNA, 19 bp, Mus musculus
  siRNA target sequence for Slitrk6 (NM_175499.2,798-816).
gccttgggcttcttaagca

SEQ ID NO: 693135 - DNA, 19 bp, Mus musculus
  siRNA target sequence for Slitrk6 (NM_175499.2,805-823).
gcttcttaagcaacttcat

SEQ ID NO: 693136 - DNA, 19 bp, Mus musculus
  siRNA target sequence for Slitrk6 (NM_175499.2,806-824).
cttcttaagcaacttcata

SEQ ID NO: 693137 - DNA, 19 bp, Mus musculus
  siRNA target sequence for Slitrk6 (NM_175499.2,809-827).
cttaagcaacttcatatca

SEQ ID NO: 693138 - DNA, 19 bp, Mus musculus
  siRNA target sequence for Slitrk6 (NM_175499.2,814-832).
gcaacttcatatcaatcat

SEQ ID NO: 693139 - DNA, 19 bp, Mus musculus
  siRNA target sequence for Slitrk6 (NM_175499.2,815-833).
caacttcatatcaatcata

SEQ ID NO: 693140 - DNA, 19 bp, Mus musculus
  siRNA target sequence for Slitrk6 (NM_175499.2,818-836).
cttcatatcaatcataatt

SEQ ID NO: 693141 - DNA, 19 bp, Mus musculus
  siRNA target sequence for Slitrk6 (NM_175499.2,899-917).
gataataatttcattacga

SEQ ID NO: 693142 - DNA, 19 bp, Mus musculus
  siRNA target sequence for Slitrk6 (NM_175499.2,995-1013).
cctccaaacatatttcgat

SEQ ID NO: 693143 - DNA, 19 bp, Mus musculus
  siRNA target sequence for Slitrk6 (NM_175499.2,1040-1058).
cgtgggaaccagttgcaaa

SEQ ID NO: 693144 - DNA, 19 bp, Mus musculus
  siRNA target sequence for Slitrk6 (NM_175499.2,1087-1105).
cattggccggatattggat

SEQ ID NO: 693145 - DNA, 19 bp, Mus musculus
  siRNA target sequence for Slitrk6 (NM_175499.2,1095-1113).
ggatattggatctccaatt

SEQ ID NO: 693146 - DNA, 19 bp, Mus musculus
  siRNA target sequence for Slitrk6 (NM_175499.2,1126-1144).
gtgggcctgcaattgtgaa

SEQ ID NO: 693147 - DNA, 19 bp, Mus musculus
  siRNA target sequence for Slitrk6 (NM_175499.2,1130-1148).
gcctgcaattgtgaattgt

SEQ ID NO: 693148 - DNA, 19 bp, Mus musculus
  siRNA target sequence for Slitrk6 (NM_175499.2,1140-1158).
gtgaattgttgcagctaaa

SEQ ID NO: 693149 - DNA, 19 bp, Mus musculus
  siRNA target sequence for Slitrk6 (NM_175499.2,1142-1160).
gaattgttgcagctaaaaa

SEQ ID NO: 693150 - DNA, 19 bp, Mus musculus
  siRNA target sequence for Slitrk6 (NM_175499.2,1154-1172).
ctaaaaaactggctagaaa

SEQ ID NO: 693151 - DNA, 19 bp, Mus musculus
  siRNA target sequence for Slitrk6 (NM_175499.2,1213-1231).
cagccctccacctttcaaa

SEQ ID NO: 693152 - DNA, 19 bp, Mus musculus
  siRNA target sequence for Slitrk6 (NM_175499.2,1269-1287).
gccctactccaccagtata

SEQ ID NO: 693153 - DNA, 19 bp, Mus musculus
  siRNA target sequence for Slitrk6 (NM_175499.2,1272-1290).
ctactccaccagtatacga

SEQ ID NO: 693154 - DNA, 19 bp, Mus musculus
  siRNA target sequence for Slitrk6 (NM_175499.2,1318-1336).
gctggccataacatcttca

SEQ ID NO: 693155 - DNA, 19 bp, Mus musculus
  siRNA target sequence for Slitrk6 (NM_175499.2,1319-1337).
ctggccataacatcttcaa

SEQ ID NO: 693156 - DNA, 19 bp, Mus musculus
  siRNA target sequence for Slitrk6 (NM_175499.2,1321-1339).
ggccataacatcttcaaca

SEQ ID NO: 693157 - DNA, 19 bp, Mus musculus
  siRNA target sequence for Slitrk6 (NM_175499.2,1348-1366).
ccgcctatcaagcaagaat

SEQ ID NO: 693158 - DNA, 19 bp, Mus musculus
  siRNA target sequence for Slitrk6 (NM_175499.2,1359-1377).
gcaagaatacatccatttt

SEQ ID NO: 693159 - DNA, 19 bp, Mus musculus
  siRNA target sequence for Slitrk6 (NM_175499.2,1400-1418).
ggtttgataccatacctta

SEQ ID NO: 693160 - DNA, 19 bp, Mus musculus
  siRNA target sequence for Slitrk6 (NM_175499.2,1454-1472).
cctatcccttgcaattgca

SEQ ID NO: 693161 - DNA, 19 bp, Mus musculus
  siRNA target sequence for Slitrk6 (NM_175499.2,1455-1473).
ctatcccttgcaattgcaa

SEQ ID NO: 693162 - DNA, 19 bp, Mus musculus
  siRNA target sequence for Slitrk6 (NM_175499.2,1459-1477).
cccttgcaattgcaaagtt

SEQ ID NO: 693163 - DNA, 19 bp, Mus musculus
  siRNA target sequence for Slitrk6 (NM_175499.2,1461-1479).
cttgcaattgcaaagttct

SEQ ID NO: 693164 - DNA, 19 bp, Mus musculus
  siRNA target sequence for Slitrk6 (NM_175499.2,1485-1503).
cttcggggcttcttatcca

SEQ ID NO: 693165 - DNA, 19 bp, Mus musculus
  siRNA target sequence for Slitrk6 (NM_175499.2,1504-1522).
ctgtcaggagcgcaatata

SEQ ID NO: 693166 - DNA, 19 bp, Mus musculus
  siRNA target sequence for Slitrk6 (NM_175499.2,1508-1526).
caggagcgcaatatagaaa

SEQ ID NO: 693167 - DNA, 19 bp, Mus musculus
  siRNA target sequence for Slitrk6 (NM_175499.2,1548-1566).
ctccacacaaccctagaaa

SEQ ID NO: 693168 - DNA, 19 bp, Mus musculus
  siRNA target sequence for Slitrk6 (NM_175499.2,1577-1595).
gcaggcaacatcattcaca

SEQ ID NO: 693169 - DNA, 19 bp, Mus musculus
  siRNA target sequence for Slitrk6 (NM_175499.2,1606-1624).
gtctgacctcacagactat

SEQ ID NO: 693170 - DNA, 19 bp, Mus musculus
  siRNA target sequence for Slitrk6 (NM_175499.2,1648-1666).
gggaaacaaccgcattgaa

SEQ ID NO: 693171 - DNA, 19 bp, Mus musculus
  siRNA target sequence for Slitrk6 (NM_175499.2,1670-1688).
ctggaagaaggatcgttta

SEQ ID NO: 693172 - DNA, 19 bp, Mus musculus
  siRNA target sequence for Slitrk6 (NM_175499.2,1698-1716).
cacgactccagaagcttta

SEQ ID NO: 693173 - DNA, 19 bp, Mus musculus
  siRNA target sequence for Slitrk6 (NM_175499.2,1701-1719).
gactccagaagctttatct

SEQ ID NO: 693174 - DNA, 19 bp, Mus musculus
  siRNA target sequence for Slitrk6 (NM_175499.2,1705-1723).
ccagaagctttatctcaat

SEQ ID NO: 693175 - DNA, 19 bp, Mus musculus
  siRNA target sequence for Slitrk6 (NM_175499.2,1730-1748).
catctgaccaaactcaata

SEQ ID NO: 693176 - DNA, 19 bp, Mus musculus
  siRNA target sequence for Slitrk6 (NM_175499.2,1773-1791).
gtctcgagtatttgtatct

SEQ ID NO: 693177 - DNA, 19 bp, Mus musculus
  siRNA target sequence for Slitrk6 (NM_175499.2,1798-1816).
caatgcggtaaaggaaata

SEQ ID NO: 693178 - DNA, 19 bp, Mus musculus
  siRNA target sequence for Slitrk6 (NM_175499.2,1834-1852).
cccaatgcctaaactgaaa

SEQ ID NO: 693179 - DNA, 19 bp, Mus musculus
  siRNA target sequence for Slitrk6 (NM_175499.2,1836-1854).
caatgcctaaactgaaagt

SEQ ID NO: 693180 - DNA, 19 bp, Mus musculus
  siRNA target sequence for Slitrk6 (NM_175499.2,1840-1858).
gcctaaactgaaagttctt

SEQ ID NO: 693181 - DNA, 19 bp, Mus musculus
  siRNA target sequence for Slitrk6 (NM_175499.2,1841-1859).
cctaaactgaaagttcttt

SEQ ID NO: 693182 - DNA, 19 bp, Mus musculus
  siRNA target sequence for Slitrk6 (NM_175499.2,1842-1860).
ctaaactgaaagttcttta

SEQ ID NO: 693183 - DNA, 19 bp, Mus musculus
  siRNA target sequence for Slitrk6 (NM_175499.2,1883-1901).
gttttaccggcacatatct

SEQ ID NO: 693184 - DNA, 19 bp, Mus musculus
  siRNA target sequence for Slitrk6 (NM_175499.2,1931-1949).
cttaaaacaaaccaattca

SEQ ID NO: 693185 - DNA, 19 bp, Mus musculus
  siRNA target sequence for Slitrk6 (NM_175499.2,1959-1977).
ctgtaagcaacatcttaga

SEQ ID NO: 693186 - DNA, 19 bp, Mus musculus
  siRNA target sequence for Slitrk6 (NM_175499.2,2031-2049).
cttgtgacttggttggatt

SEQ ID NO: 693187 - DNA, 19 bp, Mus musculus
  siRNA target sequence for Slitrk6 (NM_175499.2,2078-2096).
ggcaccatgactgatgata

SEQ ID NO: 693188 - DNA, 19 bp, Mus musculus
  siRNA target sequence for Slitrk6 (NM_175499.2,2079-2097).
gcaccatgactgatgatat

SEQ ID NO: 693189 - DNA, 19 bp, Mus musculus
  siRNA target sequence for Slitrk6 (NM_175499.2,2082-2100).
ccatgactgatgatatcct

SEQ ID NO: 693190 - DNA, 19 bp, Mus musculus
  siRNA target sequence for Slitrk6 (NM_175499.2,2143-2161).
cctcaacagtgatcttctt

SEQ ID NO: 693191 - DNA, 19 bp, Mus musculus
  siRNA target sequence for Slitrk6 (NM_175499.2,2159-2177).
ctttgccctggtttagtga

SEQ ID NO: 693192 - DNA, 19 bp, Mus musculus
  siRNA target sequence for Slitrk6 (NM_175499.2,2163-2181).
gccctggtttagtgaataa

SEQ ID NO: 693193 - DNA, 19 bp, Mus musculus
  siRNA target sequence for Slitrk6 (NM_175499.2,2191-2209).
gccaacccagactacttat

SEQ ID NO: 693194 - DNA, 19 bp, Mus musculus
  siRNA target sequence for Slitrk6 (NM_175499.2,2196-2214).
cccagactacttatgttat

SEQ ID NO: 693195 - DNA, 19 bp, Mus musculus
  siRNA target sequence for Slitrk6 (NM_175499.2,2197-2215).
ccagactacttatgttatt

SEQ ID NO: 693196 - DNA, 19 bp, Mus musculus
  siRNA target sequence for Slitrk6 (NM_175499.2,2227-2245).
cacagtggcggcagataca

SEQ ID NO: 693197 - DNA, 19 bp, Mus musculus
  siRNA target sequence for Slitrk6 (NM_175499.2,2246-2264).
gctagtacactcttcagtt

SEQ ID NO: 693198 - DNA, 19 bp, Mus musculus
  siRNA target sequence for Slitrk6 (NM_175499.2,2279-2297).
gtgcccctgtcagttctaa

SEQ ID NO: 693199 - DNA, 19 bp, Mus musculus
  siRNA target sequence for Slitrk6 (NM_175499.2,2308-2326).
cctgattgtgttcataact

SEQ ID NO: 693200 - DNA, 19 bp, Mus musculus
  siRNA target sequence for Slitrk6 (NM_175499.2,2431-2449).
cttgcagtacagcatgtat

SEQ ID NO: 693201 - DNA, 19 bp, Mus musculus
  siRNA target sequence for Slitrk6 (NM_175499.2,2547-2565).
cctttggtccaaagcattt

SEQ ID NO: 693202 - DNA, 19 bp, Mus musculus
  siRNA target sequence for Slitrk6 (NM_175499.2,2625-2643).
gcctgttagaacgagaaaa

SEQ ID NO: 693203 - DNA, 19 bp, Mus musculus
  siRNA target sequence for Slitrk6 (NM_175499.2,2626-2644).
cctgttagaacgagaaaat

SEQ ID NO: 693204 - DNA, 19 bp, Mus musculus
  siRNA target sequence for Slitrk6 (NM_175499.2,2629-2647).
gttagaacgagaaaatcat

SEQ ID NO: 693205 - DNA, 19 bp, Mus musculus
  siRNA target sequence for Slitrk6 (NM_175499.2,2656-2674).
cacaggttcaaatatgaaa

SEQ ID NO: 693206 - DNA, 19 bp, Mus musculus
  siRNA target sequence for Slitrk6 (NM_175499.2,2685-2703).
cagaccaatcaacagattt

SEQ ID NO: 693207 - DNA, 19 bp, Mus musculus
  siRNA target sequence for Slitrk6 (NM_175499.2,2694-2712).
caacagatttcatatcctt

SEQ ID NO: 693208 - DNA, 19 bp, Mus musculus
  siRNA target sequence for Slitrk6 (NM_175499.2,2781-2799).
cagagtacctaagaaaaaa

SEQ ID NO: 693209 - DNA, 19 bp, Mus musculus
  siRNA target sequence for Slitrk6 (NM_175499.2,2785-2803).
gtacctaagaaaaaatctt

SEQ ID NO: 693210 - DNA, 19 bp, Mus musculus
  siRNA target sequence for Slitrk6 (NM_175499.2,2841-2859).
gagcccacgaggagctaaa

SEQ ID NO: 693211 - DNA, 19 bp, Mus musculus
  siRNA target sequence for Slitrk6 (NM_175499.2,2843-2861).
gcccacgaggagctaaaat

SEQ ID NO: 693212 - DNA, 19 bp, Mus musculus
  siRNA target sequence for Slitrk6 (NM_175499.2,2844-2862).
cccacgaggagctaaaatt

SEQ ID NO: 693213 - DNA, 19 bp, Mus musculus
  siRNA target sequence for Slitrk6 (NM_175499.2,2845-2863).
ccacgaggagctaaaatta

SEQ ID NO: 693214 - DNA, 19 bp, Mus musculus
  siRNA target sequence for Slitrk6 (NM_175499.2,2846-2864).
cacgaggagctaaaattaa

SEQ ID NO: 693215 - DNA, 19 bp, Mus musculus
  siRNA target sequence for Slitrk6 (NM_175499.2,2851-2869).
ggagctaaaattaatggaa

SEQ ID NO: 693216 - DNA, 19 bp, Mus musculus
  siRNA target sequence for Slitrk6 (NM_175499.2,2902-2920).
ggtagaacagactaaaaat

SEQ ID NO: 693217 - DNA, 19 bp, Mus musculus
  siRNA target sequence for Slitrk6 (NM_175499.2,2909-2927).
cagactaaaaatgaatact

SEQ ID NO: 693218 - DNA, 19 bp, Mus musculus
  siRNA target sequence for Slitrk6 (NM_175499.2,2952-2970).
ctgaacccgactacttaga

SEQ ID NO: 693219 - DNA, 19 bp, Mus musculus
  siRNA target sequence for Slitrk6 (NM_175499.2,2972-2990).
gtcttggagcagcaaacat

SEQ ID NO: 693220 - DNA, 19 bp, Mus musculus
  siRNA target sequence for Slmap (NM_032008.2,94-112).
gctccaggcaaaaatcgaa

SEQ ID NO: 693221 - DNA, 19 bp, Mus musculus
  siRNA target sequence for Slmap (NM_032008.2,229-247).
ccaagggcatctaaccaaa

SEQ ID NO: 693222 - DNA, 19 bp, Mus musculus
  siRNA target sequence for Slmap (NM_032008.2,290-308).
gcaaaggaatccgacttat

SEQ ID NO: 693223 - DNA, 19 bp, Mus musculus
  siRNA target sequence for Slmap (NM_032008.2,367-385).
ggatgagcaagacctaaat

SEQ ID NO: 693224 - DNA, 19 bp, Mus musculus
  siRNA target sequence for Slmap (NM_032008.2,400-418).
ggtgtctctattaaaagat

SEQ ID NO: 693225 - DNA, 19 bp, Mus musculus
  siRNA target sequence for Slmap (NM_032008.2,425-443).
cagggtacccagtcagaaa

SEQ ID NO: 693226 - DNA, 19 bp, Mus musculus
  siRNA target sequence for Slmap (NM_032008.2,427-445).
gggtacccagtcagaaact

SEQ ID NO: 693227 - DNA, 19 bp, Mus musculus
  siRNA target sequence for Slmap (NM_032008.2,464-482).
cagcatcttcgcaaagaat

SEQ ID NO: 693228 - DNA, 19 bp, Mus musculus
  siRNA target sequence for Slmap (NM_032008.2,493-511).
ccaggagctagctagaaca

SEQ ID NO: 693229 - DNA, 19 bp, Mus musculus
  siRNA target sequence for Slmap (NM_032008.2,494-512).
caggagctagctagaacaa

SEQ ID NO: 693230 - DNA, 19 bp, Mus musculus
  siRNA target sequence for Slmap (NM_032008.2,503-521).
gctagaacaagtaaacaaa

SEQ ID NO: 693231 - DNA, 19 bp, Mus musculus
  siRNA target sequence for Slmap (NM_032008.2,554-572).
gaacgaaaagcctatcgaa

SEQ ID NO: 693232 - DNA, 19 bp, Mus musculus
  siRNA target sequence for Slmap (NM_032008.2,564-582).
cctatcgaaatcaagttga

SEQ ID NO: 693233 - DNA, 19 bp, Mus musculus
  siRNA target sequence for Slmap (NM_032008.2,565-583).
ctatcgaaatcaagttgaa

SEQ ID NO: 693234 - DNA, 19 bp, Mus musculus
  siRNA target sequence for Slmap (NM_032008.2,569-587).
cgaaatcaagttgaagaat

SEQ ID NO: 693235 - DNA, 19 bp, Mus musculus
  siRNA target sequence for Slmap (NM_032008.2,676-694).
ctccagcacaagagataaa

SEQ ID NO: 693236 - DNA, 19 bp, Mus musculus
  siRNA target sequence for Slmap (NM_032008.2,681-699).
gcacaagagataaattgct

SEQ ID NO: 693237 - DNA, 19 bp, Mus musculus
  siRNA target sequence for Slmap (NM_032008.2,702-720).
gtgcccaagatgagatttt

SEQ ID NO: 693238 - DNA, 19 bp, Mus musculus
  siRNA target sequence for Slmap (NM_032008.2,757-775).
gcgggacactgactttgtt

SEQ ID NO: 693239 - DNA, 19 bp, Mus musculus
  siRNA target sequence for Slmap (NM_032008.2,758-776).
cgggacactgactttgttt

SEQ ID NO: 693240 - DNA, 19 bp, Mus musculus
  siRNA target sequence for Slmap (NM_032008.2,834-852).
cgtctgaatacgagaatga

SEQ ID NO: 693241 - DNA, 19 bp, Mus musculus
  siRNA target sequence for Slmap (NM_032008.2,835-853).
gtctgaatacgagaatgaa

SEQ ID NO: 693242 - DNA, 19 bp, Mus musculus
  siRNA target sequence for Slmap (NM_032008.2,839-857).
gaatacgagaatgaaatca

SEQ ID NO: 693243 - DNA, 19 bp, Mus musculus
  siRNA target sequence for Slmap (NM_032008.2,978-996).
cggaatgccattctctaaa

SEQ ID NO: 693244 - DNA, 19 bp, Mus musculus
  siRNA target sequence for Slmap (NM_032008.2,1126-1144).
gcaagtgggatccttgaaa

SEQ ID NO: 693245 - DNA, 19 bp, Mus musculus
  siRNA target sequence for Slmap (NM_032008.2,1164-1182).
cagctgacctaaaaactct

SEQ ID NO: 693246 - DNA, 19 bp, Mus musculus
  siRNA target sequence for Slmap (NM_032008.2,1247-1265).
ctctcagaactgaagttga

SEQ ID NO: 693247 - DNA, 19 bp, Mus musculus
  siRNA target sequence for Slmap (NM_032008.2,1285-1303).
ggaaaagcaatcaatcaca

SEQ ID NO: 693248 - DNA, 19 bp, Mus musculus
  siRNA target sequence for Slmap (NM_032008.2,1339-1357).
gctgcgagagaaaggaaat

SEQ ID NO: 693249 - DNA, 19 bp, Mus musculus
  siRNA target sequence for Slmap (NM_032008.2,1342-1360).
gcgagagaaaggaaataat

SEQ ID NO: 693250 - DNA, 19 bp, Mus musculus
  siRNA target sequence for Snn (NM_009223.1,119-137).
gggtggtaacggtcattgt

SEQ ID NO: 693251 - DNA, 19 bp, Mus musculus
  siRNA target sequence for Snn (NM_009223.1,252-270).
gacaaaggagccctttcta

SEQ ID NO: 693252 - DNA, 19 bp, Mus musculus
  siRNA target sequence for Snn (NM_009223.1,254-272).
caaaggagccctttctact

SEQ ID NO: 693253 - DNA, 19 bp, Mus musculus
  siRNA target sequence for Spn (NM_009259.1,204-222).
gaccacaatcccagtttct

SEQ ID NO: 693254 - DNA, 19 bp, Mus musculus
  siRNA target sequence for Spn (NM_009259.1,206-224).
ccacaatcccagtttcttt

SEQ ID NO: 693255 - DNA, 19 bp, Mus musculus
  siRNA target sequence for Spn (NM_009259.1,225-243).
gacccccttggaaactact

SEQ ID NO: 693256 - DNA, 19 bp, Mus musculus
  siRNA target sequence for Spn (NM_009259.1,228-246).
ccccttggaaactactgaa

SEQ ID NO: 693257 - DNA, 19 bp, Mus musculus
  siRNA target sequence for Spn (NM_009259.1,229-247).
cccttggaaactactgaat

SEQ ID NO: 693258 - DNA, 19 bp, Mus musculus
  siRNA target sequence for Spn (NM_009259.1,230-248).
ccttggaaactactgaatt

SEQ ID NO: 693259 - DNA, 19 bp, Mus musculus
  siRNA target sequence for Spn (NM_009259.1,234-252).
ggaaactactgaattgtct

SEQ ID NO: 693260 - DNA, 19 bp, Mus musculus
  siRNA target sequence for Spn (NM_009259.1,235-253).
gaaactactgaattgtctt

SEQ ID NO: 693261 - DNA, 19 bp, Mus musculus
  siRNA target sequence for Spn (NM_009259.1,433-451).
ggaactgcagcatctacat

SEQ ID NO: 693262 - DNA, 19 bp, Mus musculus
  siRNA target sequence for Spn (NM_009259.1,443-461).
catctacatctatctctaa

SEQ ID NO: 693263 - DNA, 19 bp, Mus musculus
  siRNA target sequence for Spn (NM_009259.1,519-537).
ctctgtggctacaacagta

SEQ ID NO: 693264 - DNA, 19 bp, Mus musculus
  siRNA target sequence for Spn (NM_009259.1,655-673).
gcccgtggcacctcagttt

SEQ ID NO: 693265 - DNA, 19 bp, Mus musculus
  siRNA target sequence for Spn (NM_009259.1,666-684).
ctcagtttccagcagaaaa

SEQ ID NO: 693266 - DNA, 19 bp, Mus musculus
  siRNA target sequence for Spn (NM_009259.1,852-870).
cctgagcggaggaggaaaa

SEQ ID NO: 693267 - DNA, 19 bp, Mus musculus
  siRNA target sequence for Spn (NM_009259.1,1029-1047).
gtctcgccagggctcttta

SEQ ID NO: 693268 - DNA, 19 bp, Mus musculus
  siRNA target sequence for Spn (NM_009259.1,1031-1049).
ctcgccagggctctttagt

SEQ ID NO: 693269 - DNA, 19 bp, Mus musculus
  siRNA target sequence for Spn (NM_009259.1,1034-1052).
gccagggctctttagtact

SEQ ID NO: 693270 - DNA, 19 bp, Mus musculus
  siRNA target sequence for Spn (NM_009259.1,1035-1053).
ccagggctctttagtacta

SEQ ID NO: 693271 - DNA, 19 bp, Mus musculus
  siRNA target sequence for Spn (NM_009259.1,1038-1056).
gggctctttagtactagaa

SEQ ID NO: 693272 - DNA, 19 bp, Mus musculus
  siRNA target sequence for Spn (NM_009259.1,1149-1167).
cggtccacaagccaaagat

SEQ ID NO: 693273 - DNA, 19 bp, Mus musculus
  siRNA target sequence for Spn (NM_009259.1,1170-1188).
ggccgcacctcaatctcta

SEQ ID NO: 693274 - DNA, 19 bp, Mus musculus
  siRNA target sequence for Spn (NM_009259.1,1171-1189).
gccgcacctcaatctctat

SEQ ID NO: 693275 - DNA, 19 bp, Mus musculus
  siRNA target sequence for Steap (NM_027399.1,197-215).
gagacgagcatgctgaaaa

SEQ ID NO: 693276 - DNA, 19 bp, Mus musculus
  siRNA target sequence for Steap (NM_027399.1,307-325).
ctggcgcttgccagtgaaa

SEQ ID NO: 693277 - DNA, 19 bp, Mus musculus
  siRNA target sequence for Steap (NM_027399.1,309-327).
ggcgcttgccagtgaaagt

SEQ ID NO: 693278 - DNA, 19 bp, Mus musculus
  siRNA target sequence for Steap (NM_027399.1,322-340).
gaaagtcgctgccatcata

SEQ ID NO: 693279 - DNA, 19 bp, Mus musculus
  siRNA target sequence for Steap (NM_027399.1,326-344).
gtcgctgccatcatatcat

SEQ ID NO: 693280 - DNA, 19 bp, Mus musculus
  siRNA target sequence for Steap (NM_027399.1,379-397).
catctacccgttagtaact

SEQ ID NO: 693281 - DNA, 19 bp, Mus musculus
  siRNA target sequence for Steap (NM_027399.1,392-410).
gtaacttcccgtgaacaat

SEQ ID NO: 693282 - DNA, 19 bp, Mus musculus
  siRNA target sequence for Steap (NM_027399.1,484-502).
ctatttgccaggagagtta

SEQ ID NO: 693283 - DNA, 19 bp, Mus musculus
  siRNA target sequence for Steap (NM_027399.1,512-530).
gtacagcttcgcaatggaa

SEQ ID NO: 693284 - DNA, 19 bp, Mus musculus
  siRNA target sequence for Steap (NM_027399.1,521-539).
cgcaatggaaccaagtaca

SEQ ID NO: 693285 - DNA, 19 bp, Mus musculus
  siRNA target sequence for Steap (NM_027399.1,544-562).
gttcccaccctggttagat

SEQ ID NO: 693286 - DNA, 19 bp, Mus musculus
  siRNA target sequence for Steap (NM_027399.1,547-565).
cccaccctggttagataga

SEQ ID NO: 693287 - DNA, 19 bp, Mus musculus
  siRNA target sequence for Steap (NM_027399.1,612-630).
ctgtgctgcacgctgttta

SEQ ID NO: 693288 - DNA, 19 bp, Mus musculus
  siRNA target sequence for Steap (NM_027399.1,684-702).
cttacaaacaggttcaaca

SEQ ID NO: 693289 - DNA, 19 bp, Mus musculus
  siRNA target sequence for Steap (NM_027399.1,717-735).
cctgggtagagcatgatgt

SEQ ID NO: 693290 - DNA, 19 bp, Mus musculus
  siRNA target sequence for Steap (NM_027399.1,818-836).
gtgagcgactctttaacct

SEQ ID NO: 693291 - DNA, 19 bp, Mus musculus
  siRNA target sequence for Steap (NM_027399.1,837-855).
ggagagaatttcactatat

SEQ ID NO: 693292 - DNA, 19 bp, Mus musculus
  siRNA target sequence for Steap (NM_027399.1,870-888).
gaattgtctctcttcttct

SEQ ID NO: 693293 - DNA, 19 bp, Mus musculus
  siRNA target sequence for Steap (NM_027399.1,894-912).
cagtacacgctttggtttt

SEQ ID NO: 693294 - DNA, 19 bp, Mus musculus
  siRNA target sequence for Steap (NM_027399.1,907-925).
ggtttttgcctggaataaa

SEQ ID NO: 693295 - DNA, 19 bp, Mus musculus
  siRNA target sequence for Steap (NM_027399.1,908-926).
gtttttgcctggaataaat

SEQ ID NO: 693296 - DNA, 19 bp, Mus musculus
  siRNA target sequence for Steap (NM_027399.1,918-936).
ggaataaatgggtagatgt

SEQ ID NO: 693297 - DNA, 19 bp, Mus musculus
  siRNA target sequence for Steap (NM_027399.1,927-945).
gggtagatgtcagtcaatt

SEQ ID NO: 693298 - DNA, 19 bp, Mus musculus
  siRNA target sequence for Steap (NM_027399.1,928-946).
ggtagatgtcagtcaattt

SEQ ID NO: 693299 - DNA, 19 bp, Mus musculus
  siRNA target sequence for Steap (NM_027399.1,932-950).
gatgtcagtcaatttgtat

SEQ ID NO: 693300 - DNA, 19 bp, Mus musculus
  siRNA target sequence for Steap (NM_027399.1,952-970).
gtacatgcctccgactttt

SEQ ID NO: 693301 - DNA, 19 bp, Mus musculus
  siRNA target sequence for Steap (NM_027399.1,966-984).
cttttatgatagctgtttt

SEQ ID NO: 693302 - DNA, 19 bp, Mus musculus
  siRNA target sequence for Steap (NM_027399.1,989-1007).
ccaactcttgtcctgatat

SEQ ID NO: 693303 - DNA, 19 bp, Mus musculus
  siRNA target sequence for Steap (NM_027399.1,1045-1063).
gatactgaagattagatgt

SEQ ID NO: 693304 - DNA, 19 bp, Mus musculus
  siRNA target sequence for Steap (NM_027399.1,1073-1091).
gatgtcagcaaaattaaca

SEQ ID NO: 693305 - DNA, 19 bp, Mus musculus
  siRNA target sequence for Syngr1 (NM_009303.1,539-557).
ctggccgtacgcagattca

SEQ ID NO: 693306 - DNA, 19 bp, Mus musculus
  siRNA target sequence for Syngr2 (NM_009304.1,182-200).
caacattcacacatctgat

SEQ ID NO: 693307 - DNA, 19 bp, Mus musculus
  siRNA target sequence for Syngr2 (NM_009304.1,185-203).
cattcacacatctgatcaa

SEQ ID NO: 693308 - DNA, 19 bp, Mus musculus
  siRNA target sequence for Syngr2 (NM_009304.1,189-207).
cacacatctgatcaactat

SEQ ID NO: 693309 - DNA, 19 bp, Mus musculus
  siRNA target sequence for Syngr2 (NM_009304.1,553-571).
gagtggatgccttcattca

SEQ ID NO: 693310 - DNA, 19 bp, Mus musculus
  siRNA target sequence for Syngr2 (NM_009304.1,625-643).
gtgcctccgtggaaaacta

SEQ ID NO: 693311 - DNA, 19 bp, Mus musculus
  siRNA target sequence for Tde1 (NM_012032.2,176-194).
gttgctgtcccatcagtaa

SEQ ID NO: 693312 - DNA, 19 bp, Mus musculus
  siRNA target sequence for Tde1 (NM_012032.2,180-198).
ctgtcccatcagtaagaat

SEQ ID NO: 693313 - DNA, 19 bp, Mus musculus
  siRNA target sequence for Tde1 (NM_012032.2,184-202).
cccatcagtaagaattcca

SEQ ID NO: 693314 - DNA, 19 bp, Mus musculus
  siRNA target sequence for Tde1 (NM_012032.2,203-221).
ctgtaactcggctcatcta

SEQ ID NO: 693315 - DNA, 19 bp, Mus musculus
  siRNA target sequence for Tde1 (NM_012032.2,250-268).
gtgtcttgcatcatgatga

SEQ ID NO: 693316 - DNA, 19 bp, Mus musculus
  siRNA target sequence for Tde1 (NM_012032.2,264-282).
gatgacagaaggcatacaa

SEQ ID NO: 693317 - DNA, 19 bp, Mus musculus
  siRNA target sequence for Tde1 (NM_012032.2,325-343).
caaatcaagatggttgata

SEQ ID NO: 693318 - DNA, 19 bp, Mus musculus
  siRNA target sequence for Tde1 (NM_012032.2,364-382).
gacgtgctggtcggtttta

SEQ ID NO: 693319 - DNA, 19 bp, Mus musculus
  siRNA target sequence for Tde1 (NM_012032.2,385-403).
gctgtgtatcggatcaact

SEQ ID NO: 693320 - DNA, 19 bp, Mus musculus
  siRNA target sequence for Tde1 (NM_012032.2,386-404).
ctgtgtatcggatcaactt

SEQ ID NO: 693321 - DNA, 19 bp, Mus musculus
  siRNA target sequence for Tde1 (NM_012032.2,481-499).
gtgcacaacgggttttggt

SEQ ID NO: 693322 - DNA, 19 bp, Mus musculus
  siRNA target sequence for Tde1 (NM_012032.2,490-508).
gggttttggttcttcaaaa

SEQ ID NO: 693323 - DNA, 19 bp, Mus musculus
  siRNA target sequence for Tde1 (NM_012032.2,504-522).
caaaatcgctgccattatt

SEQ ID NO: 693324 - DNA, 19 bp, Mus musculus
  siRNA target sequence for Tde1 (NM_012032.2,514-532).
gccattattggtatcatga

SEQ ID NO: 693325 - DNA, 19 bp, Mus musculus
  siRNA target sequence for Tde1 (NM_012032.2,515-533).
ccattattggtatcatgat

SEQ ID NO: 693326 - DNA, 19 bp, Mus musculus
  siRNA target sequence for Tde1 (NM_012032.2,516-534).
cattattggtatcatgatt

SEQ ID NO: 693327 - DNA, 19 bp, Mus musculus
  siRNA target sequence for Tde1 (NM_012032.2,575-593).
ggtttgttgctggaatgtt

SEQ ID NO: 693328 - DNA, 19 bp, Mus musculus
  siRNA target sequence for Tde1 (NM_012032.2,858-876).
gtccatcctccctaaagtt

SEQ ID NO: 693329 - DNA, 19 bp, Mus musculus
  siRNA target sequence for Tde1 (NM_012032.2,860-878).
ccatcctccctaaagttca

SEQ ID NO: 693330 - DNA, 19 bp, Mus musculus
  siRNA target sequence for Tde1 (NM_012032.2,869-887).
ctaaagttcaggaacatca

SEQ ID NO: 693331 - DNA, 19 bp, Mus musculus
  siRNA target sequence for Tde1 (NM_012032.2,999-1017).
catcatcacacacttaact

SEQ ID NO: 693332 - DNA, 19 bp, Mus musculus
  siRNA target sequence for Tde1 (NM_012032.2,1125-1143).
ctttgttttctgccttata

SEQ ID NO: 693333 - DNA, 19 bp, Mus musculus
  siRNA target sequence for Tde1 (NM_012032.2,1163-1181).
cgagcaacagccaagttaa

SEQ ID NO: 693334 - DNA, 19 bp, Mus musculus
  siRNA target sequence for Tde1 (NM_012032.2,1166-1184).
gcaacagccaagttaacaa

SEQ ID NO: 693335 - DNA, 19 bp, Mus musculus
  siRNA target sequence for Tde1 (NM_012032.2,1200-1218).
gagtgacagtgttatcctt

SEQ ID NO: 693336 - DNA, 19 bp, Mus musculus
  siRNA target sequence for Tde1 (NM_012032.2,1227-1245).
caccaatggagccaatgat

SEQ ID NO: 693337 - DNA, 19 bp, Mus musculus
  siRNA target sequence for Tde1 (NM_012032.2,1288-1306).
gagggggtgcagtatagct

SEQ ID NO: 693338 - DNA, 19 bp, Mus musculus
  siRNA target sequence for Tde1 (NM_012032.2,1376-1394).
gccctgatgccaaattcca

SEQ ID NO: 693339 - DNA, 19 bp, Mus musculus
  siRNA target sequence for Tde1 (NM_012032.2,1413-1431).
gctagctgtgtggttcaaa

SEQ ID NO: 693340 - DNA, 19 bp, Mus musculus
  siRNA target sequence for Tde1 (NM_012032.2,1414-1432).
ctagctgtgtggttcaaaa

SEQ ID NO: 693341 - DNA, 19 bp, Mus musculus
  siRNA target sequence for Tde2 (NM_019760.1,158-176).
ccactgtgactagattgat

SEQ ID NO: 693342 - DNA, 19 bp, Mus musculus
  siRNA target sequence for Tde2 (NM_019760.1,170-188).
gattgatctacgcactttt

SEQ ID NO: 693343 - DNA, 19 bp, Mus musculus
  siRNA target sequence for Tde2 (NM_019760.1,189-207).
cttgctcgtcggagtatgt

SEQ ID NO: 693344 - DNA, 19 bp, Mus musculus
  siRNA target sequence for Tde2 (NM_019760.1,192-210).
gctcgtcggagtatgtgta

SEQ ID NO: 693345 - DNA, 19 bp, Mus musculus
  siRNA target sequence for Tde2 (NM_019760.1,273-291).
gaatgagaaaggtgttgtt

SEQ ID NO: 693346 - DNA, 19 bp, Mus musculus
  siRNA target sequence for Tde2 (NM_019760.1,284-302).
gtgttgttccctgtaatat

SEQ ID NO: 693347 - DNA, 19 bp, Mus musculus
  siRNA target sequence for Tde2 (NM_019760.1,361-379).
ctcctctctttactaatga

SEQ ID NO: 693348 - DNA, 19 bp, Mus musculus
  siRNA target sequence for Tde2 (NM_019760.1,364-382).
ctctctttactaatgatca

SEQ ID NO: 693349 - DNA, 19 bp, Mus musculus
  siRNA target sequence for Tde2 (NM_019760.1,410-428).
cggcagtccacaatggatt

SEQ ID NO: 693350 - DNA, 19 bp, Mus musculus
  siRNA target sequence for Tde2 (NM_019760.1,445-463).
gctacagcagttgcaatta

SEQ ID NO: 693351 - DNA, 19 bp, Mus musculus
  siRNA target sequence for Tde2 (NM_019760.1,446-464).
ctacagcagttgcaattat

SEQ ID NO: 693352 - DNA, 19 bp, Mus musculus
  siRNA target sequence for Tde2 (NM_019760.1,546-564).
ccttatacaactagtctta

SEQ ID NO: 693353 - DNA, 19 bp, Mus musculus
  siRNA target sequence for Tde2 (NM_019760.1,597-615).
gtgggttgaaaaaatggaa

SEQ ID NO: 693354 - DNA, 19 bp, Mus musculus
  siRNA target sequence for Tde2 (NM_019760.1,616-634).
gaagggaactcaagatgtt

SEQ ID NO: 693355 - DNA, 19 bp, Mus musculus
  siRNA target sequence for Tde2 (NM_019760.1,621-639).
gaactcaagatgttggtat

SEQ ID NO: 693356 - DNA, 19 bp, Mus musculus
  siRNA target sequence for Tde2 (NM_019760.1,655-673).
gctacagctctgaattact

SEQ ID NO: 693357 - DNA, 19 bp, Mus musculus
  siRNA target sequence for Tde2 (NM_019760.1,656-674).
ctacagctctgaattactt

SEQ ID NO: 693358 - DNA, 19 bp, Mus musculus
  siRNA target sequence for Tde2 (NM_019760.1,685-703).
gttgccgtcgtgctattct

SEQ ID NO: 693359 - DNA, 19 bp, Mus musculus
  siRNA target sequence for Tde2 (NM_019760.1,689-707).
ccgtcgtgctattctttgt

SEQ ID NO: 693360 - DNA, 19 bp, Mus musculus
  siRNA target sequence for Tde2 (NM_019760.1,691-709).
gtcgtgctattctttgtct

SEQ ID NO: 693361 - DNA, 19 bp, Mus musculus
  siRNA target sequence for Tde2 (NM_019760.1,746-764).
cgttcatcagtgtcaacat

SEQ ID NO: 693362 - DNA, 19 bp, Mus musculus
  siRNA target sequence for Tde2 (NM_019760.1,804-822).
caagatccaggaatcacaa

SEQ ID NO: 693363 - DNA, 19 bp, Mus musculus
  siRNA target sequence for Tde2 (NM_019760.1,837-855).
gttacagtcgtcagtaatt

SEQ ID NO: 693364 - DNA, 19 bp, Mus musculus
  siRNA target sequence for Tde2 (NM_019760.1,859-877).
gtctacacaatgtatttga

SEQ ID NO: 693365 - DNA, 19 bp, Mus musculus
  siRNA target sequence for Tde2 (NM_019760.1,898-916).
gaaccagaaacaaattgca

SEQ ID NO: 693366 - DNA, 19 bp, Mus musculus
  siRNA target sequence for Tde2 (NM_019760.1,950-968).
ccacaaggcctattccaaa

SEQ ID NO: 693367 - DNA, 19 bp, Mus musculus
  siRNA target sequence for Tde2 (NM_019760.1,1004-1022).
gaattataggacttgttct

SEQ ID NO: 693368 - DNA, 19 bp, Mus musculus
  siRNA target sequence for Tde2 (NM_019760.1,1030-1048).
ctgtgtgtgttttattcga

SEQ ID NO: 693369 - DNA, 19 bp, Mus musculus
  siRNA target sequence for Tde2 (NM_019760.1,1062-1080).
caacaacagtcaggttaat

SEQ ID NO: 693370 - DNA, 19 bp, Mus musculus
  siRNA target sequence for Tde2 (NM_019760.1,1075-1093).
gttaataagctgactctaa

SEQ ID NO: 693371 - DNA, 19 bp, Mus musculus
  siRNA target sequence for Tde2 (NM_019760.1,1083-1101).
gctgactctaacaagtgat

SEQ ID NO: 693372 - DNA, 19 bp, Mus musculus
  siRNA target sequence for Tde2 (NM_019760.1,1097-1115).
gtgatgagtcaacattgat

SEQ ID NO: 693373 - DNA, 19 bp, Mus musculus
  siRNA target sequence for Tde2 (NM_019760.1,1131-1149).
cagaagtgacggatcacta

SEQ ID NO: 693374 - DNA, 19 bp, Mus musculus
  siRNA target sequence for Tde2 (NM_019760.1,1136-1154).
gtgacggatcactagatga

SEQ ID NO: 693375 - DNA, 19 bp, Mus musculus
  siRNA target sequence for Tde2 (NM_019760.1,1164-1182).
catccaccgagctgtagat

SEQ ID NO: 693376 - DNA, 19 bp, Mus musculus
  siRNA target sequence for Tde2 (NM_019760.1,1192-1210).
gatggagtcacgtacagtt

SEQ ID NO: 693377 - DNA, 19 bp, Mus musculus
  siRNA target sequence for Tde2 (NM_019760.1,1195-1213).
ggagtcacgtacagttact

SEQ ID NO: 693378 - DNA, 19 bp, Mus musculus
  siRNA target sequence for Tde2 (NM_019760.1,1203-1221).
gtacagttactccttcttt

SEQ ID NO: 693379 - DNA, 19 bp, Mus musculus
  siRNA target sequence for Tde2 (NM_019760.1,1287-1305).
gccttctcgtgagatgaaa

SEQ ID NO: 693380 - DNA, 19 bp, Mus musculus
  siRNA target sequence for Tde2 (NM_019760.1,1288-1306).
ccttctcgtgagatgaaaa

SEQ ID NO: 693381 - DNA, 19 bp, Mus musculus
  siRNA target sequence for Tm4sf1 (NM_008536.2,248-266).
gtattttgccggcattgta

SEQ ID NO: 693382 - DNA, 19 bp, Mus musculus
  siRNA target sequence for Tm4sf1 (NM_008536.2,333-351).
ggttgctgcggctacgaaa

SEQ ID NO: 693383 - DNA, 19 bp, Mus musculus
  siRNA target sequence for Tm4sf1 (NM_008536.2,334-352).
gttgctgcggctacgaaaa

SEQ ID NO: 693384 - DNA, 19 bp, Mus musculus
  siRNA target sequence for Tm4sf1 (NM_008536.2,337-355).
gctgcggctacgaaaacta

SEQ ID NO: 693385 - DNA, 19 bp, Mus musculus
  siRNA target sequence for Tm4sf1 (NM_008536.2,407-425).
cgtgggatctgcttactgt

SEQ ID NO: 693386 - DNA, 19 bp, Mus musculus
  siRNA target sequence for Tm4sf1 (NM_008536.2,477-495).
catggagtatggaactaca

SEQ ID NO: 693387 - DNA, 19 bp, Mus musculus
  siRNA target sequence for Tm4sf1 (NM_008536.2,512-530).
gggacagtaccttctgaat

SEQ ID NO: 693388 - DNA, 19 bp, Mus musculus
  siRNA target sequence for Tm4sf1 (NM_008536.2,605-623).
ggcttttgccgcagttgaa

SEQ ID NO: 693389 - DNA, 19 bp, Mus musculus
  siRNA target sequence for Tm4sf1 (NM_008536.2,607-625).
cttttgccgcagttgaatt

SEQ ID NO: 693390 - DNA, 19 bp, Mus musculus
  siRNA target sequence for Tm4sf1 (NM_008536.2,612-630).
gccgcagttgaattcatct

SEQ ID NO: 693391 - DNA, 19 bp, Mus musculus
  siRNA target sequence for Tm4sf1 (NM_008536.2,685-703).
gctctcgccaacagcaata

SEQ ID NO: 693392 - DNA, 19 bp, Mus musculus
  siRNA target sequence for Tm4sf1 (NM_008536.2,686-704).
ctctcgccaacagcaatat

SEQ ID NO: 693393 - DNA, 19 bp, Mus musculus
  siRNA target sequence for Tm4sf1 (NM_008536.2,688-706).
ctcgccaacagcaatataa

SEQ ID NO: 693394 - DNA, 19 bp, Mus musculus
  siRNA target sequence for Tm4sf1 (NM_008536.2,690-708).
cgccaacagcaatataact

SEQ ID NO: 693395 - DNA, 19 bp, Mus musculus
  siRNA target sequence for Tm4sf2 (NM_019634.1,188-206).
caccaccatcgtggttttt

SEQ ID NO: 693396 - DNA, 19 bp, Mus musculus
  siRNA target sequence for Tm4sf2 (NM_019634.1,306-324).
ggcatttctggatttgtgt

SEQ ID NO: 693397 - DNA, 19 bp, Mus musculus
  siRNA target sequence for Tm4sf2 (NM_019634.1,307-325).
gcatttctggatttgtgtt

SEQ ID NO: 693398 - DNA, 19 bp, Mus musculus
  siRNA target sequence for Tm4sf2 (NM_019634.1,364-382).
cggatgccatgcagaacta

SEQ ID NO: 693399 - DNA, 19 bp, Mus musculus
  siRNA target sequence for Tm4sf2 (NM_019634.1,366-384).
gatgccatgcagaactaca

SEQ ID NO: 693400 - DNA, 19 bp, Mus musculus
  siRNA target sequence for Tm4sf2 (NM_019634.1,511-529).
gctgcatgaacgaaactga

SEQ ID NO: 693401 - DNA, 19 bp, Mus musculus
  siRNA target sequence for Tm4sf2 (NM_019634.1,640-658).
ctggagtggcatttggaat

SEQ ID NO: 693402 - DNA, 19 bp, Mus musculus
  siRNA target sequence for Tm4sf2 (NM_019634.1,715-733).
ctgccaatcagtatgagat

SEQ ID NO: 693403 - DNA, 19 bp, Mus musculus
  siRNA target sequence for Tm4sf4 (NM_145539.1,294-312).
ctggtacttcggaggaata

SEQ ID NO: 693404 - DNA, 19 bp, Mus musculus
  siRNA target sequence for Tm4sf4 (NM_145539.1,464-482).
ctggctactcatttatcgt

SEQ ID NO: 693405 - DNA, 19 bp, Mus musculus
  siRNA target sequence for Tm4sf4 (NM_145539.1,485-503).
cagctgtttctatcaacaa

SEQ ID NO: 693406 - DNA, 19 bp, Mus musculus
  siRNA target sequence for Tm4sf4 (NM_145539.1,549-567).
ccacgatggtgattatcta

SEQ ID NO: 693407 - DNA, 19 bp, Mus musculus
  siRNA target sequence for Tm4sf4 (NM_145539.1,550-568).
cacgatggtgattatctaa

SEQ ID NO: 693408 - DNA, 19 bp, Mus musculus
  siRNA target sequence for Tm4sf4 (NM_145539.1,552-570).
cgatggtgattatctaaaa

SEQ ID NO: 693409 - DNA, 19 bp, Mus musculus
  siRNA target sequence for Tm4sf6 (NM_019656.2,83-101).
ctcggaggctgcagactaa

SEQ ID NO: 693410 - DNA, 19 bp, Mus musculus
  siRNA target sequence for Tm4sf6 (NM_019656.2,94-112).
cagactaagccggtcatta

SEQ ID NO: 693411 - DNA, 19 bp, Mus musculus
  siRNA target sequence for Tm4sf6 (NM_019656.2,96-114).
gactaagccggtcattact

SEQ ID NO: 693412 - DNA, 19 bp, Mus musculus
  siRNA target sequence for Tm4sf6 (NM_019656.2,104-122).
cggtcattacttgtttgaa

SEQ ID NO: 693413 - DNA, 19 bp, Mus musculus
  siRNA target sequence for Tm4sf6 (NM_019656.2,105-123).
ggtcattacttgtttgaaa

SEQ ID NO: 693414 - DNA, 19 bp, Mus musculus
  siRNA target sequence for Tm4sf6 (NM_019656.2,106-124).
gtcattacttgtttgaaaa

SEQ ID NO: 693415 - DNA, 19 bp, Mus musculus
  siRNA target sequence for Tm4sf6 (NM_019656.2,198-216).
ggtgagcctggaaaattat

SEQ ID NO: 693416 - DNA, 19 bp, Mus musculus
  siRNA target sequence for Tm4sf6 (NM_019656.2,199-217).
gtgagcctggaaaattatt

SEQ ID NO: 693417 - DNA, 19 bp, Mus musculus
  siRNA target sequence for Tm4sf6 (NM_019656.2,269-287).
caggcactgtcattattct

SEQ ID NO: 693418 - DNA, 19 bp, Mus musculus
  siRNA target sequence for Tm4sf6 (NM_019656.2,271-289).
ggcactgtcattattctct

SEQ ID NO: 693419 - DNA, 19 bp, Mus musculus
  siRNA target sequence for Tm4sf6 (NM_019656.2,272-290).
gcactgtcattattctctt

SEQ ID NO: 693420 - DNA, 19 bp, Mus musculus
  siRNA target sequence for Tm4sf6 (NM_019656.2,286-304).
ctcttgggcacctttggtt

SEQ ID NO: 693421 - DNA, 19 bp, Mus musculus
  siRNA target sequence for Tm4sf6 (NM_019656.2,339-357).
gaaactgtacgcgatgttt

SEQ ID NO: 693422 - DNA, 19 bp, Mus musculus
  siRNA target sequence for Tm4sf6 (NM_019656.2,389-407).
ccgccattgttggatttgt

SEQ ID NO: 693423 - DNA, 19 bp, Mus musculus
  siRNA target sequence for Tm4sf6 (NM_019656.2,406-424).
gttttcagacatgagatta

SEQ ID NO: 693424 - DNA, 19 bp, Mus musculus
  siRNA target sequence for Tm4sf6 (NM_019656.2,471-489).
ctccacaggagactataga

SEQ ID NO: 693425 - DNA, 19 bp, Mus musculus
  siRNA target sequence for Tm4sf6 (NM_019656.2,511-529).
caaagtacgttgcattgtt

SEQ ID NO: 693426 - DNA, 19 bp, Mus musculus
  siRNA target sequence for Tm4sf6 (NM_019656.2,527-545).
gttgcggtgtcaccaatta

SEQ ID NO: 693427 - DNA, 19 bp, Mus musculus
  siRNA target sequence for Tm4sf6 (NM_019656.2,539-557).
ccaattacggagattggaa

SEQ ID NO: 693428 - DNA, 19 bp, Mus musculus
  siRNA target sequence for Tm4sf6 (NM_019656.2,540-558).
caattacggagattggaaa

SEQ ID NO: 693429 - DNA, 19 bp, Mus musculus
  siRNA target sequence for Tm4sf6 (NM_019656.2,554-572).
ggaaaggtacgaactatta

SEQ ID NO: 693430 - DNA, 19 bp, Mus musculus
  siRNA target sequence for Tm4sf6 (NM_019656.2,648-666).
cgaagagggttgtttcata

SEQ ID NO: 693431 - DNA, 19 bp, Mus musculus
  siRNA target sequence for Tm4sf6 (NM_019656.2,649-667).
gaagagggttgtttcataa

SEQ ID NO: 693432 - DNA, 19 bp, Mus musculus
  siRNA target sequence for Tm4sf6 (NM_019656.2,654-672).
gggttgtttcataaaggta

SEQ ID NO: 693433 - DNA, 19 bp, Mus musculus
  siRNA target sequence for Tm4sf6 (NM_019656.2,655-673).
ggttgtttcataaaggtaa

SEQ ID NO: 693434 - DNA, 19 bp, Mus musculus
  siRNA target sequence for Tm4sf6 (NM_019656.2,670-688).
gtaatgacaactatagagt

SEQ ID NO: 693435 - DNA, 19 bp, Mus musculus
  siRNA target sequence for Tm4sf6 (NM_019656.2,697-715).
ggagtcgttgctggaattt

SEQ ID NO: 693436 - DNA, 19 bp, Mus musculus
  siRNA target sequence for Tm4sf6 (NM_019656.2,738-756).
gctaattggaatctttctt

SEQ ID NO: 693437 - DNA, 19 bp, Mus musculus
  siRNA target sequence for Tm4sf6 (NM_019656.2,766-784).
ctgtctcgtgccataacga

SEQ ID NO: 693438 - DNA, 19 bp, Mus musculus
  siRNA target sequence for Tm4sf6 (NM_019656.2,768-786).
gtctcgtgccataacgaat

SEQ ID NO: 693439 - DNA, 19 bp, Mus musculus
  siRNA target sequence for Tm4sf6 (NM_019656.2,770-788).
ctcgtgccataacgaataa

SEQ ID NO: 693440 - DNA, 19 bp, Mus musculus
  siRNA target sequence for Tm4sf6 (NM_019656.2,782-800).
cgaataaccagtatgagat

SEQ ID NO: 693441 - DNA, 19 bp, Mus musculus
  siRNA target sequence for Tm4sf7 (NM_053082.1,53-71).
gcctccagggcgtcaagta

SEQ ID NO: 693442 - DNA, 19 bp, Mus musculus
  siRNA target sequence for Tm4sf7 (NM_053082.1,62-80).
gcgtcaagtacctcatgtt

SEQ ID NO: 693443 - DNA, 19 bp, Mus musculus
  siRNA target sequence for Tm4sf7 (NM_053082.1,154-172).
ggaaactttgccaccttat

SEQ ID NO: 693444 - DNA, 19 bp, Mus musculus
  siRNA target sequence for Tm4sf7 (NM_053082.1,356-374).
cctacagtgacaagattga

SEQ ID NO: 693445 - DNA, 19 bp, Mus musculus
  siRNA target sequence for Tm4sf7 (NM_053082.1,362-380).
gtgacaagattgacagtta

SEQ ID NO: 693446 - DNA, 19 bp, Mus musculus
  siRNA target sequence for Tm4sf7 (NM_053082.1,455-473).
gcatcatccagactgattt

SEQ ID NO: 693447 - DNA, 19 bp, Mus musculus
  siRNA target sequence for Tm4sf7 (NM_053082.1,487-505).
gtttccaattacactgatt

SEQ ID NO: 693448 - DNA, 19 bp, Mus musculus
  siRNA target sequence for Tm4sf7 (NM_053082.1,491-509).
ccaattacactgattggtt

SEQ ID NO: 693449 - DNA, 19 bp, Mus musculus
  siRNA target sequence for Tm4sf7 (NM_053082.1,500-518).
ctgattggtttgaggtata

SEQ ID NO: 693450 - DNA, 19 bp, Mus musculus
  siRNA target sequence for Tm4sf7 (NM_053082.1,594-612).
gtggaagtcgccctgttat

SEQ ID NO: 693451 - DNA, 19 bp, Mus musculus
  siRNA target sequence for Tm4sf7 (NM_053082.1,596-614).
ggaagtcgccctgttatga

SEQ ID NO: 693452 - DNA, 19 bp, Mus musculus
  siRNA target sequence for Tm4sf8 (NM_019793.2,277-295).
ggagcctatgtcttcatca

SEQ ID NO: 693453 - DNA, 19 bp, Mus musculus
  siRNA target sequence for Tm4sf8 (NM_019793.2,364-382).
gtaggagccttgcttttca

SEQ ID NO: 693454 - DNA, 19 bp, Mus musculus
  siRNA target sequence for Tm4sf8 (NM_019793.2,430-448).
ggacttgccacgtttgtct

SEQ ID NO: 693455 - DNA, 19 bp, Mus musculus
  siRNA target sequence for Tm4sf8 (NM_019793.2,431-449).
gacttgccacgtttgtctt

SEQ ID NO: 693456 - DNA, 19 bp, Mus musculus
  siRNA target sequence for Tm4sf8 (NM_019793.2,535-553).
cgcagcattcagaaagtgt

SEQ ID NO: 693457 - DNA, 19 bp, Mus musculus
  siRNA target sequence for Tm4sf8 (NM_019793.2,539-557).
gcattcagaaagtgtataa

SEQ ID NO: 693458 - DNA, 19 bp, Mus musculus
  siRNA target sequence for Tm4sf8 (NM_019793.2,584-602).
ctgccagccgtgctattga

SEQ ID NO: 693459 - DNA, 19 bp, Mus musculus
  siRNA target sequence for Tm4sf8 (NM_019793.2,588-606).
cagccgtgctattgactat

SEQ ID NO: 693460 - DNA, 19 bp, Mus musculus
  siRNA target sequence for Tm4sf8 (NM_019793.2,590-608).
gccgtgctattgactatgt

SEQ ID NO: 693461 - DNA, 19 bp, Mus musculus
  siRNA target sequence for Tm4sf8 (NM_019793.2,632-650).
gaattcataactattcaga

SEQ ID NO: 693462 - DNA, 19 bp, Mus musculus
  siRNA target sequence for Tm4sf8 (NM_019793.2,642-660).
ctattcagactgggaaaat

SEQ ID NO: 693463 - DNA, 19 bp, Mus musculus
  siRNA target sequence for Tm4sf8 (NM_019793.2,653-671).
gggaaaatacagattggtt

SEQ ID NO: 693464 - DNA, 19 bp, Mus musculus
  siRNA target sequence for Tm4sf8 (NM_019793.2,834-852).
gttggcctttgcagctatt

SEQ ID NO: 693465 - DNA, 19 bp, Mus musculus
  siRNA target sequence for Tm6sf1 (NM_145375.1,344-362).
cggccacgggggtttttgt

SEQ ID NO: 693466 - DNA, 19 bp, Mus musculus
  siRNA target sequence for Tm6sf1 (NM_145375.1,382-400).
ccggtcacctacatcttca

SEQ ID NO: 693467 - DNA, 19 bp, Mus musculus
  siRNA target sequence for Tm6sf1 (NM_145375.1,383-401).
cggtcacctacatcttcaa

SEQ ID NO: 693468 - DNA, 19 bp, Mus musculus
  siRNA target sequence for Tm6sf1 (NM_145375.1,420-438).
cgattcctggaccattgtt

SEQ ID NO: 693469 - DNA, 19 bp, Mus musculus
  siRNA target sequence for Tm6sf1 (NM_145375.1,548-566).
ccagtgtggtgaaccttat

SEQ ID NO: 693470 - DNA, 19 bp, Mus musculus
  siRNA target sequence for Tm6sf1 (NM_145375.1,551-569).
gtgtggtgaaccttatcat

SEQ ID NO: 693471 - DNA, 19 bp, Mus musculus
  siRNA target sequence for Tm6sf1 (NM_145375.1,579-597).
gcaagatggcatcattgat

SEQ ID NO: 693472 - DNA, 19 bp, Mus musculus
  siRNA target sequence for Tm6sf1 (NM_145375.1,599-617).
gattcatgacgcactactt

SEQ ID NO: 693473 - DNA, 19 bp, Mus musculus
  siRNA target sequence for Tm6sf1 (NM_145375.1,622-640).
gagggtgaaccgtatctga

SEQ ID NO: 693474 - DNA, 19 bp, Mus musculus
  siRNA target sequence for Tm6sf1 (NM_145375.1,644-662).
cggcctatgggcacatgat

SEQ ID NO: 693475 - DNA, 19 bp, Mus musculus
  siRNA target sequence for Tm6sf1 (NM_145375.1,669-687).
ctgggatggctctgttcat

SEQ ID NO: 693476 - DNA, 19 bp, Mus musculus
  siRNA target sequence for Tm6sf1 (NM_145375.1,671-689).
gggatggctctgttcatta

SEQ ID NO: 693477 - DNA, 19 bp, Mus musculus
  siRNA target sequence for Tm6sf1 (NM_145375.1,729-747).
ggaaagctacagaaccatt

SEQ ID NO: 693478 - DNA, 19 bp, Mus musculus
  siRNA target sequence for Tm6sf1 (NM_145375.1,756-774).
ctgggtcggatccattata

SEQ ID NO: 693479 - DNA, 19 bp, Mus musculus
  siRNA target sequence for Tm6sf1 (NM_145375.1,758-776).
gggtcggatccattataat

SEQ ID NO: 693480 - DNA, 19 bp, Mus musculus
  siRNA target sequence for Tm6sf1 (NM_145375.1,760-778).
gtcggatccattataatga

SEQ ID NO: 693481 - DNA, 19 bp, Mus musculus
  siRNA target sequence for Tm6sf1 (NM_145375.1,797-815).
ctggaaacatcgtaggaaa

SEQ ID NO: 693482 - DNA, 19 bp, Mus musculus
  siRNA target sequence for Tm6sf1 (NM_145375.1,800-818).
gaaacatcgtaggaaagta

SEQ ID NO: 693483 - DNA, 19 bp, Mus musculus
  siRNA target sequence for Tm6sf1 (NM_145375.1,846-864).
cttaagcataccatataca

SEQ ID NO: 693484 - DNA, 19 bp, Mus musculus
  siRNA target sequence for Tm6sf1 (NM_145375.1,885-903).
cttcagaatctataatcaa

SEQ ID NO: 693485 - DNA, 19 bp, Mus musculus
  siRNA target sequence for Tm6sf1 (NM_145375.1,905-923).
catcagaaaactataatta

SEQ ID NO: 693486 - DNA, 19 bp, Mus musculus
  siRNA target sequence for Tm6sf1 (NM_145375.1,966-984).
gagaagaccgtttgactta

SEQ ID NO: 693487 - DNA, 19 bp, Mus musculus
  siRNA target sequence for Tm6sf1 (NM_145375.1,968-986).
gaagaccgtttgacttagt

SEQ ID NO: 693488 - DNA, 19 bp, Mus musculus
  siRNA target sequence for Tm6sf1 (NM_145375.1,1033-1051).
ggcttgattgctttggatt

SEQ ID NO: 693489 - DNA, 19 bp, Mus musculus
  siRNA target sequence for Tm6sf1 (NM_145375.1,1070-1088).
gactctacacgcagtttca

SEQ ID NO: 693490 - DNA, 19 bp, Mus musculus
  siRNA target sequence for Tm6sf1 (NM_145375.1,1135-1153).
ctggcatacatgttctatt

SEQ ID NO: 693491 - DNA, 19 bp, Mus musculus
  siRNA target sequence for Tm6sf1 (NM_145375.1,1149-1167).
ctattccgtcccttacttt

SEQ ID NO: 693492 - DNA, 19 bp, Mus musculus
  siRNA target sequence for Tm6sf1 (NM_145375.1,1202-1220).
gctcatggatgcctgatat

SEQ ID NO: 693493 - DNA, 19 bp, Mus musculus
  siRNA target sequence for Tm6sf1 (NM_145375.1,1251-1269).
ggctcagttttctcacatt

SEQ ID NO: 693494 - DNA, 19 bp, Mus musculus
  siRNA target sequence for Tm6sf1 (NM_145375.1,1285-1303).
gctagaactgcttatgtct

SEQ ID NO: 693495 - DNA, 19 bp, Mus musculus
  siRNA target sequence for Tm6sf1 (NM_145375.1,1312-1330).
cccgaagaagcgaaaatct

SEQ ID NO: 693496 - DNA, 19 bp, Mus musculus
  siRNA target sequence for Tm6sf1 (NM_145375.1,1313-1331).
ccgaagaagcgaaaatctt

SEQ ID NO: 693497 - DNA, 19 bp, Mus musculus
  siRNA target sequence for Tm6sf1 (NM_145375.1,1336-1354).
ctagcactaaacatagcat

SEQ ID NO: 693498 - DNA, 19 bp, Mus musculus
  siRNA target sequence for Tm6sf1 (NM_145375.1,1347-1365).
catagcatatggagttctt

SEQ ID NO: 693499 - DNA, 19 bp, Mus musculus
  siRNA target sequence for Tm6sf1 (NM_145375.1,1380-1398).
ctaccgttgtacctacaat

SEQ ID NO: 693500 - DNA, 19 bp, Mus musculus
  siRNA target sequence for Tm6sf1 (NM_145375.1,1399-1417).
cccgagttcttcctaagaa

SEQ ID NO: 693501 - DNA, 19 bp, Mus musculus
  siRNA target sequence for Tm7sf1 (NM_031999.1,113-131).
gagccggtgcgcaatgact

SEQ ID NO: 693502 - DNA, 19 bp, Mus musculus
  siRNA target sequence for Tm7sf1 (NM_031999.1,189-207).
cggtctacaccgtcttcta

SEQ ID NO: 693503 - DNA, 19 bp, Mus musculus
  siRNA target sequence for Tm7sf1 (NM_031999.1,327-345).
ccgtgctcttctcctttta

SEQ ID NO: 693504 - DNA, 19 bp, Mus musculus
  siRNA target sequence for Tm7sf1 (NM_031999.1,329-347).
gtgctcttctccttttact

SEQ ID NO: 693505 - DNA, 19 bp, Mus musculus
  siRNA target sequence for Tm7sf1 (NM_031999.1,434-452).
ctcacgctcatgaacttgt

SEQ ID NO: 693506 - DNA, 19 bp, Mus musculus
  siRNA target sequence for Tm7sf1 (NM_031999.1,472-490).
caaggccaagtcaaaatat

SEQ ID NO: 693507 - DNA, 19 bp, Mus musculus
  siRNA target sequence for Tm7sf1 (NM_031999.1,492-510).
ctccagagctactcaaata

SEQ ID NO: 693508 - DNA, 19 bp, Mus musculus
  siRNA target sequence for Tm7sf1 (NM_031999.1,603-621).
gggacaggaaggttatcgt

SEQ ID NO: 693509 - DNA, 19 bp, Mus musculus
  siRNA target sequence for Tm7sf1 (NM_031999.1,814-832).
gttcatcttgtcattttct

SEQ ID NO: 693510 - DNA, 19 bp, Mus musculus
  siRNA target sequence for Tm7sf1 (NM_031999.1,841-859).
gaacgtccattcctttgat

SEQ ID NO: 693511 - DNA, 19 bp, Mus musculus
  siRNA target sequence for Tm7sf1 (NM_031999.1,879-897).
ccgaccaggcagatctgaa

SEQ ID NO: 693512 - DNA, 19 bp, Mus musculus
  siRNA target sequence for Tm7sf1 (NM_031999.1,1002-1020).
ccacgaaggatcttaccaa

SEQ ID NO: 693513 - DNA, 19 bp, Mus musculus
  siRNA target sequence for Tm7sf1 (NM_031999.1,1003-1021).
cacgaaggatcttaccaat

SEQ ID NO: 693514 - DNA, 19 bp, Mus musculus
  siRNA target sequence for Tmc2 (NM_138655.1,418-436).
gggcaccgagcccaatcta

SEQ ID NO: 693515 - DNA, 19 bp, Mus musculus
  siRNA target sequence for Tmc2 (NM_138655.1,473-491).
ggtcttcccggaagaaaca

SEQ ID NO: 693516 - DNA, 19 bp, Mus musculus
  siRNA target sequence for Tmc2 (NM_138655.1,476-494).
cttcccggaagaaacagat

SEQ ID NO: 693517 - DNA, 19 bp, Mus musculus
  siRNA target sequence for Tmc2 (NM_138655.1,908-926).
ctaagaaatgggtcaagtt

SEQ ID NO: 693518 - DNA, 19 bp, Mus musculus
  siRNA target sequence for Tmc2 (NM_138655.1,959-977).
gtattccctgggaaatgaa

SEQ ID NO: 693519 - DNA, 19 bp, Mus musculus
  siRNA target sequence for Tmc2 (NM_138655.1,1004-1022).
gttcttctgtggcatctta

SEQ ID NO: 693520 - DNA, 19 bp, Mus musculus
  siRNA target sequence for Tmc2 (NM_138655.1,1010-1028).
ctgtggcatcttacttcat

SEQ ID NO: 693521 - DNA, 19 bp, Mus musculus
  siRNA target sequence for Tmc2 (NM_138655.1,1029-1047).
ctttctccgatggatgtat

SEQ ID NO: 693522 - DNA, 19 bp, Mus musculus
  siRNA target sequence for Tmc2 (NM_138655.1,1040-1058).
ggatgtatggagttaacct

SEQ ID NO: 693523 - DNA, 19 bp, Mus musculus
  siRNA target sequence for Tmc2 (NM_138655.1,1041-1059).
gatgtatggagttaacctt

SEQ ID NO: 693524 - DNA, 19 bp, Mus musculus
  siRNA target sequence for Tmc2 (NM_138655.1,1060-1078).
gtcctttttggcttaatat

SEQ ID NO: 693525 - DNA, 19 bp, Mus musculus
  siRNA target sequence for Tmc2 (NM_138655.1,1113-1131).
catgccctatggaagtata

SEQ ID NO: 693526 - DNA, 19 bp, Mus musculus
  siRNA target sequence for Tmc2 (NM_138655.1,1198-1216).
gagggctacatcaaatatt

SEQ ID NO: 693527 - DNA, 19 bp, Mus musculus
  siRNA target sequence for Tmc2 (NM_138655.1,1428-1446).
ctacctcatcgggaattca

SEQ ID NO: 693528 - DNA, 19 bp, Mus musculus
  siRNA target sequence for Tmc2 (NM_138655.1,1453-1471).
gcagacaacaaatatgtct

SEQ ID NO: 693529 - DNA, 19 bp, Mus musculus
  siRNA target sequence for Tmc2 (NM_138655.1,1481-1499).
ccagcttcaaggagtctat

SEQ ID NO: 693530 - DNA, 19 bp, Mus musculus
  siRNA target sequence for Tmc2 (NM_138655.1,1482-1500).
cagcttcaaggagtctata

SEQ ID NO: 693531 - DNA, 19 bp, Mus musculus
  siRNA target sequence for Tmc2 (NM_138655.1,1496-1514).
ctatagtggacgaacaaga

SEQ ID NO: 693532 - DNA, 19 bp, Mus musculus
  siRNA target sequence for Tmc2 (NM_138655.1,1517-1535).
gtaacaaagaagggaatat

SEQ ID NO: 693533 - DNA, 19 bp, Mus musculus
  siRNA target sequence for Tmc2 (NM_138655.1,1554-1572).
ccgcgtcctggccaacttt

SEQ ID NO: 693534 - DNA, 19 bp, Mus musculus
  siRNA target sequence for Tmc2 (NM_138655.1,1594-1612).
ggaagcgggtacctcattt

SEQ ID NO: 693535 - DNA, 19 bp, Mus musculus
  siRNA target sequence for Tmc2 (NM_138655.1,1598-1616).
gcgggtacctcatttactt

SEQ ID NO: 693536 - DNA, 19 bp, Mus musculus
  siRNA target sequence for Tmc2 (NM_138655.1,1599-1617).
cgggtacctcatttacttt

SEQ ID NO: 693537 - DNA, 19 bp, Mus musculus
  siRNA target sequence for Tmc2 (NM_138655.1,1659-1677).
cagctggtatgaaaggaat

SEQ ID NO: 693538 - DNA, 19 bp, Mus musculus
  siRNA target sequence for Tmc2 (NM_138655.1,1686-1704).
gatcgtgatgtctttgcta

SEQ ID NO: 693539 - DNA, 19 bp, Mus musculus
  siRNA target sequence for Tmc2 (NM_138655.1,1845-1863).
cgatgtccaccttaagctt

SEQ ID NO: 693540 - DNA, 19 bp, Mus musculus
  siRNA target sequence for Tmc2 (NM_138655.1,1846-1864).
gatgtccaccttaagcttt

SEQ ID NO: 693541 - DNA, 19 bp, Mus musculus
  siRNA target sequence for Tmc2 (NM_138655.1,1892-1910).
ctcactggaccctgtttaa

SEQ ID NO: 693542 - DNA, 19 bp, Mus musculus
  siRNA target sequence for Tmc2 (NM_138655.1,1896-1914).
ctggaccctgtttaactat

SEQ ID NO: 693543 - DNA, 19 bp, Mus musculus
  siRNA target sequence for Tmc2 (NM_138655.1,1898-1916).
ggaccctgtttaactatta

SEQ ID NO: 693544 - DNA, 19 bp, Mus musculus
  siRNA target sequence for Tmc2 (NM_138655.1,2033-2051).
ctgacatgctggtaacata

SEQ ID NO: 693545 - DNA, 19 bp, Mus musculus
  siRNA target sequence for Tmc2 (NM_138655.1,2087-2105).
gttttgtccggttcatgaa

SEQ ID NO: 693546 - DNA, 19 bp, Mus musculus
  siRNA target sequence for Tmc2 (NM_138655.1,2141-2159).
cctcatatgccgagtttga

SEQ ID NO: 693547 - DNA, 19 bp, Mus musculus
  siRNA target sequence for Tmc2 (NM_138655.1,2142-2160).
ctcatatgccgagtttgat

SEQ ID NO: 693548 - DNA, 19 bp, Mus musculus
  siRNA target sequence for Tmc2 (NM_138655.1,2144-2162).
catatgccgagtttgatat

SEQ ID NO: 693549 - DNA, 19 bp, Mus musculus
  siRNA target sequence for Tmc2 (NM_138655.1,2231-2249).
gactggtgggcatcaatgt

SEQ ID NO: 693550 - DNA, 19 bp, Mus musculus
  siRNA target sequence for Tmc2 (NM_138655.1,2308-2326).
ccccacgaacgtgtgttta

SEQ ID NO: 693551 - DNA, 19 bp, Mus musculus
  siRNA target sequence for Tmc2 (NM_138655.1,2309-2327).
cccacgaacgtgtgtttaa

SEQ ID NO: 693552 - DNA, 19 bp, Mus musculus
  siRNA target sequence for Tmc2 (NM_138655.1,2310-2328).
ccacgaacgtgtgtttaaa

SEQ ID NO: 693553 - DNA, 19 bp, Mus musculus
  siRNA target sequence for Tmc2 (NM_138655.1,2479-2497).
gagaccatcgagaacgatt

SEQ ID NO: 693554 - DNA, 19 bp, Mus musculus
  siRNA target sequence for Tmc2 (NM_138655.1,2554-2572).
ccagccatcctgctaatgt

SEQ ID NO: 693555 - DNA, 19 bp, Mus musculus
  siRNA target sequence for Tmc2 (NM_138655.1,2555-2573).
cagccatcctgctaatgtt

SEQ ID NO: 693556 - DNA, 19 bp, Mus musculus
  siRNA target sequence for Tmc2 (NM_138655.1,2558-2576).
ccatcctgctaatgtttct

SEQ ID NO: 693557 - DNA, 19 bp, Mus musculus
  siRNA target sequence for Tmc2 (NM_138655.1,2575-2593).
ctggccatttactatctga

SEQ ID NO: 693558 - DNA, 19 bp, Mus musculus
  siRNA target sequence for Tmc2 (NM_138655.1,2646-2664).
ccaagcgctccgtgaagtt

SEQ ID NO: 693559 - DNA, 19 bp, Mus musculus
  siRNA target sequence for Tmc2 (NM_138655.1,2651-2669).
cgctccgtgaagttgagaa

SEQ ID NO: 693560 - DNA, 19 bp, Mus musculus
  siRNA target sequence for Tmc2 (NM_138655.1,2662-2680).
gttgagaagaaccataaat

SEQ ID NO: 693561 - DNA, 19 bp, Mus musculus
  siRNA target sequence for Tmc2 (NM_138655.1,2665-2683).
gagaagaaccataaatcca

SEQ ID NO: 693562 - DNA, 19 bp, Mus musculus
  siRNA target sequence for Tmc2 (NM_138655.1,2743-2761).
gccacccagatacatctta

SEQ ID NO: 693563 - DNA, 19 bp, Mus musculus
  siRNA target sequence for Tmc2 (NM_138655.1,2747-2765).
cccagatacatcttactaa

SEQ ID NO: 693564 - DNA, 19 bp, Mus musculus
  siRNA target sequence for Tmc2 (NM_138655.1,2898-2916).
gagaggcagacgagattct

SEQ ID NO: 693565 - DNA, 19 bp, Mus musculus
  siRNA target sequence for Tyrobp (NM_011662.2,99-117).
cctgactgtgggaggatta

SEQ ID NO: 693566 - DNA, 19 bp, Mus musculus
  siRNA target sequence for Tyrobp (NM_011662.2,102-120).
gactgtgggaggattaagt

SEQ ID NO: 693567 - DNA, 19 bp, Mus musculus
  siRNA target sequence for Tyrobp (NM_011662.2,148-166).
ccaagatgcgactgttctt

SEQ ID NO: 693568 - DNA, 19 bp, Mus musculus
  siRNA target sequence for Tyrobp (NM_011662.2,282-300).
ggaagggacccggaaacaa

SEQ ID NO: 693569 - DNA, 19 bp, Mus musculus
  siRNA target sequence for Tyrobp (NM_011662.2,287-305).
ggacccggaaacaacacat

SEQ ID NO: 693570 - DNA, 19 bp, Mus musculus
  siRNA target sequence for Tyrobp (NM_011662.2,345-363).
gagaccagaagtatacagt

SEQ ID NO: 693571 - DNA, 19 bp, Mus musculus
  siRNA target sequence for Upk2 (NM_009476.1,124-142).
cggggactgcagacttcaa

SEQ ID NO: 693572 - DNA, 19 bp, Mus musculus
  siRNA target sequence for Upk2 (NM_009476.1,132-150).
gcagacttcaacatctcaa

SEQ ID NO: 693573 - DNA, 19 bp, Mus musculus
  siRNA target sequence for Upk2 (NM_009476.1,177-195).
ctaacagaaagcctgttaa

SEQ ID NO: 693574 - DNA, 19 bp, Mus musculus
  siRNA target sequence for Upk2 (NM_009476.1,260-278).
cagcaaagtggttaagtca

SEQ ID NO: 693575 - DNA, 19 bp, Mus musculus
  siRNA target sequence for Upk2 (NM_009476.1,355-373).
caaggctcagcgcatatca

SEQ ID NO: 693576 - DNA, 19 bp, Mus musculus
  siRNA target sequence for Upk2 (NM_009476.1,390-408).
ccaggaaccaaatactaca

SEQ ID NO: 693577 - DNA, 19 bp, Mus musculus
  siRNA target sequence for Upk2 (NM_009476.1,391-409).
caggaaccaaatactacat

SEQ ID NO: 693578 - DNA, 19 bp, Mus musculus
  siRNA target sequence for Upk2 (NM_009476.1,393-411).
ggaaccaaatactacatat

SEQ ID NO: 693579 - DNA, 19 bp, Mus musculus
  siRNA target sequence for Upk2 (NM_009476.1,464-482).
gtccacgcttcctcgaaaa

SEQ ID NO: 693580 - DNA, 19 bp, Mus musculus
  siRNA target sequence for Upk2 (NM_009476.1,466-484).
ccacgcttcctcgaaaaaa

SEQ ID NO: 693581 - DNA, 19 bp, Mus musculus
  siRNA target sequence for Upk2 (NM_009476.1,469-487).
cgcttcctcgaaaaaacat

SEQ ID NO: 693582 - DNA, 19 bp, Mus musculus
  siRNA target sequence for Upk2 (NM_009476.1,489-507).
gagtctattgggttaggaa

SEQ ID NO: 693583 - DNA, 19 bp, Mus musculus
  siRNA target sequence for Upk2 (NM_009476.1,566-584).
gttggtcgtgggtcttatt

SEQ ID NO: 693584 - DNA, 19 bp, Mus musculus
  siRNA target sequence for Upk3a (NM_023478.1,167-185).
gcggctcttacgaggttta

SEQ ID NO: 693585 - DNA, 19 bp, Mus musculus
  siRNA target sequence for Upk3a (NM_023478.1,170-188).
gctcttacgaggtttacct

SEQ ID NO: 693586 - DNA, 19 bp, Mus musculus
  siRNA target sequence for Upk3a (NM_023478.1,284-302).
ggaggtcaggcccctataa

SEQ ID NO: 693587 - DNA, 19 bp, Mus musculus
  siRNA target sequence for Upk3a (NM_023478.1,285-303).
gaggtcaggcccctataaa

SEQ ID NO: 693588 - DNA, 19 bp, Mus musculus
  siRNA target sequence for Upk3a (NM_023478.1,288-306).
gtcaggcccctataaagct

SEQ ID NO: 693589 - DNA, 19 bp, Mus musculus
  siRNA target sequence for Upk3a (NM_023478.1,381-399).
gatcctgaacgcataccta

SEQ ID NO: 693590 - DNA, 19 bp, Mus musculus
  siRNA target sequence for Upk3a (NM_023478.1,609-627).
gcggagtggaggcatgatt

SEQ ID NO: 693591 - DNA, 19 bp, Mus musculus
  siRNA target sequence for Wfs1 (NM_011716.1,363-381).
ctgaggtgggcaaacacta

SEQ ID NO: 693592 - DNA, 19 bp, Mus musculus
  siRNA target sequence for Wfs1 (NM_011716.1,429-447).
ccgtagcctggctaatcct

SEQ ID NO: 693593 - DNA, 19 bp, Mus musculus
  siRNA target sequence for Wfs1 (NM_011716.1,503-521).
gaccggaaaggcatcactt

SEQ ID NO: 693594 - DNA, 19 bp, Mus musculus
  siRNA target sequence for Wfs1 (NM_011716.1,596-614).
gtcatgtactggaaactca

SEQ ID NO: 693595 - DNA, 19 bp, Mus musculus
  siRNA target sequence for Wfs1 (NM_011716.1,794-812).
gtggagctcaccaagaagt

SEQ ID NO: 693596 - DNA, 19 bp, Mus musculus
  siRNA target sequence for Wfs1 (NM_011716.1,811-829).
gtacgccaagggcatcatt

SEQ ID NO: 693597 - DNA, 19 bp, Mus musculus
  siRNA target sequence for Wfs1 (NM_011716.1,1486-1504).
ctggcgcttcctgaaagta

SEQ ID NO: 693598 - DNA, 19 bp, Mus musculus
  siRNA target sequence for Wfs1 (NM_011716.1,1488-1506).
ggcgcttcctgaaagtact

SEQ ID NO: 693599 - DNA, 19 bp, Mus musculus
  siRNA target sequence for Wfs1 (NM_011716.1,1502-1520).
gtactcggccagactttct

SEQ ID NO: 693600 - DNA, 19 bp, Mus musculus
  siRNA target sequence for Wfs1 (NM_011716.1,1505-1523).
ctcggccagactttcttca

SEQ ID NO: 693601 - DNA, 19 bp, Mus musculus
  siRNA target sequence for Wfs1 (NM_011716.1,1529-1547).
cccgttggccacttcatca

SEQ ID NO: 693602 - DNA, 19 bp, Mus musculus
  siRNA target sequence for Wfs1 (NM_011716.1,1530-1548).
ccgttggccacttcatcat

SEQ ID NO: 693603 - DNA, 19 bp, Mus musculus
  siRNA target sequence for Wfs1 (NM_011716.1,2043-2061).
cactcacctggcagcaata

SEQ ID NO: 693604 - DNA, 19 bp, Mus musculus
  siRNA target sequence for Wfs1 (NM_011716.1,2054-2072).
cagcaatatggcttcctat

SEQ ID NO: 693605 - DNA, 19 bp, Mus musculus
  siRNA target sequence for Wfs1 (NM_011716.1,2155-2173).
gacaggccgcttcaagtat

SEQ ID NO: 693606 - DNA, 19 bp, Mus musculus
  siRNA target sequence for Wfs1 (NM_011716.1,2263-2281).
cgaggcctacccatcttgt

SEQ ID NO: 693607 - DNA, 19 bp, Mus musculus
  siRNA target sequence for Wfs1 (NM_011716.1,2264-2282).
gaggcctacccatcttgta

SEQ ID NO: 693608 - DNA, 19 bp, Mus musculus
  siRNA target sequence for Wfs1 (NM_011716.1,2359-2377).
gaagtttgaccgctacaaa

SEQ ID NO: 693609 - DNA, 19 bp, Mus musculus
  siRNA target sequence for Wfs1 (NM_011716.1,2362-2380).
gtttgaccgctacaaattt

SEQ ID NO: 693610 - DNA, 19 bp, Mus musculus
  siRNA target sequence for Wfs1 (NM_011716.1,2366-2384).
gaccgctacaaatttgaga

SEQ ID NO: 693611 - DNA, 19 bp, Mus musculus
  siRNA target sequence for Wfs1 (NM_011716.1,2502-2520).
gccaggggagcctcataga

SEQ ID NO: 693612 - DNA, 19 bp, Mus musculus
  siRNA target sequence for Wfs1 (NM_011716.1,2504-2522).
caggggagcctcatagagt

SEQ ID NO: 693613 - DNA, 19 bp, Mus musculus
  siRNA target sequence for Wfs1 (NM_011716.1,2619-2637).
cccggaggcacgtgaagat

SEQ ID NO: 693614 - DNA, 19 bp, Mus musculus
  siRNA target sequence for Wfs1 (NM_011716.1,2662-2680).
gcacggtgccctcaagttt

SEQ ID NO: 693615 - DNA, 19 bp, Mus musculus
  siRNA target sequence for Yif1 (NM_026553.2,191-209).
gtccacggttccaagcata

SEQ ID NO: 693616 - DNA, 19 bp, Mus musculus
  siRNA target sequence for Yif1 (NM_026553.2,233-251).
cctccactcttcgatgata

SEQ ID NO: 693617 - DNA, 19 bp, Mus musculus
  siRNA target sequence for Yif1 (NM_026553.2,236-254).
ccactcttcgatgatacaa

SEQ ID NO: 693618 - DNA, 19 bp, Mus musculus
  siRNA target sequence for Yif1 (NM_026553.2,248-266).
gatacaagtggtggttatt

SEQ ID NO: 693619 - DNA, 19 bp, Mus musculus
  siRNA target sequence for Yif1 (NM_026553.2,333-351).
gagacccagtggccaatat

SEQ ID NO: 693620 - DNA, 19 bp, Mus musculus
  siRNA target sequence for Yif1 (NM_026553.2,417-435).
gttttgtgtccgtgaacaa

SEQ ID NO: 693621 - DNA, 19 bp, Mus musculus
  siRNA target sequence for Yif1 (NM_026553.2,422-440).
gtgtccgtgaacaaactca

SEQ ID NO: 693622 - DNA, 19 bp, Mus musculus
  siRNA target sequence for Yif1 (NM_026553.2,426-444).
ccgtgaacaaactcaagta

SEQ ID NO: 693623 - DNA, 19 bp, Mus musculus
  siRNA target sequence for Yif1 (NM_026553.2,427-445).
cgtgaacaaactcaagtat

SEQ ID NO: 693624 - DNA, 19 bp, Mus musculus
  siRNA target sequence for Yif1 (NM_026553.2,512-530).
cagaactggaaaatgcaat

SEQ ID NO: 693625 - DNA, 19 bp, Mus musculus
  siRNA target sequence for Yif1 (NM_026553.2,782-800).
gcttacagcggttacaaat

SEQ ID NO: 693626 - DNA, 19 bp, Mus musculus
  siRNA target sequence for Yif1 (NM_026553.2,876-894).
catcatctgcgcttatgta

SEQ ID NO: 693627 - DNA, 19 bp, Mus musculus
  siRNA target sequence for Yif1 (NM_026553.2,879-897).
catctgcgcttatgtactt

SEQ ID NO: 693628 - DNA, 19 bp, Mus musculus
  siRNA target sequence for Yif1 (NM_026553.2,882-900).
ctgcgcttatgtacttcat

SEQ ID NO: 693629 - DNA, 19 bp, Mus musculus
  siRNA target sequence for Yif1 (NM_026553.2,885-903).
cgcttatgtacttcattgt

SEQ ID NO: 693630 - DNA, 19 bp, Mus musculus
  siRNA target sequence for Zdhhc12 (NM_025428.1,433-451).
gtgttcggcgctatgatca

SEQ ID NO: 693631 - DNA, 19 bp, Mus musculus
  siRNA target sequence for Zdhhc12 (NM_025428.1,487-505).
gcaaccacccgctctttgt

SEQ ID NO: 693632 - DNA, 19 bp, Mus musculus
  siRNA target sequence for Zdhhc12 (NM_025428.1,703-721).
cgactacctgggagttcat

SEQ ID NO: 693633 - DNA, 19 bp, Mus musculus
  siRNA target sequence for Zdhhc12 (NM_025428.1,786-804).
cgaaacctggcccactttt

SEQ ID NO: 693634 - DNA, 19 bp, Mus musculus
  siRNA target sequence for Zdhhc2 (NM_178395.2,285-303).
ggatcccggtggtgttcat

SEQ ID NO: 693635 - DNA, 19 bp, Mus musculus
  siRNA target sequence for Zdhhc2 (NM_178395.2,364-382).
ggaaaacattggtgaacaa

SEQ ID NO: 693636 - DNA, 19 bp, Mus musculus
  siRNA target sequence for Zdhhc2 (NM_178395.2,391-409).
cctcatggcttatcatcta

SEQ ID NO: 693637 - DNA, 19 bp, Mus musculus
  siRNA target sequence for Zdhhc2 (NM_178395.2,459-477).
ccatgaatccttcaaaaga

SEQ ID NO: 693638 - DNA, 19 bp, Mus musculus
  siRNA target sequence for Zdhhc2 (NM_178395.2,597-615).
gcgcaatccgatattgtga

SEQ ID NO: 693639 - DNA, 19 bp, Mus musculus
  siRNA target sequence for Zdhhc2 (NM_178395.2,614-632).
gacagatgccaacttataa

SEQ ID NO: 693640 - DNA, 19 bp, Mus musculus
  siRNA target sequence for Zdhhc2 (NM_178395.2,650-668).
cattgttccgtctgtgata

SEQ ID NO: 693641 - DNA, 19 bp, Mus musculus
  siRNA target sequence for Zdhhc2 (NM_178395.2,657-675).
ccgtctgtgataaatgtat

SEQ ID NO: 693642 - DNA, 19 bp, Mus musculus
  siRNA target sequence for Zdhhc2 (NM_178395.2,658-676).
cgtctgtgataaatgtatt

SEQ ID NO: 693643 - DNA, 19 bp, Mus musculus
  siRNA target sequence for Zdhhc2 (NM_178395.2,659-677).
gtctgtgataaatgtattt

SEQ ID NO: 693644 - DNA, 19 bp, Mus musculus
  siRNA target sequence for Zdhhc2 (NM_178395.2,697-715).
cccatgggtgaacaattgt

SEQ ID NO: 693645 - DNA, 19 bp, Mus musculus
  siRNA target sequence for Zdhhc2 (NM_178395.2,766-784).
gctgtactgccttttcatt

SEQ ID NO: 693646 - DNA, 19 bp, Mus musculus
  siRNA target sequence for Zdhhc2 (NM_178395.2,781-799).
cattgctgctaccgattta

SEQ ID NO: 693647 - DNA, 19 bp, Mus musculus
  siRNA target sequence for Zdhhc2 (NM_178395.2,785-803).
gctgctaccgatttacagt

SEQ ID NO: 693648 - DNA, 19 bp, Mus musculus
  siRNA target sequence for Zdhhc2 (NM_178395.2,786-804).
ctgctaccgatttacagta

SEQ ID NO: 693649 - DNA, 19 bp, Mus musculus
  siRNA target sequence for Zdhhc2 (NM_178395.2,788-806).
gctaccgatttacagtatt

SEQ ID NO: 693650 - DNA, 19 bp, Mus musculus
  siRNA target sequence for Zdhhc2 (NM_178395.2,789-807).
ctaccgatttacagtattt

SEQ ID NO: 693651 - DNA, 19 bp, Mus musculus
  siRNA target sequence for Zdhhc2 (NM_178395.2,840-858).
ctcaagccaagttccatat

SEQ ID NO: 693652 - DNA, 19 bp, Mus musculus
  siRNA target sequence for Zdhhc2 (NM_178395.2,845-863).
gccaagttccatattatgt

SEQ ID NO: 693653 - DNA, 19 bp, Mus musculus
  siRNA target sequence for Zdhhc2 (NM_178395.2,850-868).
gttccatattatgttttta

SEQ ID NO: 693654 - DNA, 19 bp, Mus musculus
  siRNA target sequence for Zdhhc2 (NM_178395.2,903-921).
cctctctgtttggttatca

SEQ ID NO: 693655 - DNA, 19 bp, Mus musculus
  siRNA target sequence for Zdhhc2 (NM_178395.2,924-942).
gctggctagtcagcaaaaa

SEQ ID NO: 693656 - DNA, 19 bp, Mus musculus
  siRNA target sequence for Zdhhc2 (NM_178395.2,925-943).
ctggctagtcagcaaaaat

SEQ ID NO: 693657 - DNA, 19 bp, Mus musculus
  siRNA target sequence for Zdhhc2 (NM_178395.2,960-978).
cattcagaaatccagtatt

SEQ ID NO: 693658 - DNA, 19 bp, Mus musculus
  siRNA target sequence for Zdhhc2 (NM_178395.2,964-982).
cagaaatccagtatttaga

SEQ ID NO: 693659 - DNA, 19 bp, Mus musculus
  siRNA target sequence for Zdhhc2 (NM_178395.2,966-984).
gaaatccagtatttagaca

SEQ ID NO: 693660 - DNA, 19 bp, Mus musculus
  siRNA target sequence for Zdhhc2 (NM_178395.2,981-999).
gacacggaacagataagaa

SEQ ID NO: 693661 - DNA, 19 bp, Mus musculus
  siRNA target sequence for Zdhhc2 (NM_178395.2,1063-1081).
gctgttaccagtattttca

SEQ ID NO: 693662 - DNA, 19 bp, Mus musculus
  siRNA target sequence for Zdhhc2 (NM_178395.2,1066-1084).
gttaccagtattttcaagt

SEQ ID NO: 693663 - DNA, 19 bp, Mus musculus
  siRNA target sequence for Zdhhc2 (NM_178395.2,1091-1109).
gatggctgttcctttccaa

SEQ ID NO: 693664 - DNA, 19 bp, Mus musculus
  siRNA target sequence for Zdhhc2 (NM_178395.2,1143-1161).
ctactcctgcgggactaaa

SEQ ID NO: 693665 - DNA, 19 bp, Mus musculus
  siRNA target sequence for Zdhhc2 (NM_178395.2,1148-1166).
cctgcgggactaaattcaa

SEQ ID NO: 693666 - DNA, 19 bp, Mus musculus
  siRNA target sequence for Zdhhc2 (NM_178395.2,1222-1240).
gagccatctccttaaggat

SEQ ID NO: 693667 - DNA, 19 bp, Mus musculus
  siRNA target sequence for Zdhhc2 (NM_178395.2,1296-1314).
gcaaccctgcattaactat

SEQ ID NO: 693668 - DNA, 19 bp, Mus musculus
  siRNA target sequence for Zdhhc4 (NM_028379.1,272-290).
gttctacttggccttctta

SEQ ID NO: 693669 - DNA, 19 bp, Mus musculus
  siRNA target sequence for Zdhhc4 (NM_028379.1,281-299).
ggccttcttattgatttgt

SEQ ID NO: 693670 - DNA, 19 bp, Mus musculus
  siRNA target sequence for Zdhhc4 (NM_028379.1,403-421).
ccgtgcagacgcttcttca

SEQ ID NO: 693671 - DNA, 19 bp, Mus musculus
  siRNA target sequence for Zdhhc4 (NM_028379.1,404-422).
cgtgcagacgcttcttcat

SEQ ID NO: 693672 - DNA, 19 bp, Mus musculus
  siRNA target sequence for Zdhhc4 (NM_028379.1,470-488).
cttgcaagggctagtgtat

SEQ ID NO: 693673 - DNA, 19 bp, Mus musculus
  siRNA target sequence for Zdhhc4 (NM_028379.1,478-496).
ggctagtgtatgcagaata

SEQ ID NO: 693674 - DNA, 19 bp, Mus musculus
  siRNA target sequence for Zdhhc4 (NM_028379.1,574-592).
gcgtgaacctggtgttctt

SEQ ID NO: 693675 - DNA, 19 bp, Mus musculus
  siRNA target sequence for Zdhhc4 (NM_028379.1,618-636).
ggtaccatcactaaagcaa

SEQ ID NO: 693676 - DNA, 19 bp, Mus musculus
  siRNA target sequence for Zdhhc4 (NM_028379.1,619-637).
gtaccatcactaaagcaaa

SEQ ID NO: 693677 - DNA, 19 bp, Mus musculus
  siRNA target sequence for Zdhhc4 (NM_028379.1,623-641).
catcactaaagcaaacgaa

SEQ ID NO: 693678 - DNA, 19 bp, Mus musculus
  siRNA target sequence for Zdhhc4 (NM_028379.1,653-671).
gcaagtctataaattcgat

SEQ ID NO: 693679 - DNA, 19 bp, Mus musculus
  siRNA target sequence for Zdhhc4 (NM_028379.1,698-716).
gtgccccacttgcgattta

SEQ ID NO: 693680 - DNA, 19 bp, Mus musculus
  siRNA target sequence for Zdhhc4 (NM_028379.1,702-720).
cccacttgcgatttaagga

SEQ ID NO: 693681 - DNA, 19 bp, Mus musculus
  siRNA target sequence for Zdhhc4 (NM_028379.1,703-721).
ccacttgcgatttaaggaa

SEQ ID NO: 693682 - DNA, 19 bp, Mus musculus
  siRNA target sequence for Zdhhc4 (NM_028379.1,704-722).
cacttgcgatttaaggaaa

SEQ ID NO: 693683 - DNA, 19 bp, Mus musculus
  siRNA target sequence for Zdhhc4 (NM_028379.1,823-841).
ggtacttcctcatttacct

SEQ ID NO: 693684 - DNA, 19 bp, Mus musculus
  siRNA target sequence for Zdhhc4 (NM_028379.1,998-1016).
cctggcatttccaaggatt

SEQ ID NO: 693685 - DNA, 19 bp, Mus musculus
  siRNA target sequence for Zdhhc4 (NM_028379.1,1186-1204).
ggatccaccagaacattca

SEQ ID NO: 693686 - DNA, 19 bp, Mus musculus
  siRNA target sequence for Zdhhc4 (NM_028379.1,1203-1221).
cactcccacgggtttagga

SEQ ID NO: 693687 - DNA, 19 bp, Mus musculus
  siRNA target sequence for Zdhhc4 (NM_028379.1,1222-1240).
gcaaccttcgagagatctt

SEQ ID NO: 693688 - DNA, 19 bp, Mus musculus
  siRNA target sequence for Zdhhc4 (NM_028379.1,1248-1266).
gctacccccagttacaaga

SEQ ID NO: 693689 - DNA, 19 bp, Mus musculus
  siRNA target sequence for Zdhhc5 (NM_144887.2,1209-1227).
ctcagcagccgccatattt

SEQ ID NO: 693690 - DNA, 19 bp, Mus musculus
  siRNA target sequence for Zdhhc5 (NM_144887.2,1214-1232).
cagccgccatatttctagt

SEQ ID NO: 693691 - DNA, 19 bp, Mus musculus
  siRNA target sequence for Zdhhc5 (NM_144887.2,1235-1253).
gagctacaacactcttctt

SEQ ID NO: 693692 - DNA, 19 bp, Mus musculus
  siRNA target sequence for Zdhhc5 (NM_144887.2,1246-1264).
ctcttctttgcctttacgt

SEQ ID NO: 693693 - DNA, 19 bp, Mus musculus
  siRNA target sequence for Zdhhc5 (NM_144887.2,1268-1286).
caggactaagcctgaatgt

SEQ ID NO: 693694 - DNA, 19 bp, Mus musculus
  siRNA target sequence for Zdhhc5 (NM_144887.2,1379-1397).
cccgagccgaggaagatga

SEQ ID NO: 693695 - DNA, 19 bp, Mus musculus
  siRNA target sequence for Zdhhc5 (NM_144887.2,1416-1434).
ccgagctcccctttacaaa

SEQ ID NO: 693696 - DNA, 19 bp, Mus musculus
  siRNA target sequence for Zdhhc5 (NM_144887.2,1417-1435).
cgagctcccctttacaaaa

SEQ ID NO: 693697 - DNA, 19 bp, Mus musculus
  siRNA target sequence for Zdhhc5 (NM_144887.2,1475-1493).
gtgccacctgccgctttta

SEQ ID NO: 693698 - DNA, 19 bp, Mus musculus
  siRNA target sequence for Zdhhc5 (NM_144887.2,1566-1584).
ggtaaacaactgtattggt

SEQ ID NO: 693699 - DNA, 19 bp, Mus musculus
  siRNA target sequence for Zdhhc5 (NM_144887.2,1582-1600).
ggtcgcaggaactacagat

SEQ ID NO: 693700 - DNA, 19 bp, Mus musculus
  siRNA target sequence for Zdhhc5 (NM_144887.2,1583-1601).
gtcgcaggaactacagata

SEQ ID NO: 693701 - DNA, 19 bp, Mus musculus
  siRNA target sequence for Zdhhc5 (NM_144887.2,1585-1603).
cgcaggaactacagatact

SEQ ID NO: 693702 - DNA, 19 bp, Mus musculus
  siRNA target sequence for Zdhhc5 (NM_144887.2,1586-1604).
gcaggaactacagatactt

SEQ ID NO: 693703 - DNA, 19 bp, Mus musculus
  siRNA target sequence for Zdhhc5 (NM_144887.2,1622-1640).
ccctgacagctcacatcat

SEQ ID NO: 693704 - DNA, 19 bp, Mus musculus
  siRNA target sequence for Zdhhc5 (NM_144887.2,1763-1781).
gcctcacaggatttcatgt

SEQ ID NO: 693705 - DNA, 19 bp, Mus musculus
  siRNA target sequence for Zdhhc5 (NM_144887.2,1813-1831).
gaacaggttacaggtaaat

SEQ ID NO: 693706 - DNA, 19 bp, Mus musculus
  siRNA target sequence for Zdhhc5 (NM_144887.2,1861-1879).
ggctgctgtaacaacgtta

SEQ ID NO: 693707 - DNA, 19 bp, Mus musculus
  siRNA target sequence for Zdhhc5 (NM_144887.2,2014-2032).
ggcatccagggagaattga

SEQ ID NO: 693708 - DNA, 19 bp, Mus musculus
  siRNA target sequence for Zdhhc5 (NM_144887.2,2026-2044).
gaattgaggaggactaagt

SEQ ID NO: 693709 - DNA, 19 bp, Mus musculus
  siRNA target sequence for Zdhhc5 (NM_144887.2,2031-2049).
gaggaggactaagtctaaa

SEQ ID NO: 693710 - DNA, 19 bp, Mus musculus
  siRNA target sequence for Zdhhc5 (NM_144887.2,2034-2052).
gaggactaagtctaaagga

SEQ ID NO: 693711 - DNA, 19 bp, Mus musculus
  siRNA target sequence for Zdhhc5 (NM_144887.2,2201-2219).
cacctaccatgtacaagta

SEQ ID NO: 693712 - DNA, 19 bp, Mus musculus
  siRNA target sequence for Zdhhc5 (NM_144887.2,2376-2394).
cttccggtctcctactttt

SEQ ID NO: 693713 - DNA, 19 bp, Mus musculus
  siRNA target sequence for Zdhhc5 (NM_144887.2,2386-2404).
cctacttttggcaaaagct

SEQ ID NO: 693714 - DNA, 19 bp, Mus musculus
  siRNA target sequence for Zdhhc5 (NM_144887.2,2482-2500).
cagttgcagtccattcgtt

SEQ ID NO: 693715 - DNA, 19 bp, Mus musculus
  siRNA target sequence for Zdhhc5 (NM_144887.2,2548-2566).
cgcaatggaagtctatctt

SEQ ID NO: 693716 - DNA, 19 bp, Mus musculus
  siRNA target sequence for Zdhhc5 (NM_144887.2,2549-2567).
gcaatggaagtctatctta

SEQ ID NO: 693717 - DNA, 19 bp, Mus musculus
  siRNA target sequence for Zdhhc5 (NM_144887.2,2550-2568).
caatggaagtctatcttat

SEQ ID NO: 693718 - DNA, 19 bp, Mus musculus
  siRNA target sequence for Zdhhc5 (NM_144887.2,2747-2765).
cagtccgttatgacaatct

SEQ ID NO: 693719 - DNA, 19 bp, Mus musculus
  siRNA target sequence for Zdhhc5 (NM_144887.2,2749-2767).
gtccgttatgacaatctgt

SEQ ID NO: 693720 - DNA, 19 bp, Mus musculus
  siRNA target sequence for Zdhhc5 (NM_144887.2,3045-3063).
ctacctgggccgatcaata

SEQ ID NO: 693721 - DNA, 19 bp, Mus musculus
  siRNA target sequence for Zdhhc5 (NM_144887.2,3049-3067).
ctgggccgatcaatatcct

SEQ ID NO: 693722 - DNA, 19 bp, Mus musculus
  siRNA target sequence for Zdhhc5 (NM_144887.2,3055-3073).
cgatcaatatcctatagca

SEQ ID NO: 693723 - DNA, 19 bp, Mus musculus
  siRNA target sequence for Zdhhc5 (NM_144887.2,3273-3291).
ggtgggtggcaccacttat

SEQ ID NO: 693724 - DNA, 19 bp, Mus musculus
  siRNA target sequence for Zdhhc5 (NM_144887.2,3277-3295).
ggtggcaccacttatgaga

SEQ ID NO: 693725 - DNA, 19 bp, Mus musculus
  siRNA target sequence for Zdhhc5 (NM_144887.2,3278-3296).
gtggcaccacttatgagat

SEQ ID NO: 693726 - DNA, 19 bp, Mus musculus
  siRNA target sequence for Zdhhc5 (NM_144887.2,3280-3298).
ggcaccacttatgagattt

SEQ ID NO: 693727 - DNA, 19 bp, Mus musculus
  siRNA target sequence for Zdhhc5 (NM_144887.2,3282-3300).
caccacttatgagatttct

SEQ ID NO: 693728 - DNA, 19 bp, Mus musculus
  siRNA target sequence for Zdhhc6 (NM_025883.2,1127-1145).
gtttgccgccaccttgttt

SEQ ID NO: 693729 - DNA, 19 bp, Mus musculus
  siRNA target sequence for Zdhhc6 (NM_025883.2,1649-1667).
cttcatagaaggtacttca

SEQ ID NO: 693730 - DNA, 19 bp, Mus musculus
  siRNA target sequence for Zdhhc6 (NM_025883.2,1656-1674).
gaaggtacttcaagagtaa

SEQ ID NO: 693731 - DNA, 19 bp, Mus musculus
  siRNA target sequence for Zdhhc6 (NM_025883.2,1671-1689).
gtaagagggtggtttccta

SEQ ID NO: 693732 - DNA, 19 bp, Mus musculus
  siRNA target sequence for Xin (NM_011724.1,296-314).
gctccggcgtctctacaaa

SEQ ID NO: 693733 - DNA, 19 bp, Mus musculus
  siRNA target sequence for Xin (NM_011724.1,300-318).
cggcgtctctacaaacaca

SEQ ID NO: 693734 - DNA, 19 bp, Mus musculus
  siRNA target sequence for Xin (NM_011724.1,394-412).
ccactgagggcgatgttca

SEQ ID NO: 693735 - DNA, 19 bp, Mus musculus
  siRNA target sequence for Xin (NM_011724.1,415-433).
gtatgcgctggatctttga

SEQ ID NO: 693736 - DNA, 19 bp, Mus musculus
  siRNA target sequence for Xin (NM_011724.1,508-526).
ggccacctctcgaaagttt

SEQ ID NO: 693737 - DNA, 19 bp, Mus musculus
  siRNA target sequence for Xin (NM_011724.1,598-616).
ctgccagacagatgtttga

SEQ ID NO: 693738 - DNA, 19 bp, Mus musculus
  siRNA target sequence for Xin (NM_011724.1,872-890).
gcaccatccacgaagtcaa

SEQ ID NO: 693739 - DNA, 19 bp, Mus musculus
  siRNA target sequence for Xin (NM_011724.1,931-949).
ctgctcgctggctctttga

SEQ ID NO: 693740 - DNA, 19 bp, Mus musculus
  siRNA target sequence for Xin (NM_011724.1,1045-1063).
caactcgttggatctttga

SEQ ID NO: 693741 - DNA, 19 bp, Mus musculus
  siRNA target sequence for Xin (NM_011724.1,1161-1179).
cagcgacatctgtttgaaa

SEQ ID NO: 693742 - DNA, 19 bp, Mus musculus
  siRNA target sequence for Xin (NM_011724.1,1193-1211).
cactctgaagggtgaaaga

SEQ ID NO: 693743 - DNA, 19 bp, Mus musculus
  siRNA target sequence for Xin (NM_011724.1,1195-1213).
ctctgaagggtgaaagaga

SEQ ID NO: 693744 - DNA, 19 bp, Mus musculus
  siRNA target sequence for Xin (NM_011724.1,1265-1283).
ctctacactctggctattt

SEQ ID NO: 693745 - DNA, 19 bp, Mus musculus
  siRNA target sequence for Xin (NM_011724.1,1376-1394).
gtgtctacccagtaatggt

SEQ ID NO: 693746 - DNA, 19 bp, Mus musculus
  siRNA target sequence for Xin (NM_011724.1,1418-1436).
gggtgtcccccagaatgat

SEQ ID NO: 693747 - DNA, 19 bp, Mus musculus
  siRNA target sequence for Xin (NM_011724.1,1439-1457).
gttgaaaggggatgtgaaa

SEQ ID NO: 693748 - DNA, 19 bp, Mus musculus
  siRNA target sequence for Xin (NM_011724.1,1649-1667).
ggtagttggaggtgatgtt

SEQ ID NO: 693749 - DNA, 19 bp, Mus musculus
  siRNA target sequence for Xin (NM_011724.1,1670-1688).
gggctacaagtggatgttt

SEQ ID NO: 693750 - DNA, 19 bp, Mus musculus
  siRNA target sequence for Xin (NM_011724.1,1807-1825).
cgcagccattggagatgat

SEQ ID NO: 693751 - DNA, 19 bp, Mus musculus
  siRNA target sequence for Xin (NM_011724.1,1895-1913).
ccccaaaaagggtgatgta

SEQ ID NO: 693752 - DNA, 19 bp, Mus musculus
  siRNA target sequence for Xin (NM_011724.1,1897-1915).
ccaaaaagggtgatgtaca

SEQ ID NO: 693753 - DNA, 19 bp, Mus musculus
  siRNA target sequence for Xin (NM_011724.1,1918-1936).
ctatccgttggctgtttga

SEQ ID NO: 693754 - DNA, 19 bp, Mus musculus
  siRNA target sequence for Xin (NM_011724.1,2268-2286).
gtcccggagaccacaatca

SEQ ID NO: 693755 - DNA, 19 bp, Mus musculus
  siRNA target sequence for Xin (NM_011724.1,2305-2323).
caggctctgtgcataaatt

SEQ ID NO: 693756 - DNA, 19 bp, Mus musculus
  siRNA target sequence for Xin (NM_011724.1,2307-2325).
ggctctgtgcataaattca

SEQ ID NO: 693757 - DNA, 19 bp, Mus musculus
  siRNA target sequence for Xin (NM_011724.1,2733-2751).
ctggtgaccctgggaatat

SEQ ID NO: 693758 - DNA, 19 bp, Mus musculus
  siRNA target sequence for Xin (NM_011724.1,3051-3069).
catgttaccccattagact

SEQ ID NO: 693759 - DNA, 19 bp, Mus musculus
  siRNA target sequence for Xin (NM_011724.1,3139-3157).
gaaaagtggtccttccaaa

SEQ ID NO: 693760 - DNA, 19 bp, Mus musculus
  siRNA target sequence for Xin (NM_011724.1,3717-3735).
cccaaacctgcacatctaa

SEQ ID NO: 693761 - DNA, 19 bp, Mus musculus
  siRNA target sequence for Xin (NM_011724.1,3957-3975).
cctagcaggggtcagataa

SEQ ID NO: 693762 - DNA, 19 bp, Mus musculus
  siRNA target sequence for Xin (NM_011724.1,3994-4012).
gccccgagtctcctaagtt

SEQ ID NO: 693763 - DNA, 19 bp, Mus musculus
  siRNA target sequence for Xin (NM_011724.1,4038-4056).
ccaccacaaaagcacaata

SEQ ID NO: 693764 - DNA, 19 bp, Mus musculus
  siRNA target sequence for Xin (NM_011724.1,4041-4059).
ccacaaaagcacaatagct

SEQ ID NO: 693765 - DNA, 19 bp, Mus musculus
  siRNA target sequence for Xin (NM_011724.1,4416-4434).
catccacagggaactacaa

SEQ ID NO: 693766 - DNA, 19 bp, Mus musculus
  siRNA target sequence for Xin (NM_011724.1,4672-4690).
gatcctcctctccaacttt

SEQ ID NO: 693767 - DNA, 19 bp, Mus musculus
  siRNA target sequence for Xin (NM_011724.1,4696-4714).
cagtccaatcagctacaaa

SEQ ID NO: 693768 - DNA, 19 bp, Mus musculus
  siRNA target sequence for Xin (NM_011724.1,4698-4716).
gtccaatcagctacaaaga

SEQ ID NO: 693769 - DNA, 19 bp, Mus musculus
  siRNA target sequence for Xin (NM_011724.1,4736-4754).
ccctcagggaagccattat

SEQ ID NO: 693770 - DNA, 19 bp, Mus musculus
  siRNA target sequence for Xin (NM_011724.1,4873-4891).
ggcagccaaagaatgttct

SEQ ID NO: 693771 - DNA, 19 bp, Mus musculus
  siRNA target sequence for Xin (NM_011724.1,4967-4985).
ggaccaatttgggaataca

SEQ ID NO: 693772 - DNA, 19 bp, Mus musculus
  siRNA target sequence for Xin (NM_011724.1,5068-5086).
ccatgctaaggcagttact

SEQ ID NO: 693773 - DNA, 19 bp, Mus musculus
  siRNA target sequence for Xin (NM_011724.1,5117-5135).
ggcagaagctgagataaca

SEQ ID NO: 693774 - DNA, 19 bp, Mus musculus
  siRNA target sequence for Xin (NM_011724.1,5134-5152).
catggactccctgtaacaa

SEQ ID NO: 693775 - DNA, 19 bp, Mus musculus
  siRNA target sequence for Lims2 (NM_144862.1,262-280).
cggattctgtggtgaattt

SEQ ID NO: 693776 - DNA, 19 bp, Mus musculus
  siRNA target sequence for Lims2 (NM_144862.1,326-344).
ggctgcttccgctgtgaat

SEQ ID NO: 693777 - DNA, 19 bp, Mus musculus
  siRNA target sequence for Lims2 (NM_144862.1,434-452).
ggcttgggcaaattcatct

SEQ ID NO: 693778 - DNA, 19 bp, Mus musculus
  siRNA target sequence for Lims2 (NM_144862.1,487-505).
cctcatgttcaagaatgat

SEQ ID NO: 693779 - DNA, 19 bp, Mus musculus
  siRNA target sequence for Lims2 (NM_144862.1,794-812).
ggggatgtctgctacaact

SEQ ID NO: 693780 - DNA, 19 bp, Mus musculus
  siRNA target sequence for Lims2 (NM_144862.1,882-900).
gttccacctgcaacatgaa

SEQ ID NO: 693781 - DNA, 19 bp, Mus musculus
  siRNA target sequence for Lims2 (NM_144862.1,946-964).
gtgtaagaggtgctatgaa

SEQ ID NO: 693782 - DNA, 19 bp, Mus musculus
  siRNA target sequence for Tgfb1i1 (NM_009365.2,1451-1469).
ctggggacaaggatcatct

SEQ ID NO: 693783 - DNA, 19 bp, Mus musculus
  siRNA target sequence for Tgfb1i1 (NM_009365.2,1453-1471).
ggggacaaggatcatctat

SEQ ID NO: 693784 - DNA, 19 bp, Mus musculus
  siRNA target sequence for Tgfb1i1 (NM_009365.2,1454-1472).
gggacaaggatcatctata

SEQ ID NO: 693785 - DNA, 19 bp, Mus musculus
  siRNA target sequence for Tgfb1i1 (NM_009365.2,1456-1474).
gacaaggatcatctataca

SEQ ID NO: 693786 - DNA, 19 bp, Mus musculus
  siRNA target sequence for Tgfb1i1 (NM_009365.2,1605-1623).
gttcaacattacagatgaa

SEQ ID NO: 693787 - DNA, 19 bp, Mus musculus
  siRNA target sequence for Tgfb1i1 (NM_009365.2,1790-1808).
ctgacttccgtgttcagaa

SEQ ID NO: 693788 - DNA, 19 bp, Mus musculus
  siRNA target sequence for Tgfb1i1 (NM_009365.2,1980-1998).
ctcctgcaataaacctata

SEQ ID NO: 693789 - DNA, 19 bp, Mus musculus
  siRNA target sequence for Tgfb1i1 (NM_009365.2,2166-2184).
ccaacccatccgacacaaa

SEQ ID NO: 693790 - DNA, 19 bp, Mus musculus
  siRNA target sequence for Tgfb1i1 (NM_009365.2,2167-2185).
caacccatccgacacaaaa

SEQ ID NO: 693791 - DNA, 19 bp, Mus musculus
  siRNA target sequence for Tgfb1i1 (NM_009365.2,2238-2256).
ctgcggagagccttttgga

SEQ ID NO: 693792 - DNA, 19 bp, Mus musculus
  siRNA target sequence for Tgfb1i1 (NM_009365.2,2339-2357).
gccaaggccctattttgga

SEQ ID NO: 693793 - DNA, 19 bp, Mus musculus
  siRNA target sequence for Tgfb1i1 (NM_009365.2,2340-2358).
ccaaggccctattttggat

SEQ ID NO: 693794 - DNA, 19 bp, Mus musculus
  siRNA target sequence for Tgfb1i1 (NM_009365.2,2341-2359).
caaggccctattttggata

SEQ ID NO: 693795 - DNA, 19 bp, Mus musculus
  siRNA target sequence for Tgfb1i1 (NM_009365.2,2347-2365).
cctattttggataactaca

SEQ ID NO: 693796 - DNA, 19 bp, Mus musculus
  siRNA target sequence for Tgfb1i1 (NM_009365.2,2348-2366).
ctattttggataactacat

SEQ ID NO: 693797 - DNA, 19 bp, Mus musculus
  siRNA target sequence for Tgfb1i1 (NM_009365.2,2432-2450).
ccggaggcagcttttttga

SEQ ID NO: 693798 - DNA, 19 bp, Mus musculus
  siRNA target sequence for Tgfb1i1 (NM_009365.2,2454-2472).
cgagggtcgccctttgtgt

SEQ ID NO: 693799 - DNA, 19 bp, Mus musculus
  siRNA target sequence for Tgfb1i1 (NM_009365.2,2458-2476).
ggtcgccctttgtgtgaaa

SEQ ID NO: 693800 - DNA, 19 bp, Mus musculus
  siRNA target sequence for Tgfb1i1 (NM_009365.2,2459-2477).
gtcgccctttgtgtgaaaa

SEQ ID NO: 693801 - DNA, 19 bp, Mus musculus
  siRNA target sequence for Col17a1 (NM_007732.1,328-346).
ctgaagtcaccgagagaat

SEQ ID NO: 693802 - DNA, 19 bp, Mus musculus
  siRNA target sequence for Col17a1 (NM_007732.1,343-361).
gaattgtcacggaaacagt

SEQ ID NO: 693803 - DNA, 19 bp, Mus musculus
  siRNA target sequence for Col17a1 (NM_007732.1,360-378).
gtaacgacaagacttacat

SEQ ID NO: 693804 - DNA, 19 bp, Mus musculus
  siRNA target sequence for Col17a1 (NM_007732.1,398-416).
caccagcaatggatatgct

SEQ ID NO: 693805 - DNA, 19 bp, Mus musculus
  siRNA target sequence for Col17a1 (NM_007732.1,573-591).
cccggctccacctttgaaa

SEQ ID NO: 693806 - DNA, 19 bp, Mus musculus
  siRNA target sequence for Col17a1 (NM_007732.1,605-623).
gacccgccatggaacttat

SEQ ID NO: 693807 - DNA, 19 bp, Mus musculus
  siRNA target sequence for Col17a1 (NM_007732.1,607-625).
cccgccatggaacttatga

SEQ ID NO: 693808 - DNA, 19 bp, Mus musculus
  siRNA target sequence for Col17a1 (NM_007732.1,608-626).
ccgccatggaacttatgaa

SEQ ID NO: 693809 - DNA, 19 bp, Mus musculus
  siRNA target sequence for Col17a1 (NM_007732.1,865-883).
ccgtagagaccaaaacagt

SEQ ID NO: 693810 - DNA, 19 bp, Mus musculus
  siRNA target sequence for Col17a1 (NM_007732.1,899-917).
ctcagtgtccggaacctat

SEQ ID NO: 693811 - DNA, 19 bp, Mus musculus
  siRNA target sequence for Col17a1 (NM_007732.1,913-931).
cctatgattcagcaatact

SEQ ID NO: 693812 - DNA, 19 bp, Mus musculus
  siRNA target sequence for Col17a1 (NM_007732.1,992-1010).
gacctatcagaacaacata

SEQ ID NO: 693813 - DNA, 19 bp, Mus musculus
  siRNA target sequence for Col17a1 (NM_007732.1,995-1013).
ctatcagaacaacataaca

SEQ ID NO: 693814 - DNA, 19 bp, Mus musculus
  siRNA target sequence for Col17a1 (NM_007732.1,1049-1067).
ctcaacgggatcagtcttt

SEQ ID NO: 693815 - DNA, 19 bp, Mus musculus
  siRNA target sequence for Col17a1 (NM_007732.1,1062-1080).
gtctttggagtgccaaata

SEQ ID NO: 693816 - DNA, 19 bp, Mus musculus
  siRNA target sequence for Col17a1 (NM_007732.1,1206-1224).
gcatacggagcgaagaaaa

SEQ ID NO: 693817 - DNA, 19 bp, Mus musculus
  siRNA target sequence for Col17a1 (NM_007732.1,1207-1225).
catacggagcgaagaaaaa

SEQ ID NO: 693818 - DNA, 19 bp, Mus musculus
  siRNA target sequence for Col17a1 (NM_007732.1,1302-1320).
gacctcttgcataaagact

SEQ ID NO: 693819 - DNA, 19 bp, Mus musculus
  siRNA target sequence for Col17a1 (NM_007732.1,1553-1571).
gacctcggcagaaaaccat

SEQ ID NO: 693820 - DNA, 19 bp, Mus musculus
  siRNA target sequence for Col17a1 (NM_007732.1,1832-1850).
gaccaaggtgctatatcat

SEQ ID NO: 693821 - DNA, 19 bp, Mus musculus
  siRNA target sequence for Col17a1 (NM_007732.1,1834-1852).
ccaaggtgctatatcatga

SEQ ID NO: 693822 - DNA, 19 bp, Mus musculus
  siRNA target sequence for Col17a1 (NM_007732.1,1851-1869).
gacgtccagatggacaaaa

SEQ ID NO: 693823 - DNA, 19 bp, Mus musculus
  siRNA target sequence for Col17a1 (NM_007732.1,2039-2057).
ggggagtcaaggacctaaa

SEQ ID NO: 693824 - DNA, 19 bp, Mus musculus
  siRNA target sequence for Col17a1 (NM_007732.1,2042-2060).
gagtcaaggacctaaagga

SEQ ID NO: 693825 - DNA, 19 bp, Mus musculus
  siRNA target sequence for Col17a1 (NM_007732.1,2387-2405).
gggacttcctggtgtcaaa

SEQ ID NO: 693826 - DNA, 19 bp, Mus musculus
  siRNA target sequence for Col17a1 (NM_007732.1,2727-2745).
cccggcagagtcatgactt

SEQ ID NO: 693827 - DNA, 19 bp, Mus musculus
  siRNA target sequence for Col17a1 (NM_007732.1,2741-2759).
gacttcagagggatcatca

SEQ ID NO: 693828 - DNA, 19 bp, Mus musculus
  siRNA target sequence for Col17a1 (NM_007732.1,2746-2764).
cagagggatcatcaacaat

SEQ ID NO: 693829 - DNA, 19 bp, Mus musculus
  siRNA target sequence for Col17a1 (NM_007732.1,2748-2766).
gagggatcatcaacaatca

SEQ ID NO: 693830 - DNA, 19 bp, Mus musculus
  siRNA target sequence for Col17a1 (NM_007732.1,2750-2768).
gggatcatcaacaatcact

SEQ ID NO: 693831 - DNA, 19 bp, Mus musculus
  siRNA target sequence for Col17a1 (NM_007732.1,2889-2907).
gctggtgactcattcctaa

SEQ ID NO: 693832 - DNA, 19 bp, Mus musculus
  siRNA target sequence for Col17a1 (NM_007732.1,3211-3229).
catcaagcactctgtacat

SEQ ID NO: 693833 - DNA, 19 bp, Mus musculus
  siRNA target sequence for Col17a1 (NM_007732.1,3280-3298).
gcagctccggccaggatat

SEQ ID NO: 693834 - DNA, 19 bp, Mus musculus
  siRNA target sequence for Col17a1 (NM_007732.1,3439-3457).
caagccaggtcgtaagcta

SEQ ID NO: 693835 - DNA, 19 bp, Mus musculus
  siRNA target sequence for Col17a1 (NM_007732.1,3536-3554).
cgatgtgtggcagtactta

SEQ ID NO: 693836 - DNA, 19 bp, Mus musculus
  siRNA target sequence for Col17a1 (NM_007732.1,3545-3563).
gcagtacttacgtcagaat

SEQ ID NO: 693837 - DNA, 19 bp, Mus musculus
  siRNA target sequence for Col17a1 (NM_007732.1,3646-3664).
gcagacacattctcaacta

SEQ ID NO: 693838 - DNA, 19 bp, Mus musculus
  siRNA target sequence for Col17a1 (NM_007732.1,3647-3665).
cagacacattctcaactat

SEQ ID NO: 693839 - DNA, 19 bp, Mus musculus
  siRNA target sequence for Col17a1 (NM_007732.1,3657-3675).
ctcaactatatgtcaagtt

SEQ ID NO: 693840 - DNA, 19 bp, Mus musculus
  siRNA target sequence for Col17a1 (NM_007732.1,3882-3900).
cgcagcgagctgattagct

SEQ ID NO: 693841 - DNA, 19 bp, Mus musculus
  siRNA target sequence for Col17a1 (NM_007732.1,3883-3901).
gcagcgagctgattagcta

SEQ ID NO: 693842 - DNA, 19 bp, Mus musculus
  siRNA target sequence for Col17a1 (NM_007732.1,3979-3997).
gtcacttaagggagaacta

SEQ ID NO: 693843 - DNA, 19 bp, Mus musculus
  siRNA target sequence for Col17a1 (NM_007732.1,3981-3999).
cacttaagggagaactaca

SEQ ID NO: 693844 - DNA, 19 bp, Mus musculus
  siRNA target sequence for Col17a1 (NM_007732.1,4161-4179).
gctgcaggtggtggtatat

SEQ ID NO: 693845 - DNA, 19 bp, Mus musculus
  siRNA target sequence for Col17a1 (NM_007732.1,4219-4237).
gagacctagattacaacaa

SEQ ID NO: 693846 - DNA, 19 bp, Mus musculus
  siRNA target sequence for Snap91 (NM_013669.1,290-308).
ccaatgagaccaatgtcaa

SEQ ID NO: 693847 - DNA, 19 bp, Mus musculus
  siRNA target sequence for Snap91 (NM_013669.1,291-309).
caatgagaccaatgtcaat

SEQ ID NO: 693848 - DNA, 19 bp, Mus musculus
  siRNA target sequence for Snap91 (NM_013669.1,356-374).
gctgggtggtggtatttaa

SEQ ID NO: 693849 - DNA, 19 bp, Mus musculus
  siRNA target sequence for Snap91 (NM_013669.1,363-381).
ggtggtatttaaagcttta

SEQ ID NO: 693850 - DNA, 19 bp, Mus musculus
  siRNA target sequence for Snap91 (NM_013669.1,429-447).
gtatttggcctctaggaat

SEQ ID NO: 693851 - DNA, 19 bp, Mus musculus
  siRNA target sequence for Snap91 (NM_013669.1,440-458).
ctaggaatacgctattcaa

SEQ ID NO: 693852 - DNA, 19 bp, Mus musculus
  siRNA target sequence for Snap91 (NM_013669.1,443-461).
ggaatacgctattcaatct

SEQ ID NO: 693853 - DNA, 19 bp, Mus musculus
  siRNA target sequence for Snap91 (NM_013669.1,460-478).
ctcagcaactttctagata

SEQ ID NO: 693854 - DNA, 19 bp, Mus musculus
  siRNA target sequence for Snap91 (NM_013669.1,462-480).
cagcaactttctagataaa

SEQ ID NO: 693855 - DNA, 19 bp, Mus musculus
  siRNA target sequence for Snap91 (NM_013669.1,465-483).
caactttctagataaaagt

SEQ ID NO: 693856 - DNA, 19 bp, Mus musculus
  siRNA target sequence for Snap91 (NM_013669.1,482-500).
gtggatcccacggttatga

SEQ ID NO: 693857 - DNA, 19 bp, Mus musculus
  siRNA target sequence for Snap91 (NM_013669.1,484-502).
ggatcccacggttatgata

SEQ ID NO: 693858 - DNA, 19 bp, Mus musculus
  siRNA target sequence for Snap91 (NM_013669.1,485-503).
gatcccacggttatgatat

SEQ ID NO: 693859 - DNA, 19 bp, Mus musculus
  siRNA target sequence for Snap91 (NM_013669.1,510-528).
gttcatacggcgttacagt

SEQ ID NO: 693860 - DNA, 19 bp, Mus musculus
  siRNA target sequence for Snap91 (NM_013669.1,517-535).
cggcgttacagtagatact

SEQ ID NO: 693861 - DNA, 19 bp, Mus musculus
  siRNA target sequence for Snap91 (NM_013669.1,518-536).
ggcgttacagtagatactt

SEQ ID NO: 693862 - DNA, 19 bp, Mus musculus
  siRNA target sequence for Snap91 (NM_013669.1,520-538).
cgttacagtagatacttga

SEQ ID NO: 693863 - DNA, 19 bp, Mus musculus
  siRNA target sequence for Snap91 (NM_013669.1,614-632).
ggacgatggttcctgaaaa

SEQ ID NO: 693864 - DNA, 19 bp, Mus musculus
  siRNA target sequence for Snap91 (NM_013669.1,617-635).
cgatggttcctgaaaagct

SEQ ID NO: 693865 - DNA, 19 bp, Mus musculus
  siRNA target sequence for Snap91 (NM_013669.1,684-702).
gtttgatgtgcatccaaat

SEQ ID NO: 693866 - DNA, 19 bp, Mus musculus
  siRNA target sequence for Snap91 (NM_013669.1,783-801).
cggcgtcattaacttactt

SEQ ID NO: 693867 - DNA, 19 bp, Mus musculus
  siRNA target sequence for Snap91 (NM_013669.1,785-803).
gcgtcattaacttacttga

SEQ ID NO: 693868 - DNA, 19 bp, Mus musculus
  siRNA target sequence for Snap91 (NM_013669.1,786-804).
cgtcattaacttacttgaa

SEQ ID NO: 693869 - DNA, 19 bp, Mus musculus
  siRNA target sequence for Snap91 (NM_013669.1,789-807).
cattaacttacttgaaaaa

SEQ ID NO: 693870 - DNA, 19 bp, Mus musculus
  siRNA target sequence for Snap91 (NM_013669.1,834-852).
caaagacgcgctagaaatt

SEQ ID NO: 693871 - DNA, 19 bp, Mus musculus
  siRNA target sequence for Snap91 (NM_013669.1,838-856).
gacgcgctagaaatttaca

SEQ ID NO: 693872 - DNA, 19 bp, Mus musculus
  siRNA target sequence for Snap91 (NM_013669.1,903-921).
cgccgagcaagttggtatt

SEQ ID NO: 693873 - DNA, 19 bp, Mus musculus
  siRNA target sequence for Snap91 (NM_013669.1,906-924).
cgagcaagttggtattgat

SEQ ID NO: 693874 - DNA, 19 bp, Mus musculus
  siRNA target sequence for Snap91 (NM_013669.1,909-927).
gcaagttggtattgataaa

SEQ ID NO: 693875 - DNA, 19 bp, Mus musculus
  siRNA target sequence for Snap91 (NM_013669.1,969-987).
ggagacccttgaacaacat

SEQ ID NO: 693876 - DNA, 19 bp, Mus musculus
  siRNA target sequence for Snap91 (NM_013669.1,1036-1054).
gctccctctccactaagta

SEQ ID NO: 693877 - DNA, 19 bp, Mus musculus
  siRNA target sequence for Snap91 (NM_013669.1,1037-1055).
ctccctctccactaagtaa

SEQ ID NO: 693878 - DNA, 19 bp, Mus musculus
  siRNA target sequence for Snap91 (NM_013669.1,1039-1057).
ccctctccactaagtaagt

SEQ ID NO: 693879 - DNA, 19 bp, Mus musculus
  siRNA target sequence for Snap91 (NM_013669.1,1041-1059).
ctctccactaagtaagtct

SEQ ID NO: 693880 - DNA, 19 bp, Mus musculus
  siRNA target sequence for Snap91 (NM_013669.1,1075-1093).
gttacatctcctaattcta

SEQ ID NO: 693881 - DNA, 19 bp, Mus musculus
  siRNA target sequence for Snap91 (NM_013669.1,1091-1109).
ctacaccagctaaaactat

SEQ ID NO: 693882 - DNA, 19 bp, Mus musculus
  siRNA target sequence for Snap91 (NM_013669.1,1181-1199).
caagcgatctccttgatct

SEQ ID NO: 693883 - DNA, 19 bp, Mus musculus
  siRNA target sequence for Snap91 (NM_013669.1,1638-1656).
gaccagcgctcctgtagtt

SEQ ID NO: 693884 - DNA, 19 bp, Mus musculus
  siRNA target sequence for Snap91 (NM_013669.1,1810-1828).
cctcctgctctagatatct

SEQ ID NO: 693885 - DNA, 19 bp, Mus musculus
  siRNA target sequence for Snap91 (NM_013669.1,1963-1981).
ctcactgctgacctcttat

SEQ ID NO: 693886 - DNA, 19 bp, Mus musculus
  siRNA target sequence for Snap91 (NM_013669.1,1967-1985).
ctgctgacctcttatctgt

SEQ ID NO: 693887 - DNA, 19 bp, Mus musculus
  siRNA target sequence for Snap91 (NM_013669.1,2037-2055).
ggagtcctcgggtgtcata

SEQ ID NO: 693888 - DNA, 19 bp, Mus musculus
  siRNA target sequence for Snap91 (NM_013669.1,2045-2063).
cgggtgtcatagacctttt

SEQ ID NO: 693889 - DNA, 19 bp, Mus musculus
  siRNA target sequence for Snap91 (NM_013669.1,2046-2064).
gggtgtcatagaccttttt

SEQ ID NO: 693890 - DNA, 19 bp, Mus musculus
  siRNA target sequence for Snap91 (NM_013669.1,2129-2147).
cagcatcggcagatctact

SEQ ID NO: 693891 - DNA, 19 bp, Mus musculus
  siRNA target sequence for Snap91 (NM_013669.1,2195-2213).
ctccagctcagaataacct

SEQ ID NO: 693892 - DNA, 19 bp, Mus musculus
  siRNA target sequence for Snap91 (NM_013669.1,2223-2241).
cagtttcgaggcagctttt

SEQ ID NO: 693893 - DNA, 19 bp, Mus musculus
  siRNA target sequence for Snap91 (NM_013669.1,2297-2315).
gtttaggcgatcttctgat

SEQ ID NO: 693894 - DNA, 19 bp, Mus musculus
  siRNA target sequence for Snap91 (NM_013669.1,2412-2430).
ctcgtctctggccagttta

SEQ ID NO: 693895 - DNA, 19 bp, Mus musculus
  siRNA target sequence for Snap91 (NM_013669.1,2414-2432).
cgtctctggccagtttagt

SEQ ID NO: 693896 - DNA, 19 bp, Mus musculus
  siRNA target sequence for Snap91 (NM_013669.1,2415-2433).
gtctctggccagtttagta

SEQ ID NO: 693897 - DNA, 19 bp, Mus musculus
  siRNA target sequence for Snap91 (NM_013669.1,2450-2468).
ctggtaccacatcaaaaaa

SEQ ID NO: 693898 - DNA, 19 bp, Mus musculus
  siRNA target sequence for Otoa (NM_139310.1,163-181).
ggcaggatttacatccatt

SEQ ID NO: 693899 - DNA, 19 bp, Mus musculus
  siRNA target sequence for Otoa (NM_139310.1,188-206).
gaaaatggcggaagaaata

SEQ ID NO: 693900 - DNA, 19 bp, Mus musculus
  siRNA target sequence for Otoa (NM_139310.1,289-307).
gagtccttgcctatctgaa

SEQ ID NO: 693901 - DNA, 19 bp, Mus musculus
  siRNA target sequence for Otoa (NM_139310.1,428-446).
gttccacaccgccatgaaa

SEQ ID NO: 693902 - DNA, 19 bp, Mus musculus
  siRNA target sequence for Otoa (NM_139310.1,494-512).
catcaacttgggagacatt

SEQ ID NO: 693903 - DNA, 19 bp, Mus musculus
  siRNA target sequence for Otoa (NM_139310.1,653-671).
gcagccagacattacagaa

SEQ ID NO: 693904 - DNA, 19 bp, Mus musculus
  siRNA target sequence for Otoa (NM_139310.1,759-777).
cagagagctctctactcat

SEQ ID NO: 693905 - DNA, 19 bp, Mus musculus
  siRNA target sequence for Otoa (NM_139310.1,812-830).
cactgatggctcagtttca

SEQ ID NO: 693906 - DNA, 19 bp, Mus musculus
  siRNA target sequence for Otoa (NM_139310.1,832-850).
gggtcagtgcagaaaagtt

SEQ ID NO: 693907 - DNA, 19 bp, Mus musculus
  siRNA target sequence for Otoa (NM_139310.1,833-851).
ggtcagtgcagaaaagtta

SEQ ID NO: 693908 - DNA, 19 bp, Mus musculus
  siRNA target sequence for Otoa (NM_139310.1,834-852).
gtcagtgcagaaaagttat

SEQ ID NO: 693909 - DNA, 19 bp, Mus musculus
  siRNA target sequence for Otoa (NM_139310.1,869-887).
catggttcacctatcgttt

SEQ ID NO: 693910 - DNA, 19 bp, Mus musculus
  siRNA target sequence for Otoa (NM_139310.1,872-890).
ggttcacctatcgtttgaa

SEQ ID NO: 693911 - DNA, 19 bp, Mus musculus
  siRNA target sequence for Otoa (NM_139310.1,899-917).
gaacattagccctatagaa

SEQ ID NO: 693912 - DNA, 19 bp, Mus musculus
  siRNA target sequence for Otoa (NM_139310.1,1029-1047).
gacgtgaggaacatctcta

SEQ ID NO: 693913 - DNA, 19 bp, Mus musculus
  siRNA target sequence for Otoa (NM_139310.1,1449-1467).
ggtacgcaagccttctaca

SEQ ID NO: 693914 - DNA, 19 bp, Mus musculus
  siRNA target sequence for Otoa (NM_139310.1,1506-1524).
cctctttcccaggatatgt

SEQ ID NO: 693915 - DNA, 19 bp, Mus musculus
  siRNA target sequence for Otoa (NM_139310.1,1515-1533).
caggatatgtctgatttgt

SEQ ID NO: 693916 - DNA, 19 bp, Mus musculus
  siRNA target sequence for Otoa (NM_139310.1,1605-1623).
gtaccaagagctctcttta

SEQ ID NO: 693917 - DNA, 19 bp, Mus musculus
  siRNA target sequence for Otoa (NM_139310.1,1626-1644).
gaggtgtctctctatgatt

SEQ ID NO: 693918 - DNA, 19 bp, Mus musculus
  siRNA target sequence for Otoa (NM_139310.1,1628-1646).
ggtgtctctctatgattta

SEQ ID NO: 693919 - DNA, 19 bp, Mus musculus
  siRNA target sequence for Otoa (NM_139310.1,1629-1647).
gtgtctctctatgatttat

SEQ ID NO: 693920 - DNA, 19 bp, Mus musculus
  siRNA target sequence for Otoa (NM_139310.1,1633-1651).
ctctctatgatttatggaa

SEQ ID NO: 693921 - DNA, 19 bp, Mus musculus
  siRNA target sequence for Otoa (NM_139310.1,1648-1666).
ggaaagaatctcgattcaa

SEQ ID NO: 693922 - DNA, 19 bp, Mus musculus
  siRNA target sequence for Otoa (NM_139310.1,1649-1667).
gaaagaatctcgattcaat

SEQ ID NO: 693923 - DNA, 19 bp, Mus musculus
  siRNA target sequence for Otoa (NM_139310.1,1653-1671).
gaatctcgattcaatgcta

SEQ ID NO: 693924 - DNA, 19 bp, Mus musculus
  siRNA target sequence for Otoa (NM_139310.1,1830-1848).
ctggccctcttccagtatt

SEQ ID NO: 693925 - DNA, 19 bp, Mus musculus
  siRNA target sequence for Otoa (NM_139310.1,2024-2042).
gcgcttggagactttggtt

SEQ ID NO: 693926 - DNA, 19 bp, Mus musculus
  siRNA target sequence for Otoa (NM_139310.1,2039-2057).
ggttttagattctgacaaa

SEQ ID NO: 693927 - DNA, 19 bp, Mus musculus
  siRNA target sequence for Otoa (NM_139310.1,2040-2058).
gttttagattctgacaaaa

SEQ ID NO: 693928 - DNA, 19 bp, Mus musculus
  siRNA target sequence for Otoa (NM_139310.1,2097-2115).
ggtgtcattgctgatgaat

SEQ ID NO: 693929 - DNA, 19 bp, Mus musculus
  siRNA target sequence for Otoa (NM_139310.1,2098-2116).
gtgtcattgctgatgaata

SEQ ID NO: 693930 - DNA, 19 bp, Mus musculus
  siRNA target sequence for Otoa (NM_139310.1,2102-2120).
cattgctgatgaatacact

SEQ ID NO: 693931 - DNA, 19 bp, Mus musculus
  siRNA target sequence for Otoa (NM_139310.1,2318-2336).
ggacttggctcctttctta

SEQ ID NO: 693932 - DNA, 19 bp, Mus musculus
  siRNA target sequence for Otoa (NM_139310.1,2361-2379).
cacactgttgccacaaagt

SEQ ID NO: 693933 - DNA, 19 bp, Mus musculus
  siRNA target sequence for Otoa (NM_139310.1,2419-2437).
gggtgttgcttcctaaaga

SEQ ID NO: 693934 - DNA, 19 bp, Mus musculus
  siRNA target sequence for Otoa (NM_139310.1,2421-2439).
gtgttgcttcctaaagaat

SEQ ID NO: 693935 - DNA, 19 bp, Mus musculus
  siRNA target sequence for Otoa (NM_139310.1,2457-2475).
gagtctgttcagaatagca

SEQ ID NO: 693936 - DNA, 19 bp, Mus musculus
  siRNA target sequence for Otoa (NM_139310.1,2498-2516).
ccccacctttggttgtcat

SEQ ID NO: 693937 - DNA, 19 bp, Mus musculus
  siRNA target sequence for Otoa (NM_139310.1,2708-2726).
gccctcccgctggaaagaa

SEQ ID NO: 693938 - DNA, 19 bp, Mus musculus
  siRNA target sequence for Otoa (NM_139310.1,2710-2728).
cctcccgctggaaagaaca

SEQ ID NO: 693939 - DNA, 19 bp, Mus musculus
  siRNA target sequence for Otoa (NM_139310.1,2845-2863).
caggacaggctaaatccat

SEQ ID NO: 693940 - DNA, 19 bp, Mus musculus
  siRNA target sequence for Otoa (NM_139310.1,2870-2888).
ggcatttcttgaagattca

SEQ ID NO: 693941 - DNA, 19 bp, Mus musculus
  siRNA target sequence for Otoa (NM_139310.1,2904-2922).
gatctgaagagcttccatt

SEQ ID NO: 693942 - DNA, 19 bp, Mus musculus
  siRNA target sequence for Otoa (NM_139310.1,2930-2948).
gtttggtcctactctatgt

SEQ ID NO: 693943 - DNA, 19 bp, Mus musculus
  siRNA target sequence for Otoa (NM_139310.1,2950-2968).
ctatggaccccactgaaat

SEQ ID NO: 693944 - DNA, 19 bp, Mus musculus
  siRNA target sequence for Otoa (NM_139310.1,2958-2976).
cccactgaaatacaactta

SEQ ID NO: 693945 - DNA, 19 bp, Mus musculus
  siRNA target sequence for Otoa (NM_139310.1,2960-2978).
cactgaaatacaacttata

SEQ ID NO: 693946 - DNA, 19 bp, Mus musculus
  siRNA target sequence for Otoa (NM_139310.1,3035-3053).
ccccgtcttagctggattt

SEQ ID NO: 693947 - DNA, 19 bp, Mus musculus
  siRNA target sequence for Otoa (NM_139310.1,3036-3054).
cccgtcttagctggattta

SEQ ID NO: 693948 - DNA, 19 bp, Mus musculus
  siRNA target sequence for Otoa (NM_139310.1,3037-3055).
ccgtcttagctggatttaa

SEQ ID NO: 693949 - DNA, 19 bp, Mus musculus
  siRNA target sequence for Otoa (NM_139310.1,3152-3170).
gctccgaatgctcaacaaa

SEQ ID NO: 693950 - DNA, 19 bp, Mus musculus
  siRNA target sequence for Otoa (NM_139310.1,3188-3206).
ccagccgtcagccataaga

SEQ ID NO: 693951 - DNA, 19 bp, Mus musculus
  siRNA target sequence for Otoa (NM_139310.1,3189-3207).
cagccgtcagccataagat

SEQ ID NO: 693952 - DNA, 19 bp, Mus musculus
  siRNA target sequence for Otoa (NM_139310.1,3210-3228).
ctgcctggtgaggtattca

SEQ ID NO: 693953 - DNA, 19 bp, Mus musculus
  siRNA target sequence for Otoa (NM_139310.1,3212-3230).
gcctggtgaggtattcaaa

SEQ ID NO: 693954 - DNA, 19 bp, Mus musculus
  siRNA target sequence for S3-12 (NM_020568.1,266-284).
cctccacaaaggacttaca

SEQ ID NO: 693955 - DNA, 19 bp, Mus musculus
  siRNA target sequence for S3-12 (NM_020568.1,267-285).
ctccacaaaggacttacaa

SEQ ID NO: 693956 - DNA, 19 bp, Mus musculus
  siRNA target sequence for S3-12 (NM_020568.1,270-288).
cacaaaggacttacaaaca

SEQ ID NO: 693957 - DNA, 19 bp, Mus musculus
  siRNA target sequence for S3-12 (NM_020568.1,402-420).
ggacatgggaagtttcagt

SEQ ID NO: 693958 - DNA, 19 bp, Mus musculus
  siRNA target sequence for S3-12 (NM_020568.1,512-530).
cggcccttgtcggaactaa

SEQ ID NO: 693959 - DNA, 19 bp, Mus musculus
  siRNA target sequence for S3-12 (NM_020568.1,592-610).
ggtcttgacacttcaaaga

SEQ ID NO: 693960 - DNA, 19 bp, Mus musculus
  siRNA target sequence for S3-12 (NM_020568.1,3024-3042).
gctcacaggggcagcaaat

SEQ ID NO: 693961 - DNA, 19 bp, Mus musculus
  siRNA target sequence for S3-12 (NM_020568.1,3096-3114).
ggacacaaaggactctata

SEQ ID NO: 693962 - DNA, 19 bp, Mus musculus
  siRNA target sequence for S3-12 (NM_020568.1,3097-3115).
gacacaaaggactctatat

SEQ ID NO: 693963 - DNA, 19 bp, Mus musculus
  siRNA target sequence for S3-12 (NM_020568.1,3235-3253).
ctggacaccagcaagcata

SEQ ID NO: 693964 - DNA, 19 bp, Mus musculus
  siRNA target sequence for S3-12 (NM_020568.1,3366-3384).
ggctcattcaggtaatgta

SEQ ID NO: 693965 - DNA, 19 bp, Mus musculus
  siRNA target sequence for S3-12 (NM_020568.1,3453-3471).
ctgtcatgagcctagcatt

SEQ ID NO: 693966 - DNA, 19 bp, Mus musculus
  siRNA target sequence for S3-12 (NM_020568.1,3689-3707).
cacttcctgatgagttgaa

SEQ ID NO: 693967 - DNA, 19 bp, Mus musculus
  siRNA target sequence for S3-12 (NM_020568.1,3710-3728).
ggctgggtgatatctttca

SEQ ID NO: 693968 - DNA, 19 bp, Mus musculus
  siRNA target sequence for S3-12 (NM_020568.1,3796-3814).
gaccggggaagctactaca

SEQ ID NO: 693969 - DNA, 19 bp, Mus musculus
  siRNA target sequence for 1200002M06Rik (NM_027873.1,324-342).
gggagaagattaatatcct

SEQ ID NO: 693970 - DNA, 19 bp, Mus musculus
  siRNA target sequence for 1200002M06Rik (NM_027873.1,368-386).
gacccgcagaagaacgaat

SEQ ID NO: 693971 - DNA, 19 bp, Mus musculus
  siRNA target sequence for 1200002M06Rik (NM_027873.1,587-605).
ggcaatttggtcaacacat

SEQ ID NO: 693972 - DNA, 19 bp, Mus musculus
  siRNA target sequence for 1200002M06Rik (NM_027873.1,596-614).
gtcaacacatactatgact

SEQ ID NO: 693973 - DNA, 19 bp, Mus musculus
  siRNA target sequence for 1200002M06Rik (NM_027873.1,625-643).
cattgaccacaaaaagagt

SEQ ID NO: 693974 - DNA, 19 bp, Mus musculus
  siRNA target sequence for 1200002M06Rik (NM_027873.1,651-669).
gaactttggtggacagaat

SEQ ID NO: 693975 - DNA, 19 bp, Mus musculus
  siRNA target sequence for 1200002M06Rik (NM_027873.1,678-696).
cccaggatgttgttcgatt

SEQ ID NO: 693976 - DNA, 19 bp, Mus musculus
  siRNA target sequence for 1200002M06Rik (NM_027873.1,679-697).
ccaggatgttgttcgattt

SEQ ID NO: 693977 - DNA, 19 bp, Mus musculus
  siRNA target sequence for 1200002M06Rik (NM_027873.1,729-747).
gtgctgcttgcctctacta

SEQ ID NO: 693978 - DNA, 19 bp, Mus musculus
  siRNA target sequence for 1200002M06Rik (NM_027873.1,751-769).
gtccgctctgaaattggaa

SEQ ID NO: 693979 - DNA, 19 bp, Mus musculus
  siRNA target sequence for 1200002M06Rik (NM_027873.1,814-832).
ctacacaggaggaattgga

SEQ ID NO: 693980 - DNA, 19 bp, Mus musculus
  siRNA target sequence for 1200002M06Rik (NM_027873.1,825-843).
gaattggattcaagtatgt

SEQ ID NO: 693981 - DNA, 19 bp, Mus musculus
  siRNA target sequence for 1200002M06Rik (NM_027873.1,927-945).
ccatcttccctctaatcta

SEQ ID NO: 693982 - DNA, 19 bp, Mus musculus
  siRNA target sequence for 1200002M06Rik (NM_027873.1,1088-1106).
ctctttgtgccctacctaa

SEQ ID NO: 693983 - DNA, 19 bp, Mus musculus
  siRNA target sequence for 1200002M06Rik (NM_027873.1,1097-1115).
ccctacctaatctttacca

SEQ ID NO: 693984 - DNA, 19 bp, Mus musculus
  siRNA target sequence for 1200002M06Rik (NM_027873.1,1098-1116).
cctacctaatctttaccat

SEQ ID NO: 693985 - DNA, 19 bp, Mus musculus
  siRNA target sequence for 1200015L10Rik (NM_174857.1,336-354).
gctcctgcgcctttgaaga

SEQ ID NO: 693986 - DNA, 19 bp, Mus musculus
  siRNA target sequence for 1200015L10Rik (NM_174857.1,407-425).
gaggaaggccattatgtct

SEQ ID NO: 693987 - DNA, 19 bp, Mus musculus
  siRNA target sequence for 1200015L10Rik (NM_174857.1,409-427).
ggaaggccattatgtctat

SEQ ID NO: 693988 - DNA, 19 bp, Mus musculus
  siRNA target sequence for 1200015L10Rik (NM_174857.1,410-428).
gaaggccattatgtctata

SEQ ID NO: 693989 - DNA, 19 bp, Mus musculus
  siRNA target sequence for 1200015L10Rik (NM_174857.1,424-442).
ctatatggacacctctttt

SEQ ID NO: 693990 - DNA, 19 bp, Mus musculus
  siRNA target sequence for 1200015L10Rik (NM_174857.1,565-583).
gaacctctatgtgagattt

SEQ ID NO: 693991 - DNA, 19 bp, Mus musculus
  siRNA target sequence for 1200015L10Rik (NM_174857.1,676-694).
gaaattcaagattttgata

SEQ ID NO: 693992 - DNA, 19 bp, Mus musculus
  siRNA target sequence for 1200015L10Rik (NM_174857.1,723-741).
ctagcattgccctctttga

SEQ ID NO: 693993 - DNA, 19 bp, Mus musculus
  siRNA target sequence for 1200015L10Rik (NM_174857.1,726-744).
gcattgccctctttgaaat

SEQ ID NO: 693994 - DNA, 19 bp, Mus musculus
  siRNA target sequence for 1200015L10Rik (NM_174857.1,751-769).
gacagccggctactgtatt

SEQ ID NO: 693995 - DNA, 19 bp, Mus musculus
  siRNA target sequence for 1200015L10Rik (NM_174857.1,753-771).
cagccggctactgtattga

SEQ ID NO: 693996 - DNA, 19 bp, Mus musculus
  siRNA target sequence for 1200015L10Rik (NM_174857.1,755-773).
gccggctactgtattgaat

SEQ ID NO: 693997 - DNA, 19 bp, Mus musculus
  siRNA target sequence for 1200015L10Rik (NM_174857.1,763-781).
ctgtattgaatgtgacttt

SEQ ID NO: 693998 - DNA, 19 bp, Mus musculus
  siRNA target sequence for 1200015L10Rik (NM_174857.1,812-830).
cgctggaatcccaatgtga

SEQ ID NO: 693999 - DNA, 19 bp, Mus musculus
  siRNA target sequence for 1200015L10Rik (NM_174857.1,900-918).
gtgagcacggccactacat

SEQ ID NO: 694000 - DNA, 19 bp, Mus musculus
  siRNA target sequence for 1200015L10Rik (NM_174857.1,902-920).
gagcacggccactacatgt

SEQ ID NO: 694001 - DNA, 19 bp, Mus musculus
  siRNA target sequence for 1200015L10Rik (NM_174857.1,904-922).
gcacggccactacatgtat

SEQ ID NO: 694002 - DNA, 19 bp, Mus musculus
  siRNA target sequence for 1200015L10Rik (NM_174857.1,998-1016).
ggctgtctctcgttctatt

SEQ ID NO: 694003 - DNA, 19 bp, Mus musculus
  siRNA target sequence for 1200015L10Rik (NM_174857.1,999-1017).
gctgtctctcgttctatta

SEQ ID NO: 694004 - DNA, 19 bp, Mus musculus
  siRNA target sequence for 1200015L10Rik (NM_174857.1,1002-1020).
gtctctcgttctattacca

SEQ ID NO: 694005 - DNA, 19 bp, Mus musculus
  siRNA target sequence for 1200015L10Rik (NM_174857.1,1073-1091).
ggcctgtacgaggagattt

SEQ ID NO: 694006 - DNA, 19 bp, Mus musculus
  siRNA target sequence for 1200015L10Rik (NM_174857.1,1076-1094).
ctgtacgaggagatttgga

SEQ ID NO: 694007 - DNA, 19 bp, Mus musculus
  siRNA target sequence for 1200015L10Rik (NM_174857.1,1211-1229).
gccctggatgatatttctt

SEQ ID NO: 694008 - DNA, 19 bp, Mus musculus
  siRNA target sequence for 1200015L10Rik (NM_174857.1,1279-1297).
ggaaaccagctgcgatttt

SEQ ID NO: 694009 - DNA, 19 bp, Mus musculus
  siRNA target sequence for 1200015L10Rik (NM_174857.1,1300-1318).
gataggcctctgcaacttt

SEQ ID NO: 694010 - DNA, 19 bp, Mus musculus
  siRNA target sequence for 1200015L10Rik (NM_174857.1,1337-1355).
ccgggttggaccagagtaa

SEQ ID NO: 694011 - DNA, 19 bp, Mus musculus
  siRNA target sequence for 1200015L10Rik (NM_174857.1,1341-1359).
gttggaccagagtaagagt

SEQ ID NO: 694012 - DNA, 19 bp, Mus musculus
  siRNA target sequence for 1200015L10Rik (NM_174857.1,1345-1363).
gaccagagtaagagtaaaa

SEQ ID NO: 694013 - DNA, 19 bp, Mus musculus
  siRNA target sequence for 1200015L10Rik (NM_174857.1,1412-1430).
ctgctggccaacactaagt

SEQ ID NO: 694014 - DNA, 19 bp, Mus musculus
  siRNA target sequence for 1200015L10Rik (NM_174857.1,1414-1432).
gctggccaacactaagttt

SEQ ID NO: 694015 - DNA, 19 bp, Mus musculus
  siRNA target sequence for 1200015L10Rik (NM_174857.1,1418-1436).
gccaacactaagtttacat

SEQ ID NO: 694016 - DNA, 19 bp, Mus musculus
  siRNA target sequence for 1200015L10Rik (NM_174857.1,1504-1522).
ctttcattacgccatcttt

SEQ ID NO: 694017 - DNA, 19 bp, Mus musculus
  siRNA target sequence for 1200015L10Rik (NM_174857.1,1516-1534).
catctttgggtttttgaaa

SEQ ID NO: 694018 - DNA, 19 bp, Mus musculus
  siRNA target sequence for 1200015L10Rik (NM_174857.1,1541-1559).
gacaccctagccgtttata

SEQ ID NO: 694019 - DNA, 19 bp, Mus musculus
  siRNA target sequence for 1200015L10Rik (NM_174857.1,1545-1563).
ccctagccgtttatatctt

SEQ ID NO: 694020 - DNA, 19 bp, Mus musculus
  siRNA target sequence for 1200015L10Rik (NM_174857.1,1627-1645).
gatgcaagcggaaatcagt

SEQ ID NO: 694021 - DNA, 19 bp, Mus musculus
  siRNA target sequence for 1200015L10Rik (NM_174857.1,1631-1649).
caagcggaaatcagtttca

SEQ ID NO: 694022 - DNA, 19 bp, Mus musculus
  siRNA target sequence for 1200015L10Rik (NM_174857.1,1720-1738).
cctggatgacattaccata

SEQ ID NO: 694023 - DNA, 19 bp, Mus musculus
  siRNA target sequence for 1200015L10Rik (NM_174857.1,1723-1741).
ggatgacattaccatacaa

SEQ ID NO: 694024 - DNA, 19 bp, Mus musculus
  siRNA target sequence for 1200015L10Rik (NM_174857.1,1785-1803).
gagaatgcacttttgatca

SEQ ID NO: 694025 - DNA, 19 bp, Mus musculus
  siRNA target sequence for 1200015L10Rik (NM_174857.1,1791-1809).
gcacttttgatcaagatga

SEQ ID NO: 694026 - DNA, 19 bp, Mus musculus
  siRNA target sequence for 1200015L10Rik (NM_174857.1,1905-1923).
ctactggggtaggttacta

SEQ ID NO: 694027 - DNA, 19 bp, Mus musculus
  siRNA target sequence for 1200015L10Rik (NM_174857.1,1908-1926).
ctggggtaggttactacat

SEQ ID NO: 694028 - DNA, 19 bp, Mus musculus
  siRNA target sequence for 1200015L10Rik (NM_174857.1,1991-2009).
ggcgtccctgggaaacact

SEQ ID NO: 694029 - DNA, 19 bp, Mus musculus
  siRNA target sequence for 1200015L10Rik (NM_174857.1,2135-2153).
ctgcgggcactggttgaat

SEQ ID NO: 694030 - DNA, 19 bp, Mus musculus
  siRNA target sequence for 1200015L10Rik (NM_174857.1,2195-2213).
cgaggagtgtccataagaa

SEQ ID NO: 694031 - DNA, 19 bp, Mus musculus
  siRNA target sequence for 1200015L10Rik (NM_174857.1,2201-2219).
gtgtccataagaagtgata

SEQ ID NO: 694032 - DNA, 19 bp, Mus musculus
  siRNA target sequence for 1200015L10Rik (NM_174857.1,2221-2239).
cgccattgatgatgttaaa

SEQ ID NO: 694033 - DNA, 19 bp, Mus musculus
  siRNA target sequence for 1200015L10Rik (NM_174857.1,2223-2241).
ccattgatgatgttaaact

SEQ ID NO: 694034 - DNA, 19 bp, Mus musculus
  siRNA target sequence for 1200015L10Rik (NM_174857.1,2258-2276).
gcaggaatggaagatacaa

SEQ ID NO: 694035 - DNA, 19 bp, Mus musculus
  siRNA target sequence for 1200015L10Rik (NM_174857.1,2291-2309).
ggatattctgaagacttaa

SEQ ID NO: 694036 - DNA, 19 bp, Mus musculus
  siRNA target sequence for 2310004K20Rik (NM_172702.1,472-490).
gatccttgtgggtatcact

SEQ ID NO: 694037 - DNA, 19 bp, Mus musculus
  siRNA target sequence for 2310004K20Rik (NM_172702.1,526-544).
caagatctggttctacttt

SEQ ID NO: 694038 - DNA, 19 bp, Mus musculus
  siRNA target sequence for 2310004K20Rik (NM_172702.1,660-678).
ggtacgcaggccttttctt

SEQ ID NO: 694039 - DNA, 19 bp, Mus musculus
  siRNA target sequence for 2310004K20Rik (NM_172702.1,720-738).
cactgatgttcgtctacta

SEQ ID NO: 694040 - DNA, 19 bp, Mus musculus
  siRNA target sequence for 2310004K20Rik (NM_172702.1,863-881).
ctgcaagcctccgtcataa

SEQ ID NO: 694041 - DNA, 19 bp, Mus musculus
  siRNA target sequence for 2310004K20Rik (NM_172702.1,866-884).
caagcctccgtcataacct

SEQ ID NO: 694042 - DNA, 19 bp, Mus musculus
  siRNA target sequence for 2310004K20Rik (NM_172702.1,871-889).
ctccgtcataaccttgtat

SEQ ID NO: 694043 - DNA, 19 bp, Mus musculus
  siRNA target sequence for 2310004K20Rik (NM_172702.1,903-921).
cctggtctgccctatccaa

SEQ ID NO: 694044 - DNA, 19 bp, Mus musculus
  siRNA target sequence for 2310004K20Rik (NM_172702.1,918-936).
ccaacgtccctgaccaaaa

SEQ ID NO: 694045 - DNA, 19 bp, Mus musculus
  siRNA target sequence for 2310004K20Rik (NM_172702.1,919-937).
caacgtccctgaccaaaaa

SEQ ID NO: 694046 - DNA, 19 bp, Mus musculus
  siRNA target sequence for 2310004K20Rik (NM_172702.1,923-941).
gtccctgaccaaaaatgca

SEQ ID NO: 694047 - DNA, 19 bp, Mus musculus
  siRNA target sequence for 2310004K20Rik (NM_172702.1,949-967).
cctgcccactaaaaatgga

SEQ ID NO: 694048 - DNA, 19 bp, Mus musculus
  siRNA target sequence for 2310004K20Rik (NM_172702.1,950-968).
ctgcccactaaaaatggaa

SEQ ID NO: 694049 - DNA, 19 bp, Mus musculus
  siRNA target sequence for 2310004K20Rik (NM_172702.1,1046-1064).
ctgtgcaccttcttcatta

SEQ ID NO: 694050 - DNA, 19 bp, Mus musculus
  siRNA target sequence for 2310004K20Rik (NM_172702.1,1236-1254).
cctccctgcatgtcatgat

SEQ ID NO: 694051 - DNA, 19 bp, Mus musculus
  siRNA target sequence for 2310004K20Rik (NM_172702.1,1281-1299).
gagagacccggaagatgat

SEQ ID NO: 694052 - DNA, 19 bp, Mus musculus
  siRNA target sequence for 2310004K20Rik (NM_172702.1,1283-1301).
gagacccggaagatgatca

SEQ ID NO: 694053 - DNA, 19 bp, Mus musculus
  siRNA target sequence for 6030423D04Rik (NM_153137.2,433-451).
gtcaggagacccgagaaaa

SEQ ID NO: 694054 - DNA, 19 bp, Mus musculus
  siRNA target sequence for 6030423D04Rik (NM_153137.2,532-550).
gagctcggcagctacagtt

SEQ ID NO: 694055 - DNA, 19 bp, Mus musculus
  siRNA target sequence for 6030423D04Rik (NM_153137.2,875-893).
gccaacaataaagaatgat

SEQ ID NO: 694056 - DNA, 19 bp, Mus musculus
  siRNA target sequence for 6030423D04Rik (NM_153137.2,916-934).
gagttgctgtcctagacaa

SEQ ID NO: 694057 - DNA, 19 bp, Mus musculus
  siRNA target sequence for 6030423D04Rik (NM_153137.2,950-968).
ctcggaatacctcaaagaa

SEQ ID NO: 694058 - DNA, 19 bp, Mus musculus
  siRNA target sequence for 6030423D04Rik (NM_153137.2,975-993).
catagggagctgatcctaa

SEQ ID NO: 694059 - DNA, 19 bp, Mus musculus
  siRNA target sequence for 6030423D04Rik (NM_153137.2,1054-1072).
cctggaagggacagcttaa

SEQ ID NO: 694060 - DNA, 19 bp, Mus musculus
  siRNA target sequence for 6030423D04Rik (NM_153137.2,1079-1097).
caagctgaagggcaaacta

SEQ ID NO: 694061 - DNA, 19 bp, Mus musculus
  siRNA target sequence for 6030423D04Rik (NM_153137.2,1141-1159).
ccccctggggaatgaaaaa

SEQ ID NO: 694062 - DNA, 19 bp, Mus musculus
  siRNA target sequence for 6030423D04Rik (NM_153137.2,1144-1162).
cctggggaatgaaaaaggt

SEQ ID NO: 694063 - DNA, 19 bp, Mus musculus
  siRNA target sequence for 6030423D04Rik (NM_153137.2,1445-1463).
ggccctgcagcttttagaa

SEQ ID NO: 694064 - DNA, 19 bp, Mus musculus
  siRNA target sequence for 6030423D04Rik (NM_153137.2,1538-1556).
ggacctacaagatcaacta

SEQ ID NO: 694065 - DNA, 19 bp, Mus musculus
  siRNA target sequence for 6030423D04Rik (NM_153137.2,1582-1600).
ccctggtgagcaaagtaca

SEQ ID NO: 694066 - DNA, 19 bp, Mus musculus
  siRNA target sequence for 6030423D04Rik (NM_153137.2,1583-1601).
cctggtgagcaaagtacaa

SEQ ID NO: 694067 - DNA, 19 bp, Mus musculus
  siRNA target sequence for 6030423D04Rik (NM_153137.2,1616-1634).
gcttcagaatcaatcctta

SEQ ID NO: 694068 - DNA, 19 bp, Mus musculus
  siRNA target sequence for 6030423D04Rik (NM_153137.2,1833-1851).
ctgatggtggtgattgcta

SEQ ID NO: 694069 - DNA, 19 bp, Mus musculus
  siRNA target sequence for 6030423D04Rik (NM_153137.2,1861-1879).
cagtgttcctggcaaacaa

SEQ ID NO: 694070 - DNA, 19 bp, Mus musculus
  siRNA target sequence for 6330500A18Rik (NM_172675.1,194-212).
cagcaattggcgtgacaaa

SEQ ID NO: 694071 - DNA, 19 bp, Mus musculus
  siRNA target sequence for 6330500A18Rik (NM_172675.1,238-256).
ggcgtggacgaaatacagt

SEQ ID NO: 694072 - DNA, 19 bp, Mus musculus
  siRNA target sequence for 6330500A18Rik (NM_172675.1,239-257).
gcgtggacgaaatacagta

SEQ ID NO: 694073 - DNA, 19 bp, Mus musculus
  siRNA target sequence for 6330500A18Rik (NM_172675.1,240-258).
cgtggacgaaatacagtat

SEQ ID NO: 694074 - DNA, 19 bp, Mus musculus
  siRNA target sequence for 6330500A18Rik (NM_172675.1,262-280).
gttggccgcattaaacaga

SEQ ID NO: 694075 - DNA, 19 bp, Mus musculus
  siRNA target sequence for 6330500A18Rik (NM_172675.1,291-309).
gttagccagccttcatgat

SEQ ID NO: 694076 - DNA, 19 bp, Mus musculus
  siRNA target sequence for 6330500A18Rik (NM_172675.1,301-319).
cttcatgataagcatttga

SEQ ID NO: 694077 - DNA, 19 bp, Mus musculus
  siRNA target sequence for 6330500A18Rik (NM_172675.1,574-592).
gagagatcgcagcatttct

SEQ ID NO: 694078 - DNA, 19 bp, Mus musculus
  siRNA target sequence for 6330500A18Rik (NM_172675.1,600-618).
cccagtaccactaatggat

SEQ ID NO: 694079 - DNA, 19 bp, Mus musculus
  siRNA target sequence for 6330500A18Rik (NM_172675.1,711-729).
gcgagagatccgtcagatt

SEQ ID NO: 694080 - DNA, 19 bp, Mus musculus
  siRNA target sequence for 6330500A18Rik (NM_172675.1,737-755).
ccatttcagacctcaatga

SEQ ID NO: 694081 - DNA, 19 bp, Mus musculus
  siRNA target sequence for 6330500A18Rik (NM_172675.1,743-761).
cagacctcaatgaaatctt

SEQ ID NO: 694082 - DNA, 19 bp, Mus musculus
  siRNA target sequence for 6330500A18Rik (NM_172675.1,793-811).
ggaacagtccttgatagaa

SEQ ID NO: 694083 - DNA, 19 bp, Mus musculus
  siRNA target sequence for 6330500A18Rik (NM_172675.1,794-812).
gaacagtccttgatagaat

SEQ ID NO: 694084 - DNA, 19 bp, Mus musculus
  siRNA target sequence for 6330500A18Rik (NM_172675.1,854-872).
gcttgaaacagcttcacaa

SEQ ID NO: 694085 - DNA, 19 bp, Mus musculus
  siRNA target sequence for 6330500A18Rik (NM_172675.1,952-970).
gccctcgtcgccgtaaagt

SEQ ID NO: 694086 - DNA, 19 bp, Mus musculus
  siRNA target sequence for 6330500A18Rik (NM_172675.1,954-972).
cctcgtcgccgtaaagtct

SEQ ID NO: 694087 - DNA, 19 bp, Mus musculus
  siRNA target sequence for 9030418M05Rik (NM_133681.2,240-258).
ccgtcgatgggacatcttt

SEQ ID NO: 694088 - DNA, 19 bp, Mus musculus
  siRNA target sequence for 9030418M05Rik (NM_133681.2,262-280).
gaaggtcttcggatcacta

SEQ ID NO: 694089 - DNA, 19 bp, Mus musculus
  siRNA target sequence for 9030418M05Rik (NM_133681.2,447-465).
caggtgctgtggttgcttt

SEQ ID NO: 694090 - DNA, 19 bp, Mus musculus
  siRNA target sequence for 9030418M05Rik (NM_133681.2,474-492).
ccacattggctgaacaatt

SEQ ID NO: 694091 - DNA, 19 bp, Mus musculus
  siRNA target sequence for 9030418M05Rik (NM_133681.2,506-524).
gtggtgcctgctatcgaaa

SEQ ID NO: 694092 - DNA, 19 bp, Mus musculus
  siRNA target sequence for 9030418M05Rik (NM_133681.2,508-526).
ggtgcctgctatcgaaaaa

SEQ ID NO: 694093 - DNA, 19 bp, Mus musculus
  siRNA target sequence for 9030418M05Rik (NM_133681.2,554-572).
caagtatggaacactacaa

SEQ ID NO: 694094 - DNA, 19 bp, Mus musculus
  siRNA target sequence for 9030418M05Rik (NM_133681.2,601-619).
caactacacagattttaat

SEQ ID NO: 694095 - DNA, 19 bp, Mus musculus
  siRNA target sequence for 9030418M05Rik (NM_133681.2,621-639).
cctcacgtttcgtcaaaga

SEQ ID NO: 694096 - DNA, 19 bp, Mus musculus
  siRNA target sequence for 9030418M05Rik (NM_133681.2,624-642).
cacgtttcgtcaaagagaa

SEQ ID NO: 694097 - DNA, 19 bp, Mus musculus
  siRNA target sequence for 9030418M05Rik (NM_133681.2,626-644).
cgtttcgtcaaagagaata

SEQ ID NO: 694098 - DNA, 19 bp, Mus musculus
  siRNA target sequence for 9030418M05Rik (NM_133681.2,714-732).
ccaaaagtatgaaagtaca

SEQ ID NO: 694099 - DNA, 19 bp, Mus musculus
  siRNA target sequence for 9030418M05Rik (NM_133681.2,733-751).
gggttgtttcaaagagatt

SEQ ID NO: 694100 - DNA, 19 bp, Mus musculus
  siRNA target sequence for 9030418M05Rik (NM_133681.2,818-836).
ctggctgccatggttgtat

SEQ ID NO: 694101 - DNA, 19 bp, Mus musculus
  siRNA target sequence for 9030418M05Rik (NM_133681.2,829-847).
ggttgtatccatgtatcta

SEQ ID NO: 694102 - DNA, 19 bp, Mus musculus
  siRNA target sequence for 9330187M14Rik (NM_172583.1,249-267).
catggaccagaagtttcat

SEQ ID NO: 694103 - DNA, 19 bp, Mus musculus
  siRNA target sequence for 9330187M14Rik (NM_172583.1,338-356).
ccaccgtgctcgtactcaa

SEQ ID NO: 694104 - DNA, 19 bp, Mus musculus
  siRNA target sequence for 9330187M14Rik (NM_172583.1,341-359).
ccgtgctcgtactcaacat

SEQ ID NO: 694105 - DNA, 19 bp, Mus musculus
  siRNA target sequence for 9330187M14Rik (NM_172583.1,343-361).
gtgctcgtactcaacatca

SEQ ID NO: 694106 - DNA, 19 bp, Mus musculus
  siRNA target sequence for 9330187M14Rik (NM_172583.1,346-364).
ctcgtactcaacatcatct

SEQ ID NO: 694107 - DNA, 19 bp, Mus musculus
  siRNA target sequence for 9330187M14Rik (NM_172583.1,348-366).
cgtactcaacatcatctta

SEQ ID NO: 694108 - DNA, 19 bp, Mus musculus
  siRNA target sequence for 9330187M14Rik (NM_172583.1,372-390).
gttcgttgtcctgctttat

SEQ ID NO: 694109 - DNA, 19 bp, Mus musculus
  siRNA target sequence for 9330187M14Rik (NM_172583.1,425-443).
ggctggcactgctgataca

SEQ ID NO: 694110 - DNA, 19 bp, Mus musculus
  siRNA target sequence for 9330187M14Rik (NM_172583.1,452-470).
gcctgacctcactgatcta

SEQ ID NO: 694111 - DNA, 19 bp, Mus musculus
  siRNA target sequence for 9330187M14Rik (NM_172583.1,475-493).
gagcaaagtgagaagtcat

SEQ ID NO: 694112 - DNA, 19 bp, Mus musculus
  siRNA target sequence for 9330187M14Rik (NM_172583.1,572-590).
gggaccgggacctgatcaa

SEQ ID NO: 694113 - DNA, 19 bp, Mus musculus
  siRNA target sequence for 9330187M14Rik (NM_172583.1,576-594).
ccgggacctgatcaacaaa

SEQ ID NO: 694114 - DNA, 19 bp, Mus musculus
  siRNA target sequence for 9330187M14Rik (NM_172583.1,577-595).
cgggacctgatcaacaaat

SEQ ID NO: 694115 - DNA, 19 bp, Mus musculus
  siRNA target sequence for 9330187M14Rik (NM_172583.1,598-616).
ggggatgatgcgcgaattt

SEQ ID NO: 694116 - DNA, 19 bp, Mus musculus
  siRNA target sequence for 9330187M14Rik (NM_172583.1,599-617).
gggatgatgcgcgaattta

SEQ ID NO: 694117 - DNA, 19 bp, Mus musculus
  siRNA target sequence for 9330187M14Rik (NM_172583.1,604-622).
gatgcgcgaatttacatca

SEQ ID NO: 694118 - DNA, 19 bp, Mus musculus
  siRNA target sequence for 9330187M14Rik (NM_172583.1,630-648).
gtatcacctcatcatcttt

SEQ ID NO: 694119 - DNA, 19 bp, Mus musculus
  siRNA target sequence for 9330187M14Rik (NM_172583.1,688-706).
cctgttaactacattggaa

SEQ ID NO: 694120 - DNA, 19 bp, Mus musculus
  siRNA target sequence for 9330187M14Rik (NM_172583.1,737-755).
ggaccaccattgtcaatgt

SEQ ID NO: 694121 - DNA, 19 bp, Mus musculus
  siRNA target sequence for 9330187M14Rik (NM_172583.1,847-865).
ggatttgtgccaaagaaga

SEQ ID NO: 694122 - DNA, 19 bp, Mus musculus
  siRNA target sequence for 9330187M14Rik (NM_172583.1,997-1015).
gtcaggaacctgattgact

SEQ ID NO: 694123 - DNA, 19 bp, Mus musculus
  siRNA target sequence for 9330187M14Rik (NM_172583.1,1081-1099).
gggaaggtcatgatcaaga

SEQ ID NO: 694124 - DNA, 19 bp, Mus musculus
  siRNA target sequence for 9330187M14Rik (NM_172583.1,1156-1174).
gatgcggagcagtactaca

SEQ ID NO: 694125 - DNA, 19 bp, Mus musculus
  siRNA target sequence for 9330187M14Rik (NM_172583.1,1277-1295).
cagtgagacgcatctatga

SEQ ID NO: 694126 - DNA, 19 bp, Mus musculus
  siRNA target sequence for 9330187M14Rik (NM_172583.1,1281-1299).
gagacgcatctatgatgat

SEQ ID NO: 694127 - DNA, 19 bp, Mus musculus
  siRNA target sequence for 9330187M14Rik (NM_172583.1,1283-1301).
gacgcatctatgatgatta

SEQ ID NO: 694128 - DNA, 19 bp, Mus musculus
  siRNA target sequence for 9330187M14Rik (NM_172583.1,1286-1304).
gcatctatgatgattacaa

SEQ ID NO: 694129 - DNA, 19 bp, Mus musculus
  siRNA target sequence for 9330187M14Rik (NM_172583.1,1346-1364).
cgaccatcgtcaaaaacta

SEQ ID NO: 694130 - DNA, 19 bp, Mus musculus
  siRNA target sequence for 9330187M14Rik (NM_172583.1,1436-1454).
gttggtggactcgctttat

SEQ ID NO: 694131 - DNA, 19 bp, Mus musculus
  siRNA target sequence for 9330187M14Rik (NM_172583.1,1447-1465).
cgctttatcgccatcaata

SEQ ID NO: 694132 - DNA, 19 bp, Mus musculus
  siRNA target sequence for 9330187M14Rik (NM_172583.1,1673-1691).
caagtcagaacctgatcat

SEQ ID NO: 694133 - DNA, 19 bp, Mus musculus
  siRNA target sequence for 9330187M14Rik (NM_172583.1,1676-1694).
gtcagaacctgatcatagt

SEQ ID NO: 694134 - DNA, 19 bp, Mus musculus
  siRNA target sequence for 9330187M14Rik (NM_172583.1,1684-1702).
ctgatcatagtgcacaaat

SEQ ID NO: 694135 - DNA, 19 bp, Mus musculus
  siRNA target sequence for 9330187M14Rik (NM_172583.1,1752-1770).
gaccagtctgcatgtgttt

SEQ ID NO: 694136 - DNA, 19 bp, Mus musculus
  siRNA target sequence for 9330187M14Rik (NM_172583.1,1755-1773).
cagtctgcatgtgttttta

SEQ ID NO: 694137 - DNA, 19 bp, Mus musculus
  siRNA target sequence for 9330187M14Rik (NM_172583.1,1759-1777).
ctgcatgtgtttttacgat

SEQ ID NO: 694138 - DNA, 19 bp, Mus musculus
  siRNA target sequence for 9330187M14Rik (NM_172583.1,1778-1796).
ggctctttgacatctacta

SEQ ID NO: 694139 - DNA, 19 bp, Mus musculus
  siRNA target sequence for 9330187M14Rik (NM_172583.1,1779-1797).
gctctttgacatctactat

SEQ ID NO: 694140 - DNA, 19 bp, Mus musculus
  siRNA target sequence for 9330187M14Rik (NM_172583.1,1914-1932).
ggggtcactctgcacatat

SEQ ID NO: 694141 - DNA, 19 bp, Mus musculus
  siRNA target sequence for 9330187M14Rik (NM_172583.1,1915-1933).
gggtcactctgcacatatt

SEQ ID NO: 694142 - DNA, 19 bp, Mus musculus
  siRNA target sequence for 9330187M14Rik (NM_172583.1,1938-1956).
ccgcctcttcttatccaaa

SEQ ID NO: 694143 - DNA, 19 bp, Mus musculus
  siRNA target sequence for 9330187M14Rik (NM_172583.1,1939-1957).
cgcctcttcttatccaaat

SEQ ID NO: 694144 - DNA, 19 bp, Mus musculus
  siRNA target sequence for 9330187M14Rik (NM_172583.1,2004-2022).
ccagtttggacgagagtat

SEQ ID NO: 694145 - DNA, 19 bp, Mus musculus
  siRNA target sequence for 9330187M14Rik (NM_172583.1,2047-2065).
gtggtgatggcgtatagca

SEQ ID NO: 694146 - DNA, 19 bp, Mus musculus
  siRNA target sequence for 9330187M14Rik (NM_172583.1,2087-2105).
cgtttgggctgctgtatct

SEQ ID NO: 694147 - DNA, 19 bp, Mus musculus
  siRNA target sequence for 9330187M14Rik (NM_172583.1,2104-2122).
ctgtgcatgaagcacatta

SEQ ID NO: 694148 - DNA, 19 bp, Mus musculus
  siRNA target sequence for 9330187M14Rik (NM_172583.1,2106-2124).
gtgcatgaagcacattaca

SEQ ID NO: 694149 - DNA, 19 bp, Mus musculus
  siRNA target sequence for 9330187M14Rik (NM_172583.1,2108-2126).
gcatgaagcacattacaga

SEQ ID NO: 694150 - DNA, 19 bp, Mus musculus
  siRNA target sequence for 9330187M14Rik (NM_172583.1,2123-2141).
cagaccgctataacatgta

SEQ ID NO: 694151 - DNA, 19 bp, Mus musculus
  siRNA target sequence for 9330187M14Rik (NM_172583.1,2125-2143).
gaccgctataacatgtact

SEQ ID NO: 694152 - DNA, 19 bp, Mus musculus
  siRNA target sequence for 9330187M14Rik (NM_172583.1,2128-2146).
cgctataacatgtactact

SEQ ID NO: 694153 - DNA, 19 bp, Mus musculus
  siRNA target sequence for 9330187M14Rik (NM_172583.1,2189-2207).
cagtctaccaggccatttt

SEQ ID NO: 694154 - DNA, 19 bp, Mus musculus
  siRNA target sequence for Adfp (NM_007408.2,242-260).
gatcagtacccgtatttga

SEQ ID NO: 694155 - DNA, 19 bp, Mus musculus
  siRNA target sequence for Adfp (NM_007408.2,340-358).
gaagctggagccacaaatt

SEQ ID NO: 694156 - DNA, 19 bp, Mus musculus
  siRNA target sequence for Adfp (NM_007408.2,404-422).
gaaagactgcctattctga

SEQ ID NO: 694157 - DNA, 19 bp, Mus musculus
  siRNA target sequence for Adfp (NM_007408.2,637-655).
catgaacagtggagtagat

SEQ ID NO: 694158 - DNA, 19 bp, Mus musculus
  siRNA target sequence for Adfp (NM_007408.2,744-762).
gatttgatatggttcagaa

SEQ ID NO: 694159 - DNA, 19 bp, Mus musculus
  siRNA target sequence for Adfp (NM_007408.2,760-778).
gaagccgagcaactatgaa

SEQ ID NO: 694160 - DNA, 19 bp, Mus musculus
  siRNA target sequence for Adfp (NM_007408.2,859-877).
gagccaggagaccatttct

SEQ ID NO: 694161 - DNA, 19 bp, Mus musculus
  siRNA target sequence for Adfp (NM_007408.2,905-923).
gaattcgccaggaagaata

SEQ ID NO: 694162 - DNA, 19 bp, Mus musculus
  siRNA target sequence for Adfp (NM_007408.2,954-972).
ctcaggataagctctatgt

SEQ ID NO: 694163 - DNA, 19 bp, Mus musculus
  siRNA target sequence for Adfp (NM_007408.2,956-974).
caggataagctctatgtct

SEQ ID NO: 694164 - DNA, 19 bp, Mus musculus
  siRNA target sequence for Adfp (NM_007408.2,1079-1097).
cagcagctccagactacat

SEQ ID NO: 694165 - DNA, 19 bp, Mus musculus
  siRNA target sequence for Adfp (NM_007408.2,1142-1160).
caagatcaggccaaacact

SEQ ID NO: 694166 - DNA, 19 bp, Mus musculus
  siRNA target sequence for Adfp (NM_007408.2,1226-1244).
gatggcgtcctcacatcta

SEQ ID NO: 694167 - DNA, 19 bp, Mus musculus
  siRNA target sequence for AI461653 (NM_178920.2,214-232).
ccaaggatgggtcatgttt

SEQ ID NO: 694168 - DNA, 19 bp, Mus musculus
  siRNA target sequence for AI461653 (NM_178920.2,288-306).
gtatggtgactcagattga

SEQ ID NO: 694169 - DNA, 19 bp, Mus musculus
  siRNA target sequence for AI461653 (NM_178920.2,323-341).
ctggattttgtctaccatt

SEQ ID NO: 694170 - DNA, 19 bp, Mus musculus
  siRNA target sequence for AI461653 (NM_178920.2,332-350).
gtctaccatttcatagtct

SEQ ID NO: 694171 - DNA, 19 bp, Mus musculus
  siRNA target sequence for AI461653 (NM_178920.2,358-376).
ctacttcggagcgttttta

SEQ ID NO: 694172 - DNA, 19 bp, Mus musculus
  siRNA target sequence for AI461653 (NM_178920.2,496-514).
gacaacagcttgttatggt

SEQ ID NO: 694173 - DNA, 19 bp, Mus musculus
  siRNA target sequence for AL022610 (NM_133947.2,321-339).
gccactaccggaaagacta

SEQ ID NO: 694174 - DNA, 19 bp, Mus musculus
  siRNA target sequence for AL022610 (NM_133947.2,370-388).
cggaaacatccttcatcta

SEQ ID NO: 694175 - DNA, 19 bp, Mus musculus
  siRNA target sequence for AL022610 (NM_133947.2,376-394).
catccttcatctacacaat

SEQ ID NO: 694176 - DNA, 19 bp, Mus musculus
  siRNA target sequence for AL022610 (NM_133947.2,450-468).
gataatgctgtttttatat

SEQ ID NO: 694177 - DNA, 19 bp, Mus musculus
  siRNA target sequence for AL022610 (NM_133947.2,499-517).
gactgggagcagtttgaat

SEQ ID NO: 694178 - DNA, 19 bp, Mus musculus
  siRNA target sequence for AL022610 (NM_133947.2,538-556).
gcggtcatcctgaagttta

SEQ ID NO: 694179 - DNA, 19 bp, Mus musculus
  siRNA target sequence for AL022610 (NM_133947.2,539-557).
cggtcatcctgaagtttat

SEQ ID NO: 694180 - DNA, 19 bp, Mus musculus
  siRNA target sequence for AL022610 (NM_133947.2,568-586).
gaggagtcgctaaacctta

SEQ ID NO: 694181 - DNA, 19 bp, Mus musculus
  siRNA target sequence for AL022610 (NM_133947.2,688-706).
cgcttcctagaaatacaga

SEQ ID NO: 694182 - DNA, 19 bp, Mus musculus
  siRNA target sequence for AL022610 (NM_133947.2,697-715).
gaaatacagaggattgctt

SEQ ID NO: 694183 - DNA, 19 bp, Mus musculus
  siRNA target sequence for AL022610 (NM_133947.2,716-734).
catcttccagtgagaacaa

SEQ ID NO: 694184 - DNA, 19 bp, Mus musculus
  siRNA target sequence for AL022610 (NM_133947.2,758-776).
cccctatgggcgacatact

SEQ ID NO: 694185 - DNA, 19 bp, Mus musculus
  siRNA target sequence for AL022610 (NM_133947.2,990-1008).
gctccgaggcaagaatgaa

SEQ ID NO: 694186 - DNA, 19 bp, Mus musculus
  siRNA target sequence for AL022610 (NM_133947.2,1070-1088).
gccagatggatcgaaagat

SEQ ID NO: 694187 - DNA, 19 bp, Mus musculus
  siRNA target sequence for AL022610 (NM_133947.2,1071-1089).
ccagatggatcgaaagatt

SEQ ID NO: 694188 - DNA, 19 bp, Mus musculus
  siRNA target sequence for AL022610 (NM_133947.2,1072-1090).
cagatggatcgaaagatta

SEQ ID NO: 694189 - DNA, 19 bp, Mus musculus
  siRNA target sequence for AL022610 (NM_133947.2,1122-1140).
ctttaaggttcgagagttt

SEQ ID NO: 694190 - DNA, 19 bp, Mus musculus
  siRNA target sequence for AL022610 (NM_133947.2,1169-1187).
cattcaacgacctgataga

SEQ ID NO: 694191 - DNA, 19 bp, Mus musculus
  siRNA target sequence for AL022610 (NM_133947.2,1224-1242).
gcaggctcgtctggaaaat

SEQ ID NO: 694192 - DNA, 19 bp, Mus musculus
  siRNA target sequence for AL022610 (NM_133947.2,1514-1532).
gccgctttgaagacgaaaa

SEQ ID NO: 694193 - DNA, 19 bp, Mus musculus
  siRNA target sequence for AL022610 (NM_133947.2,1677-1695).
cctgcagcagcgagatcaa

SEQ ID NO: 694194 - DNA, 19 bp, Mus musculus
  siRNA target sequence for AL022610 (NM_133947.2,1909-1927).
gctcgagaggcctctctaa

SEQ ID NO: 694195 - DNA, 19 bp, Mus musculus
  siRNA target sequence for AL022610 (NM_133947.2,1942-1960).
gctcgccagcagctagaaa

SEQ ID NO: 694196 - DNA, 19 bp, Mus musculus
  siRNA target sequence for AL022610 (NM_133947.2,2198-2216).
caactgagcgagaaaaggt

SEQ ID NO: 694197 - DNA, 19 bp, Mus musculus
  siRNA target sequence for AL022610 (NM_133947.2,2254-2272).
gcccttgaggagtctttga

SEQ ID NO: 694198 - DNA, 19 bp, Mus musculus
  siRNA target sequence for AL022610 (NM_133947.2,2255-2273).
cccttgaggagtctttgaa

SEQ ID NO: 694199 - DNA, 19 bp, Mus musculus
  siRNA target sequence for AL022610 (NM_133947.2,2257-2275).
cttgaggagtctttgaaga

SEQ ID NO: 694200 - DNA, 19 bp, Mus musculus
  siRNA target sequence for AL022610 (NM_133947.2,2982-3000).
gcagggacggccattctct

SEQ ID NO: 694201 - DNA, 19 bp, Mus musculus
  siRNA target sequence for AL022610 (NM_133947.2,2983-3001).
cagggacggccattctcta

SEQ ID NO: 694202 - DNA, 19 bp, Mus musculus
  siRNA target sequence for AL022610 (NM_133947.2,2986-3004).
ggacggccattctctagta

SEQ ID NO: 694203 - DNA, 19 bp, Mus musculus
  siRNA target sequence for AL022610 (NM_133947.2,3002-3020).
gtacacacgcagcagtaaa

SEQ ID NO: 694204 - DNA, 19 bp, Mus musculus
  siRNA target sequence for AL022610 (NM_133947.2,3070-3088).
cgggcagcactgatcaaga

SEQ ID NO: 694205 - DNA, 19 bp, Mus musculus
  siRNA target sequence for AL022610 (NM_133947.2,3517-3535).
cttcgggcagagatcagta

SEQ ID NO: 694206 - DNA, 19 bp, Mus musculus
  siRNA target sequence for AL022610 (NM_133947.2,3641-3659).
cactgcagggccagttaga

SEQ ID NO: 694207 - DNA, 19 bp, Mus musculus
  siRNA target sequence for AL022610 (NM_133947.2,3671-3689).
gagagctagggcataatca

SEQ ID NO: 694208 - DNA, 19 bp, Mus musculus
  siRNA target sequence for AL022610 (NM_133947.2,3720-3738).
gcaagccctccgtgctaaa

SEQ ID NO: 694209 - DNA, 19 bp, Mus musculus
  siRNA target sequence for AL022610 (NM_133947.2,3947-3965).
ggctgcgcctgcttcaagt

SEQ ID NO: 694210 - DNA, 19 bp, Mus musculus
  siRNA target sequence for AL022610 (NM_133947.2,3948-3966).
gctgcgcctgcttcaagta

SEQ ID NO: 694211 - DNA, 19 bp, Mus musculus
  siRNA target sequence for AL022610 (NM_133947.2,3952-3970).
cgcctgcttcaagtagaaa

SEQ ID NO: 694212 - DNA, 19 bp, Mus musculus
  siRNA target sequence for AL022610 (NM_133947.2,3964-3982).
gtagaaacagccagcaata

SEQ ID NO: 694213 - DNA, 19 bp, Mus musculus
  siRNA target sequence for AL022610 (NM_133947.2,4047-4065).
ggagaaacagcgtgtagtt

SEQ ID NO: 694214 - DNA, 19 bp, Mus musculus
  siRNA target sequence for AL022610 (NM_133947.2,4202-4220).
cacaggccctggtaagtga

SEQ ID NO: 694215 - DNA, 19 bp, Mus musculus
  siRNA target sequence for AL022610 (NM_133947.2,4373-4391).
gatctttgcggcagaagat

SEQ ID NO: 694216 - DNA, 19 bp, Mus musculus
  siRNA target sequence for AL022610 (NM_133947.2,4617-4635).
ggctgaaatgcgacaagaa

SEQ ID NO: 694217 - DNA, 19 bp, Mus musculus
  siRNA target sequence for AL022610 (NM_133947.2,5186-5204).
gtgacttgggcaaattcca

SEQ ID NO: 694218 - DNA, 19 bp, Mus musculus
  siRNA target sequence for AL022610 (NM_133947.2,5228-5246).
gccgtgagcctcaagtgaa

SEQ ID NO: 694219 - DNA, 19 bp, Mus musculus
  siRNA target sequence for AL022610 (NM_133947.2,5229-5247).
ccgtgagcctcaagtgaaa

SEQ ID NO: 694220 - DNA, 19 bp, Mus musculus
  siRNA target sequence for AL022610 (NM_133947.2,5250-5268).
ccagctggacttaagtatt

SEQ ID NO: 694221 - DNA, 19 bp, Mus musculus
  siRNA target sequence for AL022610 (NM_133947.2,5528-5546).
gccgtaccacacaaatcat

SEQ ID NO: 694222 - DNA, 19 bp, Mus musculus
  siRNA target sequence for AL022610 (NM_133947.2,5530-5548).
cgtaccacacaaatcatca

SEQ ID NO: 694223 - DNA, 19 bp, Mus musculus
  siRNA target sequence for AL022610 (NM_133947.2,5531-5549).
gtaccacacaaatcatcaa

SEQ ID NO: 694224 - DNA, 19 bp, Mus musculus
  siRNA target sequence for AL022610 (NM_133947.2,5539-5557).
caaatcatcaacatcacta

SEQ ID NO: 694225 - DNA, 19 bp, Mus musculus
  siRNA target sequence for AL022610 (NM_133947.2,5562-5580).
caagaaattagaattggaa

SEQ ID NO: 694226 - DNA, 19 bp, Mus musculus
  siRNA target sequence for AL022610 (NM_133947.2,5584-5602).
ccagacagcgccaactcat

SEQ ID NO: 694227 - DNA, 19 bp, Mus musculus
  siRNA target sequence for AL022610 (NM_133947.2,5789-5807).
cccaagggaggaatagctt

SEQ ID NO: 694228 - DNA, 19 bp, Mus musculus
  siRNA target sequence for AL022610 (NM_133947.2,5794-5812).
gggaggaatagcttctaca

SEQ ID NO: 694229 - DNA, 19 bp, Mus musculus
  siRNA target sequence for AL022610 (NM_133947.2,6031-6049).
gagggtgttggcataacta

SEQ ID NO: 694230 - DNA, 19 bp, Mus musculus
  siRNA target sequence for AL022610 (NM_133947.2,6099-6117).
cactcctgagtccaagaaa

SEQ ID NO: 694231 - DNA, 19 bp, Mus musculus
  siRNA target sequence for AL022610 (NM_133947.2,6227-6245).
cggaccggcgtcagtcaat

SEQ ID NO: 694232 - DNA, 19 bp, Mus musculus
  siRNA target sequence for AL022610 (NM_133947.2,6247-6265).
gctttcagcatccttaaca

SEQ ID NO: 694233 - DNA, 19 bp, Mus musculus
  siRNA target sequence for BC003296 (NM_178410.2,144-162).
cctgactacgtggcaaaat

SEQ ID NO: 694234 - DNA, 19 bp, Mus musculus
  siRNA target sequence for BC003296 (NM_178410.2,145-163).
ctgactacgtggcaaaata

SEQ ID NO: 694235 - DNA, 19 bp, Mus musculus
  siRNA target sequence for BC003296 (NM_178410.2,149-167).
ctacgtggcaaaatatcct

SEQ ID NO: 694236 - DNA, 19 bp, Mus musculus
  siRNA target sequence for BC003296 (NM_178410.2,257-275).
ggccatcctgaggaagttt

SEQ ID NO: 694237 - DNA, 19 bp, Mus musculus
  siRNA target sequence for BC003296 (NM_178410.2,259-277).
ccatcctgaggaagtttga

SEQ ID NO: 694238 - DNA, 19 bp, Mus musculus
  siRNA target sequence for BC003296 (NM_178410.2,296-314).
gagcaggctcccacatcat

SEQ ID NO: 694239 - DNA, 19 bp, Mus musculus
  siRNA target sequence for BC003296 (NM_178410.2,303-321).
ctcccacatcattctgaaa

SEQ ID NO: 694240 - DNA, 19 bp, Mus musculus
  siRNA target sequence for BC003296 (NM_178410.2,335-353).
cgagagaatttcaagaatt

SEQ ID NO: 694241 - DNA, 19 bp, Mus musculus
  siRNA target sequence for BC003296 (NM_178410.2,354-372).
catgaagagtttaggaaaa

SEQ ID NO: 694242 - DNA, 19 bp, Mus musculus
  siRNA target sequence for BC003296 (NM_178410.2,360-378).
gagtttaggaaaaagaaga

SEQ ID NO: 694243 - DNA, 19 bp, Mus musculus
  siRNA target sequence for BC003296 (NM_178410.2,409-427).
gttgcgattacctcaagaa

SEQ ID NO: 694244 - DNA, 19 bp, Mus musculus
  siRNA target sequence for BC003296 (NM_178410.2,440-458).
cataaagcaaagaattcaa

SEQ ID NO: 694245 - DNA, 19 bp, Mus musculus
  siRNA target sequence for BC003296 (NM_178410.2,451-469).
gaattcaagaatacgataa

SEQ ID NO: 694246 - DNA, 19 bp, Mus musculus
  siRNA target sequence for BC003296 (NM_178410.2,456-474).
caagaatacgataaagtga

SEQ ID NO: 694247 - DNA, 19 bp, Mus musculus
  siRNA target sequence for BC014795 (NM_144794.1,86-104).
gccgtccaaggctgtgttt

SEQ ID NO: 694248 - DNA, 19 bp, Mus musculus
  siRNA target sequence for BC014795 (NM_144794.1,88-106).
cgtccaaggctgtgtttgt

SEQ ID NO: 694249 - DNA, 19 bp, Mus musculus
  siRNA target sequence for BC014795 (NM_144794.1,126-144).
ggcgaacgtcccaatgact

SEQ ID NO: 694250 - DNA, 19 bp, Mus musculus
  siRNA target sequence for BC014795 (NM_144794.1,132-150).
cgtcccaatgactcctatt

SEQ ID NO: 694251 - DNA, 19 bp, Mus musculus
  siRNA target sequence for BC014795 (NM_144794.1,141-159).
gactcctattgctacaact

SEQ ID NO: 694252 - DNA, 19 bp, Mus musculus
  siRNA target sequence for BC014795 (NM_144794.1,211-229).
ctgtcctgctcttagatgt

SEQ ID NO: 694253 - DNA, 19 bp, Mus musculus
  siRNA target sequence for BC014795 (NM_144794.1,251-269).
cctggtgttttccatcata

SEQ ID NO: 694254 - DNA, 19 bp, Mus musculus
  siRNA target sequence for BC014795 (NM_144794.1,255-273).
gtgttttccatcataagga

SEQ ID NO: 694255 - DNA, 19 bp, Mus musculus
  siRNA target sequence for BC014795 (NM_144794.1,295-313).
gcatagccctggtatcaga

SEQ ID NO: 694256 - DNA, 19 bp, Mus musculus
  siRNA target sequence for BC014795 (NM_144794.1,460-478).
ccatccactacctgtcttt

SEQ ID NO: 694257 - DNA, 19 bp, Mus musculus
  siRNA target sequence for BC014795 (NM_144794.1,461-479).
catccactacctgtctttt

SEQ ID NO: 694258 - DNA, 19 bp, Mus musculus
  siRNA target sequence for BC014795 (NM_144794.1,465-483).
cactacctgtcttttcaga

SEQ ID NO: 694259 - DNA, 19 bp, Mus musculus
  siRNA target sequence for BC014795 (NM_144794.1,475-493).
cttttcagaggcacatcat

SEQ ID NO: 694260 - DNA, 19 bp, Mus musculus
  siRNA target sequence for BC014795 (NM_144794.1,504-522).
gtggtgatcagcttcttgt

SEQ ID NO: 694261 - DNA, 19 bp, Mus musculus
  siRNA target sequence for BC014795 (NM_144794.1,588-606).
gggaggacaacgatagcta

SEQ ID NO: 694262 - DNA, 19 bp, Mus musculus
  siRNA target sequence for BC014795 (NM_144794.1,589-607).
ggaggacaacgatagctaa

SEQ ID NO: 694263 - DNA, 19 bp, Mus musculus
  siRNA target sequence for BC014795 (NM_144794.1,669-687).
ctcacggtgggcttcatgt

SEQ ID NO: 694264 - DNA, 19 bp, Mus musculus
  siRNA target sequence for BC014795 (NM_144794.1,693-711).
cacacacggtccatcagat

SEQ ID NO: 694265 - DNA, 19 bp, Mus musculus
  siRNA target sequence for BC014795 (NM_144794.1,697-715).
cacggtccatcagatacaa

SEQ ID NO: 694266 - DNA, 19 bp, Mus musculus
  siRNA target sequence for BC014795 (NM_144794.1,720-738).
gagagtctggtgagacaaa

SEQ ID NO: 694267 - DNA, 19 bp, Mus musculus
  siRNA target sequence for BC014795 (NM_144794.1,724-742).
gtctggtgagacaaacctt

SEQ ID NO: 694268 - DNA, 19 bp, Mus musculus
  siRNA target sequence for BC014795 (NM_144794.1,729-747).
gtgagacaaaccttgttca

SEQ ID NO: 694269 - DNA, 19 bp, Mus musculus
  siRNA target sequence for BC014795 (NM_144794.1,847-865).
gcgtggctaagctgatcta

SEQ ID NO: 694270 - DNA, 19 bp, Mus musculus
  siRNA target sequence for BC014795 (NM_144794.1,889-907).
ccgagaagagccttaccta

SEQ ID NO: 694271 - DNA, 19 bp, Mus musculus
  siRNA target sequence for BC014795 (NM_144794.1,890-908).
cgagaagagccttacctat

SEQ ID NO: 694272 - DNA, 19 bp, Mus musculus
  siRNA target sequence for BC014795 (NM_144794.1,891-909).
gagaagagccttacctatt

SEQ ID NO: 694273 - DNA, 19 bp, Mus musculus
  siRNA target sequence for BC014795 (NM_144794.1,896-914).
gagccttacctattacaca

SEQ ID NO: 694274 - DNA, 19 bp, Mus musculus
  siRNA target sequence for BC014795 (NM_144794.1,898-916).
gccttacctattacacaaa

SEQ ID NO: 694275 - DNA, 19 bp, Mus musculus
  siRNA target sequence for BC014795 (NM_144794.1,934-952).
gccgacggaccctcatcaa

SEQ ID NO: 694276 - DNA, 19 bp, Mus musculus
  siRNA target sequence for BC014795 (NM_144794.1,1002-1020).
cgggaagatgctatttctt

SEQ ID NO: 694277 - DNA, 19 bp, Mus musculus
  siRNA target sequence for BC014795 (NM_144794.1,1018-1036).
cttactacactcgaatgaa

SEQ ID NO: 694278 - DNA, 19 bp, Mus musculus
  siRNA target sequence for BC014795 (NM_144794.1,1124-1142).
gtccatggctacctacata

SEQ ID NO: 694279 - DNA, 19 bp, Mus musculus
  siRNA target sequence for BC014795 (NM_144794.1,1132-1150).
ctacctacatactgaaaga

SEQ ID NO: 694280 - DNA, 19 bp, Mus musculus
  siRNA target sequence for BC014795 (NM_144794.1,1135-1153).
cctacatactgaaagactt

SEQ ID NO: 694281 - DNA, 19 bp, Mus musculus
  siRNA target sequence for BC014795 (NM_144794.1,1139-1157).
catactgaaagacttcaat

SEQ ID NO: 694282 - DNA, 19 bp, Mus musculus
  siRNA target sequence for BC014795 (NM_144794.1,1231-1249).
ccaagtggacggtcacttt

SEQ ID NO: 694283 - DNA, 19 bp, Mus musculus
  siRNA target sequence for BC014795 (NM_144794.1,1363-1381).
ccacgccctccatcattat

SEQ ID NO: 694284 - DNA, 19 bp, Mus musculus
  siRNA target sequence for BC014795 (NM_144794.1,1367-1385).
gccctccatcattatgtct

SEQ ID NO: 694285 - DNA, 19 bp, Mus musculus
  siRNA target sequence for BC014795 (NM_144794.1,1413-1431).
cccatccacgcactgaata

SEQ ID NO: 694286 - DNA, 19 bp, Mus musculus
  siRNA target sequence for BC014795 (NM_144794.1,1414-1432).
ccatccacgcactgaataa

SEQ ID NO: 694287 - DNA, 19 bp, Mus musculus
  siRNA target sequence for BC014795 (NM_144794.1,1559-1577).
ggtgtcgaaggtctacata

SEQ ID NO: 694288 - DNA, 19 bp, Mus musculus
  siRNA target sequence for BC014795 (NM_144794.1,1560-1578).
gtgtcgaaggtctacatat

SEQ ID NO: 694289 - DNA, 19 bp, Mus musculus
  siRNA target sequence for BC014795 (NM_144794.1,1562-1580).
gtcgaaggtctacatattt

SEQ ID NO: 694290 - DNA, 19 bp, Mus musculus
  siRNA target sequence for BC014795 (NM_144794.1,1615-1633).
gtctcaccagcttggattt

SEQ ID NO: 694291 - DNA, 19 bp, Mus musculus
  siRNA target sequence for BC014795 (NM_144794.1,1643-1661).
gtggctctttgacaaaact

SEQ ID NO: 694292 - DNA, 19 bp, Mus musculus
  siRNA target sequence for BC014795 (NM_144794.1,1711-1729).
gtgccttctttgtgaacta

SEQ ID NO: 694293 - DNA, 19 bp, Mus musculus
  siRNA target sequence for BC014795 (NM_144794.1,1826-1844).
cgctgaccgcaggaatgtt

SEQ ID NO: 694294 - DNA, 19 bp, Mus musculus
  siRNA target sequence for BC014795 (NM_144794.1,1827-1845).
gctgaccgcaggaatgtta

SEQ ID NO: 694295 - DNA, 19 bp, Mus musculus
  siRNA target sequence for BC014795 (NM_144794.1,1828-1846).
ctgaccgcaggaatgttaa

SEQ ID NO: 694296 - DNA, 19 bp, Mus musculus
  siRNA target sequence for BC014795 (NM_144794.1,2011-2029).
cttacctcccggctaaact

SEQ ID NO: 694297 - DNA, 19 bp, Mus musculus
  siRNA target sequence for BC014795 (NM_144794.1,2190-2208).
ctgtacacctgctttggat

SEQ ID NO: 694298 - DNA, 19 bp, Mus musculus
  siRNA target sequence for BC014795 (NM_144794.1,2379-2397).
ggtgccatccgtaacatca

SEQ ID NO: 694299 - DNA, 19 bp, Mus musculus
  siRNA target sequence for BC014795 (NM_144794.1,2414-2432).
gcagcccgtggctcaagat

SEQ ID NO: 694300 - DNA, 19 bp, Mus musculus
  siRNA target sequence for BC026370 (NM_198167.1,188-206).
ggacttcatgtgctttctt

SEQ ID NO: 694301 - DNA, 19 bp, Mus musculus
  siRNA target sequence for BC026370 (NM_198167.1,385-403).
ccagctctgtcgactttga

SEQ ID NO: 694302 - DNA, 19 bp, Mus musculus
  siRNA target sequence for BC026370 (NM_198167.1,718-736).
ggagacacacctctaagat

SEQ ID NO: 694303 - DNA, 19 bp, Mus musculus
  siRNA target sequence for BC026370 (NM_198167.1,737-755).
gcgctacaaggaagatgat

SEQ ID NO: 694304 - DNA, 19 bp, Mus musculus
  siRNA target sequence for BC026370 (NM_198167.1,756-774).
ctggtcaagcggactcttt

SEQ ID NO: 694305 - DNA, 19 bp, Mus musculus
  siRNA target sequence for BC026370 (NM_198167.1,764-782).
gcggactcttttcatcaat

SEQ ID NO: 694306 - DNA, 19 bp, Mus musculus
  siRNA target sequence for BC026370 (NM_198167.1,779-797).
caatggaatctccaaatat

SEQ ID NO: 694307 - DNA, 19 bp, Mus musculus
  siRNA target sequence for BC026370 (NM_198167.1,918-936).
gctgagcggggaaaactct

SEQ ID NO: 694308 - DNA, 19 bp, Mus musculus
  siRNA target sequence for BC026370 (NM_198167.1,919-937).
ctgagcggggaaaactcta

SEQ ID NO: 694309 - DNA, 19 bp, Mus musculus
  siRNA target sequence for BC026370 (NM_198167.1,923-941).
gcggggaaaactctacttt

SEQ ID NO: 694310 - DNA, 19 bp, Mus musculus
  siRNA target sequence for BC026370 (NM_198167.1,1041-1059).
gccattgagtactacacaa

SEQ ID NO: 694311 - DNA, 19 bp, Mus musculus
  siRNA target sequence for BC026370 (NM_198167.1,1042-1060).
ccattgagtactacacaaa

SEQ ID NO: 694312 - DNA, 19 bp, Mus musculus
  siRNA target sequence for BC026370 (NM_198167.1,1179-1197).
gacttcaacgtgtgcaaat

SEQ ID NO: 694313 - DNA, 19 bp, Mus musculus
  siRNA target sequence for BC026370 (NM_198167.1,1345-1363).
gctgcctggtcatcaatgt

SEQ ID NO: 694314 - DNA, 19 bp, Mus musculus
  siRNA target sequence for BC026370 (NM_198167.1,1358-1376).
caatgtggtcctcttcatt

SEQ ID NO: 694315 - DNA, 19 bp, Mus musculus
  siRNA target sequence for BC026370 (NM_198167.1,1704-1722).
gcagctattcggtttgagt

SEQ ID NO: 694316 - DNA, 19 bp, Mus musculus
  siRNA target sequence for BC026370 (NM_198167.1,1735-1753).
ccgacaacggcgctttctt

SEQ ID NO: 694317 - DNA, 19 bp, Mus musculus
  siRNA target sequence for BC026370 (NM_198167.1,1744-1762).
gcgctttcttcgtgaacta

SEQ ID NO: 694318 - DNA, 19 bp, Mus musculus
  siRNA target sequence for BC026370 (NM_198167.1,1807-1825).
gcatcccaggcctactcat

SEQ ID NO: 694319 - DNA, 19 bp, Mus musculus
  siRNA target sequence for BC026370 (NM_198167.1,1914-1932).
gcctacgcttggatgatgt

SEQ ID NO: 694320 - DNA, 19 bp, Mus musculus
  siRNA target sequence for BC026370 (NM_198167.1,1983-2001).
cccttcgggctcatgtaca

SEQ ID NO: 694321 - DNA, 19 bp, Mus musculus
  siRNA target sequence for BC026370 (NM_198167.1,1984-2002).
ccttcgggctcatgtacat

SEQ ID NO: 694322 - DNA, 19 bp, Mus musculus
  siRNA target sequence for BC026370 (NM_198167.1,2147-2165).
catgcgcacgggtttccta

SEQ ID NO: 694323 - DNA, 19 bp, Mus musculus
  siRNA target sequence for BC026370 (NM_198167.1,2185-2203).
ccttcgttgttctggtaat

SEQ ID NO: 694324 - DNA, 19 bp, Mus musculus
  siRNA target sequence for BC026370 (NM_198167.1,2295-2313).
gccgtgagctccagaagta

SEQ ID NO: 694325 - DNA, 19 bp, Mus musculus
  siRNA target sequence for BC026370 (NM_198167.1,2300-2318).
gagctccagaagtaatgga

SEQ ID NO: 694326 - DNA, 19 bp, Mus musculus
  siRNA target sequence for BC026370 (NM_198167.1,2343-2361).
cccaaatctgcgaaataca

SEQ ID NO: 694327 - DNA, 19 bp, Mus musculus
  siRNA target sequence for BC026370 (NM_198167.1,2519-2537).
cctcatagagaatgagatt

SEQ ID NO: 694328 - DNA, 19 bp, Mus musculus
  siRNA target sequence for Bves (NM_024285.1,917-935).
cactgaatgaccctacttt

SEQ ID NO: 694329 - DNA, 19 bp, Mus musculus
  siRNA target sequence for Bves (NM_024285.1,921-939).
gaatgaccctactttaaat

SEQ ID NO: 694330 - DNA, 19 bp, Mus musculus
  siRNA target sequence for Bves (NM_024285.1,1108-1126).
cgagcctctgccaagatga

SEQ ID NO: 694331 - DNA, 19 bp, Mus musculus
  siRNA target sequence for Bves (NM_024285.1,1153-1171).
gacgatgaggtctttgtgt

SEQ ID NO: 694332 - DNA, 19 bp, Mus musculus
  siRNA target sequence for Cacna2d3 (NM_009785.1,229-247).
gtgggcctccgcttttggt

SEQ ID NO: 694333 - DNA, 19 bp, Mus musculus
  siRNA target sequence for Cacna2d3 (NM_009785.1,246-264).
gtggggagataaaatccat

SEQ ID NO: 694334 - DNA, 19 bp, Mus musculus
  siRNA target sequence for Cacna2d3 (NM_009785.1,475-493).
gcagtatgaatacttcaat

SEQ ID NO: 694335 - DNA, 19 bp, Mus musculus
  siRNA target sequence for Cacna2d3 (NM_009785.1,521-539).
gacgggaactttttggaat

SEQ ID NO: 694336 - DNA, 19 bp, Mus musculus
  siRNA target sequence for Cacna2d3 (NM_009785.1,560-578).
gcccccaatgaccatttta

SEQ ID NO: 694337 - DNA, 19 bp, Mus musculus
  siRNA target sequence for Cacna2d3 (NM_009785.1,614-632).
caagtgccaacgaacatgt

SEQ ID NO: 694338 - DNA, 19 bp, Mus musculus
  siRNA target sequence for Cacna2d3 (NM_009785.1,617-635).
gtgccaacgaacatgtaca

SEQ ID NO: 694339 - DNA, 19 bp, Mus musculus
  siRNA target sequence for Cacna2d3 (NM_009785.1,620-638).
ccaacgaacatgtacaaca

SEQ ID NO: 694340 - DNA, 19 bp, Mus musculus
  siRNA target sequence for Cacna2d3 (NM_009785.1,621-639).
caacgaacatgtacaacaa

SEQ ID NO: 694341 - DNA, 19 bp, Mus musculus
  siRNA target sequence for Cacna2d3 (NM_009785.1,649-667).
cattgtcaatggagtgtat

SEQ ID NO: 694342 - DNA, 19 bp, Mus musculus
  siRNA target sequence for Cacna2d3 (NM_009785.1,653-671).
gtcaatggagtgtattggt

SEQ ID NO: 694343 - DNA, 19 bp, Mus musculus
  siRNA target sequence for Cacna2d3 (NM_009785.1,659-677).
ggagtgtattggtctgaat

SEQ ID NO: 694344 - DNA, 19 bp, Mus musculus
  siRNA target sequence for Cacna2d3 (NM_009785.1,664-682).
gtattggtctgaatctcta

SEQ ID NO: 694345 - DNA, 19 bp, Mus musculus
  siRNA target sequence for Cacna2d3 (NM_009785.1,670-688).
gtctgaatctctaaacaaa

SEQ ID NO: 694346 - DNA, 19 bp, Mus musculus
  siRNA target sequence for Cacna2d3 (NM_009785.1,672-690).
ctgaatctctaaacaaagt

SEQ ID NO: 694347 - DNA, 19 bp, Mus musculus
  siRNA target sequence for Cacna2d3 (NM_009785.1,710-728).
cgggatccgtctctcatat

SEQ ID NO: 694348 - DNA, 19 bp, Mus musculus
  siRNA target sequence for Cacna2d3 (NM_009785.1,741-759).
gaagtgcaaagggcttttt

SEQ ID NO: 694349 - DNA, 19 bp, Mus musculus
  siRNA target sequence for Cacna2d3 (NM_009785.1,915-933).
ccatcgccaagcaaacagt

SEQ ID NO: 694350 - DNA, 19 bp, Mus musculus
  siRNA target sequence for Cacna2d3 (NM_009785.1,936-954).
cctcaatactggatactct

SEQ ID NO: 694351 - DNA, 19 bp, Mus musculus
  siRNA target sequence for Cacna2d3 (NM_009785.1,951-969).
ctctgggtgatgatgactt

SEQ ID NO: 694352 - DNA, 19 bp, Mus musculus
  siRNA target sequence for Cacna2d3 (NM_009785.1,1098-1116).
ggattggaatgctggatat

SEQ ID NO: 694353 - DNA, 19 bp, Mus musculus
  siRNA target sequence for Cacna2d3 (NM_009785.1,1188-1206).
ccatcatgctcataactga

SEQ ID NO: 694354 - DNA, 19 bp, Mus musculus
  siRNA target sequence for Cacna2d3 (NM_009785.1,1258-1276).
ccgaaaggttcgaatcttt

SEQ ID NO: 694355 - DNA, 19 bp, Mus musculus
  siRNA target sequence for Cacna2d3 (NM_009785.1,1259-1277).
cgaaaggttcgaatcttta

SEQ ID NO: 694356 - DNA, 19 bp, Mus musculus
  siRNA target sequence for Cacna2d3 (NM_009785.1,1299-1317).
ctgcttttgccgacaatct

SEQ ID NO: 694357 - DNA, 19 bp, Mus musculus
  siRNA target sequence for Cacna2d3 (NM_009785.1,1302-1320).
cttttgccgacaatctcaa

SEQ ID NO: 694358 - DNA, 19 bp, Mus musculus
  siRNA target sequence for Cacna2d3 (NM_009785.1,1328-1346).
gcttgtgctaacaaaggat

SEQ ID NO: 694359 - DNA, 19 bp, Mus musculus
  siRNA target sequence for Cacna2d3 (NM_009785.1,1450-1468).
gtggaccgaagcgtacatt

SEQ ID NO: 694360 - DNA, 19 bp, Mus musculus
  siRNA target sequence for Cacna2d3 (NM_009785.1,1508-1526).
cagggcctcgtcttgatga

SEQ ID NO: 694361 - DNA, 19 bp, Mus musculus
  siRNA target sequence for Cacna2d3 (NM_009785.1,1535-1553).
gccatgcctgtgtttagta

SEQ ID NO: 694362 - DNA, 19 bp, Mus musculus
  siRNA target sequence for Cacna2d3 (NM_009785.1,1569-1587).
ggtcaaagggcattcttct

SEQ ID NO: 694363 - DNA, 19 bp, Mus musculus
  siRNA target sequence for Cacna2d3 (NM_009785.1,1633-1651).
catccccaaatacaagtta

SEQ ID NO: 694364 - DNA, 19 bp, Mus musculus
  siRNA target sequence for Cacna2d3 (NM_009785.1,1669-1687).
cttcgccatcacgaataat

SEQ ID NO: 694365 - DNA, 19 bp, Mus musculus
  siRNA target sequence for Cacna2d3 (NM_009785.1,1672-1690).
cgccatcacgaataatgga

SEQ ID NO: 694366 - DNA, 19 bp, Mus musculus
  siRNA target sequence for Cacna2d3 (NM_009785.1,1673-1691).
gccatcacgaataatggat

SEQ ID NO: 694367 - DNA, 19 bp, Mus musculus
  siRNA target sequence for Cacna2d3 (NM_009785.1,1674-1692).
ccatcacgaataatggata

SEQ ID NO: 694368 - DNA, 19 bp, Mus musculus
  siRNA target sequence for Cacna2d3 (NM_009785.1,1675-1693).
catcacgaataatggatat

SEQ ID NO: 694369 - DNA, 19 bp, Mus musculus
  siRNA target sequence for Cacna2d3 (NM_009785.1,1680-1698).
cgaataatggatatatcct

SEQ ID NO: 694370 - DNA, 19 bp, Mus musculus
  siRNA target sequence for Cacna2d3 (NM_009785.1,1714-1732).
caggccactgtatgaagaa

SEQ ID NO: 694371 - DNA, 19 bp, Mus musculus
  siRNA target sequence for Cacna2d3 (NM_009785.1,1788-1806).
gggaagaccgggatgatgt

SEQ ID NO: 694372 - DNA, 19 bp, Mus musculus
  siRNA target sequence for Cacna2d3 (NM_009785.1,1796-1814).
cgggatgatgtgttacgaa

SEQ ID NO: 694373 - DNA, 19 bp, Mus musculus
  siRNA target sequence for Cacna2d3 (NM_009785.1,1797-1815).
gggatgatgtgttacgaaa

SEQ ID NO: 694374 - DNA, 19 bp, Mus musculus
  siRNA target sequence for Cacna2d3 (NM_009785.1,1798-1816).
ggatgatgtgttacgaaat

SEQ ID NO: 694375 - DNA, 19 bp, Mus musculus
  siRNA target sequence for Cacna2d3 (NM_009785.1,1897-1915).
gaccaatgactactactat

SEQ ID NO: 694376 - DNA, 19 bp, Mus musculus
  siRNA target sequence for Cacna2d3 (NM_009785.1,1900-1918).
caatgactactactataca

SEQ ID NO: 694377 - DNA, 19 bp, Mus musculus
  siRNA target sequence for Cacna2d3 (NM_009785.1,1924-1942).
caagggtactcctttcagt

SEQ ID NO: 694378 - DNA, 19 bp, Mus musculus
  siRNA target sequence for Cacna2d3 (NM_009785.1,1927-1945).
gggtactcctttcagttta

SEQ ID NO: 694379 - DNA, 19 bp, Mus musculus
  siRNA target sequence for Cacna2d3 (NM_009785.1,1984-2002).
ccgagggaatgtaaccatt

SEQ ID NO: 694380 - DNA, 19 bp, Mus musculus
  siRNA target sequence for Cacna2d3 (NM_009785.1,2010-2028).
gcctccatgacttagaaca

SEQ ID NO: 694381 - DNA, 19 bp, Mus musculus
  siRNA target sequence for Cacna2d3 (NM_009785.1,2086-2104).
gcaccgccatctatctcaa

SEQ ID NO: 694382 - DNA, 19 bp, Mus musculus
  siRNA target sequence for Cacna2d3 (NM_009785.1,2289-2307).
gcacaggcctctcaagaat

SEQ ID NO: 694383 - DNA, 19 bp, Mus musculus
  siRNA target sequence for Cacna2d3 (NM_009785.1,2422-2440).
gcagatcgcaggaagcttt

SEQ ID NO: 694384 - DNA, 19 bp, Mus musculus
  siRNA target sequence for Cacna2d3 (NM_009785.1,2428-2446).
cgcaggaagctttgtctat

SEQ ID NO: 694385 - DNA, 19 bp, Mus musculus
  siRNA target sequence for Cacna2d3 (NM_009785.1,2432-2450).
ggaagctttgtctattcca

SEQ ID NO: 694386 - DNA, 19 bp, Mus musculus
  siRNA target sequence for Cacna2d3 (NM_009785.1,2433-2451).
gaagctttgtctattccat

SEQ ID NO: 694387 - DNA, 19 bp, Mus musculus
  siRNA target sequence for Cacna2d3 (NM_009785.1,2515-2533).
cctggatgagcggaaatct

SEQ ID NO: 694388 - DNA, 19 bp, Mus musculus
  siRNA target sequence for Cacna2d3 (NM_009785.1,2543-2561).
gcagctgtaggcattcaga

SEQ ID NO: 694389 - DNA, 19 bp, Mus musculus
  siRNA target sequence for Cacna2d3 (NM_009785.1,2544-2562).
cagctgtaggcattcagat

SEQ ID NO: 694390 - DNA, 19 bp, Mus musculus
  siRNA target sequence for Cacna2d3 (NM_009785.1,2621-2639).
gatggcaaatgctccataa

SEQ ID NO: 694391 - DNA, 19 bp, Mus musculus
  siRNA target sequence for Cacna2d3 (NM_009785.1,2648-2666).
gacgagactgtgaactgtt

SEQ ID NO: 694392 - DNA, 19 bp, Mus musculus
  siRNA target sequence for Cacna2d3 (NM_009785.1,2662-2680).
ctgttaccttatagacaat

SEQ ID NO: 694393 - DNA, 19 bp, Mus musculus
  siRNA target sequence for Cacna2d3 (NM_009785.1,2664-2682).
gttaccttatagacaataa

SEQ ID NO: 694394 - DNA, 19 bp, Mus musculus
  siRNA target sequence for Cacna2d3 (NM_009785.1,2710-2728).
cacacagactggagatttt

SEQ ID NO: 694395 - DNA, 19 bp, Mus musculus
  siRNA target sequence for Cacna2d3 (NM_009785.1,2747-2765).
gctgtcatgaacaagttgt

SEQ ID NO: 694396 - DNA, 19 bp, Mus musculus
  siRNA target sequence for Cacna2d3 (NM_009785.1,2750-2768).
gtcatgaacaagttgttaa

SEQ ID NO: 694397 - DNA, 19 bp, Mus musculus
  siRNA target sequence for Cacna2d3 (NM_009785.1,2853-2871).
gacttctggacccctataa

SEQ ID NO: 694398 - DNA, 19 bp, Mus musculus
  siRNA target sequence for Cacna2d3 (NM_009785.1,2885-2903).
gcagccaagtggataatga

SEQ ID NO: 694399 - DNA, 19 bp, Mus musculus
  siRNA target sequence for Cacna2d3 (NM_009785.1,2953-2971).
ctccgacatgacagctaaa

SEQ ID NO: 694400 - DNA, 19 bp, Mus musculus
  siRNA target sequence for Cacna2d3 (NM_009785.1,2966-2984).
gctaaagcccagaaactga

SEQ ID NO: 694401 - DNA, 19 bp, Mus musculus
  siRNA target sequence for Cacna2d3 (NM_009785.1,2989-3007).
gaccctggaaccttgtgat

SEQ ID NO: 694402 - DNA, 19 bp, Mus musculus
  siRNA target sequence for Cacna2d3 (NM_009785.1,2992-3010).
cctggaaccttgtgatact

SEQ ID NO: 694403 - DNA, 19 bp, Mus musculus
  siRNA target sequence for Cacna2d3 (NM_009785.1,2996-3014).
gaaccttgtgatactgaat

SEQ ID NO: 694404 - DNA, 19 bp, Mus musculus
  siRNA target sequence for Cacna2d3 (NM_009785.1,3087-3105).
ccttcgtcatccagcaaat

SEQ ID NO: 694405 - DNA, 19 bp, Mus musculus
  siRNA target sequence for Cacna2d3 (NM_009785.1,3100-3118).
gcaaatcccgagtagcaat

SEQ ID NO: 694406 - DNA, 19 bp, Mus musculus
  siRNA target sequence for Cacna2d3 (NM_009785.1,3108-3126).
cgagtagcaatctgttcat

SEQ ID NO: 694407 - DNA, 19 bp, Mus musculus
  siRNA target sequence for Cacna2d3 (NM_009785.1,3155-3173).
gagtccgtggctcctataa

SEQ ID NO: 694408 - DNA, 19 bp, Mus musculus
  siRNA target sequence for Cacna2d3 (NM_009785.1,3182-3200).
cccattgaaatcaggtata

SEQ ID NO: 694409 - DNA, 19 bp, Mus musculus
  siRNA target sequence for Cacna2d3 (NM_009785.1,3188-3206).
gaaatcaggtataatgaat

SEQ ID NO: 694410 - DNA, 19 bp, Mus musculus
  siRNA target sequence for Cacna2d3 (NM_009785.1,3350-3368).
gtttcgagtctcttctcaa

SEQ ID NO: 694411 - DNA, 19 bp, Mus musculus
  siRNA target sequence for Cap2 (NM_026056.2,194-212).
caccgtccgtggaagcttt

SEQ ID NO: 694412 - DNA, 19 bp, Mus musculus
  siRNA target sequence for Cap2 (NM_026056.2,197-215).
cgtccgtggaagcttttga

SEQ ID NO: 694413 - DNA, 19 bp, Mus musculus
  siRNA target sequence for Cap2 (NM_026056.2,200-218).
ccgtggaagcttttgacaa

SEQ ID NO: 694414 - DNA, 19 bp, Mus musculus
  siRNA target sequence for Cap2 (NM_026056.2,205-223).
gaagcttttgacaaactga

SEQ ID NO: 694415 - DNA, 19 bp, Mus musculus
  siRNA target sequence for Cap2 (NM_026056.2,208-226).
gcttttgacaaactgataa

SEQ ID NO: 694416 - DNA, 19 bp, Mus musculus
  siRNA target sequence for Cap2 (NM_026056.2,214-232).
gacaaactgataaacagta

SEQ ID NO: 694417 - DNA, 19 bp, Mus musculus
  siRNA target sequence for Cap2 (NM_026056.2,235-253).
gtggccgagttcttaaaga

SEQ ID NO: 694418 - DNA, 19 bp, Mus musculus
  siRNA target sequence for Cap2 (NM_026056.2,297-315).
ggtgcacggtgctttccaa

SEQ ID NO: 694419 - DNA, 19 bp, Mus musculus
  siRNA target sequence for Cap2 (NM_026056.2,390-408).
gcccatatcggagaagatt

SEQ ID NO: 694420 - DNA, 19 bp, Mus musculus
  siRNA target sequence for Cap2 (NM_026056.2,392-410).
ccatatcggagaagattca

SEQ ID NO: 694421 - DNA, 19 bp, Mus musculus
  siRNA target sequence for Cap2 (NM_026056.2,393-411).
catatcggagaagattcaa

SEQ ID NO: 694422 - DNA, 19 bp, Mus musculus
  siRNA target sequence for Cap2 (NM_026056.2,439-457).
cggggaagcaacatgttca

SEQ ID NO: 694423 - DNA, 19 bp, Mus musculus
  siRNA target sequence for Cap2 (NM_026056.2,515-533).
ccaaacctggtccttatgt

SEQ ID NO: 694424 - DNA, 19 bp, Mus musculus
  siRNA target sequence for Cap2 (NM_026056.2,547-565).
gacgctgccaccttttaca

SEQ ID NO: 694425 - DNA, 19 bp, Mus musculus
  siRNA target sequence for Cap2 (NM_026056.2,549-567).
cgctgccaccttttacaca

SEQ ID NO: 694426 - DNA, 19 bp, Mus musculus
  siRNA target sequence for Cap2 (NM_026056.2,553-571).
gccaccttttacacaaaca

SEQ ID NO: 694427 - DNA, 19 bp, Mus musculus
  siRNA target sequence for Cap2 (NM_026056.2,566-584).
caaacagggtcctgaaaga

SEQ ID NO: 694428 - DNA, 19 bp, Mus musculus
  siRNA target sequence for Cap2 (NM_026056.2,572-590).
gggtcctgaaagactacaa

SEQ ID NO: 694429 - DNA, 19 bp, Mus musculus
  siRNA target sequence for Cap2 (NM_026056.2,719-737).
cagcgtcagcgttttccat

SEQ ID NO: 694430 - DNA, 19 bp, Mus musculus
  siRNA target sequence for Cap2 (NM_026056.2,838-856).
ccttctcgctcagctttat

SEQ ID NO: 694431 - DNA, 19 bp, Mus musculus
  siRNA target sequence for Cap2 (NM_026056.2,839-857).
cttctcgctcagctttatt

SEQ ID NO: 694432 - DNA, 19 bp, Mus musculus
  siRNA target sequence for Cap2 (NM_026056.2,957-975).
gattcgctctccaaccaaa

SEQ ID NO: 694433 - DNA, 19 bp, Mus musculus
  siRNA target sequence for Cap2 (NM_026056.2,993-1011).
cacatctccaaaatcgaat

SEQ ID NO: 694434 - DNA, 19 bp, Mus musculus
  siRNA target sequence for Cap2 (NM_026056.2,1100-1118).
ccgagaccgagctgaaaca

SEQ ID NO: 694435 - DNA, 19 bp, Mus musculus
  siRNA target sequence for Cap2 (NM_026056.2,1101-1119).
cgagaccgagctgaaacaa

SEQ ID NO: 694436 - DNA, 19 bp, Mus musculus
  siRNA target sequence for Cap2 (NM_026056.2,1117-1135).
caagtggcttacattttca

SEQ ID NO: 694437 - DNA, 19 bp, Mus musculus
  siRNA target sequence for Cap2 (NM_026056.2,1285-1303).
gtaccaacaatctccatta

SEQ ID NO: 694438 - DNA, 19 bp, Mus musculus
  siRNA target sequence for Cap2 (NM_026056.2,1288-1306).
ccaacaatctccattaata

SEQ ID NO: 694439 - DNA, 19 bp, Mus musculus
  siRNA target sequence for Cap2 (NM_026056.2,1367-1385).
cgaagtcgtccgagatgaa

SEQ ID NO: 694440 - DNA, 19 bp, Mus musculus
  siRNA target sequence for Cap2 (NM_026056.2,1368-1386).
gaagtcgtccgagatgaat

SEQ ID NO: 694441 - DNA, 19 bp, Mus musculus
  siRNA target sequence for Cap2 (NM_026056.2,1395-1413).
ccctcaggatgacgattat

SEQ ID NO: 694442 - DNA, 19 bp, Mus musculus
  siRNA target sequence for Cap2 (NM_026056.2,1401-1419).
ggatgacgattatagagaa

SEQ ID NO: 694443 - DNA, 19 bp, Mus musculus
  siRNA target sequence for Cap2 (NM_026056.2,1402-1420).
gatgacgattatagagaat

SEQ ID NO: 694444 - DNA, 19 bp, Mus musculus
  siRNA target sequence for Cap2 (NM_026056.2,1424-1442).
ccattcccgagcagttcaa

SEQ ID NO: 694445 - DNA, 19 bp, Mus musculus
  siRNA target sequence for Cap2 (NM_026056.2,1431-1449).
cgagcagttcaagacaata

SEQ ID NO: 694446 - DNA, 19 bp, Mus musculus
  siRNA target sequence for Cap2 (NM_026056.2,1472-1490).
ccgaacctgcagagatcat

SEQ ID NO: 694447 - DNA, 19 bp, Mus musculus
  siRNA target sequence for Cbln1 (NM_019626.1,609-627).
gtccgctcccttactaaga

SEQ ID NO: 694448 - DNA, 19 bp, Mus musculus
  siRNA target sequence for Cbln1 (NM_019626.1,611-629).
ccgctcccttactaagaga

SEQ ID NO: 694449 - DNA, 19 bp, Mus musculus
  siRNA target sequence for Cbln1 (NM_019626.1,612-630).
cgctcccttactaagagaa

SEQ ID NO: 694450 - DNA, 19 bp, Mus musculus
  siRNA target sequence for Cbln1 (NM_019626.1,616-634).
cccttactaagagaagtaa

SEQ ID NO: 694451 - DNA, 19 bp, Mus musculus
  siRNA target sequence for Cbln1 (NM_019626.1,617-635).
ccttactaagagaagtaaa

SEQ ID NO: 694452 - DNA, 19 bp, Mus musculus
  siRNA target sequence for Cbln1 (NM_019626.1,658-676).
ccgtttccaaaattaatct

SEQ ID NO: 694453 - DNA, 19 bp, Mus musculus
  siRNA target sequence for Cbln1 (NM_019626.1,715-733).
cttgccttgtcattatggt

SEQ ID NO: 694454 - DNA, 19 bp, Mus musculus
  siRNA target sequence for Cd24a (NM_009846.1,130-148).
ctacccacgcagatttact

SEQ ID NO: 694455 - DNA, 19 bp, Mus musculus
  siRNA target sequence for Cd24a (NM_009846.1,175-193).
cccggtaaccagaatattt

SEQ ID NO: 694456 - DNA, 19 bp, Mus musculus
  siRNA target sequence for Cd24a (NM_009846.1,197-215).
cttccccaaatccaagtaa

SEQ ID NO: 694457 - DNA, 19 bp, Mus musculus
  siRNA target sequence for Cd52 (NM_013706.1,164-182).
ccgcttctggtactaacaa

SEQ ID NO: 694458 - DNA, 19 bp, Mus musculus
  siRNA target sequence for Cd52 (NM_013706.1,165-183).
cgcttctggtactaacaaa

SEQ ID NO: 694459 - DNA, 19 bp, Mus musculus
  siRNA target sequence for Cd52 (NM_013706.1,166-184).
gcttctggtactaacaaaa

SEQ ID NO: 694460 - DNA, 19 bp, Mus musculus
  siRNA target sequence for Cd52 (NM_013706.1,275-293).
ccttaatgtgcctcttcta

SEQ ID NO: 694461 - DNA, 19 bp, Mus musculus
  siRNA target sequence for Cklfsf2a (NM_027022.2,121-139).
ggcagcaccgataaagttt

SEQ ID NO: 694462 - DNA, 19 bp, Mus musculus
  siRNA target sequence for Cklfsf2a (NM_027022.2,125-143).
gcaccgataaagtttccat

SEQ ID NO: 694463 - DNA, 19 bp, Mus musculus
  siRNA target sequence for Cklfsf2a (NM_027022.2,126-144).
caccgataaagtttccatt

SEQ ID NO: 694464 - DNA, 19 bp, Mus musculus
  siRNA target sequence for Cklfsf2a (NM_027022.2,190-208).
ggggcttcgacgctatcta

SEQ ID NO: 694465 - DNA, 19 bp, Mus musculus
  siRNA target sequence for Cklfsf2a (NM_027022.2,191-209).
gggcttcgacgctatctat

SEQ ID NO: 694466 - DNA, 19 bp, Mus musculus
  siRNA target sequence for Cklfsf2a (NM_027022.2,192-210).
ggcttcgacgctatctatt

SEQ ID NO: 694467 - DNA, 19 bp, Mus musculus
  siRNA target sequence for Cklfsf2a (NM_027022.2,197-215).
cgacgctatctattggaat

SEQ ID NO: 694468 - DNA, 19 bp, Mus musculus
  siRNA target sequence for Cklfsf2a (NM_027022.2,198-216).
gacgctatctattggaatt

SEQ ID NO: 694469 - DNA, 19 bp, Mus musculus
  siRNA target sequence for Cklfsf2a (NM_027022.2,200-218).
cgctatctattggaattga

SEQ ID NO: 694470 - DNA, 19 bp, Mus musculus
  siRNA target sequence for Cklfsf2a (NM_027022.2,246-264).
caggacacgccgtgttcaa

SEQ ID NO: 694471 - DNA, 19 bp, Mus musculus
  siRNA target sequence for Cklfsf2a (NM_027022.2,426-444).
ggcctatggcggatatctt

SEQ ID NO: 694472 - DNA, 19 bp, Mus musculus
  siRNA target sequence for Cklfsf2a (NM_027022.2,428-446).
cctatggcggatatcttca

SEQ ID NO: 694473 - DNA, 19 bp, Mus musculus
  siRNA target sequence for Cklfsf2a (NM_027022.2,476-494).
ggtggcatatactttgctt

SEQ ID NO: 694474 - DNA, 19 bp, Mus musculus
  siRNA target sequence for Cklfsf2a (NM_027022.2,480-498).
gcatatactttgctttcaa

SEQ ID NO: 694475 - DNA, 19 bp, Mus musculus
  siRNA target sequence for Cklfsf2a (NM_027022.2,551-569).
gctgctgcgatctgttctt

SEQ ID NO: 694476 - DNA, 19 bp, Mus musculus
  siRNA target sequence for Cklfsf2a (NM_027022.2,564-582).
gttctttcatcgacatgtt

SEQ ID NO: 694477 - DNA, 19 bp, Mus musculus
  siRNA target sequence for Cklfsf2a (NM_027022.2,571-589).
catcgacatgttacttcaa

SEQ ID NO: 694478 - DNA, 19 bp, Mus musculus
  siRNA target sequence for Cklfsf2a (NM_027022.2,577-595).
catgttacttcaattccaa

SEQ ID NO: 694479 - DNA, 19 bp, Mus musculus
  siRNA target sequence for Cklfsf2a (NM_027022.2,598-616).
cttcagaggccttaggtta

SEQ ID NO: 694480 - DNA, 19 bp, Mus musculus
  siRNA target sequence for Cklfsf2a (NM_027022.2,603-621).
gaggccttaggttaaggaa

SEQ ID NO: 694481 - DNA, 19 bp, Mus musculus
  siRNA target sequence for Cklfsf2b (NM_028524.1,246-264).
gagtgcaagtctctgatta

SEQ ID NO: 694482 - DNA, 19 bp, Mus musculus
  siRNA target sequence for Cklfsf2b (NM_028524.1,305-323).
ggccactcatccaattgta

SEQ ID NO: 694483 - DNA, 19 bp, Mus musculus
  siRNA target sequence for Cklfsf2b (NM_028524.1,306-324).
gccactcatccaattgtaa

SEQ ID NO: 694484 - DNA, 19 bp, Mus musculus
  siRNA target sequence for Cklfsf2b (NM_028524.1,307-325).
ccactcatccaattgtaat

SEQ ID NO: 694485 - DNA, 19 bp, Mus musculus
  siRNA target sequence for Cklfsf2b (NM_028524.1,310-328).
ctcatccaattgtaatcct

SEQ ID NO: 694486 - DNA, 19 bp, Mus musculus
  siRNA target sequence for Cklfsf2b (NM_028524.1,321-339).
gtaatcctgctgcttacta

SEQ ID NO: 694487 - DNA, 19 bp, Mus musculus
  siRNA target sequence for Cklfsf2b (NM_028524.1,461-479).
cataggtggtatattcttt

SEQ ID NO: 694488 - DNA, 19 bp, Mus musculus
  siRNA target sequence for Cklfsf2b (NM_028524.1,536-554).
gggtgttacggcatttata

SEQ ID NO: 694489 - DNA, 19 bp, Mus musculus
  siRNA target sequence for Cklfsf2b (NM_028524.1,537-555).
ggtgttacggcatttataa

SEQ ID NO: 694490 - DNA, 19 bp, Mus musculus
  siRNA target sequence for Cklfsf2b (NM_028524.1,540-558).
gttacggcatttataagta

SEQ ID NO: 694491 - DNA, 19 bp, Mus musculus
  siRNA target sequence for Cklfsf2b (NM_028524.1,544-562).
cggcatttataagtatcat

SEQ ID NO: 694492 - DNA, 19 bp, Mus musculus
  siRNA target sequence for Cklfsf2b (NM_028524.1,602-620).
gcttcgaaagtttattcta

SEQ ID NO: 694493 - DNA, 19 bp, Mus musculus
  siRNA target sequence for Cklfsf2b (NM_028524.1,606-624).
cgaaagtttattctactta

SEQ ID NO: 694494 - DNA, 19 bp, Mus musculus
  siRNA target sequence for Cklfsf2b (NM_028524.1,650-668).
ggacccgaaactcctttta

SEQ ID NO: 694495 - DNA, 19 bp, Mus musculus
  siRNA target sequence for Cklfsf2b (NM_028524.1,651-669).
gacccgaaactccttttaa

SEQ ID NO: 694496 - DNA, 19 bp, Mus musculus
  siRNA target sequence for Cklfsf3 (NM_024217.2,288-306).
gccgagtcgggtctttcat

SEQ ID NO: 694497 - DNA, 19 bp, Mus musculus
  siRNA target sequence for Cklfsf3 (NM_024217.2,289-307).
ccgagtcgggtctttcatt

SEQ ID NO: 694498 - DNA, 19 bp, Mus musculus
  siRNA target sequence for Cklfsf3 (NM_024217.2,291-309).
gagtcgggtctttcattca

SEQ ID NO: 694499 - DNA, 19 bp, Mus musculus
  siRNA target sequence for Cklfsf3 (NM_024217.2,521-539).
ctcagatggggcttacaaa

SEQ ID NO: 694500 - DNA, 19 bp, Mus musculus
  siRNA target sequence for Cklfsf3 (NM_024217.2,556-574).
gcttttttgccacaattgt

SEQ ID NO: 694501 - DNA, 19 bp, Mus musculus
  siRNA target sequence for Cklfsf3 (NM_024217.2,568-586).
caattgtgttcgcaattga

SEQ ID NO: 694502 - DNA, 19 bp, Mus musculus
  siRNA target sequence for Cklfsf3 (NM_024217.2,585-603).
gacttctacctgatcttta

SEQ ID NO: 694503 - DNA, 19 bp, Mus musculus
  siRNA target sequence for Cklfsf3 (NM_024217.2,590-608).
ctacctgatctttaatgaa

SEQ ID NO: 694504 - DNA, 19 bp, Mus musculus
  siRNA target sequence for Cklfsf3 (NM_024217.2,655-673).
cccataggacagaagaaga

SEQ ID NO: 694505 - DNA, 19 bp, Mus musculus
  siRNA target sequence for Cklfsf4 (NM_153582.3,299-317).
cgtgcgaaggcctctactt

SEQ ID NO: 694506 - DNA, 19 bp, Mus musculus
  siRNA target sequence for Cklfsf4 (NM_153582.3,327-345).
cgtaagctgcagtgcattt

SEQ ID NO: 694507 - DNA, 19 bp, Mus musculus
  siRNA target sequence for Cklfsf4 (NM_153582.3,355-373).
ggggtcctgctgattctct

SEQ ID NO: 694508 - DNA, 19 bp, Mus musculus
  siRNA target sequence for Cklfsf4 (NM_153582.3,405-423).
gatcaactggaatctaaca

SEQ ID NO: 694509 - DNA, 19 bp, Mus musculus
  siRNA target sequence for Cklfsf4 (NM_153582.3,437-455).
ctggactcagcactttctt

SEQ ID NO: 694510 - DNA, 19 bp, Mus musculus
  siRNA target sequence for Cklfsf4 (NM_153582.3,477-495).
gttggctgctctaaaccat

SEQ ID NO: 694511 - DNA, 19 bp, Mus musculus
  siRNA target sequence for Cklfsf4 (NM_153582.3,480-498).
ggctgctctaaaccataaa

SEQ ID NO: 694512 - DNA, 19 bp, Mus musculus
  siRNA target sequence for Cklfsf4 (NM_153582.3,508-526).
gaaattgctgccgtgatat

SEQ ID NO: 694513 - DNA, 19 bp, Mus musculus
  siRNA target sequence for Cklfsf4 (NM_153582.3,597-615).
ccgccagcagagcactaat

SEQ ID NO: 694514 - DNA, 19 bp, Mus musculus
  siRNA target sequence for Cklfsf4 (NM_153582.3,599-617).
gccagcagagcactaatga

SEQ ID NO: 694515 - DNA, 19 bp, Mus musculus
  siRNA target sequence for Cklfsf4 (NM_153582.3,601-619).
cagcagagcactaatgact

SEQ ID NO: 694516 - DNA, 19 bp, Mus musculus
  siRNA target sequence for Cklfsf5 (NM_026066.1,370-388).
ctgcagcgttgctagagtt

SEQ ID NO: 694517 - DNA, 19 bp, Mus musculus
  siRNA target sequence for Cklfsf5 (NM_026066.1,591-609).
gcctatgatgcattcaaga

SEQ ID NO: 694518 - DNA, 19 bp, Mus musculus
  siRNA target sequence for Cklfsf5 (NM_026066.1,592-610).
cctatgatgcattcaagat

SEQ ID NO: 694519 - DNA, 19 bp, Mus musculus
  siRNA target sequence for Cklfsf6 (NM_026036.1,338-356).
gtcaagtcatcggattttt

SEQ ID NO: 694520 - DNA, 19 bp, Mus musculus
  siRNA target sequence for Cklfsf6 (NM_026036.1,386-404).
ctgctggcatctatcattt

SEQ ID NO: 694521 - DNA, 19 bp, Mus musculus
  siRNA target sequence for Cklfsf6 (NM_026036.1,420-438).
ctgggacctcagctgaaat

SEQ ID NO: 694522 - DNA, 19 bp, Mus musculus
  siRNA target sequence for Cklfsf6 (NM_026036.1,516-534).
gggagagcccgctgagaaa

SEQ ID NO: 694523 - DNA, 19 bp, Mus musculus
  siRNA target sequence for Cklfsf7 (NM_133978.1,245-263).
ccatgtgcgacctgataat

SEQ ID NO: 694524 - DNA, 19 bp, Mus musculus
  siRNA target sequence for Cklfsf7 (NM_133978.1,375-393).
catcgcctccatagtgata

SEQ ID NO: 694525 - DNA, 19 bp, Mus musculus
  siRNA target sequence for Cklfsf7 (NM_133978.1,388-406).
gtgatagcctccaagagtt

SEQ ID NO: 694526 - DNA, 19 bp, Mus musculus
  siRNA target sequence for Cklfsf7 (NM_133978.1,423-441).
ggtagccggagcgatcttt

SEQ ID NO: 694527 - DNA, 19 bp, Mus musculus
  siRNA target sequence for Cklfsf8 (NM_027294.1,403-421).
cgctggcactgagtatttt

SEQ ID NO: 694528 - DNA, 19 bp, Mus musculus
  siRNA target sequence for Cklfsf8 (NM_027294.1,431-449).
gcttttggctgggtaatgt

SEQ ID NO: 694529 - DNA, 19 bp, Mus musculus
  siRNA target sequence for Cklfsf8 (NM_027294.1,468-486).
gggtcctcaccgtcttctt

SEQ ID NO: 694530 - DNA, 19 bp, Mus musculus
  siRNA target sequence for Cklfsf8 (NM_027294.1,567-585).
gtgccttcgtcttgtactt

SEQ ID NO: 694531 - DNA, 19 bp, Mus musculus
  siRNA target sequence for Cklfsf8 (NM_027294.1,595-613).
catagtggacgcatcttct

SEQ ID NO: 694532 - DNA, 19 bp, Mus musculus
  siRNA target sequence for Cklfsf8 (NM_027294.1,695-713).
gctggaaacacgtacttca

SEQ ID NO: 694533 - DNA, 19 bp, Mus musculus
  siRNA target sequence for Cklfsf8 (NM_027294.1,698-716).
ggaaacacgtacttcagtt

SEQ ID NO: 694534 - DNA, 19 bp, Mus musculus
  siRNA target sequence for D330039I19Rik (NM_175507.2,347-365).
ccggacttggcttgtttta

SEQ ID NO: 694535 - DNA, 19 bp, Mus musculus
  siRNA target sequence for D330039I19Rik (NM_175507.2,349-367).
ggacttggcttgttttaca

SEQ ID NO: 694536 - DNA, 19 bp, Mus musculus
  siRNA target sequence for D330039I19Rik (NM_175507.2,425-443).
gcgtccatgctgtagagat

SEQ ID NO: 694537 - DNA, 19 bp, Mus musculus
  siRNA target sequence for D330039I19Rik (NM_175507.2,439-457).
gagatcagtgcgtttcgat

SEQ ID NO: 694538 - DNA, 19 bp, Mus musculus
  siRNA target sequence for D330039I19Rik (NM_175507.2,455-473).
gatgcgtggtccaaatgct

SEQ ID NO: 694539 - DNA, 19 bp, Mus musculus
  siRNA target sequence for D330039I19Rik (NM_175507.2,475-493).
gttattatcccttgcttaa

SEQ ID NO: 694540 - DNA, 19 bp, Mus musculus
  siRNA target sequence for D330039I19Rik (NM_175507.2,484-502).
ccttgcttaatatacagaa

SEQ ID NO: 694541 - DNA, 19 bp, Mus musculus
  siRNA target sequence for D330039I19Rik (NM_175507.2,485-503).
cttgcttaatatacagaaa

SEQ ID NO: 694542 - DNA, 19 bp, Mus musculus
  siRNA target sequence for D330039I19Rik (NM_175507.2,569-587).
gtgccatgatcctcatgta

SEQ ID NO: 694543 - DNA, 19 bp, Mus musculus
  siRNA target sequence for D330039I19Rik (NM_175507.2,610-628).
ctcgcagacgccacagtta

SEQ ID NO: 694544 - DNA, 19 bp, Mus musculus
  siRNA target sequence for D330039I19Rik (NM_175507.2,612-630).
cgcagacgccacagttatt

SEQ ID NO: 694545 - DNA, 19 bp, Mus musculus
  siRNA target sequence for D330039I19Rik (NM_175507.2,643-661).
cccgtgtttacgtccatat

SEQ ID NO: 694546 - DNA, 19 bp, Mus musculus
  siRNA target sequence for D330039I19Rik (NM_175507.2,644-662).
ccgtgtttacgtccatatt

SEQ ID NO: 694547 - DNA, 19 bp, Mus musculus
  siRNA target sequence for D330039I19Rik (NM_175507.2,645-663).
cgtgtttacgtccatattt

SEQ ID NO: 694548 - DNA, 19 bp, Mus musculus
  siRNA target sequence for D330039I19Rik (NM_175507.2,648-666).
gtttacgtccatatttgct

SEQ ID NO: 694549 - DNA, 19 bp, Mus musculus
  siRNA target sequence for D330039I19Rik (NM_175507.2,722-740).
caatcgctggagtgatact

SEQ ID NO: 694550 - DNA, 19 bp, Mus musculus
  siRNA target sequence for D330039I19Rik (NM_175507.2,728-746).
ctggagtgatacttatcgt

SEQ ID NO: 694551 - DNA, 19 bp, Mus musculus
  siRNA target sequence for D330039I19Rik (NM_175507.2,781-799).
gggatgagagaaagctatt

SEQ ID NO: 694552 - DNA, 19 bp, Mus musculus
  siRNA target sequence for D330039I19Rik (NM_175507.2,848-866).
ctgcgatcactctggttat

SEQ ID NO: 694553 - DNA, 19 bp, Mus musculus
  siRNA target sequence for D330039I19Rik (NM_175507.2,851-869).
cgatcactctggttattct

SEQ ID NO: 694554 - DNA, 19 bp, Mus musculus
  siRNA target sequence for D330039I19Rik (NM_175507.2,859-877).
ctggttattctgaggaaaa

SEQ ID NO: 694555 - DNA, 19 bp, Mus musculus
  siRNA target sequence for D330039I19Rik (NM_175507.2,905-923).
gcatctggtactatgtcat

SEQ ID NO: 694556 - DNA, 19 bp, Mus musculus
  siRNA target sequence for D330039I19Rik (NM_175507.2,906-924).
catctggtactatgtcata

SEQ ID NO: 694557 - DNA, 19 bp, Mus musculus
  siRNA target sequence for D330039I19Rik (NM_175507.2,989-1007).
ggctggacaggctgtttct

SEQ ID NO: 694558 - DNA, 19 bp, Mus musculus
  siRNA target sequence for D330039I19Rik (NM_175507.2,998-1016).
ggctgtttctcatactcat

SEQ ID NO: 694559 - DNA, 19 bp, Mus musculus
  siRNA target sequence for D330039I19Rik (NM_175507.2,1033-1051).
gggggtcagatatttatca

SEQ ID NO: 694560 - DNA, 19 bp, Mus musculus
  siRNA target sequence for D330039I19Rik (NM_175507.2,1035-1053).
gggtcagatatttatcact

SEQ ID NO: 694561 - DNA, 19 bp, Mus musculus
  siRNA target sequence for D330039I19Rik (NM_175507.2,1036-1054).
ggtcagatatttatcacta

SEQ ID NO: 694562 - DNA, 19 bp, Mus musculus
  siRNA target sequence for D330039I19Rik (NM_175507.2,1041-1059).
gatatttatcactaaagca

SEQ ID NO: 694563 - DNA, 19 bp, Mus musculus
  siRNA target sequence for D330039I19Rik (NM_175507.2,1052-1070).
ctaaagcagttcaaataga

SEQ ID NO: 694564 - DNA, 19 bp, Mus musculus
  siRNA target sequence for D330039I19Rik (NM_175507.2,1076-1094).
caggactcgtagcgataat

SEQ ID NO: 694565 - DNA, 19 bp, Mus musculus
  siRNA target sequence for D330039I19Rik (NM_175507.2,1078-1096).
ggactcgtagcgataatga

SEQ ID NO: 694566 - DNA, 19 bp, Mus musculus
  siRNA target sequence for D330039I19Rik (NM_175507.2,1079-1097).
gactcgtagcgataatgaa

SEQ ID NO: 694567 - DNA, 19 bp, Mus musculus
  siRNA target sequence for D330039I19Rik (NM_175507.2,1081-1099).
ctcgtagcgataatgaaga

SEQ ID NO: 694568 - DNA, 19 bp, Mus musculus
  siRNA target sequence for Efna1 (NM_010107.2,218-236).
cacgtgcagctgaatgact

SEQ ID NO: 694569 - DNA, 19 bp, Mus musculus
  siRNA target sequence for Efna1 (NM_010107.2,355-373).
ggaccaggtccgttggaat

SEQ ID NO: 694570 - DNA, 19 bp, Mus musculus
  siRNA target sequence for Efna1 (NM_010107.2,356-374).
gaccaggtccgttggaatt

SEQ ID NO: 694571 - DNA, 19 bp, Mus musculus
  siRNA target sequence for Efna1 (NM_010107.2,359-377).
caggtccgttggaattgca

SEQ ID NO: 694572 - DNA, 19 bp, Mus musculus
  siRNA target sequence for Efna1 (NM_010107.2,425-443).
cagcgcttcacgcctttta

SEQ ID NO: 694573 - DNA, 19 bp, Mus musculus
  siRNA target sequence for Efna1 (NM_010107.2,428-446).
cgcttcacgccttttatct

SEQ ID NO: 694574 - DNA, 19 bp, Mus musculus
  siRNA target sequence for Efna1 (NM_010107.2,468-486).
gacacagctactactacat

SEQ ID NO: 694575 - DNA, 19 bp, Mus musculus
  siRNA target sequence for Efna1 (NM_010107.2,526-544).
gctgaaggtgactgtcaat

SEQ ID NO: 694576 - DNA, 19 bp, Mus musculus
  siRNA target sequence for Efna1 (NM_010107.2,666-684).
cactggtctgggcagtatt

SEQ ID NO: 694577 - DNA, 19 bp, Mus musculus
  siRNA target sequence for Efna2 (NM_007909.1,469-487).
cggcctggccacgaatact

SEQ ID NO: 694578 - DNA, 19 bp, Mus musculus
  siRNA target sequence for Efna2 (NM_007909.1,470-488).
ggcctggccacgaatacta

SEQ ID NO: 694579 - DNA, 19 bp, Mus musculus
  siRNA target sequence for Efna2 (NM_007909.1,472-490).
cctggccacgaatactact

SEQ ID NO: 694580 - DNA, 19 bp, Mus musculus
  siRNA target sequence for Efna2 (NM_007909.1,530-548).
gcctgcgactcaaggttta

SEQ ID NO: 694581 - DNA, 19 bp, Mus musculus
  siRNA target sequence for Efna2 (NM_007909.1,531-549).
cctgcgactcaaggtttat

SEQ ID NO: 694582 - DNA, 19 bp, Mus musculus
  siRNA target sequence for Efna2 (NM_007909.1,550-568).
gtgcgtccaaccaatgaga

SEQ ID NO: 694583 - DNA, 19 bp, Mus musculus
  siRNA target sequence for Efna4 (NM_007910.1,217-235).
gagctgggcttcaacgatt

SEQ ID NO: 694584 - DNA, 19 bp, Mus musculus
  siRNA target sequence for Efna4 (NM_007910.1,392-410).
ctttcagccctgttcgatt

SEQ ID NO: 694585 - DNA, 19 bp, Mus musculus
  siRNA target sequence for Efna4 (NM_007910.1,396-414).
cagccctgttcgattctca

SEQ ID NO: 694586 - DNA, 19 bp, Mus musculus
  siRNA target sequence for Efna4 (NM_007910.1,401-419).
ctgttcgattctcagaaaa

SEQ ID NO: 694587 - DNA, 19 bp, Mus musculus
  siRNA target sequence for Efna4 (NM_007910.1,463-481).
cctggagagacttactact

SEQ ID NO: 694588 - DNA, 19 bp, Mus musculus
  siRNA target sequence for Efna4 (NM_007910.1,464-482).
ctggagagacttactacta

SEQ ID NO: 694589 - DNA, 19 bp, Mus musculus
  siRNA target sequence for Efna4 (NM_007910.1,466-484).
ggagagacttactactaca

SEQ ID NO: 694590 - DNA, 19 bp, Mus musculus
  siRNA target sequence for Efna4 (NM_007910.1,467-485).
gagagacttactactacat

SEQ ID NO: 694591 - DNA, 19 bp, Mus musculus
  siRNA target sequence for Efna4 (NM_007910.1,469-487).
gagacttactactacatct

SEQ ID NO: 694592 - DNA, 19 bp, Mus musculus
  siRNA target sequence for Ell3 (NM_145973.2,236-254).
ccgagggtacctaaggttt

SEQ ID NO: 694593 - DNA, 19 bp, Mus musculus
  siRNA target sequence for Ell3 (NM_145973.2,274-292).
gccttttctccttcatagt

SEQ ID NO: 694594 - DNA, 19 bp, Mus musculus
  siRNA target sequence for Ell3 (NM_145973.2,305-323).
ccaagagggcactaatggt

SEQ ID NO: 694595 - DNA, 19 bp, Mus musculus
  siRNA target sequence for Ell3 (NM_145973.2,322-340).
gtggcttggaccttgtgta

SEQ ID NO: 694596 - DNA, 19 bp, Mus musculus
  siRNA target sequence for Ell3 (NM_145973.2,683-701).
gaaacgcctggacaagaaa

SEQ ID NO: 694597 - DNA, 19 bp, Mus musculus
  siRNA target sequence for Ell3 (NM_145973.2,687-705).
cgcctggacaagaaacgtt

SEQ ID NO: 694598 - DNA, 19 bp, Mus musculus
  siRNA target sequence for Ell3 (NM_145973.2,698-716).
gaaacgttcagcacctata

SEQ ID NO: 694599 - DNA, 19 bp, Mus musculus
  siRNA target sequence for Ell3 (NM_145973.2,772-790).
cactacaagggctagcaaa

SEQ ID NO: 694600 - DNA, 19 bp, Mus musculus
  siRNA target sequence for Ell3 (NM_145973.2,924-942).
gattatctcctgcaataca

SEQ ID NO: 694601 - DNA, 19 bp, Mus musculus
  siRNA target sequence for Ell3 (NM_145973.2,1121-1139).
gatagtccaggagtataaa

SEQ ID NO: 694602 - DNA, 19 bp, Mus musculus
  siRNA target sequence for Ell3 (NM_145973.2,1186-1204).
gtgagtacctgcatcagaa

SEQ ID NO: 694603 - DNA, 19 bp, Mus musculus
  siRNA target sequence for Lamp3 (NM_177356.2,193-211).
caacaaaacctctactaca

SEQ ID NO: 694604 - DNA, 19 bp, Mus musculus
  siRNA target sequence for Lamp3 (NM_177356.2,207-225).
ctacaactgattaaccaaa

SEQ ID NO: 694605 - DNA, 19 bp, Mus musculus
  siRNA target sequence for Lamp3 (NM_177356.2,222-240).
caaagatctcatataactt

SEQ ID NO: 694606 - DNA, 19 bp, Mus musculus
  siRNA target sequence for Lamp3 (NM_177356.2,297-315).
gaaaacacagcccatataa

SEQ ID NO: 694607 - DNA, 19 bp, Mus musculus
  siRNA target sequence for Lamp3 (NM_177356.2,304-322).
cagcccatataacaatgaa

SEQ ID NO: 694608 - DNA, 19 bp, Mus musculus
  siRNA target sequence for Lamp3 (NM_177356.2,358-376).
ccatcagctcagctagtta

SEQ ID NO: 694609 - DNA, 19 bp, Mus musculus
  siRNA target sequence for Lamp3 (NM_177356.2,364-382).
gctcagctagttatacctt

SEQ ID NO: 694610 - DNA, 19 bp, Mus musculus
  siRNA target sequence for Lamp3 (NM_177356.2,379-397).
cctttgtcagatctaataa

SEQ ID NO: 694611 - DNA, 19 bp, Mus musculus
  siRNA target sequence for Lamp3 (NM_177356.2,477-495).
gctagtctagccattgtca

SEQ ID NO: 694612 - DNA, 19 bp, Mus musculus
  siRNA target sequence for Lamp3 (NM_177356.2,481-499).
gtctagccattgtcaacta

SEQ ID NO: 694613 - DNA, 19 bp, Mus musculus
  siRNA target sequence for Lamp3 (NM_177356.2,533-551).
gactacccttcccaaaaca

SEQ ID NO: 694614 - DNA, 19 bp, Mus musculus
  siRNA target sequence for Lamp3 (NM_177356.2,535-553).
ctacccttcccaaaacatt

SEQ ID NO: 694615 - DNA, 19 bp, Mus musculus
  siRNA target sequence for Lamp3 (NM_177356.2,590-608).
gccaactctgtccactaat

SEQ ID NO: 694616 - DNA, 19 bp, Mus musculus
  siRNA target sequence for Lamp3 (NM_177356.2,592-610).
caactctgtccactaatgt

SEQ ID NO: 694617 - DNA, 19 bp, Mus musculus
  siRNA target sequence for Lamp3 (NM_177356.2,595-613).
ctctgtccactaatgtctt

SEQ ID NO: 694618 - DNA, 19 bp, Mus musculus
  siRNA target sequence for Lamp3 (NM_177356.2,672-690).
cctaggcctactcttgtaa

SEQ ID NO: 694619 - DNA, 19 bp, Mus musculus
  siRNA target sequence for Lamp3 (NM_177356.2,703-721).
cagccaagatcggaactta

SEQ ID NO: 694620 - DNA, 19 bp, Mus musculus
  siRNA target sequence for Lamp3 (NM_177356.2,706-724).
ccaagatcggaacttatga

SEQ ID NO: 694621 - DNA, 19 bp, Mus musculus
  siRNA target sequence for Lamp3 (NM_177356.2,707-725).
caagatcggaacttatgaa

SEQ ID NO: 694622 - DNA, 19 bp, Mus musculus
  siRNA target sequence for Lamp3 (NM_177356.2,772-790).
gcactgattgttcaagaaa

SEQ ID NO: 694623 - DNA, 19 bp, Mus musculus
  siRNA target sequence for Lamp3 (NM_177356.2,799-817).
gattctgcaacccaaagat

SEQ ID NO: 694624 - DNA, 19 bp, Mus musculus
  siRNA target sequence for Lamp3 (NM_177356.2,805-823).
gcaacccaaagatatttca

SEQ ID NO: 694625 - DNA, 19 bp, Mus musculus
  siRNA target sequence for Lman1 (NM_027400.2,47-65).
ggagcgcggtcgttcttct

SEQ ID NO: 694626 - DNA, 19 bp, Mus musculus
  siRNA target sequence for Lman1 (NM_027400.2,77-95).
ctgtctttcagccaattca

SEQ ID NO: 694627 - DNA, 19 bp, Mus musculus
  siRNA target sequence for Lman1 (NM_027400.2,166-184).
ccgccgtttcgagtacaaa

SEQ ID NO: 694628 - DNA, 19 bp, Mus musculus
  siRNA target sequence for Lman1 (NM_027400.2,167-185).
cgccgtttcgagtacaaat

SEQ ID NO: 694629 - DNA, 19 bp, Mus musculus
  siRNA target sequence for Lman1 (NM_027400.2,168-186).
gccgtttcgagtacaaata

SEQ ID NO: 694630 - DNA, 19 bp, Mus musculus
  siRNA target sequence for Lman1 (NM_027400.2,170-188).
cgtttcgagtacaaataca

SEQ ID NO: 694631 - DNA, 19 bp, Mus musculus
  siRNA target sequence for Lman1 (NM_027400.2,264-282).
gtgcagatcagattcgaat

SEQ ID NO: 694632 - DNA, 19 bp, Mus musculus
  siRNA target sequence for Lman1 (NM_027400.2,278-296).
cgaatagcgccgtcattaa

SEQ ID NO: 694633 - DNA, 19 bp, Mus musculus
  siRNA target sequence for Lman1 (NM_027400.2,279-297).
gaatagcgccgtcattaaa

SEQ ID NO: 694634 - DNA, 19 bp, Mus musculus
  siRNA target sequence for Lman1 (NM_027400.2,313-331).
cgtgtggaccaaagcaaaa

SEQ ID NO: 694635 - DNA, 19 bp, Mus musculus
  siRNA target sequence for Lman1 (NM_027400.2,373-391).
gaccggaagaggtcgaatt

SEQ ID NO: 694636 - DNA, 19 bp, Mus musculus
  siRNA target sequence for Lman1 (NM_027400.2,376-394).
cggaagaggtcgaattgga

SEQ ID NO: 694637 - DNA, 19 bp, Mus musculus
  siRNA target sequence for Lman1 (NM_027400.2,392-410).
ggagccgatggcttagcaa

SEQ ID NO: 694638 - DNA, 19 bp, Mus musculus
  siRNA target sequence for Lman1 (NM_027400.2,393-411).
gagccgatggcttagcaat

SEQ ID NO: 694639 - DNA, 19 bp, Mus musculus
  siRNA target sequence for Lman1 (NM_027400.2,401-419).
ggcttagcaatttggtata

SEQ ID NO: 694640 - DNA, 19 bp, Mus musculus
  siRNA target sequence for Lman1 (NM_027400.2,403-421).
cttagcaatttggtataca

SEQ ID NO: 694641 - DNA, 19 bp, Mus musculus
  siRNA target sequence for Lman1 (NM_027400.2,433-451).
cttggacggccctgtgttt

SEQ ID NO: 694642 - DNA, 19 bp, Mus musculus
  siRNA target sequence for Lman1 (NM_027400.2,465-483).
cgtggaatggtgttggaat

SEQ ID NO: 694643 - DNA, 19 bp, Mus musculus
  siRNA target sequence for Lman1 (NM_027400.2,469-487).
gaatggtgttggaatattt

SEQ ID NO: 694644 - DNA, 19 bp, Mus musculus
  siRNA target sequence for Lman1 (NM_027400.2,547-565).
caatggacaaatcaattat

SEQ ID NO: 694645 - DNA, 19 bp, Mus musculus
  siRNA target sequence for Lman1 (NM_027400.2,606-624).
gtcagagggactttcgtaa

SEQ ID NO: 694646 - DNA, 19 bp, Mus musculus
  siRNA target sequence for Lman1 (NM_027400.2,608-626).
cagagggactttcgtaata

SEQ ID NO: 694647 - DNA, 19 bp, Mus musculus
  siRNA target sequence for Lman1 (NM_027400.2,610-628).
gagggactttcgtaataaa

SEQ ID NO: 694648 - DNA, 19 bp, Mus musculus
  siRNA target sequence for Lman1 (NM_027400.2,635-653).
cctgtccgggcaaagatta

SEQ ID NO: 694649 - DNA, 19 bp, Mus musculus
  siRNA target sequence for Lman1 (NM_027400.2,638-656).
gtccgggcaaagattacgt

SEQ ID NO: 694650 - DNA, 19 bp, Mus musculus
  siRNA target sequence for Lman1 (NM_027400.2,640-658).
ccgggcaaagattacgtat

SEQ ID NO: 694651 - DNA, 19 bp, Mus musculus
  siRNA target sequence for Lman1 (NM_027400.2,641-659).
cgggcaaagattacgtatt

SEQ ID NO: 694652 - DNA, 19 bp, Mus musculus
  siRNA target sequence for Lman1 (NM_027400.2,642-660).
gggcaaagattacgtatta

SEQ ID NO: 694653 - DNA, 19 bp, Mus musculus
  siRNA target sequence for Lman1 (NM_027400.2,645-663).
caaagattacgtattacca

SEQ ID NO: 694654 - DNA, 19 bp, Mus musculus
  siRNA target sequence for Lman1 (NM_027400.2,669-687).
cactgacagtcatgatcaa

SEQ ID NO: 694655 - DNA, 19 bp, Mus musculus
  siRNA target sequence for Lman1 (NM_027400.2,682-700).
gatcaataatggctttaca

SEQ ID NO: 694656 - DNA, 19 bp, Mus musculus
  siRNA target sequence for Lman1 (NM_027400.2,751-769).
ccccacacaaggtcatttt

SEQ ID NO: 694657 - DNA, 19 bp, Mus musculus
  siRNA target sequence for Lman1 (NM_027400.2,800-818).
gatgaccacgacgttcttt

SEQ ID NO: 694658 - DNA, 19 bp, Mus musculus
  siRNA target sequence for Lman1 (NM_027400.2,803-821).
gaccacgacgttctttctt

SEQ ID NO: 694659 - DNA, 19 bp, Mus musculus
  siRNA target sequence for Lman1 (NM_027400.2,1047-1065).
gacagaatcgtattcatct

SEQ ID NO: 694660 - DNA, 19 bp, Mus musculus
  siRNA target sequence for Lman1 (NM_027400.2,1090-1108).
gctggatatgattcttgat

SEQ ID NO: 694661 - DNA, 19 bp, Mus musculus
  siRNA target sequence for Lman1 (NM_027400.2,1093-1111).
ggatatgattcttgatgaa

SEQ ID NO: 694662 - DNA, 19 bp, Mus musculus
  siRNA target sequence for Lman1 (NM_027400.2,1231-1249).
gattctgagacaagtgaat

SEQ ID NO: 694663 - DNA, 19 bp, Mus musculus
  siRNA target sequence for Lman1 (NM_027400.2,1399-1417).
gcgcagcatgccatctaat

SEQ ID NO: 694664 - DNA, 19 bp, Mus musculus
  siRNA target sequence for Lman1 (NM_027400.2,1401-1419).
gcagcatgccatctaatga

SEQ ID NO: 694665 - DNA, 19 bp, Mus musculus
  siRNA target sequence for Lman1 (NM_027400.2,1404-1422).
gcatgccatctaatgaaaa

SEQ ID NO: 694666 - DNA, 19 bp, Mus musculus
  siRNA target sequence for Lman1 (NM_027400.2,1405-1423).
catgccatctaatgaaaaa

SEQ ID NO: 694667 - DNA, 19 bp, Mus musculus
  siRNA target sequence for Lman1 (NM_027400.2,1445-1463).
ccattcccgtcgtgtctat

SEQ ID NO: 694668 - DNA, 19 bp, Mus musculus
  siRNA target sequence for Lman1 (NM_027400.2,1464-1482).
ccacgatccactttgtgat

SEQ ID NO: 694669 - DNA, 19 bp, Mus musculus
  siRNA target sequence for Lman1 (NM_027400.2,1465-1483).
cacgatccactttgtgata

SEQ ID NO: 694670 - DNA, 19 bp, Mus musculus
  siRNA target sequence for Lman1 (NM_027400.2,1467-1485).
cgatccactttgtgatatt

SEQ ID NO: 694671 - DNA, 19 bp, Mus musculus
  siRNA target sequence for Lman1 (NM_027400.2,1468-1486).
gatccactttgtgatattt

SEQ ID NO: 694672 - DNA, 19 bp, Mus musculus
  siRNA target sequence for Lman1 (NM_027400.2,1511-1529).
gttggctatatcatgtaca

SEQ ID NO: 694673 - DNA, 19 bp, Mus musculus
  siRNA target sequence for Lman1 (NM_027400.2,1544-1562).
gcagctgccaaaaaattct

SEQ ID NO: 694674 - DNA, 19 bp, Mus musculus
  siRNA target sequence for Ly6a (NM_010738.2,274-292).
ctcctaatattgaaagtat

SEQ ID NO: 694675 - DNA, 19 bp, Mus musculus
  siRNA target sequence for Ly6c (NM_010741.1,387-405).
catgtctgggtacttgtta

SEQ ID NO: 694676 - DNA, 19 bp, Mus musculus
  siRNA target sequence for Ly6c (NM_010741.1,413-431).
gggttcccctactccaaat

SEQ ID NO: 694677 - DNA, 19 bp, Mus musculus
  siRNA target sequence for Ly6c (NM_010741.1,414-432).
ggttcccctactccaaata

SEQ ID NO: 694678 - DNA, 19 bp, Mus musculus
  siRNA target sequence for Ly6d (NM_010742.1,116-134).
gtctgcccgtccaacttct

SEQ ID NO: 694679 - DNA, 19 bp, Mus musculus
  siRNA target sequence for Ly6d (NM_010742.1,120-138).
gcccgtccaacttctactt

SEQ ID NO: 694680 - DNA, 19 bp, Mus musculus
  siRNA target sequence for Ly6d (NM_010742.1,245-263).
ggttccgaggtcacacaat

SEQ ID NO: 694681 - DNA, 19 bp, Mus musculus
  siRNA target sequence for Ly6e (NM_008529.2,183-201).
ctgatgtgcttctcatgta

SEQ ID NO: 694682 - DNA, 19 bp, Mus musculus
  siRNA target sequence for Ly6e (NM_008529.2,196-214).
catgtaccgatcagaagaa

SEQ ID NO: 694683 - DNA, 19 bp, Mus musculus
  siRNA target sequence for Ly6e (NM_008529.2,199-217).
gtaccgatcagaagaacaa

SEQ ID NO: 694684 - DNA, 19 bp, Mus musculus
  siRNA target sequence for Ly6e (NM_008529.2,202-220).
ccgatcagaagaacaatat

SEQ ID NO: 694685 - DNA, 19 bp, Mus musculus
  siRNA target sequence for Ly6e (NM_008529.2,203-221).
cgatcagaagaacaatata

SEQ ID NO: 694686 - DNA, 19 bp, Mus musculus
  siRNA target sequence for Ly6e (NM_008529.2,248-266).
ggagaaagaccattactgt

SEQ ID NO: 694687 - DNA, 19 bp, Mus musculus
  siRNA target sequence for Ly6e (NM_008529.2,258-276).
cattactgtatcacgttat

SEQ ID NO: 694688 - DNA, 19 bp, Mus musculus
  siRNA target sequence for Ly6e (NM_008529.2,286-304).
cgggctttgggaatgtcaa

SEQ ID NO: 694689 - DNA, 19 bp, Mus musculus
  siRNA target sequence for Ly6e (NM_008529.2,337-355).
cgatctgccccagtgaaaa

SEQ ID NO: 694690 - DNA, 19 bp, Mus musculus
  siRNA target sequence for Ly6e (NM_008529.2,349-367).
gtgaaaatgtcaatctcaa

SEQ ID NO: 694691 - DNA, 19 bp, Mus musculus
  siRNA target sequence for Ly6f (NM_008530.1,321-339).
gccctgctaatcttgaaaa

SEQ ID NO: 694692 - DNA, 19 bp, Mus musculus
  siRNA target sequence for Ly6f (NM_008530.1,395-413).
ctctgcaatgcaccatttt

SEQ ID NO: 694693 - DNA, 19 bp, Mus musculus
  siRNA target sequence for Ly6h (NM_011837.1,299-317).
gcaggaaggatcattctgt

SEQ ID NO: 694694 - DNA, 19 bp, Mus musculus
  siRNA target sequence for Ly6h (NM_011837.1,335-353).
cctcctgcgacttcgttaa

SEQ ID NO: 694695 - DNA, 19 bp, Mus musculus
  siRNA target sequence for Ly6h (NM_011837.1,372-390).
ctatctgatggggttcatt

SEQ ID NO: 694696 - DNA, 19 bp, Mus musculus
  siRNA target sequence for Ly6h (NM_011837.1,376-394).
ctgatggggttcattaact

SEQ ID NO: 694697 - DNA, 19 bp, Mus musculus
  siRNA target sequence for Ly6h (NM_011837.1,417-435).
ggactgctgcgagaaagat

SEQ ID NO: 694698 - DNA, 19 bp, Mus musculus
  siRNA target sequence for Ly6h (NM_011837.1,418-436).
gactgctgcgagaaagatt

SEQ ID NO: 694699 - DNA, 19 bp, Mus musculus
  siRNA target sequence for Ly6i (NM_020498.1,453-471).
gttgctcaggaggaagaat

SEQ ID NO: 694700 - DNA, 19 bp, Mus musculus
  siRNA target sequence for Lynx1 (NM_011838.2,342-360).
ccacgtgtgtgcctacaat

SEQ ID NO: 694701 - DNA, 19 bp, Mus musculus
  siRNA target sequence for Lynx1 (NM_011838.2,410-428).
gtatgaccacacgaactta

SEQ ID NO: 694702 - DNA, 19 bp, Mus musculus
  siRNA target sequence for Lynx1 (NM_011838.2,487-505).
gtgtacgatggctattcca

SEQ ID NO: 694703 - DNA, 19 bp, Mus musculus
  siRNA target sequence for Mcp (NM_010778.2,71-89).
gaaggaagagctacacttt

SEQ ID NO: 694704 - DNA, 19 bp, Mus musculus
  siRNA target sequence for Mcp (NM_010778.2,135-153).
gctgtctcatttatctgat

SEQ ID NO: 694705 - DNA, 19 bp, Mus musculus
  siRNA target sequence for Mcp (NM_010778.2,167-185).
cacggccatttgaagctat

SEQ ID NO: 694706 - DNA, 19 bp, Mus musculus
  siRNA target sequence for Mcp (NM_010778.2,267-285).
gtctccatacctgatgatt

SEQ ID NO: 694707 - DNA, 19 bp, Mus musculus
  siRNA target sequence for Mcp (NM_010778.2,271-289).
ccatacctgatgattgcta

SEQ ID NO: 694708 - DNA, 19 bp, Mus musculus
  siRNA target sequence for Mcp (NM_010778.2,304-322).
catacatgggtccctattt

SEQ ID NO: 694709 - DNA, 19 bp, Mus musculus
  siRNA target sequence for Mcp (NM_010778.2,308-326).
catgggtccctatttcaga

SEQ ID NO: 694710 - DNA, 19 bp, Mus musculus
  siRNA target sequence for Mcp (NM_010778.2,329-347).
ctggttgtattaaagttca

SEQ ID NO: 694711 - DNA, 19 bp, Mus musculus
  siRNA target sequence for Mcp (NM_010778.2,331-349).
ggttgtattaaagttcaat

SEQ ID NO: 694712 - DNA, 19 bp, Mus musculus
  siRNA target sequence for Mcp (NM_010778.2,357-375).
gttacaagacccttcattt

SEQ ID NO: 694713 - DNA, 19 bp, Mus musculus
  siRNA target sequence for Mcp (NM_010778.2,368-386).
cttcatttggcaaagtata

SEQ ID NO: 694714 - DNA, 19 bp, Mus musculus
  siRNA target sequence for Mcp (NM_010778.2,390-408).
catagatggcagcttttca

SEQ ID NO: 694715 - DNA, 19 bp, Mus musculus
  siRNA target sequence for Mcp (NM_010778.2,410-428).
ggggtgctcgagctaaatt

SEQ ID NO: 694716 - DNA, 19 bp, Mus musculus
  siRNA target sequence for Mcp (NM_010778.2,411-429).
gggtgctcgagctaaattt

SEQ ID NO: 694717 - DNA, 19 bp, Mus musculus
  siRNA target sequence for Mcp (NM_010778.2,412-430).
ggtgctcgagctaaattta

SEQ ID NO: 694718 - DNA, 19 bp, Mus musculus
  siRNA target sequence for Mcp (NM_010778.2,418-436).
cgagctaaatttacttgta

SEQ ID NO: 694719 - DNA, 19 bp, Mus musculus
  siRNA target sequence for Mcp (NM_010778.2,419-437).
gagctaaatttacttgtat

SEQ ID NO: 694720 - DNA, 19 bp, Mus musculus
  siRNA target sequence for Mcp (NM_010778.2,434-452).
gtatggaaggttattacgt

SEQ ID NO: 694721 - DNA, 19 bp, Mus musculus
  siRNA target sequence for Mcp (NM_010778.2,443-461).
gttattacgtagttggtat

SEQ ID NO: 694722 - DNA, 19 bp, Mus musculus
  siRNA target sequence for Mcp (NM_010778.2,512-530).
gctatcccccacattgtga

SEQ ID NO: 694723 - DNA, 19 bp, Mus musculus
  siRNA target sequence for Mcp (NM_010778.2,513-531).
ctatcccccacattgtgaa

SEQ ID NO: 694724 - DNA, 19 bp, Mus musculus
  siRNA target sequence for Mcp (NM_010778.2,572-590).
cacatacccttactgatat

SEQ ID NO: 694725 - DNA, 19 bp, Mus musculus
  siRNA target sequence for Mcp (NM_010778.2,574-592).
catacccttactgatataa

SEQ ID NO: 694726 - DNA, 19 bp, Mus musculus
  siRNA target sequence for Mcp (NM_010778.2,635-653).
ctaccccagggccagataa

SEQ ID NO: 694727 - DNA, 19 bp, Mus musculus
  siRNA target sequence for Mcp (NM_010778.2,640-658).
ccagggccagataagtttt

SEQ ID NO: 694728 - DNA, 19 bp, Mus musculus
  siRNA target sequence for Mcp (NM_010778.2,664-682).
gttggaacaagcatgatat

SEQ ID NO: 694729 - DNA, 19 bp, Mus musculus
  siRNA target sequence for Mcp (NM_010778.2,694-712).
cataacacctggagtaaca

SEQ ID NO: 694730 - DNA, 19 bp, Mus musculus
  siRNA target sequence for Mcp (NM_010778.2,711-729).
cagccctccggagtgtaaa

SEQ ID NO: 694731 - DNA, 19 bp, Mus musculus
  siRNA target sequence for Mcp (NM_010778.2,713-731).
gccctccggagtgtaaagt

SEQ ID NO: 694732 - DNA, 19 bp, Mus musculus
  siRNA target sequence for Mcp (NM_010778.2,719-737).
cggagtgtaaagtggtaaa

SEQ ID NO: 694733 - DNA, 19 bp, Mus musculus
  siRNA target sequence for Mcp (NM_010778.2,743-761).
caaatccagtactacaaaa

SEQ ID NO: 694734 - DNA, 19 bp, Mus musculus
  siRNA target sequence for Mcp (NM_010778.2,782-800).
ctggcgaaatattttccta

SEQ ID NO: 694735 - DNA, 19 bp, Mus musculus
  siRNA target sequence for Mcp (NM_010778.2,786-804).
cgaaatattttcctatcaa

SEQ ID NO: 694736 - DNA, 19 bp, Mus musculus
  siRNA target sequence for Mcp (NM_010778.2,809-827).
cagtgatgtttgagtgttt

SEQ ID NO: 694737 - DNA, 19 bp, Mus musculus
  siRNA target sequence for Mcp (NM_010778.2,813-831).
gatgtttgagtgtttgcaa

SEQ ID NO: 694738 - DNA, 19 bp, Mus musculus
  siRNA target sequence for Mcp (NM_010778.2,824-842).
gtttgcaaggattttacat

SEQ ID NO: 694739 - DNA, 19 bp, Mus musculus
  siRNA target sequence for Mcp (NM_010778.2,858-876).
ggtgatctgtagtgctaat

SEQ ID NO: 694740 - DNA, 19 bp, Mus musculus
  siRNA target sequence for Mcp (NM_010778.2,859-877).
gtgatctgtagtgctaata

SEQ ID NO: 694741 - DNA, 19 bp, Mus musculus
  siRNA target sequence for Mcp (NM_010778.2,864-882).
ctgtagtgctaataactct

SEQ ID NO: 694742 - DNA, 19 bp, Mus musculus
  siRNA target sequence for Mcp (NM_010778.2,968-986).
ctagtccccgtgaaggaat

SEQ ID NO: 694743 - DNA, 19 bp, Mus musculus
  siRNA target sequence for Mcp (NM_010778.2,971-989).
gtccccgtgaaggaatatt

SEQ ID NO: 694744 - DNA, 19 bp, Mus musculus
  siRNA target sequence for Mcp (NM_010778.2,973-991).
ccccgtgaaggaatattta

SEQ ID NO: 694745 - DNA, 19 bp, Mus musculus
  siRNA target sequence for Mcp (NM_010778.2,983-1001).
gaatatttagccaagaatt

SEQ ID NO: 694746 - DNA, 19 bp, Mus musculus
  siRNA target sequence for Mcp (NM_010778.2,997-1015).
gaattagatgcatggatta

SEQ ID NO: 694747 - DNA, 19 bp, Mus musculus
  siRNA target sequence for Mcp (NM_010778.2,1003-1021).
gatgcatggattattgctt

SEQ ID NO: 694748 - DNA, 19 bp, Mus musculus
  siRNA target sequence for Mcp (NM_010778.2,1010-1028).
ggattattgctttgattgt

SEQ ID NO: 694749 - DNA, 19 bp, Mus musculus
  siRNA target sequence for Mcp (NM_010778.2,1018-1036).
gctttgattgttattacgt

SEQ ID NO: 694750 - DNA, 19 bp, Mus musculus
  siRNA target sequence for Mcp (NM_010778.2,1023-1041).
gattgttattacgtcaatt

SEQ ID NO: 694751 - DNA, 19 bp, Mus musculus
  siRNA target sequence for Mcp (NM_010778.2,1034-1052).
cgtcaattgttggagtttt

SEQ ID NO: 694752 - DNA, 19 bp, Mus musculus
  siRNA target sequence for Mcp (NM_010778.2,1037-1055).
caattgttggagtttttat

SEQ ID NO: 694753 - DNA, 19 bp, Mus musculus
  siRNA target sequence for Nkg7 (NM_024253.3,230-248).
gctctgaccactgatttct

SEQ ID NO: 694754 - DNA, 19 bp, Mus musculus
  siRNA target sequence for Nkg7 (NM_024253.3,310-328).
gactcaagtagcaggttat

SEQ ID NO: 694755 - DNA, 19 bp, Mus musculus
  siRNA target sequence for Nkg7 (NM_024253.3,312-330).
ctcaagtagcaggttatat

SEQ ID NO: 694756 - DNA, 19 bp, Mus musculus
  siRNA target sequence for Nkg7 (NM_024253.3,468-486).
cagctctctccatattagt

SEQ ID NO: 694757 - DNA, 19 bp, Mus musculus
  siRNA target sequence for Nkg7 (NM_024253.3,494-512).
gcagtgtacaccagtatga

SEQ ID NO: 694758 - DNA, 19 bp, Mus musculus
  siRNA target sequence for Nkg7 (NM_024253.3,497-515).
gtgtacaccagtatgagat

SEQ ID NO: 694759 - DNA, 19 bp, Mus musculus
  siRNA target sequence for Nkg7 (NM_024253.3,536-554).
caagtccagacattcttct

SEQ ID NO: 694760 - DNA, 19 bp, Mus musculus
  siRNA target sequence for Nkg7 (NM_024253.3,636-654).
cccgtcgggctgagtatga

SEQ ID NO: 694761 - DNA, 19 bp, Mus musculus
  siRNA target sequence for Nkg7 (NM_024253.3,637-655).
ccgtcgggctgagtatgaa

SEQ ID NO: 694762 - DNA, 19 bp, Mus musculus
  siRNA target sequence for Nkg7 (NM_024253.3,638-656).
cgtcgggctgagtatgaaa

SEQ ID NO: 694763 - DNA, 19 bp, Mus musculus
  siRNA target sequence for Pbxip1 (NM_146131.1,89-107).
cctgcccagactcagataa

SEQ ID NO: 694764 - DNA, 19 bp, Mus musculus
  siRNA target sequence for Pbxip1 (NM_146131.1,90-108).
ctgcccagactcagataat

SEQ ID NO: 694765 - DNA, 19 bp, Mus musculus
  siRNA target sequence for Pbxip1 (NM_146131.1,94-112).
ccagactcagataatagct

SEQ ID NO: 694766 - DNA, 19 bp, Mus musculus
  siRNA target sequence for Pbxip1 (NM_146131.1,447-465).
gatccatccacagaactta

SEQ ID NO: 694767 - DNA, 19 bp, Mus musculus
  siRNA target sequence for Pbxip1 (NM_146131.1,584-602).
ccgtggtacccgtagatgt

SEQ ID NO: 694768 - DNA, 19 bp, Mus musculus
  siRNA target sequence for Pbxip1 (NM_146131.1,643-661).
ggcatctccctcaacatgt

SEQ ID NO: 694769 - DNA, 19 bp, Mus musculus
  siRNA target sequence for Pbxip1 (NM_146131.1,831-849).
gcacctgcaggcttcaagt

SEQ ID NO: 694770 - DNA, 19 bp, Mus musculus
  siRNA target sequence for Pbxip1 (NM_146131.1,1053-1071).
ccaggccctagaatcagaa

SEQ ID NO: 694771 - DNA, 19 bp, Mus musculus
  siRNA target sequence for Pbxip1 (NM_146131.1,1208-1226).
cagaccccagcttattgga

SEQ ID NO: 694772 - DNA, 19 bp, Mus musculus
  siRNA target sequence for Pbxip1 (NM_146131.1,1411-1429).
gagaatcagggtatcaaca

SEQ ID NO: 694773 - DNA, 19 bp, Mus musculus
  siRNA target sequence for Pbxip1 (NM_146131.1,1698-1716).
ggtacaccctaggaaagat

SEQ ID NO: 694774 - DNA, 19 bp, Mus musculus
  siRNA target sequence for Pbxip1 (NM_146131.1,1921-1939).
gtgctgagagaatacttgt

SEQ ID NO: 694775 - DNA, 19 bp, Mus musculus
  siRNA target sequence for Pbxip1 (NM_146131.1,2026-2044).
cggcttcgcttcagagatt

SEQ ID NO: 694776 - DNA, 19 bp, Mus musculus
  siRNA target sequence for Pbxip1 (NM_146131.1,2027-2045).
ggcttcgcttcagagattt

SEQ ID NO: 694777 - DNA, 19 bp, Mus musculus
  siRNA target sequence for Pbxip1 (NM_146131.1,2028-2046).
gcttcgcttcagagatttt

SEQ ID NO: 694778 - DNA, 19 bp, Mus musculus
  siRNA target sequence for Pbxip1 (NM_146131.1,2091-2109).
gacaggcgacgatgatgaa

SEQ ID NO: 694779 - DNA, 19 bp, Mus musculus
  siRNA target sequence for Pbxip1 (NM_146131.1,2093-2111).
caggcgacgatgatgaagt

SEQ ID NO: 694780 - DNA, 19 bp, Mus musculus
  siRNA target sequence for Popdc2 (NM_022318.1,471-489).
gctggaaaccggatgtaga

SEQ ID NO: 694781 - DNA, 19 bp, Mus musculus
  siRNA target sequence for Popdc2 (NM_022318.1,472-490).
ctggaaaccggatgtagaa

SEQ ID NO: 694782 - DNA, 19 bp, Mus musculus
  siRNA target sequence for Popdc2 (NM_022318.1,859-877).
gggggagacccccatcaat

SEQ ID NO: 694783 - DNA, 19 bp, Mus musculus
  siRNA target sequence for Popdc2 (NM_022318.1,1030-1048).
gaccgaatgtagctacatt

SEQ ID NO: 694784 - DNA, 19 bp, Mus musculus
  siRNA target sequence for Popdc2 (NM_022318.1,1439-1457).
cgtcctctccagaactctt

SEQ ID NO: 694785 - DNA, 19 bp, Mus musculus
  siRNA target sequence for Popdc3 (NM_024286.1,519-537).
caagcttatggaaaagctt

SEQ ID NO: 694786 - DNA, 19 bp, Mus musculus
  siRNA target sequence for Popdc3 (NM_024286.1,579-597).
ccgaaggggccatttacca

SEQ ID NO: 694787 - DNA, 19 bp, Mus musculus
  siRNA target sequence for Popdc3 (NM_024286.1,596-614).
cacctcgccagtatcttgt

SEQ ID NO: 694788 - DNA, 19 bp, Mus musculus
  siRNA target sequence for Popdc3 (NM_024286.1,598-616).
cctcgccagtatcttgttt

SEQ ID NO: 694789 - DNA, 19 bp, Mus musculus
  siRNA target sequence for Popdc3 (NM_024286.1,604-622).
cagtatcttgtttgtagta

SEQ ID NO: 694790 - DNA, 19 bp, Mus musculus
  siRNA target sequence for Popdc3 (NM_024286.1,610-628).
cttgtttgtagtaggtttt

SEQ ID NO: 694791 - DNA, 19 bp, Mus musculus
  siRNA target sequence for Popdc3 (NM_024286.1,718-736).
catctgtgccgctgacata

SEQ ID NO: 694792 - DNA, 19 bp, Mus musculus
  siRNA target sequence for Popdc3 (NM_024286.1,725-743).
gccgctgacatattttcct

SEQ ID NO: 694793 - DNA, 19 bp, Mus musculus
  siRNA target sequence for Popdc3 (NM_024286.1,781-799).
cgttcacatcgcgtatcaa

SEQ ID NO: 694794 - DNA, 19 bp, Mus musculus
  siRNA target sequence for Popdc3 (NM_024286.1,813-831).
ccttcgcccgagatttcca

SEQ ID NO: 694795 - DNA, 19 bp, Mus musculus
  siRNA target sequence for Popdc3 (NM_024286.1,814-832).
cttcgcccgagatttccat

SEQ ID NO: 694796 - DNA, 19 bp, Mus musculus
  siRNA target sequence for Popdc3 (NM_024286.1,819-837).
cccgagatttccatgtgtt

SEQ ID NO: 694797 - DNA, 19 bp, Mus musculus
  siRNA target sequence for Popdc3 (NM_024286.1,824-842).
gatttccatgtgttgtaca

SEQ ID NO: 694798 - DNA, 19 bp, Mus musculus
  siRNA target sequence for Popdc3 (NM_024286.1,874-892).
gcccgtcttcagaacaatt

SEQ ID NO: 694799 - DNA, 19 bp, Mus musculus
  siRNA target sequence for Popdc3 (NM_024286.1,900-918).
gctctgaagtggttagttt

SEQ ID NO: 694800 - DNA, 19 bp, Mus musculus
  siRNA target sequence for Popdc3 (NM_024286.1,938-956).
gccatgcaggggaaaacct

SEQ ID NO: 694801 - DNA, 19 bp, Mus musculus
  siRNA target sequence for Popdc3 (NM_024286.1,946-964).
ggggaaaacctccattgat

SEQ ID NO: 694802 - DNA, 19 bp, Mus musculus
  siRNA target sequence for Popdc3 (NM_024286.1,979-997).
catctcaggaagaatcaga

SEQ ID NO: 694803 - DNA, 19 bp, Mus musculus
  siRNA target sequence for Popdc3 (NM_024286.1,1000-1018).
gacagtcgatggcgaattt

SEQ ID NO: 694804 - DNA, 19 bp, Mus musculus
  siRNA target sequence for Popdc3 (NM_024286.1,1010-1028).
ggcgaatttctgcattata

SEQ ID NO: 694805 - DNA, 19 bp, Mus musculus
  siRNA target sequence for Popdc3 (NM_024286.1,1011-1029).
gcgaatttctgcattatat

SEQ ID NO: 694806 - DNA, 19 bp, Mus musculus
  siRNA target sequence for Popdc3 (NM_024286.1,1169-1187).
gcgcagcatcggtacatct

SEQ ID NO: 694807 - DNA, 19 bp, Mus musculus
  siRNA target sequence for Popdc3 (NM_024286.1,1189-1207).
ccgcctgttttcggtttta

SEQ ID NO: 694808 - DNA, 19 bp, Mus musculus
  siRNA target sequence for Popdc3 (NM_024286.1,1190-1208).
cgcctgttttcggttttaa

SEQ ID NO: 694809 - DNA, 19 bp, Mus musculus
  siRNA target sequence for Popdc3 (NM_024286.1,1192-1210).
cctgttttcggttttaatt

SEQ ID NO: 694810 - DNA, 19 bp, Mus musculus
  siRNA target sequence for Popdc3 (NM_024286.1,1212-1230).
gcagtgacattgcagataa

SEQ ID NO: 694811 - DNA, 19 bp, Mus musculus
  siRNA target sequence for Popdc3 (NM_024286.1,1213-1231).
cagtgacattgcagataaa

SEQ ID NO: 694812 - DNA, 19 bp, Mus musculus
  siRNA target sequence for Popdc3 (NM_024286.1,1219-1237).
cattgcagataaactctat

SEQ ID NO: 694813 - DNA, 19 bp, Mus musculus
  siRNA target sequence for Popdc3 (NM_024286.1,1243-1261).
gaacgacagggtgtacata

SEQ ID NO: 694814 - DNA, 19 bp, Mus musculus
  siRNA target sequence for Popdc3 (NM_024286.1,1247-1265).
gacagggtgtacataggaa

SEQ ID NO: 694815 - DNA, 19 bp, Mus musculus
  siRNA target sequence for Popdc3 (NM_024286.1,1251-1269).
gggtgtacataggaaagaa

SEQ ID NO: 694816 - DNA, 19 bp, Mus musculus
  siRNA target sequence for Popdc3 (NM_024286.1,1252-1270).
ggtgtacataggaaagaaa

SEQ ID NO: 694817 - DNA, 19 bp, Mus musculus
  siRNA target sequence for Popdc3 (NM_024286.1,1292-1310).
cccaactactaccatatgt

SEQ ID NO: 694818 - DNA, 19 bp, Mus musculus
  siRNA target sequence for Popdc3 (NM_024286.1,1294-1312).
caactactaccatatgtca

SEQ ID NO: 694819 - DNA, 19 bp, Mus musculus
  siRNA target sequence for Popdc3 (NM_024286.1,1351-1369).
ccggaattccagacaacat

SEQ ID NO: 694820 - DNA, 19 bp, Mus musculus
  siRNA target sequence for Popdc3 (NM_024286.1,1352-1370).
cggaattccagacaacatt

SEQ ID NO: 694821 - DNA, 19 bp, Mus musculus
  siRNA target sequence for Popdc3 (NM_024286.1,1360-1378).
cagacaacattgtaacaaa

SEQ ID NO: 694822 - DNA, 19 bp, Mus musculus
  siRNA target sequence for Stoml2 (NM_023231.2,34-52).
gcactggagcccttttgct

SEQ ID NO: 694823 - DNA, 19 bp, Mus musculus
  siRNA target sequence for Stoml2 (NM_023231.2,239-257).
gcagagtctcaaggaaatt

SEQ ID NO: 694824 - DNA, 19 bp, Mus musculus
  siRNA target sequence for Stoml2 (NM_023231.2,246-264).
ctcaaggaaattgttatca

SEQ ID NO: 694825 - DNA, 19 bp, Mus musculus
  siRNA target sequence for Stoml2 (NM_023231.2,280-298).
cagccgtaactcttgacaa

SEQ ID NO: 694826 - DNA, 19 bp, Mus musculus
  siRNA target sequence for Stoml2 (NM_023231.2,284-302).
cgtaactcttgacaatgta

SEQ ID NO: 694827 - DNA, 19 bp, Mus musculus
  siRNA target sequence for Stoml2 (NM_023231.2,285-303).
gtaactcttgacaatgtaa

SEQ ID NO: 694828 - DNA, 19 bp, Mus musculus
  siRNA target sequence for Stoml2 (NM_023231.2,399-417).
gctcagacgactatgagat

SEQ ID NO: 694829 - DNA, 19 bp, Mus musculus
  siRNA target sequence for Syngr3 (NM_011522.2,219-237).
gtcgtgtcctgggtgtttt

SEQ ID NO: 694830 - DNA, 19 bp, Mus musculus
  siRNA target sequence for Syngr3 (NM_011522.2,224-242).
gtcctgggtgttttctatt

SEQ ID NO: 694831 - DNA, 19 bp, Mus musculus
  siRNA target sequence for Syngr3 (NM_011522.2,246-264).
gtgttcggaccgattgtca

SEQ ID NO: 694832 - DNA, 19 bp, Mus musculus
  siRNA target sequence for Syngr3 (NM_011522.2,487-505).
ggttcgtaggcttctgttt

SEQ ID NO: 694833 - DNA, 19 bp, Mus musculus
  siRNA target sequence for Syngr3 (NM_011522.2,645-663).
cgcctaggcaccgatatgt

SEQ ID NO: 694834 - DNA, 19 bp, Mus musculus
  siRNA target sequence for Syngr3 (NM_011522.2,735-753).
gtggagggtacagaaacat

SEQ ID NO: 694835 - DNA, 19 bp, Mus musculus
  siRNA target sequence for Thy1 (NM_009382.2,108-126).
gcctgcctggtgaaccaaa

SEQ ID NO: 694836 - DNA, 19 bp, Mus musculus
  siRNA target sequence for Thy1 (NM_009382.2,137-155).
ggactgccgccatgagaat

SEQ ID NO: 694837 - DNA, 19 bp, Mus musculus
  siRNA target sequence for Thy1 (NM_009382.2,274-292).
ccaaccagccctatatcaa

SEQ ID NO: 694838 - DNA, 19 bp, Mus musculus
  siRNA target sequence for Thy1 (NM_009382.2,323-341).
ggatgagggcgactacttt

SEQ ID NO: 694839 - DNA, 19 bp, Mus musculus
  siRNA target sequence for 0610009H04Rik (NM_018854.3,393-411).
gcgaggcagggctgcattt

SEQ ID NO: 694840 - DNA, 19 bp, Mus musculus
  siRNA target sequence for 0610009H04Rik (NM_018854.3,531-549).
gtctaattgagcttgttga

SEQ ID NO: 694841 - DNA, 19 bp, Mus musculus
  siRNA target sequence for Lad1 (NM_133664.2,482-500).
caccgcaacctgagttcaa

SEQ ID NO: 694842 - DNA, 19 bp, Mus musculus
  siRNA target sequence for Lad1 (NM_133664.2,767-785).
ccccttgtgcctaagaaga

SEQ ID NO: 694843 - DNA, 19 bp, Mus musculus
  siRNA target sequence for Lad1 (NM_133664.2,768-786).
cccttgtgcctaagaagaa

SEQ ID NO: 694844 - DNA, 19 bp, Mus musculus
  siRNA target sequence for Lad1 (NM_133664.2,848-866).
gaagaacgcctaaagaaca

SEQ ID NO: 694845 - DNA, 19 bp, Mus musculus
  siRNA target sequence for Lad1 (NM_133664.2,1033-1051).
gtctctgactgagaaaaga

SEQ ID NO: 694846 - DNA, 19 bp, Mus musculus
  siRNA target sequence for Lad1 (NM_133664.2,1069-1087).
ggttccagaaaaaacaagt

SEQ ID NO: 694847 - DNA, 19 bp, Mus musculus
  siRNA target sequence for Lad1 (NM_133664.2,1156-1174).
gtcccctccagttctagaa

SEQ ID NO: 694848 - DNA, 19 bp, Mus musculus
  siRNA target sequence for Lad1 (NM_133664.2,1211-1229).
ctggtgtcggagaaagcat

SEQ ID NO: 694849 - DNA, 19 bp, Mus musculus
  siRNA target sequence for Lad1 (NM_133664.2,1655-1673).
gccatccagaggtcagaat

SEQ ID NO: 694850 - DNA, 19 bp, Mus musculus
  siRNA target sequence for Lad1 (NM_133664.2,1791-1809).
ccatccgaaaggagaatct

SEQ ID NO: 694851 - DNA, 19 bp, Mus musculus
  siRNA target sequence for Lad1 (NM_133664.2,1822-1840).
ggtcgtgacatcaagactt

SEQ ID NO: 694852 - DNA, 19 bp, Mus musculus
  siRNA target sequence for Lad1 (NM_133664.2,1823-1841).
gtcgtgacatcaagactta

SEQ ID NO: 694853 - DNA, 19 bp, Mus musculus
  siRNA target sequence for Mfap2 (NM_008546.2,449-467).
gtggtcaacaaggaaatat

SEQ ID NO: 694854 - DNA, 19 bp, Mus musculus
  siRNA target sequence for Mfap2 (NM_008546.2,512-530).
ctgtgccgagacaagttct

SEQ ID NO: 694855 - DNA, 19 bp, Mus musculus
  siRNA target sequence for Mfap5 (NM_015776.1,142-160).
gtcaacgcggagatgatgt

SEQ ID NO: 694856 - DNA, 19 bp, Mus musculus
  siRNA target sequence for Mfap5 (NM_015776.1,277-295).
cagagtgccgggatgagaa

SEQ ID NO: 694857 - DNA, 19 bp, Mus musculus
  siRNA target sequence for Mfap5 (NM_015776.1,293-311).
gaagtttgcttgtacaaga

SEQ ID NO: 694858 - DNA, 19 bp, Mus musculus
  siRNA target sequence for Mfap5 (NM_015776.1,367-385).
gtttacggcgcatgtacat

SEQ ID NO: 694859 - DNA, 19 bp, Mus musculus
  siRNA target sequence for Mfap5 (NM_015776.1,372-390).
cggcgcatgtacatcatca

SEQ ID NO: 694860 - DNA, 19 bp, Mus musculus
  siRNA target sequence for Mfap5 (NM_015776.1,374-392).
gcgcatgtacatcatcaat

SEQ ID NO: 694861 - DNA, 19 bp, Mus musculus
  siRNA target sequence for Mfap5 (NM_015776.1,403-421).
gttcccgactcgtctgtaa

SEQ ID NO: 694862 - DNA, 19 bp, Mus musculus
  siRNA target sequence for Mfap5 (NM_015776.1,407-425).
ccgactcgtctgtaaagaa

SEQ ID NO: 694863 - DNA, 19 bp, Mus musculus
  siRNA target sequence for Mfap5 (NM_015776.1,409-427).
gactcgtctgtaaagaaca

SEQ ID NO: 694864 - DNA, 19 bp, Mus musculus
  siRNA target sequence for Mfap5 (NM_015776.1,483-501).
cttcggcgctccaactact

SEQ ID NO: 694865 - DNA, 19 bp, Mus musculus
  siRNA target sequence for Mfap5 (NM_015776.1,504-522).
cgacttcctccctgtgaaa

SEQ ID NO: 694866 - DNA, 19 bp, Mus musculus
  siRNA target sequence for Mfap5 (NM_015776.1,505-523).
gacttcctccctgtgaaaa

SEQ ID NO: 694867 - DNA, 19 bp, Mus musculus
  siRNA target sequence for Mfap5 (NM_015776.1,510-528).
cctccctgtgaaaatatga

SEQ ID NO: 694868 - DNA, 19 bp, Mus musculus
  siRNA target sequence for Aspn (NM_025711.2,271-289).
cagcactgaagaatatgat

SEQ ID NO: 694869 - DNA, 19 bp, Mus musculus
  siRNA target sequence for Aspn (NM_025711.2,335-353).
cgacaactctctttttcca

SEQ ID NO: 694870 - DNA, 19 bp, Mus musculus
  siRNA target sequence for Aspn (NM_025711.2,341-359).
ctctctttttccaacgaaa

SEQ ID NO: 694871 - DNA, 19 bp, Mus musculus
  siRNA target sequence for Aspn (NM_025711.2,405-423).
ccatttgggtgccaatgtt

SEQ ID NO: 694872 - DNA, 19 bp, Mus musculus
  siRNA target sequence for Aspn (NM_025711.2,454-472).
gtctgacatcggttccaaa

SEQ ID NO: 694873 - DNA, 19 bp, Mus musculus
  siRNA target sequence for Aspn (NM_025711.2,460-478).
catcggttccaaacaacat

SEQ ID NO: 694874 - DNA, 19 bp, Mus musculus
  siRNA target sequence for Aspn (NM_025711.2,473-491).
caacattccatttgatact

SEQ ID NO: 694875 - DNA, 19 bp, Mus musculus
  siRNA target sequence for Aspn (NM_025711.2,492-510).
cgaatggttgaccttcaaa

SEQ ID NO: 694876 - DNA, 19 bp, Mus musculus
  siRNA target sequence for Aspn (NM_025711.2,659-677).
ccaactaagtgaaattcca

SEQ ID NO: 694877 - DNA, 19 bp, Mus musculus
  siRNA target sequence for Aspn (NM_025711.2,678-696).
cttaatcttcccaaatcat

SEQ ID NO: 694878 - DNA, 19 bp, Mus musculus
  siRNA target sequence for Aspn (NM_025711.2,746-764).
cacgttcaagggaatgaat

SEQ ID NO: 694879 - DNA, 19 bp, Mus musculus
  siRNA target sequence for Aspn (NM_025711.2,834-852).
ggggtgacagtattccata

SEQ ID NO: 694880 - DNA, 19 bp, Mus musculus
  siRNA target sequence for Aspn (NM_025711.2,835-853).
gggtgacagtattccatat

SEQ ID NO: 694881 - DNA, 19 bp, Mus musculus
  siRNA target sequence for Aspn (NM_025711.2,856-874).
ggatcgctgaagcaaaact

SEQ ID NO: 694882 - DNA, 19 bp, Mus musculus
  siRNA target sequence for Aspn (NM_025711.2,857-875).
gatcgctgaagcaaaacta

SEQ ID NO: 694883 - DNA, 19 bp, Mus musculus
  siRNA target sequence for Aspn (NM_025711.2,945-963).
gtggaacttgaagatctta

SEQ ID NO: 694884 - DNA, 19 bp, Mus musculus
  siRNA target sequence for Aspn (NM_025711.2,1058-1076).
gatacacttggaacacaat

SEQ ID NO: 694885 - DNA, 19 bp, Mus musculus
  siRNA target sequence for Aspn (NM_025711.2,1133-1151).
ccttcattataattcaatt

SEQ ID NO: 694886 - DNA, 19 bp, Mus musculus
  siRNA target sequence for Aspn (NM_025711.2,1153-1171).
caaaagtgggagtgaatga

SEQ ID NO: 694887 - DNA, 19 bp, Mus musculus
  siRNA target sequence for Aspn (NM_025711.2,1213-1231).
gtgcaataagtttattcaa

SEQ ID NO: 694888 - DNA, 19 bp, Mus musculus
  siRNA target sequence for Aspn (NM_025711.2,1241-1259).
gaagtactgggaaatacaa

SEQ ID NO: 694889 - DNA, 19 bp, Mus musculus
  siRNA target sequence for Aspn (NM_025711.2,1301-1319).
gcttgggaatgttggaaaa

SEQ ID NO: 694890 - DNA, 19 bp, Mus musculus
  siRNA target sequence for Bgn (NM_007542.3,351-369).
gccacctgcgggttgttca

SEQ ID NO: 694891 - DNA, 19 bp, Mus musculus
  siRNA target sequence for Bgn (NM_007542.3,503-521).
gtcttggtaaacaataaga

SEQ ID NO: 694892 - DNA, 19 bp, Mus musculus
  siRNA target sequence for Bgn (NM_007542.3,557-575).
cggaagctgcaaaaactct

SEQ ID NO: 694893 - DNA, 19 bp, Mus musculus
  siRNA target sequence for Bgn (NM_007542.3,558-576).
ggaagctgcaaaaactcta

SEQ ID NO: 694894 - DNA, 19 bp, Mus musculus
  siRNA target sequence for Bgn (NM_007542.3,618-636).
ccagctccctggtagaact

SEQ ID NO: 694895 - DNA, 19 bp, Mus musculus
  siRNA target sequence for Bgn (NM_007542.3,619-637).
cagctccctggtagaacta

SEQ ID NO: 694896 - DNA, 19 bp, Mus musculus
  siRNA target sequence for Bgn (NM_007542.3,624-642).
ccctggtagaactacgaat

SEQ ID NO: 694897 - DNA, 19 bp, Mus musculus
  siRNA target sequence for Bgn (NM_007542.3,628-646).
ggtagaactacgaatccat

SEQ ID NO: 694898 - DNA, 19 bp, Mus musculus
  siRNA target sequence for Bgn (NM_007542.3,684-702).
gcgggctccggaacatgaa

SEQ ID NO: 694899 - DNA, 19 bp, Mus musculus
  siRNA target sequence for Bgn (NM_007542.3,686-704).
gggctccggaacatgaact

SEQ ID NO: 694900 - DNA, 19 bp, Mus musculus
  siRNA target sequence for Bgn (NM_007542.3,920-938).
ggcttaggtcacaatcaga

SEQ ID NO: 694901 - DNA, 19 bp, Mus musculus
  siRNA target sequence for Bgn (NM_007542.3,921-939).
gcttaggtcacaatcagat

SEQ ID NO: 694902 - DNA, 19 bp, Mus musculus
  siRNA target sequence for Bgn (NM_007542.3,935-953).
cagattcggatgattgaga

SEQ ID NO: 694903 - DNA, 19 bp, Mus musculus
  siRNA target sequence for Bgn (NM_007542.3,937-955).
gattcggatgattgagaat

SEQ ID NO: 694904 - DNA, 19 bp, Mus musculus
  siRNA target sequence for Bgn (NM_007542.3,1081-1099).
caccaaggtgggcatcaat

SEQ ID NO: 694905 - DNA, 19 bp, Mus musculus
  siRNA target sequence for Bgn (NM_007542.3,1124-1142).
gtcaagagggcctactata

SEQ ID NO: 694906 - DNA, 19 bp, Mus musculus
  siRNA target sequence for Bgn (NM_007542.3,1126-1144).
caagagggcctactataat

SEQ ID NO: 694907 - DNA, 19 bp, Mus musculus
  siRNA target sequence for Bgn (NM_007542.3,1146-1164).
gcatcagcctcttcaacaa

SEQ ID NO: 694908 - DNA, 19 bp, Mus musculus
  siRNA target sequence for Bgn (NM_007542.3,1225-1243).
catccaatttggaaattat

SEQ ID NO: 694909 - DNA, 19 bp, Mus musculus
  siRNA target sequence for Chad (NM_007689.2,215-233).
caaccaaactgctcaatct

SEQ ID NO: 694910 - DNA, 19 bp, Mus musculus
  siRNA target sequence for Chad (NM_007689.2,347-365).
gaggcctgaagcagcttat

SEQ ID NO: 694911 - DNA, 19 bp, Mus musculus
  siRNA target sequence for Chad (NM_007689.2,777-795).
ccagtccttcggtagatat

SEQ ID NO: 694912 - DNA, 19 bp, Mus musculus
  siRNA target sequence for Chad (NM_007689.2,855-873).
gggtgtgaccacactgaaa

SEQ ID NO: 694913 - DNA, 19 bp, Mus musculus
  siRNA target sequence for Chad (NM_007689.2,951-969).
caccaacaacccatggaaa

SEQ ID NO: 694914 - DNA, 19 bp, Mus musculus
  siRNA target sequence for Chad (NM_007689.2,1040-1058).
cctcgccagccaagttcaa

SEQ ID NO: 694915 - DNA, 19 bp, Mus musculus
  siRNA target sequence for Chad (NM_007689.2,1084-1102).
gcccttcgcagctgcaaat

SEQ ID NO: 694916 - DNA, 19 bp, Mus musculus
  siRNA target sequence for Chad (NM_007689.2,1107-1125).
gaccaagaggtccaagaaa

SEQ ID NO: 694917 - DNA, 19 bp, Mus musculus
  siRNA target sequence for Crtap (NM_019922.1,478-496).
cagtgctggcggactttca

SEQ ID NO: 694918 - DNA, 19 bp, Mus musculus
  siRNA target sequence for Crtap (NM_019922.1,498-516).
cagcgcgagccctacaagt

SEQ ID NO: 694919 - DNA, 19 bp, Mus musculus
  siRNA target sequence for Crtap (NM_019922.1,500-518).
gcgcgagccctacaagttt

SEQ ID NO: 694920 - DNA, 19 bp, Mus musculus
  siRNA target sequence for Crtap (NM_019922.1,502-520).
gcgagccctacaagtttct

SEQ ID NO: 694921 - DNA, 19 bp, Mus musculus
  siRNA target sequence for Crtap (NM_019922.1,600-618).
gacgagatgatgaagagaa

SEQ ID NO: 694922 - DNA, 19 bp, Mus musculus
  siRNA target sequence for Crtap (NM_019922.1,649-667).
ccgaggaccacattaaaga

SEQ ID NO: 694923 - DNA, 19 bp, Mus musculus
  siRNA target sequence for Crtap (NM_019922.1,682-700).
cgtacgagagcctgtttgt

SEQ ID NO: 694924 - DNA, 19 bp, Mus musculus
  siRNA target sequence for Crtap (NM_019922.1,879-897).
ctggagtgtaagattcgtt

SEQ ID NO: 694925 - DNA, 19 bp, Mus musculus
  siRNA target sequence for Crtap (NM_019922.1,927-945).
ggctatcccgtggagaaat

SEQ ID NO: 694926 - DNA, 19 bp, Mus musculus
  siRNA target sequence for Crtap (NM_019922.1,928-946).
gctatcccgtggagaaatt

SEQ ID NO: 694927 - DNA, 19 bp, Mus musculus
  siRNA target sequence for Crtap (NM_019922.1,929-947).
ctatcccgtggagaaattt

SEQ ID NO: 694928 - DNA, 19 bp, Mus musculus
  siRNA target sequence for Crtap (NM_019922.1,951-969).
gcgaccatgtaccactatt

SEQ ID NO: 694929 - DNA, 19 bp, Mus musculus
  siRNA target sequence for Crtap (NM_019922.1,952-970).
cgaccatgtaccactattt

SEQ ID NO: 694930 - DNA, 19 bp, Mus musculus
  siRNA target sequence for Crtap (NM_019922.1,972-990).
cagtttgcgtattacaagt

SEQ ID NO: 694931 - DNA, 19 bp, Mus musculus
  siRNA target sequence for Crtap (NM_019922.1,979-997).
cgtattacaagttgaatga

SEQ ID NO: 694932 - DNA, 19 bp, Mus musculus
  siRNA target sequence for Crtap (NM_019922.1,980-998).
gtattacaagttgaatgat

SEQ ID NO: 694933 - DNA, 19 bp, Mus musculus
  siRNA target sequence for Crtap (NM_019922.1,1165-1183).
cgctccagaaggaactgta

SEQ ID NO: 694934 - DNA, 19 bp, Mus musculus
  siRNA target sequence for Crtap (NM_019922.1,1192-1210).
ctcaggaacacctaatgga

SEQ ID NO: 694935 - DNA, 19 bp, Mus musculus
  siRNA target sequence for Crtap (NM_019922.1,1222-1240).
gagaggttgtggagtatgt

SEQ ID NO: 694936 - DNA, 19 bp, Mus musculus
  siRNA target sequence for Dcn (NM_007833.1,270-288).
ctcttgggctggaccattt

SEQ ID NO: 694937 - DNA, 19 bp, Mus musculus
  siRNA target sequence for Dcn (NM_007833.1,342-360).
cccttatgaccctgacaat

SEQ ID NO: 694938 - DNA, 19 bp, Mus musculus
  siRNA target sequence for Dcn (NM_007833.1,435-453).
caaagtgccctgggatttt

SEQ ID NO: 694939 - DNA, 19 bp, Mus musculus
  siRNA target sequence for Dcn (NM_007833.1,542-560).
ccttgatccttgtcaacaa

SEQ ID NO: 694940 - DNA, 19 bp, Mus musculus
  siRNA target sequence for Dcn (NM_007833.1,595-613).
cctctcgtgaagttggaaa

SEQ ID NO: 694941 - DNA, 19 bp, Mus musculus
  siRNA target sequence for Dcn (NM_007833.1,626-644).
ctaagaaccaactaaagga

SEQ ID NO: 694942 - DNA, 19 bp, Mus musculus
  siRNA target sequence for Dcn (NM_007833.1,682-700).
cgtgtccatgagaatgaga

SEQ ID NO: 694943 - DNA, 19 bp, Mus musculus
  siRNA target sequence for Dcn (NM_007833.1,711-729).
gcggaaatccgacttcaat

SEQ ID NO: 694944 - DNA, 19 bp, Mus musculus
  siRNA target sequence for Dcn (NM_007833.1,813-831).
gaagagtctctcatacatt

SEQ ID NO: 694945 - DNA, 19 bp, Mus musculus
  siRNA target sequence for Dcn (NM_007833.1,834-852).
catctcagacaccaacata

SEQ ID NO: 694946 - DNA, 19 bp, Mus musculus
  siRNA target sequence for Dcn (NM_007833.1,885-903).
cactgaagtgcatctagat

SEQ ID NO: 694947 - DNA, 19 bp, Mus musculus
  siRNA target sequence for Dcn (NM_007833.1,895-913).
catctagatggcaacaaga

SEQ ID NO: 694948 - DNA, 19 bp, Mus musculus
  siRNA target sequence for Dcn (NM_007833.1,933-951).
cagcctgaaaggactgatt

SEQ ID NO: 694949 - DNA, 19 bp, Mus musculus
  siRNA target sequence for Dcn (NM_007833.1,936-954).
cctgaaaggactgattaat

SEQ ID NO: 694950 - DNA, 19 bp, Mus musculus
  siRNA target sequence for Dcn (NM_007833.1,943-961).
ggactgattaatttgtcta

SEQ ID NO: 694951 - DNA, 19 bp, Mus musculus
  siRNA target sequence for Dcn (NM_007833.1,944-962).
gactgattaatttgtctaa

SEQ ID NO: 694952 - DNA, 19 bp, Mus musculus
  siRNA target sequence for Dcn (NM_007833.1,1078-1096).
ctggcacagcataagtata

SEQ ID NO: 694953 - DNA, 19 bp, Mus musculus
  siRNA target sequence for Dcn (NM_007833.1,1130-1148).
ccgcagttgggcaaaatga

SEQ ID NO: 694954 - DNA, 19 bp, Mus musculus
  siRNA target sequence for Dcn (NM_007833.1,1132-1150).
gcagttgggcaaaatgact

SEQ ID NO: 694955 - DNA, 19 bp, Mus musculus
  siRNA target sequence for Dcn (NM_007833.1,1133-1151).
cagttgggcaaaatgactt

SEQ ID NO: 694956 - DNA, 19 bp, Mus musculus
  siRNA target sequence for Dcn (NM_007833.1,1218-1236).
ccggtattgggaaatcttt

SEQ ID NO: 694957 - DNA, 19 bp, Mus musculus
  siRNA target sequence for Dcn (NM_007833.1,1263-1281).
gcgttctgccattcaactt

SEQ ID NO: 694958 - DNA, 19 bp, Mus musculus
  siRNA target sequence for Dcn (NM_007833.1,1271-1289).
ccattcaacttggaaacta

SEQ ID NO: 694959 - DNA, 19 bp, Mus musculus
  siRNA target sequence for Dcn (NM_007833.1,1276-1294).
caacttggaaactacaagt

SEQ ID NO: 694960 - DNA, 19 bp, Mus musculus
  siRNA target sequence for Dmp1 (NM_016779.1,165-183).
ccagataccacaatactga

SEQ ID NO: 694961 - DNA, 19 bp, Mus musculus
  siRNA target sequence for Dmp1 (NM_016779.1,172-190).
ccacaatactgaatctgaa

SEQ ID NO: 694962 - DNA, 19 bp, Mus musculus
  siRNA target sequence for Dmp1 (NM_016779.1,357-375).
cggctggtggactctctaa

SEQ ID NO: 694963 - DNA, 19 bp, Mus musculus
  siRNA target sequence for Dmp1 (NM_016779.1,362-380).
ggtggactctctaagagta

SEQ ID NO: 694964 - DNA, 19 bp, Mus musculus
  siRNA target sequence for Dmp1 (NM_016779.1,711-729).
gttctgagttcgatgatga

SEQ ID NO: 694965 - DNA, 19 bp, Mus musculus
  siRNA target sequence for Dmp1 (NM_016779.1,770-788).
cgaggccacgccagaatga

SEQ ID NO: 694966 - DNA, 19 bp, Mus musculus
  siRNA target sequence for Dmp1 (NM_016779.1,802-820).
caggtcggaagaatctaaa

SEQ ID NO: 694967 - DNA, 19 bp, Mus musculus
  siRNA target sequence for Dmp1 (NM_016779.1,862-880).
ccagtctgtggaattttca

SEQ ID NO: 694968 - DNA, 19 bp, Mus musculus
  siRNA target sequence for Dmp1 (NM_016779.1,1220-1238).
gacagcctgaacacattct

SEQ ID NO: 694969 - DNA, 19 bp, Mus musculus
  siRNA target sequence for Dmp1 (NM_016779.1,1450-1468).
cagtagccgatccaaagaa

SEQ ID NO: 694970 - DNA, 19 bp, Mus musculus
  siRNA target sequence for Dmp1 (NM_016779.1,1452-1470).
gtagccgatccaaagaaga

SEQ ID NO: 694971 - DNA, 19 bp, Mus musculus
  siRNA target sequence for Dmp1 (NM_016779.1,1528-1546).
ggaagctgacagtaggaaa

SEQ ID NO: 694972 - DNA, 19 bp, Mus musculus
  siRNA target sequence for Dspg3 (NM_007884.2,141-159).
gagttgccctgggacttat

SEQ ID NO: 694973 - DNA, 19 bp, Mus musculus
  siRNA target sequence for Dspg3 (NM_007884.2,143-161).
gttgccctgggacttatca

SEQ ID NO: 694974 - DNA, 19 bp, Mus musculus
  siRNA target sequence for Dspg3 (NM_007884.2,151-169).
gggacttatcatcattgat

SEQ ID NO: 694975 - DNA, 19 bp, Mus musculus
  siRNA target sequence for Dspg3 (NM_007884.2,185-203).
ccaactacagagctcttta

SEQ ID NO: 694976 - DNA, 19 bp, Mus musculus
  siRNA target sequence for Dspg3 (NM_007884.2,189-207).
ctacagagctctttaacta

SEQ ID NO: 694977 - DNA, 19 bp, Mus musculus
  siRNA target sequence for Dspg3 (NM_007884.2,194-212).
gagctctttaactatgact

SEQ ID NO: 694978 - DNA, 19 bp, Mus musculus
  siRNA target sequence for Dspg3 (NM_007884.2,243-261).
cagggaccttttataacta

SEQ ID NO: 694979 - DNA, 19 bp, Mus musculus
  siRNA target sequence for Dspg3 (NM_007884.2,246-264).
ggaccttttataactatga

SEQ ID NO: 694980 - DNA, 19 bp, Mus musculus
  siRNA target sequence for Dspg3 (NM_007884.2,247-265).
gaccttttataactatgaa

SEQ ID NO: 694981 - DNA, 19 bp, Mus musculus
  siRNA target sequence for Dspg3 (NM_007884.2,284-302).
gtagagaacgagaaagtgt

SEQ ID NO: 694982 - DNA, 19 bp, Mus musculus
  siRNA target sequence for Dspg3 (NM_007884.2,481-499).
cctgtgtacttgtataagt

SEQ ID NO: 694983 - DNA, 19 bp, Mus musculus
  siRNA target sequence for Dspg3 (NM_007884.2,568-586).
ctattcacgttttaacaga

SEQ ID NO: 694984 - DNA, 19 bp, Mus musculus
  siRNA target sequence for Dspg3 (NM_007884.2,573-591).
cacgttttaacagaattaa

SEQ ID NO: 694985 - DNA, 19 bp, Mus musculus
  siRNA target sequence for Dspg3 (NM_007884.2,640-658).
cgatctgacatcaaattta

SEQ ID NO: 694986 - DNA, 19 bp, Mus musculus
  siRNA target sequence for Dspg3 (NM_007884.2,709-727).
gctggttctgcgtgacaat

SEQ ID NO: 694987 - DNA, 19 bp, Mus musculus
  siRNA target sequence for Dspg3 (NM_007884.2,710-728).
ctggttctgcgtgacaata

SEQ ID NO: 694988 - DNA, 19 bp, Mus musculus
  siRNA target sequence for Dspg3 (NM_007884.2,713-731).
gttctgcgtgacaataaga

SEQ ID NO: 694989 - DNA, 19 bp, Mus musculus
  siRNA target sequence for Dspg3 (NM_007884.2,743-761).
ccagaattgccaaacactt

SEQ ID NO: 694990 - DNA, 19 bp, Mus musculus
  siRNA target sequence for Dspg3 (NM_007884.2,744-762).
cagaattgccaaacacttt

SEQ ID NO: 694991 - DNA, 19 bp, Mus musculus
  siRNA target sequence for Dspg3 (NM_007884.2,836-854).
gatctccaccatctctata

SEQ ID NO: 694992 - DNA, 19 bp, Mus musculus
  siRNA target sequence for Dspg3 (NM_007884.2,848-866).
ctctatatcaccgataaca

SEQ ID NO: 694993 - DNA, 19 bp, Mus musculus
  siRNA target sequence for Dspg3 (NM_007884.2,914-932).
cacctccagaataatgaca

SEQ ID NO: 694994 - DNA, 19 bp, Mus musculus
  siRNA target sequence for Dspg3 (NM_007884.2,937-955).
ggagatgcatgaagatact

SEQ ID NO: 694995 - DNA, 19 bp, Mus musculus
  siRNA target sequence for Dspg3 (NM_007884.2,938-956).
gagatgcatgaagatactt

SEQ ID NO: 694996 - DNA, 19 bp, Mus musculus
  siRNA target sequence for Dspg3 (NM_007884.2,987-1005).
gtaaggcattagaggatat

SEQ ID NO: 694997 - DNA, 19 bp, Mus musculus
  siRNA target sequence for Dspp (NM_010080.1,194-212).
ctgtgcctcttctaacaca

SEQ ID NO: 694998 - DNA, 19 bp, Mus musculus
  siRNA target sequence for Dspp (NM_010080.1,223-241).
gcagcacagaatgagttat

SEQ ID NO: 694999 - DNA, 19 bp, Mus musculus
  siRNA target sequence for Dspp (NM_010080.1,226-244).
gcacagaatgagttatcta

SEQ ID NO: 695000 - DNA, 19 bp, Mus musculus
  siRNA target sequence for Dspp (NM_010080.1,227-245).
cacagaatgagttatctat

SEQ ID NO: 695001 - DNA, 19 bp, Mus musculus
  siRNA target sequence for Dspp (NM_010080.1,312-330).
cgaggatggttacaaaaga

SEQ ID NO: 695002 - DNA, 19 bp, Mus musculus
  siRNA target sequence for Dspp (NM_010080.1,335-353).
ggaatggctccgagtcaat

SEQ ID NO: 695003 - DNA, 19 bp, Mus musculus
  siRNA target sequence for Dspp (NM_010080.1,336-354).
gaatggctccgagtcaata

SEQ ID NO: 695004 - DNA, 19 bp, Mus musculus
  siRNA target sequence for Dspp (NM_010080.1,341-359).
gctccgagtcaatacatgt

SEQ ID NO: 695005 - DNA, 19 bp, Mus musculus
  siRNA target sequence for Dspp (NM_010080.1,342-360).
ctccgagtcaatacatgta

SEQ ID NO: 695006 - DNA, 19 bp, Mus musculus
  siRNA target sequence for Dspp (NM_010080.1,380-398).
ctcagcccattttagtaaa

SEQ ID NO: 695007 - DNA, 19 bp, Mus musculus
  siRNA target sequence for Dspp (NM_010080.1,384-402).
gcccattttagtaaacgaa

SEQ ID NO: 695008 - DNA, 19 bp, Mus musculus
  siRNA target sequence for Dspp (NM_010080.1,502-520).
caggtaggcatcgttgaaa

SEQ ID NO: 695009 - DNA, 19 bp, Mus musculus
  siRNA target sequence for Dspp (NM_010080.1,504-522).
ggtaggcatcgttgaaaat

SEQ ID NO: 695010 - DNA, 19 bp, Mus musculus
  siRNA target sequence for Dspp (NM_010080.1,555-573).
ggctggtcagaatacaaaa

SEQ ID NO: 695011 - DNA, 19 bp, Mus musculus
  siRNA target sequence for Dspp (NM_010080.1,556-574).
gctggtcagaatacaaaat

SEQ ID NO: 695012 - DNA, 19 bp, Mus musculus
  siRNA target sequence for Dspp (NM_010080.1,611-629).
cgacccttgtccaggaaaa

SEQ ID NO: 695013 - DNA, 19 bp, Mus musculus
  siRNA target sequence for Dspp (NM_010080.1,640-658).
gaagctagcatcaagaata

SEQ ID NO: 695014 - DNA, 19 bp, Mus musculus
  siRNA target sequence for Dspp (NM_010080.1,687-705).
gagtggggttgctacacat

SEQ ID NO: 695015 - DNA, 19 bp, Mus musculus
  siRNA target sequence for Dspp (NM_010080.1,691-709).
ggggttgctacacatgaaa

SEQ ID NO: 695016 - DNA, 19 bp, Mus musculus
  siRNA target sequence for Dspp (NM_010080.1,1035-1053).
ggaaaacggtgttgaagaa

SEQ ID NO: 695017 - DNA, 19 bp, Mus musculus
  siRNA target sequence for Dspp (NM_010080.1,1157-1175).
ggaagagccaaggaataga

SEQ ID NO: 695018 - DNA, 19 bp, Mus musculus
  siRNA target sequence for Dspp (NM_010080.1,1191-1209).
caaaggcaacaaaagtatt

SEQ ID NO: 695019 - DNA, 19 bp, Mus musculus
  siRNA target sequence for Dspp (NM_010080.1,1200-1218).
caaaagtattattaccaaa

SEQ ID NO: 695020 - DNA, 19 bp, Mus musculus
  siRNA target sequence for Dspp (NM_010080.1,1235-1253).
gtggaagtaaagatagcaa

SEQ ID NO: 695021 - DNA, 19 bp, Mus musculus
  siRNA target sequence for Dspp (NM_010080.1,1388-1406).
gtgatgggcatgacagtta

SEQ ID NO: 695022 - DNA, 19 bp, Mus musculus
  siRNA target sequence for Dspp (NM_010080.1,1422-1440).
gtccatgcaaggagatgat

SEQ ID NO: 695023 - DNA, 19 bp, Mus musculus
  siRNA target sequence for Dspp (NM_010080.1,1471-1489).
gacgaaagtgacactaact

SEQ ID NO: 695024 - DNA, 19 bp, Mus musculus
  siRNA target sequence for Dspp (NM_010080.1,1473-1491).
cgaaagtgacactaactct

SEQ ID NO: 695025 - DNA, 19 bp, Mus musculus
  siRNA target sequence for Dspp (NM_010080.1,1516-1534).
cgtggagatgcttcttaca

SEQ ID NO: 695026 - DNA, 19 bp, Mus musculus
  siRNA target sequence for Dspp (NM_010080.1,1519-1537).
ggagatgcttcttacacat

SEQ ID NO: 695027 - DNA, 19 bp, Mus musculus
  siRNA target sequence for Dspp (NM_010080.1,2865-2883).
ccactcaaccagtgatgat

SEQ ID NO: 695028 - DNA, 19 bp, Mus musculus
  siRNA target sequence for Fmod (NM_021355.2,124-142).
cccagggccagtatgatga

SEQ ID NO: 695029 - DNA, 19 bp, Mus musculus
  siRNA target sequence for Fmod (NM_021355.2,297-315).
cgtgattgtccccaagaat

SEQ ID NO: 695030 - DNA, 19 bp, Mus musculus
  siRNA target sequence for Fmod (NM_021355.2,394-412).
gcatgaagtacgtctactt

SEQ ID NO: 695031 - DNA, 19 bp, Mus musculus
  siRNA target sequence for Fmod (NM_021355.2,470-488).
cctctgggtcgctctacat

SEQ ID NO: 695032 - DNA, 19 bp, Mus musculus
  siRNA target sequence for Fmod (NM_021355.2,483-501).
ctacatggcaaccagatta

SEQ ID NO: 695033 - DNA, 19 bp, Mus musculus
  siRNA target sequence for Fmod (NM_021355.2,641-659).
ctcacgggtccccaacaat

SEQ ID NO: 695034 - DNA, 19 bp, Mus musculus
  siRNA target sequence for Fmod (NM_021355.2,645-663).
cgggtccccaacaatgctt

SEQ ID NO: 695035 - DNA, 19 bp, Mus musculus
  siRNA target sequence for Fmod (NM_021355.2,646-664).
gggtccccaacaatgcttt

SEQ ID NO: 695036 - DNA, 19 bp, Mus musculus
  siRNA target sequence for Fmod (NM_021355.2,677-695).
gaacctcacggccttatat

SEQ ID NO: 695037 - DNA, 19 bp, Mus musculus
  siRNA target sequence for Fmod (NM_021355.2,745-763).
ggtccctgatcctactaga

SEQ ID NO: 695038 - DNA, 19 bp, Mus musculus
  siRNA target sequence for Fmod (NM_021355.2,755-773).
cctactagacctgagttat

SEQ ID NO: 695039 - DNA, 19 bp, Mus musculus
  siRNA target sequence for Fmod (NM_021355.2,824-842).
gtacctagaacacaacaat

SEQ ID NO: 695040 - DNA, 19 bp, Mus musculus
  siRNA target sequence for Fmod (NM_021355.2,906-924).
cacaacagtctcactaaca

SEQ ID NO: 695041 - DNA, 19 bp, Mus musculus
  siRNA target sequence for Fmod (NM_021355.2,958-976).
gccttcttgagctagactt

SEQ ID NO: 695042 - DNA, 19 bp, Mus musculus
  siRNA target sequence for Fmod (NM_021355.2,1042-1060).
gcaacaggatcaatgagtt

SEQ ID NO: 695043 - DNA, 19 bp, Mus musculus
  siRNA target sequence for Fmod (NM_021355.2,1081-1099).
cggtggtggacgtcatgaa

SEQ ID NO: 695044 - DNA, 19 bp, Mus musculus
  siRNA target sequence for Gpc2 (NM_172412.1,252-270).
gatatagcttaaacctaat

SEQ ID NO: 695045 - DNA, 19 bp, Mus musculus
  siRNA target sequence for Gpc2 (NM_172412.1,288-306).
caggtgagcaccttcaagt

SEQ ID NO: 695046 - DNA, 19 bp, Mus musculus
  siRNA target sequence for Gpc2 (NM_172412.1,360-378).
gggatgctgaagtcacatt

SEQ ID NO: 695047 - DNA, 19 bp, Mus musculus
  siRNA target sequence for Gpc2 (NM_172412.1,432-450).
ggcatagaaagtttaatga

SEQ ID NO: 695048 - DNA, 19 bp, Mus musculus
  siRNA target sequence for Gpc2 (NM_172412.1,496-514).
gctcttctcgcattcctat

SEQ ID NO: 695049 - DNA, 19 bp, Mus musculus
  siRNA target sequence for Gpc2 (NM_172412.1,528-546).
cccagcacgccgtcatctt

SEQ ID NO: 695050 - DNA, 19 bp, Mus musculus
  siRNA target sequence for Gpc2 (NM_172412.1,530-548).
cagcacgccgtcatcttca

SEQ ID NO: 695051 - DNA, 19 bp, Mus musculus
  siRNA target sequence for Gpc2 (NM_172412.1,532-550).
gcacgccgtcatcttcaat

SEQ ID NO: 695052 - DNA, 19 bp, Mus musculus
  siRNA target sequence for Gpc2 (NM_172412.1,561-579).
ccggcctgcgggactacta

SEQ ID NO: 695053 - DNA, 19 bp, Mus musculus
  siRNA target sequence for Gpc2 (NM_172412.1,562-580).
cggcctgcgggactactat

SEQ ID NO: 695054 - DNA, 19 bp, Mus musculus
  siRNA target sequence for Gpc2 (NM_172412.1,564-582).
gcctgcgggactactatga

SEQ ID NO: 695055 - DNA, 19 bp, Mus musculus
  siRNA target sequence for Gpc2 (NM_172412.1,586-604).
gtctggcgaggggttagat

SEQ ID NO: 695056 - DNA, 19 bp, Mus musculus
  siRNA target sequence for Gpc2 (NM_172412.1,651-669).
ctttgctgcacccacaata

SEQ ID NO: 695057 - DNA, 19 bp, Mus musculus
  siRNA target sequence for Gpc2 (NM_172412.1,656-674).
ctgcacccacaatacagtt

SEQ ID NO: 695058 - DNA, 19 bp, Mus musculus
  siRNA target sequence for Gpc2 (NM_172412.1,758-776).
cgcctccgcctacagatat

SEQ ID NO: 695059 - DNA, 19 bp, Mus musculus
  siRNA target sequence for Gpc2 (NM_172412.1,761-779).
ctccgcctacagatatcca

SEQ ID NO: 695060 - DNA, 19 bp, Mus musculus
  siRNA target sequence for Gpc2 (NM_172412.1,838-856).
cagcgaagcacttaaggta

SEQ ID NO: 695061 - DNA, 19 bp, Mus musculus
  siRNA target sequence for Gpc2 (NM_172412.1,914-932).
cggggagttccttcactta

SEQ ID NO: 695062 - DNA, 19 bp, Mus musculus
  siRNA target sequence for Gpc2 (NM_172412.1,915-933).
ggggagttccttcacttat

SEQ ID NO: 695063 - DNA, 19 bp, Mus musculus
  siRNA target sequence for Gpc2 (NM_172412.1,1478-1496).
cacaacccggagttggata

SEQ ID NO: 695064 - DNA, 19 bp, Mus musculus
  siRNA target sequence for Kera (NM_008438.1,188-206).
ggcaaccccaaactgttta

SEQ ID NO: 695065 - DNA, 19 bp, Mus musculus
  siRNA target sequence for Kera (NM_008438.1,195-213).
ccaaactgtttaatactct

SEQ ID NO: 695066 - DNA, 19 bp, Mus musculus
  siRNA target sequence for Kera (NM_008438.1,252-270).
gtgagacaggcctatgaaa

SEQ ID NO: 695067 - DNA, 19 bp, Mus musculus
  siRNA target sequence for Kera (NM_008438.1,256-274).
gacaggcctatgaaataca

SEQ ID NO: 695068 - DNA, 19 bp, Mus musculus
  siRNA target sequence for Kera (NM_008438.1,294-312).
gtccacgacgacttctatt

SEQ ID NO: 695069 - DNA, 19 bp, Mus musculus
  siRNA target sequence for Kera (NM_008438.1,296-314).
ccacgacgacttctattgt

SEQ ID NO: 695070 - DNA, 19 bp, Mus musculus
  siRNA target sequence for Kera (NM_008438.1,484-502).
ggatcaatttaaacaagaa

SEQ ID NO: 695071 - DNA, 19 bp, Mus musculus
  siRNA target sequence for Kera (NM_008438.1,610-628).
caagaagtttggaacaatt

SEQ ID NO: 695072 - DNA, 19 bp, Mus musculus
  siRNA target sequence for Kera (NM_008438.1,613-631).
gaagtttggaacaattaca

SEQ ID NO: 695073 - DNA, 19 bp, Mus musculus
  siRNA target sequence for Kera (NM_008438.1,616-634).
gtttggaacaattacaatt

SEQ ID NO: 695074 - DNA, 19 bp, Mus musculus
  siRNA target sequence for Kera (NM_008438.1,707-725).
gcagcataacaaactatta

SEQ ID NO: 695075 - DNA, 19 bp, Mus musculus
  siRNA target sequence for Kera (NM_008438.1,711-729).
cataacaaactattagaca

SEQ ID NO: 695076 - DNA, 19 bp, Mus musculus
  siRNA target sequence for Kera (NM_008438.1,731-749).
cgcctttcaaagagatact

SEQ ID NO: 695077 - DNA, 19 bp, Mus musculus
  siRNA target sequence for Kera (NM_008438.1,733-751).
cctttcaaagagatacttt

SEQ ID NO: 695078 - DNA, 19 bp, Mus musculus
  siRNA target sequence for Kera (NM_008438.1,764-782).
gaacctcatgcagttaaat

SEQ ID NO: 695079 - DNA, 19 bp, Mus musculus
  siRNA target sequence for Kera (NM_008438.1,776-794).
gttaaatatggcgaagaat

SEQ ID NO: 695080 - DNA, 19 bp, Mus musculus
  siRNA target sequence for Kera (NM_008438.1,803-821).
gaacatgcccccaagatta

SEQ ID NO: 695081 - DNA, 19 bp, Mus musculus
  siRNA target sequence for Kera (NM_008438.1,806-824).
catgcccccaagattacca

SEQ ID NO: 695082 - DNA, 19 bp, Mus musculus
  siRNA target sequence for Kera (NM_008438.1,840-858).
ctctttctagacaacaact

SEQ ID NO: 695083 - DNA, 19 bp, Mus musculus
  siRNA target sequence for Kera (NM_008438.1,916-934).
ggctcaaccacaacaaact

SEQ ID NO: 695084 - DNA, 19 bp, Mus musculus
  siRNA target sequence for Kera (NM_008438.1,950-968).
cccgtcgaggggttttgat

SEQ ID NO: 695085 - DNA, 19 bp, Mus musculus
  siRNA target sequence for Kera (NM_008438.1,952-970).
cgtcgaggggttttgatgt

SEQ ID NO: 695086 - DNA, 19 bp, Mus musculus
  siRNA target sequence for Kera (NM_008438.1,976-994).
ccattctggatcttcaact

SEQ ID NO: 695087 - DNA, 19 bp, Mus musculus
  siRNA target sequence for Kera (NM_008438.1,984-1002).
gatcttcaactgtcttaca

SEQ ID NO: 695088 - DNA, 19 bp, Mus musculus
  siRNA target sequence for Kera (NM_008438.1,1001-1019).
caaccagctcacaaacttt

SEQ ID NO: 695089 - DNA, 19 bp, Mus musculus
  siRNA target sequence for Kera (NM_008438.1,1012-1030).
caaactttccccgaatcaa

SEQ ID NO: 695090 - DNA, 19 bp, Mus musculus
  siRNA target sequence for Kera (NM_008438.1,1053-1071).
cttgatcacaacaaaatta

SEQ ID NO: 695091 - DNA, 19 bp, Mus musculus
  siRNA target sequence for Kera (NM_008438.1,1077-1095).
gtgaacatgtctgtaatat

SEQ ID NO: 695092 - DNA, 19 bp, Mus musculus
  siRNA target sequence for Kera (NM_008438.1,1157-1175).
gcgtctggatgggaatgaa

SEQ ID NO: 695093 - DNA, 19 bp, Mus musculus
  siRNA target sequence for Kera (NM_008438.1,1158-1176).
cgtctggatgggaatgaaa

SEQ ID NO: 695094 - DNA, 19 bp, Mus musculus
  siRNA target sequence for Kera (NM_008438.1,1181-1199).
gccaccgatcccgatagat

SEQ ID NO: 695095 - DNA, 19 bp, Mus musculus
  siRNA target sequence for Kera (NM_008438.1,1182-1200).
ccaccgatcccgatagatt

SEQ ID NO: 695096 - DNA, 19 bp, Mus musculus
  siRNA target sequence for Kera (NM_008438.1,1183-1201).
caccgatcccgatagattt

SEQ ID NO: 695097 - DNA, 19 bp, Mus musculus
  siRNA target sequence for Kera (NM_008438.1,1186-1204).
cgatcccgatagatttggt

SEQ ID NO: 695098 - DNA, 19 bp, Mus musculus
  siRNA target sequence for Lum (NM_008524.1,107-125).
ctcttgccttggcattagt

SEQ ID NO: 695099 - DNA, 19 bp, Mus musculus
  siRNA target sequence for Lum (NM_008524.1,131-149).
gtgtcagtggccaatacta

SEQ ID NO: 695100 - DNA, 19 bp, Mus musculus
  siRNA target sequence for Lum (NM_008524.1,137-155).
gtggccaatactacgatta

SEQ ID NO: 695101 - DNA, 19 bp, Mus musculus
  siRNA target sequence for Lum (NM_008524.1,140-158).
gccaatactacgattatga

SEQ ID NO: 695102 - DNA, 19 bp, Mus musculus
  siRNA target sequence for Lum (NM_008524.1,159-177).
catccctctcttcatgtat

SEQ ID NO: 695103 - DNA, 19 bp, Mus musculus
  siRNA target sequence for Lum (NM_008524.1,171-189).
catgtatgggcaaatatca

SEQ ID NO: 695104 - DNA, 19 bp, Mus musculus
  siRNA target sequence for Lum (NM_008524.1,192-210).
caactgtgcaccagaatgt

SEQ ID NO: 695105 - DNA, 19 bp, Mus musculus
  siRNA target sequence for Lum (NM_008524.1,448-466).
ctgcatataaactacaaca

SEQ ID NO: 695106 - DNA, 19 bp, Mus musculus
  siRNA target sequence for Lum (NM_008524.1,479-497).
ccgtcggtccacttccaaa

SEQ ID NO: 695107 - DNA, 19 bp, Mus musculus
  siRNA target sequence for Lum (NM_008524.1,508-526).
gacctacagctgaccaata

SEQ ID NO: 695108 - DNA, 19 bp, Mus musculus
  siRNA target sequence for Lum (NM_008524.1,510-528).
cctacagctgaccaataat

SEQ ID NO: 695109 - DNA, 19 bp, Mus musculus
  siRNA target sequence for Lum (NM_008524.1,511-529).
ctacagctgaccaataata

SEQ ID NO: 695110 - DNA, 19 bp, Mus musculus
  siRNA target sequence for Lum (NM_008524.1,553-571).
gacgggctggtcaacttga

SEQ ID NO: 695111 - DNA, 19 bp, Mus musculus
  siRNA target sequence for Lum (NM_008524.1,561-579).
ggtcaacttgaccttcatt

SEQ ID NO: 695112 - DNA, 19 bp, Mus musculus
  siRNA target sequence for Lum (NM_008524.1,564-582).
caacttgaccttcatttat

SEQ ID NO: 695113 - DNA, 19 bp, Mus musculus
  siRNA target sequence for Lum (NM_008524.1,627-645).
gaaaggtctcaaatcacta

SEQ ID NO: 695114 - DNA, 19 bp, Mus musculus
  siRNA target sequence for Lum (NM_008524.1,655-673).
gatttgagcttcaatcaga

SEQ ID NO: 695115 - DNA, 19 bp, Mus musculus
  siRNA target sequence for Lum (NM_008524.1,694-712).
ctacctacatctcttctaa

SEQ ID NO: 695116 - DNA, 19 bp, Mus musculus
  siRNA target sequence for Lum (NM_008524.1,715-733).
ctctacctagacaataata

SEQ ID NO: 695117 - DNA, 19 bp, Mus musculus
  siRNA target sequence for Lum (NM_008524.1,721-739).
ctagacaataataagatca

SEQ ID NO: 695118 - DNA, 19 bp, Mus musculus
  siRNA target sequence for Lum (NM_008524.1,740-758).
gcaacattccggatgagta

SEQ ID NO: 695119 - DNA, 19 bp, Mus musculus
  siRNA target sequence for Lum (NM_008524.1,786-804).
cctgcgtttatctcacaat

SEQ ID NO: 695120 - DNA, 19 bp, Mus musculus
  siRNA target sequence for Lum (NM_008524.1,823-841).
gtacctggaaactcgttta

SEQ ID NO: 695121 - DNA, 19 bp, Mus musculus
  siRNA target sequence for Lum (NM_008524.1,826-844).
cctggaaactcgtttaata

SEQ ID NO: 695122 - DNA, 19 bp, Mus musculus
  siRNA target sequence for Lum (NM_008524.1,827-845).
ctggaaactcgtttaatat

SEQ ID NO: 695123 - DNA, 19 bp, Mus musculus
  siRNA target sequence for Lum (NM_008524.1,868-886).
ctctcctataataagctta

SEQ ID NO: 695124 - DNA, 19 bp, Mus musculus
  siRNA target sequence for Lum (NM_008524.1,888-906).
gagtataccaacagttaat

SEQ ID NO: 695125 - DNA, 19 bp, Mus musculus
  siRNA target sequence for Lum (NM_008524.1,890-908).
gtataccaacagttaatga

SEQ ID NO: 695126 - DNA, 19 bp, Mus musculus
  siRNA target sequence for Lum (NM_008524.1,899-917).
cagttaatgaaaatcttga

SEQ ID NO: 695127 - DNA, 19 bp, Mus musculus
  siRNA target sequence for Lum (NM_008524.1,930-948).
ggaggtcaatgaacttgaa

SEQ ID NO: 695128 - DNA, 19 bp, Mus musculus
  siRNA target sequence for Lum (NM_008524.1,988-1006).
ctgtcttactccaagatca

SEQ ID NO: 695129 - DNA, 19 bp, Mus musculus
  siRNA target sequence for Lum (NM_008524.1,1070-1088).
gtctacgtgtagcaaatga

SEQ ID NO: 695130 - DNA, 19 bp, Mus musculus
  siRNA target sequence for Lum (NM_008524.1,1075-1093).
cgtgtagcaaatgaaatca

SEQ ID NO: 695131 - DNA, 19 bp, Mus musculus
  siRNA target sequence for Optc (NM_054076.1,410-428).
cttacgcgtccctgtatgt

SEQ ID NO: 695132 - DNA, 19 bp, Mus musculus
  siRNA target sequence for Optc (NM_054076.1,421-439).
ctgtatgtggggaaccata

SEQ ID NO: 695133 - DNA, 19 bp, Mus musculus
  siRNA target sequence for Optc (NM_054076.1,468-486).
cattgatctcagcaactat

SEQ ID NO: 695134 - DNA, 19 bp, Mus musculus
  siRNA target sequence for Optc (NM_054076.1,511-529).
cagatccctgaggctaaaa

SEQ ID NO: 695135 - DNA, 19 bp, Mus musculus
  siRNA target sequence for Optc (NM_054076.1,540-558).
gactcttccaacaagaact

SEQ ID NO: 695136 - DNA, 19 bp, Mus musculus
  siRNA target sequence for Optc (NM_054076.1,620-638).
ccaccactggcctactaaa

SEQ ID NO: 695137 - DNA, 19 bp, Mus musculus
  siRNA target sequence for Prelp (NM_054077.2,204-222).
ccaaccgacaagaccaaaa

SEQ ID NO: 695138 - DNA, 19 bp, Mus musculus
  siRNA target sequence for Prelp (NM_054077.2,431-449).
caccccgaatccattacct

SEQ ID NO: 695139 - DNA, 19 bp, Mus musculus
  siRNA target sequence for Prelp (NM_054077.2,433-451).
ccccgaatccattaccttt

SEQ ID NO: 695140 - DNA, 19 bp, Mus musculus
  siRNA target sequence for Prelp (NM_054077.2,436-454).
cgaatccattacctttact

SEQ ID NO: 695141 - DNA, 19 bp, Mus musculus
  siRNA target sequence for Prelp (NM_054077.2,437-455).
gaatccattacctttactt

SEQ ID NO: 695142 - DNA, 19 bp, Mus musculus
  siRNA target sequence for Prelp (NM_054077.2,942-960).
ccgcatgaactacaacaaa

SEQ ID NO: 695143 - DNA, 19 bp, Mus musculus
  siRNA target sequence for Prelp (NM_054077.2,1074-1092).
cctgtacctcaacaacaat

SEQ ID NO: 695144 - DNA, 19 bp, Mus musculus
  siRNA target sequence for Spock1 (NM_009262.1,228-246).
ccctcaacaacgccaattt

SEQ ID NO: 695145 - DNA, 19 bp, Mus musculus
  siRNA target sequence for Spock1 (NM_009262.1,238-256).
cgccaatttcctagacaat

SEQ ID NO: 695146 - DNA, 19 bp, Mus musculus
  siRNA target sequence for Spock1 (NM_009262.1,309-327).
gcttccgagatgaagttga

SEQ ID NO: 695147 - DNA, 19 bp, Mus musculus
  siRNA target sequence for Spock1 (NM_009262.1,323-341).
gttgaggatgactatttca

SEQ ID NO: 695148 - DNA, 19 bp, Mus musculus
  siRNA target sequence for Spock1 (NM_009262.1,415-433).
cagcccgcacaaagtatgt

SEQ ID NO: 695149 - DNA, 19 bp, Mus musculus
  siRNA target sequence for Spock1 (NM_009262.1,417-435).
gcccgcacaaagtatgtgt

SEQ ID NO: 695150 - DNA, 19 bp, Mus musculus
  siRNA target sequence for Spock1 (NM_009262.1,528-546).
gaccttccaatctggttaa

SEQ ID NO: 695151 - DNA, 19 bp, Mus musculus
  siRNA target sequence for Spock1 (NM_009262.1,530-548).
ccttccaatctggttaagt

SEQ ID NO: 695152 - DNA, 19 bp, Mus musculus
  siRNA target sequence for Spock1 (NM_009262.1,625-643).
ggaattccacgcttgttct

SEQ ID NO: 695153 - DNA, 19 bp, Mus musculus
  siRNA target sequence for Spock1 (NM_009262.1,626-644).
gaattccacgcttgttcta

SEQ ID NO: 695154 - DNA, 19 bp, Mus musculus
  siRNA target sequence for Spock1 (NM_009262.1,778-796).
ctggttcggggctcttcat

SEQ ID NO: 695155 - DNA, 19 bp, Mus musculus
  siRNA target sequence for Spock1 (NM_009262.1,780-798).
ggttcggggctcttcatga

SEQ ID NO: 695156 - DNA, 19 bp, Mus musculus
  siRNA target sequence for Spock1 (NM_009262.1,890-908).
ggttggatgttcaacaagt

SEQ ID NO: 695157 - DNA, 19 bp, Mus musculus
  siRNA target sequence for Spock1 (NM_009262.1,891-909).
gttggatgttcaacaagtt

SEQ ID NO: 695158 - DNA, 19 bp, Mus musculus
  siRNA target sequence for Spock1 (NM_009262.1,904-922).
caagttggacatgaactat

SEQ ID NO: 695159 - DNA, 19 bp, Mus musculus
  siRNA target sequence for Spock1 (NM_009262.1,1021-1039).
cggcaaactctccaacaat

SEQ ID NO: 695160 - DNA, 19 bp, Mus musculus
  siRNA target sequence for Spock1 (NM_009262.1,1204-1222).
gtgctggtgtgtggataaa

SEQ ID NO: 695161 - DNA, 19 bp, Mus musculus
  siRNA target sequence for Spock1 (NM_009262.1,1398-1416).
ccgtgcgggaagatgatga

SEQ ID NO: 695162 - DNA, 19 bp, Mus musculus
  siRNA target sequence for 1700038F02Rik (NM_026092.1,155-173).
ggtgtcttcgccctaatta

SEQ ID NO: 695163 - DNA, 19 bp, Mus musculus
  siRNA target sequence for 1700038F02Rik (NM_026092.1,158-176).
gtcttcgccctaattatca

SEQ ID NO: 695164 - DNA, 19 bp, Mus musculus
  siRNA target sequence for 1700038F02Rik (NM_026092.1,183-201).
gcatagtcgcagaatccaa

SEQ ID NO: 695165 - DNA, 19 bp, Mus musculus
  siRNA target sequence for 1700038F02Rik (NM_026092.1,184-202).
catagtcgcagaatccaaa

SEQ ID NO: 695166 - DNA, 19 bp, Mus musculus
  siRNA target sequence for 1700038F02Rik (NM_026092.1,191-209).
gcagaatccaaaatctaca

SEQ ID NO: 695167 - DNA, 19 bp, Mus musculus
  siRNA target sequence for 1700038F02Rik (NM_026092.1,212-230).
cgatgtaaactggcaaaaa

SEQ ID NO: 695168 - DNA, 19 bp, Mus musculus
  siRNA target sequence for 1700038F02Rik (NM_026092.1,216-234).
gtaaactggcaaaaatctt

SEQ ID NO: 695169 - DNA, 19 bp, Mus musculus
  siRNA target sequence for 1700038F02Rik (NM_026092.1,282-300).
ggctctgcatggcatacta

SEQ ID NO: 695170 - DNA, 19 bp, Mus musculus
  siRNA target sequence for 1700038F02Rik (NM_026092.1,283-301).
gctctgcatggcatactat

SEQ ID NO: 695171 - DNA, 19 bp, Mus musculus
  siRNA target sequence for 1700038F02Rik (NM_026092.1,340-358).
ggatggaagcactgactat

SEQ ID NO: 695172 - DNA, 19 bp, Mus musculus
  siRNA target sequence for 1700038F02Rik (NM_026092.1,497-515).
gagacacaagggatgaact

SEQ ID NO: 695173 - DNA, 19 bp, Mus musculus
  siRNA target sequence for 1810009N24Rik (NM_026915.2,447-465).
gctgcacagtggctaagat

SEQ ID NO: 695174 - DNA, 19 bp, Mus musculus
  siRNA target sequence for 1810009N24Rik (NM_026915.2,457-475).
ggctaagatgctctatgat

SEQ ID NO: 695175 - DNA, 19 bp, Mus musculus
  siRNA target sequence for 1810009N24Rik (NM_026915.2,473-491).
gatgggggcttgaattatt

SEQ ID NO: 695176 - DNA, 19 bp, Mus musculus
  siRNA target sequence for 1810009N24Rik (NM_026915.2,547-565).
caacccctcagctgtctat

SEQ ID NO: 695177 - DNA, 19 bp, Mus musculus
  siRNA target sequence for 1810009N24Rik (NM_026915.2,590-608).
ggtttcggcctctttcaga

SEQ ID NO: 695178 - DNA, 19 bp, Mus musculus
  siRNA target sequence for 1810009N24Rik (NM_026915.2,591-609).
gtttcggcctctttcagat

SEQ ID NO: 695179 - DNA, 19 bp, Mus musculus
  siRNA target sequence for 1810009N24Rik (NM_026915.2,657-675).
cctgcactgctttactgaa

SEQ ID NO: 695180 - DNA, 19 bp, Mus musculus
  siRNA target sequence for 1810009N24Rik (NM_026915.2,658-676).
ctgcactgctttactgaat

SEQ ID NO: 695181 - DNA, 19 bp, Mus musculus
  siRNA target sequence for 1810009N24Rik (NM_026915.2,666-684).
ctttactgaatccaaactt

SEQ ID NO: 695182 - DNA, 19 bp, Mus musculus
  siRNA target sequence for 1810009N24Rik (NM_026915.2,678-696).
caaacttaaaggatacgat

SEQ ID NO: 695183 - DNA, 19 bp, Mus musculus
  siRNA target sequence for 1810049K24Rik (NM_030209.1,476-494).
gcagcgtgggcacatagat

SEQ ID NO: 695184 - DNA, 19 bp, Mus musculus
  siRNA target sequence for 1810049K24Rik (NM_030209.1,602-620).
gacgaggtgaaggattaca

SEQ ID NO: 695185 - DNA, 19 bp, Mus musculus
  siRNA target sequence for 1810049K24Rik (NM_030209.1,737-755).
cacacctgtcggaacatga

SEQ ID NO: 695186 - DNA, 19 bp, Mus musculus
  siRNA target sequence for 1810049K24Rik (NM_030209.1,787-805).
gtatctcgtctgcaattat

SEQ ID NO: 695187 - DNA, 19 bp, Mus musculus
  siRNA target sequence for 1810049K24Rik (NM_030209.1,887-905).
ggctgcctgaacaatcttt

SEQ ID NO: 695188 - DNA, 19 bp, Mus musculus
  siRNA target sequence for 1810049K24Rik (NM_030209.1,914-932).
gaaaagcctcacaagcata

SEQ ID NO: 695189 - DNA, 19 bp, Mus musculus
  siRNA target sequence for 1810049K24Rik (NM_030209.1,1163-1181).
ctgttttatgaaagttctt

SEQ ID NO: 695190 - DNA, 19 bp, Mus musculus
  siRNA target sequence for 1810049K24Rik (NM_030209.1,1172-1190).
gaaagttcttccagcatat

SEQ ID NO: 695191 - DNA, 19 bp, Mus musculus
  siRNA target sequence for 1810049K24Rik (NM_030209.1,1475-1493).
gtgtatggaaccaacatct

SEQ ID NO: 695192 - DNA, 19 bp, Mus musculus
  siRNA target sequence for 1810049K24Rik (NM_030209.1,1477-1495).
gtatggaaccaacatctat

SEQ ID NO: 695193 - DNA, 19 bp, Mus musculus
  siRNA target sequence for 1810049K24Rik (NM_030209.1,1571-1589).
gtgatgcccgtggacaaaa

SEQ ID NO: 695194 - DNA, 19 bp, Mus musculus
  siRNA target sequence for 2310005P21Rik (NM_030888.2,160-178).
ctgtgtcaagatgaataca

SEQ ID NO: 695195 - DNA, 19 bp, Mus musculus
  siRNA target sequence for 2310005P21Rik (NM_030888.2,208-226).
ccagactgcagcaagtgtt

SEQ ID NO: 695196 - DNA, 19 bp, Mus musculus
  siRNA target sequence for 2310005P21Rik (NM_030888.2,228-246).
ccatggagattatggattt

SEQ ID NO: 695197 - DNA, 19 bp, Mus musculus
  siRNA target sequence for 2310005P21Rik (NM_030888.2,476-494).
ctcacttcagcaatcagaa

SEQ ID NO: 695198 - DNA, 19 bp, Mus musculus
  siRNA target sequence for 2310005P21Rik (NM_030888.2,513-531).
cagtgttgagaccaacatt

SEQ ID NO: 695199 - DNA, 19 bp, Mus musculus
  siRNA target sequence for 2310005P21Rik (NM_030888.2,524-542).
ccaacattggaaacttctt

SEQ ID NO: 695200 - DNA, 19 bp, Mus musculus
  siRNA target sequence for 2310005P21Rik (NM_030888.2,533-551).
gaaacttcttcgatgtcat

SEQ ID NO: 695201 - DNA, 19 bp, Mus musculus
  siRNA target sequence for 2310005P21Rik (NM_030888.2,572-590).
ccgtatcaggtgtgtattt

SEQ ID NO: 695202 - DNA, 19 bp, Mus musculus
  siRNA target sequence for 2310005P21Rik (NM_030888.2,618-636).
ggacgtagaggaagtgtat

SEQ ID NO: 695203 - DNA, 19 bp, Mus musculus
  siRNA target sequence for 2310005P21Rik (NM_030888.2,628-646).
gaagtgtatgtgtacctta

SEQ ID NO: 695204 - DNA, 19 bp, Mus musculus
  siRNA target sequence for 2310005P21Rik (NM_030888.2,672-690).
catgtacagctatgaaaca

SEQ ID NO: 695205 - DNA, 19 bp, Mus musculus
  siRNA target sequence for 2310005P21Rik (NM_030888.2,745-763).
gatgaagtctggctaagaa

SEQ ID NO: 695206 - DNA, 19 bp, Mus musculus
  siRNA target sequence for 2310005P21Rik (NM_030888.2,812-830).
caggctttctgctctttga

SEQ ID NO: 695207 - DNA, 19 bp, Mus musculus
  siRNA target sequence for 4921508O11Rik (NM_026223.1,55-73).
ggcgtgcccagtcgaatta

SEQ ID NO: 695208 - DNA, 19 bp, Mus musculus
  siRNA target sequence for 4921508O11Rik (NM_026223.1,58-76).
gtgcccagtcgaattacgt

SEQ ID NO: 695209 - DNA, 19 bp, Mus musculus
  siRNA target sequence for 4921508O11Rik (NM_026223.1,74-92).
cgtacggctaagaagagta

SEQ ID NO: 695210 - DNA, 19 bp, Mus musculus
  siRNA target sequence for 4921508O11Rik (NM_026223.1,142-160).
ccaaacttccgcttgaaga

SEQ ID NO: 695211 - DNA, 19 bp, Mus musculus
  siRNA target sequence for 4921508O11Rik (NM_026223.1,159-177).
gaggatgtagactttatca

SEQ ID NO: 695212 - DNA, 19 bp, Mus musculus
  siRNA target sequence for 4921508O11Rik (NM_026223.1,161-179).
ggatgtagactttatcaat

SEQ ID NO: 695213 - DNA, 19 bp, Mus musculus
  siRNA target sequence for 4921508O11Rik (NM_026223.1,165-183).
gtagactttatcaatgaat

SEQ ID NO: 695214 - DNA, 19 bp, Mus musculus
  siRNA target sequence for 4921508O11Rik (NM_026223.1,282-300).
gcatgggggaaaaaatgta

SEQ ID NO: 695215 - DNA, 19 bp, Mus musculus
  siRNA target sequence for 4921508O11Rik (NM_026223.1,302-320).
gtatagccgtaatactcat

SEQ ID NO: 695216 - DNA, 19 bp, Mus musculus
  siRNA target sequence for 4921508O11Rik (NM_026223.1,307-325).
gccgtaatactcatctaga

SEQ ID NO: 695217 - DNA, 19 bp, Mus musculus
  siRNA target sequence for 4921508O11Rik (NM_026223.1,321-339).
ctagacaaactccatgaat

SEQ ID NO: 695218 - DNA, 19 bp, Mus musculus
  siRNA target sequence for 4921508O11Rik (NM_026223.1,340-358).
cccatccagtatttactga

SEQ ID NO: 695219 - DNA, 19 bp, Mus musculus
  siRNA target sequence for 4921508O11Rik (NM_026223.1,341-359).
ccatccagtatttactgaa

SEQ ID NO: 695220 - DNA, 19 bp, Mus musculus
  siRNA target sequence for 4921508O11Rik (NM_026223.1,342-360).
catccagtatttactgaaa

SEQ ID NO: 695221 - DNA, 19 bp, Mus musculus
  siRNA target sequence for 4921508O11Rik (NM_026223.1,355-373).
ctgaaattggcgaaaacat

SEQ ID NO: 695222 - DNA, 19 bp, Mus musculus
  siRNA target sequence for 4921508O11Rik (NM_026223.1,357-375).
gaaattggcgaaaacatgt

SEQ ID NO: 695223 - DNA, 19 bp, Mus musculus
  siRNA target sequence for 4921508O11Rik (NM_026223.1,385-403).
ctgtagaggactttactgt

SEQ ID NO: 695224 - DNA, 19 bp, Mus musculus
  siRNA target sequence for 4921508O11Rik (NM_026223.1,387-405).
gtagaggactttactgtaa

SEQ ID NO: 695225 - DNA, 19 bp, Mus musculus
  siRNA target sequence for 4921508O11Rik (NM_026223.1,468-486).
gttgaggaccagaactgtt

SEQ ID NO: 695226 - DNA, 19 bp, Mus musculus
  siRNA target sequence for 4921508O11Rik (NM_026223.1,477-495).
cagaactgttctcattaca

SEQ ID NO: 695227 - DNA, 19 bp, Mus musculus
  siRNA target sequence for 4921508O11Rik (NM_026223.1,508-526).
gggacagttcctacaaagt

SEQ ID NO: 695228 - DNA, 19 bp, Mus musculus
  siRNA target sequence for 4921508O11Rik (NM_026223.1,568-586).
cacacgcagcacttttcat

SEQ ID NO: 695229 - DNA, 19 bp, Mus musculus
  siRNA target sequence for 4921508O11Rik (NM_026223.1,570-588).
cacgcagcacttttcatat

SEQ ID NO: 695230 - DNA, 19 bp, Mus musculus
  siRNA target sequence for 4921508O11Rik (NM_026223.1,573-591).
gcagcacttttcatatgca

SEQ ID NO: 695231 - DNA, 19 bp, Mus musculus
  siRNA target sequence for 4921508O11Rik (NM_026223.1,678-696).
gactacctatgcagtaaca

SEQ ID NO: 695232 - DNA, 19 bp, Mus musculus
  siRNA target sequence for 4921508O11Rik (NM_026223.1,680-698).
ctacctatgcagtaacaca

SEQ ID NO: 695233 - DNA, 19 bp, Mus musculus
  siRNA target sequence for 4921508O11Rik (NM_026223.1,703-721).
gtgatgaagctacatacta

SEQ ID NO: 695234 - DNA, 19 bp, Mus musculus
  siRNA target sequence for 4921508O11Rik (NM_026223.1,755-773).
cccagtcgtgtgtaatcca

SEQ ID NO: 695235 - DNA, 19 bp, Mus musculus
  siRNA target sequence for 4921508O11Rik (NM_026223.1,756-774).
ccagtcgtgtgtaatccaa

SEQ ID NO: 695236 - DNA, 19 bp, Mus musculus
  siRNA target sequence for 4921508O11Rik (NM_026223.1,757-775).
cagtcgtgtgtaatccaat

SEQ ID NO: 695237 - DNA, 19 bp, Mus musculus
  siRNA target sequence for 4921508O11Rik (NM_026223.1,772-790).
caatgtgcatatttatcct

SEQ ID NO: 695238 - DNA, 19 bp, Mus musculus
  siRNA target sequence for 4921508O11Rik (NM_026223.1,820-838).
gtgtcattgtcgttctgat

SEQ ID NO: 695239 - DNA, 19 bp, Mus musculus
  siRNA target sequence for 4921508O11Rik (NM_026223.1,848-866).
caggtttccagttatctta

SEQ ID NO: 695240 - DNA, 19 bp, Mus musculus
  siRNA target sequence for 4932416A11Rik (NM_147776.2,105-123).
cccagggggacctgttgtt

SEQ ID NO: 695241 - DNA, 19 bp, Mus musculus
  siRNA target sequence for 4932416A11Rik (NM_147776.2,141-159).
ccagcgtgtcacactatga

SEQ ID NO: 695242 - DNA, 19 bp, Mus musculus
  siRNA target sequence for 4932416A11Rik (NM_147776.2,144-162).
gcgtgtcacactatgagtt

SEQ ID NO: 695243 - DNA, 19 bp, Mus musculus
  siRNA target sequence for 4932416A11Rik (NM_147776.2,154-172).
ctatgagttctcaagagtt

SEQ ID NO: 695244 - DNA, 19 bp, Mus musculus
  siRNA target sequence for 4932416A11Rik (NM_147776.2,165-183).
caagagttcgggaatttgt

SEQ ID NO: 695245 - DNA, 19 bp, Mus musculus
  siRNA target sequence for 4932416A11Rik (NM_147776.2,191-209).
ctggtggctacgatgtctt

SEQ ID NO: 695246 - DNA, 19 bp, Mus musculus
  siRNA target sequence for 4932416A11Rik (NM_147776.2,318-336).
gtgttgcaccccaacgtat

SEQ ID NO: 695247 - DNA, 19 bp, Mus musculus
  siRNA target sequence for 4932416A11Rik (NM_147776.2,365-383).
gcttatgccaaagaacaat

SEQ ID NO: 695248 - DNA, 19 bp, Mus musculus
  siRNA target sequence for 4932416A11Rik (NM_147776.2,366-384).
cttatgccaaagaacaatt

SEQ ID NO: 695249 - DNA, 19 bp, Mus musculus
  siRNA target sequence for 4932416A11Rik (NM_147776.2,570-588).
ccgagaagcacctacactt

SEQ ID NO: 695250 - DNA, 19 bp, Mus musculus
  siRNA target sequence for 4932416A11Rik (NM_147776.2,723-741).
cagcggactctggttacta

SEQ ID NO: 695251 - DNA, 19 bp, Mus musculus
  siRNA target sequence for 4932416A11Rik (NM_147776.2,735-753).
gttactacgtgctggaatt

SEQ ID NO: 695252 - DNA, 19 bp, Mus musculus
  siRNA target sequence for 4932416A11Rik (NM_147776.2,739-757).
ctacgtgctggaattggta

SEQ ID NO: 695253 - DNA, 19 bp, Mus musculus
  siRNA target sequence for 4932416A11Rik (NM_147776.2,832-850).
cgacccggacacagactat

SEQ ID NO: 695254 - DNA, 19 bp, Mus musculus
  siRNA target sequence for 4932416A11Rik (NM_147776.2,837-855).
cggacacagactatgaagt

SEQ ID NO: 695255 - DNA, 19 bp, Mus musculus
  siRNA target sequence for 4932416A11Rik (NM_147776.2,841-859).
cacagactatgaagtatca

SEQ ID NO: 695256 - DNA, 19 bp, Mus musculus
  siRNA target sequence for 4932416A11Rik (NM_147776.2,843-861).
cagactatgaagtatcact

SEQ ID NO: 695257 - DNA, 19 bp, Mus musculus
  siRNA target sequence for 9530003J23Rik (NM_029906.1,38-56).
ccctaactctccttactct

SEQ ID NO: 695258 - DNA, 19 bp, Mus musculus
  siRNA target sequence for 9530003J23Rik (NM_029906.1,39-57).
cctaactctccttactcta

SEQ ID NO: 695259 - DNA, 19 bp, Mus musculus
  siRNA target sequence for 9530003J23Rik (NM_029906.1,93-111).
ggtctacgaccgatgttct

SEQ ID NO: 695260 - DNA, 19 bp, Mus musculus
  siRNA target sequence for 9530003J23Rik (NM_029906.1,184-202).
gccaaatgggagagtaatt

SEQ ID NO: 695261 - DNA, 19 bp, Mus musculus
  siRNA target sequence for 9530003J23Rik (NM_029906.1,245-263).
ccagctatgggatctttca

SEQ ID NO: 695262 - DNA, 19 bp, Mus musculus
  siRNA target sequence for 9530003J23Rik (NM_029906.1,390-408).
gaaggatccacaaggaatt

SEQ ID NO: 695263 - DNA, 19 bp, Mus musculus
  siRNA target sequence for 9530003J23Rik (NM_029906.1,397-415).
ccacaaggaatttattcat

SEQ ID NO: 695264 - DNA, 19 bp, Mus musculus
  siRNA target sequence for Cocoacrisp (NM_031402.1,472-490).
cagctatggtggttcctaa

SEQ ID NO: 695265 - DNA, 19 bp, Mus musculus
  siRNA target sequence for Cocoacrisp (NM_031402.1,640-658).
caacagcttctaatatgga

SEQ ID NO: 695266 - DNA, 19 bp, Mus musculus
  siRNA target sequence for Cocoacrisp (NM_031402.1,645-663).
gcttctaatatggagtata

SEQ ID NO: 695267 - DNA, 19 bp, Mus musculus
  siRNA target sequence for Cocoacrisp (NM_031402.1,646-664).
cttctaatatggagtatat

SEQ ID NO: 695268 - DNA, 19 bp, Mus musculus
  siRNA target sequence for Cocoacrisp (NM_031402.1,694-712).
cagaatcctgggctgaaat

SEQ ID NO: 695269 - DNA, 19 bp, Mus musculus
  siRNA target sequence for Cocoacrisp (NM_031402.1,696-714).
gaatcctgggctgaaatgt

SEQ ID NO: 695270 - DNA, 19 bp, Mus musculus
  siRNA target sequence for Cocoacrisp (NM_031402.1,746-764).
gccctccattggacagaat

SEQ ID NO: 695271 - DNA, 19 bp, Mus musculus
  siRNA target sequence for Cocoacrisp (NM_031402.1,747-765).
ccctccattggacagaatt

SEQ ID NO: 695272 - DNA, 19 bp, Mus musculus
  siRNA target sequence for Cocoacrisp (NM_031402.1,825-843).
gaagtgagagactttagct

SEQ ID NO: 695273 - DNA, 19 bp, Mus musculus
  siRNA target sequence for Cocoacrisp (NM_031402.1,836-854).
ctttagctacccatatgaa

SEQ ID NO: 695274 - DNA, 19 bp, Mus musculus
  siRNA target sequence for Cocoacrisp (NM_031402.1,841-859).
gctacccatatgaaaatga

SEQ ID NO: 695275 - DNA, 19 bp, Mus musculus
  siRNA target sequence for Cocoacrisp (NM_031402.1,918-936).
gtggtgtgggctactagta

SEQ ID NO: 695276 - DNA, 19 bp, Mus musculus
  siRNA target sequence for Cocoacrisp (NM_031402.1,926-944).
ggctactagtagcagaata

SEQ ID NO: 695277 - DNA, 19 bp, Mus musculus
  siRNA target sequence for Cocoacrisp (NM_031402.1,945-963).
ggctgtgccgtcaatctgt

SEQ ID NO: 695278 - DNA, 19 bp, Mus musculus
  siRNA target sequence for Cocoacrisp (NM_031402.1,1045-1063).
ggggccacgcaccttacaa

SEQ ID NO: 695279 - DNA, 19 bp, Mus musculus
  siRNA target sequence for Cocoacrisp (NM_031402.1,1046-1064).
gggccacgcaccttacaaa

SEQ ID NO: 695280 - DNA, 19 bp, Mus musculus
  siRNA target sequence for Cocoacrisp (NM_031402.1,1048-1066).
gccacgcaccttacaaaca

SEQ ID NO: 695281 - DNA, 19 bp, Mus musculus
  siRNA target sequence for Cocoacrisp (NM_031402.1,1211-1229).
cacccatgttcgaacaaga

SEQ ID NO: 695282 - DNA, 19 bp, Mus musculus
  siRNA target sequence for Cocoacrisp (NM_031402.1,1214-1232).
ccatgttcgaacaagatca

SEQ ID NO: 695283 - DNA, 19 bp, Mus musculus
  siRNA target sequence for Cocoacrisp (NM_031402.1,1268-1286).
gcagatgtctcagattgtt

SEQ ID NO: 695284 - DNA, 19 bp, Mus musculus
  siRNA target sequence for Cocoacrisp (NM_031402.1,1280-1298).
gattgtttcttgtgaagta

SEQ ID NO: 695285 - DNA, 19 bp, Mus musculus
  siRNA target sequence for Cocoacrisp (NM_031402.1,1355-1373).
ctgcttggacagtaaagct

SEQ ID NO: 695286 - DNA, 19 bp, Mus musculus
  siRNA target sequence for Cocoacrisp (NM_031402.1,1357-1375).
gcttggacagtaaagctaa

SEQ ID NO: 695287 - DNA, 19 bp, Mus musculus
  siRNA target sequence for Cocoacrisp (NM_031402.1,1383-1401).
gggagtgtacattatgaaa

SEQ ID NO: 695288 - DNA, 19 bp, Mus musculus
  siRNA target sequence for Cocoacrisp (NM_031402.1,1426-1444).
ccatccactatgggataat

SEQ ID NO: 695289 - DNA, 19 bp, Mus musculus
  siRNA target sequence for Cocoacrisp (NM_031402.1,1427-1445).
catccactatgggataata

SEQ ID NO: 695290 - DNA, 19 bp, Mus musculus
  siRNA target sequence for Cocoacrisp (NM_031402.1,1477-1495).
gacaagggagaaagcatta

SEQ ID NO: 695291 - DNA, 19 bp, Mus musculus
  siRNA target sequence for Cocoacrisp (NM_031402.1,1479-1497).
caagggagaaagcattact

SEQ ID NO: 695292 - DNA, 19 bp, Mus musculus
  siRNA target sequence for Cocoacrisp (NM_031402.1,1508-1526).
caacagaaatggcattcaa

SEQ ID NO: 695293 - DNA, 19 bp, Mus musculus
  siRNA target sequence for Cocoacrisp (NM_031402.1,1581-1599).
caagctgtgacctgtgaaa

SEQ ID NO: 695294 - DNA, 19 bp, Mus musculus
  siRNA target sequence for Cocoacrisp (NM_031402.1,1655-1673).
gtactgtcctcgaaactgt

SEQ ID NO: 695295 - DNA, 19 bp, Mus musculus
  siRNA target sequence for Cocoacrisp (NM_031402.1,1676-1694).
gcagtcaaatccacattat

SEQ ID NO: 695296 - DNA, 19 bp, Mus musculus
  siRNA target sequence for Cocoacrisp (NM_031402.1,1687-1705).
cacattatgctcgtgtaat

SEQ ID NO: 695297 - DNA, 19 bp, Mus musculus
  siRNA target sequence for Cocoacrisp (NM_031402.1,1780-1798).
gtggttatgtggatgtcat

SEQ ID NO: 695298 - DNA, 19 bp, Mus musculus
  siRNA target sequence for Cocoacrisp (NM_031402.1,1888-1906).
ccgtgtattcgctgttgtt

SEQ ID NO: 695299 - DNA, 19 bp, Mus musculus
  siRNA target sequence for Cocoacrisp (NM_031402.1,1889-1907).
cgtgtattcgctgttgttt

SEQ ID NO: 695300 - DNA, 19 bp, Mus musculus
  siRNA target sequence for Crisp1 (NM_009638.2,393-411).
gaatacaaagatcttacat

SEQ ID NO: 695301 - DNA, 19 bp, Mus musculus
  siRNA target sequence for Crisp1 (NM_009638.2,424-442).
caaagcaacctgatagtgt

SEQ ID NO: 695302 - DNA, 19 bp, Mus musculus
  siRNA target sequence for Crisp1 (NM_009638.2,550-568).
gtcctgttggcaattatca

SEQ ID NO: 695303 - DNA, 19 bp, Mus musculus
  siRNA target sequence for Crisp1 (NM_009638.2,575-593).
gctatacacaccttacact

SEQ ID NO: 695304 - DNA, 19 bp, Mus musculus
  siRNA target sequence for Crisp1 (NM_009638.2,647-665).
caatagttgtggacatgaa

SEQ ID NO: 695305 - DNA, 19 bp, Mus musculus
  siRNA target sequence for Crisp1 (NM_009638.2,655-673).
gtggacatgaagataagta

SEQ ID NO: 695306 - DNA, 19 bp, Mus musculus
  siRNA target sequence for Crisp1 (NM_009638.2,676-694).
ctaactgtaaatatctgaa

SEQ ID NO: 695307 - DNA, 19 bp, Mus musculus
  siRNA target sequence for Crisp1 (NM_009638.2,682-700).
gtaaatatctgaagaagat

SEQ ID NO: 695308 - DNA, 19 bp, Mus musculus
  siRNA target sequence for Crisp1 (NM_009638.2,701-719).
gctatcctgtgaacatgaa

SEQ ID NO: 695309 - DNA, 19 bp, Mus musculus
  siRNA target sequence for Crisp2 (NM_009420.1,282-300).
ggatccagactttacttct

SEQ ID NO: 695310 - DNA, 19 bp, Mus musculus
  siRNA target sequence for Crisp2 (NM_009420.1,308-326).
ctaaccaactacaagttca

SEQ ID NO: 695311 - DNA, 19 bp, Mus musculus
  siRNA target sequence for Crisp2 (NM_009420.1,331-349).
gagatcgtaaataaacaca

SEQ ID NO: 695312 - DNA, 19 bp, Mus musculus
  siRNA target sequence for Crisp2 (NM_009420.1,427-445).
gctcaaaagtgggctaata

SEQ ID NO: 695313 - DNA, 19 bp, Mus musculus
  siRNA target sequence for Crisp2 (NM_009420.1,428-446).
ctcaaaagtgggctaataa

SEQ ID NO: 695314 - DNA, 19 bp, Mus musculus
  siRNA target sequence for Crisp2 (NM_009420.1,430-448).
caaaagtgggctaataagt

SEQ ID NO: 695315 - DNA, 19 bp, Mus musculus
  siRNA target sequence for Crisp2 (NM_009420.1,437-455).
gggctaataagtgtatttt

SEQ ID NO: 695316 - DNA, 19 bp, Mus musculus
  siRNA target sequence for Crisp2 (NM_009420.1,438-456).
ggctaataagtgtatttta

SEQ ID NO: 695317 - DNA, 19 bp, Mus musculus
  siRNA target sequence for Crisp2 (NM_009420.1,440-458).
ctaataagtgtattttaga

SEQ ID NO: 695318 - DNA, 19 bp, Mus musculus
  siRNA target sequence for Crisp2 (NM_009420.1,475-493).
gaccggaagatcaatataa

SEQ ID NO: 695319 - DNA, 19 bp, Mus musculus
  siRNA target sequence for Crisp2 (NM_009420.1,477-495).
ccggaagatcaatataaga

SEQ ID NO: 695320 - DNA, 19 bp, Mus musculus
  siRNA target sequence for Crisp2 (NM_009420.1,478-496).
cggaagatcaatataagat

SEQ ID NO: 695321 - DNA, 19 bp, Mus musculus
  siRNA target sequence for Crisp2 (NM_009420.1,494-512).
gatgtggtgagaatctcta

SEQ ID NO: 695322 - DNA, 19 bp, Mus musculus
  siRNA target sequence for Crisp2 (NM_009420.1,530-548).
ccctctggtcaactgtaat

SEQ ID NO: 695323 - DNA, 19 bp, Mus musculus
  siRNA target sequence for Crisp2 (NM_009420.1,531-549).
cctctggtcaactgtaatt

SEQ ID NO: 695324 - DNA, 19 bp, Mus musculus
  siRNA target sequence for Crisp2 (NM_009420.1,624-642).
cactcagcttgtttggtat

SEQ ID NO: 695325 - DNA, 19 bp, Mus musculus
  siRNA target sequence for Crisp2 (NM_009420.1,688-706).
gacaacctgaaatatttct

SEQ ID NO: 695326 - DNA, 19 bp, Mus musculus
  siRNA target sequence for Crisp2 (NM_009420.1,724-742).
cctatgggtaacaatgtga

SEQ ID NO: 695327 - DNA, 19 bp, Mus musculus
  siRNA target sequence for Crisp2 (NM_009420.1,725-743).
ctatgggtaacaatgtgat

SEQ ID NO: 695328 - DNA, 19 bp, Mus musculus
  siRNA target sequence for Crisp2 (NM_009420.1,730-748).
ggtaacaatgtgatgaaaa

SEQ ID NO: 695329 - DNA, 19 bp, Mus musculus
  siRNA target sequence for Crisp2 (NM_009420.1,731-749).
gtaacaatgtgatgaaaaa

SEQ ID NO: 695330 - DNA, 19 bp, Mus musculus
  siRNA target sequence for Crisp2 (NM_009420.1,779-797).
gtgctagttgtcccaataa

SEQ ID NO: 695331 - DNA, 19 bp, Mus musculus
  siRNA target sequence for Crisp2 (NM_009420.1,788-806).
gtcccaataactgtgaaaa

SEQ ID NO: 695332 - DNA, 19 bp, Mus musculus
  siRNA target sequence for Crisp2 (NM_009420.1,818-836).
ccaatagctgtgattttga

SEQ ID NO: 695333 - DNA, 19 bp, Mus musculus
  siRNA target sequence for Crisp2 (NM_009420.1,819-837).
caatagctgtgattttgaa

SEQ ID NO: 695334 - DNA, 19 bp, Mus musculus
  siRNA target sequence for Crisp2 (NM_009420.1,835-853).
gaagatttacttagtaact

SEQ ID NO: 695335 - DNA, 19 bp, Mus musculus
  siRNA target sequence for Crisp2 (NM_009420.1,867-885).
gacttcagcaggctgtaaa

SEQ ID NO: 695336 - DNA, 19 bp, Mus musculus
  siRNA target sequence for Crisp3 (NM_009639.1,578-596).
gcaggccatacctagctta

SEQ ID NO: 695337 - DNA, 19 bp, Mus musculus
  siRNA target sequence for Crisp3 (NM_009639.1,648-666).
gtgcaccaagagttgtcaa

SEQ ID NO: 695338 - DNA, 19 bp, Mus musculus
  siRNA target sequence for Crisp3 (NM_009639.1,650-668).
gcaccaagagttgtcaata

SEQ ID NO: 695339 - DNA, 19 bp, Mus musculus
  siRNA target sequence for Crisp3 (NM_009639.1,651-669).
caccaagagttgtcaatat

SEQ ID NO: 695340 - DNA, 19 bp, Mus musculus
  siRNA target sequence for Crisp3 (NM_009639.1,653-671).
ccaagagttgtcaatataa

SEQ ID NO: 695341 - DNA, 19 bp, Mus musculus
  siRNA target sequence for Crisp3 (NM_009639.1,657-675).
gagttgtcaatataaggat

SEQ ID NO: 695342 - DNA, 19 bp, Mus musculus
  siRNA target sequence for Crisp3 (NM_009639.1,678-696).
gtctttttggtgtaaacgt

SEQ ID NO: 695343 - DNA, 19 bp, Mus musculus
  siRNA target sequence for Crisp3 (NM_009639.1,689-707).
gtaaacgtctggaatacgt

SEQ ID NO: 695344 - DNA, 19 bp, Mus musculus
  siRNA target sequence for Crisp3 (NM_009639.1,718-736).
ccaggtcttaaaaaacgtt

SEQ ID NO: 695345 - DNA, 19 bp, Mus musculus
  siRNA target sequence for Csnk (NM_007786.1,39-57).
gatgaggaattttatcgta

SEQ ID NO: 695346 - DNA, 19 bp, Mus musculus
  siRNA target sequence for Csnk (NM_007786.1,102-120).
gatacaaaacccagattca

SEQ ID NO: 695347 - DNA, 19 bp, Mus musculus
  siRNA target sequence for Csnk (NM_007786.1,125-143).
gccgtggtgagaagaatga

SEQ ID NO: 695348 - DNA, 19 bp, Mus musculus
  siRNA target sequence for Csnk (NM_007786.1,131-149).
gtgagaagaatgacatagt

SEQ ID NO: 695349 - DNA, 19 bp, Mus musculus
  siRNA target sequence for Csnk (NM_007786.1,184-202).
cgctccgtcctgaacttca

SEQ ID NO: 695350 - DNA, 19 bp, Mus musculus
  siRNA target sequence for Csnk (NM_007786.1,185-203).
gctccgtcctgaacttcaa

SEQ ID NO: 695351 - DNA, 19 bp, Mus musculus
  siRNA target sequence for Csnk (NM_007786.1,188-206).
ccgtcctgaacttcaatca

SEQ ID NO: 695352 - DNA, 19 bp, Mus musculus
  siRNA target sequence for Csnk (NM_007786.1,189-207).
cgtcctgaacttcaatcaa

SEQ ID NO: 695353 - DNA, 19 bp, Mus musculus
  siRNA target sequence for Csnk (NM_007786.1,248-266).
ctactgctagcccatacat

SEQ ID NO: 695354 - DNA, 19 bp, Mus musculus
  siRNA target sequence for Csnk (NM_007786.1,251-269).
ctgctagcccatacatgta

SEQ ID NO: 695355 - DNA, 19 bp, Mus musculus
  siRNA target sequence for Csnk (NM_007786.1,254-272).
ctagcccatacatgtacta

SEQ ID NO: 695356 - DNA, 19 bp, Mus musculus
  siRNA target sequence for Csnk (NM_007786.1,273-291).
cccacttgttgttagacta

SEQ ID NO: 695357 - DNA, 19 bp, Mus musculus
  siRNA target sequence for Csnk (NM_007786.1,351-369).
gtctgctggagtaccttat

SEQ ID NO: 695358 - DNA, 19 bp, Mus musculus
  siRNA target sequence for Csnk (NM_007786.1,394-412).
gccatgcctacaaatgaaa

SEQ ID NO: 695359 - DNA, 19 bp, Mus musculus
  siRNA target sequence for Csnk (NM_007786.1,395-413).
ccatgcctacaaatgaaaa

SEQ ID NO: 695360 - DNA, 19 bp, Mus musculus
  siRNA target sequence for Csnk (NM_007786.1,445-463).
cccattactcccattgtgt

SEQ ID NO: 695361 - DNA, 19 bp, Mus musculus
  siRNA target sequence for Csnk (NM_007786.1,476-494).
ctaccatggagtcaatagt

SEQ ID NO: 695362 - DNA, 19 bp, Mus musculus
  siRNA target sequence for Csnk (NM_007786.1,483-501).
ggagtcaatagtaaatact

SEQ ID NO: 695363 - DNA, 19 bp, Mus musculus
  siRNA target sequence for D430034N21 (NM_183211.1,1234-1252).
cccactcatgcttcatcat

SEQ ID NO: 695364 - DNA, 19 bp, Mus musculus
  siRNA target sequence for D430034N21 (NM_183211.1,1235-1253).
ccactcatgcttcatcata

SEQ ID NO: 695365 - DNA, 19 bp, Mus musculus
  siRNA target sequence for D430034N21 (NM_183211.1,1238-1256).
ctcatgcttcatcatatgt

SEQ ID NO: 695366 - DNA, 19 bp, Mus musculus
  siRNA target sequence for D430034N21 (NM_183211.1,1288-1306).
gcagtcacagagagtcatt

SEQ ID NO: 695367 - DNA, 19 bp, Mus musculus
  siRNA target sequence for D430034N21 (NM_183211.1,1405-1423).
ctcccatccttcttagagt

SEQ ID NO: 695368 - DNA, 19 bp, Mus musculus
  siRNA target sequence for D430034N21 (NM_183211.1,1446-1464).
caacactgcacatctctat

SEQ ID NO: 695369 - DNA, 19 bp, Mus musculus
  siRNA target sequence for D430034N21 (NM_183211.1,1456-1474).
catctctattatttctgat

SEQ ID NO: 695370 - DNA, 19 bp, Mus musculus
  siRNA target sequence for Glipr1 (NM_028608.1,204-222).
gtctgtgtctagttcttca

SEQ ID NO: 695371 - DNA, 19 bp, Mus musculus
  siRNA target sequence for Glipr1 (NM_028608.1,234-252).
cactttgccagatataaca

SEQ ID NO: 695372 - DNA, 19 bp, Mus musculus
  siRNA target sequence for Glipr1 (NM_028608.1,236-254).
ctttgccagatataacaaa

SEQ ID NO: 695373 - DNA, 19 bp, Mus musculus
  siRNA target sequence for Glipr1 (NM_028608.1,251-269).
caaacgaggacttcattaa

SEQ ID NO: 695374 - DNA, 19 bp, Mus musculus
  siRNA target sequence for Glipr1 (NM_028608.1,264-282).
cattaaagaatgtgttcaa

SEQ ID NO: 695375 - DNA, 19 bp, Mus musculus
  siRNA target sequence for Glipr1 (NM_028608.1,292-310).
cagcttcggtcaaaagtga

SEQ ID NO: 695376 - DNA, 19 bp, Mus musculus
  siRNA target sequence for Glipr1 (NM_028608.1,377-395).
ggacaaaatcttgtgaatt

SEQ ID NO: 695377 - DNA, 19 bp, Mus musculus
  siRNA target sequence for Glipr1 (NM_028608.1,442-460).
gccctgggagagaatatct

SEQ ID NO: 695378 - DNA, 19 bp, Mus musculus
  siRNA target sequence for Glipr1 (NM_028608.1,461-479).
ggcttggctctctatccat

SEQ ID NO: 695379 - DNA, 19 bp, Mus musculus
  siRNA target sequence for Glipr1 (NM_028608.1,466-484).
ggctctctatccatctttt

SEQ ID NO: 695380 - DNA, 19 bp, Mus musculus
  siRNA target sequence for Glipr1 (NM_028608.1,583-601).
gtttgggcagacagttaca

SEQ ID NO: 695381 - DNA, 19 bp, Mus musculus
  siRNA target sequence for Glipr1 (NM_028608.1,618-636).
gcaactttgccctaatgga

SEQ ID NO: 695382 - DNA, 19 bp, Mus musculus
  siRNA target sequence for Glipr1 (NM_028608.1,626-644).
gccctaatggagcaaattt

SEQ ID NO: 695383 - DNA, 19 bp, Mus musculus
  siRNA target sequence for Glipr1 (NM_028608.1,627-645).
ccctaatggagcaaatttt

SEQ ID NO: 695384 - DNA, 19 bp, Mus musculus
  siRNA target sequence for Glipr1 (NM_028608.1,629-647).
ctaatggagcaaattttat

SEQ ID NO: 695385 - DNA, 19 bp, Mus musculus
  siRNA target sequence for Glipr1 (NM_028608.1,654-672).
ctatggaccagcaggaaat

SEQ ID NO: 695386 - DNA, 19 bp, Mus musculus
  siRNA target sequence for Pi15 (NM_053191.1,153-171).
cacatactgtcgttttact

SEQ ID NO: 695387 - DNA, 19 bp, Mus musculus
  siRNA target sequence for Pi15 (NM_053191.1,155-173).
catactgtcgttttactaa

SEQ ID NO: 695388 - DNA, 19 bp, Mus musculus
  siRNA target sequence for Pi15 (NM_053191.1,189-207).
ctctgccagccaataactt

SEQ ID NO: 695389 - DNA, 19 bp, Mus musculus
  siRNA target sequence for Pi15 (NM_053191.1,264-282).
ccaggcggaagcgttacat

SEQ ID NO: 695390 - DNA, 19 bp, Mus musculus
  siRNA target sequence for Pi15 (NM_053191.1,265-283).
caggcggaagcgttacatt

SEQ ID NO: 695391 - DNA, 19 bp, Mus musculus
  siRNA target sequence for Pi15 (NM_053191.1,268-286).
gcggaagcgttacatttct

SEQ ID NO: 695392 - DNA, 19 bp, Mus musculus
  siRNA target sequence for Pi15 (NM_053191.1,274-292).
gcgttacatttctcagaat

SEQ ID NO: 695393 - DNA, 19 bp, Mus musculus
  siRNA target sequence for Pi15 (NM_053191.1,298-316).
gatcgccattctcgattat

SEQ ID NO: 695394 - DNA, 19 bp, Mus musculus
  siRNA target sequence for Pi15 (NM_053191.1,301-319).
cgccattctcgattatcat

SEQ ID NO: 695395 - DNA, 19 bp, Mus musculus
  siRNA target sequence for Pi15 (NM_053191.1,302-320).
gccattctcgattatcata

SEQ ID NO: 695396 - DNA, 19 bp, Mus musculus
  siRNA target sequence for Pi15 (NM_053191.1,303-321).
ccattctcgattatcataa

SEQ ID NO: 695397 - DNA, 19 bp, Mus musculus
  siRNA target sequence for Pi15 (NM_053191.1,304-322).
cattctcgattatcataat

SEQ ID NO: 695398 - DNA, 19 bp, Mus musculus
  siRNA target sequence for Pi15 (NM_053191.1,351-369).
cagcaaacatggaatatat

SEQ ID NO: 695399 - DNA, 19 bp, Mus musculus
  siRNA target sequence for Pi15 (NM_053191.1,427-445).
ggaccatggaccttcttat

SEQ ID NO: 695400 - DNA, 19 bp, Mus musculus
  siRNA target sequence for Pi15 (NM_053191.1,511-529).
ggtcaagccatggtatgat

SEQ ID NO: 695401 - DNA, 19 bp, Mus musculus
  siRNA target sequence for Pi15 (NM_053191.1,597-615).
ggcccatgtgcactcatta

SEQ ID NO: 695402 - DNA, 19 bp, Mus musculus
  siRNA target sequence for Pi15 (NM_053191.1,598-616).
gcccatgtgcactcattat

SEQ ID NO: 695403 - DNA, 19 bp, Mus musculus
  siRNA target sequence for Pi15 (NM_053191.1,630-648).
gggccacttctaatcgaat

SEQ ID NO: 695404 - DNA, 19 bp, Mus musculus
  siRNA target sequence for Pi15 (NM_053191.1,631-649).
ggccacttctaatcgaata

SEQ ID NO: 695405 - DNA, 19 bp, Mus musculus
  siRNA target sequence for Pi15 (NM_053191.1,634-652).
cacttctaatcgaatagga

SEQ ID NO: 695406 - DNA, 19 bp, Mus musculus
  siRNA target sequence for Pi15 (NM_053191.1,645-663).
gaataggatgtgcaattca

SEQ ID NO: 695407 - DNA, 19 bp, Mus musculus
  siRNA target sequence for Pi15 (NM_053191.1,699-717).
ggcgaagagcagtgtactt

SEQ ID NO: 695408 - DNA, 19 bp, Mus musculus
  siRNA target sequence for Pi15 (NM_053191.1,712-730).
gtacttggtgtgcaactat

SEQ ID NO: 695409 - DNA, 19 bp, Mus musculus
  siRNA target sequence for Pi15 (NM_053191.1,753-771).
gagaagcaccatacaaagt

SEQ ID NO: 695410 - DNA, 19 bp, Mus musculus
  siRNA target sequence for Pi15 (NM_053191.1,770-788).
gttggagtgccatgttcat

SEQ ID NO: 695411 - DNA, 19 bp, Mus musculus
  siRNA target sequence for Pi15 (NM_053191.1,810-828).
gagcctgtactgacaatct

SEQ ID NO: 695412 - DNA, 19 bp, Mus musculus
  siRNA target sequence for Pi15 (NM_053191.1,836-854).
ccaggggtaaccacaaact

SEQ ID NO: 695413 - DNA, 19 bp, Mus musculus
  siRNA target sequence for Pi15 (NM_053191.1,837-855).
caggggtaaccacaaacta

SEQ ID NO: 695414 - DNA, 19 bp, Mus musculus
  siRNA target sequence for Afp (NM_007423.2,70-88).
ctcatcctcctgctacatt

SEQ ID NO: 695415 - DNA, 19 bp, Mus musculus
  siRNA target sequence for Afp (NM_007423.2,98-116).
ccaaagcattgcacgaaaa

SEQ ID NO: 695416 - DNA, 19 bp, Mus musculus
  siRNA target sequence for Afp (NM_007423.2,99-117).
caaagcattgcacgaaaat

SEQ ID NO: 695417 - DNA, 19 bp, Mus musculus
  siRNA target sequence for Afp (NM_007423.2,103-121).
gcattgcacgaaaatgagt

SEQ ID NO: 695418 - DNA, 19 bp, Mus musculus
  siRNA target sequence for Afp (NM_007423.2,104-122).
cattgcacgaaaatgagtt

SEQ ID NO: 695419 - DNA, 19 bp, Mus musculus
  siRNA target sequence for Afp (NM_007423.2,126-144).
gatagcttccacgttagat

SEQ ID NO: 695420 - DNA, 19 bp, Mus musculus
  siRNA target sequence for Afp (NM_007423.2,153-171).
gtgcgtgacggagaagaat

SEQ ID NO: 695421 - DNA, 19 bp, Mus musculus
  siRNA target sequence for Afp (NM_007423.2,276-294).
ctctggcgatgggtgttta

SEQ ID NO: 695422 - DNA, 19 bp, Mus musculus
  siRNA target sequence for Afp (NM_007423.2,334-352).
gagacggaactctctaaca

SEQ ID NO: 695423 - DNA, 19 bp, Mus musculus
  siRNA target sequence for Afp (NM_007423.2,338-356).
cggaactctctaacaagta

SEQ ID NO: 695424 - DNA, 19 bp, Mus musculus
  siRNA target sequence for Afp (NM_007423.2,536-554).
ggaggaaccccttcatgta

SEQ ID NO: 695425 - DNA, 19 bp, Mus musculus
  siRNA target sequence for Afp (NM_007423.2,652-670).
gcatccattgcaaaggaat

SEQ ID NO: 695426 - DNA, 19 bp, Mus musculus
  siRNA target sequence for Afp (NM_007423.2,749-767).
ccattattaagctaagtca

SEQ ID NO: 695427 - DNA, 19 bp, Mus musculus
  siRNA target sequence for Afp (NM_007423.2,750-768).
cattattaagctaagtcaa

SEQ ID NO: 695428 - DNA, 19 bp, Mus musculus
  siRNA target sequence for Afp (NM_007423.2,759-777).
gctaagtcaaaagttaact

SEQ ID NO: 695429 - DNA, 19 bp, Mus musculus
  siRNA target sequence for Afp (NM_007423.2,874-892).
ggggaaaaagtcatgacat

SEQ ID NO: 695430 - DNA, 19 bp, Mus musculus
  siRNA target sequence for Afp (NM_007423.2,875-893).
gggaaaaagtcatgacata

SEQ ID NO: 695431 - DNA, 19 bp, Mus musculus
  siRNA target sequence for Afp (NM_007423.2,883-901).
gtcatgacatatatatgtt

SEQ ID NO: 695432 - DNA, 19 bp, Mus musculus
  siRNA target sequence for Afp (NM_007423.2,958-976).
caactaggcttctgcataa

SEQ ID NO: 695433 - DNA, 19 bp, Mus musculus
  siRNA target sequence for Afp (NM_007423.2,1000-1018).
cctgaaggcttatctctaa

SEQ ID NO: 695434 - DNA, 19 bp, Mus musculus
  siRNA target sequence for Afp (NM_007423.2,1006-1024).
ggcttatctctaaatccaa

SEQ ID NO: 695435 - DNA, 19 bp, Mus musculus
  siRNA target sequence for Afp (NM_007423.2,1029-1047).
gtttttgggagacagaaat

SEQ ID NO: 695436 - DNA, 19 bp, Mus musculus
  siRNA target sequence for Afp (NM_007423.2,1086-1104).
ggcaagctttcttcatgaa

SEQ ID NO: 695437 - DNA, 19 bp, Mus musculus
  siRNA target sequence for Afp (NM_007423.2,1087-1105).
gcaagctttcttcatgaat

SEQ ID NO: 695438 - DNA, 19 bp, Mus musculus
  siRNA target sequence for Afp (NM_007423.2,1140-1158).
cattctaagaattgctaaa

SEQ ID NO: 695439 - DNA, 19 bp, Mus musculus
  siRNA target sequence for Afp (NM_007423.2,1144-1162).
ctaagaattgctaaaacgt

SEQ ID NO: 695440 - DNA, 19 bp, Mus musculus
  siRNA target sequence for Afp (NM_007423.2,1154-1172).
ctaaaacgtaccaggaaat

SEQ ID NO: 695441 - DNA, 19 bp, Mus musculus
  siRNA target sequence for Afp (NM_007423.2,1205-1223).
ctggatgtcaggacaatct

SEQ ID NO: 695442 - DNA, 19 bp, Mus musculus
  siRNA target sequence for Afp (NM_007423.2,1295-1313).
ccttaggagactacaaatt

SEQ ID NO: 695443 - DNA, 19 bp, Mus musculus
  siRNA target sequence for Afp (NM_007423.2,1296-1314).
cttaggagactacaaatta

SEQ ID NO: 695444 - DNA, 19 bp, Mus musculus
  siRNA target sequence for Afp (NM_007423.2,1423-1441).
ctcagcgaggagaaatggt

SEQ ID NO: 695445 - DNA, 19 bp, Mus musculus
  siRNA target sequence for Afp (NM_007423.2,1453-1471).
gagggaatggccgacattt

SEQ ID NO: 695446 - DNA, 19 bp, Mus musculus
  siRNA target sequence for Afp (NM_007423.2,1457-1475).
gaatggccgacattttcat

SEQ ID NO: 695447 - DNA, 19 bp, Mus musculus
  siRNA target sequence for Afp (NM_007423.2,1530-1548).
ctgctgcaactcttcgtat

SEQ ID NO: 695448 - DNA, 19 bp, Mus musculus
  siRNA target sequence for Afp (NM_007423.2,1550-1568).
ccaacaggaggctatgcat

SEQ ID NO: 695449 - DNA, 19 bp, Mus musculus
  siRNA target sequence for Afp (NM_007423.2,1604-1622).
ccccattctctgaggataa

SEQ ID NO: 695450 - DNA, 19 bp, Mus musculus
  siRNA target sequence for Afp (NM_007423.2,1811-1829).
cagaagagggtccaaagtt

SEQ ID NO: 695451 - DNA, 19 bp, Mus musculus
  siRNA target sequence for Afp (NM_007423.2,1819-1837).
ggtccaaagttgatttcca

SEQ ID NO: 695452 - DNA, 19 bp, Mus musculus
  siRNA target sequence for Agc1 (NM_007424.1,337-355).
ctcaccccaagaatcaagt

SEQ ID NO: 695453 - DNA, 19 bp, Mus musculus
  siRNA target sequence for Agc1 (NM_007424.1,441-459).
ggtgtcgctccccaactat

SEQ ID NO: 695454 - DNA, 19 bp, Mus musculus
  siRNA target sequence for Agc1 (NM_007424.1,571-589).
gaggtcatagtgaaaggta

SEQ ID NO: 695455 - DNA, 19 bp, Mus musculus
  siRNA target sequence for Agc1 (NM_007424.1,573-591).
ggtcatagtgaaaggtatt

SEQ ID NO: 695456 - DNA, 19 bp, Mus musculus
  siRNA target sequence for Agc1 (NM_007424.1,594-612).
gttccactacagagctatt

SEQ ID NO: 695457 - DNA, 19 bp, Mus musculus
  siRNA target sequence for Agc1 (NM_007424.1,746-764).
ctgaccagacagtcagata

SEQ ID NO: 695458 - DNA, 19 bp, Mus musculus
  siRNA target sequence for Agc1 (NM_007424.1,885-903).
ggagggtgaggtcttttat

SEQ ID NO: 695459 - DNA, 19 bp, Mus musculus
  siRNA target sequence for Agc1 (NM_007424.1,1159-1177).
cgatatgacgccatctgtt

SEQ ID NO: 695460 - DNA, 19 bp, Mus musculus
  siRNA target sequence for Agc1 (NM_007424.1,1160-1178).
gatatgacgccatctgtta

SEQ ID NO: 695461 - DNA, 19 bp, Mus musculus
  siRNA target sequence for Agc1 (NM_007424.1,1173-1191).
ctgttacacaggtgaagat

SEQ ID NO: 695462 - DNA, 19 bp, Mus musculus
  siRNA target sequence for Agc1 (NM_007424.1,1350-1368).
cctgtcccccactatctca

SEQ ID NO: 695463 - DNA, 19 bp, Mus musculus
  siRNA target sequence for Agc1 (NM_007424.1,1578-1596).
cttgccagggggagttgta

SEQ ID NO: 695464 - DNA, 19 bp, Mus musculus
  siRNA target sequence for Agc1 (NM_007424.1,1583-1601).
cagggggagttgtattcca

SEQ ID NO: 695465 - DNA, 19 bp, Mus musculus
  siRNA target sequence for Agc1 (NM_007424.1,1622-1640).
gatactctctgacatttga

SEQ ID NO: 695466 - DNA, 19 bp, Mus musculus
  siRNA target sequence for Agc1 (NM_007424.1,1836-1854).
cgtgcgcccatcatcagaa

SEQ ID NO: 695467 - DNA, 19 bp, Mus musculus
  siRNA target sequence for Agc1 (NM_007424.1,1837-1855).
gtgcgcccatcatcagaaa

SEQ ID NO: 695468 - DNA, 19 bp, Mus musculus
  siRNA target sequence for Agc1 (NM_007424.1,1841-1859).
gcccatcatcagaaaccta

SEQ ID NO: 695469 - DNA, 19 bp, Mus musculus
  siRNA target sequence for Agc1 (NM_007424.1,1842-1860).
cccatcatcagaaacctat

SEQ ID NO: 695470 - DNA, 19 bp, Mus musculus
  siRNA target sequence for Agc1 (NM_007424.1,1850-1868).
cagaaacctatgatgtcta

SEQ ID NO: 695471 - DNA, 19 bp, Mus musculus
  siRNA target sequence for Agc1 (NM_007424.1,2232-2250).
cacatcaccctctgacata

SEQ ID NO: 695472 - DNA, 19 bp, Mus musculus
  siRNA target sequence for Agc1 (NM_007424.1,2234-2252).
catcaccctctgacataga

SEQ ID NO: 695473 - DNA, 19 bp, Mus musculus
  siRNA target sequence for Agc1 (NM_007424.1,2866-2884).
ccttcaggaggagaaatta

SEQ ID NO: 695474 - DNA, 19 bp, Mus musculus
  siRNA target sequence for Agc1 (NM_007424.1,3434-3452).
ctgcctctgggggatatgt

SEQ ID NO: 695475 - DNA, 19 bp, Mus musculus
  siRNA target sequence for Agc1 (NM_007424.1,3554-3572).
cctctggagtggaagatct

SEQ ID NO: 695476 - DNA, 19 bp, Mus musculus
  siRNA target sequence for Agc1 (NM_007424.1,3568-3586).
gatcttggtccttctacta

SEQ ID NO: 695477 - DNA, 19 bp, Mus musculus
  siRNA target sequence for Agc1 (NM_007424.1,3574-3592).
ggtccttctactagagata

SEQ ID NO: 695478 - DNA, 19 bp, Mus musculus
  siRNA target sequence for Agc1 (NM_007424.1,3798-3816).
cttggactttggcaaacta

SEQ ID NO: 695479 - DNA, 19 bp, Mus musculus
  siRNA target sequence for Agc1 (NM_007424.1,3969-3987).
ccttgtggacagtacctta

SEQ ID NO: 695480 - DNA, 19 bp, Mus musculus
  siRNA target sequence for Agc1 (NM_007424.1,4070-4088).
ggctgcccctgggtgaatt

SEQ ID NO: 695481 - DNA, 19 bp, Mus musculus
  siRNA target sequence for Agc1 (NM_007424.1,4090-4108).
gacagtagtgcggacatta

SEQ ID NO: 695482 - DNA, 19 bp, Mus musculus
  siRNA target sequence for Agc1 (NM_007424.1,4092-4110).
cagtagtgcggacattagt

SEQ ID NO: 695483 - DNA, 19 bp, Mus musculus
  siRNA target sequence for Agc1 (NM_007424.1,4159-4177).
gatagcagtggagaaacat

SEQ ID NO: 695484 - DNA, 19 bp, Mus musculus
  siRNA target sequence for Agc1 (NM_007424.1,4168-4186).
ggagaaacatctggatttt

SEQ ID NO: 695485 - DNA, 19 bp, Mus musculus
  siRNA target sequence for Agc1 (NM_007424.1,4219-4237).
ggcgtcagcgaggaaacat

SEQ ID NO: 695486 - DNA, 19 bp, Mus musculus
  siRNA target sequence for Agc1 (NM_007424.1,4221-4239).
cgtcagcgaggaaacatct

SEQ ID NO: 695487 - DNA, 19 bp, Mus musculus
  siRNA target sequence for Agc1 (NM_007424.1,4298-4316).
gagtgactgagcttaatga

SEQ ID NO: 695488 - DNA, 19 bp, Mus musculus
  siRNA target sequence for Agc1 (NM_007424.1,4346-4364).
gagatgggtctggaattct

SEQ ID NO: 695489 - DNA, 19 bp, Mus musculus
  siRNA target sequence for Agc1 (NM_007424.1,4375-4393).
ggacagtcctctggtataa

SEQ ID NO: 695490 - DNA, 19 bp, Mus musculus
  siRNA target sequence for Agc1 (NM_007424.1,4380-4398).
gtcctctggtataacatct

SEQ ID NO: 695491 - DNA, 19 bp, Mus musculus
  siRNA target sequence for Agc1 (NM_007424.1,4519-4537).
gagtcttctggcattacat

SEQ ID NO: 695492 - DNA, 19 bp, Mus musculus
  siRNA target sequence for Agc1 (NM_007424.1,4542-4560).
ggacaccagttttgttgaa

SEQ ID NO: 695493 - DNA, 19 bp, Mus musculus
  siRNA target sequence for Agc1 (NM_007424.1,4561-4579).
gtgacccctaccacattta

SEQ ID NO: 695494 - DNA, 19 bp, Mus musculus
  siRNA target sequence for Agc1 (NM_007424.1,4662-4680).
ggacgtcagtgaacaatct

SEQ ID NO: 695495 - DNA, 19 bp, Mus musculus
  siRNA target sequence for Agc1 (NM_007424.1,4751-4769).
ctgaggtcagtggtgaatt

SEQ ID NO: 695496 - DNA, 19 bp, Mus musculus
  siRNA target sequence for Agc1 (NM_007424.1,4753-4771).
gaggtcagtggtgaattct

SEQ ID NO: 695497 - DNA, 19 bp, Mus musculus
  siRNA target sequence for Agc1 (NM_007424.1,4755-4773).
ggtcagtggtgaattctct

SEQ ID NO: 695498 - DNA, 19 bp, Mus musculus
  siRNA target sequence for Agc1 (NM_007424.1,4862-4880).
gaactttggtggaatctat

SEQ ID NO: 695499 - DNA, 19 bp, Mus musculus
  siRNA target sequence for Agc1 (NM_007424.1,4919-4937).
cttcgggcattttggaatt

SEQ ID NO: 695500 - DNA, 19 bp, Mus musculus
  siRNA target sequence for Agc1 (NM_007424.1,5037-5055).
gacaccaagctctccatat

SEQ ID NO: 695501 - DNA, 19 bp, Mus musculus
  siRNA target sequence for Agc1 (NM_007424.1,5041-5059).
ccaagctctccatatttta

SEQ ID NO: 695502 - DNA, 19 bp, Mus musculus
  siRNA target sequence for Agc1 (NM_007424.1,5134-5152).
gggcttccggaagttactt

SEQ ID NO: 695503 - DNA, 19 bp, Mus musculus
  siRNA target sequence for Agc1 (NM_007424.1,5140-5158).
ccggaagttactttaaaca

SEQ ID NO: 695504 - DNA, 19 bp, Mus musculus
  siRNA target sequence for Agc1 (NM_007424.1,5209-5227).
ggccatggtccttctatga

SEQ ID NO: 695505 - DNA, 19 bp, Mus musculus
  siRNA target sequence for Agc1 (NM_007424.1,5212-5230).
catggtccttctatgacat

SEQ ID NO: 695506 - DNA, 19 bp, Mus musculus
  siRNA target sequence for Agc1 (NM_007424.1,5280-5298).
ccttggtggcgctgtaaca

SEQ ID NO: 695507 - DNA, 19 bp, Mus musculus
  siRNA target sequence for Agc1 (NM_007424.1,5281-5299).
cttggtggcgctgtaacaa

SEQ ID NO: 695508 - DNA, 19 bp, Mus musculus
  siRNA target sequence for Agc1 (NM_007424.1,5284-5302).
ggtggcgctgtaacaaact

SEQ ID NO: 695509 - DNA, 19 bp, Mus musculus
  siRNA target sequence for Agc1 (NM_007424.1,5285-5303).
gtggcgctgtaacaaactt

SEQ ID NO: 695510 - DNA, 19 bp, Mus musculus
  siRNA target sequence for Agc1 (NM_007424.1,5395-5413).
gaggccagcagtaaactgt

SEQ ID NO: 695511 - DNA, 19 bp, Mus musculus
  siRNA target sequence for Agc1 (NM_007424.1,5425-5443).
gatctgcatggaatcactt

SEQ ID NO: 695512 - DNA, 19 bp, Mus musculus
  siRNA target sequence for Agc1 (NM_007424.1,5567-5585).
gcactacctccgacataga

SEQ ID NO: 695513 - DNA, 19 bp, Mus musculus
  siRNA target sequence for Agc1 (NM_007424.1,5766-5784).
cccaaatccctcatactca

SEQ ID NO: 695514 - DNA, 19 bp, Mus musculus
  siRNA target sequence for Agc1 (NM_007424.1,5998-6016).
catctgagcagcattgtca

SEQ ID NO: 695515 - DNA, 19 bp, Mus musculus
  siRNA target sequence for Agc1 (NM_007424.1,6033-6051).
gttcgtcaacaaaaatgct

SEQ ID NO: 695516 - DNA, 19 bp, Mus musculus
  siRNA target sequence for Agc1 (NM_007424.1,6075-6093).
gaatgacaggactatcgaa

SEQ ID NO: 695517 - DNA, 19 bp, Mus musculus
  siRNA target sequence for Agc1 (NM_007424.1,6114-6132).
cggacactctctgcaattt

SEQ ID NO: 695518 - DNA, 19 bp, Mus musculus
  siRNA target sequence for Agc1 (NM_007424.1,6116-6134).
gacactctctgcaatttga

SEQ ID NO: 695519 - DNA, 19 bp, Mus musculus
  siRNA target sequence for Agc1 (NM_007424.1,6118-6136).
cactctctgcaatttgaga

SEQ ID NO: 695520 - DNA, 19 bp, Mus musculus
  siRNA target sequence for Agc1 (NM_007424.1,6244-6262).
ctgcccttcacgtgtaaaa

SEQ ID NO: 695521 - DNA, 19 bp, Mus musculus
  siRNA target sequence for Agc1 (NM_007424.1,6311-6329).
ccctcgggcagaagaaaga

SEQ ID NO: 695522 - DNA, 19 bp, Mus musculus
  siRNA target sequence for Akp3 (NM_007432.1,524-542).
cctcgggcacatatgttca

SEQ ID NO: 695523 - DNA, 19 bp, Mus musculus
  siRNA target sequence for Akp3 (NM_007432.1,699-717).
ccccgagtatccaaatgat

SEQ ID NO: 695524 - DNA, 19 bp, Mus musculus
  siRNA target sequence for Akp3 (NM_007432.1,726-744).
gactggaaccagattggat

SEQ ID NO: 695525 - DNA, 19 bp, Mus musculus
  siRNA target sequence for Akp3 (NM_007432.1,800-818).
ggaatcgtgaacaactcat

SEQ ID NO: 695526 - DNA, 19 bp, Mus musculus
  siRNA target sequence for Akp3 (NM_007432.1,801-819).
gaatcgtgaacaactcatt

SEQ ID NO: 695527 - DNA, 19 bp, Mus musculus
  siRNA target sequence for Akp3 (NM_007432.1,865-883).
gagcctgtagacacaaaat

SEQ ID NO: 695528 - DNA, 19 bp, Mus musculus
  siRNA target sequence for Akp3 (NM_007432.1,867-885).
gcctgtagacacaaaattt

SEQ ID NO: 695529 - DNA, 19 bp, Mus musculus
  siRNA target sequence for Akp3 (NM_007432.1,910-928).
gacccatctctgaaggata

SEQ ID NO: 695530 - DNA, 19 bp, Mus musculus
  siRNA target sequence for Akp3 (NM_007432.1,913-931).
ccatctctgaaggatatga

SEQ ID NO: 695531 - DNA, 19 bp, Mus musculus
  siRNA target sequence for Akp3 (NM_007432.1,1102-1120).
gacactctgaccatagtca

SEQ ID NO: 695532 - DNA, 19 bp, Mus musculus
  siRNA target sequence for Akp3 (NM_007432.1,1565-1583).
caaccaccccggtccataa

SEQ ID NO: 695533 - DNA, 19 bp, Mus musculus
  siRNA target sequence for Akp3 (NM_007432.1,1640-1658).
gaatgctgatgctactact

SEQ ID NO: 695534 - DNA, 19 bp, Mus musculus
  siRNA target sequence for Amh (NM_007445.1,73-91).
ctgaggcggttgaaaacct

SEQ ID NO: 695535 - DNA, 19 bp, Mus musculus
  siRNA target sequence for Amh (NM_007445.1,226-244).
gtctgaacagctatgagta

SEQ ID NO: 695536 - DNA, 19 bp, Mus musculus
  siRNA target sequence for Amh (NM_007445.1,424-442).
ccgagctcttgctgaagtt

SEQ ID NO: 695537 - DNA, 19 bp, Mus musculus
  siRNA target sequence for Amh (NM_007445.1,475-493).
gggagcaggccctgttagt

SEQ ID NO: 695538 - DNA, 19 bp, Mus musculus
  siRNA target sequence for Amh (NM_007445.1,568-586).
ctcgggacacccgctattt

SEQ ID NO: 695539 - DNA, 19 bp, Mus musculus
  siRNA target sequence for Amh (NM_007445.1,1024-1042).
gggaggaacccctattact

SEQ ID NO: 695540 - DNA, 19 bp, Mus musculus
  siRNA target sequence for Amh (NM_007445.1,1063-1081).
ccacggagagggaacctat

SEQ ID NO: 695541 - DNA, 19 bp, Mus musculus
  siRNA target sequence for Amh (NM_007445.1,1385-1403).
gcgcgagctgagtgtagat

SEQ ID NO: 695542 - DNA, 19 bp, Mus musculus
  siRNA target sequence for Amh (NM_007445.1,1387-1405).
gcgagctgagtgtagatct

SEQ ID NO: 695543 - DNA, 19 bp, Mus musculus
  siRNA target sequence for Ang (NM_007447.2,93-111).
caggcccgttgttcttgat

SEQ ID NO: 695544 - DNA, 19 bp, Mus musculus
  siRNA target sequence for Ang (NM_007447.2,95-113).
ggcccgttgttcttgatct

SEQ ID NO: 695545 - DNA, 19 bp, Mus musculus
  siRNA target sequence for Ang (NM_007447.2,96-114).
gcccgttgttcttgatctt

SEQ ID NO: 695546 - DNA, 19 bp, Mus musculus
  siRNA target sequence for Ang (NM_007447.2,328-346).
gaatggaagcccttacaga

SEQ ID NO: 695547 - DNA, 19 bp, Mus musculus
  siRNA target sequence for Ang (NM_007447.2,338-356).
ccttacagagaaaacttaa

SEQ ID NO: 695548 - DNA, 19 bp, Mus musculus
  siRNA target sequence for Ang (NM_007447.2,443-461).
gggttcagacatgttgtta

SEQ ID NO: 695549 - DNA, 19 bp, Mus musculus
  siRNA target sequence for Ang (NM_007447.2,444-462).
ggttcagacatgttgttat

SEQ ID NO: 695550 - DNA, 19 bp, Mus musculus
  siRNA target sequence for Ang (NM_007447.2,445-463).
gttcagacatgttgttatt

SEQ ID NO: 695551 - DNA, 19 bp, Mus musculus
  siRNA target sequence for Angrp (NM_007449.1,257-275).
gcccttatggacgaaattt

SEQ ID NO: 695552 - DNA, 19 bp, Mus musculus
  siRNA target sequence for Angrp (NM_007449.1,258-276).
cccttatggacgaaattta

SEQ ID NO: 695553 - DNA, 19 bp, Mus musculus
  siRNA target sequence for Angrp (NM_007449.1,265-283).
ggacgaaatttaagaataa

SEQ ID NO: 695554 - DNA, 19 bp, Mus musculus
  siRNA target sequence for Angrp (NM_007449.1,268-286).
cgaaatttaagaataagca

SEQ ID NO: 695555 - DNA, 19 bp, Mus musculus
  siRNA target sequence for Angrp (NM_007449.1,355-373).
gcctctaaagggttcagat

SEQ ID NO: 695556 - DNA, 19 bp, Mus musculus
  siRNA target sequence for Ap3d (NM_007460.1,251-269).
gaccgcatgttcgataaga

SEQ ID NO: 695557 - DNA, 19 bp, Mus musculus
  siRNA target sequence for Ap3d (NM_007460.1,471-489).
gtgcctccaagttcacatt

SEQ ID NO: 695558 - DNA, 19 bp, Mus musculus
  siRNA target sequence for Ap3d (NM_007460.1,616-634).
gactggtctgtcctgtttt

SEQ ID NO: 695559 - DNA, 19 bp, Mus musculus
  siRNA target sequence for Ap3d (NM_007460.1,620-638).
ggtctgtcctgttttgtca

SEQ ID NO: 695560 - DNA, 19 bp, Mus musculus
  siRNA target sequence for Ap3d (NM_007460.1,654-672).
gagacctggcaaatgacat

SEQ ID NO: 695561 - DNA, 19 bp, Mus musculus
  siRNA target sequence for Ap3d (NM_007460.1,689-707).
cacacgaagccgtacatca

SEQ ID NO: 695562 - DNA, 19 bp, Mus musculus
  siRNA target sequence for Ap3d (NM_007460.1,716-734).
gcagtgctgatcatgtaca

SEQ ID NO: 695563 - DNA, 19 bp, Mus musculus
  siRNA target sequence for Ap3d (NM_007460.1,721-739).
gctgatcatgtacaaagta

SEQ ID NO: 695564 - DNA, 19 bp, Mus musculus
  siRNA target sequence for Ap3d (NM_007460.1,822-840).
ctgcggctgttaatgtcat

SEQ ID NO: 695565 - DNA, 19 bp, Mus musculus
  siRNA target sequence for Ap3d (NM_007460.1,851-869).
gcacgccgcaaccctaaaa

SEQ ID NO: 695566 - DNA, 19 bp, Mus musculus
  siRNA target sequence for Ap3d (NM_007460.1,852-870).
cacgccgcaaccctaaaaa

SEQ ID NO: 695567 - DNA, 19 bp, Mus musculus
  siRNA target sequence for Ap3d (NM_007460.1,854-872).
cgccgcaaccctaaaaact

SEQ ID NO: 695568 - DNA, 19 bp, Mus musculus
  siRNA target sequence for Ap3d (NM_007460.1,877-895).
gtctctggcgccactgttt

SEQ ID NO: 695569 - DNA, 19 bp, Mus musculus
  siRNA target sequence for Ap3d (NM_007460.1,879-897).
ctctggcgccactgttttt

SEQ ID NO: 695570 - DNA, 19 bp, Mus musculus
  siRNA target sequence for Ap3d (NM_007460.1,881-899).
ctggcgccactgtttttca

SEQ ID NO: 695571 - DNA, 19 bp, Mus musculus
  siRNA target sequence for Ap3d (NM_007460.1,1054-1072).
gtgtgtgaacaccgtaatt

SEQ ID NO: 695572 - DNA, 19 bp, Mus musculus
  siRNA target sequence for Ap3d (NM_007460.1,1127-1145).
ctatgcgttcagaagttga

SEQ ID NO: 695573 - DNA, 19 bp, Mus musculus
  siRNA target sequence for Ap3d (NM_007460.1,1136-1154).
cagaagttgaggatactga

SEQ ID NO: 695574 - DNA, 19 bp, Mus musculus
  siRNA target sequence for Ap3d (NM_007460.1,1138-1156).
gaagttgaggatactgata

SEQ ID NO: 695575 - DNA, 19 bp, Mus musculus
  siRNA target sequence for Ap3d (NM_007460.1,1141-1159).
gttgaggatactgatagaa

SEQ ID NO: 695576 - DNA, 19 bp, Mus musculus
  siRNA target sequence for Ap3d (NM_007460.1,1160-1178).
gactccgaccagaacttaa

SEQ ID NO: 695577 - DNA, 19 bp, Mus musculus
  siRNA target sequence for Ap3d (NM_007460.1,1164-1182).
ccgaccagaacttaaagta

SEQ ID NO: 695578 - DNA, 19 bp, Mus musculus
  siRNA target sequence for Ap3d (NM_007460.1,1188-1206).
ggctgctggccatgtctaa

SEQ ID NO: 695579 - DNA, 19 bp, Mus musculus
  siRNA target sequence for Ap3d (NM_007460.1,1189-1207).
gctgctggccatgtctaaa

SEQ ID NO: 695580 - DNA, 19 bp, Mus musculus
  siRNA target sequence for Ap3d (NM_007460.1,1316-1334).
ggaatggtgtccaagaaga

SEQ ID NO: 695581 - DNA, 19 bp, Mus musculus
  siRNA target sequence for Ap3d (NM_007460.1,1389-1407).
ccacctatcgcgatgaact

SEQ ID NO: 695582 - DNA, 19 bp, Mus musculus
  siRNA target sequence for Ap3d (NM_007460.1,1567-1585).
ggccattcgcaaatttgct

SEQ ID NO: 695583 - DNA, 19 bp, Mus musculus
  siRNA target sequence for Ap3d (NM_007460.1,1635-1653).
gcacccaacgcaatggtat

SEQ ID NO: 695584 - DNA, 19 bp, Mus musculus
  siRNA target sequence for Ap3d (NM_007460.1,1639-1657).
ccaacgcaatggtatctgt

SEQ ID NO: 695585 - DNA, 19 bp, Mus musculus
  siRNA target sequence for Ap3d (NM_007460.1,2249-2267).
gccaacaaccccttctaca

SEQ ID NO: 695586 - DNA, 19 bp, Mus musculus
  siRNA target sequence for Ap3d (NM_007460.1,2307-2325).
caccaggtgtggaacacat

SEQ ID NO: 695587 - DNA, 19 bp, Mus musculus
  siRNA target sequence for Ap3d (NM_007460.1,2522-2540).
cagcgtgtggacattatca

SEQ ID NO: 695588 - DNA, 19 bp, Mus musculus
  siRNA target sequence for Ap3d (NM_007460.1,2524-2542).
gcgtgtggacattatcact

SEQ ID NO: 695589 - DNA, 19 bp, Mus musculus
  siRNA target sequence for Ap3d (NM_007460.1,2653-2671).
gctgcctgtccagaaacat

SEQ ID NO: 695590 - DNA, 19 bp, Mus musculus
  siRNA target sequence for Ap3d (NM_007460.1,2654-2672).
ctgcctgtccagaaacata

SEQ ID NO: 695591 - DNA, 19 bp, Mus musculus
  siRNA target sequence for Ap3d (NM_007460.1,2656-2674).
gcctgtccagaaacataga

SEQ ID NO: 695592 - DNA, 19 bp, Mus musculus
  siRNA target sequence for Ap3d (NM_007460.1,2657-2675).
cctgtccagaaacatagaa

SEQ ID NO: 695593 - DNA, 19 bp, Mus musculus
  siRNA target sequence for Ap3d (NM_007460.1,2709-2727).
gtgtgctcggggtagagaa

SEQ ID NO: 695594 - DNA, 19 bp, Mus musculus
  siRNA target sequence for Ap3d (NM_007460.1,2859-2877).
ccccgtccacggaagaact

SEQ ID NO: 695595 - DNA, 19 bp, Mus musculus
  siRNA target sequence for Ap3d (NM_007460.1,2860-2878).
cccgtccacggaagaactt

SEQ ID NO: 695596 - DNA, 19 bp, Mus musculus
  siRNA target sequence for Ap3d (NM_007460.1,3022-3040).
gccacgagacaagaagaaa

SEQ ID NO: 695597 - DNA, 19 bp, Mus musculus
  siRNA target sequence for Ap3d (NM_007460.1,3144-3162).
cctacattaaagtgacata

SEQ ID NO: 695598 - DNA, 19 bp, Mus musculus
  siRNA target sequence for Ap3d (NM_007460.1,3145-3163).
ctacattaaagtgacatat

SEQ ID NO: 695599 - DNA, 19 bp, Mus musculus
  siRNA target sequence for Ap3d (NM_007460.1,3467-3485).
gacttccggctgcatttca

SEQ ID NO: 695600 - DNA, 19 bp, Mus musculus
  siRNA target sequence for Ap3d (NM_007460.1,3561-3579).
gcatgaactccatcaaagt

SEQ ID NO: 695601 - DNA, 19 bp, Mus musculus
  siRNA target sequence for Ap3d (NM_007460.1,3574-3592).
caaagtcgatggcattagt

SEQ ID NO: 695602 - DNA, 19 bp, Mus musculus
  siRNA target sequence for Ap3d (NM_007460.1,3578-3596).
gtcgatggcattagtatgt

SEQ ID NO: 695603 - DNA, 19 bp, Mus musculus
  siRNA target sequence for Ap3d (NM_007460.1,3580-3598).
cgatggcattagtatgtct

SEQ ID NO: 695604 - DNA, 19 bp, Mus musculus
  siRNA target sequence for Ap3d (NM_007460.1,3581-3599).
gatggcattagtatgtctt

SEQ ID NO: 695605 - DNA, 19 bp, Mus musculus
  siRNA target sequence for Ap3d (NM_007460.1,3730-3748).
gagctccgtgtcagtagat

SEQ ID NO: 695606 - DNA, 19 bp, Mus musculus
  siRNA target sequence for Bcl2a1b (NM_007534.1,417-435).
gggggtgttctcctcaaaa

SEQ ID NO: 695607 - DNA, 19 bp, Mus musculus
  siRNA target sequence for Bcl2a1b (NM_007534.1,418-436).
ggggtgttctcctcaaaaa

SEQ ID NO: 695608 - DNA, 19 bp, Mus musculus
  siRNA target sequence for Bcl2a1b (NM_007534.1,419-437).
gggtgttctcctcaaaaaa

SEQ ID NO: 695609 - DNA, 19 bp, Mus musculus
  siRNA target sequence for Bdkrb1 (NM_007539.1,24-42).
gctacagccttctaaccaa

SEQ ID NO: 695610 - DNA, 19 bp, Mus musculus
  siRNA target sequence for Bdkrb1 (NM_007539.1,150-168).
cctcctggggaacctttta

SEQ ID NO: 695611 - DNA, 19 bp, Mus musculus
  siRNA target sequence for Bdkrb1 (NM_007539.1,224-242).
gcctaaccatagcagaaat

SEQ ID NO: 695612 - DNA, 19 bp, Mus musculus
  siRNA target sequence for Bdkrb1 (NM_007539.1,310-328).
gttgggaaccgtttcaact

SEQ ID NO: 695613 - DNA, 19 bp, Mus musculus
  siRNA target sequence for Bdkrb1 (NM_007539.1,425-443).
gctacaggttgctggtata

SEQ ID NO: 695614 - DNA, 19 bp, Mus musculus
  siRNA target sequence for Bdkrb1 (NM_007539.1,606-624).
cgaagcttggcactttgta

SEQ ID NO: 695615 - DNA, 19 bp, Mus musculus
  siRNA target sequence for Bdkrb1 (NM_007539.1,607-625).
gaagcttggcactttgtaa

SEQ ID NO: 695616 - DNA, 19 bp, Mus musculus
  siRNA target sequence for Bdkrb1 (NM_007539.1,611-629).
cttggcactttgtaaggat

SEQ ID NO: 695617 - DNA, 19 bp, Mus musculus
  siRNA target sequence for Bdkrb1 (NM_007539.1,909-927).
ggccaacttctttgctttt

SEQ ID NO: 695618 - DNA, 19 bp, Mus musculus
  siRNA target sequence for Ceacam2 (NM_007543.2,192-210).
gcaacaatgttattctagt

SEQ ID NO: 695619 - DNA, 19 bp, Mus musculus
  siRNA target sequence for Ceacam2 (NM_007543.2,209-227).
gttgtttacaatatgatga

SEQ ID NO: 695620 - DNA, 19 bp, Mus musculus
  siRNA target sequence for Ceacam2 (NM_007543.2,230-248).
ggagtctcggcctttagct

SEQ ID NO: 695621 - DNA, 19 bp, Mus musculus
  siRNA target sequence for Ceacam2 (NM_007543.2,247-265).
ctggcacaagggatctact

SEQ ID NO: 695622 - DNA, 19 bp, Mus musculus
  siRNA target sequence for Ceacam2 (NM_007543.2,257-275).
ggatctactacgtctacaa

SEQ ID NO: 695623 - DNA, 19 bp, Mus musculus
  siRNA target sequence for Ceacam2 (NM_007543.2,258-276).
gatctactacgtctacaaa

SEQ ID NO: 695624 - DNA, 19 bp, Mus musculus
  siRNA target sequence for Ceacam2 (NM_007543.2,267-285).
cgtctacaaatgctgaaat

SEQ ID NO: 695625 - DNA, 19 bp, Mus musculus
  siRNA target sequence for Ceacam2 (NM_007543.2,270-288).
ctacaaatgctgaaattgt

SEQ ID NO: 695626 - DNA, 19 bp, Mus musculus
  siRNA target sequence for Ceacam2 (NM_007543.2,296-314).
gtaacaggcactaataaga

SEQ ID NO: 695627 - DNA, 19 bp, Mus musculus
  siRNA target sequence for Ceacam2 (NM_007543.2,444-462).
gggtcctgactggacaatt

SEQ ID NO: 695628 - DNA, 19 bp, Mus musculus
  siRNA target sequence for Ceacam2 (NM_007543.2,445-463).
ggtcctgactggacaattt

SEQ ID NO: 695629 - DNA, 19 bp, Mus musculus
  siRNA target sequence for Ceacam2 (NM_007543.2,451-469).
gactggacaatttcatgta

SEQ ID NO: 695630 - DNA, 19 bp, Mus musculus
  siRNA target sequence for Ceacam2 (NM_007543.2,586-604).
caacaatgatactcttcta

SEQ ID NO: 695631 - DNA, 19 bp, Mus musculus
  siRNA target sequence for Ceacam2 (NM_007543.2,632-650).
gcgggactcatcctcaaaa

SEQ ID NO: 695632 - DNA, 19 bp, Mus musculus
  siRNA target sequence for Ceacam2 (NM_007543.2,633-651).
cgggactcatcctcaaaat

SEQ ID NO: 695633 - DNA, 19 bp, Mus musculus
  siRNA target sequence for Ceacam2 (NM_007543.2,729-747).
caatcaaactggaagtaat

SEQ ID NO: 695634 - DNA, 19 bp, Mus musculus
  siRNA target sequence for Ceacam2 (NM_007543.2,743-761).
gtaatatttgactcaacat

SEQ ID NO: 695635 - DNA, 19 bp, Mus musculus
  siRNA target sequence for Ceacam2 (NM_007543.2,752-770).
gactcaacatatgacattt

SEQ ID NO: 695636 - DNA, 19 bp, Mus musculus
  siRNA target sequence for Ceacam2 (NM_007543.2,754-772).
ctcaacatatgacatttca

SEQ ID NO: 695637 - DNA, 19 bp, Mus musculus
  siRNA target sequence for Ceacam2 (NM_007543.2,756-774).
caacatatgacatttcaga

SEQ ID NO: 695638 - DNA, 19 bp, Mus musculus
  siRNA target sequence for Ceacam2 (NM_007543.2,776-794).
gtccccattgctgtaatca

SEQ ID NO: 695639 - DNA, 19 bp, Mus musculus
  siRNA target sequence for Ceacam2 (NM_007543.2,781-799).
cattgctgtaatcataact

SEQ ID NO: 695640 - DNA, 19 bp, Mus musculus
  siRNA target sequence for Biklk (NM_007546.1,246-264).
cctgcatcggcgatgagat

SEQ ID NO: 695641 - DNA, 19 bp, Mus musculus
  siRNA target sequence for Biklk (NM_007546.1,343-361).
gacaggtgtcagaggtatt

SEQ ID NO: 695642 - DNA, 19 bp, Mus musculus
  siRNA target sequence for Biklk (NM_007546.1,500-518).
ctgggtggggcctggtatt

SEQ ID NO: 695643 - DNA, 19 bp, Mus musculus
  siRNA target sequence for Ptpns1 (NM_007547.1,478-496).
ccggtgggacccattaggt

SEQ ID NO: 695644 - DNA, 19 bp, Mus musculus
  siRNA target sequence for Ptpns1 (NM_007547.1,710-728).
ggggaacagaggtctatgt

SEQ ID NO: 695645 - DNA, 19 bp, Mus musculus
  siRNA target sequence for Ptpns1 (NM_007547.1,711-729).
gggaacagaggtctatgta

SEQ ID NO: 695646 - DNA, 19 bp, Mus musculus
  siRNA target sequence for Ptpns1 (NM_007547.1,839-857).
ccctgaagtggttcaaaga

SEQ ID NO: 695647 - DNA, 19 bp, Mus musculus
  siRNA target sequence for Ptpns1 (NM_007547.1,840-858).
cctgaagtggttcaaagat

SEQ ID NO: 695648 - DNA, 19 bp, Mus musculus
  siRNA target sequence for Ptpns1 (NM_007547.1,934-952).
gtcagggtggtactaaact

SEQ ID NO: 695649 - DNA, 19 bp, Mus musculus
  siRNA target sequence for Ptpns1 (NM_007547.1,951-969).
ctccatggatgttaattct

SEQ ID NO: 695650 - DNA, 19 bp, Mus musculus
  siRNA target sequence for Ptpns1 (NM_007547.1,953-971).
ccatggatgttaattctaa

SEQ ID NO: 695651 - DNA, 19 bp, Mus musculus
  siRNA target sequence for Ptpns1 (NM_007547.1,991-1009).
cacatcaccttggatagaa

SEQ ID NO: 695652 - DNA, 19 bp, Mus musculus
  siRNA target sequence for Ptpns1 (NM_007547.1,1022-1040).
ggattgctaacctgtctaa

SEQ ID NO: 695653 - DNA, 19 bp, Mus musculus
  siRNA target sequence for Ptpns1 (NM_007547.1,1027-1045).
gctaacctgtctaacttca

SEQ ID NO: 695654 - DNA, 19 bp, Mus musculus
  siRNA target sequence for Ptpns1 (NM_007547.1,1186-1204).
gacacgcccaagaatctca

SEQ ID NO: 695655 - DNA, 19 bp, Mus musculus
  siRNA target sequence for Ptpns1 (NM_007547.1,1190-1208).
cgcccaagaatctcacaaa

SEQ ID NO: 695656 - DNA, 19 bp, Mus musculus
  siRNA target sequence for Ptpns1 (NM_007547.1,1192-1210).
cccaagaatctcacaaaga

SEQ ID NO: 695657 - DNA, 19 bp, Mus musculus
  siRNA target sequence for Ptpns1 (NM_007547.1,1212-1230).
cacggatgggacctataat

SEQ ID NO: 695658 - DNA, 19 bp, Mus musculus
  siRNA target sequence for Ptpns1 (NM_007547.1,1214-1232).
cggatgggacctataatta

SEQ ID NO: 695659 - DNA, 19 bp, Mus musculus
  siRNA target sequence for Ptpns1 (NM_007547.1,1216-1234).
gatgggacctataattaca

SEQ ID NO: 695660 - DNA, 19 bp, Mus musculus
  siRNA target sequence for Ptpns1 (NM_007547.1,1219-1237).
gggacctataattacacaa

SEQ ID NO: 695661 - DNA, 19 bp, Mus musculus
  siRNA target sequence for Ptpns1 (NM_007547.1,1315-1333).
gcgatcacccgaaaccata

SEQ ID NO: 695662 - DNA, 19 bp, Mus musculus
  siRNA target sequence for Ptpns1 (NM_007547.1,1360-1378).
gatcaagggagcatgcaaa

SEQ ID NO: 695663 - DNA, 19 bp, Mus musculus
  siRNA target sequence for Ptpns1 (NM_007547.1,1374-1392).
gcaaaccttccctggtaat

SEQ ID NO: 695664 - DNA, 19 bp, Mus musculus
  siRNA target sequence for Ptpns1 (NM_007547.1,1380-1398).
cttccctggtaataatgct

SEQ ID NO: 695665 - DNA, 19 bp, Mus musculus
  siRNA target sequence for Ptpns1 (NM_007547.1,1400-1418).
cccacaactggaatgtctt

SEQ ID NO: 695666 - DNA, 19 bp, Mus musculus
  siRNA target sequence for Ptpns1 (NM_007547.1,1477-1495).
ctcctccggatcaaacaga

SEQ ID NO: 695667 - DNA, 19 bp, Mus musculus
  siRNA target sequence for Ptpns1 (NM_007547.1,1482-1500).
ccggatcaaacagaagaaa

SEQ ID NO: 695668 - DNA, 19 bp, Mus musculus
  siRNA target sequence for Ptpns1 (NM_007547.1,1598-1616).
catacgcagacctgaatct

SEQ ID NO: 695669 - DNA, 19 bp, Mus musculus
  siRNA target sequence for Ptpns1 (NM_007547.1,1609-1627).
ctgaatctgcccaaagaga

SEQ ID NO: 695670 - DNA, 19 bp, Mus musculus
  siRNA target sequence for Bmp8a (NM_007558.1,938-956).
cccagggatctttgatgat

SEQ ID NO: 695671 - DNA, 19 bp, Mus musculus
  siRNA target sequence for Btg2 (NM_007570.1,199-217).
gcactgaccgatcattaca

SEQ ID NO: 695672 - DNA, 19 bp, Mus musculus
  siRNA target sequence for Btg2 (NM_007570.1,200-218).
cactgaccgatcattacaa

SEQ ID NO: 695673 - DNA, 19 bp, Mus musculus
  siRNA target sequence for Btg2 (NM_007570.1,503-521).
gcagcccctcgaagaacta

SEQ ID NO: 695674 - DNA, 19 bp, Mus musculus
  siRNA target sequence for Btg2 (NM_007570.1,504-522).
cagcccctcgaagaactat

SEQ ID NO: 695675 - DNA, 19 bp, Mus musculus
  siRNA target sequence for Btg2 (NM_007570.1,508-526).
ccctcgaagaactatgtga

SEQ ID NO: 695676 - DNA, 19 bp, Mus musculus
  siRNA target sequence for Btg2 (NM_007570.1,509-527).
cctcgaagaactatgtgat

SEQ ID NO: 695677 - DNA, 19 bp, Mus musculus
  siRNA target sequence for C5r1 (NM_007577.1,24-42).
ctttgaaatcaactatgat

SEQ ID NO: 695678 - DNA, 19 bp, Mus musculus
  siRNA target sequence for C5r1 (NM_007577.1,50-68).
gaaccatggatcctaacat

SEQ ID NO: 695679 - DNA, 19 bp, Mus musculus
  siRNA target sequence for C5r1 (NM_007577.1,213-231).
cgccatctggtttctgaat

SEQ ID NO: 695680 - DNA, 19 bp, Mus musculus
  siRNA target sequence for C5r1 (NM_007577.1,273-291).
cctgttcacgaccgtttta

SEQ ID NO: 695681 - DNA, 19 bp, Mus musculus
  siRNA target sequence for C5r1 (NM_007577.1,274-292).
ctgttcacgaccgttttaa

SEQ ID NO: 695682 - DNA, 19 bp, Mus musculus
  siRNA target sequence for C5r1 (NM_007577.1,276-294).
gttcacgaccgttttaaat

SEQ ID NO: 695683 - DNA, 19 bp, Mus musculus
  siRNA target sequence for C5r1 (NM_007577.1,279-297).
cacgaccgttttaaatcat

SEQ ID NO: 695684 - DNA, 19 bp, Mus musculus
  siRNA target sequence for C5r1 (NM_007577.1,375-393).
gctgctggctaccattagt

SEQ ID NO: 695685 - DNA, 19 bp, Mus musculus
  siRNA target sequence for C5r1 (NM_007577.1,517-535).
gtgtaccgggaggcatata

SEQ ID NO: 695686 - DNA, 19 bp, Mus musculus
  siRNA target sequence for C5r1 (NM_007577.1,552-570).
gcacactgtatgtggtatt

SEQ ID NO: 695687 - DNA, 19 bp, Mus musculus
  siRNA target sequence for C5r1 (NM_007577.1,553-571).
cacactgtatgtggtatta

SEQ ID NO: 695688 - DNA, 19 bp, Mus musculus
  siRNA target sequence for C5r1 (NM_007577.1,620-638).
ggctgatggtgggttttgt

SEQ ID NO: 695689 - DNA, 19 bp, Mus musculus
  siRNA target sequence for C5r1 (NM_007577.1,713-731).
ccaccaagacgctcaaagt

SEQ ID NO: 695690 - DNA, 19 bp, Mus musculus
  siRNA target sequence for C5r1 (NM_007577.1,780-798).
ggtgaccggggtgatgata

SEQ ID NO: 695691 - DNA, 19 bp, Mus musculus
  siRNA target sequence for C5r1 (NM_007577.1,942-960).
gtctctccccagcatcata

SEQ ID NO: 695692 - DNA, 19 bp, Mus musculus
  siRNA target sequence for C5r1 (NM_007577.1,983-1001).
cagtgggcagggatagcaa

SEQ ID NO: 695693 - DNA, 19 bp, Mus musculus
  siRNA target sequence for C5r1 (NM_007577.1,988-1006).
ggcagggatagcaagactt

SEQ ID NO: 695694 - DNA, 19 bp, Mus musculus
  siRNA target sequence for C5r1 (NM_007577.1,989-1007).
gcagggatagcaagacttt

SEQ ID NO: 695695 - DNA, 19 bp, Mus musculus
  siRNA target sequence for C5r1 (NM_007577.1,993-1011).
ggatagcaagactttcact

SEQ ID NO: 695696 - DNA, 19 bp, Mus musculus
  siRNA target sequence for Cappa3 (NM_007605.2,130-148).
cagcgtcttgagtaggaaa

SEQ ID NO: 695697 - DNA, 19 bp, Mus musculus
  siRNA target sequence for Cappa3 (NM_007605.2,227-245).
ctgcttatccgagatgaaa

SEQ ID NO: 695698 - DNA, 19 bp, Mus musculus
  siRNA target sequence for Cappa3 (NM_007605.2,281-299).
cagcactgccaaaaatact

SEQ ID NO: 695699 - DNA, 19 bp, Mus musculus
  siRNA target sequence for Cappa3 (NM_007605.2,355-373).
gggtgacttccgcttcttt

SEQ ID NO: 695700 - DNA, 19 bp, Mus musculus
  siRNA target sequence for Cappa3 (NM_007605.2,374-392).
gactaccagagcaaacttt

SEQ ID NO: 695701 - DNA, 19 bp, Mus musculus
  siRNA target sequence for Cappa3 (NM_007605.2,380-398).
cagagcaaactttctttca

SEQ ID NO: 695702 - DNA, 19 bp, Mus musculus
  siRNA target sequence for Cappa3 (NM_007605.2,419-437).
caactgagggatatccaaa

SEQ ID NO: 695703 - DNA, 19 bp, Mus musculus
  siRNA target sequence for Cappa3 (NM_007605.2,443-461).
ggaatcattcggaatgaga

SEQ ID NO: 695704 - DNA, 19 bp, Mus musculus
  siRNA target sequence for Cappa3 (NM_007605.2,491-509).
gccttaaaactctatgtga

SEQ ID NO: 695705 - DNA, 19 bp, Mus musculus
  siRNA target sequence for Cappa3 (NM_007605.2,492-510).
ccttaaaactctatgtgaa

SEQ ID NO: 695706 - DNA, 19 bp, Mus musculus
  siRNA target sequence for Cappa3 (NM_007605.2,493-511).
cttaaaactctatgtgaat

SEQ ID NO: 695707 - DNA, 19 bp, Mus musculus
  siRNA target sequence for Cappa3 (NM_007605.2,615-633).
gttggaacggtctttggaa

SEQ ID NO: 695708 - DNA, 19 bp, Mus musculus
  siRNA target sequence for Cappa3 (NM_007605.2,649-667).
ccaggtaaacccgtttcta

SEQ ID NO: 695709 - DNA, 19 bp, Mus musculus
  siRNA target sequence for Cappa3 (NM_007605.2,650-668).
caggtaaacccgtttctaa

SEQ ID NO: 695710 - DNA, 19 bp, Mus musculus
  siRNA target sequence for Cappa3 (NM_007605.2,711-729).
ggtgtgtcaaccttcatat

SEQ ID NO: 695711 - DNA, 19 bp, Mus musculus
  siRNA target sequence for Cappa3 (NM_007605.2,712-730).
gtgtgtcaaccttcatatt

SEQ ID NO: 695712 - DNA, 19 bp, Mus musculus
  siRNA target sequence for Cappa3 (NM_007605.2,714-732).
gtgtcaaccttcatattga

SEQ ID NO: 695713 - DNA, 19 bp, Mus musculus
  siRNA target sequence for Cappa3 (NM_007605.2,756-774).
gcttggaggtggtcaatca

SEQ ID NO: 695714 - DNA, 19 bp, Mus musculus
  siRNA target sequence for Cappa3 (NM_007605.2,757-775).
cttggaggtggtcaatcaa

SEQ ID NO: 695715 - DNA, 19 bp, Mus musculus
  siRNA target sequence for Cappa3 (NM_007605.2,834-852).
ctgctgtcatagaagaact

SEQ ID NO: 695716 - DNA, 19 bp, Mus musculus
  siRNA target sequence for Cappa3 (NM_007605.2,864-882).
ctaacgaagccctgagaaa

SEQ ID NO: 695717 - DNA, 19 bp, Mus musculus
  siRNA target sequence for Cappa3 (NM_007605.2,868-886).
cgaagccctgagaaaaata

SEQ ID NO: 695718 - DNA, 19 bp, Mus musculus
  siRNA target sequence for Cappa3 (NM_007605.2,902-920).
ccagtgacacgcactttga

SEQ ID NO: 695719 - DNA, 19 bp, Mus musculus
  siRNA target sequence for Cappa3 (NM_007605.2,903-921).
cagtgacacgcactttgat

SEQ ID NO: 695720 - DNA, 19 bp, Mus musculus
  siRNA target sequence for Cappa3 (NM_007605.2,933-951).
ggatcctctctgacttgaa

SEQ ID NO: 695721 - DNA, 19 bp, Mus musculus
  siRNA target sequence for Cappa3 (NM_007605.2,934-952).
gatcctctctgacttgaat

SEQ ID NO: 695722 - DNA, 19 bp, Mus musculus
  siRNA target sequence for Cappa3 (NM_007605.2,955-973).
ggtgatgtaccccaagtta

SEQ ID NO: 695723 - DNA, 19 bp, Mus musculus
  siRNA target sequence for Cappa3 (NM_007605.2,965-983).
cccaagttagggtatgtta

SEQ ID NO: 695724 - DNA, 19 bp, Mus musculus
  siRNA target sequence for Cappa3 (NM_007605.2,966-984).
ccaagttagggtatgttat

SEQ ID NO: 695725 - DNA, 19 bp, Mus musculus
  siRNA target sequence for Cappa3 (NM_007605.2,967-985).
caagttagggtatgttatt

SEQ ID NO: 695726 - DNA, 19 bp, Mus musculus
  siRNA target sequence for Cappa3 (NM_007605.2,974-992).
gggtatgttatttactcaa

SEQ ID NO: 695727 - DNA, 19 bp, Mus musculus
  siRNA target sequence for Cappa3 (NM_007605.2,998-1016).
gtgttgtgcaactggataa

SEQ ID NO: 695728 - DNA, 19 bp, Mus musculus
  siRNA target sequence for Cappa3 (NM_007605.2,1000-1018).
gttgtgcaactggataata

SEQ ID NO: 695729 - DNA, 19 bp, Mus musculus
  siRNA target sequence for Cd48 (NM_007649.2,104-122).
ggatttcaaggtcattcaa

SEQ ID NO: 695730 - DNA, 19 bp, Mus musculus
  siRNA target sequence for Cd48 (NM_007649.2,105-123).
gatttcaaggtcattcaat

SEQ ID NO: 695731 - DNA, 19 bp, Mus musculus
  siRNA target sequence for Cd48 (NM_007649.2,139-157).
caccaccggcagcaatgta

SEQ ID NO: 695732 - DNA, 19 bp, Mus musculus
  siRNA target sequence for Cd48 (NM_007649.2,155-173).
gtaaccctgaaaatccata

SEQ ID NO: 695733 - DNA, 19 bp, Mus musculus
  siRNA target sequence for Cd48 (NM_007649.2,159-177).
ccctgaaaatccataagga

SEQ ID NO: 695734 - DNA, 19 bp, Mus musculus
  siRNA target sequence for Cd48 (NM_007649.2,175-193).
ggacccacttggaccatat

SEQ ID NO: 695735 - DNA, 19 bp, Mus musculus
  siRNA target sequence for Cd48 (NM_007649.2,197-215).
cgtatcacctggcttcata

SEQ ID NO: 695736 - DNA, 19 bp, Mus musculus
  siRNA target sequence for Cd48 (NM_007649.2,205-223).
ctggcttcatactaaaaat

SEQ ID NO: 695737 - DNA, 19 bp, Mus musculus
  siRNA target sequence for Cd48 (NM_007649.2,236-254).
gagtacaactataatagta

SEQ ID NO: 695738 - DNA, 19 bp, Mus musculus
  siRNA target sequence for Cd48 (NM_007649.2,238-256).
gtacaactataatagtaca

SEQ ID NO: 695739 - DNA, 19 bp, Mus musculus
  siRNA target sequence for Cd48 (NM_007649.2,244-262).
ctataatagtacaaagaca

SEQ ID NO: 695740 - DNA, 19 bp, Mus musculus
  siRNA target sequence for Cd48 (NM_007649.2,265-283).
cttcgagtctgaatttaaa

SEQ ID NO: 695741 - DNA, 19 bp, Mus musculus
  siRNA target sequence for Cd48 (NM_007649.2,364-382).
gagagtgctgcgtgaaact

SEQ ID NO: 695742 - DNA, 19 bp, Mus musculus
  siRNA target sequence for Cd48 (NM_007649.2,426-444).
ccaagccttccatagaaat

SEQ ID NO: 695743 - DNA, 19 bp, Mus musculus
  siRNA target sequence for Cd48 (NM_007649.2,432-450).
cttccatagaaatcaataa

SEQ ID NO: 695744 - DNA, 19 bp, Mus musculus
  siRNA target sequence for Cd48 (NM_007649.2,502-520).
ggaccagcatgttgactat

SEQ ID NO: 695745 - DNA, 19 bp, Mus musculus
  siRNA target sequence for Cd48 (NM_007649.2,503-521).
gaccagcatgttgactata

SEQ ID NO: 695746 - DNA, 19 bp, Mus musculus
  siRNA target sequence for Cd48 (NM_007649.2,506-524).
cagcatgttgactatactt

SEQ ID NO: 695747 - DNA, 19 bp, Mus musculus
  siRNA target sequence for Cd48 (NM_007649.2,515-533).
gactatacttggtatgaga

SEQ ID NO: 695748 - DNA, 19 bp, Mus musculus
  siRNA target sequence for Cd48 (NM_007649.2,590-608).
ccacagaacaagtctacat

SEQ ID NO: 695749 - DNA, 19 bp, Mus musculus
  siRNA target sequence for Cd48 (NM_007649.2,591-609).
cacagaacaagtctacatt

SEQ ID NO: 695750 - DNA, 19 bp, Mus musculus
  siRNA target sequence for Cd48 (NM_007649.2,685-703).
cagatcttctggagtatgt

SEQ ID NO: 695751 - DNA, 19 bp, Mus musculus
  siRNA target sequence for Cd59a (NM_007652.2,190-208).
ggtggtttcttcatgcaat

SEQ ID NO: 695752 - DNA, 19 bp, Mus musculus
  siRNA target sequence for Cd59a (NM_007652.2,300-318).
gtcatggtgagatcattat

SEQ ID NO: 695753 - DNA, 19 bp, Mus musculus
  siRNA target sequence for Cd59a (NM_007652.2,310-328).
gatcattatggaccaatta

SEQ ID NO: 695754 - DNA, 19 bp, Mus musculus
  siRNA target sequence for Cd59a (NM_007652.2,313-331).
cattatggaccaattagaa

SEQ ID NO: 695755 - DNA, 19 bp, Mus musculus
  siRNA target sequence for Cdr2 (NM_007672.1,234-252).
ccagcttgctgctgaactt

SEQ ID NO: 695756 - DNA, 19 bp, Mus musculus
  siRNA target sequence for Cdr2 (NM_007672.1,361-379).
gagcttctacggcaaatga

SEQ ID NO: 695757 - DNA, 19 bp, Mus musculus
  siRNA target sequence for Cdr2 (NM_007672.1,363-381).
gcttctacggcaaatgaat

SEQ ID NO: 695758 - DNA, 19 bp, Mus musculus
  siRNA target sequence for Cdr2 (NM_007672.1,382-400).
gagcagcatgcgaaagttt

SEQ ID NO: 695759 - DNA, 19 bp, Mus musculus
  siRNA target sequence for Cdr2 (NM_007672.1,384-402).
gcagcatgcgaaagtttat

SEQ ID NO: 695760 - DNA, 19 bp, Mus musculus
  siRNA target sequence for Cdr2 (NM_007672.1,512-530).
gcctgcaaaccaacattga

SEQ ID NO: 695761 - DNA, 19 bp, Mus musculus
  siRNA target sequence for Cdr2 (NM_007672.1,629-647).
gtctgaaagagctgtatga

SEQ ID NO: 695762 - DNA, 19 bp, Mus musculus
  siRNA target sequence for Cdr2 (NM_007672.1,649-667).
ctccgccaacactttgtgt

SEQ ID NO: 695763 - DNA, 19 bp, Mus musculus
  siRNA target sequence for Cdr2 (NM_007672.1,765-783).
gcaggcccagctaagtcta

SEQ ID NO: 695764 - DNA, 19 bp, Mus musculus
  siRNA target sequence for Cdr2 (NM_007672.1,801-819).
gagcgtggaggcagagtat

SEQ ID NO: 695765 - DNA, 19 bp, Mus musculus
  siRNA target sequence for Cdr2 (NM_007672.1,803-821).
gcgtggaggcagagtataa

SEQ ID NO: 695766 - DNA, 19 bp, Mus musculus
  siRNA target sequence for Cdr2 (NM_007672.1,972-990).
ggtgcccgactctctgttt

SEQ ID NO: 695767 - DNA, 19 bp, Mus musculus
  siRNA target sequence for Cdr2 (NM_007672.1,975-993).
gcccgactctctgtttgtt

SEQ ID NO: 695768 - DNA, 19 bp, Mus musculus
  siRNA target sequence for Cdr2 (NM_007672.1,1211-1229).
gtgccctgaaagtgaagta

SEQ ID NO: 695769 - DNA, 19 bp, Mus musculus
  siRNA target sequence for Cdr2 (NM_007672.1,1403-1421).
ctacacctccagaatacaa

SEQ ID NO: 695770 - DNA, 19 bp, Mus musculus
  siRNA target sequence for Cdr2 (NM_007672.1,1414-1432).
gaatacaaagcactattta

SEQ ID NO: 695771 - DNA, 19 bp, Mus musculus
  siRNA target sequence for Cdr2 (NM_007672.1,1423-1441).
gcactatttaaggagatat

SEQ ID NO: 695772 - DNA, 19 bp, Mus musculus
  siRNA target sequence for Cdr2 (NM_007672.1,1424-1442).
cactatttaaggagatatt

SEQ ID NO: 695773 - DNA, 19 bp, Mus musculus
  siRNA target sequence for Cdr2 (NM_007672.1,1474-1492).
gatgaacagagaacaaaat

SEQ ID NO: 695774 - DNA, 19 bp, Mus musculus
  siRNA target sequence for Ceacam10 (NM_007675.2,704-722).
cagcctccaataagattat

SEQ ID NO: 695775 - DNA, 19 bp, Mus musculus
  siRNA target sequence for Ceacam10 (NM_007675.2,809-827).
cctacgcactagatatgct

SEQ ID NO: 695776 - DNA, 19 bp, Mus musculus
  siRNA target sequence for Ceacam10 (NM_007675.2,820-838).
gatatgctatttcaaaact

SEQ ID NO: 695777 - DNA, 19 bp, Mus musculus
  siRNA target sequence for Ceacam10 (NM_007675.2,848-866).
ccctaatgcctgtgcaatt

SEQ ID NO: 695778 - DNA, 19 bp, Mus musculus
  siRNA target sequence for Ceacam10 (NM_007675.2,849-867).
cctaatgcctgtgcaattt

SEQ ID NO: 695779 - DNA, 19 bp, Mus musculus
  siRNA target sequence for Cenpb (NM_007682.2,731-749).
ctgtggtacgactttctgt

SEQ ID NO: 695780 - DNA, 19 bp, Mus musculus
  siRNA target sequence for Cenpb (NM_007682.2,1310-1328).
ggccttaatgccactatca

SEQ ID NO: 695781 - DNA, 19 bp, Mus musculus
  siRNA target sequence for Cenpb (NM_007682.2,1842-1860).
gtcacatccttcatttgga

SEQ ID NO: 695782 - DNA, 19 bp, Mus musculus
  siRNA target sequence for Cenpb (NM_007682.2,1913-1931).
cggggtcttggacatcaaa

SEQ ID NO: 695783 - DNA, 19 bp, Mus musculus
  siRNA target sequence for Cfc1 (NM_007685.1,271-289).
ccaacccagggtatcagtt

SEQ ID NO: 695784 - DNA, 19 bp, Mus musculus
  siRNA target sequence for Cfc1 (NM_007685.1,276-294).
ccagggtatcagtttgaaa

SEQ ID NO: 695785 - DNA, 19 bp, Mus musculus
  siRNA target sequence for Cfc1 (NM_007685.1,277-295).
cagggtatcagtttgaaaa

SEQ ID NO: 695786 - DNA, 19 bp, Mus musculus
  siRNA target sequence for Cfc1 (NM_007685.1,342-360).
catcggtctgggatacagt

SEQ ID NO: 695787 - DNA, 19 bp, Mus musculus
  siRNA target sequence for Cfc1 (NM_007685.1,347-365).
gtctgggatacagttatca

SEQ ID NO: 695788 - DNA, 19 bp, Mus musculus
  siRNA target sequence for Cfc1 (NM_007685.1,432-450).
ggacagaactctgagtaat

SEQ ID NO: 695789 - DNA, 19 bp, Mus musculus
  siRNA target sequence for Cfc1 (NM_007685.1,433-451).
gacagaactctgagtaatt

SEQ ID NO: 695790 - DNA, 19 bp, Mus musculus
  siRNA target sequence for Cfc1 (NM_007685.1,587-605).
gcgtgtgccctgcctattt

SEQ ID NO: 695791 - DNA, 19 bp, Mus musculus
  siRNA target sequence for Cfc1 (NM_007685.1,691-709).
ctatgcaggtgcatcttct

SEQ ID NO: 695792 - DNA, 19 bp, Mus musculus
  siRNA target sequence for Cfc1 (NM_007685.1,722-740).
gcctcccacaccaaacgtt

SEQ ID NO: 695793 - DNA, 19 bp, Mus musculus
  siRNA target sequence for Chgb (NM_007694.1,118-136).
gctcagctccagtggataa

SEQ ID NO: 695794 - DNA, 19 bp, Mus musculus
  siRNA target sequence for Chgb (NM_007694.1,131-149).
ggataacagggatcacaat

SEQ ID NO: 695795 - DNA, 19 bp, Mus musculus
  siRNA target sequence for Chgb (NM_007694.1,161-179).
gactcgctgcattatcgaa

SEQ ID NO: 695796 - DNA, 19 bp, Mus musculus
  siRNA target sequence for Chgb (NM_007694.1,232-250).
gccggcaagtcctgaagaa

SEQ ID NO: 695797 - DNA, 19 bp, Mus musculus
  siRNA target sequence for Chgb (NM_007694.1,290-308).
ccagaactcgaagtttgaa

SEQ ID NO: 695798 - DNA, 19 bp, Mus musculus
  siRNA target sequence for Chgb (NM_007694.1,373-391).
caggcgctccagtagaaga

SEQ ID NO: 695799 - DNA, 19 bp, Mus musculus
  siRNA target sequence for Chgb (NM_007694.1,406-424).
cgaaggtaggcaatgagaa

SEQ ID NO: 695800 - DNA, 19 bp, Mus musculus
  siRNA target sequence for Chgb (NM_007694.1,491-509).
ccaacaagcgtccaaagaa

SEQ ID NO: 695801 - DNA, 19 bp, Mus musculus
  siRNA target sequence for Chgb (NM_007694.1,502-520).
ccaaagaagcaaagatata

SEQ ID NO: 695802 - DNA, 19 bp, Mus musculus
  siRNA target sequence for Chgb (NM_007694.1,507-525).
gaagcaaagatataccatt

SEQ ID NO: 695803 - DNA, 19 bp, Mus musculus
  siRNA target sequence for Chgb (NM_007694.1,968-986).
cgaagggcatcctctatct

SEQ ID NO: 695804 - DNA, 19 bp, Mus musculus
  siRNA target sequence for Chgb (NM_007694.1,1555-1573).
ggtttccagacagacaata

SEQ ID NO: 695805 - DNA, 19 bp, Mus musculus
  siRNA target sequence for Chgb (NM_007694.1,1556-1574).
gtttccagacagacaatat

SEQ ID NO: 695806 - DNA, 19 bp, Mus musculus
  siRNA target sequence for Chgb (NM_007694.1,1676-1694).
caacccagatgacagtttt

SEQ ID NO: 695807 - DNA, 19 bp, Mus musculus
  siRNA target sequence for Chgb (NM_007694.1,1800-1818).
gtgaattggggatatgaga

SEQ ID NO: 695808 - DNA, 19 bp, Mus musculus
  siRNA target sequence for Chgb (NM_007694.1,1837-1855).
cccctcagctcgacttgaa

SEQ ID NO: 695809 - DNA, 19 bp, Mus musculus
  siRNA target sequence for Chgb (NM_007694.1,1847-1865).
cgacttgaaacggcaatat

SEQ ID NO: 695810 - DNA, 19 bp, Mus musculus
  siRNA target sequence for Chgb (NM_007694.1,1850-1868).
cttgaaacggcaatatgat

SEQ ID NO: 695811 - DNA, 19 bp, Mus musculus
  siRNA target sequence for Chgb (NM_007694.1,1904-1922).
gaagaaggcagacgaattt

SEQ ID NO: 695812 - DNA, 19 bp, Mus musculus
  siRNA target sequence for Chgb (NM_007694.1,1914-1932).
gacgaatttcccgatttct

SEQ ID NO: 695813 - DNA, 19 bp, Mus musculus
  siRNA target sequence for Chgb (NM_007694.1,2061-2079).
cagaagatagcggaaaagt

SEQ ID NO: 695814 - DNA, 19 bp, Mus musculus
  siRNA target sequence for Chrm4 (NM_007699.1,6-24).
gaacttcacacctgtcaat

SEQ ID NO: 695815 - DNA, 19 bp, Mus musculus
  siRNA target sequence for Chrm4 (NM_007699.1,245-263).
cgttctctatgaaccttta

SEQ ID NO: 695816 - DNA, 19 bp, Mus musculus
  siRNA target sequence for Chrm4 (NM_007699.1,259-277).
ctttacaccttatacatca

SEQ ID NO: 695817 - DNA, 19 bp, Mus musculus
  siRNA target sequence for Chrm4 (NM_007699.1,438-456).
gatggcaggcctcatgatt

SEQ ID NO: 695818 - DNA, 19 bp, Mus musculus
  siRNA target sequence for Chrm4 (NM_007699.1,662-680).
gccgcagccgtgttcacaa

SEQ ID NO: 695819 - DNA, 19 bp, Mus musculus
  siRNA target sequence for Chrm4 (NM_007699.1,747-765).
gaagccgagcattaagaaa

SEQ ID NO: 695820 - DNA, 19 bp, Mus musculus
  siRNA target sequence for Chrm4 (NM_007699.1,1016-1034).
ggtccaagatccaaattgt

SEQ ID NO: 695821 - DNA, 19 bp, Mus musculus
  siRNA target sequence for Chrm4 (NM_007699.1,1112-1130).
ccaatgtggcccgaaagtt

SEQ ID NO: 695822 - DNA, 19 bp, Mus musculus
  siRNA target sequence for Chrm4 (NM_007699.1,1113-1131).
caatgtggcccgaaagttt

SEQ ID NO: 695823 - DNA, 19 bp, Mus musculus
  siRNA target sequence for Chrm4 (NM_007699.1,1235-1253).
cctggacaccctacaatgt

SEQ ID NO: 695824 - DNA, 19 bp, Mus musculus
  siRNA target sequence for Chrm4 (NM_007699.1,1238-1256).
ggacaccctacaatgtcat

SEQ ID NO: 695825 - DNA, 19 bp, Mus musculus
  siRNA target sequence for Coch (NM_007728.2,353-371).
ctctgtgtttgggaacata

SEQ ID NO: 695826 - DNA, 19 bp, Mus musculus
  siRNA target sequence for Coch (NM_007728.2,462-480).
cctggtcgagagaactact

SEQ ID NO: 695827 - DNA, 19 bp, Mus musculus
  siRNA target sequence for Coch (NM_007728.2,599-617).
ccacccaccttcaggtaaa

SEQ ID NO: 695828 - DNA, 19 bp, Mus musculus
  siRNA target sequence for Coch (NM_007728.2,600-618).
cacccaccttcaggtaaaa

SEQ ID NO: 695829 - DNA, 19 bp, Mus musculus
  siRNA target sequence for Coch (NM_007728.2,606-624).
ccttcaggtaaaagactaa

SEQ ID NO: 695830 - DNA, 19 bp, Mus musculus
  siRNA target sequence for Coch (NM_007728.2,666-684).
gcagacattgcatttctca

SEQ ID NO: 695831 - DNA, 19 bp, Mus musculus
  siRNA target sequence for Coch (NM_007728.2,667-685).
cagacattgcatttctcat

SEQ ID NO: 695832 - DNA, 19 bp, Mus musculus
  siRNA target sequence for Coch (NM_007728.2,705-723).
gggcagcgccgatttaatt

SEQ ID NO: 695833 - DNA, 19 bp, Mus musculus
  siRNA target sequence for Coch (NM_007728.2,706-724).
ggcagcgccgatttaattt

SEQ ID NO: 695834 - DNA, 19 bp, Mus musculus
  siRNA target sequence for Coch (NM_007728.2,742-760).
ggaaagtggcactaatgtt

SEQ ID NO: 695835 - DNA, 19 bp, Mus musculus
  siRNA target sequence for Coch (NM_007728.2,807-825).
gaacaccccaaaatagaat

SEQ ID NO: 695836 - DNA, 19 bp, Mus musculus
  siRNA target sequence for Coch (NM_007728.2,847-865).
cagccaaagatgtcttgtt

SEQ ID NO: 695837 - DNA, 19 bp, Mus musculus
  siRNA target sequence for Coch (NM_007728.2,868-886).
ccataaaagaagtaggttt

SEQ ID NO: 695838 - DNA, 19 bp, Mus musculus
  siRNA target sequence for Coch (NM_007728.2,983-1001).
ggtggtagtgtttattgat

SEQ ID NO: 695839 - DNA, 19 bp, Mus musculus
  siRNA target sequence for Coch (NM_007728.2,1006-1024).
ggccctctgatgacattga

SEQ ID NO: 695840 - DNA, 19 bp, Mus musculus
  siRNA target sequence for Coch (NM_007728.2,1103-1121).
ggggatggttcaagatgtt

SEQ ID NO: 695841 - DNA, 19 bp, Mus musculus
  siRNA target sequence for Coch (NM_007728.2,1109-1127).
ggttcaagatgttgcattt

SEQ ID NO: 695842 - DNA, 19 bp, Mus musculus
  siRNA target sequence for Coch (NM_007728.2,1136-1154).
ggctgtgtgtcggaataat

SEQ ID NO: 695843 - DNA, 19 bp, Mus musculus
  siRNA target sequence for Coch (NM_007728.2,1146-1164).
cggaataatggcttcttct

SEQ ID NO: 695844 - DNA, 19 bp, Mus musculus
  siRNA target sequence for Coch (NM_007728.2,1156-1174).
gcttcttctcttatcacat

SEQ ID NO: 695845 - DNA, 19 bp, Mus musculus
  siRNA target sequence for Coch (NM_007728.2,1184-1202).
gtttggcactacaaaatat

SEQ ID NO: 695846 - DNA, 19 bp, Mus musculus
  siRNA target sequence for Coch (NM_007728.2,1228-1246).
gtacgcacgaacagatgat

SEQ ID NO: 695847 - DNA, 19 bp, Mus musculus
  siRNA target sequence for Coch (NM_007728.2,1239-1257).
cagatgatgtgcagcaaaa

SEQ ID NO: 695848 - DNA, 19 bp, Mus musculus
  siRNA target sequence for Coch (NM_007728.2,1303-1321).
gcagtgttggagatagcaa

SEQ ID NO: 695849 - DNA, 19 bp, Mus musculus
  siRNA target sequence for Coch (NM_007728.2,1306-1324).
gtgttggagatagcaattt

SEQ ID NO: 695850 - DNA, 19 bp, Mus musculus
  siRNA target sequence for Coch (NM_007728.2,1327-1345).
gcctcatgctagaatttgt

SEQ ID NO: 695851 - DNA, 19 bp, Mus musculus
  siRNA target sequence for Coch (NM_007728.2,1331-1349).
catgctagaatttgtttct

SEQ ID NO: 695852 - DNA, 19 bp, Mus musculus
  siRNA target sequence for Coch (NM_007728.2,1348-1366).
ctaacatagcgaagacatt

SEQ ID NO: 695853 - DNA, 19 bp, Mus musculus
  siRNA target sequence for Coch (NM_007728.2,1396-1414).
ctgctgtacagttcactta

SEQ ID NO: 695854 - DNA, 19 bp, Mus musculus
  siRNA target sequence for Coch (NM_007728.2,1419-1437).
cagcgcaccgagttcagtt

SEQ ID NO: 695855 - DNA, 19 bp, Mus musculus
  siRNA target sequence for Coch (NM_007728.2,1422-1440).
cgcaccgagttcagtttca

SEQ ID NO: 695856 - DNA, 19 bp, Mus musculus
  siRNA target sequence for Coch (NM_007728.2,1443-1461).
gactataataccaaagaga

SEQ ID NO: 695857 - DNA, 19 bp, Mus musculus
  siRNA target sequence for Coch (NM_007728.2,1479-1497).
gcgaacatccgctacatga

SEQ ID NO: 695858 - DNA, 19 bp, Mus musculus
  siRNA target sequence for Coch (NM_007728.2,1521-1539).
gccatcgcctttactgtta

SEQ ID NO: 695859 - DNA, 19 bp, Mus musculus
  siRNA target sequence for Coch (NM_007728.2,1526-1544).
cgcctttactgttagaaat

SEQ ID NO: 695860 - DNA, 19 bp, Mus musculus
  siRNA target sequence for Coch (NM_007728.2,1728-1746).
gagtcacacgctttcttta

SEQ ID NO: 695861 - DNA, 19 bp, Mus musculus
  siRNA target sequence for Coch (NM_007728.2,1757-1775).
cacagggttagaaccaatt

SEQ ID NO: 695862 - DNA, 19 bp, Mus musculus
  siRNA target sequence for Coch (NM_007728.2,1759-1777).
cagggttagaaccaattgt

SEQ ID NO: 695863 - DNA, 19 bp, Mus musculus
  siRNA target sequence for Coch (NM_007728.2,1784-1802).
cgtcatcagaggcatttgt

SEQ ID NO: 695864 - DNA, 19 bp, Mus musculus
  siRNA target sequence for Col12a1 (NM_007730.1,161-179).
cccaccttccgacttgaat

SEQ ID NO: 695865 - DNA, 19 bp, Mus musculus
  siRNA target sequence for Col12a1 (NM_007730.1,162-180).
ccaccttccgacttgaatt

SEQ ID NO: 695866 - DNA, 19 bp, Mus musculus
  siRNA target sequence for Col12a1 (NM_007730.1,163-181).
caccttccgacttgaattt

SEQ ID NO: 695867 - DNA, 19 bp, Mus musculus
  siRNA target sequence for Col12a1 (NM_007730.1,165-183).
ccttccgacttgaatttta

SEQ ID NO: 695868 - DNA, 19 bp, Mus musculus
  siRNA target sequence for Col12a1 (NM_007730.1,221-239).
gagaccagttgatccaatt

SEQ ID NO: 695869 - DNA, 19 bp, Mus musculus
  siRNA target sequence for Col12a1 (NM_007730.1,223-241).
gaccagttgatccaattgt

SEQ ID NO: 695870 - DNA, 19 bp, Mus musculus
  siRNA target sequence for Col12a1 (NM_007730.1,235-253).
caattgtgggttacagaat

SEQ ID NO: 695871 - DNA, 19 bp, Mus musculus
  siRNA target sequence for Col12a1 (NM_007730.1,273-291).
gatgggcctactaaagaat

SEQ ID NO: 695872 - DNA, 19 bp, Mus musculus
  siRNA target sequence for Col12a1 (NM_007730.1,300-318).
gcagctagtaccactgaaa

SEQ ID NO: 695873 - DNA, 19 bp, Mus musculus
  siRNA target sequence for Col12a1 (NM_007730.1,304-322).
ctagtaccactgaaactct

SEQ ID NO: 695874 - DNA, 19 bp, Mus musculus
  siRNA target sequence for Col12a1 (NM_007730.1,313-331).
ctgaaactctattatcaga

SEQ ID NO: 695875 - DNA, 19 bp, Mus musculus
  siRNA target sequence for Col12a1 (NM_007730.1,319-337).
ctctattatcagatcttat

SEQ ID NO: 695876 - DNA, 19 bp, Mus musculus
  siRNA target sequence for Col12a1 (NM_007730.1,346-364).
cacagtatgtggtgactat

SEQ ID NO: 695877 - DNA, 19 bp, Mus musculus
  siRNA target sequence for Col12a1 (NM_007730.1,361-379).
ctataacttcctataatga

SEQ ID NO: 695878 - DNA, 19 bp, Mus musculus
  siRNA target sequence for Col12a1 (NM_007730.1,367-385).
cttcctataatgaagtaga

SEQ ID NO: 695879 - DNA, 19 bp, Mus musculus
  siRNA target sequence for Col12a1 (NM_007730.1,395-413).
gccagtaataggtcaacta

SEQ ID NO: 695880 - DNA, 19 bp, Mus musculus
  siRNA target sequence for Col12a1 (NM_007730.1,405-423).
ggtcaactaacaattcaaa

SEQ ID NO: 695881 - DNA, 19 bp, Mus musculus
  siRNA target sequence for Col12a1 (NM_007730.1,493-511).
cctggaccgacctagtgtt

SEQ ID NO: 695882 - DNA, 19 bp, Mus musculus
  siRNA target sequence for Col12a1 (NM_007730.1,496-514).
ggaccgacctagtgtttct

SEQ ID NO: 695883 - DNA, 19 bp, Mus musculus
  siRNA target sequence for Col12a1 (NM_007730.1,530-548).
gagtgtgggaagaaataat

SEQ ID NO: 695884 - DNA, 19 bp, Mus musculus
  siRNA target sequence for Col12a1 (NM_007730.1,554-572).
gtacattttagacttcatt

SEQ ID NO: 695885 - DNA, 19 bp, Mus musculus
  siRNA target sequence for Col12a1 (NM_007730.1,611-629).
gacgagggttggagttgtt

SEQ ID NO: 695886 - DNA, 19 bp, Mus musculus
  siRNA target sequence for Col12a1 (NM_007730.1,613-631).
cgagggttggagttgttca

SEQ ID NO: 695887 - DNA, 19 bp, Mus musculus
  siRNA target sequence for Col12a1 (NM_007730.1,616-634).
gggttggagttgttcagta

SEQ ID NO: 695888 - DNA, 19 bp, Mus musculus
  siRNA target sequence for Col12a1 (NM_007730.1,647-665).
caggactgaatttaactta

SEQ ID NO: 695889 - DNA, 19 bp, Mus musculus
  siRNA target sequence for Col12a1 (NM_007730.1,650-668).
gactgaatttaacttaaat

SEQ ID NO: 695890 - DNA, 19 bp, Mus musculus
  siRNA target sequence for Col12a1 (NM_007730.1,652-670).
ctgaatttaacttaaatca

SEQ ID NO: 695891 - DNA, 19 bp, Mus musculus
  siRNA target sequence for Col12a1 (NM_007730.1,690-708).
ctccttgctgcagttaaaa

SEQ ID NO: 695892 - DNA, 19 bp, Mus musculus
  siRNA target sequence for Col12a1 (NM_007730.1,739-757).
caggggatgccattgatta

SEQ ID NO: 695893 - DNA, 19 bp, Mus musculus
  siRNA target sequence for Col12a1 (NM_007730.1,741-759).
ggggatgccattgattact

SEQ ID NO: 695894 - DNA, 19 bp, Mus musculus
  siRNA target sequence for Col12a1 (NM_007730.1,742-760).
gggatgccattgattactt

SEQ ID NO: 695895 - DNA, 19 bp, Mus musculus
  siRNA target sequence for Col12a1 (NM_007730.1,743-761).
ggatgccattgattactta

SEQ ID NO: 695896 - DNA, 19 bp, Mus musculus
  siRNA target sequence for Col12a1 (NM_007730.1,748-766).
ccattgattacttagttaa

SEQ ID NO: 695897 - DNA, 19 bp, Mus musculus
  siRNA target sequence for Col12a1 (NM_007730.1,899-917).
ctctctgggcattaaagct

SEQ ID NO: 695898 - DNA, 19 bp, Mus musculus
  siRNA target sequence for Col12a1 (NM_007730.1,930-948).
gaactcaaacaaattgcat

SEQ ID NO: 695899 - DNA, 19 bp, Mus musculus
  siRNA target sequence for Col12a1 (NM_007730.1,974-992).
caatgtggccaattttgat

SEQ ID NO: 695900 - DNA, 19 bp, Mus musculus
  siRNA target sequence for Col12a1 (NM_007730.1,1002-1020).
gacatccagaatgagataa

SEQ ID NO: 695901 - DNA, 19 bp, Mus musculus
  siRNA target sequence for Col12a1 (NM_007730.1,1028-1046).
ggtgtgttcaggagttgat

SEQ ID NO: 695902 - DNA, 19 bp, Mus musculus
  siRNA target sequence for Col12a1 (NM_007730.1,1159-1177).
gcgctgtgaccggctataa

SEQ ID NO: 695903 - DNA, 19 bp, Mus musculus
  siRNA target sequence for Col12a1 (NM_007730.1,1208-1226).
ccggcatcacgctttgagt

SEQ ID NO: 695904 - DNA, 19 bp, Mus musculus
  siRNA target sequence for Col12a1 (NM_007730.1,1238-1256).
gacgaccacgctcaatgtt

SEQ ID NO: 695905 - DNA, 19 bp, Mus musculus
  siRNA target sequence for Col12a1 (NM_007730.1,1280-1298).
gtaccagatcagcgttttt

SEQ ID NO: 695906 - DNA, 19 bp, Mus musculus
  siRNA target sequence for Col12a1 (NM_007730.1,1358-1376).
gacgcagccaatgaaagtt

SEQ ID NO: 695907 - DNA, 19 bp, Mus musculus
  siRNA target sequence for Col12a1 (NM_007730.1,1583-1601).
gttcaacagagttgaagat

SEQ ID NO: 695908 - DNA, 19 bp, Mus musculus
  siRNA target sequence for Col12a1 (NM_007730.1,1586-1604).
caacagagttgaagatata

SEQ ID NO: 695909 - DNA, 19 bp, Mus musculus
  siRNA target sequence for Col12a1 (NM_007730.1,1591-1609).
gagttgaagatataatcaa

SEQ ID NO: 695910 - DNA, 19 bp, Mus musculus
  siRNA target sequence for Col12a1 (NM_007730.1,1715-1733).
cgtaccgaaggtgatgatt

SEQ ID NO: 695911 - DNA, 19 bp, Mus musculus
  siRNA target sequence for Col12a1 (NM_007730.1,1770-1788).
gatcctgctataaaactca

SEQ ID NO: 695912 - DNA, 19 bp, Mus musculus
  siRNA target sequence for Col12a1 (NM_007730.1,1906-1924).
cctttcagaggatatcatt

SEQ ID NO: 695913 - DNA, 19 bp, Mus musculus
  siRNA target sequence for Col12a1 (NM_007730.1,1939-1957).
ccatctgtcttagaattga

SEQ ID NO: 695914 - DNA, 19 bp, Mus musculus
  siRNA target sequence for Col12a1 (NM_007730.1,1958-1976).
gcaagagttggcagctata

SEQ ID NO: 695915 - DNA, 19 bp, Mus musculus
  siRNA target sequence for Col12a1 (NM_007730.1,1962-1980).
gagttggcagctataaaga

SEQ ID NO: 695916 - DNA, 19 bp, Mus musculus
  siRNA target sequence for Col12a1 (NM_007730.1,1967-1985).
ggcagctataaagaagaaa

SEQ ID NO: 695917 - DNA, 19 bp, Mus musculus
  siRNA target sequence for Col12a1 (NM_007730.1,2019-2037).
caggtaactgctaatagtt

SEQ ID NO: 695918 - DNA, 19 bp, Mus musculus
  siRNA target sequence for Col12a1 (NM_007730.1,2022-2040).
gtaactgctaatagtttca

SEQ ID NO: 695919 - DNA, 19 bp, Mus musculus
  siRNA target sequence for Col12a1 (NM_007730.1,2051-2069).
gtctcctcctggagacaat

SEQ ID NO: 695920 - DNA, 19 bp, Mus musculus
  siRNA target sequence for Col12a1 (NM_007730.1,2061-2079).
ggagacaatgtcttttcgt

SEQ ID NO: 695921 - DNA, 19 bp, Mus musculus
  siRNA target sequence for Col12a1 (NM_007730.1,2062-2080).
gagacaatgtcttttcgta

SEQ ID NO: 695922 - DNA, 19 bp, Mus musculus
  siRNA target sequence for Col12a1 (NM_007730.1,2077-2095).
cgtatcacgtcacatacaa

SEQ ID NO: 695923 - DNA, 19 bp, Mus musculus
  siRNA target sequence for Col12a1 (NM_007730.1,2140-2158).
ccagcactagtgttgttct

SEQ ID NO: 695924 - DNA, 19 bp, Mus musculus
  siRNA target sequence for Col12a1 (NM_007730.1,2143-2161).
gcactagtgttgttctcaa

SEQ ID NO: 695925 - DNA, 19 bp, Mus musculus
  siRNA target sequence for Col12a1 (NM_007730.1,2179-2197).
ccctgtacttggtgaatgt

SEQ ID NO: 695926 - DNA, 19 bp, Mus musculus
  siRNA target sequence for Col12a1 (NM_007730.1,2181-2199).
ctgtacttggtgaatgtga

SEQ ID NO: 695927 - DNA, 19 bp, Mus musculus
  siRNA target sequence for Col12a1 (NM_007730.1,2243-2261).
ggagaccactgcagaagta

SEQ ID NO: 695928 - DNA, 19 bp, Mus musculus
  siRNA target sequence for Col12a1 (NM_007730.1,2295-2313).
gagactacggacagtttta

SEQ ID NO: 695929 - DNA, 19 bp, Mus musculus
  siRNA target sequence for Col12a1 (NM_007730.1,2297-2315).
gactacggacagttttaaa

SEQ ID NO: 695930 - DNA, 19 bp, Mus musculus
  siRNA target sequence for Col12a1 (NM_007730.1,2299-2317).
ctacggacagttttaaact

SEQ ID NO: 695931 - DNA, 19 bp, Mus musculus
  siRNA target sequence for Col12a1 (NM_007730.1,2331-2349).
gctccagggagagtcttaa

SEQ ID NO: 695932 - DNA, 19 bp, Mus musculus
  siRNA target sequence for Col12a1 (NM_007730.1,2335-2353).
cagggagagtcttaaggta

SEQ ID NO: 695933 - DNA, 19 bp, Mus musculus
  siRNA target sequence for Col12a1 (NM_007730.1,2345-2363).
cttaaggtatcggattaga

SEQ ID NO: 695934 - DNA, 19 bp, Mus musculus
  siRNA target sequence for Col12a1 (NM_007730.1,2439-2457).
ctgacgcccgacacaaaat

SEQ ID NO: 695935 - DNA, 19 bp, Mus musculus
  siRNA target sequence for Col12a1 (NM_007730.1,2443-2461).
cgcccgacacaaaatatga

SEQ ID NO: 695936 - DNA, 19 bp, Mus musculus
  siRNA target sequence for Col12a1 (NM_007730.1,2444-2462).
gcccgacacaaaatatgaa

SEQ ID NO: 695937 - DNA, 19 bp, Mus musculus
  siRNA target sequence for Col12a1 (NM_007730.1,2445-2463).
cccgacacaaaatatgaaa

SEQ ID NO: 695938 - DNA, 19 bp, Mus musculus
  siRNA target sequence for Col12a1 (NM_007730.1,2446-2464).
ccgacacaaaatatgaaat

SEQ ID NO: 695939 - DNA, 19 bp, Mus musculus
  siRNA target sequence for Col12a1 (NM_007730.1,2447-2465).
cgacacaaaatatgaaata

SEQ ID NO: 695940 - DNA, 19 bp, Mus musculus
  siRNA target sequence for Col12a1 (NM_007730.1,2544-2562).
ccaagagacctaagagttt

SEQ ID NO: 695941 - DNA, 19 bp, Mus musculus
  siRNA target sequence for Col12a1 (NM_007730.1,2572-2590).
cgacatcaacgctgaagtt

SEQ ID NO: 695942 - DNA, 19 bp, Mus musculus
  siRNA target sequence for Col12a1 (NM_007730.1,2611-2629).
gaaaggtgaagcaatatct

SEQ ID NO: 695943 - DNA, 19 bp, Mus musculus
  siRNA target sequence for Col12a1 (NM_007730.1,2698-2716).
ccatgttgaggaaattgaa

SEQ ID NO: 695944 - DNA, 19 bp, Mus musculus
  siRNA target sequence for Col12a1 (NM_007730.1,2714-2732).
gaaggaagggacacagtat

SEQ ID NO: 695945 - DNA, 19 bp, Mus musculus
  siRNA target sequence for Col12a1 (NM_007730.1,2718-2736).
gaagggacacagtatgact

SEQ ID NO: 695946 - DNA, 19 bp, Mus musculus
  siRNA target sequence for Col12a1 (NM_007730.1,2721-2739).
gggacacagtatgacttat

SEQ ID NO: 695947 - DNA, 19 bp, Mus musculus
  siRNA target sequence for Col12a1 (NM_007730.1,2818-2836).
ctcagaacctagttaccaa

SEQ ID NO: 695948 - DNA, 19 bp, Mus musculus
  siRNA target sequence for Col12a1 (NM_007730.1,2897-2915).
gtacagggtctcatggaaa

SEQ ID NO: 695949 - DNA, 19 bp, Mus musculus
  siRNA target sequence for Col12a1 (NM_007730.1,2908-2926).
catggaaatcgctttacga

SEQ ID NO: 695950 - DNA, 19 bp, Mus musculus
  siRNA target sequence for Col12a1 (NM_007730.1,2961-2979).
gatgcaattcatactatga

SEQ ID NO: 695951 - DNA, 19 bp, Mus musculus
  siRNA target sequence for Col12a1 (NM_007730.1,2965-2983).
caattcatactatgataga

SEQ ID NO: 695952 - DNA, 19 bp, Mus musculus
  siRNA target sequence for Col12a1 (NM_007730.1,2997-3015).
gagaccaagtacaaaattt

SEQ ID NO: 695953 - DNA, 19 bp, Mus musculus
  siRNA target sequence for Col12a1 (NM_007730.1,3001-3019).
ccaagtacaaaatttcagt

SEQ ID NO: 695954 - DNA, 19 bp, Mus musculus
  siRNA target sequence for Col12a1 (NM_007730.1,3059-3077).
cggagatgccacaactgaa

SEQ ID NO: 695955 - DNA, 19 bp, Mus musculus
  siRNA target sequence for Col12a1 (NM_007730.1,3068-3086).
cacaactgaattatctcaa

SEQ ID NO: 695956 - DNA, 19 bp, Mus musculus
  siRNA target sequence for Col12a1 (NM_007730.1,3154-3172).
cggggaaagtcgtcaacta

SEQ ID NO: 695957 - DNA, 19 bp, Mus musculus
  siRNA target sequence for Col12a1 (NM_007730.1,3167-3185).
caactaccgtgttgtgtat

SEQ ID NO: 695958 - DNA, 19 bp, Mus musculus
  siRNA target sequence for Col12a1 (NM_007730.1,3288-3306).
gttctcccaatgtacaaga

SEQ ID NO: 695959 - DNA, 19 bp, Mus musculus
  siRNA target sequence for Col12a1 (NM_007730.1,3340-3358).
caacagcgtctcgatttaa

SEQ ID NO: 695960 - DNA, 19 bp, Mus musculus
  siRNA target sequence for Col12a1 (NM_007730.1,3363-3381).
ccgagaaacctcaaaactt

SEQ ID NO: 695961 - DNA, 19 bp, Mus musculus
  siRNA target sequence for Col12a1 (NM_007730.1,3387-3405).
ccaaccatgtcaagtttca

SEQ ID NO: 695962 - DNA, 19 bp, Mus musculus
  siRNA target sequence for Col12a1 (NM_007730.1,3427-3445).
ctggggaagtgaaaggtta

SEQ ID NO: 695963 - DNA, 19 bp, Mus musculus
  siRNA target sequence for Col12a1 (NM_007730.1,3495-3513).
gtccttggaccatatgaca

SEQ ID NO: 695964 - DNA, 19 bp, Mus musculus
  siRNA target sequence for Col12a1 (NM_007730.1,3550-3568).
cctatagagtcaatgtttt

SEQ ID NO: 695965 - DNA, 19 bp, Mus musculus
  siRNA target sequence for Col12a1 (NM_007730.1,3575-3593).
gtttgatggaggagaaagt

SEQ ID NO: 695966 - DNA, 19 bp, Mus musculus
  siRNA target sequence for Col12a1 (NM_007730.1,3597-3615).
ccactcgttgggcaagaaa

SEQ ID NO: 695967 - DNA, 19 bp, Mus musculus
  siRNA target sequence for Col12a1 (NM_007730.1,3598-3616).
cactcgttgggcaagaaat

SEQ ID NO: 695968 - DNA, 19 bp, Mus musculus
  siRNA target sequence for Col12a1 (NM_007730.1,3600-3618).
ctcgttgggcaagaaatga

SEQ ID NO: 695969 - DNA, 19 bp, Mus musculus
  siRNA target sequence for Col12a1 (NM_007730.1,3641-3659).
gacaccatttctatcttct

SEQ ID NO: 695970 - DNA, 19 bp, Mus musculus
  siRNA target sequence for Col12a1 (NM_007730.1,3651-3669).
ctatcttctgggatggatt

SEQ ID NO: 695971 - DNA, 19 bp, Mus musculus
  siRNA target sequence for Col12a1 (NM_007730.1,3719-3737).
gagcatcggccgtgcaaat

SEQ ID NO: 695972 - DNA, 19 bp, Mus musculus
  siRNA target sequence for Col12a1 (NM_007730.1,3721-3739).
gcatcggccgtgcaaattt

SEQ ID NO: 695973 - DNA, 19 bp, Mus musculus
  siRNA target sequence for Col12a1 (NM_007730.1,3722-3740).
catcggccgtgcaaatttt

SEQ ID NO: 695974 - DNA, 19 bp, Mus musculus
  siRNA target sequence for Col12a1 (NM_007730.1,3725-3743).
cggccgtgcaaattttaga

SEQ ID NO: 695975 - DNA, 19 bp, Mus musculus
  siRNA target sequence for Col12a1 (NM_007730.1,3726-3744).
ggccgtgcaaattttagaa

SEQ ID NO: 695976 - DNA, 19 bp, Mus musculus
  siRNA target sequence for Col12a1 (NM_007730.1,3728-3746).
ccgtgcaaattttagaact

SEQ ID NO: 695977 - DNA, 19 bp, Mus musculus
  siRNA target sequence for Col12a1 (NM_007730.1,3758-3776).
catttctcgtattgtagaa

SEQ ID NO: 695978 - DNA, 19 bp, Mus musculus
  siRNA target sequence for Col12a1 (NM_007730.1,3790-3808).
gccccaaaagagtacaaat

SEQ ID NO: 695979 - DNA, 19 bp, Mus musculus
  siRNA target sequence for Col12a1 (NM_007730.1,3791-3809).
ccccaaaagagtacaaatt

SEQ ID NO: 695980 - DNA, 19 bp, Mus musculus
  siRNA target sequence for Col12a1 (NM_007730.1,3985-4003).
ggcctcgtgctcgcaaaat

SEQ ID NO: 695981 - DNA, 19 bp, Mus musculus
  siRNA target sequence for Col12a1 (NM_007730.1,3986-4004).
gcctcgtgctcgcaaaatt

SEQ ID NO: 695982 - DNA, 19 bp, Mus musculus
  siRNA target sequence for Col12a1 (NM_007730.1,4013-4031).
cattaccgatggaaaatca

SEQ ID NO: 695983 - DNA, 19 bp, Mus musculus
  siRNA target sequence for Col12a1 (NM_007730.1,4079-4097).
ggagctgtttgctattggt

SEQ ID NO: 695984 - DNA, 19 bp, Mus musculus
  siRNA target sequence for Col12a1 (NM_007730.1,4080-4098).
gagctgtttgctattggta

SEQ ID NO: 695985 - DNA, 19 bp, Mus musculus
  siRNA target sequence for Col12a1 (NM_007730.1,4083-4101).
ctgtttgctattggtatta

SEQ ID NO: 695986 - DNA, 19 bp, Mus musculus
  siRNA target sequence for Col12a1 (NM_007730.1,4108-4126).
ctgatgaagttgagttaaa

SEQ ID NO: 695987 - DNA, 19 bp, Mus musculus
  siRNA target sequence for Col12a1 (NM_007730.1,4206-4224).
ctcaccatcaacttgtgta

SEQ ID NO: 695988 - DNA, 19 bp, Mus musculus
  siRNA target sequence for Col12a1 (NM_007730.1,4250-4268).
ggaagcaccgactaactta

SEQ ID NO: 695989 - DNA, 19 bp, Mus musculus
  siRNA target sequence for Col12a1 (NM_007730.1,4254-4272).
gcaccgactaacttagtaa

SEQ ID NO: 695990 - DNA, 19 bp, Mus musculus
  siRNA target sequence for Col12a1 (NM_007730.1,4255-4273).
caccgactaacttagtaat

SEQ ID NO: 695991 - DNA, 19 bp, Mus musculus
  siRNA target sequence for Col12a1 (NM_007730.1,4257-4275).
ccgactaacttagtaattt

SEQ ID NO: 695992 - DNA, 19 bp, Mus musculus
  siRNA target sequence for Col12a1 (NM_007730.1,4259-4277).
gactaacttagtaatttca

SEQ ID NO: 695993 - DNA, 19 bp, Mus musculus
  siRNA target sequence for Col12a1 (NM_007730.1,4261-4279).
ctaacttagtaatttcaga

SEQ ID NO: 695994 - DNA, 19 bp, Mus musculus
  siRNA target sequence for Col12a1 (NM_007730.1,4285-4303).
ctcaccgttcttttagagt

SEQ ID NO: 695995 - DNA, 19 bp, Mus musculus
  siRNA target sequence for Col12a1 (NM_007730.1,4369-4387).
ggaaacgccaggagtttta

SEQ ID NO: 695996 - DNA, 19 bp, Mus musculus
  siRNA target sequence for Col12a1 (NM_007730.1,4370-4388).
gaaacgccaggagttttat

SEQ ID NO: 695997 - DNA, 19 bp, Mus musculus
  siRNA target sequence for Col12a1 (NM_007730.1,4521-4539).
cctgtagttagcctgaata

SEQ ID NO: 695998 - DNA, 19 bp, Mus musculus
  siRNA target sequence for Col12a1 (NM_007730.1,4522-4540).
ctgtagttagcctgaatat

SEQ ID NO: 695999 - DNA, 19 bp, Mus musculus
  siRNA target sequence for Col12a1 (NM_007730.1,4524-4542).
gtagttagcctgaatattt

SEQ ID NO: 696000 - DNA, 19 bp, Mus musculus
  siRNA target sequence for Col12a1 (NM_007730.1,4597-4615).
ctggctacaccgtatcata

SEQ ID NO: 696001 - DNA, 19 bp, Mus musculus
  siRNA target sequence for Col12a1 (NM_007730.1,4601-4619).
ctacaccgtatcataccaa

SEQ ID NO: 696002 - DNA, 19 bp, Mus musculus
  siRNA target sequence for Col12a1 (NM_007730.1,4700-4718).
ccttcctaacacagagtat

SEQ ID NO: 696003 - DNA, 19 bp, Mus musculus
  siRNA target sequence for Col12a1 (NM_007730.1,4742-4760).
gtatgacctcactagtgaa

SEQ ID NO: 696004 - DNA, 19 bp, Mus musculus
  siRNA target sequence for Col12a1 (NM_007730.1,4866-4884).
ggaaaagttcgcaagtaca

SEQ ID NO: 696005 - DNA, 19 bp, Mus musculus
  siRNA target sequence for Col12a1 (NM_007730.1,4867-4885).
gaaaagttcgcaagtacat

SEQ ID NO: 696006 - DNA, 19 bp, Mus musculus
  siRNA target sequence for Col12a1 (NM_007730.1,4872-4890).
gttcgcaagtacattgtta

SEQ ID NO: 696007 - DNA, 19 bp, Mus musculus
  siRNA target sequence for Col12a1 (NM_007730.1,4875-4893).
cgcaagtacattgttagat

SEQ ID NO: 696008 - DNA, 19 bp, Mus musculus
  siRNA target sequence for Col12a1 (NM_007730.1,4945-4963).
ccagcactatcctcaaaga

SEQ ID NO: 696009 - DNA, 19 bp, Mus musculus
  siRNA target sequence for Col12a1 (NM_007730.1,5026-5044).
ccccagcaactgcatatga

SEQ ID NO: 696010 - DNA, 19 bp, Mus musculus
  siRNA target sequence for Col12a1 (NM_007730.1,5072-5090).
caacctccagtttactgaa

SEQ ID NO: 696011 - DNA, 19 bp, Mus musculus
  siRNA target sequence for Col12a1 (NM_007730.1,5189-5207).
ggagaccattttaaatgga

SEQ ID NO: 696012 - DNA, 19 bp, Mus musculus
  siRNA target sequence for Col12a1 (NM_007730.1,5240-5258).
ccccaatactccgtatgaa

SEQ ID NO: 696013 - DNA, 19 bp, Mus musculus
  siRNA target sequence for Col12a1 (NM_007730.1,5242-5260).
ccaatactccgtatgaagt

SEQ ID NO: 696014 - DNA, 19 bp, Mus musculus
  siRNA target sequence for Col12a1 (NM_007730.1,5318-5336).
gcgcacactgcgtctgata

SEQ ID NO: 696015 - DNA, 19 bp, Mus musculus
  siRNA target sequence for Col12a1 (NM_007730.1,5327-5345).
gcgtctgatacccttaaca

SEQ ID NO: 696016 - DNA, 19 bp, Mus musculus
  siRNA target sequence for Col12a1 (NM_007730.1,5328-5346).
cgtctgatacccttaacaa

SEQ ID NO: 696017 - DNA, 19 bp, Mus musculus
  siRNA target sequence for Col12a1 (NM_007730.1,5333-5351).
gatacccttaacaacacaa

SEQ ID NO: 696018 - DNA, 19 bp, Mus musculus
  siRNA target sequence for Col12a1 (NM_007730.1,5371-5389).
ggaaccttcaggtgtacaa

SEQ ID NO: 696019 - DNA, 19 bp, Mus musculus
  siRNA target sequence for Col12a1 (NM_007730.1,5372-5390).
gaaccttcaggtgtacaat

SEQ ID NO: 696020 - DNA, 19 bp, Mus musculus
  siRNA target sequence for Col12a1 (NM_007730.1,5433-5451).
ggtcgtgtgcagaagtaca

SEQ ID NO: 696021 - DNA, 19 bp, Mus musculus
  siRNA target sequence for Col12a1 (NM_007730.1,5642-5660).
gaggaatttgagagtgtat

SEQ ID NO: 696022 - DNA, 19 bp, Mus musculus
  siRNA target sequence for Col12a1 (NM_007730.1,5644-5662).
ggaatttgagagtgtatga

SEQ ID NO: 696023 - DNA, 19 bp, Mus musculus
  siRNA target sequence for Col12a1 (NM_007730.1,5707-5725).
gcaatcctcgtcagtacaa

SEQ ID NO: 696024 - DNA, 19 bp, Mus musculus
  siRNA target sequence for Col12a1 (NM_007730.1,5712-5730).
cctcgtcagtacaaactct

SEQ ID NO: 696025 - DNA, 19 bp, Mus musculus
  siRNA target sequence for Col12a1 (NM_007730.1,5713-5731).
ctcgtcagtacaaactctt

SEQ ID NO: 696026 - DNA, 19 bp, Mus musculus
  siRNA target sequence for Col12a1 (NM_007730.1,5715-5733).
cgtcagtacaaactctttt

SEQ ID NO: 696027 - DNA, 19 bp, Mus musculus
  siRNA target sequence for Col12a1 (NM_007730.1,5840-5858).
ggttccggtctatacagaa

SEQ ID NO: 696028 - DNA, 19 bp, Mus musculus
  siRNA target sequence for Col12a1 (NM_007730.1,5911-5929).
caagaaacatccaagtgta

SEQ ID NO: 696029 - DNA, 19 bp, Mus musculus
  siRNA target sequence for Col12a1 (NM_007730.1,5985-6003).
cagcagtaccgcattgtgt

SEQ ID NO: 696030 - DNA, 19 bp, Mus musculus
  siRNA target sequence for Col12a1 (NM_007730.1,6152-6170).
cagccagggccgaacactt

SEQ ID NO: 696031 - DNA, 19 bp, Mus musculus
  siRNA target sequence for Col12a1 (NM_007730.1,6249-6267).
gggccagttcagcaataca

SEQ ID NO: 696032 - DNA, 19 bp, Mus musculus
  siRNA target sequence for Col12a1 (NM_007730.1,6258-6276).
cagcaatacaggatcatct

SEQ ID NO: 696033 - DNA, 19 bp, Mus musculus
  siRNA target sequence for Col12a1 (NM_007730.1,6283-6301).
ctactgtcggcgatccaat

SEQ ID NO: 696034 - DNA, 19 bp, Mus musculus
  siRNA target sequence for Col12a1 (NM_007730.1,6286-6304).
ctgtcggcgatccaattga

SEQ ID NO: 696035 - DNA, 19 bp, Mus musculus
  siRNA target sequence for Col12a1 (NM_007730.1,6290-6308).
cggcgatccaattgatgaa

SEQ ID NO: 696036 - DNA, 19 bp, Mus musculus
  siRNA target sequence for Col12a1 (NM_007730.1,6291-6309).
ggcgatccaattgatgaat

SEQ ID NO: 696037 - DNA, 19 bp, Mus musculus
  siRNA target sequence for Col12a1 (NM_007730.1,6292-6310).
gcgatccaattgatgaata

SEQ ID NO: 696038 - DNA, 19 bp, Mus musculus
  siRNA target sequence for Col12a1 (NM_007730.1,6293-6311).
cgatccaattgatgaatat

SEQ ID NO: 696039 - DNA, 19 bp, Mus musculus
  siRNA target sequence for Col12a1 (NM_007730.1,6356-6374).
gcaacctgacactccatat

SEQ ID NO: 696040 - DNA, 19 bp, Mus musculus
  siRNA target sequence for Col12a1 (NM_007730.1,6360-6378).
cctgacactccatataaaa

SEQ ID NO: 696041 - DNA, 19 bp, Mus musculus
  siRNA target sequence for Col12a1 (NM_007730.1,6361-6379).
ctgacactccatataaaat

SEQ ID NO: 696042 - DNA, 19 bp, Mus musculus
  siRNA target sequence for Col12a1 (NM_007730.1,6363-6381).
gacactccatataaaatta

SEQ ID NO: 696043 - DNA, 19 bp, Mus musculus
  siRNA target sequence for Col12a1 (NM_007730.1,6453-6471).
cctcctcagaacatacaca

SEQ ID NO: 696044 - DNA, 19 bp, Mus musculus
  siRNA target sequence for Col12a1 (NM_007730.1,6521-6539).
ctcaccagttcttggatat

SEQ ID NO: 696045 - DNA, 19 bp, Mus musculus
  siRNA target sequence for Col12a1 (NM_007730.1,6523-6541).
caccagttcttggatataa

SEQ ID NO: 696046 - DNA, 19 bp, Mus musculus
  siRNA target sequence for Col12a1 (NM_007730.1,6623-6641).
caatcccagcactacctat

SEQ ID NO: 696047 - DNA, 19 bp, Mus musculus
  siRNA target sequence for Col12a1 (NM_007730.1,6680-6698).
cgttcccctcacagatcaa

SEQ ID NO: 696048 - DNA, 19 bp, Mus musculus
  siRNA target sequence for Col12a1 (NM_007730.1,6693-6711).
gatcaaggcaccacattgt

SEQ ID NO: 696049 - DNA, 19 bp, Mus musculus
  siRNA target sequence for Col12a1 (NM_007730.1,6699-6717).
ggcaccacattgtacttaa

SEQ ID NO: 696050 - DNA, 19 bp, Mus musculus
  siRNA target sequence for Col12a1 (NM_007730.1,6700-6718).
gcaccacattgtacttaaa

SEQ ID NO: 696051 - DNA, 19 bp, Mus musculus
  siRNA target sequence for Col12a1 (NM_007730.1,6793-6811).
cctcctacaggctaaagct

SEQ ID NO: 696052 - DNA, 19 bp, Mus musculus
  siRNA target sequence for Col12a1 (NM_007730.1,6855-6873).
ggatcagagaccagtcatt

SEQ ID NO: 696053 - DNA, 19 bp, Mus musculus
  siRNA target sequence for Col12a1 (NM_007730.1,6902-6920).
gtacggcgttactgttttt

SEQ ID NO: 696054 - DNA, 19 bp, Mus musculus
  siRNA target sequence for Col12a1 (NM_007730.1,6946-6964).
cgggtgtccccatcaaaga

SEQ ID NO: 696055 - DNA, 19 bp, Mus musculus
  siRNA target sequence for Col12a1 (NM_007730.1,7032-7050).
ccacctgcccgtgatgtat

SEQ ID NO: 696056 - DNA, 19 bp, Mus musculus
  siRNA target sequence for Col12a1 (NM_007730.1,7036-7054).
ctgcccgtgatgtatgcaa

SEQ ID NO: 696057 - DNA, 19 bp, Mus musculus
  siRNA target sequence for Col12a1 (NM_007730.1,7057-7075).
gggccaaggcagatattgt

SEQ ID NO: 696058 - DNA, 19 bp, Mus musculus
  siRNA target sequence for Col12a1 (NM_007730.1,7059-7077).
gccaaggcagatattgtgt

SEQ ID NO: 696059 - DNA, 19 bp, Mus musculus
  siRNA target sequence for Col12a1 (NM_007730.1,7060-7078).
ccaaggcagatattgtgtt

SEQ ID NO: 696060 - DNA, 19 bp, Mus musculus
  siRNA target sequence for Col12a1 (NM_007730.1,7065-7083).
gcagatattgtgttcttga

SEQ ID NO: 696061 - DNA, 19 bp, Mus musculus
  siRNA target sequence for Col12a1 (NM_007730.1,7085-7103).
ggatgcctcttggagtatt

SEQ ID NO: 696062 - DNA, 19 bp, Mus musculus
  siRNA target sequence for Col12a1 (NM_007730.1,7212-7230).
gaggtcaagtctgaattca

SEQ ID NO: 696063 - DNA, 19 bp, Mus musculus
  siRNA target sequence for Col12a1 (NM_007730.1,7233-7251).
ctgaacacatacaacgata

SEQ ID NO: 696064 - DNA, 19 bp, Mus musculus
  siRNA target sequence for Col12a1 (NM_007730.1,7235-7253).
gaacacatacaacgataaa

SEQ ID NO: 696065 - DNA, 19 bp, Mus musculus
  siRNA target sequence for Col12a1 (NM_007730.1,7238-7256).
cacatacaacgataaagct

SEQ ID NO: 696066 - DNA, 19 bp, Mus musculus
  siRNA target sequence for Col12a1 (NM_007730.1,7311-7329).
ggcaaggccctcacattta

SEQ ID NO: 696067 - DNA, 19 bp, Mus musculus
  siRNA target sequence for Col12a1 (NM_007730.1,7312-7330).
gcaaggccctcacatttat

SEQ ID NO: 696068 - DNA, 19 bp, Mus musculus
  siRNA target sequence for Col12a1 (NM_007730.1,7357-7375).
gcggcatgagaaagaatgt

SEQ ID NO: 696069 - DNA, 19 bp, Mus musculus
  siRNA target sequence for Col12a1 (NM_007730.1,7446-7464).
cagtcagggttcagtgtat

SEQ ID NO: 696070 - DNA, 19 bp, Mus musculus
  siRNA target sequence for Col12a1 (NM_007730.1,7575-7593).
gaggacaatctgatcacat

SEQ ID NO: 696071 - DNA, 19 bp, Mus musculus
  siRNA target sequence for Col12a1 (NM_007730.1,7705-7723).
ctgtccaaggagtctcttt

SEQ ID NO: 696072 - DNA, 19 bp, Mus musculus
  siRNA target sequence for Col12a1 (NM_007730.1,7709-7727).
ccaaggagtctctttggaa

SEQ ID NO: 696073 - DNA, 19 bp, Mus musculus
  siRNA target sequence for Col12a1 (NM_007730.1,7710-7728).
caaggagtctctttggaat

SEQ ID NO: 696074 - DNA, 19 bp, Mus musculus
  siRNA target sequence for Col12a1 (NM_007730.1,7720-7738).
ctttggaatccggatcttt

SEQ ID NO: 696075 - DNA, 19 bp, Mus musculus
  siRNA target sequence for Col12a1 (NM_007730.1,7818-7836).
cctccttcgtacacgatta

SEQ ID NO: 696076 - DNA, 19 bp, Mus musculus
  siRNA target sequence for Col12a1 (NM_007730.1,7819-7837).
ctccttcgtacacgattat

SEQ ID NO: 696077 - DNA, 19 bp, Mus musculus
  siRNA target sequence for Col12a1 (NM_007730.1,7821-7839).
ccttcgtacacgattatat

SEQ ID NO: 696078 - DNA, 19 bp, Mus musculus
  siRNA target sequence for Col12a1 (NM_007730.1,7822-7840).
cttcgtacacgattatatt

SEQ ID NO: 696079 - DNA, 19 bp, Mus musculus
  siRNA target sequence for Col12a1 (NM_007730.1,7825-7843).
cgtacacgattatattatt

SEQ ID NO: 696080 - DNA, 19 bp, Mus musculus
  siRNA target sequence for Col12a1 (NM_007730.1,7882-7900).
caatttggcaaattacaga

SEQ ID NO: 696081 - DNA, 19 bp, Mus musculus
  siRNA target sequence for Col12a1 (NM_007730.1,7938-7956).
ccttccagcaagacactat

SEQ ID NO: 696082 - DNA, 19 bp, Mus musculus
  siRNA target sequence for Col12a1 (NM_007730.1,7949-7967).
gacactatctttctttaat

SEQ ID NO: 696083 - DNA, 19 bp, Mus musculus
  siRNA target sequence for Col12a1 (NM_007730.1,7961-7979).
ctttaataaggatacaaga

SEQ ID NO: 696084 - DNA, 19 bp, Mus musculus
  siRNA target sequence for Col12a1 (NM_007730.1,7980-7998).
ggggaggtacaaactgtta

SEQ ID NO: 696085 - DNA, 19 bp, Mus musculus
  siRNA target sequence for Col12a1 (NM_007730.1,7982-8000).
ggaggtacaaactgttaca

SEQ ID NO: 696086 - DNA, 19 bp, Mus musculus
  siRNA target sequence for Col12a1 (NM_007730.1,7983-8001).
gaggtacaaactgttacat

SEQ ID NO: 696087 - DNA, 19 bp, Mus musculus
  siRNA target sequence for Col12a1 (NM_007730.1,7985-8003).
ggtacaaactgttacattt

SEQ ID NO: 696088 - DNA, 19 bp, Mus musculus
  siRNA target sequence for Col12a1 (NM_007730.1,7989-8007).
caaactgttacatttgaca

SEQ ID NO: 696089 - DNA, 19 bp, Mus musculus
  siRNA target sequence for Col12a1 (NM_007730.1,7999-8017).
catttgacacagatgaagt

SEQ ID NO: 696090 - DNA, 19 bp, Mus musculus
  siRNA target sequence for Col12a1 (NM_007730.1,8038-8056).
gctttcataaggtccatat

SEQ ID NO: 696091 - DNA, 19 bp, Mus musculus
  siRNA target sequence for Col12a1 (NM_007730.1,8039-8057).
ctttcataaggtccatatt

SEQ ID NO: 696092 - DNA, 19 bp, Mus musculus
  siRNA target sequence for Col12a1 (NM_007730.1,8068-8086).
caaagagtgttaagattta

SEQ ID NO: 696093 - DNA, 19 bp, Mus musculus
  siRNA target sequence for Col12a1 (NM_007730.1,8072-8090).
gagtgttaagatttatatt

SEQ ID NO: 696094 - DNA, 19 bp, Mus musculus
  siRNA target sequence for Col12a1 (NM_007730.1,8076-8094).
gttaagatttatattgact

SEQ ID NO: 696095 - DNA, 19 bp, Mus musculus
  siRNA target sequence for Col12a1 (NM_007730.1,8140-8158).
caactgatggctacgaaat

SEQ ID NO: 696096 - DNA, 19 bp, Mus musculus
  siRNA target sequence for Col12a1 (NM_007730.1,8149-8167).
gctacgaaattcttggaaa

SEQ ID NO: 696097 - DNA, 19 bp, Mus musculus
  siRNA target sequence for Col12a1 (NM_007730.1,8248-8266).
gagacagatgctgtgatat

SEQ ID NO: 696098 - DNA, 19 bp, Mus musculus
  siRNA target sequence for Col12a1 (NM_007730.1,8295-8313).
cctgcccttccgaatgctt

SEQ ID NO: 696099 - DNA, 19 bp, Mus musculus
  siRNA target sequence for Col12a1 (NM_007730.1,8564-8582).
gacaggaaccccaggatta

SEQ ID NO: 696100 - DNA, 19 bp, Mus musculus
  siRNA target sequence for Col12a1 (NM_007730.1,8734-8752).
ctggtcaatctggcttaaa

SEQ ID NO: 696101 - DNA, 19 bp, Mus musculus
  siRNA target sequence for Col12a1 (NM_007730.1,8812-8830).
gacaagtctgcgaacaact

SEQ ID NO: 696102 - DNA, 19 bp, Mus musculus
  siRNA target sequence for Col12a1 (NM_007730.1,8840-8858).
ccagatgagcagattcaat

SEQ ID NO: 696103 - DNA, 19 bp, Mus musculus
  siRNA target sequence for Col12a1 (NM_007730.1,9202-9220).
gtcctcctggatattgtga

SEQ ID NO: 696104 - DNA, 19 bp, Mus musculus
  siRNA target sequence for Col13a1 (NM_007731.1,746-764).
caactgctggacgagaaat

SEQ ID NO: 696105 - DNA, 19 bp, Mus musculus
  siRNA target sequence for Col13a1 (NM_007731.1,749-767).
ctgctggacgagaaatgga

SEQ ID NO: 696106 - DNA, 19 bp, Mus musculus
  siRNA target sequence for Col13a1 (NM_007731.1,891-909).
ctggacgtgtgggtatcaa

SEQ ID NO: 696107 - DNA, 19 bp, Mus musculus
  siRNA target sequence for Col13a1 (NM_007731.1,1181-1199).
cgctccaacccgataatgt

SEQ ID NO: 696108 - DNA, 19 bp, Mus musculus
  siRNA target sequence for Col13a1 (NM_007731.1,1191-1209).
cgataatgtccctaaagct

SEQ ID NO: 696109 - DNA, 19 bp, Mus musculus
  siRNA target sequence for Col13a1 (NM_007731.1,1207-1225).
gctgttgcctctactcaat

SEQ ID NO: 696110 - DNA, 19 bp, Mus musculus
  siRNA target sequence for Col13a1 (NM_007731.1,1208-1226).
ctgttgcctctactcaatt

SEQ ID NO: 696111 - DNA, 19 bp, Mus musculus
  siRNA target sequence for Col13a1 (NM_007731.1,1806-1824).
gagagatggtggattataa

SEQ ID NO: 696112 - DNA, 19 bp, Mus musculus
  siRNA target sequence for Col13a1 (NM_007731.1,2374-2392).
gggctcccagggagaaaaa

SEQ ID NO: 696113 - DNA, 19 bp, Mus musculus
  siRNA target sequence for Cpo (NM_007757.1,551-569).
caagatggagctgatgatt

SEQ ID NO: 696114 - DNA, 19 bp, Mus musculus
  siRNA target sequence for Cpo (NM_007757.1,638-656).
ccggtgggagaggaaagaa

SEQ ID NO: 696115 - DNA, 19 bp, Mus musculus
  siRNA target sequence for Cpo (NM_007757.1,686-704).
ggacgggcgtgtgtttgaa

SEQ ID NO: 696116 - DNA, 19 bp, Mus musculus
  siRNA target sequence for Cpo (NM_007757.1,687-705).
gacgggcgtgtgtttgaaa

SEQ ID NO: 696117 - DNA, 19 bp, Mus musculus
  siRNA target sequence for Cpo (NM_007757.1,725-743).
cgtcgttcatgggaatctt

SEQ ID NO: 696118 - DNA, 19 bp, Mus musculus
  siRNA target sequence for Cpo (NM_007757.1,750-768).
gaagcagcgaaccaaatga

SEQ ID NO: 696119 - DNA, 19 bp, Mus musculus
  siRNA target sequence for Cpo (NM_007757.1,786-804).
ctgaagacgaaagatagta

SEQ ID NO: 696120 - DNA, 19 bp, Mus musculus
  siRNA target sequence for Cpo (NM_007757.1,798-816).
gatagtaaattgccattta

SEQ ID NO: 696121 - DNA, 19 bp, Mus musculus
  siRNA target sequence for Cpo (NM_007757.1,864-882).
cccaccatgcatttcaact

SEQ ID NO: 696122 - DNA, 19 bp, Mus musculus
  siRNA target sequence for Cpo (NM_007757.1,902-920).
ggaagctgacggtaacaca

SEQ ID NO: 696123 - DNA, 19 bp, Mus musculus
  siRNA target sequence for Cpo (NM_007757.1,983-1001).
ccatttccaccgtactcta

SEQ ID NO: 696124 - DNA, 19 bp, Mus musculus
  siRNA target sequence for Cpo (NM_007757.1,984-1002).
catttccaccgtactctaa

SEQ ID NO: 696125 - DNA, 19 bp, Mus musculus
  siRNA target sequence for Cpo (NM_007757.1,989-1007).
ccaccgtactctaaaggaa

SEQ ID NO: 696126 - DNA, 19 bp, Mus musculus
  siRNA target sequence for Cpo (NM_007757.1,1027-1045).
cagacatctacccaaagtt

SEQ ID NO: 696127 - DNA, 19 bp, Mus musculus
  siRNA target sequence for Cpo (NM_007757.1,1029-1047).
gacatctacccaaagttta

SEQ ID NO: 696128 - DNA, 19 bp, Mus musculus
  siRNA target sequence for Cpo (NM_007757.1,1054-1072).
ggtgtgacgactacttctt

SEQ ID NO: 696129 - DNA, 19 bp, Mus musculus
  siRNA target sequence for Cpo (NM_007757.1,1055-1073).
gtgtgacgactacttcttt

SEQ ID NO: 696130 - DNA, 19 bp, Mus musculus
  siRNA target sequence for Cpo (NM_007757.1,1057-1075).
gtgacgactacttctttat

SEQ ID NO: 696131 - DNA, 19 bp, Mus musculus
  siRNA target sequence for Cpo (NM_007757.1,1178-1196).
ggctgtggtcccttcctat

SEQ ID NO: 696132 - DNA, 19 bp, Mus musculus
  siRNA target sequence for Cpo (NM_007757.1,1269-1287).
gggcggtatgtggagttta

SEQ ID NO: 696133 - DNA, 19 bp, Mus musculus
  siRNA target sequence for Cpo (NM_007757.1,1271-1289).
gcggtatgtggagtttaat

SEQ ID NO: 696134 - DNA, 19 bp, Mus musculus
  siRNA target sequence for Cpo (NM_007757.1,1283-1301).
gtttaatctgttgtatgat

SEQ ID NO: 696135 - DNA, 19 bp, Mus musculus
  siRNA target sequence for Cpo (NM_007757.1,1339-1357).
ggatcgaaagtatcttgat

SEQ ID NO: 696136 - DNA, 19 bp, Mus musculus
  siRNA target sequence for Cpo (NM_007757.1,1396-1414).
ctcccccagagaattccaa

SEQ ID NO: 696137 - DNA, 19 bp, Mus musculus
  siRNA target sequence for Crcp (NM_007761.1,137-155).
gaggtgttccagttactaa

SEQ ID NO: 696138 - DNA, 19 bp, Mus musculus
  siRNA target sequence for Crcp (NM_007761.1,148-166).
gttactaacggatctcaaa

SEQ ID NO: 696139 - DNA, 19 bp, Mus musculus
  siRNA target sequence for Crcp (NM_007761.1,281-299).
ccagcgattgtccaagaat

SEQ ID NO: 696140 - DNA, 19 bp, Mus musculus
  siRNA target sequence for Crcp (NM_007761.1,282-300).
cagcgattgtccaagaatt

SEQ ID NO: 696141 - DNA, 19 bp, Mus musculus
  siRNA target sequence for Crcp (NM_007761.1,445-463).
gcacactgtcactagcatt

SEQ ID NO: 696142 - DNA, 19 bp, Mus musculus
  siRNA target sequence for Crcp (NM_007761.1,490-508).
gagcaaaagcactagcaat

SEQ ID NO: 696143 - DNA, 19 bp, Mus musculus
  siRNA target sequence for Crip1 (NM_007763.1,81-99).
gcgacaaggaggtgtattt

SEQ ID NO: 696144 - DNA, 19 bp, Mus musculus
  siRNA target sequence for Crip1 (NM_007763.1,226-244).
ctgctactccgccatgttt

SEQ ID NO: 696145 - DNA, 19 bp, Mus musculus
  siRNA target sequence for Pcdha4 (NM_007766.1,589-607).
gactgagtccaaatgatta

SEQ ID NO: 696146 - DNA, 19 bp, Mus musculus
  siRNA target sequence for Pcdha4 (NM_007766.1,591-609).
ctgagtccaaatgattact

SEQ ID NO: 696147 - DNA, 19 bp, Mus musculus
  siRNA target sequence for Pcdha4 (NM_007766.1,632-650).
cgacgaacgggtaaaaggt

SEQ ID NO: 696148 - DNA, 19 bp, Mus musculus
  siRNA target sequence for Pcdha4 (NM_007766.1,691-709).
ctccagagataattttagt

SEQ ID NO: 696149 - DNA, 19 bp, Mus musculus
  siRNA target sequence for Pcdha4 (NM_007766.1,747-765).
ggcagtgttcagttactca

SEQ ID NO: 696150 - DNA, 19 bp, Mus musculus
  siRNA target sequence for Pcdha4 (NM_007766.1,894-912).
gtaaatggggatattatgt

SEQ ID NO: 696151 - DNA, 19 bp, Mus musculus
  siRNA target sequence for Pcdha4 (NM_007766.1,966-984).
cctgttagcggagagatta

SEQ ID NO: 696152 - DNA, 19 bp, Mus musculus
  siRNA target sequence for Pcdha4 (NM_007766.1,967-985).
ctgttagcggagagattat

SEQ ID NO: 696153 - DNA, 19 bp, Mus musculus
  siRNA target sequence for Pcdha4 (NM_007766.1,987-1005).
gtaaagggatacattgatt

SEQ ID NO: 696154 - DNA, 19 bp, Mus musculus
  siRNA target sequence for Pcdha4 (NM_007766.1,992-1010).
gggatacattgattttgaa

SEQ ID NO: 696155 - DNA, 19 bp, Mus musculus
  siRNA target sequence for Pcdha4 (NM_007766.1,1015-1033).
gcaaatcctatgaaattct

SEQ ID NO: 696156 - DNA, 19 bp, Mus musculus
  siRNA target sequence for Pcdha4 (NM_007766.1,1032-1050).
ctcatagagggaattgaca

SEQ ID NO: 696157 - DNA, 19 bp, Mus musculus
  siRNA target sequence for Pcdha4 (NM_007766.1,1069-1087).
ctgggcactgtaaagtcat

SEQ ID NO: 696158 - DNA, 19 bp, Mus musculus
  siRNA target sequence for Pcdha4 (NM_007766.1,1072-1090).
ggcactgtaaagtcattgt

SEQ ID NO: 696159 - DNA, 19 bp, Mus musculus
  siRNA target sequence for Pcdha4 (NM_007766.1,1116-1134).
gttccagaattggaattca

SEQ ID NO: 696160 - DNA, 19 bp, Mus musculus
  siRNA target sequence for Pcdha4 (NM_007766.1,1127-1145).
ggaattcaaatctctatca

SEQ ID NO: 696161 - DNA, 19 bp, Mus musculus
  siRNA target sequence for Pcdha4 (NM_007766.1,1146-1164).
cttccaatacgagagaatt

SEQ ID NO: 696162 - DNA, 19 bp, Mus musculus
  siRNA target sequence for Pcdha4 (NM_007766.1,1235-1253).
ctgctccctgacaagtcat

SEQ ID NO: 696163 - DNA, 19 bp, Mus musculus
  siRNA target sequence for Pcdha4 (NM_007766.1,1936-1954).
gccttttccgcgtaggttt

SEQ ID NO: 696164 - DNA, 19 bp, Mus musculus
  siRNA target sequence for Pcdha4 (NM_007766.1,2278-2296).
ctccaaaaccggtaatggt

SEQ ID NO: 696165 - DNA, 19 bp, Mus musculus
  siRNA target sequence for Pcdha4 (NM_007766.1,2416-2434).
gggacagagaggatcaatt

SEQ ID NO: 696166 - DNA, 19 bp, Mus musculus
  siRNA target sequence for Pcdha4 (NM_007766.1,2685-2703).
ccaggcaaccccaaacagt

SEQ ID NO: 696167 - DNA, 19 bp, Mus musculus
  siRNA target sequence for Pcdha4 (NM_007766.1,2711-2729).
cggtgagttgccagacaaa

SEQ ID NO: 696168 - DNA, 19 bp, Mus musculus
  siRNA target sequence for Pcdha4 (NM_007766.1,2712-2730).
ggtgagttgccagacaaat

SEQ ID NO: 696169 - DNA, 19 bp, Mus musculus
  siRNA target sequence for Pcdha4 (NM_007766.1,2713-2731).
gtgagttgccagacaaatt

SEQ ID NO: 696170 - DNA, 19 bp, Mus musculus
  siRNA target sequence for Pcdha4 (NM_007766.1,2717-2735).
gttgccagacaaattcatt

SEQ ID NO: 696171 - DNA, 19 bp, Mus musculus
  siRNA target sequence for Pcdha4 (NM_007766.1,2742-2760).
ggatctcctgcaatcatct

SEQ ID NO: 696172 - DNA, 19 bp, Mus musculus
  siRNA target sequence for Pcdha4 (NM_007766.1,2772-2790).
gagcctgctaacaaccaaa

SEQ ID NO: 696173 - DNA, 19 bp, Mus musculus
  siRNA target sequence for Pcdha4 (NM_007766.1,2774-2792).
gcctgctaacaaccaaatt

SEQ ID NO: 696174 - DNA, 19 bp, Mus musculus
  siRNA target sequence for Pcdha4 (NM_007766.1,2776-2794).
ctgctaacaaccaaattga

SEQ ID NO: 696175 - DNA, 19 bp, Mus musculus
  siRNA target sequence for Pcdha4 (NM_007766.1,2778-2796).
gctaacaaccaaattgaca

SEQ ID NO: 696176 - DNA, 19 bp, Mus musculus
  siRNA target sequence for Cryga (NM_007774.3,259-277).
cctgccgttccattccata

SEQ ID NO: 696177 - DNA, 19 bp, Mus musculus
  siRNA target sequence for Cryga (NM_007774.3,375-393).
cgcctccatgagatctact

SEQ ID NO: 696178 - DNA, 19 bp, Mus musculus
  siRNA target sequence for Cryga (NM_007774.3,525-543).
ctgagacgggtcatggatt

SEQ ID NO: 696179 - DNA, 19 bp, Mus musculus
  siRNA target sequence for Cryga (NM_007774.3,529-547).
gacgggtcatggatttgta

SEQ ID NO: 696180 - DNA, 19 bp, Mus musculus
  siRNA target sequence for Crygd (NM_007776.1,350-368).
cgattccacttcaatgaga

SEQ ID NO: 696181 - DNA, 19 bp, Mus musculus
  siRNA target sequence for Csna (NM_007784.2,88-106).
gctatgcccagacttcata

SEQ ID NO: 696182 - DNA, 19 bp, Mus musculus
  siRNA target sequence for Csna (NM_007784.2,93-111).
gcccagacttcatagtaga

SEQ ID NO: 696183 - DNA, 19 bp, Mus musculus
  siRNA target sequence for Csna (NM_007784.2,247-265).
gatgaaatcaaggtaacta

SEQ ID NO: 696184 - DNA, 19 bp, Mus musculus
  siRNA target sequence for Csna (NM_007784.2,326-344).
catcaagtgaggaatctga

SEQ ID NO: 696185 - DNA, 19 bp, Mus musculus
  siRNA target sequence for Csna (NM_007784.2,346-364).
gaagctattcccaatatca

SEQ ID NO: 696186 - DNA, 19 bp, Mus musculus
  siRNA target sequence for Csna (NM_007784.2,363-381).
cactgagcagaaaaacatt

SEQ ID NO: 696187 - DNA, 19 bp, Mus musculus
  siRNA target sequence for Csna (NM_007784.2,734-752).
cctactatccacatatgga

SEQ ID NO: 696188 - DNA, 19 bp, Mus musculus
  siRNA target sequence for Csna (NM_007784.2,757-775).
ccttacagaatgaatgcat

SEQ ID NO: 696189 - DNA, 19 bp, Mus musculus
  siRNA target sequence for Csna (NM_007784.2,851-869).
cacaaatcttccagtatga

SEQ ID NO: 696190 - DNA, 19 bp, Mus musculus
  siRNA target sequence for Csna (NM_007784.2,917-935).
ctcccaaagctgtccttaa

SEQ ID NO: 696191 - DNA, 19 bp, Mus musculus
  siRNA target sequence for Csna (NM_007784.2,960-978).
ggatactgaaaaaaccaat

SEQ ID NO: 696192 - DNA, 19 bp, Mus musculus
  siRNA target sequence for Csng (NM_007785.1,94-112).
ctctggcaaagcacgaaat

SEQ ID NO: 696193 - DNA, 19 bp, Mus musculus
  siRNA target sequence for Csng (NM_007785.1,125-143).
ctccagtgaggaatcatct

SEQ ID NO: 696194 - DNA, 19 bp, Mus musculus
  siRNA target sequence for Csng (NM_007785.1,204-222).
gattctgctagcagttcat

SEQ ID NO: 696195 - DNA, 19 bp, Mus musculus
  siRNA target sequence for Csng (NM_007785.1,238-256).
ccgaggaagtcagtgaaaa

SEQ ID NO: 696196 - DNA, 19 bp, Mus musculus
  siRNA target sequence for Csng (NM_007785.1,239-257).
cgaggaagtcagtgaaaaa

SEQ ID NO: 696197 - DNA, 19 bp, Mus musculus
  siRNA target sequence for Csng (NM_007785.1,393-411).
cagcctaatgccatccata

SEQ ID NO: 696198 - DNA, 19 bp, Mus musculus
  siRNA target sequence for Csng (NM_007785.1,415-433).
cgcccacccaggaatccat

SEQ ID NO: 696199 - DNA, 19 bp, Mus musculus
  siRNA target sequence for Csng (NM_007785.1,578-596).
cttcccaaatgctcactat

SEQ ID NO: 696200 - DNA, 19 bp, Mus musculus
  siRNA target sequence for Csng (NM_007785.1,582-600).
ccaaatgctcactatacga

SEQ ID NO: 696201 - DNA, 19 bp, Mus musculus
  siRNA target sequence for Csng (NM_007785.1,588-606).
gctcactatacgagattct

SEQ ID NO: 696202 - DNA, 19 bp, Mus musculus
  siRNA target sequence for Csng (NM_007785.1,589-607).
ctcactatacgagattcta

SEQ ID NO: 696203 - DNA, 19 bp, Mus musculus
  siRNA target sequence for Csng (NM_007785.1,591-609).
cactatacgagattctact

SEQ ID NO: 696204 - DNA, 19 bp, Mus musculus
  siRNA target sequence for Csrp2 (NM_007792.2,221-239).
cagtggcgattcatgatga

SEQ ID NO: 696205 - DNA, 19 bp, Mus musculus
  siRNA target sequence for Csrp2 (NM_007792.2,257-275).
cctgctacggaaagaagta

SEQ ID NO: 696206 - DNA, 19 bp, Mus musculus
  siRNA target sequence for Csrp2 (NM_007792.2,277-295).
ggaccaaaaggctatggtt

SEQ ID NO: 696207 - DNA, 19 bp, Mus musculus
  siRNA target sequence for Csrp2 (NM_007792.2,278-296).
gaccaaaaggctatggtta

SEQ ID NO: 696208 - DNA, 19 bp, Mus musculus
  siRNA target sequence for Csrp2 (NM_007792.2,372-390).
caggcctacgacaaatcca

SEQ ID NO: 696209 - DNA, 19 bp, Mus musculus
  siRNA target sequence for Csrp2 (NM_007792.2,374-392).
ggcctacgacaaatccaaa

SEQ ID NO: 696210 - DNA, 19 bp, Mus musculus
  siRNA target sequence for Csrp2 (NM_007792.2,583-601).
gggtgctacgcaaagaact

SEQ ID NO: 696211 - DNA, 19 bp, Mus musculus
  siRNA target sequence for Csrp2 (NM_007792.2,585-603).
gtgctacgcaaagaacttt

SEQ ID NO: 696212 - DNA, 19 bp, Mus musculus
  siRNA target sequence for Ctla2a (NM_007796.1,92-110).
caccccctgatccaagttt

SEQ ID NO: 696213 - DNA, 19 bp, Mus musculus
  siRNA target sequence for Ctla2a (NM_007796.1,146-164).
caaaagcctacaatctgaa

SEQ ID NO: 696214 - DNA, 19 bp, Mus musculus
  siRNA target sequence for Ctla2a (NM_007796.1,184-202).
ctcgtgtgggaggagaata

SEQ ID NO: 696215 - DNA, 19 bp, Mus musculus
  siRNA target sequence for Ctla2a (NM_007796.1,216-234).
ggcacacaatgcagactat

SEQ ID NO: 696216 - DNA, 19 bp, Mus musculus
  siRNA target sequence for Ctla2a (NM_007796.1,261-279).
gggcctgaatcaatttagt

SEQ ID NO: 696217 - DNA, 19 bp, Mus musculus
  siRNA target sequence for Ctla2a (NM_007796.1,263-281).
gcctgaatcaatttagtga

SEQ ID NO: 696218 - DNA, 19 bp, Mus musculus
  siRNA target sequence for Ctla2a (NM_007796.1,312-330).
ctatggaaactcactgaat

SEQ ID NO: 696219 - DNA, 19 bp, Mus musculus
  siRNA target sequence for Ctla2a (NM_007796.1,373-391).
ggaaagaacagctatctga

SEQ ID NO: 696220 - DNA, 19 bp, Mus musculus
  siRNA target sequence for Cyp2b13 (NM_007813.1,626-644).
ctgatgtatcagatatatt

SEQ ID NO: 696221 - DNA, 19 bp, Mus musculus
  siRNA target sequence for Cyp2b13 (NM_007813.1,628-646).
gatgtatcagatatattca

SEQ ID NO: 696222 - DNA, 19 bp, Mus musculus
  siRNA target sequence for Cyp3a13 (NM_007819.1,86-104).
ggacctgatcccaaacttt

SEQ ID NO: 696223 - DNA, 19 bp, Mus musculus
  siRNA target sequence for Cyp3a13 (NM_007819.1,152-170).
cttatatggaactcattca

SEQ ID NO: 696224 - DNA, 19 bp, Mus musculus
  siRNA target sequence for Cyp3a13 (NM_007819.1,257-275).
ggaatgtgacatacaatgt

SEQ ID NO: 696225 - DNA, 19 bp, Mus musculus
  siRNA target sequence for Cyp3a13 (NM_007819.1,343-361).
cagacataatcaaaacagt

SEQ ID NO: 696226 - DNA, 19 bp, Mus musculus
  siRNA target sequence for Cyp3a13 (NM_007819.1,376-394).
gttactctaccttcacaaa

SEQ ID NO: 696227 - DNA, 19 bp, Mus musculus
  siRNA target sequence for Cyp3a13 (NM_007819.1,522-540).
cccatcattaaccagttta

SEQ ID NO: 696228 - DNA, 19 bp, Mus musculus
  siRNA target sequence for Cyp3a13 (NM_007819.1,524-542).
catcattaaccagtttaca

SEQ ID NO: 696229 - DNA, 19 bp, Mus musculus
  siRNA target sequence for Cyp3a13 (NM_007819.1,527-545).
cattaaccagtttacagat

SEQ ID NO: 696230 - DNA, 19 bp, Mus musculus
  siRNA target sequence for Cyp3a13 (NM_007819.1,543-561).
gatgtgttggtgagaaaca

SEQ ID NO: 696231 - DNA, 19 bp, Mus musculus
  siRNA target sequence for Cyp3a13 (NM_007819.1,644-662).
ctcatttggagtgaatatt

SEQ ID NO: 696232 - DNA, 19 bp, Mus musculus
  siRNA target sequence for Cyp3a13 (NM_007819.1,797-815).
ctccttgtttccaagagat

SEQ ID NO: 696233 - DNA, 19 bp, Mus musculus
  siRNA target sequence for Cyp3a13 (NM_007819.1,803-821).
gtttccaagagatgtcata

SEQ ID NO: 696234 - DNA, 19 bp, Mus musculus
  siRNA target sequence for Cyp3a13 (NM_007819.1,818-836).
cataagcttttttacaact

SEQ ID NO: 696235 - DNA, 19 bp, Mus musculus
  siRNA target sequence for Cyp3a13 (NM_007819.1,835-853).
cttcagtagaacgaatgaa

SEQ ID NO: 696236 - DNA, 19 bp, Mus musculus
  siRNA target sequence for Cyp3a13 (NM_007819.1,838-856).
cagtagaacgaatgaaaga

SEQ ID NO: 696237 - DNA, 19 bp, Mus musculus
  siRNA target sequence for Cyp3a13 (NM_007819.1,916-934).
cccagaattacaaaaccaa

SEQ ID NO: 696238 - DNA, 19 bp, Mus musculus
  siRNA target sequence for Cyp3a13 (NM_007819.1,1133-1151).
gctacagatggagtatcta

SEQ ID NO: 696239 - DNA, 19 bp, Mus musculus
  siRNA target sequence for Cyp3a13 (NM_007819.1,1227-1245).
gaaatcaatgggctattca

SEQ ID NO: 696240 - DNA, 19 bp, Mus musculus
  siRNA target sequence for Cyp3a13 (NM_007819.1,1287-1305).
cacaaagacccgaagtact

SEQ ID NO: 696241 - DNA, 19 bp, Mus musculus
  siRNA target sequence for Cyp3a13 (NM_007819.1,1349-1367).
gaatcaggacagcatcaat

SEQ ID NO: 696242 - DNA, 19 bp, Mus musculus
  siRNA target sequence for Cyp3a13 (NM_007819.1,1360-1378).
gcatcaatccttacatgta

SEQ ID NO: 696243 - DNA, 19 bp, Mus musculus
  siRNA target sequence for Cyp3a13 (NM_007819.1,1426-1444).
ctctcataaacatgaaagt

SEQ ID NO: 696244 - DNA, 19 bp, Mus musculus
  siRNA target sequence for Cyp3a13 (NM_007819.1,1491-1509).
gaaactgagatccctttaa

SEQ ID NO: 696245 - DNA, 19 bp, Mus musculus
  siRNA target sequence for Cyp3a13 (NM_007819.1,1544-1562).
cccactccttctaaaagtt

SEQ ID NO: 696246 - DNA, 19 bp, Mus musculus
  siRNA target sequence for Cyp3a13 (NM_007819.1,1570-1588).
gagatgagactgtaagtga

SEQ ID NO: 696247 - DNA, 19 bp, Mus musculus
  siRNA target sequence for Cyp3a16 (NM_007820.1,362-380).
caaaccggcaggatttttt

SEQ ID NO: 696248 - DNA, 19 bp, Mus musculus
  siRNA target sequence for Cyp3a16 (NM_007820.1,857-875).
gcgtggactttatttatct

SEQ ID NO: 696249 - DNA, 19 bp, Mus musculus
  siRNA target sequence for Defcr-rs12 (NM_007846.1,166-184).
gatgcagcagccataagaa

SEQ ID NO: 696250 - DNA, 19 bp, Mus musculus
  siRNA target sequence for Dri1 (NM_007880.1,889-907).
ccagcccaccccagtcata

SEQ ID NO: 696251 - DNA, 19 bp, Mus musculus
  siRNA target sequence for Dri1 (NM_007880.1,1081-1099).
gtcctcgacctgttcatgt

SEQ ID NO: 696252 - DNA, 19 bp, Mus musculus
  siRNA target sequence for Dri1 (NM_007880.1,1086-1104).
cgacctgttcatgttgtat

SEQ ID NO: 696253 - DNA, 19 bp, Mus musculus
  siRNA target sequence for Dri1 (NM_007880.1,1126-1144).
ggcctggtagaggttatca

SEQ ID NO: 696254 - DNA, 19 bp, Mus musculus
  siRNA target sequence for Dri1 (NM_007880.1,1127-1145).
gcctggtagaggttatcaa

SEQ ID NO: 696255 - DNA, 19 bp, Mus musculus
  siRNA target sequence for Dri1 (NM_007880.1,1214-1232).
cacttcggacacagtacat

SEQ ID NO: 696256 - DNA, 19 bp, Mus musculus
  siRNA target sequence for Dri1 (NM_007880.1,1335-1353).
cttcggtggctcactcttt

SEQ ID NO: 696257 - DNA, 19 bp, Mus musculus
  siRNA target sequence for Dri1 (NM_007880.1,1451-1469).
ccccagcgcccaagatcaa

SEQ ID NO: 696258 - DNA, 19 bp, Mus musculus
  siRNA target sequence for Dri1 (NM_007880.1,1457-1475).
cgcccaagatcaagaaaga

SEQ ID NO: 696259 - DNA, 19 bp, Mus musculus
  siRNA target sequence for Dri1 (NM_007880.1,1835-1853).
gcatgtccgtggagatgaa

SEQ ID NO: 696260 - DNA, 19 bp, Mus musculus
  siRNA target sequence for Dri1 (NM_007880.1,1841-1859).
ccgtggagatgaatggtat

SEQ ID NO: 696261 - DNA, 19 bp, Mus musculus
  siRNA target sequence for Dri1 (NM_007880.1,1842-1860).
cgtggagatgaatggtatt

SEQ ID NO: 696262 - DNA, 19 bp, Mus musculus
  siRNA target sequence for Dsg2 (NM_007883.1,337-355).
ctcacttggttcgtcaaaa

SEQ ID NO: 696263 - DNA, 19 bp, Mus musculus
  siRNA target sequence for Dsg2 (NM_007883.1,413-431).
gaacccgattgccaagata

SEQ ID NO: 696264 - DNA, 19 bp, Mus musculus
  siRNA target sequence for Dsg2 (NM_007883.1,417-435).
ccgattgccaagatacact

SEQ ID NO: 696265 - DNA, 19 bp, Mus musculus
  siRNA target sequence for Dsg2 (NM_007883.1,502-520).
cgcctttcggcatattcgt

SEQ ID NO: 696266 - DNA, 19 bp, Mus musculus
  siRNA target sequence for Dsg2 (NM_007883.1,509-527).
cggcatattcgtctttgat

SEQ ID NO: 696267 - DNA, 19 bp, Mus musculus
  siRNA target sequence for Dsg2 (NM_007883.1,512-530).
catattcgtctttgataga

SEQ ID NO: 696268 - DNA, 19 bp, Mus musculus
  siRNA target sequence for Dsg2 (NM_007883.1,518-536).
cgtctttgatagaaacaca

SEQ ID NO: 696269 - DNA, 19 bp, Mus musculus
  siRNA target sequence for Dsg2 (NM_007883.1,537-555).
ggagaactgaacatcacta

SEQ ID NO: 696270 - DNA, 19 bp, Mus musculus
  siRNA target sequence for Dsg2 (NM_007883.1,545-563).
gaacatcactagcattctt

SEQ ID NO: 696271 - DNA, 19 bp, Mus musculus
  siRNA target sequence for Dsg2 (NM_007883.1,567-585).
cgggaagaaacaccatatt

SEQ ID NO: 696272 - DNA, 19 bp, Mus musculus
  siRNA target sequence for Dsg2 (NM_007883.1,588-606).
ctgctgacaggctatgcat

SEQ ID NO: 696273 - DNA, 19 bp, Mus musculus
  siRNA target sequence for Dsg2 (NM_007883.1,641-659).
ggaactacgcatcaaagtt

SEQ ID NO: 696274 - DNA, 19 bp, Mus musculus
  siRNA target sequence for Dsg2 (NM_007883.1,710-728).
gtccattgaggaattgagt

SEQ ID NO: 696275 - DNA, 19 bp, Mus musculus
  siRNA target sequence for Dsg2 (NM_007883.1,730-748).
cagcacatacacttgtgat

SEQ ID NO: 696276 - DNA, 19 bp, Mus musculus
  siRNA target sequence for Dsg2 (NM_007883.1,777-795).
ccggagactctgaatgcta

SEQ ID NO: 696277 - DNA, 19 bp, Mus musculus
  siRNA target sequence for Dsg2 (NM_007883.1,822-840).
gagcctgcaaatagtcata

SEQ ID NO: 696278 - DNA, 19 bp, Mus musculus
  siRNA target sequence for Dsg2 (NM_007883.1,825-843).
cctgcaaatagtcatatgt

SEQ ID NO: 696279 - DNA, 19 bp, Mus musculus
  siRNA target sequence for Dsg2 (NM_007883.1,829-847).
caaatagtcatatgttcta

SEQ ID NO: 696280 - DNA, 19 bp, Mus musculus
  siRNA target sequence for Dsg2 (NM_007883.1,835-853).
gtcatatgttctacctaaa

SEQ ID NO: 696281 - DNA, 19 bp, Mus musculus
  siRNA target sequence for Dsg2 (NM_007883.1,837-855).
catatgttctacctaaata

SEQ ID NO: 696282 - DNA, 19 bp, Mus musculus
  siRNA target sequence for Dsg2 (NM_007883.1,858-876).
gacacgggggagatctata

SEQ ID NO: 696283 - DNA, 19 bp, Mus musculus
  siRNA target sequence for Dsg2 (NM_007883.1,872-890).
ctatacgaccagttttact

SEQ ID NO: 696284 - DNA, 19 bp, Mus musculus
  siRNA target sequence for Dsg2 (NM_007883.1,939-957).
gatggtaacgggcagataa

SEQ ID NO: 696285 - DNA, 19 bp, Mus musculus
  siRNA target sequence for Dsg2 (NM_007883.1,943-961).
gtaacgggcagataacaga

SEQ ID NO: 696286 - DNA, 19 bp, Mus musculus
  siRNA target sequence for Dsg2 (NM_007883.1,981-999).
caagttcagatccgtatat

SEQ ID NO: 696287 - DNA, 19 bp, Mus musculus
  siRNA target sequence for Dsg2 (NM_007883.1,1080-1098).
gtcatgcggatcaaagtga

SEQ ID NO: 696288 - DNA, 19 bp, Mus musculus
  siRNA target sequence for Dsg2 (NM_007883.1,1120-1138).
ctgataactggctagcaaa

SEQ ID NO: 696289 - DNA, 19 bp, Mus musculus
  siRNA target sequence for Dsg2 (NM_007883.1,1156-1174).
gaaatgaagggggctattt

SEQ ID NO: 696290 - DNA, 19 bp, Mus musculus
  siRNA target sequence for Dsg2 (NM_007883.1,1165-1183).
ggggctatttccacattga

SEQ ID NO: 696291 - DNA, 19 bp, Mus musculus
  siRNA target sequence for Dsg2 (NM_007883.1,1300-1318).
ccattctgagcaagtacaa

SEQ ID NO: 696292 - DNA, 19 bp, Mus musculus
  siRNA target sequence for Dsg2 (NM_007883.1,1355-1373).
cgtggttgaaggcattcat

SEQ ID NO: 696293 - DNA, 19 bp, Mus musculus
  siRNA target sequence for Dsg2 (NM_007883.1,1401-1419).
gctagtgaggcaatggata

SEQ ID NO: 696294 - DNA, 19 bp, Mus musculus
  siRNA target sequence for Dsg2 (NM_007883.1,1428-1446).
ctcagcaggtcgattggaa

SEQ ID NO: 696295 - DNA, 19 bp, Mus musculus
  siRNA target sequence for Dsg2 (NM_007883.1,1433-1451).
caggtcgattggaaatttt

SEQ ID NO: 696296 - DNA, 19 bp, Mus musculus
  siRNA target sequence for Dsg2 (NM_007883.1,1469-1487).
cactggtcaagcagctaaa

SEQ ID NO: 696297 - DNA, 19 bp, Mus musculus
  siRNA target sequence for Dsg2 (NM_007883.1,1473-1491).
ggtcaagcagctaaagtaa

SEQ ID NO: 696298 - DNA, 19 bp, Mus musculus
  siRNA target sequence for Dsg2 (NM_007883.1,1476-1494).
caagcagctaaagtaacat

SEQ ID NO: 696299 - DNA, 19 bp, Mus musculus
  siRNA target sequence for Dsg2 (NM_007883.1,1537-1555).
ccgtcacttcagagattaa

SEQ ID NO: 696300 - DNA, 19 bp, Mus musculus
  siRNA target sequence for Dsg2 (NM_007883.1,1548-1566).
gagattaagcttgtaaaga

SEQ ID NO: 696301 - DNA, 19 bp, Mus musculus
  siRNA target sequence for Dsg2 (NM_007883.1,1630-1648).
ccaaagaacatcctcaaaa

SEQ ID NO: 696302 - DNA, 19 bp, Mus musculus
  siRNA target sequence for Dsg2 (NM_007883.1,1664-1682).
catcgttatcactgttgaa

SEQ ID NO: 696303 - DNA, 19 bp, Mus musculus
  siRNA target sequence for Dsg2 (NM_007883.1,2014-2032).
ctgcacagtatgacaacta

SEQ ID NO: 696304 - DNA, 19 bp, Mus musculus
  siRNA target sequence for Dsg2 (NM_007883.1,2050-2068).
ccgccatcgctctcatgat

SEQ ID NO: 696305 - DNA, 19 bp, Mus musculus
  siRNA target sequence for Dsg2 (NM_007883.1,2051-2069).
cgccatcgctctcatgatt

SEQ ID NO: 696306 - DNA, 19 bp, Mus musculus
  siRNA target sequence for Dsg2 (NM_007883.1,2053-2071).
ccatcgctctcatgattct

SEQ ID NO: 696307 - DNA, 19 bp, Mus musculus
  siRNA target sequence for Dsg2 (NM_007883.1,2054-2072).
catcgctctcatgattcta

SEQ ID NO: 696308 - DNA, 19 bp, Mus musculus
  siRNA target sequence for Dsg2 (NM_007883.1,2096-2114).
gccgctcttgctgttgata

SEQ ID NO: 696309 - DNA, 19 bp, Mus musculus
  siRNA target sequence for Dsg2 (NM_007883.1,2149-2167).
ccattcctgggacaataga

SEQ ID NO: 696310 - DNA, 19 bp, Mus musculus
  siRNA target sequence for Dsg2 (NM_007883.1,2171-2189).
gctgcacccttggaataat

SEQ ID NO: 696311 - DNA, 19 bp, Mus musculus
  siRNA target sequence for Dsg2 (NM_007883.1,2315-2333).
ctcagcttccgttaccaaa

SEQ ID NO: 696312 - DNA, 19 bp, Mus musculus
  siRNA target sequence for Dsg2 (NM_007883.1,2397-2415).
ggggccactcaccatgtaa

SEQ ID NO: 696313 - DNA, 19 bp, Mus musculus
  siRNA target sequence for Dsg2 (NM_007883.1,2505-2523).
gccgtgaatgaggaattct

SEQ ID NO: 696314 - DNA, 19 bp, Mus musculus
  siRNA target sequence for Dsg2 (NM_007883.1,2543-2561).
gaaagcggcctcctacaat

SEQ ID NO: 696315 - DNA, 19 bp, Mus musculus
  siRNA target sequence for Dsg2 (NM_007883.1,2563-2581).
gggaagacgaccttcacat

SEQ ID NO: 696316 - DNA, 19 bp, Mus musculus
  siRNA target sequence for Dsg2 (NM_007883.1,2640-2658).
gtcgggtgctgcagtttca

SEQ ID NO: 696317 - DNA, 19 bp, Mus musculus
  siRNA target sequence for Dsg2 (NM_007883.1,2691-2709).
gatcttggccttaaattca

SEQ ID NO: 696318 - DNA, 19 bp, Mus musculus
  siRNA target sequence for Dsg2 (NM_007883.1,2708-2726).
caagaccctagctgaagtt

SEQ ID NO: 696319 - DNA, 19 bp, Mus musculus
  siRNA target sequence for Dsg2 (NM_007883.1,2806-2824).
cttctggctcgcactatga

SEQ ID NO: 696320 - DNA, 19 bp, Mus musculus
  siRNA target sequence for Dsg2 (NM_007883.1,2928-2946).
gtcactgagagctctgtat

SEQ ID NO: 696321 - DNA, 19 bp, Mus musculus
  siRNA target sequence for Dsg2 (NM_007883.1,2930-2948).
cactgagagctctgtatct

SEQ ID NO: 696322 - DNA, 19 bp, Mus musculus
  siRNA target sequence for Dsg2 (NM_007883.1,2988-3006).
gtggcttctggtaatatta

SEQ ID NO: 696323 - DNA, 19 bp, Mus musculus
  siRNA target sequence for Dsg2 (NM_007883.1,2992-3010).
cttctggtaatattatagt

SEQ ID NO: 696324 - DNA, 19 bp, Mus musculus
  siRNA target sequence for Dsg2 (NM_007883.1,3124-3142).
ccttggtggatcagcatta

SEQ ID NO: 696325 - DNA, 19 bp, Mus musculus
  siRNA target sequence for Dsg2 (NM_007883.1,3137-3155).
gcattatgccaatgaagaa

SEQ ID NO: 696326 - DNA, 19 bp, Mus musculus
  siRNA target sequence for Dsg2 (NM_007883.1,3339-3357).
gtcaccgtgacagaaagaa

SEQ ID NO: 696327 - DNA, 19 bp, Mus musculus
  siRNA target sequence for Dsg2 (NM_007883.1,3343-3361).
ccgtgacagaaagaatact

SEQ ID NO: 696328 - DNA, 19 bp, Mus musculus
  siRNA target sequence for Dsg2 (NM_007883.1,3344-3362).
cgtgacagaaagaatacta

SEQ ID NO: 696329 - DNA, 19 bp, Mus musculus
  siRNA target sequence for Dsg2 (NM_007883.1,3345-3363).
gtgacagaaagaatactaa

SEQ ID NO: 696330 - DNA, 19 bp, Mus musculus
  siRNA target sequence for Dsg2 (NM_007883.1,3437-3455).
ctctagtgtgggaagcata

SEQ ID NO: 696331 - DNA, 19 bp, Mus musculus
  siRNA target sequence for Dsg2 (NM_007883.1,3460-3478).
ctctgcccaatttagatct

SEQ ID NO: 696332 - DNA, 19 bp, Mus musculus
  siRNA target sequence for Dsg2 (NM_007883.1,3489-3507).
gatcgtcccaattctacta

SEQ ID NO: 696333 - DNA, 19 bp, Mus musculus
  siRNA target sequence for Dsg2 (NM_007883.1,3492-3510).
cgtcccaattctactataa

SEQ ID NO: 696334 - DNA, 19 bp, Mus musculus
  siRNA target sequence for Dsg2 (NM_007883.1,3541-3559).
gcaccatgcaacattctta

SEQ ID NO: 696335 - DNA, 19 bp, Mus musculus
  siRNA target sequence for Rnase2 (NM_007895.2,225-243).
cagcgtattaacaggttta

SEQ ID NO: 696336 - DNA, 19 bp, Mus musculus
  siRNA target sequence for Ei24 (NM_007915.1,174-192).
ggcaggggaatcaaagact

SEQ ID NO: 696337 - DNA, 19 bp, Mus musculus
  siRNA target sequence for Ei24 (NM_007915.1,201-219).
ggcatctgtaccatctcaa

SEQ ID NO: 696338 - DNA, 19 bp, Mus musculus
  siRNA target sequence for Ei24 (NM_007915.1,323-341).
gagtgaaccacgtattgtt

SEQ ID NO: 696339 - DNA, 19 bp, Mus musculus
  siRNA target sequence for Ei24 (NM_007915.1,327-345).
gaaccacgtattgttagta

SEQ ID NO: 696340 - DNA, 19 bp, Mus musculus
  siRNA target sequence for Ei24 (NM_007915.1,330-348).
ccacgtattgttagtagaa

SEQ ID NO: 696341 - DNA, 19 bp, Mus musculus
  siRNA target sequence for Ei24 (NM_007915.1,331-349).
cacgtattgttagtagaat

SEQ ID NO: 696342 - DNA, 19 bp, Mus musculus
  siRNA target sequence for Ei24 (NM_007915.1,333-351).
cgtattgttagtagaattt

SEQ ID NO: 696343 - DNA, 19 bp, Mus musculus
  siRNA target sequence for Ei24 (NM_007915.1,401-419).
gttttatcgagtgtttatt

SEQ ID NO: 696344 - DNA, 19 bp, Mus musculus
  siRNA target sequence for Ei24 (NM_007915.1,536-554).
cctgtttgtgcttagcaaa

SEQ ID NO: 696345 - DNA, 19 bp, Mus musculus
  siRNA target sequence for Ei24 (NM_007915.1,555-573).
gttgtgaatgccatttggt

SEQ ID NO: 696346 - DNA, 19 bp, Mus musculus
  siRNA target sequence for Ei24 (NM_007915.1,564-582).
gccatttggttccaagata

SEQ ID NO: 696347 - DNA, 19 bp, Mus musculus
  siRNA target sequence for Ei24 (NM_007915.1,565-583).
ccatttggttccaagatat

SEQ ID NO: 696348 - DNA, 19 bp, Mus musculus
  siRNA target sequence for Ei24 (NM_007915.1,566-584).
catttggttccaagatata

SEQ ID NO: 696349 - DNA, 19 bp, Mus musculus
  siRNA target sequence for Ei24 (NM_007915.1,631-649).
ccagtgtcagcaaaataat

SEQ ID NO: 696350 - DNA, 19 bp, Mus musculus
  siRNA target sequence for Ei24 (NM_007915.1,659-677).
gctcttcaaccttttgcta

SEQ ID NO: 696351 - DNA, 19 bp, Mus musculus
  siRNA target sequence for Ei24 (NM_007915.1,674-692).
gctacaggcacttttcctt

SEQ ID NO: 696352 - DNA, 19 bp, Mus musculus
  siRNA target sequence for Ei24 (NM_007915.1,755-773).
gcatatgtctcttctctat

SEQ ID NO: 696353 - DNA, 19 bp, Mus musculus
  siRNA target sequence for Ei24 (NM_007915.1,775-793).
cactgtactgctttgagta

SEQ ID NO: 696354 - DNA, 19 bp, Mus musculus
  siRNA target sequence for Ei24 (NM_007915.1,789-807).
gagtaccgttggttcaaca

SEQ ID NO: 696355 - DNA, 19 bp, Mus musculus
  siRNA target sequence for Ei24 (NM_007915.1,791-809).
gtaccgttggttcaacaaa

SEQ ID NO: 696356 - DNA, 19 bp, Mus musculus
  siRNA target sequence for Ei24 (NM_007915.1,824-842).
ccagcgattgtcgaacata

SEQ ID NO: 696357 - DNA, 19 bp, Mus musculus
  siRNA target sequence for Ei24 (NM_007915.1,827-845).
gcgattgtcgaacatagaa

SEQ ID NO: 696358 - DNA, 19 bp, Mus musculus
  siRNA target sequence for Ei24 (NM_007915.1,828-846).
cgattgtcgaacatagaaa

SEQ ID NO: 696359 - DNA, 19 bp, Mus musculus
  siRNA target sequence for Ei24 (NM_007915.1,847-865).
ggaattggccttactactt

SEQ ID NO: 696360 - DNA, 19 bp, Mus musculus
  siRNA target sequence for Ei24 (NM_007915.1,903-921).
caatcctcctacattatca

SEQ ID NO: 696361 - DNA, 19 bp, Mus musculus
  siRNA target sequence for Ei24 (NM_007915.1,965-983).
cgccaatgaagcaaagact

SEQ ID NO: 696362 - DNA, 19 bp, Mus musculus
  siRNA target sequence for Epc1 (NM_007935.1,230-248).
catcttcagcgggctattt

SEQ ID NO: 696363 - DNA, 19 bp, Mus musculus
  siRNA target sequence for Epc1 (NM_007935.1,266-284).
ggcgagaagcgggataaca

SEQ ID NO: 696364 - DNA, 19 bp, Mus musculus
  siRNA target sequence for Epc1 (NM_007935.1,267-285).
gcgagaagcgggataacat

SEQ ID NO: 696365 - DNA, 19 bp, Mus musculus
  siRNA target sequence for Epc1 (NM_007935.1,274-292).
gcgggataacatggttatt

SEQ ID NO: 696366 - DNA, 19 bp, Mus musculus
  siRNA target sequence for Epc1 (NM_007935.1,277-295).
ggataacatggttattcca

SEQ ID NO: 696367 - DNA, 19 bp, Mus musculus
  siRNA target sequence for Epc1 (NM_007935.1,320-338).
gcttactatgagtccatat

SEQ ID NO: 696368 - DNA, 19 bp, Mus musculus
  siRNA target sequence for Epc1 (NM_007935.1,374-392).
cacatacagccttttagct

SEQ ID NO: 696369 - DNA, 19 bp, Mus musculus
  siRNA target sequence for Epc1 (NM_007935.1,399-417).
ctgaacagcctgattacga

SEQ ID NO: 696370 - DNA, 19 bp, Mus musculus
  siRNA target sequence for Epc1 (NM_007935.1,415-433).
cgatctggattctgaagat

SEQ ID NO: 696371 - DNA, 19 bp, Mus musculus
  siRNA target sequence for Epc1 (NM_007935.1,541-559).
gcaggaagccaaactactt

SEQ ID NO: 696372 - DNA, 19 bp, Mus musculus
  siRNA target sequence for Epc1 (NM_007935.1,575-593).
gagttaattagagaagttt

SEQ ID NO: 696373 - DNA, 19 bp, Mus musculus
  siRNA target sequence for Epc1 (NM_007935.1,590-608).
gtttatgaatactggatta

SEQ ID NO: 696374 - DNA, 19 bp, Mus musculus
  siRNA target sequence for Epc1 (NM_007935.1,645-663).
cgttggtaaaacaggaaaa

SEQ ID NO: 696375 - DNA, 19 bp, Mus musculus
  siRNA target sequence for Epc1 (NM_007935.1,675-693).
ctagcacaaatgatcctta

SEQ ID NO: 696376 - DNA, 19 bp, Mus musculus
  siRNA target sequence for Epc1 (NM_007935.1,686-704).
gatccttacgtggctttta

SEQ ID NO: 696377 - DNA, 19 bp, Mus musculus
  siRNA target sequence for Epc1 (NM_007935.1,943-961).
gccagtgaagcctacttat

SEQ ID NO: 696378 - DNA, 19 bp, Mus musculus
  siRNA target sequence for Epc1 (NM_007935.1,968-986).
cccatcatcccgattacta

SEQ ID NO: 696379 - DNA, 19 bp, Mus musculus
  siRNA target sequence for Epc1 (NM_007935.1,1017-1035).
cggactcgaaggagttcaa

SEQ ID NO: 696380 - DNA, 19 bp, Mus musculus
  siRNA target sequence for Epc1 (NM_007935.1,1021-1039).
ctcgaaggagttcaaagtt

SEQ ID NO: 696381 - DNA, 19 bp, Mus musculus
  siRNA target sequence for Epc1 (NM_007935.1,1046-1064).
caagataaggctgatctta

SEQ ID NO: 696382 - DNA, 19 bp, Mus musculus
  siRNA target sequence for Epc1 (NM_007935.1,1156-1174).
cttcagtgctaaagactta

SEQ ID NO: 696383 - DNA, 19 bp, Mus musculus
  siRNA target sequence for Epc1 (NM_007935.1,1300-1318).
gtactatgctcctcattta

SEQ ID NO: 696384 - DNA, 19 bp, Mus musculus
  siRNA target sequence for Epc1 (NM_007935.1,1338-1356).
cctggactagccctaaaga

SEQ ID NO: 696385 - DNA, 19 bp, Mus musculus
  siRNA target sequence for Epc1 (NM_007935.1,1339-1357).
ctggactagccctaaagat

SEQ ID NO: 696386 - DNA, 19 bp, Mus musculus
  siRNA target sequence for Epc1 (NM_007935.1,1367-1385).
ggggatgtgcgatatagat

SEQ ID NO: 696387 - DNA, 19 bp, Mus musculus
  siRNA target sequence for Epc1 (NM_007935.1,1368-1386).
gggatgtgcgatatagata

SEQ ID NO: 696388 - DNA, 19 bp, Mus musculus
  siRNA target sequence for Epc1 (NM_007935.1,1373-1391).
gtgcgatatagatattgct

SEQ ID NO: 696389 - DNA, 19 bp, Mus musculus
  siRNA target sequence for Epc1 (NM_007935.1,1375-1393).
gcgatatagatattgctta

SEQ ID NO: 696390 - DNA, 19 bp, Mus musculus
  siRNA target sequence for Epc1 (NM_007935.1,1471-1489).
cagagcgcattcagactat

SEQ ID NO: 696391 - DNA, 19 bp, Mus musculus
  siRNA target sequence for Epc1 (NM_007935.1,1473-1491).
gagcgcattcagactatga

SEQ ID NO: 696392 - DNA, 19 bp, Mus musculus
  siRNA target sequence for Epc1 (NM_007935.1,1482-1500).
cagactatgacagtatgtt

SEQ ID NO: 696393 - DNA, 19 bp, Mus musculus
  siRNA target sequence for Epc1 (NM_007935.1,1619-1637).
ctagtcgatatcaaatcat

SEQ ID NO: 696394 - DNA, 19 bp, Mus musculus
  siRNA target sequence for Epc1 (NM_007935.1,1622-1640).
gtcgatatcaaatcatgta

SEQ ID NO: 696395 - DNA, 19 bp, Mus musculus
  siRNA target sequence for Epc1 (NM_007935.1,1624-1642).
cgatatcaaatcatgtaga

SEQ ID NO: 696396 - DNA, 19 bp, Mus musculus
  siRNA target sequence for Epc1 (NM_007935.1,1625-1643).
gatatcaaatcatgtagat

SEQ ID NO: 696397 - DNA, 19 bp, Mus musculus
  siRNA target sequence for Epc1 (NM_007935.1,1692-1710).
gtgaactctccagtagaaa

SEQ ID NO: 696398 - DNA, 19 bp, Mus musculus
  siRNA target sequence for Epc1 (NM_007935.1,1694-1712).
gaactctccagtagaaagt

SEQ ID NO: 696399 - DNA, 19 bp, Mus musculus
  siRNA target sequence for Epc1 (NM_007935.1,1895-1913).
cagcaagcaaatagtagtt

SEQ ID NO: 696400 - DNA, 19 bp, Mus musculus
  siRNA target sequence for Epc1 (NM_007935.1,1927-1945).
gcaacagggttttgtttct

SEQ ID NO: 696401 - DNA, 19 bp, Mus musculus
  siRNA target sequence for Epc1 (NM_007935.1,2067-2085).
ctgcctcaggagtatacaa

SEQ ID NO: 696402 - DNA, 19 bp, Mus musculus
  siRNA target sequence for Epc1 (NM_007935.1,2109-2127).
caccaacggcacttgtaca

SEQ ID NO: 696403 - DNA, 19 bp, Mus musculus
  siRNA target sequence for Epc1 (NM_007935.1,2111-2129).
ccaacggcacttgtacata

SEQ ID NO: 696404 - DNA, 19 bp, Mus musculus
  siRNA target sequence for Epc1 (NM_007935.1,2158-2176).
gttacagccttcaaatatt

SEQ ID NO: 696405 - DNA, 19 bp, Mus musculus
  siRNA target sequence for Epc1 (NM_007935.1,2235-2253).
caacaactcaggttctgtt

SEQ ID NO: 696406 - DNA, 19 bp, Mus musculus
  siRNA target sequence for Epc1 (NM_007935.1,2255-2273).
gggaacaacatccgattaa

SEQ ID NO: 696407 - DNA, 19 bp, Mus musculus
  siRNA target sequence for Epc1 (NM_007935.1,2327-2345).
catatacctaggactttaa

SEQ ID NO: 696408 - DNA, 19 bp, Mus musculus
  siRNA target sequence for Epo (NM_007942.1,175-193).
cccagactgagtgaaaata

SEQ ID NO: 696409 - DNA, 19 bp, Mus musculus
  siRNA target sequence for Epo (NM_007942.1,176-194).
ccagactgagtgaaaatat

SEQ ID NO: 696410 - DNA, 19 bp, Mus musculus
  siRNA target sequence for Epo (NM_007942.1,216-234).
caacttctatgcttggaaa

SEQ ID NO: 696411 - DNA, 19 bp, Mus musculus
  siRNA target sequence for Epo (NM_007942.1,313-331).
gccctgctagccaattcct

SEQ ID NO: 696412 - DNA, 19 bp, Mus musculus
  siRNA target sequence for Epo (NM_007942.1,343-361).
gagacccttcagcttcata

SEQ ID NO: 696413 - DNA, 19 bp, Mus musculus
  siRNA target sequence for Epo (NM_007942.1,345-363).
gacccttcagcttcatata

SEQ ID NO: 696414 - DNA, 19 bp, Mus musculus
  siRNA target sequence for Epo (NM_007942.1,416-434).
gagctcagaaggaattgat

SEQ ID NO: 696415 - DNA, 19 bp, Mus musculus
  siRNA target sequence for Epo (NM_007942.1,473-491).
cactcacagtggatacttt

SEQ ID NO: 696416 - DNA, 19 bp, Mus musculus
  siRNA target sequence for Eps8 (NM_007945.1,292-310).
cttctcaactgaatggtta

SEQ ID NO: 696417 - DNA, 19 bp, Mus musculus
  siRNA target sequence for Eps8 (NM_007945.1,464-482).
cgtgctggatcggaaagat

SEQ ID NO: 696418 - DNA, 19 bp, Mus musculus
  siRNA target sequence for Eps8 (NM_007945.1,474-492).
cggaaagatgcaatgatca

SEQ ID NO: 696419 - DNA, 19 bp, Mus musculus
  siRNA target sequence for Eps8 (NM_007945.1,495-513).
gtcgaggacggaataagaa

SEQ ID NO: 696420 - DNA, 19 bp, Mus musculus
  siRNA target sequence for Eps8 (NM_007945.1,539-557).
caaagtgtggactcaagat

SEQ ID NO: 696421 - DNA, 19 bp, Mus musculus
  siRNA target sequence for Eps8 (NM_007945.1,543-561).
gtgtggactcaagatatga

SEQ ID NO: 696422 - DNA, 19 bp, Mus musculus
  siRNA target sequence for Eps8 (NM_007945.1,545-563).
gtggactcaagatatgatt

SEQ ID NO: 696423 - DNA, 19 bp, Mus musculus
  siRNA target sequence for Eps8 (NM_007945.1,547-565).
ggactcaagatatgattct

SEQ ID NO: 696424 - DNA, 19 bp, Mus musculus
  siRNA target sequence for Eps8 (NM_007945.1,638-656).
cacaatctcgcattgtcaa

SEQ ID NO: 696425 - DNA, 19 bp, Mus musculus
  siRNA target sequence for Eps8 (NM_007945.1,753-771).
gaggttaaggcaaacctaa

SEQ ID NO: 696426 - DNA, 19 bp, Mus musculus
  siRNA target sequence for Eps8 (NM_007945.1,756-774).
gttaaggcaaacctaatta

SEQ ID NO: 696427 - DNA, 19 bp, Mus musculus
  siRNA target sequence for Eps8 (NM_007945.1,761-779).
ggcaaacctaattagtgaa

SEQ ID NO: 696428 - DNA, 19 bp, Mus musculus
  siRNA target sequence for Eps8 (NM_007945.1,790-808).
gtgcaatcagtgacagtaa

SEQ ID NO: 696429 - DNA, 19 bp, Mus musculus
  siRNA target sequence for Eps8 (NM_007945.1,1061-1079).
cttaaaccatattttggat

SEQ ID NO: 696430 - DNA, 19 bp, Mus musculus
  siRNA target sequence for Eps8 (NM_007945.1,1122-1140).
gcgttttctgagctttcta

SEQ ID NO: 696431 - DNA, 19 bp, Mus musculus
  siRNA target sequence for Eps8 (NM_007945.1,1123-1141).
cgttttctgagctttctaa

SEQ ID NO: 696432 - DNA, 19 bp, Mus musculus
  siRNA target sequence for Eps8 (NM_007945.1,1180-1198).
gagagggcgttttaacact

SEQ ID NO: 696433 - DNA, 19 bp, Mus musculus
  siRNA target sequence for Eps8 (NM_007945.1,1266-1284).
cttctggccaagttgaagt

SEQ ID NO: 696434 - DNA, 19 bp, Mus musculus
  siRNA target sequence for Eps8 (NM_007945.1,1295-1313).
gaacccgagtgcttcagat

SEQ ID NO: 696435 - DNA, 19 bp, Mus musculus
  siRNA target sequence for Eps8 (NM_007945.1,1316-1334).
ggttcattttttgtttact

SEQ ID NO: 696436 - DNA, 19 bp, Mus musculus
  siRNA target sequence for Eps8 (NM_007945.1,1391-1409).
cagcccactgttgacaaaa

SEQ ID NO: 696437 - DNA, 19 bp, Mus musculus
  siRNA target sequence for Eps8 (NM_007945.1,1393-1411).
gcccactgttgacaaaaga

SEQ ID NO: 696438 - DNA, 19 bp, Mus musculus
  siRNA target sequence for Eps8 (NM_007945.1,1498-1516).
cagagtggccgaaagaaca

SEQ ID NO: 696439 - DNA, 19 bp, Mus musculus
  siRNA target sequence for Eps8 (NM_007945.1,1504-1522).
ggccgaaagaacagttcat

SEQ ID NO: 696440 - DNA, 19 bp, Mus musculus
  siRNA target sequence for Eps8 (NM_007945.1,1707-1725).
gacggatatgcgtacagta

SEQ ID NO: 696441 - DNA, 19 bp, Mus musculus
  siRNA target sequence for Eps8 (NM_007945.1,1789-1807).
ctcctaatcaccaagtaga

SEQ ID NO: 696442 - DNA, 19 bp, Mus musculus
  siRNA target sequence for Eps8 (NM_007945.1,1791-1809).
cctaatcaccaagtagata

SEQ ID NO: 696443 - DNA, 19 bp, Mus musculus
  siRNA target sequence for Eps8 (NM_007945.1,1885-1903).
gcgagctctcggttatgaa

SEQ ID NO: 696444 - DNA, 19 bp, Mus musculus
  siRNA target sequence for Eps8 (NM_007945.1,1889-1907).
gctctcggttatgaaagat

SEQ ID NO: 696445 - DNA, 19 bp, Mus musculus
  siRNA target sequence for Eps8 (NM_007945.1,1894-1912).
cggttatgaaagatgatgt

SEQ ID NO: 696446 - DNA, 19 bp, Mus musculus
  siRNA target sequence for Eps8 (NM_007945.1,1974-1992).
gggtttgtgccaaataaca

SEQ ID NO: 696447 - DNA, 19 bp, Mus musculus
  siRNA target sequence for Eps8 (NM_007945.1,2033-2051).
cgctgaccccccatacaca

SEQ ID NO: 696448 - DNA, 19 bp, Mus musculus
  siRNA target sequence for Eps8 (NM_007945.1,2052-2070).
cataccatacagaaacaaa

SEQ ID NO: 696449 - DNA, 19 bp, Mus musculus
  siRNA target sequence for Eps8 (NM_007945.1,2388-2406).
gttccagtgatcaatatca

SEQ ID NO: 696450 - DNA, 19 bp, Mus musculus
  siRNA target sequence for Eps8 (NM_007945.1,2414-2432).
ctcctcaccggaagaagta

SEQ ID NO: 696451 - DNA, 19 bp, Mus musculus
  siRNA target sequence for Eps8 (NM_007945.1,2587-2605).
ctgctttggaggacagtaa

SEQ ID NO: 696452 - DNA, 19 bp, Mus musculus
  siRNA target sequence for Eps8 (NM_007945.1,2611-2629).
gctccgagttacaagagat

SEQ ID NO: 696453 - DNA, 19 bp, Mus musculus
  siRNA target sequence for Eps8 (NM_007945.1,2614-2632).
ccgagttacaagagatcat

SEQ ID NO: 696454 - DNA, 19 bp, Mus musculus
  siRNA target sequence for Es1 (NM_007954.1,1407-1425).
cggggctccactattaaaa

SEQ ID NO: 696455 - DNA, 19 bp, Mus musculus
  siRNA target sequence for Evi1 (NM_007963.1,189-207).
caaccaggactgtaaggaa

SEQ ID NO: 696456 - DNA, 19 bp, Mus musculus
  siRNA target sequence for Evi1 (NM_007963.1,246-264).
gcacatgctgtcacatact

SEQ ID NO: 696457 - DNA, 19 bp, Mus musculus
  siRNA target sequence for Evi1 (NM_007963.1,358-376).
cactatgagtgtgaaaact

SEQ ID NO: 696458 - DNA, 19 bp, Mus musculus
  siRNA target sequence for Evi1 (NM_007963.1,402-420).
caaccttcagcgacacatt

SEQ ID NO: 696459 - DNA, 19 bp, Mus musculus
  siRNA target sequence for Evi1 (NM_007963.1,406-424).
cttcagcgacacattcgat

SEQ ID NO: 696460 - DNA, 19 bp, Mus musculus
  siRNA target sequence for Evi1 (NM_007963.1,482-500).
cttcgtcaggcctcaaaca

SEQ ID NO: 696461 - DNA, 19 bp, Mus musculus
  siRNA target sequence for Evi1 (NM_007963.1,543-561).
ggtctgccataaatcctat

SEQ ID NO: 696462 - DNA, 19 bp, Mus musculus
  siRNA target sequence for Evi1 (NM_007963.1,544-562).
gtctgccataaatcctata

SEQ ID NO: 696463 - DNA, 19 bp, Mus musculus
  siRNA target sequence for Evi1 (NM_007963.1,548-566).
gccataaatcctatactca

SEQ ID NO: 696464 - DNA, 19 bp, Mus musculus
  siRNA target sequence for Evi1 (NM_007963.1,648-666).
cagcactacgtcttcctta

SEQ ID NO: 696465 - DNA, 19 bp, Mus musculus
  siRNA target sequence for Evi1 (NM_007963.1,650-668).
gcactacgtcttccttaaa

SEQ ID NO: 696466 - DNA, 19 bp, Mus musculus
  siRNA target sequence for Evi1 (NM_007963.1,653-671).
ctacgtcttccttaaataa

SEQ ID NO: 696467 - DNA, 19 bp, Mus musculus
  siRNA target sequence for Evi1 (NM_007963.1,656-674).
cgtcttccttaaataaaca

SEQ ID NO: 696468 - DNA, 19 bp, Mus musculus
  siRNA target sequence for Evi1 (NM_007963.1,746-764).
gaaccccagctatggataa

SEQ ID NO: 696469 - DNA, 19 bp, Mus musculus
  siRNA target sequence for Evi1 (NM_007963.1,768-786).
gtccatggttaatatgagt

SEQ ID NO: 696470 - DNA, 19 bp, Mus musculus
  siRNA target sequence for Evi1 (NM_007963.1,808-826).
gactattttggcaccaata

SEQ ID NO: 696471 - DNA, 19 bp, Mus musculus
  siRNA target sequence for Evi1 (NM_007963.1,856-874).
gctcctggattttccttta

SEQ ID NO: 696472 - DNA, 19 bp, Mus musculus
  siRNA target sequence for Evi1 (NM_007963.1,906-924).
ccacaggcctcctttgata

SEQ ID NO: 696473 - DNA, 19 bp, Mus musculus
  siRNA target sequence for Evi1 (NM_007963.1,926-944).
ccgctagtcctcctgttaa

SEQ ID NO: 696474 - DNA, 19 bp, Mus musculus
  siRNA target sequence for Evi1 (NM_007963.1,927-945).
cgctagtcctcctgttaaa

SEQ ID NO: 696475 - DNA, 19 bp, Mus musculus
  siRNA target sequence for Evi1 (NM_007963.1,932-950).
gtcctcctgttaaaggatt

SEQ ID NO: 696476 - DNA, 19 bp, Mus musculus
  siRNA target sequence for Evi1 (NM_007963.1,934-952).
cctcctgttaaaggattat

SEQ ID NO: 696477 - DNA, 19 bp, Mus musculus
  siRNA target sequence for Evi1 (NM_007963.1,956-974).
gtaccgaacagtcaaacaa

SEQ ID NO: 696478 - DNA, 19 bp, Mus musculus
  siRNA target sequence for Evi1 (NM_007963.1,960-978).
cgaacagtcaaacaaatgt

SEQ ID NO: 696479 - DNA, 19 bp, Mus musculus
  siRNA target sequence for Evi1 (NM_007963.1,1011-1029).
gccagctacacaggatatt

SEQ ID NO: 696480 - DNA, 19 bp, Mus musculus
  siRNA target sequence for Evi1 (NM_007963.1,1015-1033).
gctacacaggatattttga

SEQ ID NO: 696481 - DNA, 19 bp, Mus musculus
  siRNA target sequence for Evi1 (NM_007963.1,1016-1034).
ctacacaggatattttgaa

SEQ ID NO: 696482 - DNA, 19 bp, Mus musculus
  siRNA target sequence for Evi1 (NM_007963.1,1052-1070).
cacctgtaggggacaataa

SEQ ID NO: 696483 - DNA, 19 bp, Mus musculus
  siRNA target sequence for Evi1 (NM_007963.1,1174-1192).
ggcagtgacctggaaacaa

SEQ ID NO: 696484 - DNA, 19 bp, Mus musculus
  siRNA target sequence for Evi1 (NM_007963.1,1284-1302).
gcagaatctggcttcgata

SEQ ID NO: 696485 - DNA, 19 bp, Mus musculus
  siRNA target sequence for Evi1 (NM_007963.1,1285-1303).
cagaatctggcttcgataa

SEQ ID NO: 696486 - DNA, 19 bp, Mus musculus
  siRNA target sequence for Evi1 (NM_007963.1,1287-1305).
gaatctggcttcgataact

SEQ ID NO: 696487 - DNA, 19 bp, Mus musculus
  siRNA target sequence for Evi1 (NM_007963.1,1294-1312).
gcttcgataactaataaga

SEQ ID NO: 696488 - DNA, 19 bp, Mus musculus
  siRNA target sequence for Evi1 (NM_007963.1,1298-1316).
cgataactaataagaaaga

SEQ ID NO: 696489 - DNA, 19 bp, Mus musculus
  siRNA target sequence for Evi1 (NM_007963.1,1332-1350).
cgttttctcagcatctgta

SEQ ID NO: 696490 - DNA, 19 bp, Mus musculus
  siRNA target sequence for Evi1 (NM_007963.1,1365-1383).
cgtgtcaggagctgtgaat

SEQ ID NO: 696491 - DNA, 19 bp, Mus musculus
  siRNA target sequence for Evi1 (NM_007963.1,1368-1386).
gtcaggagctgtgaatgat

SEQ ID NO: 696492 - DNA, 19 bp, Mus musculus
  siRNA target sequence for Evi1 (NM_007963.1,1373-1391).
gagctgtgaatgattctat

SEQ ID NO: 696493 - DNA, 19 bp, Mus musculus
  siRNA target sequence for Evi1 (NM_007963.1,1445-1463).
ggctgcaagacaaaaaagt

SEQ ID NO: 696494 - DNA, 19 bp, Mus musculus
  siRNA target sequence for Evi1 (NM_007963.1,1510-1528).
gcattctctcaatcaatgt

SEQ ID NO: 696495 - DNA, 19 bp, Mus musculus
  siRNA target sequence for Evi1 (NM_007963.1,1546-1564).
gacttgaggtcgttacctt

SEQ ID NO: 696496 - DNA, 19 bp, Mus musculus
  siRNA target sequence for Evi1 (NM_007963.1,1551-1569).
gaggtcgttacctttgaaa

SEQ ID NO: 696497 - DNA, 19 bp, Mus musculus
  siRNA target sequence for Evi1 (NM_007963.1,1553-1571).
ggtcgttacctttgaaaat

SEQ ID NO: 696498 - DNA, 19 bp, Mus musculus
  siRNA target sequence for Evi1 (NM_007963.1,1583-1601).
caccaagtgaagttaagaa

SEQ ID NO: 696499 - DNA, 19 bp, Mus musculus
  siRNA target sequence for Evi1 (NM_007963.1,1751-1769).
gagccagtgggacaaagtt

SEQ ID NO: 696500 - DNA, 19 bp, Mus musculus
  siRNA target sequence for Evi1 (NM_007963.1,1753-1771).
gccagtgggacaaagttga

SEQ ID NO: 696501 - DNA, 19 bp, Mus musculus
  siRNA target sequence for Evi1 (NM_007963.1,1821-1839).
ggatactaggccatcttca

SEQ ID NO: 696502 - DNA, 19 bp, Mus musculus
  siRNA target sequence for Evi1 (NM_007963.1,1878-1896).
catggaccccatttataga

SEQ ID NO: 696503 - DNA, 19 bp, Mus musculus
  siRNA target sequence for Evi1 (NM_007963.1,1881-1899).
ggaccccatttatagagta

SEQ ID NO: 696504 - DNA, 19 bp, Mus musculus
  siRNA target sequence for Evi1 (NM_007963.1,1916-1934).
ctgacccgcttgaagcttt

SEQ ID NO: 696505 - DNA, 19 bp, Mus musculus
  siRNA target sequence for Evi1 (NM_007963.1,1958-1976).
ctccaggattcttgtttca

SEQ ID NO: 696506 - DNA, 19 bp, Mus musculus
  siRNA target sequence for Evi1 (NM_007963.1,1977-1995).
cccgcaaatgtcagcaatt

SEQ ID NO: 696507 - DNA, 19 bp, Mus musculus
  siRNA target sequence for Evi1 (NM_007963.1,1979-1997).
cgcaaatgtcagcaattga

SEQ ID NO: 696508 - DNA, 19 bp, Mus musculus
  siRNA target sequence for Evi1 (NM_007963.1,2185-2203).
ctaacacggcacttgagaa

SEQ ID NO: 696509 - DNA, 19 bp, Mus musculus
  siRNA target sequence for Evi1 (NM_007963.1,2307-2325).
gccatttaagtgtcattta

SEQ ID NO: 696510 - DNA, 19 bp, Mus musculus
  siRNA target sequence for Evi1 (NM_007963.1,2342-2360).
gtcaacaaaccaatcttga

SEQ ID NO: 696511 - DNA, 19 bp, Mus musculus
  siRNA target sequence for Evi1 (NM_007963.1,2416-2434).
cctcactcagagctagaaa

SEQ ID NO: 696512 - DNA, 19 bp, Mus musculus
  siRNA target sequence for Evi1 (NM_007963.1,2442-2460).
cgcaatcctggatgacaaa

SEQ ID NO: 696513 - DNA, 19 bp, Mus musculus
  siRNA target sequence for Evi1 (NM_007963.1,2444-2462).
caatcctggatgacaaaga

SEQ ID NO: 696514 - DNA, 19 bp, Mus musculus
  siRNA target sequence for Evi1 (NM_007963.1,2552-2570).
gcagtcacttcaaggataa

SEQ ID NO: 696515 - DNA, 19 bp, Mus musculus
  siRNA target sequence for Evi1 (NM_007963.1,2597-2615).
cagatttattggatgatga

SEQ ID NO: 696516 - DNA, 19 bp, Mus musculus
  siRNA target sequence for Evi1 (NM_007963.1,2688-2706).
gctaggggtgactcgttta

SEQ ID NO: 696517 - DNA, 19 bp, Mus musculus
  siRNA target sequence for Evi1 (NM_007963.1,2767-2785).
gcgtccccggtgaggtata

SEQ ID NO: 696518 - DNA, 19 bp, Mus musculus
  siRNA target sequence for Evi1 (NM_007963.1,2768-2786).
cgtccccggtgaggtataa

SEQ ID NO: 696519 - DNA, 19 bp, Mus musculus
  siRNA target sequence for Evi1 (NM_007963.1,2769-2787).
gtccccggtgaggtataaa

SEQ ID NO: 696520 - DNA, 19 bp, Mus musculus
  siRNA target sequence for Evi1 (NM_007963.1,2850-2868).
caaaatgagggaaatggaa

SEQ ID NO: 696521 - DNA, 19 bp, Mus musculus
  siRNA target sequence for Evi1 (NM_007963.1,2890-2908).
gagctgtcctccattagtt

SEQ ID NO: 696522 - DNA, 19 bp, Mus musculus
  siRNA target sequence for Evi1 (NM_007963.1,2929-2947).
cttaaacagacgttacaca

SEQ ID NO: 696523 - DNA, 19 bp, Mus musculus
  siRNA target sequence for Evi5 (NM_007964.1,71-89).
ggttaccaccaaaatgact

SEQ ID NO: 696524 - DNA, 19 bp, Mus musculus
  siRNA target sequence for Evi5 (NM_007964.1,93-111).
gcctttagaaaccctaata

SEQ ID NO: 696525 - DNA, 19 bp, Mus musculus
  siRNA target sequence for Evi5 (NM_007964.1,228-246).
gcctcactacacactacat

SEQ ID NO: 696526 - DNA, 19 bp, Mus musculus
  siRNA target sequence for Evi5 (NM_007964.1,335-353).
ggaggaacaaaacagatta

SEQ ID NO: 696527 - DNA, 19 bp, Mus musculus
  siRNA target sequence for Evi5 (NM_007964.1,357-375).
gagacagacagtaagtctt

SEQ ID NO: 696528 - DNA, 19 bp, Mus musculus
  siRNA target sequence for Evi5 (NM_007964.1,363-381).
gacagtaagtctttaagat

SEQ ID NO: 696529 - DNA, 19 bp, Mus musculus
  siRNA target sequence for Evi5 (NM_007964.1,404-422).
cagtggttcctctcttgta

SEQ ID NO: 696530 - DNA, 19 bp, Mus musculus
  siRNA target sequence for Evi5 (NM_007964.1,408-426).
ggttcctctcttgtatcaa

SEQ ID NO: 696531 - DNA, 19 bp, Mus musculus
  siRNA target sequence for Evi5 (NM_007964.1,462-480).
gaagactcttggattctct

SEQ ID NO: 696532 - DNA, 19 bp, Mus musculus
  siRNA target sequence for Evi5 (NM_007964.1,494-512).
gaatgaatgggatgatgta

SEQ ID NO: 696533 - DNA, 19 bp, Mus musculus
  siRNA target sequence for Evi5 (NM_007964.1,510-528).
gtacgcaagaagaaagaaa

SEQ ID NO: 696534 - DNA, 19 bp, Mus musculus
  siRNA target sequence for Evi5 (NM_007964.1,536-554).
gaaggagcttgttcgtaaa

SEQ ID NO: 696535 - DNA, 19 bp, Mus musculus
  siRNA target sequence for Evi5 (NM_007964.1,582-600).
gtgtggcaacttttatgta

SEQ ID NO: 696536 - DNA, 19 bp, Mus musculus
  siRNA target sequence for Evi5 (NM_007964.1,584-602).
gtggcaacttttatgtaat

SEQ ID NO: 696537 - DNA, 19 bp, Mus musculus
  siRNA target sequence for Evi5 (NM_007964.1,636-654).
gaactcctgaaaatgactt

SEQ ID NO: 696538 - DNA, 19 bp, Mus musculus
  siRNA target sequence for Evi5 (NM_007964.1,655-673).
caccttgtgaaaaactgat

SEQ ID NO: 696539 - DNA, 19 bp, Mus musculus
  siRNA target sequence for Evi5 (NM_007964.1,680-698).
ggacattgctagaacttat

SEQ ID NO: 696540 - DNA, 19 bp, Mus musculus
  siRNA target sequence for Evi5 (NM_007964.1,683-701).
cattgctagaacttatcca

SEQ ID NO: 696541 - DNA, 19 bp, Mus musculus
  siRNA target sequence for Evi5 (NM_007964.1,699-717).
ccagaacacaactttttta

SEQ ID NO: 696542 - DNA, 19 bp, Mus musculus
  siRNA target sequence for Evi5 (NM_007964.1,731-749).
ccttggacaggaggtttta

SEQ ID NO: 696543 - DNA, 19 bp, Mus musculus
  siRNA target sequence for Evi5 (NM_007964.1,807-825).
gtgctttcatcgttggatt

SEQ ID NO: 696544 - DNA, 19 bp, Mus musculus
  siRNA target sequence for Evi5 (NM_007964.1,887-905).
ctacagacttcgtgaacta

SEQ ID NO: 696545 - DNA, 19 bp, Mus musculus
  siRNA target sequence for Evi5 (NM_007964.1,890-908).
cagacttcgtgaactattt

SEQ ID NO: 696546 - DNA, 19 bp, Mus musculus
  siRNA target sequence for Evi5 (NM_007964.1,892-910).
gacttcgtgaactatttaa

SEQ ID NO: 696547 - DNA, 19 bp, Mus musculus
  siRNA target sequence for Evi5 (NM_007964.1,922-940).
cggaattgggcctttgtat

SEQ ID NO: 696548 - DNA, 19 bp, Mus musculus
  siRNA target sequence for Evi5 (NM_007964.1,1006-1024).
gttttcatacgtcaatgta

SEQ ID NO: 696549 - DNA, 19 bp, Mus musculus
  siRNA target sequence for Evi5 (NM_007964.1,1071-1089).
ccaattgcgacaaggatat

SEQ ID NO: 696550 - DNA, 19 bp, Mus musculus
  siRNA target sequence for Evi5 (NM_007964.1,1072-1090).
caattgcgacaaggatatt

SEQ ID NO: 696551 - DNA, 19 bp, Mus musculus
  siRNA target sequence for Evi5 (NM_007964.1,1077-1095).
gcgacaaggatatttgaca

SEQ ID NO: 696552 - DNA, 19 bp, Mus musculus
  siRNA target sequence for Evi5 (NM_007964.1,1078-1096).
cgacaaggatatttgacat

SEQ ID NO: 696553 - DNA, 19 bp, Mus musculus
  siRNA target sequence for Evi5 (NM_007964.1,1103-1121).
gtctgagggtttggaaata

SEQ ID NO: 696554 - DNA, 19 bp, Mus musculus
  siRNA target sequence for Evi5 (NM_007964.1,1105-1123).
ctgagggtttggaaatagt

SEQ ID NO: 696555 - DNA, 19 bp, Mus musculus
  siRNA target sequence for Evi5 (NM_007964.1,1135-1153).
gattagcgcttcttcagat

SEQ ID NO: 696556 - DNA, 19 bp, Mus musculus
  siRNA target sequence for Evi5 (NM_007964.1,1151-1169).
gatgaatcaggcagaatta

SEQ ID NO: 696557 - DNA, 19 bp, Mus musculus
  siRNA target sequence for Evi5 (NM_007964.1,1234-1252).
gtggcccagaaaaattaat

SEQ ID NO: 696558 - DNA, 19 bp, Mus musculus
  siRNA target sequence for Evi5 (NM_007964.1,1260-1278).
gcttaccaagtcaaataca

SEQ ID NO: 696559 - DNA, 19 bp, Mus musculus
  siRNA target sequence for Evi5 (NM_007964.1,1261-1279).
cttaccaagtcaaatacaa

SEQ ID NO: 696560 - DNA, 19 bp, Mus musculus
  siRNA target sequence for Evi5 (NM_007964.1,1367-1385).
cacagaaaataggctttta

SEQ ID NO: 696561 - DNA, 19 bp, Mus musculus
  siRNA target sequence for Evi5 (NM_007964.1,1391-1409).
gcgcattgaaacattagaa

SEQ ID NO: 696562 - DNA, 19 bp, Mus musculus
  siRNA target sequence for Evi5 (NM_007964.1,1392-1410).
cgcattgaaacattagaaa

SEQ ID NO: 696563 - DNA, 19 bp, Mus musculus
  siRNA target sequence for Evi5 (NM_007964.1,1523-1541).
ggataaagtgttggatata

SEQ ID NO: 696564 - DNA, 19 bp, Mus musculus
  siRNA target sequence for Evi5 (NM_007964.1,1631-1649).
cattatgggtttgaaagaa

SEQ ID NO: 696565 - DNA, 19 bp, Mus musculus
  siRNA target sequence for Evi5 (NM_007964.1,1658-1676).
gcaagtcagaaccttagaa

SEQ ID NO: 696566 - DNA, 19 bp, Mus musculus
  siRNA target sequence for Evi5 (NM_007964.1,1718-1736).
gaaagacccacccaagaaa

SEQ ID NO: 696567 - DNA, 19 bp, Mus musculus
  siRNA target sequence for Evi5 (NM_007964.1,1845-1863).
cagaaccagatcaatagta

SEQ ID NO: 696568 - DNA, 19 bp, Mus musculus
  siRNA target sequence for Evi5 (NM_007964.1,1918-1936).
cgctgtctgtgaagaacaa

SEQ ID NO: 696569 - DNA, 19 bp, Mus musculus
  siRNA target sequence for Evi5 (NM_007964.1,1940-1958).
cttgcttgcccagttaagt

SEQ ID NO: 696570 - DNA, 19 bp, Mus musculus
  siRNA target sequence for Evi5 (NM_007964.1,2130-2148).
gactctaaccagtacatta

SEQ ID NO: 696571 - DNA, 19 bp, Mus musculus
  siRNA target sequence for Evi5 (NM_007964.1,2216-2234).
ctccagccgacctcctttt

SEQ ID NO: 696572 - DNA, 19 bp, Mus musculus
  siRNA target sequence for Evi5 (NM_007964.1,2219-2237).
cagccgacctccttttgat

SEQ ID NO: 696573 - DNA, 19 bp, Mus musculus
  siRNA target sequence for Evi5 (NM_007964.1,2244-2262).
cacattgtcagccatctaa

SEQ ID NO: 696574 - DNA, 19 bp, Mus musculus
  siRNA target sequence for Evi5 (NM_007964.1,2259-2277).
ctaataggagacgatgaat

SEQ ID NO: 696575 - DNA, 19 bp, Mus musculus
  siRNA target sequence for Evi5 (NM_007964.1,2282-2300).
ccactcatcggatgaagat

SEQ ID NO: 696576 - DNA, 19 bp, Mus musculus
  siRNA target sequence for Evi5 (NM_007964.1,2469-2487).
cagagagagtcctactcaa

SEQ ID NO: 696577 - DNA, 19 bp, Mus musculus
  siRNA target sequence for F8a (NM_007978.1,391-409).
ctcaagaagcgcttcttga

SEQ ID NO: 696578 - DNA, 19 bp, Mus musculus
  siRNA target sequence for F8a (NM_007978.1,768-786).
cgctgctgccggtcacttt

SEQ ID NO: 696579 - DNA, 19 bp, Mus musculus
  siRNA target sequence for F8a (NM_007978.1,1215-1233).
ctcctgggaggctttcgat

SEQ ID NO: 696580 - DNA, 19 bp, Mus musculus
  siRNA target sequence for Fgfbp1 (NM_008009.2,1262-1280).
cagagaagcaggacatcta

SEQ ID NO: 696581 - DNA, 19 bp, Mus musculus
  siRNA target sequence for Fgfbp1 (NM_008009.2,1269-1287).
gcaggacatctaaatctct

SEQ ID NO: 696582 - DNA, 19 bp, Mus musculus
  siRNA target sequence for Fgfbp1 (NM_008009.2,1382-1400).
caagccgatcaggagtttt

SEQ ID NO: 696583 - DNA, 19 bp, Mus musculus
  siRNA target sequence for Fgfbp1 (NM_008009.2,1385-1403).
gccgatcaggagttttctt

SEQ ID NO: 696584 - DNA, 19 bp, Mus musculus
  siRNA target sequence for Fgfbp1 (NM_008009.2,1387-1405).
cgatcaggagttttcttgt

SEQ ID NO: 696585 - DNA, 19 bp, Mus musculus
  siRNA target sequence for Fgfbp1 (NM_008009.2,1431-1449).
gccttaaacacgacaaaga

SEQ ID NO: 696586 - DNA, 19 bp, Mus musculus
  siRNA target sequence for Fgfbp1 (NM_008009.2,1475-1493).
cgcacgctgcgcaaacaga

SEQ ID NO: 696587 - DNA, 19 bp, Mus musculus
  siRNA target sequence for Fgfbp1 (NM_008009.2,1629-1647).
ccgcaagggagcacaacaa

SEQ ID NO: 696588 - DNA, 19 bp, Mus musculus
  siRNA target sequence for Fgfbp1 (NM_008009.2,1790-1808).
gagttctgtggggaatctt

SEQ ID NO: 696589 - DNA, 19 bp, Mus musculus
  siRNA target sequence for Fgfbp1 (NM_008009.2,1802-1820).
gaatcttggagctccattt

SEQ ID NO: 696590 - DNA, 19 bp, Mus musculus
  siRNA target sequence for Fgfbp1 (NM_008009.2,1821-1839).
gcacattcttcctcaacat

SEQ ID NO: 696591 - DNA, 19 bp, Mus musculus
  siRNA target sequence for Fin14 (NM_008015.1,914-932).
ctacagtgcagtttagtca

SEQ ID NO: 696592 - DNA, 19 bp, Mus musculus
  siRNA target sequence for Fin14 (NM_008015.1,919-937).
gtgcagtttagtcagtttt

SEQ ID NO: 696593 - DNA, 19 bp, Mus musculus
  siRNA target sequence for Fin14 (NM_008015.1,922-940).
cagtttagtcagttttagt

SEQ ID NO: 696594 - DNA, 19 bp, Mus musculus
  siRNA target sequence for Fin14 (NM_008015.1,997-1015).
gcattgtccaccactaaaa

SEQ ID NO: 696595 - DNA, 19 bp, Mus musculus
  siRNA target sequence for Fin14 (NM_008015.1,998-1016).
cattgtccaccactaaaat

SEQ ID NO: 696596 - DNA, 19 bp, Mus musculus
  siRNA target sequence for Fin15 (NM_008016.1,576-594).
gcaaatatatctagcttta

SEQ ID NO: 696597 - DNA, 19 bp, Mus musculus
  siRNA target sequence for Fin15 (NM_008016.1,577-595).
caaatatatctagctttat

SEQ ID NO: 696598 - DNA, 19 bp, Mus musculus
  siRNA target sequence for Fin15 (NM_008016.1,610-628).
ggaagaatgctacgtatta

SEQ ID NO: 696599 - DNA, 19 bp, Mus musculus
  siRNA target sequence for Fin15 (NM_008016.1,611-629).
gaagaatgctacgtattat

SEQ ID NO: 696600 - DNA, 19 bp, Mus musculus
  siRNA target sequence for Fin15 (NM_008016.1,614-632).
gaatgctacgtattataca

SEQ ID NO: 696601 - DNA, 19 bp, Mus musculus
  siRNA target sequence for Fin15 (NM_008016.1,618-636).
gctacgtattatacatgta

SEQ ID NO: 696602 - DNA, 19 bp, Mus musculus
  siRNA target sequence for Fin15 (NM_008016.1,623-641).
gtattatacatgtagcttt

SEQ ID NO: 696603 - DNA, 19 bp, Mus musculus
  siRNA target sequence for Fin15 (NM_008016.1,712-730).
gaactgccttttccttatt

SEQ ID NO: 696604 - DNA, 19 bp, Mus musculus
  siRNA target sequence for Fin15 (NM_008016.1,763-781).
ccctcaactctgtaattct

SEQ ID NO: 696605 - DNA, 19 bp, Mus musculus
  siRNA target sequence for Fin15 (NM_008016.1,797-815).
gtttcaaactctctacatt

SEQ ID NO: 696606 - DNA, 19 bp, Mus musculus
  siRNA target sequence for Foxd4 (NM_008022.1,516-534).
ccgcccagtcctctaagtt

SEQ ID NO: 696607 - DNA, 19 bp, Mus musculus
  siRNA target sequence for Foxd4 (NM_008022.1,858-876).
ggtatctgcgccttcatca

SEQ ID NO: 696608 - DNA, 19 bp, Mus musculus
  siRNA target sequence for Foxd4 (NM_008022.1,889-907).
cctattaccgccgtaagtt

SEQ ID NO: 696609 - DNA, 19 bp, Mus musculus
  siRNA target sequence for Foxd4 (NM_008022.1,1563-1581).
gcttcccctttgtttcaca

SEQ ID NO: 696610 - DNA, 19 bp, Mus musculus
  siRNA target sequence for Foxd4 (NM_008022.1,1586-1604).
cgcaggttcccggacaata

SEQ ID NO: 696611 - DNA, 19 bp, Mus musculus
  siRNA target sequence for Foxd4 (NM_008022.1,1587-1605).
gcaggttcccggacaatat

SEQ ID NO: 696612 - DNA, 19 bp, Mus musculus
  siRNA target sequence for Foxd4 (NM_008022.1,1588-1606).
caggttcccggacaatatt

SEQ ID NO: 696613 - DNA, 19 bp, Mus musculus
  siRNA target sequence for Foxd4 (NM_008022.1,1650-1668).
catcactgtgccattagct

SEQ ID NO: 696614 - DNA, 19 bp, Mus musculus
  siRNA target sequence for Fpr-rs1 (NM_008038.1,12-30).
ctactctatccctttgaat

SEQ ID NO: 696615 - DNA, 19 bp, Mus musculus
  siRNA target sequence for Fpr-rs1 (NM_008038.1,32-50).
gatcagatgtggtgatcta

SEQ ID NO: 696616 - DNA, 19 bp, Mus musculus
  siRNA target sequence for Fpr-rs1 (NM_008038.1,37-55).
gatgtggtgatctatgatt

SEQ ID NO: 696617 - DNA, 19 bp, Mus musculus
  siRNA target sequence for Fpr-rs1 (NM_008038.1,310-328).
gcagtagatgtaaacctat

SEQ ID NO: 696618 - DNA, 19 bp, Mus musculus
  siRNA target sequence for Fpr-rs1 (NM_008038.1,311-329).
cagtagatgtaaacctatt

SEQ ID NO: 696619 - DNA, 19 bp, Mus musculus
  siRNA target sequence for Fpr-rs1 (NM_008038.1,513-531).
ctgtagattgagctttgta

SEQ ID NO: 696620 - DNA, 19 bp, Mus musculus
  siRNA target sequence for Fpr-rs1 (NM_008038.1,547-565).
gttgaggaaaggttgaaca

SEQ ID NO: 696621 - DNA, 19 bp, Mus musculus
  siRNA target sequence for Fpr-rs1 (NM_008038.1,802-820).
cagtttagtggtagttata

SEQ ID NO: 696622 - DNA, 19 bp, Mus musculus
  siRNA target sequence for Fpr-rs1 (NM_008038.1,829-847).
ggcaggttggttaatccaa

SEQ ID NO: 696623 - DNA, 19 bp, Mus musculus
  siRNA target sequence for Fpr-rs1 (NM_008038.1,838-856).
gttaatccaaccagttcat

SEQ ID NO: 696624 - DNA, 19 bp, Mus musculus
  siRNA target sequence for Fpr-rs1 (NM_008038.1,965-983).
gtgaggactctggtcatat

SEQ ID NO: 696625 - DNA, 19 bp, Mus musculus
  siRNA target sequence for Fpr-rs1 (NM_008038.1,967-985).
gaggactctggtcatatca

SEQ ID NO: 696626 - DNA, 19 bp, Mus musculus
  siRNA target sequence for Fpr-rs1 (NM_008038.1,969-987).
ggactctggtcatatcagt

SEQ ID NO: 696627 - DNA, 19 bp, Mus musculus
  siRNA target sequence for Fpr-rs2 (NM_008039.1,489-507).
cttgactactgttagaatt

SEQ ID NO: 696628 - DNA, 19 bp, Mus musculus
  siRNA target sequence for Fpr-rs2 (NM_008039.1,514-532).
ggagatgtgtattgtacat

SEQ ID NO: 696629 - DNA, 19 bp, Mus musculus
  siRNA target sequence for Fpr-rs2 (NM_008039.1,517-535).
gatgtgtattgtacattca

SEQ ID NO: 696630 - DNA, 19 bp, Mus musculus
  siRNA target sequence for Fpr-rs2 (NM_008039.1,520-538).
gtgtattgtacattcaact

SEQ ID NO: 696631 - DNA, 19 bp, Mus musculus
  siRNA target sequence for Fpr-rs2 (NM_008039.1,667-685).
ctcattgctgtcaagatca

SEQ ID NO: 696632 - DNA, 19 bp, Mus musculus
  siRNA target sequence for Fpr-rs2 (NM_008039.1,687-705).
cagaagaaaccttgttaat

SEQ ID NO: 696633 - DNA, 19 bp, Mus musculus
  siRNA target sequence for Fpr-rs2 (NM_008039.1,789-807).
gggcacagtctggtttaaa

SEQ ID NO: 696634 - DNA, 19 bp, Mus musculus
  siRNA target sequence for Fpr-rs2 (NM_008039.1,812-830).
cattgcttagtggtagtta

SEQ ID NO: 696635 - DNA, 19 bp, Mus musculus
  siRNA target sequence for Fpr-rs2 (NM_008039.1,827-845).
gttataaaattcttgacat

SEQ ID NO: 696636 - DNA, 19 bp, Mus musculus
  siRNA target sequence for Fpr-rs2 (NM_008039.1,870-888).
ggcttacttcaatagttgt

SEQ ID NO: 696637 - DNA, 19 bp, Mus musculus
  siRNA target sequence for Fpr-rs2 (NM_008039.1,921-939).
ggactttcgtgagagattt

SEQ ID NO: 696638 - DNA, 19 bp, Mus musculus
  siRNA target sequence for Fpr-rs2 (NM_008039.1,928-946).
cgtgagagatttattcatt

SEQ ID NO: 696639 - DNA, 19 bp, Mus musculus
  siRNA target sequence for Fpr-rs2 (NM_008039.1,1000-1018).
gattcaagcaccagttcta

SEQ ID NO: 696640 - DNA, 19 bp, Mus musculus
  siRNA target sequence for Fpr-rs2 (NM_008039.1,1027-1045).
cctgcagacattgagttaa

SEQ ID NO: 696641 - DNA, 19 bp, Mus musculus
  siRNA target sequence for Fpr-rs3 (NM_008040.1,78-96).
gatcctctcagtgatagtt

SEQ ID NO: 696642 - DNA, 19 bp, Mus musculus
  siRNA target sequence for Fpr-rs3 (NM_008040.1,88-106).
gtgatagttctctccataa

SEQ ID NO: 696643 - DNA, 19 bp, Mus musculus
  siRNA target sequence for Fpr-rs3 (NM_008040.1,304-322).
ctcagcattgtgcacataa

SEQ ID NO: 696644 - DNA, 19 bp, Mus musculus
  siRNA target sequence for Fpr-rs3 (NM_008040.1,308-326).
gcattgtgcacataaacct

SEQ ID NO: 696645 - DNA, 19 bp, Mus musculus
  siRNA target sequence for Fpr-rs3 (NM_008040.1,423-441).
ggccaggaaagtgattgtt

SEQ ID NO: 696646 - DNA, 19 bp, Mus musculus
  siRNA target sequence for Fpr-rs3 (NM_008040.1,522-540).
gcactgtacatgtaacttt

SEQ ID NO: 696647 - DNA, 19 bp, Mus musculus
  siRNA target sequence for Fpr-rs3 (NM_008040.1,530-548).
catgtaactttgaatctgt

SEQ ID NO: 696648 - DNA, 19 bp, Mus musculus
  siRNA target sequence for Fpr-rs3 (NM_008040.1,593-611).
gcacagcaacaggaatcat

SEQ ID NO: 696649 - DNA, 19 bp, Mus musculus
  siRNA target sequence for Fpr-rs3 (NM_008040.1,674-692).
ctgccaagatttgtagaaa

SEQ ID NO: 696650 - DNA, 19 bp, Mus musculus
  siRNA target sequence for Fpr-rs3 (NM_008040.1,686-704).
gtagaaaaggctttctgaa

SEQ ID NO: 696651 - DNA, 19 bp, Mus musculus
  siRNA target sequence for Fpr-rs3 (NM_008040.1,777-795).
gattattcttctaggtaat

SEQ ID NO: 696652 - DNA, 19 bp, Mus musculus
  siRNA target sequence for Fpr-rs3 (NM_008040.1,787-805).
ctaggtaatatctggaata

SEQ ID NO: 696653 - DNA, 19 bp, Mus musculus
  siRNA target sequence for Fpr-rs3 (NM_008040.1,791-809).
gtaatatctggaataagga

SEQ ID NO: 696654 - DNA, 19 bp, Mus musculus
  siRNA target sequence for Fpr-rs3 (NM_008040.1,814-832).
ccaagcagcattcacattt

SEQ ID NO: 696655 - DNA, 19 bp, Mus musculus
  siRNA target sequence for Fpr-rs3 (NM_008040.1,821-839).
gcattcacattttgttgaa

SEQ ID NO: 696656 - DNA, 19 bp, Mus musculus
  siRNA target sequence for Fpr-rs3 (NM_008040.1,993-1011).
cagcaacttttcttcatgt

SEQ ID NO: 696657 - DNA, 19 bp, Mus musculus
  siRNA target sequence for Fpr-rs4 (NM_008041.1,84-102).
ctcattagtggttctcttt

SEQ ID NO: 696658 - DNA, 19 bp, Mus musculus
  siRNA target sequence for Fpr-rs4 (NM_008041.1,201-219).
ggctttgagtgatttatct

SEQ ID NO: 696659 - DNA, 19 bp, Mus musculus
  siRNA target sequence for Fpr-rs4 (NM_008041.1,304-322).
cacataattgcaaacataa

SEQ ID NO: 696660 - DNA, 19 bp, Mus musculus
  siRNA target sequence for Fpr-rs4 (NM_008041.1,331-349).
gtaagtatcttcctaatca

SEQ ID NO: 696661 - DNA, 19 bp, Mus musculus
  siRNA target sequence for Fpr-rs4 (NM_008041.1,520-538).
gtgtactgtatatctaaat

SEQ ID NO: 696662 - DNA, 19 bp, Mus musculus
  siRNA target sequence for Fpr-rs4 (NM_008041.1,831-849).
gttggttaacccagcaaat

SEQ ID NO: 696663 - DNA, 19 bp, Mus musculus
  siRNA target sequence for Fpr-rs4 (NM_008041.1,835-853).
gttaacccagcaaatacct

SEQ ID NO: 696664 - DNA, 19 bp, Mus musculus
  siRNA target sequence for Fst (NM_008046.1,98-116).
ggctccgccaagcaaagaa

SEQ ID NO: 696665 - DNA, 19 bp, Mus musculus
  siRNA target sequence for Fst (NM_008046.1,122-140).
gctgccaggtcctgtataa

SEQ ID NO: 696666 - DNA, 19 bp, Mus musculus
  siRNA target sequence for Fst (NM_008046.1,257-275).
ccaactgcatcccttgtaa

SEQ ID NO: 696667 - DNA, 19 bp, Mus musculus
  siRNA target sequence for Fst (NM_008046.1,297-315).
ctgcggacctgggaaaaaa

SEQ ID NO: 696668 - DNA, 19 bp, Mus musculus
  siRNA target sequence for Fst (NM_008046.1,398-416).
ggctggatgggaaaaccta

SEQ ID NO: 696669 - DNA, 19 bp, Mus musculus
  siRNA target sequence for Fst (NM_008046.1,461-479).
cggaactagaagtacagta

SEQ ID NO: 696670 - DNA, 19 bp, Mus musculus
  siRNA target sequence for Fst (NM_008046.1,498-516).
gacttgtagggatgttttt

SEQ ID NO: 696671 - DNA, 19 bp, Mus musculus
  siRNA target sequence for Fst (NM_008046.1,647-665).
gcgcctgccacctgagaaa

SEQ ID NO: 696672 - DNA, 19 bp, Mus musculus
  siRNA target sequence for Fst (NM_008046.1,681-699).
gggcagatccattggatta

SEQ ID NO: 696673 - DNA, 19 bp, Mus musculus
  siRNA target sequence for Fst (NM_008046.1,700-718).
gcctatgagggaaagtgta

SEQ ID NO: 696674 - DNA, 19 bp, Mus musculus
  siRNA target sequence for Fst (NM_008046.1,701-719).
cctatgagggaaagtgtat

SEQ ID NO: 696675 - DNA, 19 bp, Mus musculus
  siRNA target sequence for Fst (NM_008046.1,905-923).
cttctggcgtgcttcttga

SEQ ID NO: 696676 - DNA, 19 bp, Mus musculus
  siRNA target sequence for Fst (NM_008046.1,908-926).
ctggcgtgcttcttgaagt

SEQ ID NO: 696677 - DNA, 19 bp, Mus musculus
  siRNA target sequence for Fst (NM_008046.1,991-1009).
caggactacagctttccta

SEQ ID NO: 696678 - DNA, 19 bp, Mus musculus
  siRNA target sequence for G6pt1 (NM_008063.1,128-146).
ccaaggctacggctactat

SEQ ID NO: 696679 - DNA, 19 bp, Mus musculus
  siRNA target sequence for G6pt1 (NM_008063.1,143-161).
ctatcgcactgtcatattt

SEQ ID NO: 696680 - DNA, 19 bp, Mus musculus
  siRNA target sequence for G6pt1 (NM_008063.1,175-193).
gaggctacagcctgtacta

SEQ ID NO: 696681 - DNA, 19 bp, Mus musculus
  siRNA target sequence for G6pt1 (NM_008063.1,177-195).
ggctacagcctgtactatt

SEQ ID NO: 696682 - DNA, 19 bp, Mus musculus
  siRNA target sequence for G6pt1 (NM_008063.1,178-196).
gctacagcctgtactattt

SEQ ID NO: 696683 - DNA, 19 bp, Mus musculus
  siRNA target sequence for G6pt1 (NM_008063.1,247-265).
ctctggacaaggacgattt

SEQ ID NO: 696684 - DNA, 19 bp, Mus musculus
  siRNA target sequence for G6pt1 (NM_008063.1,382-400).
gtctggtcaacgtagtctt

SEQ ID NO: 696685 - DNA, 19 bp, Mus musculus
  siRNA target sequence for G6pt1 (NM_008063.1,565-583).
gaagtttgggacctatctt

SEQ ID NO: 696686 - DNA, 19 bp, Mus musculus
  siRNA target sequence for G6pt1 (NM_008063.1,825-843).
gtcttcggagtaaagactt

SEQ ID NO: 696687 - DNA, 19 bp, Mus musculus
  siRNA target sequence for G6pt1 (NM_008063.1,1128-1146).
gtgtttggtttctcttctt

SEQ ID NO: 696688 - DNA, 19 bp, Mus musculus
  siRNA target sequence for G6pt1 (NM_008063.1,1333-1351).
gagccagcacagttgtctt

SEQ ID NO: 696689 - DNA, 19 bp, Mus musculus
  siRNA target sequence for Gata4 (NM_008092.1,1177-1195).
gacaccccaatctcgatat

SEQ ID NO: 696690 - DNA, 19 bp, Mus musculus
  siRNA target sequence for Gata4 (NM_008092.1,1179-1197).
caccccaatctcgatatgt

SEQ ID NO: 696691 - DNA, 19 bp, Mus musculus
  siRNA target sequence for Gata4 (NM_008092.1,1181-1199).
ccccaatctcgatatgttt

SEQ ID NO: 696692 - DNA, 19 bp, Mus musculus
  siRNA target sequence for Gata4 (NM_008092.1,1183-1201).
ccaatctcgatatgtttga

SEQ ID NO: 696693 - DNA, 19 bp, Mus musculus
  siRNA target sequence for Gata4 (NM_008092.1,1184-1202).
caatctcgatatgtttgat

SEQ ID NO: 696694 - DNA, 19 bp, Mus musculus
  siRNA target sequence for Gata4 (NM_008092.1,1412-1430).
cacgctgtggcgtcgtaat

SEQ ID NO: 696695 - DNA, 19 bp, Mus musculus
  siRNA target sequence for Gata4 (NM_008092.1,1538-1556).
gcccaagaacctgaataaa

SEQ ID NO: 696696 - DNA, 19 bp, Mus musculus
  siRNA target sequence for Gata4 (NM_008092.1,1539-1557).
cccaagaacctgaataaat

SEQ ID NO: 696697 - DNA, 19 bp, Mus musculus
  siRNA target sequence for Gata4 (NM_008092.1,1872-1890).
gacagtcatggggacataa

SEQ ID NO: 696698 - DNA, 19 bp, Mus musculus
  siRNA target sequence for Gbas (NM_008095.1,165-183).
ctggctaaagtccttgttt

SEQ ID NO: 696699 - DNA, 19 bp, Mus musculus
  siRNA target sequence for Gbas (NM_008095.1,167-185).
ggctaaagtccttgtttgt

SEQ ID NO: 696700 - DNA, 19 bp, Mus musculus
  siRNA target sequence for Gbas (NM_008095.1,169-187).
ctaaagtccttgtttgtca

SEQ ID NO: 696701 - DNA, 19 bp, Mus musculus
  siRNA target sequence for Gbas (NM_008095.1,192-210).
ggtcgatccaaggaaagat

SEQ ID NO: 696702 - DNA, 19 bp, Mus musculus
  siRNA target sequence for Gbas (NM_008095.1,218-236).
ccaacctcctagccaaaaa

SEQ ID NO: 696703 - DNA, 19 bp, Mus musculus
  siRNA target sequence for Gbas (NM_008095.1,242-260).
cgagcagtctgtacaagtt

SEQ ID NO: 696704 - DNA, 19 bp, Mus musculus
  siRNA target sequence for Gbas (NM_008095.1,287-305).
gcctagacgcatacaacaa

SEQ ID NO: 696705 - DNA, 19 bp, Mus musculus
  siRNA target sequence for Gbas (NM_008095.1,288-306).
cctagacgcatacaacaaa

SEQ ID NO: 696706 - DNA, 19 bp, Mus musculus
  siRNA target sequence for Gbas (NM_008095.1,289-307).
ctagacgcatacaacaaaa

SEQ ID NO: 696707 - DNA, 19 bp, Mus musculus
  siRNA target sequence for Gbas (NM_008095.1,292-310).
gacgcatacaacaaaattt

SEQ ID NO: 696708 - DNA, 19 bp, Mus musculus
  siRNA target sequence for Gbas (NM_008095.1,296-314).
catacaacaaaatttgtca

SEQ ID NO: 696709 - DNA, 19 bp, Mus musculus
  siRNA target sequence for Gbas (NM_008095.1,311-329).
gtcaagaagtgttaccaaa

SEQ ID NO: 696710 - DNA, 19 bp, Mus musculus
  siRNA target sequence for Gbas (NM_008095.1,444-462).
cacggaggtcatgaataaa

SEQ ID NO: 696711 - DNA, 19 bp, Mus musculus
  siRNA target sequence for Gbas (NM_008095.1,446-464).
cggaggtcatgaataaact

SEQ ID NO: 696712 - DNA, 19 bp, Mus musculus
  siRNA target sequence for Gbas (NM_008095.1,448-466).
gaggtcatgaataaactca

SEQ ID NO: 696713 - DNA, 19 bp, Mus musculus
  siRNA target sequence for Gbas (NM_008095.1,613-631).
ctccgaccaggaacaatga

SEQ ID NO: 696714 - DNA, 19 bp, Mus musculus
  siRNA target sequence for Gbas (NM_008095.1,665-683).
gctttagacaggacagtaa

SEQ ID NO: 696715 - DNA, 19 bp, Mus musculus
  siRNA target sequence for Gbas (NM_008095.1,666-684).
ctttagacaggacagtaat

SEQ ID NO: 696716 - DNA, 19 bp, Mus musculus
  siRNA target sequence for Gbas (NM_008095.1,807-825).
ggaggagctcgtgtactat

SEQ ID NO: 696717 - DNA, 19 bp, Mus musculus
  siRNA target sequence for Gbas (NM_008095.1,808-826).
gaggagctcgtgtactata

SEQ ID NO: 696718 - DNA, 19 bp, Mus musculus
  siRNA target sequence for Gbas (NM_008095.1,810-828).
ggagctcgtgtactataca

SEQ ID NO: 696719 - DNA, 19 bp, Mus musculus
  siRNA target sequence for Gbas (NM_008095.1,822-840).
ctatacagtcccactcatt

SEQ ID NO: 696720 - DNA, 19 bp, Mus musculus
  siRNA target sequence for Gcet (NM_008099.2,264-282).
cccgttcaggacaatgcta

SEQ ID NO: 696721 - DNA, 19 bp, Mus musculus
  siRNA target sequence for Gcet (NM_008099.2,265-283).
ccgttcaggacaatgctaa

SEQ ID NO: 696722 - DNA, 19 bp, Mus musculus
  siRNA target sequence for Gcet (NM_008099.2,474-492).
ccttccacagatgatgaat

SEQ ID NO: 696723 - DNA, 19 bp, Mus musculus
  siRNA target sequence for Gcet (NM_008099.2,475-493).
cttccacagatgatgaata

SEQ ID NO: 696724 - DNA, 19 bp, Mus musculus
  siRNA target sequence for Gcet (NM_008099.2,557-575).
cccctacgagacacacttt

SEQ ID NO: 696725 - DNA, 19 bp, Mus musculus
  siRNA target sequence for Gfi1b (NM_008114.2,135-153).
cacggtcctttctagtgaa

SEQ ID NO: 696726 - DNA, 19 bp, Mus musculus
  siRNA target sequence for Gfi1b (NM_008114.2,291-309).
ccttggactggaacacaat

SEQ ID NO: 696727 - DNA, 19 bp, Mus musculus
  siRNA target sequence for Gfi1b (NM_008114.2,417-435).
ctgagtcaccccctttcta

SEQ ID NO: 696728 - DNA, 19 bp, Mus musculus
  siRNA target sequence for Gfi1b (NM_008114.2,600-618).
ctccaggcatggacactta

SEQ ID NO: 696729 - DNA, 19 bp, Mus musculus
  siRNA target sequence for Glrp1 (NM_008132.1,642-660).
cccaggcatgatgatattt

SEQ ID NO: 696730 - DNA, 19 bp, Mus musculus
  siRNA target sequence for Bscl2 (NM_008144.3,671-689).
gacgtgatcgggtactgat

SEQ ID NO: 696731 - DNA, 19 bp, Mus musculus
  siRNA target sequence for Bscl2 (NM_008144.3,674-692).
gtgatcgggtactgatgta

SEQ ID NO: 696732 - DNA, 19 bp, Mus musculus
  siRNA target sequence for Bscl2 (NM_008144.3,690-708).
gtatggacagccatatcga

SEQ ID NO: 696733 - DNA, 19 bp, Mus musculus
  siRNA target sequence for Bscl2 (NM_008144.3,729-747).
gcccgaatcccctgtgaat

SEQ ID NO: 696734 - DNA, 19 bp, Mus musculus
  siRNA target sequence for Bscl2 (NM_008144.3,731-749).
ccgaatcccctgtgaatca

SEQ ID NO: 696735 - DNA, 19 bp, Mus musculus
  siRNA target sequence for Bscl2 (NM_008144.3,748-766).
caagacttgggcatgttct

SEQ ID NO: 696736 - DNA, 19 bp, Mus musculus
  siRNA target sequence for Bscl2 (NM_008144.3,769-787).
gtcactgtttcatgttata

SEQ ID NO: 696737 - DNA, 19 bp, Mus musculus
  siRNA target sequence for Bscl2 (NM_008144.3,799-817).
cgaatcatctccacttctt

SEQ ID NO: 696738 - DNA, 19 bp, Mus musculus
  siRNA target sequence for Bscl2 (NM_008144.3,821-839).
gctcagtgatgctgcatta

SEQ ID NO: 696739 - DNA, 19 bp, Mus musculus
  siRNA target sequence for Bscl2 (NM_008144.3,931-949).
gaactctactctgactata

SEQ ID NO: 696740 - DNA, 19 bp, Mus musculus
  siRNA target sequence for Bscl2 (NM_008144.3,943-961).
gactatagggagaattcgt

SEQ ID NO: 696741 - DNA, 19 bp, Mus musculus
  siRNA target sequence for Bscl2 (NM_008144.3,945-963).
ctatagggagaattcgtat

SEQ ID NO: 696742 - DNA, 19 bp, Mus musculus
  siRNA target sequence for Bscl2 (NM_008144.3,971-989).
caactggagcaattattga

SEQ ID NO: 696743 - DNA, 19 bp, Mus musculus
  siRNA target sequence for Bscl2 (NM_008144.3,974-992).
ctggagcaattattgagat

SEQ ID NO: 696744 - DNA, 19 bp, Mus musculus
  siRNA target sequence for Bscl2 (NM_008144.3,998-1016).
gcaagcgcatccagatgta

SEQ ID NO: 696745 - DNA, 19 bp, Mus musculus
  siRNA target sequence for Bscl2 (NM_008144.3,1188-1206).
cttctctctgcaggttaat

SEQ ID NO: 696746 - DNA, 19 bp, Mus musculus
  siRNA target sequence for Bscl2 (NM_008144.3,1209-1227).
ccgacaaagggataactca

SEQ ID NO: 696747 - DNA, 19 bp, Mus musculus
  siRNA target sequence for Gp49a (NM_008147.1,56-74).
cacagtgctgctatacctt

SEQ ID NO: 696748 - DNA, 19 bp, Mus musculus
  siRNA target sequence for Gp49a (NM_008147.1,281-299).
gaccaagttcaaaattcga

SEQ ID NO: 696749 - DNA, 19 bp, Mus musculus
  siRNA target sequence for Gp49a (NM_008147.1,283-301).
ccaagttcaaaattcgatt

SEQ ID NO: 696750 - DNA, 19 bp, Mus musculus
  siRNA target sequence for Gp49a (NM_008147.1,827-845).
ccagtgtcgtcacaaaaat

SEQ ID NO: 696751 - DNA, 19 bp, Mus musculus
  siRNA target sequence for Gp49a (NM_008147.1,828-846).
cagtgtcgtcacaaaaata

SEQ ID NO: 696752 - DNA, 19 bp, Mus musculus
  siRNA target sequence for Gp5 (NM_008148.2,204-222).
gaatggaccagggcatatt

SEQ ID NO: 696753 - DNA, 19 bp, Mus musculus
  siRNA target sequence for Gp5 (NM_008148.2,260-278).
cgcctgatgctctcagata

SEQ ID NO: 696754 - DNA, 19 bp, Mus musculus
  siRNA target sequence for Gp5 (NM_008148.2,269-287).
ctctcagatagccacattt

SEQ ID NO: 696755 - DNA, 19 bp, Mus musculus
  siRNA target sequence for Gp5 (NM_008148.2,337-355).
caggttgacgcgcaacaaa

SEQ ID NO: 696756 - DNA, 19 bp, Mus musculus
  siRNA target sequence for Gp5 (NM_008148.2,339-357).
ggttgacgcgcaacaaaat

SEQ ID NO: 696757 - DNA, 19 bp, Mus musculus
  siRNA target sequence for Gp5 (NM_008148.2,343-361).
gacgcgcaacaaaatctct

SEQ ID NO: 696758 - DNA, 19 bp, Mus musculus
  siRNA target sequence for Gp5 (NM_008148.2,369-387).
cacgtgcgatcctggataa

SEQ ID NO: 696759 - DNA, 19 bp, Mus musculus
  siRNA target sequence for Gp5 (NM_008148.2,371-389).
cgtgcgatcctggataaga

SEQ ID NO: 696760 - DNA, 19 bp, Mus musculus
  siRNA target sequence for Gp5 (NM_008148.2,372-390).
gtgcgatcctggataagat

SEQ ID NO: 696761 - DNA, 19 bp, Mus musculus
  siRNA target sequence for Gp5 (NM_008148.2,426-444).
cactaagggaccttgatca

SEQ ID NO: 696762 - DNA, 19 bp, Mus musculus
  siRNA target sequence for Gp5 (NM_008148.2,428-446).
ctaagggaccttgatcaaa

SEQ ID NO: 696763 - DNA, 19 bp, Mus musculus
  siRNA target sequence for Gp5 (NM_008148.2,432-450).
gggaccttgatcaaaacct

SEQ ID NO: 696764 - DNA, 19 bp, Mus musculus
  siRNA target sequence for Gp5 (NM_008148.2,490-508).
ccagaatcagctctctttt

SEQ ID NO: 696765 - DNA, 19 bp, Mus musculus
  siRNA target sequence for Gp5 (NM_008148.2,531-549).
gcctgagagaactgaagtt

SEQ ID NO: 696766 - DNA, 19 bp, Mus musculus
  siRNA target sequence for Gp5 (NM_008148.2,617-635).
gagaaactgctgctctatt

SEQ ID NO: 696767 - DNA, 19 bp, Mus musculus
  siRNA target sequence for Gp5 (NM_008148.2,1468-1486).
cgaccctccaaccgaaaat

SEQ ID NO: 696768 - DNA, 19 bp, Mus musculus
  siRNA target sequence for Gp5 (NM_008148.2,1471-1489).
ccctccaaccgaaaatgct

SEQ ID NO: 696769 - DNA, 19 bp, Mus musculus
  siRNA target sequence for Gp5 (NM_008148.2,1560-1578).
ggggtgaaagtcccaataa

SEQ ID NO: 696770 - DNA, 19 bp, Mus musculus
  siRNA target sequence for Gp5 (NM_008148.2,1562-1580).
ggtgaaagtcccaataaca

SEQ ID NO: 696771 - DNA, 19 bp, Mus musculus
  siRNA target sequence for Gp5 (NM_008148.2,1667-1685).
cagctgtttcgaacattaa

SEQ ID NO: 696772 - DNA, 19 bp, Mus musculus
  siRNA target sequence for Gpr12 (NM_008151.2,304-322).
gacccgaaggtcaatttaa

SEQ ID NO: 696773 - DNA, 19 bp, Mus musculus
  siRNA target sequence for Gpr12 (NM_008151.2,327-345).
gctgcctcgggactgtata

SEQ ID NO: 696774 - DNA, 19 bp, Mus musculus
  siRNA target sequence for Gpr12 (NM_008151.2,330-348).
gcctcgggactgtatagat

SEQ ID NO: 696775 - DNA, 19 bp, Mus musculus
  siRNA target sequence for Gpr12 (NM_008151.2,350-368).
ccggtgctccagagaacat

SEQ ID NO: 696776 - DNA, 19 bp, Mus musculus
  siRNA target sequence for Gpr12 (NM_008151.2,352-370).
ggtgctccagagaacatct

SEQ ID NO: 696777 - DNA, 19 bp, Mus musculus
  siRNA target sequence for Gpr12 (NM_008151.2,462-480).
cctcatctgctgtgaaaat

SEQ ID NO: 696778 - DNA, 19 bp, Mus musculus
  siRNA target sequence for Gpr12 (NM_008151.2,482-500).
ccgttgtggtccttatcat

SEQ ID NO: 696779 - DNA, 19 bp, Mus musculus
  siRNA target sequence for Gpr12 (NM_008151.2,484-502).
gttgtggtccttatcatct

SEQ ID NO: 696780 - DNA, 19 bp, Mus musculus
  siRNA target sequence for Gpr12 (NM_008151.2,579-597).
gggactcatcatcaatttt

SEQ ID NO: 696781 - DNA, 19 bp, Mus musculus
  siRNA target sequence for Gpr12 (NM_008151.2,581-599).
gactcatcatcaattttgt

SEQ ID NO: 696782 - DNA, 19 bp, Mus musculus
  siRNA target sequence for Gpr12 (NM_008151.2,636-654).
ggtcaccatcggactcatt

SEQ ID NO: 696783 - DNA, 19 bp, Mus musculus
  siRNA target sequence for Gpr12 (NM_008151.2,651-669).
cattgtcgcctctttctct

SEQ ID NO: 696784 - DNA, 19 bp, Mus musculus
  siRNA target sequence for Gpr12 (NM_008151.2,706-724).
cgctacctctcgctatatt

SEQ ID NO: 696785 - DNA, 19 bp, Mus musculus
  siRNA target sequence for Gpr12 (NM_008151.2,707-725).
gctacctctcgctatatta

SEQ ID NO: 696786 - DNA, 19 bp, Mus musculus
  siRNA target sequence for Gpr12 (NM_008151.2,745-763).
gagaggaccgtcaccttta

SEQ ID NO: 696787 - DNA, 19 bp, Mus musculus
  siRNA target sequence for Gpr12 (NM_008151.2,749-767).
ggaccgtcacctttaccta

SEQ ID NO: 696788 - DNA, 19 bp, Mus musculus
  siRNA target sequence for Gpr12 (NM_008151.2,939-957).
gctctacatccagatttgt

SEQ ID NO: 696789 - DNA, 19 bp, Mus musculus
  siRNA target sequence for Gpr12 (NM_008151.2,940-958).
ctctacatccagatttgta

SEQ ID NO: 696790 - DNA, 19 bp, Mus musculus
  siRNA target sequence for Gpr12 (NM_008151.2,969-987).
gaggcacgcccatcagata

SEQ ID NO: 696791 - DNA, 19 bp, Mus musculus
  siRNA target sequence for Gpr12 (NM_008151.2,1009-1027).
gctacatcgcactatgtga

SEQ ID NO: 696792 - DNA, 19 bp, Mus musculus
  siRNA target sequence for Gpr12 (NM_008151.2,1122-1140).
cacctacccttcgatctat

SEQ ID NO: 696793 - DNA, 19 bp, Mus musculus
  siRNA target sequence for Gpr12 (NM_008151.2,1128-1146).
cccttcgatctatacctat

SEQ ID NO: 696794 - DNA, 19 bp, Mus musculus
  siRNA target sequence for Grid2 (NM_008167.1,78-96).
catccacatcggagcaatt

SEQ ID NO: 696795 - DNA, 19 bp, Mus musculus
  siRNA target sequence for Grid2 (NM_008167.1,81-99).
ccacatcggagcaattttt

SEQ ID NO: 696796 - DNA, 19 bp, Mus musculus
  siRNA target sequence for Grid2 (NM_008167.1,84-102).
catcggagcaatttttgat

SEQ ID NO: 696797 - DNA, 19 bp, Mus musculus
  siRNA target sequence for Grid2 (NM_008167.1,87-105).
cggagcaatttttgatgaa

SEQ ID NO: 696798 - DNA, 19 bp, Mus musculus
  siRNA target sequence for Grid2 (NM_008167.1,241-259).
gaagcatgtgaacttatga

SEQ ID NO: 696799 - DNA, 19 bp, Mus musculus
  siRNA target sequence for Grid2 (NM_008167.1,399-417).
cacccggagcaacagaaat

SEQ ID NO: 696800 - DNA, 19 bp, Mus musculus
  siRNA target sequence for Grid2 (NM_008167.1,411-429).
cagaaatgatgactatact

SEQ ID NO: 696801 - DNA, 19 bp, Mus musculus
  siRNA target sequence for Grid2 (NM_008167.1,440-458).
gtccacctgtctacttgaa

SEQ ID NO: 696802 - DNA, 19 bp, Mus musculus
  siRNA target sequence for Grid2 (NM_008167.1,494-512).
ggcagaaatttattatctt

SEQ ID NO: 696803 - DNA, 19 bp, Mus musculus
  siRNA target sequence for Grid2 (NM_008167.1,534-552).
ccgtggaatccaggaattt

SEQ ID NO: 696804 - DNA, 19 bp, Mus musculus
  siRNA target sequence for Grid2 (NM_008167.1,535-553).
cgtggaatccaggaatttt

SEQ ID NO: 696805 - DNA, 19 bp, Mus musculus
  siRNA target sequence for Grid2 (NM_008167.1,645-663).
gaggatagaggagttgaat

SEQ ID NO: 696806 - DNA, 19 bp, Mus musculus
  siRNA target sequence for Grid2 (NM_008167.1,664-682).
cgctatcgagacactctta

SEQ ID NO: 696807 - DNA, 19 bp, Mus musculus
  siRNA target sequence for Grid2 (NM_008167.1,666-684).
ctatcgagacactcttaga

SEQ ID NO: 696808 - DNA, 19 bp, Mus musculus
  siRNA target sequence for Grid2 (NM_008167.1,686-704).
gagccatccttgtcatgaa

SEQ ID NO: 696809 - DNA, 19 bp, Mus musculus
  siRNA target sequence for Grid2 (NM_008167.1,706-724).
cctgccacagccaaatcct

SEQ ID NO: 696810 - DNA, 19 bp, Mus musculus
  siRNA target sequence for Grid2 (NM_008167.1,707-725).
ctgccacagccaaatcctt

SEQ ID NO: 696811 - DNA, 19 bp, Mus musculus
  siRNA target sequence for Grid2 (NM_008167.1,711-729).
cacagccaaatccttcata

SEQ ID NO: 696812 - DNA, 19 bp, Mus musculus
  siRNA target sequence for Grid2 (NM_008167.1,716-734).
ccaaatccttcataagtga

SEQ ID NO: 696813 - DNA, 19 bp, Mus musculus
  siRNA target sequence for Grid2 (NM_008167.1,746-764).
cgaatctggttgcttttga

SEQ ID NO: 696814 - DNA, 19 bp, Mus musculus
  siRNA target sequence for Grid2 (NM_008167.1,961-979).
gagatttctaacctttaca

SEQ ID NO: 696815 - DNA, 19 bp, Mus musculus
  siRNA target sequence for Grid2 (NM_008167.1,1000-1018).
cttgcgaatgccttccata

SEQ ID NO: 696816 - DNA, 19 bp, Mus musculus
  siRNA target sequence for Grid2 (NM_008167.1,1003-1021).
gcgaatgccttccataaga

SEQ ID NO: 696817 - DNA, 19 bp, Mus musculus
  siRNA target sequence for Grid2 (NM_008167.1,1004-1022).
cgaatgccttccataagaa

SEQ ID NO: 696818 - DNA, 19 bp, Mus musculus
  siRNA target sequence for Grid2 (NM_008167.1,1051-1069).
gcaagcttgtcctgtatca

SEQ ID NO: 696819 - DNA, 19 bp, Mus musculus
  siRNA target sequence for Grid2 (NM_008167.1,1139-1157).
gattgactggagatctaga

SEQ ID NO: 696820 - DNA, 19 bp, Mus musculus
  siRNA target sequence for Grid2 (NM_008167.1,1143-1161).
gactggagatctagaattt

SEQ ID NO: 696821 - DNA, 19 bp, Mus musculus
  siRNA target sequence for Grid2 (NM_008167.1,1179-1197).
ccccaatgtccactttgaa

SEQ ID NO: 696822 - DNA, 19 bp, Mus musculus
  siRNA target sequence for Grid2 (NM_008167.1,1180-1198).
cccaatgtccactttgaaa

SEQ ID NO: 696823 - DNA, 19 bp, Mus musculus
  siRNA target sequence for Grid2 (NM_008167.1,1229-1247).
gcaggggtgtccgtaaact

SEQ ID NO: 696824 - DNA, 19 bp, Mus musculus
  siRNA target sequence for Grid2 (NM_008167.1,1230-1248).
caggggtgtccgtaaactt

SEQ ID NO: 696825 - DNA, 19 bp, Mus musculus
  siRNA target sequence for Grid2 (NM_008167.1,1264-1282).
gtcacaggtctgaatggat

SEQ ID NO: 696826 - DNA, 19 bp, Mus musculus
  siRNA target sequence for Grid2 (NM_008167.1,1327-1345).
ctacgagtggtgactgtat

SEQ ID NO: 696827 - DNA, 19 bp, Mus musculus
  siRNA target sequence for Grid2 (NM_008167.1,1420-1438).
gttttggatgccctatcta

SEQ ID NO: 696828 - DNA, 19 bp, Mus musculus
  siRNA target sequence for Grid2 (NM_008167.1,1436-1454).
ctaactacctgggttttaa

SEQ ID NO: 696829 - DNA, 19 bp, Mus musculus
  siRNA target sequence for Grid2 (NM_008167.1,1468-1486).
gttgcaccggaccacaaat

SEQ ID NO: 696830 - DNA, 19 bp, Mus musculus
  siRNA target sequence for Grid2 (NM_008167.1,1558-1576).
gggatttcagctttaacca

SEQ ID NO: 696831 - DNA, 19 bp, Mus musculus
  siRNA target sequence for Grid2 (NM_008167.1,1559-1577).
ggatttcagctttaaccat

SEQ ID NO: 696832 - DNA, 19 bp, Mus musculus
  siRNA target sequence for Grid2 (NM_008167.1,1679-1697).
cctgccttgcaccatttga

SEQ ID NO: 696833 - DNA, 19 bp, Mus musculus
  siRNA target sequence for Grid2 (NM_008167.1,1680-1698).
ctgccttgcaccatttgat

SEQ ID NO: 696834 - DNA, 19 bp, Mus musculus
  siRNA target sequence for Grid2 (NM_008167.1,1682-1700).
gccttgcaccatttgatct

SEQ ID NO: 696835 - DNA, 19 bp, Mus musculus
  siRNA target sequence for Grid2 (NM_008167.1,1683-1701).
ccttgcaccatttgatcta

SEQ ID NO: 696836 - DNA, 19 bp, Mus musculus
  siRNA target sequence for Grid2 (NM_008167.1,1684-1702).
cttgcaccatttgatctat

SEQ ID NO: 696837 - DNA, 19 bp, Mus musculus
  siRNA target sequence for Grid2 (NM_008167.1,1861-1879).
ggggaagtcccatacacaa

SEQ ID NO: 696838 - DNA, 19 bp, Mus musculus
  siRNA target sequence for Grid2 (NM_008167.1,1882-1900).
ctggcaacccgaatgatga

SEQ ID NO: 696839 - DNA, 19 bp, Mus musculus
  siRNA target sequence for Grid2 (NM_008167.1,1905-1923).
ggcttggtggttatttgct

SEQ ID NO: 696840 - DNA, 19 bp, Mus musculus
  siRNA target sequence for Grid2 (NM_008167.1,1913-1931).
ggttatttgctctgattgt

SEQ ID NO: 696841 - DNA, 19 bp, Mus musculus
  siRNA target sequence for Grid2 (NM_008167.1,1926-1944).
gattgtcatctcatcttat

SEQ ID NO: 696842 - DNA, 19 bp, Mus musculus
  siRNA target sequence for Grid2 (NM_008167.1,1957-1975).
gccgctttcctcactatca

SEQ ID NO: 696843 - DNA, 19 bp, Mus musculus
  siRNA target sequence for Grid2 (NM_008167.1,2046-2064).
cttggactcggcagtatat

SEQ ID NO: 696844 - DNA, 19 bp, Mus musculus
  siRNA target sequence for Grid2 (NM_008167.1,2119-2137).
cagatgtggaggatgatca

SEQ ID NO: 696845 - DNA, 19 bp, Mus musculus
  siRNA target sequence for Grid2 (NM_008167.1,2130-2148).
gatgatcaaccgaagcaat

SEQ ID NO: 696846 - DNA, 19 bp, Mus musculus
  siRNA target sequence for Grid2 (NM_008167.1,2140-2158).
cgaagcaatgggtcagaaa

SEQ ID NO: 696847 - DNA, 19 bp, Mus musculus
  siRNA target sequence for Grid2 (NM_008167.1,2144-2162).
gcaatgggtcagaaaacaa

SEQ ID NO: 696848 - DNA, 19 bp, Mus musculus
  siRNA target sequence for Grid2 (NM_008167.1,2183-2201).
gcattcaaaaggtaaaata

SEQ ID NO: 696849 - DNA, 19 bp, Mus musculus
  siRNA target sequence for Grid2 (NM_008167.1,2224-2242).
gatgcagctgtgttggaat

SEQ ID NO: 696850 - DNA, 19 bp, Mus musculus
  siRNA target sequence for Grid2 (NM_008167.1,2333-2351).
gcccctaccgtgatgtctt

SEQ ID NO: 696851 - DNA, 19 bp, Mus musculus
  siRNA target sequence for Grid2 (NM_008167.1,2334-2352).
cccctaccgtgatgtcttt

SEQ ID NO: 696852 - DNA, 19 bp, Mus musculus
  siRNA target sequence for Grid2 (NM_008167.1,2340-2358).
ccgtgatgtcttttcacaa

SEQ ID NO: 696853 - DNA, 19 bp, Mus musculus
  siRNA target sequence for Grid2 (NM_008167.1,2383-2401).
ggcgacatggacattctca

SEQ ID NO: 696854 - DNA, 19 bp, Mus musculus
  siRNA target sequence for Grid2 (NM_008167.1,2580-2598).
ctcccgggtcccatcgaaa

SEQ ID NO: 696855 - DNA, 19 bp, Mus musculus
  siRNA target sequence for Grid2 (NM_008167.1,2591-2609).
catcgaaagaggatgacaa

SEQ ID NO: 696856 - DNA, 19 bp, Mus musculus
  siRNA target sequence for Grid2 (NM_008167.1,2628-2646).
cctccatagacgtgtaaat

SEQ ID NO: 696857 - DNA, 19 bp, Mus musculus
  siRNA target sequence for Grid2 (NM_008167.1,2629-2647).
ctccatagacgtgtaaata

SEQ ID NO: 696858 - DNA, 19 bp, Mus musculus
  siRNA target sequence for Grid2 (NM_008167.1,2632-2650).
catagacgtgtaaatagct

SEQ ID NO: 696859 - DNA, 19 bp, Mus musculus
  siRNA target sequence for Grid2 (NM_008167.1,2682-2700).
gttttccacctcgtcaatt

SEQ ID NO: 696860 - DNA, 19 bp, Mus musculus
  siRNA target sequence for Grid2 (NM_008167.1,2687-2705).
ccacctcgtcaattgactt

SEQ ID NO: 696861 - DNA, 19 bp, Mus musculus
  siRNA target sequence for Grid2 (NM_008167.1,2711-2729).
ctctggacattgacacttt

SEQ ID NO: 696862 - DNA, 19 bp, Mus musculus
  siRNA target sequence for Grid2 (NM_008167.1,2823-2841).
ccgcacactctcagcaaaa

SEQ ID NO: 696863 - DNA, 19 bp, Mus musculus
  siRNA target sequence for Grid2 (NM_008167.1,2878-2896).
caccgaactggccctttta

SEQ ID NO: 696864 - DNA, 19 bp, Mus musculus
  siRNA target sequence for Grid2 (NM_008167.1,2906-2924).
ctcctaatgggggcttttt

SEQ ID NO: 696865 - DNA, 19 bp, Mus musculus
  siRNA target sequence for Grid2 (NM_008167.1,2908-2926).
cctaatgggggctttttca

SEQ ID NO: 696866 - DNA, 19 bp, Mus musculus
  siRNA target sequence for Grid2 (NM_008167.1,2927-2945).
ggagtcctatcaaaacaat

SEQ ID NO: 696867 - DNA, 19 bp, Mus musculus
  siRNA target sequence for Grid2 (NM_008167.1,2932-2950).
cctatcaaaacaatgtcat

SEQ ID NO: 696868 - DNA, 19 bp, Mus musculus
  siRNA target sequence for Grid2 (NM_008167.1,2937-2955).
caaaacaatgtcatctatt

SEQ ID NO: 696869 - DNA, 19 bp, Mus musculus
  siRNA target sequence for Grid2 (NM_008167.1,2972-2990).
ccactctggggctcaatct

SEQ ID NO: 696870 - DNA, 19 bp, Mus musculus
  siRNA target sequence for Grid2 (NM_008167.1,3004-3022).
gaccgaggcacgtccatat

SEQ ID NO: 696871 - DNA, 19 bp, Mus musculus
  siRNA target sequence for Gtl3 (NM_008187.1,290-308).
gatctgggacaaaaaggta

SEQ ID NO: 696872 - DNA, 19 bp, Mus musculus
  siRNA target sequence for Gtl3 (NM_008187.1,328-346).
gaatcactgacaatgacat

SEQ ID NO: 696873 - DNA, 19 bp, Mus musculus
  siRNA target sequence for Gtl3 (NM_008187.1,381-399).
gtcagtaccacatacatca

SEQ ID NO: 696874 - DNA, 19 bp, Mus musculus
  siRNA target sequence for Gtl3 (NM_008187.1,450-468).
gtcatgatcatcaaaaact

SEQ ID NO: 696875 - DNA, 19 bp, Mus musculus
  siRNA target sequence for Gtl3 (NM_008187.1,495-513).
caggtactagatgacaaaa

SEQ ID NO: 696876 - DNA, 19 bp, Mus musculus
  siRNA target sequence for Gtl3 (NM_008187.1,523-541).
gaaggtttcgagcaagtaa

SEQ ID NO: 696877 - DNA, 19 bp, Mus musculus
  siRNA target sequence for Gtl3 (NM_008187.1,603-621).
ggctggaaccagattcagt

SEQ ID NO: 696878 - DNA, 19 bp, Mus musculus
  siRNA target sequence for Gtl3 (NM_008187.1,649-667).
catatggcacgaactacat

SEQ ID NO: 696879 - DNA, 19 bp, Mus musculus
  siRNA target sequence for Gtl3 (NM_008187.1,679-697).
gagtgcagatccatgcaaa

SEQ ID NO: 696880 - DNA, 19 bp, Mus musculus
  siRNA target sequence for Gtl3 (NM_008187.1,702-720).
cgtatccgaagggtttact

SEQ ID NO: 696881 - DNA, 19 bp, Mus musculus
  siRNA target sequence for H2-T3 (NM_008208.2,153-171).
cagcgaaccgtggtacata

SEQ ID NO: 696882 - DNA, 19 bp, Mus musculus
  siRNA target sequence for H2-T3 (NM_008208.2,220-238).
ggggagactgcgacatata

SEQ ID NO: 696883 - DNA, 19 bp, Mus musculus
  siRNA target sequence for H2-T3 (NM_008208.2,221-239).
gggagactgcgacatataa

SEQ ID NO: 696884 - DNA, 19 bp, Mus musculus
  siRNA target sequence for H2-T3 (NM_008208.2,303-321).
cacaagcaatgcacagttt

SEQ ID NO: 696885 - DNA, 19 bp, Mus musculus
  siRNA target sequence for H2-T3 (NM_008208.2,341-359).
ctatgctggactactacaa

SEQ ID NO: 696886 - DNA, 19 bp, Mus musculus
  siRNA target sequence for H2-T3 (NM_008208.2,401-419).
gctgtgaggtggagttctt

SEQ ID NO: 696887 - DNA, 19 bp, Mus musculus
  siRNA target sequence for H2-T3 (NM_008208.2,425-443).
gcctcttccgcgcttatga

SEQ ID NO: 696888 - DNA, 19 bp, Mus musculus
  siRNA target sequence for H2-T3 (NM_008208.2,583-601).
gagggcccatgcaaggatt

SEQ ID NO: 696889 - DNA, 19 bp, Mus musculus
  siRNA target sequence for H2-T3 (NM_008208.2,759-777).
gaatggggaggaattgatt

SEQ ID NO: 696890 - DNA, 19 bp, Mus musculus
  siRNA target sequence for H2-T3 (NM_008208.2,1040-1058).
gtggaaacggagacgataa

SEQ ID NO: 696891 - DNA, 19 bp, Mus musculus
  siRNA target sequence for H2-T3 (NM_008208.2,1042-1060).
ggaaacggagacgataaca

SEQ ID NO: 696892 - DNA, 19 bp, Mus musculus
  siRNA target sequence for H2-T3 (NM_008208.2,1053-1071).
cgataacactgctgcatat

SEQ ID NO: 696893 - DNA, 19 bp, Mus musculus
  siRNA target sequence for Hbb-b1 (NM_008220.2,169-187).
ggacccagcggtactttga

SEQ ID NO: 696894 - DNA, 19 bp, Mus musculus
  siRNA target sequence for Hbb-b1 (NM_008220.2,170-188).
gacccagcggtactttgat

SEQ ID NO: 696895 - DNA, 19 bp, Mus musculus
  siRNA target sequence for Hbb-b1 (NM_008220.2,260-278).
gataactgcctttaacgat

SEQ ID NO: 696896 - DNA, 19 bp, Mus musculus
  siRNA target sequence for Hbb-b1 (NM_008220.2,379-397).
gcaatatgatcgtgattgt

SEQ ID NO: 696897 - DNA, 19 bp, Mus musculus
  siRNA target sequence for Hcfc1 (NM_008224.2,323-341).
ctgtgtctcccgcaaactt

SEQ ID NO: 696898 - DNA, 19 bp, Mus musculus
  siRNA target sequence for Hcfc1 (NM_008224.2,431-449).
ctatcaaggagcttatagt

SEQ ID NO: 696899 - DNA, 19 bp, Mus musculus
  siRNA target sequence for Hcfc1 (NM_008224.2,473-491).
ggatagtggacgaactaca

SEQ ID NO: 696900 - DNA, 19 bp, Mus musculus
  siRNA target sequence for Hcfc1 (NM_008224.2,484-502).
gaactacacgtgtacaaca

SEQ ID NO: 696901 - DNA, 19 bp, Mus musculus
  siRNA target sequence for Hcfc1 (NM_008224.2,608-626).
gaatggtagagtatggaaa

SEQ ID NO: 696902 - DNA, 19 bp, Mus musculus
  siRNA target sequence for Hcfc1 (NM_008224.2,613-631).
gtagagtatggaaaataca

SEQ ID NO: 696903 - DNA, 19 bp, Mus musculus
  siRNA target sequence for Hcfc1 (NM_008224.2,632-650).
gcaacgacctctatgaact

SEQ ID NO: 696904 - DNA, 19 bp, Mus musculus
  siRNA target sequence for Hcfc1 (NM_008224.2,656-674).
caagtcgttgggaatggaa

SEQ ID NO: 696905 - DNA, 19 bp, Mus musculus
  siRNA target sequence for Hcfc1 (NM_008224.2,684-702).
ggcaaagacacccaaaaat

SEQ ID NO: 696906 - DNA, 19 bp, Mus musculus
  siRNA target sequence for Hcfc1 (NM_008224.2,738-756).
ctcccttgtgggcaacaaa

SEQ ID NO: 696907 - DNA, 19 bp, Mus musculus
  siRNA target sequence for Hcfc1 (NM_008224.2,741-759).
ccttgtgggcaacaaatgt

SEQ ID NO: 696908 - DNA, 19 bp, Mus musculus
  siRNA target sequence for Hcfc1 (NM_008224.2,742-760).
cttgtgggcaacaaatgtt

SEQ ID NO: 696909 - DNA, 19 bp, Mus musculus
  siRNA target sequence for Hcfc1 (NM_008224.2,769-787).
gggggtctggccaatgata

SEQ ID NO: 696910 - DNA, 19 bp, Mus musculus
  siRNA target sequence for Hcfc1 (NM_008224.2,771-789).
gggtctggccaatgatagt

SEQ ID NO: 696911 - DNA, 19 bp, Mus musculus
  siRNA target sequence for Hcfc1 (NM_008224.2,811-829).
ccgaggtacctgaatgact

SEQ ID NO: 696912 - DNA, 19 bp, Mus musculus
  siRNA target sequence for Hcfc1 (NM_008224.2,812-830).
cgaggtacctgaatgactt

SEQ ID NO: 696913 - DNA, 19 bp, Mus musculus
  siRNA target sequence for Hcfc1 (NM_008224.2,813-831).
gaggtacctgaatgactta

SEQ ID NO: 696914 - DNA, 19 bp, Mus musculus
  siRNA target sequence for Hcfc1 (NM_008224.2,925-943).
gctgtggtctacactgaaa

SEQ ID NO: 696915 - DNA, 19 bp, Mus musculus
  siRNA target sequence for Hcfc1 (NM_008224.2,926-944).
ctgtggtctacactgaaaa

SEQ ID NO: 696916 - DNA, 19 bp, Mus musculus
  siRNA target sequence for Hcfc1 (NM_008224.2,1127-1145).
gctgggtgccccttgtcat

SEQ ID NO: 696917 - DNA, 19 bp, Mus musculus
  siRNA target sequence for Hcfc1 (NM_008224.2,1205-1223).
gtctcaacctggataccat

SEQ ID NO: 696918 - DNA, 19 bp, Mus musculus
  siRNA target sequence for Hcfc1 (NM_008224.2,1287-1305).
ctgtgctgttgccatcaat

SEQ ID NO: 696919 - DNA, 19 bp, Mus musculus
  siRNA target sequence for Hcfc1 (NM_008224.2,1299-1317).
catcaatactcgtctgtat

SEQ ID NO: 696920 - DNA, 19 bp, Mus musculus
  siRNA target sequence for Hcfc1 (NM_008224.2,1302-1320).
caatactcgtctgtatatt

SEQ ID NO: 696921 - DNA, 19 bp, Mus musculus
  siRNA target sequence for Hcfc1 (NM_008224.2,1370-1388).
gcaaggacttgtggtattt

SEQ ID NO: 696922 - DNA, 19 bp, Mus musculus
  siRNA target sequence for Hcfc1 (NM_008224.2,1409-1427).
ccccagcccgagtacaact

SEQ ID NO: 696923 - DNA, 19 bp, Mus musculus
  siRNA target sequence for Hcfc1 (NM_008224.2,1410-1428).
cccagcccgagtacaacta

SEQ ID NO: 696924 - DNA, 19 bp, Mus musculus
  siRNA target sequence for Hcfc1 (NM_008224.2,1412-1430).
cagcccgagtacaactagt

SEQ ID NO: 696925 - DNA, 19 bp, Mus musculus
  siRNA target sequence for Hcfc1 (NM_008224.2,1498-1516).
caactccagaaatatgaca

SEQ ID NO: 696926 - DNA, 19 bp, Mus musculus
  siRNA target sequence for Hcfc1 (NM_008224.2,1802-1820).
gaacaccactggttaccat

SEQ ID NO: 696927 - DNA, 19 bp, Mus musculus
  siRNA target sequence for Hcfc1 (NM_008224.2,2124-2142).
cccagccactcgaatgcta

SEQ ID NO: 696928 - DNA, 19 bp, Mus musculus
  siRNA target sequence for Hcfc1 (NM_008224.2,2125-2143).
ccagccactcgaatgctaa

SEQ ID NO: 696929 - DNA, 19 bp, Mus musculus
  siRNA target sequence for Hcfc1 (NM_008224.2,2126-2144).
cagccactcgaatgctaaa

SEQ ID NO: 696930 - DNA, 19 bp, Mus musculus
  siRNA target sequence for Hcfc1 (NM_008224.2,2128-2146).
gccactcgaatgctaaaga

SEQ ID NO: 696931 - DNA, 19 bp, Mus musculus
  siRNA target sequence for Hcfc1 (NM_008224.2,2130-2148).
cactcgaatgctaaagact

SEQ ID NO: 696932 - DNA, 19 bp, Mus musculus
  siRNA target sequence for Hcfc1 (NM_008224.2,2192-2210).
catctactcgccctatcat

SEQ ID NO: 696933 - DNA, 19 bp, Mus musculus
  siRNA target sequence for Hcfc1 (NM_008224.2,2403-2421).
gacaggccaagcatctaca

SEQ ID NO: 696934 - DNA, 19 bp, Mus musculus
  siRNA target sequence for Hcfc1 (NM_008224.2,2506-2524).
cccacaaccatcattacca

SEQ ID NO: 696935 - DNA, 19 bp, Mus musculus
  siRNA target sequence for Hcfc1 (NM_008224.2,2599-2617).
cctggcacaactaccatta

SEQ ID NO: 696936 - DNA, 19 bp, Mus musculus
  siRNA target sequence for Hcfc1 (NM_008224.2,2600-2618).
ctggcacaactaccattat

SEQ ID NO: 696937 - DNA, 19 bp, Mus musculus
  siRNA target sequence for Hcfc1 (NM_008224.2,2603-2621).
gcacaactaccattattaa

SEQ ID NO: 696938 - DNA, 19 bp, Mus musculus
  siRNA target sequence for Hcfc1 (NM_008224.2,2683-2701).
ggcattaagtccccaatta

SEQ ID NO: 696939 - DNA, 19 bp, Mus musculus
  siRNA target sequence for Hcfc1 (NM_008224.2,2685-2703).
cattaagtccccaattaca

SEQ ID NO: 696940 - DNA, 19 bp, Mus musculus
  siRNA target sequence for Hcfc1 (NM_008224.2,2735-2753).
caggagcgcctgctaaaat

SEQ ID NO: 696941 - DNA, 19 bp, Mus musculus
  siRNA target sequence for Hcfc1 (NM_008224.2,2737-2755).
ggagcgcctgctaaaatca

SEQ ID NO: 696942 - DNA, 19 bp, Mus musculus
  siRNA target sequence for Hcfc1 (NM_008224.2,2738-2756).
gagcgcctgctaaaatcat

SEQ ID NO: 696943 - DNA, 19 bp, Mus musculus
  siRNA target sequence for Hcfc1 (NM_008224.2,2740-2758).
gcgcctgctaaaatcatca

SEQ ID NO: 696944 - DNA, 19 bp, Mus musculus
  siRNA target sequence for Hcfc1 (NM_008224.2,2761-2779).
gctgtccccaagattgcta

SEQ ID NO: 696945 - DNA, 19 bp, Mus musculus
  siRNA target sequence for Hcfc1 (NM_008224.2,3028-3046).
ctggctacacctatcacta

SEQ ID NO: 696946 - DNA, 19 bp, Mus musculus
  siRNA target sequence for Hcfc1 (NM_008224.2,3084-3102).
caaccctactgctatcaca

SEQ ID NO: 696947 - DNA, 19 bp, Mus musculus
  siRNA target sequence for Hcfc1 (NM_008224.2,3186-3204).
ccaggtcactctgattaca

SEQ ID NO: 696948 - DNA, 19 bp, Mus musculus
  siRNA target sequence for Hcfc1 (NM_008224.2,3440-3458).
ctacccaggtgcagtttgt

SEQ ID NO: 696949 - DNA, 19 bp, Mus musculus
  siRNA target sequence for Hcfc1 (NM_008224.2,3506-3524).
gacaacagaatggtaatgt

SEQ ID NO: 696950 - DNA, 19 bp, Mus musculus
  siRNA target sequence for Hcfc1 (NM_008224.2,3523-3541).
gtggtccgtgtctgttcaa

SEQ ID NO: 696951 - DNA, 19 bp, Mus musculus
  siRNA target sequence for Hcfc1 (NM_008224.2,4004-4022).
gccaaccagagacatatca

SEQ ID NO: 696952 - DNA, 19 bp, Mus musculus
  siRNA target sequence for Hcfc1 (NM_008224.2,4005-4023).
ccaaccagagacatatcat

SEQ ID NO: 696953 - DNA, 19 bp, Mus musculus
  siRNA target sequence for Hcfc1 (NM_008224.2,4009-4027).
ccagagacatatcatactt

SEQ ID NO: 696954 - DNA, 19 bp, Mus musculus
  siRNA target sequence for Hcfc1 (NM_008224.2,4010-4028).
cagagacatatcatactta

SEQ ID NO: 696955 - DNA, 19 bp, Mus musculus
  siRNA target sequence for Hcfc1 (NM_008224.2,4012-4030).
gagacatatcatacttaca

SEQ ID NO: 696956 - DNA, 19 bp, Mus musculus
  siRNA target sequence for Hcfc1 (NM_008224.2,4090-4108).
cgggtggtccccacatcta

SEQ ID NO: 696957 - DNA, 19 bp, Mus musculus
  siRNA target sequence for Hcfc1 (NM_008224.2,4092-4110).
ggtggtccccacatctaca

SEQ ID NO: 696958 - DNA, 19 bp, Mus musculus
  siRNA target sequence for Hcfc1 (NM_008224.2,4337-4355).
ctaccactgccacatcaaa

SEQ ID NO: 696959 - DNA, 19 bp, Mus musculus
  siRNA target sequence for Hcfc1 (NM_008224.2,4717-4735).
caaggtgacagcacaaata

SEQ ID NO: 696960 - DNA, 19 bp, Mus musculus
  siRNA target sequence for Hcfc1 (NM_008224.2,4744-4762).
gccagtgctatcactacaa

SEQ ID NO: 696961 - DNA, 19 bp, Mus musculus
  siRNA target sequence for Hcfc1 (NM_008224.2,4746-4764).
cagtgctatcactacaagt

SEQ ID NO: 696962 - DNA, 19 bp, Mus musculus
  siRNA target sequence for Hcfc1 (NM_008224.2,4760-4778).
caagtgtgtcttctacatt

SEQ ID NO: 696963 - DNA, 19 bp, Mus musculus
  siRNA target sequence for Hcfc1 (NM_008224.2,5133-5151).
caccacaacccttatggta

SEQ ID NO: 696964 - DNA, 19 bp, Mus musculus
  siRNA target sequence for Hcfc1 (NM_008224.2,5289-5307).
ggagcccatggatacatct

SEQ ID NO: 696965 - DNA, 19 bp, Mus musculus
  siRNA target sequence for Hcfc1 (NM_008224.2,5292-5310).
gcccatggatacatctgaa

SEQ ID NO: 696966 - DNA, 19 bp, Mus musculus
  siRNA target sequence for Hcfc1 (NM_008224.2,5607-5625).
cctggctccatctaacaca

SEQ ID NO: 696967 - DNA, 19 bp, Mus musculus
  siRNA target sequence for Hcfc1 (NM_008224.2,5809-5827).
gtaatggtgacacactatt

SEQ ID NO: 696968 - DNA, 19 bp, Mus musculus
  siRNA target sequence for Hcfc1 (NM_008224.2,5869-5887).
ggcacggtcccagactata

SEQ ID NO: 696969 - DNA, 19 bp, Mus musculus
  siRNA target sequence for Hcfc1 (NM_008224.2,5870-5888).
gcacggtcccagactataa

SEQ ID NO: 696970 - DNA, 19 bp, Mus musculus
  siRNA target sequence for Hcfc1 (NM_008224.2,5873-5891).
cggtcccagactataacca

SEQ ID NO: 696971 - DNA, 19 bp, Mus musculus
  siRNA target sequence for Hcfc1 (NM_008224.2,5879-5897).
cagactataaccagctaaa

SEQ ID NO: 696972 - DNA, 19 bp, Mus musculus
  siRNA target sequence for Hcfc1 (NM_008224.2,5881-5899).
gactataaccagctaaaga

SEQ ID NO: 696973 - DNA, 19 bp, Mus musculus
  siRNA target sequence for Hcfc1 (NM_008224.2,5913-5931).
gccaggcacggcttacaaa

SEQ ID NO: 696974 - DNA, 19 bp, Mus musculus
  siRNA target sequence for Hcfc1 (NM_008224.2,5914-5932).
ccaggcacggcttacaaat

SEQ ID NO: 696975 - DNA, 19 bp, Mus musculus
  siRNA target sequence for Hcfc1 (NM_008224.2,5915-5933).
caggcacggcttacaaatt

SEQ ID NO: 696976 - DNA, 19 bp, Mus musculus
  siRNA target sequence for Hcfc1 (NM_008224.2,5919-5937).
cacggcttacaaatttcga

SEQ ID NO: 696977 - DNA, 19 bp, Mus musculus
  siRNA target sequence for Hcfc1 (NM_008224.2,5979-5997).
gatctcagcctttaagact

SEQ ID NO: 696978 - DNA, 19 bp, Mus musculus
  siRNA target sequence for Hcfc1 (NM_008224.2,6016-6034).
ggggctccttgtgctatta

SEQ ID NO: 696979 - DNA, 19 bp, Mus musculus
  siRNA target sequence for Hcfc1 (NM_008224.2,6017-6035).
gggctccttgtgctattaa

SEQ ID NO: 696980 - DNA, 19 bp, Mus musculus
  siRNA target sequence for Hcfc1 (NM_008224.2,6246-6264).
cgcccacattgactatact

SEQ ID NO: 696981 - DNA, 19 bp, Mus musculus
  siRNA target sequence for Hcfc1 (NM_008224.2,6247-6265).
gcccacattgactatacta

SEQ ID NO: 696982 - DNA, 19 bp, Mus musculus
  siRNA target sequence for Hcfc1 (NM_008224.2,6250-6268).
cacattgactatactacaa

SEQ ID NO: 696983 - DNA, 19 bp, Mus musculus
  siRNA target sequence for Hcfc1 (NM_008224.2,6288-6306).
cattgctgcccgcaatgaa

SEQ ID NO: 696984 - DNA, 19 bp, Mus musculus
  siRNA target sequence for Hcfc1 (NM_008224.2,6336-6354).
gtggttgcaagaaactagt

SEQ ID NO: 696985 - DNA, 19 bp, Mus musculus
  siRNA target sequence for Hcfc1 (NM_008224.2,6338-6356).
ggttgcaagaaactagtaa

SEQ ID NO: 696986 - DNA, 19 bp, Mus musculus
  siRNA target sequence for Hcfc1 (NM_008224.2,6339-6357).
gttgcaagaaactagtaaa

SEQ ID NO: 696987 - DNA, 19 bp, Mus musculus
  siRNA target sequence for Hcfc1 (NM_008224.2,6392-6410).
ccatgtcgtctccagaaat

SEQ ID NO: 696988 - DNA, 19 bp, Mus musculus
  siRNA target sequence for Pwwp1 (NM_008232.1,108-126).
cagcgaggatcgaacatgt

SEQ ID NO: 696989 - DNA, 19 bp, Mus musculus
  siRNA target sequence for Pwwp1 (NM_008232.1,140-158).
cgctaccaggtgttcttct

SEQ ID NO: 696990 - DNA, 19 bp, Mus musculus
  siRNA target sequence for Pwwp1 (NM_008232.1,277-295).
cgagcacgaccctatggtt

SEQ ID NO: 696991 - DNA, 19 bp, Mus musculus
  siRNA target sequence for Pwwp1 (NM_008232.1,852-870).
gcctgattgttggagaaat

SEQ ID NO: 696992 - DNA, 19 bp, Mus musculus
  siRNA target sequence for Pwwp1 (NM_008232.1,853-871).
cctgattgttggagaaata

SEQ ID NO: 696993 - DNA, 19 bp, Mus musculus
  siRNA target sequence for Hdgfrp2 (NM_008233.1,266-284).
ggacctgttcccctatgat

SEQ ID NO: 696994 - DNA, 19 bp, Mus musculus
  siRNA target sequence for Hdgfrp2 (NM_008233.1,267-285).
gacctgttcccctatgata

SEQ ID NO: 696995 - DNA, 19 bp, Mus musculus
  siRNA target sequence for Hdgfrp2 (NM_008233.1,270-288).
ctgttcccctatgataagt

SEQ ID NO: 696996 - DNA, 19 bp, Mus musculus
  siRNA target sequence for Hdgfrp2 (NM_008233.1,587-605).
ggtgtcagtctctaaacga

SEQ ID NO: 696997 - DNA, 19 bp, Mus musculus
  siRNA target sequence for Hdgfrp2 (NM_008233.1,596-614).
ctctaaacgagctagaaga

SEQ ID NO: 696998 - DNA, 19 bp, Mus musculus
  siRNA target sequence for Hdgfrp2 (NM_008233.1,1038-1056).
gtagaccgcatcagtgaat

SEQ ID NO: 696999 - DNA, 19 bp, Mus musculus
  siRNA target sequence for Hdgfrp2 (NM_008233.1,1517-1535).
gctgcacagcgagatcaaa

SEQ ID NO: 697000 - DNA, 19 bp, Mus musculus
  siRNA target sequence for Hdgfrp2 (NM_008233.1,1518-1536).
ctgcacagcgagatcaaat

SEQ ID NO: 697001 - DNA, 19 bp, Mus musculus
  siRNA target sequence for Hdgfrp2 (NM_008233.1,1520-1538).
gcacagcgagatcaaattt

SEQ ID NO: 697002 - DNA, 19 bp, Mus musculus
  siRNA target sequence for Hdgfrp2 (NM_008233.1,1523-1541).
cagcgagatcaaatttgca

SEQ ID NO: 697003 - DNA, 19 bp, Mus musculus
  siRNA target sequence for Hdgfrp2 (NM_008233.1,1607-1625).
ggtaacctctcagattctt

SEQ ID NO: 697004 - DNA, 19 bp, Mus musculus
  siRNA target sequence for Hdgfrp2 (NM_008233.1,1946-1964).
cgggcaggactctgaagat

SEQ ID NO: 697005 - DNA, 19 bp, Mus musculus
  siRNA target sequence for Hells (NM_008234.2,151-169).
ggagcctgcggtgattact

SEQ ID NO: 697006 - DNA, 19 bp, Mus musculus
  siRNA target sequence for Hells (NM_008234.2,217-235).
gaaagagcggaagatgtta

SEQ ID NO: 697007 - DNA, 19 bp, Mus musculus
  siRNA target sequence for Hells (NM_008234.2,402-420).
ggtcattaaaacttacaga

SEQ ID NO: 697008 - DNA, 19 bp, Mus musculus
  siRNA target sequence for Hells (NM_008234.2,413-431).
cttacagagggtaaaagtt

SEQ ID NO: 697009 - DNA, 19 bp, Mus musculus
  siRNA target sequence for Hells (NM_008234.2,421-439).
gggtaaaagtttagttgat

SEQ ID NO: 697010 - DNA, 19 bp, Mus musculus
  siRNA target sequence for Hells (NM_008234.2,480-498).
gagaagatgaatcttataa

SEQ ID NO: 697011 - DNA, 19 bp, Mus musculus
  siRNA target sequence for Hells (NM_008234.2,532-550).
gtccgtagctaaaaaacat

SEQ ID NO: 697012 - DNA, 19 bp, Mus musculus
  siRNA target sequence for Hells (NM_008234.2,616-634).
ggattcaaatagtatgatt

SEQ ID NO: 697013 - DNA, 19 bp, Mus musculus
  siRNA target sequence for Hells (NM_008234.2,617-635).
gattcaaatagtatgatta

SEQ ID NO: 697014 - DNA, 19 bp, Mus musculus
  siRNA target sequence for Hells (NM_008234.2,621-639).
caaatagtatgattaaaga

SEQ ID NO: 697015 - DNA, 19 bp, Mus musculus
  siRNA target sequence for Hells (NM_008234.2,627-645).
gtatgattaaagatagatt

SEQ ID NO: 697016 - DNA, 19 bp, Mus musculus
  siRNA target sequence for Hells (NM_008234.2,683-701).
gacccagttcggaaatgta

SEQ ID NO: 697017 - DNA, 19 bp, Mus musculus
  siRNA target sequence for Hells (NM_008234.2,863-881).
gctacaattgcattgatga

SEQ ID NO: 697018 - DNA, 19 bp, Mus musculus
  siRNA target sequence for Hells (NM_008234.2,864-882).
ctacaattgcattgatgat

SEQ ID NO: 697019 - DNA, 19 bp, Mus musculus
  siRNA target sequence for Hells (NM_008234.2,867-885).
caattgcattgatgattca

SEQ ID NO: 697020 - DNA, 19 bp, Mus musculus
  siRNA target sequence for Hells (NM_008234.2,889-907).
gggagtacctggacctttt

SEQ ID NO: 697021 - DNA, 19 bp, Mus musculus
  siRNA target sequence for Hells (NM_008234.2,921-939).
ctttgtctacacttcctaa

SEQ ID NO: 697022 - DNA, 19 bp, Mus musculus
  siRNA target sequence for Hells (NM_008234.2,936-954).
ctaactggatggctgaatt

SEQ ID NO: 697023 - DNA, 19 bp, Mus musculus
  siRNA target sequence for Hells (NM_008234.2,943-961).
gatggctgaatttaaaaga

SEQ ID NO: 697024 - DNA, 19 bp, Mus musculus
  siRNA target sequence for Hells (NM_008234.2,1002-1020).
gggaggaccgtcggaaatt

SEQ ID NO: 697025 - DNA, 19 bp, Mus musculus
  siRNA target sequence for Hells (NM_008234.2,1006-1024).
ggaccgtcggaaattagta

SEQ ID NO: 697026 - DNA, 19 bp, Mus musculus
  siRNA target sequence for Hells (NM_008234.2,1010-1028).
cgtcggaaattagtaaaga

SEQ ID NO: 697027 - DNA, 19 bp, Mus musculus
  siRNA target sequence for Hells (NM_008234.2,1011-1029).
gtcggaaattagtaaagaa

SEQ ID NO: 697028 - DNA, 19 bp, Mus musculus
  siRNA target sequence for Hells (NM_008234.2,1064-1082).
cctgtggtggtcacatcat

SEQ ID NO: 697029 - DNA, 19 bp, Mus musculus
  siRNA target sequence for Hells (NM_008234.2,1118-1136).
cattgctattggaaatact

SEQ ID NO: 697030 - DNA, 19 bp, Mus musculus
  siRNA target sequence for Hells (NM_008234.2,1122-1140).
gctattggaaatacttaat

SEQ ID NO: 697031 - DNA, 19 bp, Mus musculus
  siRNA target sequence for Hells (NM_008234.2,1128-1146).
ggaaatacttaatagtaga

SEQ ID NO: 697032 - DNA, 19 bp, Mus musculus
  siRNA target sequence for Hells (NM_008234.2,1129-1147).
gaaatacttaatagtagat

SEQ ID NO: 697033 - DNA, 19 bp, Mus musculus
  siRNA target sequence for Hells (NM_008234.2,1178-1196).
cggctaatcagggagttaa

SEQ ID NO: 697034 - DNA, 19 bp, Mus musculus
  siRNA target sequence for Hells (NM_008234.2,1189-1207).
ggagttaaaacggttcaat

SEQ ID NO: 697035 - DNA, 19 bp, Mus musculus
  siRNA target sequence for Hells (NM_008234.2,1199-1217).
cggttcaatgctgataaca

SEQ ID NO: 697036 - DNA, 19 bp, Mus musculus
  siRNA target sequence for Hells (NM_008234.2,1200-1218).
ggttcaatgctgataacaa

SEQ ID NO: 697037 - DNA, 19 bp, Mus musculus
  siRNA target sequence for Hells (NM_008234.2,1211-1229).
gataacaaacttcttttga

SEQ ID NO: 697038 - DNA, 19 bp, Mus musculus
  siRNA target sequence for Hells (NM_008234.2,1230-1248).
ctggtactcccttgcaaaa

SEQ ID NO: 697039 - DNA, 19 bp, Mus musculus
  siRNA target sequence for Hells (NM_008234.2,1232-1250).
ggtactcccttgcaaaaca

SEQ ID NO: 697040 - DNA, 19 bp, Mus musculus
  siRNA target sequence for Hells (NM_008234.2,1285-1303).
gttgccagatgtatttgat

SEQ ID NO: 697041 - DNA, 19 bp, Mus musculus
  siRNA target sequence for Hells (NM_008234.2,1319-1337).
gagtcttggtttgatatca

SEQ ID NO: 697042 - DNA, 19 bp, Mus musculus
  siRNA target sequence for Hells (NM_008234.2,1321-1339).
gtcttggtttgatatcact

SEQ ID NO: 697043 - DNA, 19 bp, Mus musculus
  siRNA target sequence for Hells (NM_008234.2,1361-1379).
gatattatagctaaagaga

SEQ ID NO: 697044 - DNA, 19 bp, Mus musculus
  siRNA target sequence for Hells (NM_008234.2,1382-1400).
gaacagaatgttttacata

SEQ ID NO: 697045 - DNA, 19 bp, Mus musculus
  siRNA target sequence for Hells (NM_008234.2,1411-1429).
gattttaacgcctttccta

SEQ ID NO: 697046 - DNA, 19 bp, Mus musculus
  siRNA target sequence for Hells (NM_008234.2,1465-1483).
cccccctaagcgagaagta

SEQ ID NO: 697047 - DNA, 19 bp, Mus musculus
  siRNA target sequence for Hells (NM_008234.2,1467-1485).
cccctaagcgagaagtagt

SEQ ID NO: 697048 - DNA, 19 bp, Mus musculus
  siRNA target sequence for Hells (NM_008234.2,1468-1486).
ccctaagcgagaagtagtt

SEQ ID NO: 697049 - DNA, 19 bp, Mus musculus
  siRNA target sequence for Hells (NM_008234.2,1470-1488).
ctaagcgagaagtagttgt

SEQ ID NO: 697050 - DNA, 19 bp, Mus musculus
  siRNA target sequence for Hells (NM_008234.2,1474-1492).
gcgagaagtagttgtttat

SEQ ID NO: 697051 - DNA, 19 bp, Mus musculus
  siRNA target sequence for Hells (NM_008234.2,1516-1534).
gatcttctatacagctatt

SEQ ID NO: 697052 - DNA, 19 bp, Mus musculus
  siRNA target sequence for Hells (NM_008234.2,1542-1560).
gcacaattgcaaacatgtt

SEQ ID NO: 697053 - DNA, 19 bp, Mus musculus
  siRNA target sequence for Hells (NM_008234.2,1608-1626).
caaaacgacgaagtagaaa

SEQ ID NO: 697054 - DNA, 19 bp, Mus musculus
  siRNA target sequence for Hells (NM_008234.2,1613-1631).
cgacgaagtagaaagtcaa

SEQ ID NO: 697055 - DNA, 19 bp, Mus musculus
  siRNA target sequence for Hells (NM_008234.2,1614-1632).
gacgaagtagaaagtcaat

SEQ ID NO: 697056 - DNA, 19 bp, Mus musculus
  siRNA target sequence for Hells (NM_008234.2,1649-1667).
gatcagttccctagtgaat

SEQ ID NO: 697057 - DNA, 19 bp, Mus musculus
  siRNA target sequence for Hells (NM_008234.2,1654-1672).
gttccctagtgaattagaa

SEQ ID NO: 697058 - DNA, 19 bp, Mus musculus
  siRNA target sequence for Hells (NM_008234.2,1713-1731).
ggactgttgtggaaggtaa

SEQ ID NO: 697059 - DNA, 19 bp, Mus musculus
  siRNA target sequence for Hells (NM_008234.2,1714-1732).
gactgttgtggaaggtaat

SEQ ID NO: 697060 - DNA, 19 bp, Mus musculus
  siRNA target sequence for Hells (NM_008234.2,1716-1734).
ctgttgtggaaggtaatat

SEQ ID NO: 697061 - DNA, 19 bp, Mus musculus
  siRNA target sequence for Hells (NM_008234.2,1727-1745).
ggtaatatccctatagaat

SEQ ID NO: 697062 - DNA, 19 bp, Mus musculus
  siRNA target sequence for Hells (NM_008234.2,1735-1753).
ccctatagaatctgaagtt

SEQ ID NO: 697063 - DNA, 19 bp, Mus musculus
  siRNA target sequence for Hells (NM_008234.2,1736-1754).
cctatagaatctgaagtta

SEQ ID NO: 697064 - DNA, 19 bp, Mus musculus
  siRNA target sequence for Hells (NM_008234.2,1742-1760).
gaatctgaagttaatctga

SEQ ID NO: 697065 - DNA, 19 bp, Mus musculus
  siRNA target sequence for Hells (NM_008234.2,1794-1812).
gctgtaatcacccatatat

SEQ ID NO: 697066 - DNA, 19 bp, Mus musculus
  siRNA target sequence for Hells (NM_008234.2,1797-1815).
gtaatcacccatatatgat

SEQ ID NO: 697067 - DNA, 19 bp, Mus musculus
  siRNA target sequence for Hells (NM_008234.2,1831-1849).
ccctgtcacacaagaattt

SEQ ID NO: 697068 - DNA, 19 bp, Mus musculus
  siRNA target sequence for Hells (NM_008234.2,1833-1851).
ctgtcacacaagaatttaa

SEQ ID NO: 697069 - DNA, 19 bp, Mus musculus
  siRNA target sequence for Hells (NM_008234.2,1839-1857).
cacaagaatttaagattga

SEQ ID NO: 697070 - DNA, 19 bp, Mus musculus
  siRNA target sequence for Hells (NM_008234.2,1859-1877).
gaagagttggtaacaaatt

SEQ ID NO: 697071 - DNA, 19 bp, Mus musculus
  siRNA target sequence for Hells (NM_008234.2,1881-1899).
ggaagttcttaattttgga

SEQ ID NO: 697072 - DNA, 19 bp, Mus musculus
  siRNA target sequence for Hells (NM_008234.2,1882-1900).
gaagttcttaattttggat

SEQ ID NO: 697073 - DNA, 19 bp, Mus musculus
  siRNA target sequence for Hells (NM_008234.2,1901-1919).
cgaatgctgcccgaactta

SEQ ID NO: 697074 - DNA, 19 bp, Mus musculus
  siRNA target sequence for Hells (NM_008234.2,1902-1920).
gaatgctgcccgaacttaa

SEQ ID NO: 697075 - DNA, 19 bp, Mus musculus
  siRNA target sequence for Hells (NM_008234.2,1940-1958).
ctggtgttttcacaaatga

SEQ ID NO: 697076 - DNA, 19 bp, Mus musculus
  siRNA target sequence for Hells (NM_008234.2,1942-1960).
ggtgttttcacaaatgaca

SEQ ID NO: 697077 - DNA, 19 bp, Mus musculus
  siRNA target sequence for Hells (NM_008234.2,1970-1988).
gacatcttgatggattatt

SEQ ID NO: 697078 - DNA, 19 bp, Mus musculus
  siRNA target sequence for Hells (NM_008234.2,1991-2009).
catcttagaaacttcatct

SEQ ID NO: 697079 - DNA, 19 bp, Mus musculus
  siRNA target sequence for Hells (NM_008234.2,2021-2039).
gatgggtccatgtcttatt

SEQ ID NO: 697080 - DNA, 19 bp, Mus musculus
  siRNA target sequence for Hells (NM_008234.2,2073-2091).
cggatccagatgtttttct

SEQ ID NO: 697081 - DNA, 19 bp, Mus musculus
  siRNA target sequence for Hells (NM_008234.2,2114-2132).
ggtggtttaggcataaact

SEQ ID NO: 697082 - DNA, 19 bp, Mus musculus
  siRNA target sequence for Hells (NM_008234.2,2115-2133).
gtggtttaggcataaactt

SEQ ID NO: 697083 - DNA, 19 bp, Mus musculus
  siRNA target sequence for Hells (NM_008234.2,2117-2135).
ggtttaggcataaacttga

SEQ ID NO: 697084 - DNA, 19 bp, Mus musculus
  siRNA target sequence for Hells (NM_008234.2,2291-2309).
gcagctgctaaaagaaagt

SEQ ID NO: 697085 - DNA, 19 bp, Mus musculus
  siRNA target sequence for Hells (NM_008234.2,2311-2329).
ggagaagttgataatccat

SEQ ID NO: 697086 - DNA, 19 bp, Mus musculus
  siRNA target sequence for Hells (NM_008234.2,2317-2335).
gttgataatccataaaaat

SEQ ID NO: 697087 - DNA, 19 bp, Mus musculus
  siRNA target sequence for Hells (NM_008234.2,2353-2371).
gtctgggttaagtcaatct

SEQ ID NO: 697088 - DNA, 19 bp, Mus musculus
  siRNA target sequence for Hells (NM_008234.2,2359-2377).
gttaagtcaatctaagaat

SEQ ID NO: 697089 - DNA, 19 bp, Mus musculus
  siRNA target sequence for Hells (NM_008234.2,2364-2382).
gtcaatctaagaatttctt

SEQ ID NO: 697090 - DNA, 19 bp, Mus musculus
  siRNA target sequence for Hells (NM_008234.2,2401-2419).
ggagttattaaaatctaga

SEQ ID NO: 697091 - DNA, 19 bp, Mus musculus
  siRNA target sequence for Hells (NM_008234.2,2404-2422).
gttattaaaatctagagat

SEQ ID NO: 697092 - DNA, 19 bp, Mus musculus
  siRNA target sequence for Hells (NM_008234.2,2420-2438).
gattatgaaagggaagtaa

SEQ ID NO: 697093 - DNA, 19 bp, Mus musculus
  siRNA target sequence for Hells (NM_008234.2,2458-2476).
cattagtgacgaagatcta

SEQ ID NO: 697094 - DNA, 19 bp, Mus musculus
  siRNA target sequence for Hells (NM_008234.2,2468-2486).
gaagatctagaattactgt

SEQ ID NO: 697095 - DNA, 19 bp, Mus musculus
  siRNA target sequence for Hells (NM_008234.2,2488-2506).
ggatcgaagtgatctcatt

SEQ ID NO: 697096 - DNA, 19 bp, Mus musculus
  siRNA target sequence for Hells (NM_008234.2,2493-2511).
gaagtgatctcattgatca

SEQ ID NO: 697097 - DNA, 19 bp, Mus musculus
  siRNA target sequence for Hells (NM_008234.2,2496-2514).
gtgatctcattgatcaaat

SEQ ID NO: 697098 - DNA, 19 bp, Mus musculus
  siRNA target sequence for Hells (NM_008234.2,2498-2516).
gatctcattgatcaaatga

SEQ ID NO: 697099 - DNA, 19 bp, Mus musculus
  siRNA target sequence for Hells (NM_008234.2,2515-2533).
gaaggcttcaagaccaatt

SEQ ID NO: 697100 - DNA, 19 bp, Mus musculus
  siRNA target sequence for Hells (NM_008234.2,2537-2555).
gggaagacagggatattca

SEQ ID NO: 697101 - DNA, 19 bp, Mus musculus
  siRNA target sequence for Hells (NM_008234.2,2542-2560).
gacagggatattcaaaata

SEQ ID NO: 697102 - DNA, 19 bp, Mus musculus
  siRNA target sequence for Hells (NM_008234.2,2544-2562).
cagggatattcaaaatact

SEQ ID NO: 697103 - DNA, 19 bp, Mus musculus
  siRNA target sequence for Hells (NM_008234.2,2576-2594).
gattccagtgctgaatgtt

SEQ ID NO: 697104 - DNA, 19 bp, Mus musculus
  siRNA target sequence for Hells (NM_008234.2,2580-2598).
ccagtgctgaatgtttatt

SEQ ID NO: 697105 - DNA, 19 bp, Mus musculus
  siRNA target sequence for Hells (NM_008234.2,2581-2599).
cagtgctgaatgtttattt

SEQ ID NO: 697106 - DNA, 19 bp, Mus musculus
  siRNA target sequence for Hn1 (NM_008258.1,98-116).
gaccactaccactaccttt

SEQ ID NO: 697107 - DNA, 19 bp, Mus musculus
  siRNA target sequence for Hn1 (NM_008258.1,165-183).
ccaggtggtgggtccaatt

SEQ ID NO: 697108 - DNA, 19 bp, Mus musculus
  siRNA target sequence for Hn1 (NM_008258.1,171-189).
ggtgggtccaatttttcat

SEQ ID NO: 697109 - DNA, 19 bp, Mus musculus
  siRNA target sequence for Hn1 (NM_008258.1,172-190).
gtgggtccaatttttcatt

SEQ ID NO: 697110 - DNA, 19 bp, Mus musculus
  siRNA target sequence for Hn1 (NM_008258.1,367-385).
gctctggagatttcttaga

SEQ ID NO: 697111 - DNA, 19 bp, Mus musculus
  siRNA target sequence for Hn1 (NM_008258.1,396-414).
gaaggtgatatgcatgaaa

SEQ ID NO: 697112 - DNA, 19 bp, Mus musculus
  siRNA target sequence for Hoxa13 (NM_008264.1,142-160).
cgagcccaccgtcatgttt

SEQ ID NO: 697113 - DNA, 19 bp, Mus musculus
  siRNA target sequence for Hoxa13 (NM_008264.1,147-165).
ccaccgtcatgtttctcta

SEQ ID NO: 697114 - DNA, 19 bp, Mus musculus
  siRNA target sequence for Hoxa13 (NM_008264.1,189-207).
ccgacgagctcaacaagaa

SEQ ID NO: 697115 - DNA, 19 bp, Mus musculus
  siRNA target sequence for Hoxa13 (NM_008264.1,713-731).
gccttcgccgacaagtaca

SEQ ID NO: 697116 - DNA, 19 bp, Mus musculus
  siRNA target sequence for Hoxa13 (NM_008264.1,714-732).
ccttcgccgacaagtacat

SEQ ID NO: 697117 - DNA, 19 bp, Mus musculus
  siRNA target sequence for Hoxa13 (NM_008264.1,847-865).
cctggatatgccagtagtt

SEQ ID NO: 697118 - DNA, 19 bp, Mus musculus
  siRNA target sequence for Hoxa13 (NM_008264.1,951-969).
gctggaacggccaaatgta

SEQ ID NO: 697119 - DNA, 19 bp, Mus musculus
  siRNA target sequence for Hoxa13 (NM_008264.1,1043-1061).
gacgccagctcctatagga

SEQ ID NO: 697120 - DNA, 19 bp, Mus musculus
  siRNA target sequence for Hoxa13 (NM_008264.1,1072-1090).
gaagcgcgtgccttacact

SEQ ID NO: 697121 - DNA, 19 bp, Mus musculus
  siRNA target sequence for Hoxa13 (NM_008264.1,1123-1141).
cgctacgaacaaattcatt

SEQ ID NO: 697122 - DNA, 19 bp, Mus musculus
  siRNA target sequence for Hoxa13 (NM_008264.1,1124-1142).
gctacgaacaaattcatta

SEQ ID NO: 697123 - DNA, 19 bp, Mus musculus
  siRNA target sequence for Hoxa13 (NM_008264.1,1128-1146).
cgaacaaattcattaccaa

SEQ ID NO: 697124 - DNA, 19 bp, Mus musculus
  siRNA target sequence for Hoxa13 (NM_008264.1,1150-1168).
caaacggaggaggatatca

SEQ ID NO: 697125 - DNA, 19 bp, Mus musculus
  siRNA target sequence for Hoxb1 (NM_008266.1,517-535).
gactataataggatgagtt

SEQ ID NO: 697126 - DNA, 19 bp, Mus musculus
  siRNA target sequence for Hoxb1 (NM_008266.1,527-545).
ggatgagttcctttttaga

SEQ ID NO: 697127 - DNA, 19 bp, Mus musculus
  siRNA target sequence for Hoxb1 (NM_008266.1,665-683).
gctcagcgctccaacaaaa

SEQ ID NO: 697128 - DNA, 19 bp, Mus musculus
  siRNA target sequence for Hoxb1 (NM_008266.1,780-798).
ctatgggccttctcagtat

SEQ ID NO: 697129 - DNA, 19 bp, Mus musculus
  siRNA target sequence for Hoxb1 (NM_008266.1,900-918).
cggctcagggccatatcct

SEQ ID NO: 697130 - DNA, 19 bp, Mus musculus
  siRNA target sequence for Hoxb1 (NM_008266.1,946-964).
cagaccgcaacctttgcat

SEQ ID NO: 697131 - DNA, 19 bp, Mus musculus
  siRNA target sequence for Hoxb1 (NM_008266.1,1112-1130).
gcggtctccgcacaaactt

SEQ ID NO: 697132 - DNA, 19 bp, Mus musculus
  siRNA target sequence for Hoxb1 (NM_008266.1,1114-1132).
ggtctccgcacaaacttca

SEQ ID NO: 697133 - DNA, 19 bp, Mus musculus
  siRNA target sequence for Hoxd11 (NM_008273.1,116-134).
cctcgtgccagatgacttt

SEQ ID NO: 697134 - DNA, 19 bp, Mus musculus
  siRNA target sequence for Hoxd11 (NM_008273.1,401-419).
ggccagacgtgctcttcaa

SEQ ID NO: 697135 - DNA, 19 bp, Mus musculus
  siRNA target sequence for Hoxd11 (NM_008273.1,470-488).
ccgcagcctctaacttcta

SEQ ID NO: 697136 - DNA, 19 bp, Mus musculus
  siRNA target sequence for Hoxd11 (NM_008273.1,472-490).
gcagcctctaacttctaca

SEQ ID NO: 697137 - DNA, 19 bp, Mus musculus
  siRNA target sequence for Hoxd11 (NM_008273.1,837-855).
ggaacgcgagtttttcttt

SEQ ID NO: 697138 - DNA, 19 bp, Mus musculus
  siRNA target sequence for Hoxd11 (NM_008273.1,838-856).
gaacgcgagtttttcttta

SEQ ID NO: 697139 - DNA, 19 bp, Mus musculus
  siRNA target sequence for Hoxd11 (NM_008273.1,939-957).
gaatcgcaggatgaaagaa

SEQ ID NO: 697140 - DNA, 19 bp, Mus musculus
  siRNA target sequence for Hoxd11 (NM_008273.1,990-1008).
cactggaaaccccttattt

SEQ ID NO: 697141 - DNA, 19 bp, Mus musculus
  siRNA target sequence for Map4k1 (NM_008279.1,102-120).
cttgtggaccccgacattt

SEQ ID NO: 697142 - DNA, 19 bp, Mus musculus
  siRNA target sequence for Map4k1 (NM_008279.1,105-123).
gtggaccccgacattttta

SEQ ID NO: 697143 - DNA, 19 bp, Mus musculus
  siRNA target sequence for Map4k1 (NM_008279.1,107-125).
ggaccccgacatttttaat

SEQ ID NO: 697144 - DNA, 19 bp, Mus musculus
  siRNA target sequence for Map4k1 (NM_008279.1,108-126).
gaccccgacatttttaata

SEQ ID NO: 697145 - DNA, 19 bp, Mus musculus
  siRNA target sequence for Map4k1 (NM_008279.1,832-850).
ccttccacaactttgtcaa

SEQ ID NO: 697146 - DNA, 19 bp, Mus musculus
  siRNA target sequence for Map4k1 (NM_008279.1,852-870).
gtcaccctcactaagaact

SEQ ID NO: 697147 - DNA, 19 bp, Mus musculus
  siRNA target sequence for Map4k1 (NM_008279.1,1150-1168).
ctgaaactgttcgcttata

SEQ ID NO: 697148 - DNA, 19 bp, Mus musculus
  siRNA target sequence for Map4k1 (NM_008279.1,1204-1222).
gtcagctgtcagattctga

SEQ ID NO: 697149 - DNA, 19 bp, Mus musculus
  siRNA target sequence for Map4k1 (NM_008279.1,1295-1313).
gtttcggtctccatcagat

SEQ ID NO: 697150 - DNA, 19 bp, Mus musculus
  siRNA target sequence for Map4k1 (NM_008279.1,1446-1464).
cgctcagatccctcattgt

SEQ ID NO: 697151 - DNA, 19 bp, Mus musculus
  siRNA target sequence for Map4k1 (NM_008279.1,1567-1585).
cccttcttgtgaaattatt

SEQ ID NO: 697152 - DNA, 19 bp, Mus musculus
  siRNA target sequence for Map4k1 (NM_008279.1,1625-1643).
gacacatccctctacaaaa

SEQ ID NO: 697153 - DNA, 19 bp, Mus musculus
  siRNA target sequence for Map4k1 (NM_008279.1,1627-1645).
cacatccctctacaaaaga

SEQ ID NO: 697154 - DNA, 19 bp, Mus musculus
  siRNA target sequence for Map4k1 (NM_008279.1,1707-1725).
gccacgctggaaatgatct

SEQ ID NO: 697155 - DNA, 19 bp, Mus musculus
  siRNA target sequence for Map4k1 (NM_008279.1,1738-1756).
caacctggctctattgcat

SEQ ID NO: 697156 - DNA, 19 bp, Mus musculus
  siRNA target sequence for Map4k1 (NM_008279.1,1744-1762).
ggctctattgcatcaacaa

SEQ ID NO: 697157 - DNA, 19 bp, Mus musculus
  siRNA target sequence for Map4k1 (NM_008279.1,1817-1835).
gggcctgcttgaaaggaaa

SEQ ID NO: 697158 - DNA, 19 bp, Mus musculus
  siRNA target sequence for Map4k1 (NM_008279.1,1879-1897).
ggttactggcaagaaagaa

SEQ ID NO: 697159 - DNA, 19 bp, Mus musculus
  siRNA target sequence for Hrsp12 (NM_008287.2,155-173).
gacaggaccatttacattt

SEQ ID NO: 697160 - DNA, 19 bp, Mus musculus
  siRNA target sequence for Hrsp12 (NM_008287.2,157-175).
caggaccatttacatttct

SEQ ID NO: 697161 - DNA, 19 bp, Mus musculus
  siRNA target sequence for Hrsp12 (NM_008287.2,214-232).
gccaggaggagtagtagaa

SEQ ID NO: 697162 - DNA, 19 bp, Mus musculus
  siRNA target sequence for Hrsp12 (NM_008287.2,292-310).
caataatgtggtgaaaaca

SEQ ID NO: 697163 - DNA, 19 bp, Mus musculus
  siRNA target sequence for Hrsp12 (NM_008287.2,320-338).
ctggctgacatgaatgact

SEQ ID NO: 697164 - DNA, 19 bp, Mus musculus
  siRNA target sequence for Hrsp12 (NM_008287.2,342-360).
gcactgtcaatgagatcta

SEQ ID NO: 697165 - DNA, 19 bp, Mus musculus
  siRNA target sequence for Hrsp12 (NM_008287.2,345-363).
ctgtcaatgagatctataa

SEQ ID NO: 697166 - DNA, 19 bp, Mus musculus
  siRNA target sequence for Hrsp12 (NM_008287.2,423-441).
gaggaagtcgagttgaaat

SEQ ID NO: 697167 - DNA, 19 bp, Mus musculus
  siRNA target sequence for Hrsp12 (NM_008287.2,453-471).
ctgtccaggggcctttcat

SEQ ID NO: 697168 - DNA, 19 bp, Mus musculus
  siRNA target sequence for Hrsp12 (NM_008287.2,455-473).
gtccaggggcctttcatca

SEQ ID NO: 697169 - DNA, 19 bp, Mus musculus
  siRNA target sequence for Hsd11b2 (NM_008289.1,275-293).
cggttgtgacactggtttt

SEQ ID NO: 697170 - DNA, 19 bp, Mus musculus
  siRNA target sequence for Hsd11b2 (NM_008289.1,295-313).
gcaaggagacagctaagaa

SEQ ID NO: 697171 - DNA, 19 bp, Mus musculus
  siRNA target sequence for Hsd11b2 (NM_008289.1,296-314).
caaggagacagctaagaaa

SEQ ID NO: 697172 - DNA, 19 bp, Mus musculus
  siRNA target sequence for Hsd11b2 (NM_008289.1,724-742).
caatagcactgcttatgga

SEQ ID NO: 697173 - DNA, 19 bp, Mus musculus
  siRNA target sequence for Hsd11b2 (NM_008289.1,771-789).
ggtatcaaggtcagcatta

SEQ ID NO: 697174 - DNA, 19 bp, Mus musculus
  siRNA target sequence for Hsd11b2 (NM_008289.1,962-980).
ccttagcccagttgtagat

SEQ ID NO: 697175 - DNA, 19 bp, Mus musculus
  siRNA target sequence for Hsd11b2 (NM_008289.1,1098-1116).
ctacagaacttctttatca

SEQ ID NO: 697176 - DNA, 19 bp, Mus musculus
  siRNA target sequence for Ifi1 (NM_008326.1,493-511).
catggcagagacccattat

SEQ ID NO: 697177 - DNA, 19 bp, Mus musculus
  siRNA target sequence for Ifi1 (NM_008326.1,496-514).
ggcagagacccattatgct

SEQ ID NO: 697178 - DNA, 19 bp, Mus musculus
  siRNA target sequence for Ifi1 (NM_008326.1,589-607).
caccgaaagagctttaaga

SEQ ID NO: 697179 - DNA, 19 bp, Mus musculus
  siRNA target sequence for Ifi1 (NM_008326.1,735-753).
gagtcatcggccatgatga

SEQ ID NO: 697180 - DNA, 19 bp, Mus musculus
  siRNA target sequence for Ifi1 (NM_008326.1,739-757).
catcggccatgatgaagat

SEQ ID NO: 697181 - DNA, 19 bp, Mus musculus
  siRNA target sequence for Ifi1 (NM_008326.1,797-815).
cggactgagtactcttcat

SEQ ID NO: 697182 - DNA, 19 bp, Mus musculus
  siRNA target sequence for Ifi1 (NM_008326.1,906-924).
gcacatgtgacttattcat

SEQ ID NO: 697183 - DNA, 19 bp, Mus musculus
  siRNA target sequence for Ifi1 (NM_008326.1,1055-1073).
gtccggctcctacagaata

SEQ ID NO: 697184 - DNA, 19 bp, Mus musculus
  siRNA target sequence for Ifi1 (NM_008326.1,1059-1077).
ggctcctacagaatatcca

SEQ ID NO: 697185 - DNA, 19 bp, Mus musculus
  siRNA target sequence for Ifi1 (NM_008326.1,1174-1192).
gcttagggacacacttcat

SEQ ID NO: 697186 - DNA, 19 bp, Mus musculus
  siRNA target sequence for Ifi1 (NM_008326.1,1175-1193).
cttagggacacacttcata

SEQ ID NO: 697187 - DNA, 19 bp, Mus musculus
  siRNA target sequence for Ifi1 (NM_008326.1,1233-1251).
ccctttatggcacttatga

SEQ ID NO: 697188 - DNA, 19 bp, Mus musculus
  siRNA target sequence for Ifi1 (NM_008326.1,1235-1253).
ctttatggcacttatgaga

SEQ ID NO: 697189 - DNA, 19 bp, Mus musculus
  siRNA target sequence for Ifi1 (NM_008326.1,1252-1270).
gaagatcgttggtgataaa

SEQ ID NO: 697190 - DNA, 19 bp, Mus musculus
  siRNA target sequence for Ifi1 (NM_008326.1,1255-1273).
gatcgttggtgataaagta

SEQ ID NO: 697191 - DNA, 19 bp, Mus musculus
  siRNA target sequence for Ifi1 (NM_008326.1,1357-1375).
gaaagtgtaccgactgata

SEQ ID NO: 697192 - DNA, 19 bp, Mus musculus
  siRNA target sequence for Ifi1 (NM_008326.1,1363-1381).
gtaccgactgatatttggt

SEQ ID NO: 697193 - DNA, 19 bp, Mus musculus
  siRNA target sequence for Ifi1 (NM_008326.1,1380-1398).
gtgtagatgacgaatcagt

SEQ ID NO: 697194 - DNA, 19 bp, Mus musculus
  siRNA target sequence for Ifi1 (NM_008326.1,1450-1468).
catgaagtcccaaaacttt

SEQ ID NO: 697195 - DNA, 19 bp, Mus musculus
  siRNA target sequence for Ifi1 (NM_008326.1,1456-1474).
gtcccaaaacttttatact

SEQ ID NO: 697196 - DNA, 19 bp, Mus musculus
  siRNA target sequence for Ifi1 (NM_008326.1,1584-1602).
gacataaacgcatgctttt

SEQ ID NO: 697197 - DNA, 19 bp, Mus musculus
  siRNA target sequence for Ifi47 (NM_008330.1,188-206).
cagtactctgcattaatca

SEQ ID NO: 697198 - DNA, 19 bp, Mus musculus
  siRNA target sequence for Ifi47 (NM_008330.1,237-255).
ccctcactggtattcacaa

SEQ ID NO: 697199 - DNA, 19 bp, Mus musculus
  siRNA target sequence for Ifi47 (NM_008330.1,238-256).
cctcactggtattcacaaa

SEQ ID NO: 697200 - DNA, 19 bp, Mus musculus
  siRNA target sequence for Ifi47 (NM_008330.1,361-379).
gactggcaagtccagtttt

SEQ ID NO: 697201 - DNA, 19 bp, Mus musculus
  siRNA target sequence for Ifi47 (NM_008330.1,400-418).
gggccacgaagcagatgaa

SEQ ID NO: 697202 - DNA, 19 bp, Mus musculus
  siRNA target sequence for Ifi47 (NM_008330.1,401-419).
ggccacgaagcagatgaat

SEQ ID NO: 697203 - DNA, 19 bp, Mus musculus
  siRNA target sequence for Ifi47 (NM_008330.1,440-458).
gagaccactatgtgtaaaa

SEQ ID NO: 697204 - DNA, 19 bp, Mus musculus
  siRNA target sequence for Ifi47 (NM_008330.1,451-469).
gtgtaaaaccccctatcaa

SEQ ID NO: 697205 - DNA, 19 bp, Mus musculus
  siRNA target sequence for Ifi47 (NM_008330.1,460-478).
cccctatcaacatccaaaa

SEQ ID NO: 697206 - DNA, 19 bp, Mus musculus
  siRNA target sequence for Ifi47 (NM_008330.1,510-528).
ggactgggacacccaattt

SEQ ID NO: 697207 - DNA, 19 bp, Mus musculus
  siRNA target sequence for Ifi47 (NM_008330.1,529-547).
ccacgcagacgcttatcta

SEQ ID NO: 697208 - DNA, 19 bp, Mus musculus
  siRNA target sequence for Ifi47 (NM_008330.1,597-615).
cccgcttcagcctcaatga

SEQ ID NO: 697209 - DNA, 19 bp, Mus musculus
  siRNA target sequence for Ifi47 (NM_008330.1,598-616).
ccgcttcagcctcaatgat

SEQ ID NO: 697210 - DNA, 19 bp, Mus musculus
  siRNA target sequence for Ifi47 (NM_008330.1,676-694).
ggtggatagtgacttatat

SEQ ID NO: 697211 - DNA, 19 bp, Mus musculus
  siRNA target sequence for Ifi47 (NM_008330.1,677-695).
gtggatagtgacttatata

SEQ ID NO: 697212 - DNA, 19 bp, Mus musculus
  siRNA target sequence for Ifi47 (NM_008330.1,679-697).
ggatagtgacttatataat

SEQ ID NO: 697213 - DNA, 19 bp, Mus musculus
  siRNA target sequence for Ifi47 (NM_008330.1,753-771).
gagactactgtgtgactaa

SEQ ID NO: 697214 - DNA, 19 bp, Mus musculus
  siRNA target sequence for Ifi47 (NM_008330.1,762-780).
gtgtgactaatctcatcaa

SEQ ID NO: 697215 - DNA, 19 bp, Mus musculus
  siRNA target sequence for Ifi47 (NM_008330.1,824-842).
gatctgggtgcgtttgatt

SEQ ID NO: 697216 - DNA, 19 bp, Mus musculus
  siRNA target sequence for Ifi47 (NM_008330.1,879-897).
ctgggcacaagcgtcatat

SEQ ID NO: 697217 - DNA, 19 bp, Mus musculus
  siRNA target sequence for Ifi47 (NM_008330.1,881-899).
gggcacaagcgtcatatgt

SEQ ID NO: 697218 - DNA, 19 bp, Mus musculus
  siRNA target sequence for Ifi47 (NM_008330.1,882-900).
ggcacaagcgtcatatgtt

SEQ ID NO: 697219 - DNA, 19 bp, Mus musculus
  siRNA target sequence for Ifi47 (NM_008330.1,883-901).
gcacaagcgtcatatgttt

SEQ ID NO: 697220 - DNA, 19 bp, Mus musculus
  siRNA target sequence for Ifi47 (NM_008330.1,903-921).
ccctgctcttgcccaatat

SEQ ID NO: 697221 - DNA, 19 bp, Mus musculus
  siRNA target sequence for Ifi47 (NM_008330.1,934-952).
cattgagctaaagaaacat

SEQ ID NO: 697222 - DNA, 19 bp, Mus musculus
  siRNA target sequence for Ifi47 (NM_008330.1,1063-1081).
gaaggattaccgaagctat

SEQ ID NO: 697223 - DNA, 19 bp, Mus musculus
  siRNA target sequence for Ifi47 (NM_008330.1,1066-1084).
ggattaccgaagctatttt

SEQ ID NO: 697224 - DNA, 19 bp, Mus musculus
  siRNA target sequence for Ifi47 (NM_008330.1,1086-1104).
gcttggatgatcaatcgat

SEQ ID NO: 697225 - DNA, 19 bp, Mus musculus
  siRNA target sequence for Ifi47 (NM_008330.1,1090-1108).
ggatgatcaatcgattaaa

SEQ ID NO: 697226 - DNA, 19 bp, Mus musculus
  siRNA target sequence for Ifi47 (NM_008330.1,1169-1187).
gatttctggtcccttgtaa

SEQ ID NO: 697227 - DNA, 19 bp, Mus musculus
  siRNA target sequence for Ifi47 (NM_008330.1,1176-1194).
ggtcccttgtaaaggataa

SEQ ID NO: 697228 - DNA, 19 bp, Mus musculus
  siRNA target sequence for Ifi47 (NM_008330.1,1184-1202).
gtaaaggataacagcataa

SEQ ID NO: 697229 - DNA, 19 bp, Mus musculus
  siRNA target sequence for Ifi47 (NM_008330.1,1243-1261).
gaaaggaggccctgaatct

SEQ ID NO: 697230 - DNA, 19 bp, Mus musculus
  siRNA target sequence for Ifi47 (NM_008330.1,1263-1281).
ctgccttccaggctttaaa

SEQ ID NO: 697231 - DNA, 19 bp, Mus musculus
  siRNA target sequence for Ifi47 (NM_008330.1,1293-1311).
ggcgcacacagttccttaa

SEQ ID NO: 697232 - DNA, 19 bp, Mus musculus
  siRNA target sequence for Ifi47 (NM_008330.1,1295-1313).
cgcacacagttccttaaca

SEQ ID NO: 697233 - DNA, 19 bp, Mus musculus
  siRNA target sequence for Igfbp6 (NM_008344.1,524-542).
cgtcggaggagactacaaa

SEQ ID NO: 697234 - DNA, 19 bp, Mus musculus
  siRNA target sequence for Igfbp6 (NM_008344.1,591-609).
cagagaccggcagaagaat

SEQ ID NO: 697235 - DNA, 19 bp, Mus musculus
  siRNA target sequence for Igfbp6 (NM_008344.1,636-654).
gcccaatcctgttcaagat

SEQ ID NO: 697236 - DNA, 19 bp, Mus musculus
  siRNA target sequence for Igfbp6 (NM_008344.1,637-655).
cccaatcctgttcaagata

SEQ ID NO: 697237 - DNA, 19 bp, Mus musculus
  siRNA target sequence for Igfbp6 (NM_008344.1,675-693).
cagacacttggattcagta

SEQ ID NO: 697238 - DNA, 19 bp, Mus musculus
  siRNA target sequence for Igfbp6 (NM_008344.1,728-746).
gagcacgtgggctctatgt

SEQ ID NO: 697239 - DNA, 19 bp, Mus musculus
  siRNA target sequence for Igfbp6 (NM_008344.1,738-756).
gctctatgtgccaaactgt

SEQ ID NO: 697240 - DNA, 19 bp, Mus musculus
  siRNA target sequence for Imap38 (NM_008376.2,340-358).
gtgcctgtcaccagaagtt

SEQ ID NO: 697241 - DNA, 19 bp, Mus musculus
  siRNA target sequence for Imap38 (NM_008376.2,403-421).
gtggacaccccggatatct

SEQ ID NO: 697242 - DNA, 19 bp, Mus musculus
  siRNA target sequence for Imap38 (NM_008376.2,947-965).
ggggatggcggaaattcta

SEQ ID NO: 697243 - DNA, 19 bp, Mus musculus
  siRNA target sequence for Imap38 (NM_008376.2,1042-1060).
ggctttggggaccagaata

SEQ ID NO: 697244 - DNA, 19 bp, Mus musculus
  siRNA target sequence for Imap38 (NM_008376.2,1048-1066).
ggggaccagaataacagat

SEQ ID NO: 697245 - DNA, 19 bp, Mus musculus
  siRNA target sequence for Lrig1 (NM_008377.1,665-683).
ggacgcgcagcctaaacct

SEQ ID NO: 697246 - DNA, 19 bp, Mus musculus
  siRNA target sequence for Lrig1 (NM_008377.1,671-689).
gcagcctaaacctgagtta

SEQ ID NO: 697247 - DNA, 19 bp, Mus musculus
  siRNA target sequence for Lrig1 (NM_008377.1,674-692).
gcctaaacctgagttataa

SEQ ID NO: 697248 - DNA, 19 bp, Mus musculus
  siRNA target sequence for Lrig1 (NM_008377.1,705-723).
gatcgactctgctgctttt

SEQ ID NO: 697249 - DNA, 19 bp, Mus musculus
  siRNA target sequence for Lrig1 (NM_008377.1,937-955).
ccgaacggcctgcgtataa

SEQ ID NO: 697250 - DNA, 19 bp, Mus musculus
  siRNA target sequence for Lrig1 (NM_008377.1,950-968).
gtataagggaactcaactt

SEQ ID NO: 697251 - DNA, 19 bp, Mus musculus
  siRNA target sequence for Lrig1 (NM_008377.1,1036-1054).
ctccgtctgagcaaaaaca

SEQ ID NO: 697252 - DNA, 19 bp, Mus musculus
  siRNA target sequence for Lrig1 (NM_008377.1,1059-1077).
cacccagcttcctgtgaaa

SEQ ID NO: 697253 - DNA, 19 bp, Mus musculus
  siRNA target sequence for Lrig1 (NM_008377.1,1091-1109).
ccaggctgacacaactaga

SEQ ID NO: 697254 - DNA, 19 bp, Mus musculus
  siRNA target sequence for Lrig1 (NM_008377.1,1181-1199).
ggcttcagaggaacaacat

SEQ ID NO: 697255 - DNA, 19 bp, Mus musculus
  siRNA target sequence for Lrig1 (NM_008377.1,1220-1238).
ccttctgggggctgtctaa

SEQ ID NO: 697256 - DNA, 19 bp, Mus musculus
  siRNA target sequence for Lrig1 (NM_008377.1,1589-1607).
cctttacggggcttgacaa

SEQ ID NO: 697257 - DNA, 19 bp, Mus musculus
  siRNA target sequence for Lrig1 (NM_008377.1,1906-1924).
ctgccagacagctttgtgt

SEQ ID NO: 697258 - DNA, 19 bp, Mus musculus
  siRNA target sequence for Lrig1 (NM_008377.1,2108-2126).
cacaggacggcgaagtgat

SEQ ID NO: 697259 - DNA, 19 bp, Mus musculus
  siRNA target sequence for Lrig1 (NM_008377.1,2179-2197).
cgctaccagtgtatcatca

SEQ ID NO: 697260 - DNA, 19 bp, Mus musculus
  siRNA target sequence for Lrig1 (NM_008377.1,2203-2221).
cactttggctccacatact

SEQ ID NO: 697261 - DNA, 19 bp, Mus musculus
  siRNA target sequence for Lrig1 (NM_008377.1,2248-2266).
gtgttgccatcattcacta

SEQ ID NO: 697262 - DNA, 19 bp, Mus musculus
  siRNA target sequence for Lrig1 (NM_008377.1,2392-2410).
gagcgacgcatgcatgtta

SEQ ID NO: 697263 - DNA, 19 bp, Mus musculus
  siRNA target sequence for Lrig1 (NM_008377.1,2414-2432).
cagacgatgatgtgttctt

SEQ ID NO: 697264 - DNA, 19 bp, Mus musculus
  siRNA target sequence for Lrig1 (NM_008377.1,2511-2529).
cgctaccctcacagtctta

SEQ ID NO: 697265 - DNA, 19 bp, Mus musculus
  siRNA target sequence for Lrig1 (NM_008377.1,2513-2531).
ctaccctcacagtcttaga

SEQ ID NO: 697266 - DNA, 19 bp, Mus musculus
  siRNA target sequence for Lrig1 (NM_008377.1,2517-2535).
cctcacagtcttagaaact

SEQ ID NO: 697267 - DNA, 19 bp, Mus musculus
  siRNA target sequence for Lrig1 (NM_008377.1,2728-2746).
gatgcagggcggtatacct

SEQ ID NO: 697268 - DNA, 19 bp, Mus musculus
  siRNA target sequence for Lrig1 (NM_008377.1,2788-2806).
cagctgagcattttaccta

SEQ ID NO: 697269 - DNA, 19 bp, Mus musculus
  siRNA target sequence for Lrig1 (NM_008377.1,2937-2955).
cgtcactaacacagatgaa

SEQ ID NO: 697270 - DNA, 19 bp, Mus musculus
  siRNA target sequence for Lrig1 (NM_008377.1,2958-2976).
cattgtgcctccagatgtt

SEQ ID NO: 697271 - DNA, 19 bp, Mus musculus
  siRNA target sequence for Lrig1 (NM_008377.1,3008-3026).
ctgaccggcaggaaactgt

SEQ ID NO: 697272 - DNA, 19 bp, Mus musculus
  siRNA target sequence for Lrig1 (NM_008377.1,3106-3124).
ccagaggtcgacattcata

SEQ ID NO: 697273 - DNA, 19 bp, Mus musculus
  siRNA target sequence for Lrig1 (NM_008377.1,3115-3133).
gacattcatagcactacat

SEQ ID NO: 697274 - DNA, 19 bp, Mus musculus
  siRNA target sequence for Lrig1 (NM_008377.1,3143-3161).
ccaagctgtgtgttggata

SEQ ID NO: 697275 - DNA, 19 bp, Mus musculus
  siRNA target sequence for Lrig1 (NM_008377.1,3336-3354).
gcagcatgaccgggaatat

SEQ ID NO: 697276 - DNA, 19 bp, Mus musculus
  siRNA target sequence for Lrig1 (NM_008377.1,3337-3355).
cagcatgaccgggaatatt

SEQ ID NO: 697277 - DNA, 19 bp, Mus musculus
  siRNA target sequence for Lrig1 (NM_008377.1,3491-3509).
cctcttggactttagcaaa

SEQ ID NO: 697278 - DNA, 19 bp, Mus musculus
  siRNA target sequence for Lrig1 (NM_008377.1,3500-3518).
ctttagcaaagttacatga

SEQ ID NO: 697279 - DNA, 19 bp, Mus musculus
  siRNA target sequence for Lrig1 (NM_008377.1,3541-3559).
ccttctcctacgttagctt

SEQ ID NO: 697280 - DNA, 19 bp, Mus musculus
  siRNA target sequence for Lrig1 (NM_008377.1,3579-3597).
ggaagacgccatatctact

SEQ ID NO: 697281 - DNA, 19 bp, Mus musculus
  siRNA target sequence for Lrig1 (NM_008377.1,3695-3713).
ggaggggaccactgctatt

SEQ ID NO: 697282 - DNA, 19 bp, Mus musculus
  siRNA target sequence for Irf1 (NM_008390.1,248-266).
cagattaattccaaccaaa

SEQ ID NO: 697283 - DNA, 19 bp, Mus musculus
  siRNA target sequence for Irf1 (NM_008390.1,272-290).
gggctgatctggatcaata

SEQ ID NO: 697284 - DNA, 19 bp, Mus musculus
  siRNA target sequence for Irf1 (NM_008390.1,273-291).
ggctgatctggatcaataa

SEQ ID NO: 697285 - DNA, 19 bp, Mus musculus
  siRNA target sequence for Irf1 (NM_008390.1,274-292).
gctgatctggatcaataaa

SEQ ID NO: 697286 - DNA, 19 bp, Mus musculus
  siRNA target sequence for Irf1 (NM_008390.1,282-300).
ggatcaataaagaagagat

SEQ ID NO: 697287 - DNA, 19 bp, Mus musculus
  siRNA target sequence for Irf1 (NM_008390.1,371-389).
cggagctgggccattcaca

SEQ ID NO: 697288 - DNA, 19 bp, Mus musculus
  siRNA target sequence for Irf1 (NM_008390.1,590-608).
cgagacactaagagcaaaa

SEQ ID NO: 697289 - DNA, 19 bp, Mus musculus
  siRNA target sequence for Irf1 (NM_008390.1,632-650).
gttagcccggacactttct

SEQ ID NO: 697290 - DNA, 19 bp, Mus musculus
  siRNA target sequence for Irf1 (NM_008390.1,713-731).
ctgggtcaggacttggata

SEQ ID NO: 697291 - DNA, 19 bp, Mus musculus
  siRNA target sequence for Irf1 (NM_008390.1,822-840).
gcaccactgatctgtataa

SEQ ID NO: 697292 - DNA, 19 bp, Mus musculus
  siRNA target sequence for Irf1 (NM_008390.1,1066-1084).
cattgggataggcatacaa

SEQ ID NO: 697293 - DNA, 19 bp, Mus musculus
  siRNA target sequence for Irf1 (NM_008390.1,1071-1089).
ggataggcatacaacatgt

SEQ ID NO: 697294 - DNA, 19 bp, Mus musculus
  siRNA target sequence for Itgb1bp1 (NM_008403.2,230-248).
gttcccagagcagtgaaat

SEQ ID NO: 697295 - DNA, 19 bp, Mus musculus
  siRNA target sequence for Itgb1bp1 (NM_008403.2,280-298).
cttggaggactttcaagat

SEQ ID NO: 697296 - DNA, 19 bp, Mus musculus
  siRNA target sequence for Itgb1bp1 (NM_008403.2,318-336).
cgatacagactccactaaa

SEQ ID NO: 697297 - DNA, 19 bp, Mus musculus
  siRNA target sequence for Itgb1bp1 (NM_008403.2,319-337).
gatacagactccactaaaa

SEQ ID NO: 697298 - DNA, 19 bp, Mus musculus
  siRNA target sequence for Itgb1bp1 (NM_008403.2,371-389).
gtgctgagttccgaataaa

SEQ ID NO: 697299 - DNA, 19 bp, Mus musculus
  siRNA target sequence for Itgb1bp1 (NM_008403.2,373-391).
gctgagttccgaataaagt

SEQ ID NO: 697300 - DNA, 19 bp, Mus musculus
  siRNA target sequence for Itgb1bp1 (NM_008403.2,374-392).
ctgagttccgaataaagta

SEQ ID NO: 697301 - DNA, 19 bp, Mus musculus
  siRNA target sequence for Itgb1bp1 (NM_008403.2,378-396).
gttccgaataaagtatgtt

SEQ ID NO: 697302 - DNA, 19 bp, Mus musculus
  siRNA target sequence for Itgb1bp1 (NM_008403.2,442-460).
ggaccactagacctgataa

SEQ ID NO: 697303 - DNA, 19 bp, Mus musculus
  siRNA target sequence for Itgb1bp1 (NM_008403.2,443-461).
gaccactagacctgataaa

SEQ ID NO: 697304 - DNA, 19 bp, Mus musculus
  siRNA target sequence for Itgb1bp1 (NM_008403.2,445-463).
ccactagacctgataaatt

SEQ ID NO: 697305 - DNA, 19 bp, Mus musculus
  siRNA target sequence for Itgb1bp1 (NM_008403.2,453-471).
cctgataaattacatagat

SEQ ID NO: 697306 - DNA, 19 bp, Mus musculus
  siRNA target sequence for Itgb1bp1 (NM_008403.2,476-494).
cccagcaagatggaaagtt

SEQ ID NO: 697307 - DNA, 19 bp, Mus musculus
  siRNA target sequence for Itgb1bp1 (NM_008403.2,536-554).
ctaagtacggcataaaagt

SEQ ID NO: 697308 - DNA, 19 bp, Mus musculus
  siRNA target sequence for Itgb1bp1 (NM_008403.2,609-627).
ccggatggtgtgttacgat

SEQ ID NO: 697309 - DNA, 19 bp, Mus musculus
  siRNA target sequence for Itgb1bp1 (NM_008403.2,736-754).
gcaatctgcaaggtcttat

SEQ ID NO: 697310 - DNA, 19 bp, Mus musculus
  siRNA target sequence for Itgb1bp1 (NM_008403.2,747-765).
ggtcttatccacagcattt

SEQ ID NO: 697311 - DNA, 19 bp, Mus musculus
  siRNA target sequence for Ivl (NM_008412.1,64-82).
gtgtgttctccagatcata

SEQ ID NO: 697312 - DNA, 19 bp, Mus musculus
  siRNA target sequence for Ivl (NM_008412.1,68-86).
gttctccagatcatatcca

SEQ ID NO: 697313 - DNA, 19 bp, Mus musculus
  siRNA target sequence for Ivl (NM_008412.1,129-147).
ccaggtcttcactgagatt

SEQ ID NO: 697314 - DNA, 19 bp, Mus musculus
  siRNA target sequence for Ivl (NM_008412.1,199-217).
gatctgcctgatcaaaagt

SEQ ID NO: 697315 - DNA, 19 bp, Mus musculus
  siRNA target sequence for Ivl (NM_008412.1,1194-1212).
gatagagcgtgaaggttat

SEQ ID NO: 697316 - DNA, 19 bp, Mus musculus
  siRNA target sequence for Ivl (NM_008412.1,1226-1244).
gcctgggtcagtcacttaa

SEQ ID NO: 697317 - DNA, 19 bp, Mus musculus
  siRNA target sequence for Ivl (NM_008412.1,1321-1339).
ctggatcaagcactagtaa

SEQ ID NO: 697318 - DNA, 19 bp, Mus musculus
  siRNA target sequence for Ivl (NM_008412.1,1361-1379).
ggaagaaacacgaattgga

SEQ ID NO: 697319 - DNA, 19 bp, Mus musculus
  siRNA target sequence for Klkb1 (NM_008455.1,667-685).
gtatgactcaactgtataa

SEQ ID NO: 697320 - DNA, 19 bp, Mus musculus
  siRNA target sequence for Klkb1 (NM_008455.1,839-857).
catgaaagagagcattaca

SEQ ID NO: 697321 - DNA, 19 bp, Mus musculus
  siRNA target sequence for Klkb1 (NM_008455.1,887-905).
ggccatttctggtcattct

SEQ ID NO: 697322 - DNA, 19 bp, Mus musculus
  siRNA target sequence for Klkb1 (NM_008455.1,911-929).
gcagtgtggccatcaaata

SEQ ID NO: 697323 - DNA, 19 bp, Mus musculus
  siRNA target sequence for Klkb1 (NM_008455.1,933-951).
gcttgccaccgagacatat

SEQ ID NO: 697324 - DNA, 19 bp, Mus musculus
  siRNA target sequence for Klkb1 (NM_008455.1,937-955).
gccaccgagacatatacaa

SEQ ID NO: 697325 - DNA, 19 bp, Mus musculus
  siRNA target sequence for Klkb1 (NM_008455.1,947-965).
catatacaaaggacttgat

SEQ ID NO: 697326 - DNA, 19 bp, Mus musculus
  siRNA target sequence for Klkb1 (NM_008455.1,968-986).
gagagggtccaactttaat

SEQ ID NO: 697327 - DNA, 19 bp, Mus musculus
  siRNA target sequence for Klkb1 (NM_008455.1,970-988).
gagggtccaactttaatat

SEQ ID NO: 697328 - DNA, 19 bp, Mus musculus
  siRNA target sequence for Klkb1 (NM_008455.1,972-990).
gggtccaactttaatatct

SEQ ID NO: 697329 - DNA, 19 bp, Mus musculus
  siRNA target sequence for Klkb1 (NM_008455.1,991-1009).
ctaagaccgacaatattga

SEQ ID NO: 697330 - DNA, 19 bp, Mus musculus
  siRNA target sequence for Klkb1 (NM_008455.1,1019-1037).
gaaactgtgcacaaataat

SEQ ID NO: 697331 - DNA, 19 bp, Mus musculus
  siRNA target sequence for Klkb1 (NM_008455.1,1125-1143).
ggaacacccaccagcataa

SEQ ID NO: 697332 - DNA, 19 bp, Mus musculus
  siRNA target sequence for Klkb1 (NM_008455.1,1188-1206).
gcgctttcggagataggtt

SEQ ID NO: 697333 - DNA, 19 bp, Mus musculus
  siRNA target sequence for Klkb1 (NM_008455.1,1203-1221).
ggttgccccatggatattt

SEQ ID NO: 697334 - DNA, 19 bp, Mus musculus
  siRNA target sequence for Klkb1 (NM_008455.1,1204-1222).
gttgccccatggatatttt

SEQ ID NO: 697335 - DNA, 19 bp, Mus musculus
  siRNA target sequence for Klkb1 (NM_008455.1,1317-1335).
cttttcttcacgttctaca

SEQ ID NO: 697336 - DNA, 19 bp, Mus musculus
  siRNA target sequence for Klkb1 (NM_008455.1,1325-1343).
cacgttctacacgaatgaa

SEQ ID NO: 697337 - DNA, 19 bp, Mus musculus
  siRNA target sequence for Klkb1 (NM_008455.1,1353-1371).
gaatcacagagaaatgttt

SEQ ID NO: 697338 - DNA, 19 bp, Mus musculus
  siRNA target sequence for Klkb1 (NM_008455.1,1407-1425).
ccccctattcctcaagaaa

SEQ ID NO: 697339 - DNA, 19 bp, Mus musculus
  siRNA target sequence for Klkb1 (NM_008455.1,1408-1426).
cccctattcctcaagaaaa

SEQ ID NO: 697340 - DNA, 19 bp, Mus musculus
  siRNA target sequence for Klkb1 (NM_008455.1,1416-1434).
cctcaagaaaacgctatat

SEQ ID NO: 697341 - DNA, 19 bp, Mus musculus
  siRNA target sequence for Klkb1 (NM_008455.1,1427-1445).
cgctatatctggatatagt

SEQ ID NO: 697342 - DNA, 19 bp, Mus musculus
  siRNA target sequence for Klkb1 (NM_008455.1,1473-1491).
gaaccctgccattccaaaa

SEQ ID NO: 697343 - DNA, 19 bp, Mus musculus
  siRNA target sequence for Klkb1 (NM_008455.1,1563-1581).
gagacttgtacaaagacaa

SEQ ID NO: 697344 - DNA, 19 bp, Mus musculus
  siRNA target sequence for Klkb1 (NM_008455.1,1583-1601).
ccgctgccagttttttatt

SEQ ID NO: 697345 - DNA, 19 bp, Mus musculus
  siRNA target sequence for Klkb1 (NM_008455.1,1628-1646).
ggaggaggggtgtaaatgt

SEQ ID NO: 697346 - DNA, 19 bp, Mus musculus
  siRNA target sequence for Klkb1 (NM_008455.1,1629-1647).
gaggaggggtgtaaatgtt

SEQ ID NO: 697347 - DNA, 19 bp, Mus musculus
  siRNA target sequence for Klkb1 (NM_008455.1,1634-1652).
ggggtgtaaatgttcctta

SEQ ID NO: 697348 - DNA, 19 bp, Mus musculus
  siRNA target sequence for Klkb1 (NM_008455.1,1635-1653).
gggtgtaaatgttccttaa

SEQ ID NO: 697349 - DNA, 19 bp, Mus musculus
  siRNA target sequence for Klkb1 (NM_008455.1,1698-1716).
caggggagctccggttatt

SEQ ID NO: 697350 - DNA, 19 bp, Mus musculus
  siRNA target sequence for Klkb1 (NM_008455.1,1702-1720).
ggagctccggttattctct

SEQ ID NO: 697351 - DNA, 19 bp, Mus musculus
  siRNA target sequence for Klkb1 (NM_008455.1,1708-1726).
ccggttattctctgagatt

SEQ ID NO: 697352 - DNA, 19 bp, Mus musculus
  siRNA target sequence for Klkb1 (NM_008455.1,1710-1728).
ggttattctctgagattgt

SEQ ID NO: 697353 - DNA, 19 bp, Mus musculus
  siRNA target sequence for Klkb1 (NM_008455.1,1744-1762).
gccctgactgtacaacaaa

SEQ ID NO: 697354 - DNA, 19 bp, Mus musculus
  siRNA target sequence for Klkb1 (NM_008455.1,1745-1763).
ccctgactgtacaacaaaa

SEQ ID NO: 697355 - DNA, 19 bp, Mus musculus
  siRNA target sequence for Klkb1 (NM_008455.1,1746-1764).
cctgactgtacaacaaaaa

SEQ ID NO: 697356 - DNA, 19 bp, Mus musculus
  siRNA target sequence for Klkb1 (NM_008455.1,1987-2005).
cgccttcctcgagaataaa

SEQ ID NO: 697357 - DNA, 19 bp, Mus musculus
  siRNA target sequence for Klkb1 (NM_008455.1,1996-2014).
cgagaataaaggagcttat

SEQ ID NO: 697358 - DNA, 19 bp, Mus musculus
  siRNA target sequence for Klkb1 (NM_008455.1,1997-2015).
gagaataaaggagcttatt

SEQ ID NO: 697359 - DNA, 19 bp, Mus musculus
  siRNA target sequence for Klkb1 (NM_008455.1,2073-2091).
cagacgcccctgaattata

SEQ ID NO: 697360 - DNA, 19 bp, Mus musculus
  siRNA target sequence for Klkb1 (NM_008455.1,2075-2093).
gacgcccctgaattatact

SEQ ID NO: 697361 - DNA, 19 bp, Mus musculus
  siRNA target sequence for Klkb1 (NM_008455.1,2077-2095).
cgcccctgaattatactga

SEQ ID NO: 697362 - DNA, 19 bp, Mus musculus
  siRNA target sequence for Klkb1 (NM_008455.1,2078-2096).
gcccctgaattatactgaa

SEQ ID NO: 697363 - DNA, 19 bp, Mus musculus
  siRNA target sequence for Klkb1 (NM_008455.1,2079-2097).
cccctgaattatactgaat

SEQ ID NO: 697364 - DNA, 19 bp, Mus musculus
  siRNA target sequence for Klkb1 (NM_008455.1,2080-2098).
ccctgaattatactgaatt

SEQ ID NO: 697365 - DNA, 19 bp, Mus musculus
  siRNA target sequence for Klkb1 (NM_008455.1,2084-2102).
gaattatactgaattccaa

SEQ ID NO: 697366 - DNA, 19 bp, Mus musculus
  siRNA target sequence for Klkb1 (NM_008455.1,2092-2110).
ctgaattccaaaaaccaat

SEQ ID NO: 697367 - DNA, 19 bp, Mus musculus
  siRNA target sequence for Klkb1 (NM_008455.1,2119-2137).
cttccaaagctgacacaaa

SEQ ID NO: 697368 - DNA, 19 bp, Mus musculus
  siRNA target sequence for Klkb1 (NM_008455.1,2311-2329).
gcggaacagacgcttgtaa

SEQ ID NO: 697369 - DNA, 19 bp, Mus musculus
  siRNA target sequence for Klkb1 (NM_008455.1,2344-2362).
gccccttagtctgtaaaca

SEQ ID NO: 697370 - DNA, 19 bp, Mus musculus
  siRNA target sequence for Klkb1 (NM_008455.1,2346-2364).
cccttagtctgtaaacaca

SEQ ID NO: 697371 - DNA, 19 bp, Mus musculus
  siRNA target sequence for Klkb1 (NM_008455.1,2451-2469).
gagtacatggactggatat

SEQ ID NO: 697372 - DNA, 19 bp, Mus musculus
  siRNA target sequence for Klkb1 (NM_008455.1,2477-2495).
gacacagagcagtgatgta

SEQ ID NO: 697373 - DNA, 19 bp, Mus musculus
  siRNA target sequence for Klk8 (NM_008457.1,441-459).
gcccacgaaggagtcaaaa

SEQ ID NO: 697374 - DNA, 19 bp, Mus musculus
  siRNA target sequence for Lbcl1 (NM_008487.1,316-334).
ctcatttgtcctacatgta

SEQ ID NO: 697375 - DNA, 19 bp, Mus musculus
  siRNA target sequence for Lbcl1 (NM_008487.1,342-360).
catccacaaccgctgtaaa

SEQ ID NO: 697376 - DNA, 19 bp, Mus musculus
  siRNA target sequence for Lbcl1 (NM_008487.1,346-364).
cacaaccgctgtaaagaca

SEQ ID NO: 697377 - DNA, 19 bp, Mus musculus
  siRNA target sequence for Lbcl1 (NM_008487.1,442-460).
gtctcccttcgaagtaaga

SEQ ID NO: 697378 - DNA, 19 bp, Mus musculus
  siRNA target sequence for Lbcl1 (NM_008487.1,476-494).
ggccaacgtctgccattta

SEQ ID NO: 697379 - DNA, 19 bp, Mus musculus
  siRNA target sequence for Lbcl1 (NM_008487.1,677-695).
ccgtggaatcccttattga

SEQ ID NO: 697380 - DNA, 19 bp, Mus musculus
  siRNA target sequence for Lbcl1 (NM_008487.1,754-772).
gactttgaggcggattctt

SEQ ID NO: 697381 - DNA, 19 bp, Mus musculus
  siRNA target sequence for Lbcl1 (NM_008487.1,871-889).
cacgtgagaaccttgaaga

SEQ ID NO: 697382 - DNA, 19 bp, Mus musculus
  siRNA target sequence for Lbcl1 (NM_008487.1,874-892).
gtgagaaccttgaagatta

SEQ ID NO: 697383 - DNA, 19 bp, Mus musculus
  siRNA target sequence for Lbcl1 (NM_008487.1,1049-1067).
gcacccggaactttgtcat

SEQ ID NO: 697384 - DNA, 19 bp, Mus musculus
  siRNA target sequence for Lbcl1 (NM_008487.1,1154-1172).
gccacaccaaggccttaaa

SEQ ID NO: 697385 - DNA, 19 bp, Mus musculus
  siRNA target sequence for Lbcl1 (NM_008487.1,1166-1184).
ccttaaagctctataagga

SEQ ID NO: 697386 - DNA, 19 bp, Mus musculus
  siRNA target sequence for Lbcl1 (NM_008487.1,1286-1304).
ctcagcggatcaccaaata

SEQ ID NO: 697387 - DNA, 19 bp, Mus musculus
  siRNA target sequence for Lbcl1 (NM_008487.1,1384-1402).
ctagtgaaggagttgttgt

SEQ ID NO: 697388 - DNA, 19 bp, Mus musculus
  siRNA target sequence for Lbcl1 (NM_008487.1,1445-1463).
gcctgcaggagatttacaa

SEQ ID NO: 697389 - DNA, 19 bp, Mus musculus
  siRNA target sequence for Lbcl1 (NM_008487.1,1455-1473).
gatttacaaccgaatggat

SEQ ID NO: 697390 - DNA, 19 bp, Mus musculus
  siRNA target sequence for Lbcl1 (NM_008487.1,1506-1524).
ccccttcggccgagatgaa

SEQ ID NO: 697391 - DNA, 19 bp, Mus musculus
  siRNA target sequence for Lbcl1 (NM_008487.1,1508-1526).
ccttcggccgagatgaact

SEQ ID NO: 697392 - DNA, 19 bp, Mus musculus
  siRNA target sequence for Lbcl1 (NM_008487.1,1512-1530).
cggccgagatgaactttta

SEQ ID NO: 697393 - DNA, 19 bp, Mus musculus
  siRNA target sequence for Lbcl1 (NM_008487.1,1698-1716).
cctcatcgtaagagacata

SEQ ID NO: 697394 - DNA, 19 bp, Mus musculus
  siRNA target sequence for Lbcl1 (NM_008487.1,1722-1740).
ccaggcgaaagggatgttt

SEQ ID NO: 697395 - DNA, 19 bp, Mus musculus
  siRNA target sequence for Lbcl1 (NM_008487.1,1726-1744).
gcgaaagggatgtttctga

SEQ ID NO: 697396 - DNA, 19 bp, Mus musculus
  siRNA target sequence for Lbcl1 (NM_008487.1,1727-1745).
cgaaagggatgtttctgat

SEQ ID NO: 697397 - DNA, 19 bp, Mus musculus
  siRNA target sequence for Lbcl1 (NM_008487.1,1751-1769).
ctggaccgcctgagatgta

SEQ ID NO: 697398 - DNA, 19 bp, Mus musculus
  siRNA target sequence for Lbcl1 (NM_008487.1,1754-1772).
gaccgcctgagatgtatga

SEQ ID NO: 697399 - DNA, 19 bp, Mus musculus
  siRNA target sequence for Llglh (NM_008502.1,58-76).
ccgcagcgcgagaagctta

SEQ ID NO: 697400 - DNA, 19 bp, Mus musculus
  siRNA target sequence for Llglh (NM_008502.1,59-77).
cgcagcgcgagaagcttaa

SEQ ID NO: 697401 - DNA, 19 bp, Mus musculus
  siRNA target sequence for Llglh (NM_008502.1,206-224).
gtgcacccggagtggaatt

SEQ ID NO: 697402 - DNA, 19 bp, Mus musculus
  siRNA target sequence for Llglh (NM_008502.1,208-226).
gcacccggagtggaattta

SEQ ID NO: 697403 - DNA, 19 bp, Mus musculus
  siRNA target sequence for Llglh (NM_008502.1,326-344).
gggagatcatccatcataa

SEQ ID NO: 697404 - DNA, 19 bp, Mus musculus
  siRNA target sequence for Llglh (NM_008502.1,327-345).
ggagatcatccatcataat

SEQ ID NO: 697405 - DNA, 19 bp, Mus musculus
  siRNA target sequence for Llglh (NM_008502.1,450-468).
gctcgtagctggcaataca

SEQ ID NO: 697406 - DNA, 19 bp, Mus musculus
  siRNA target sequence for Llglh (NM_008502.1,659-677).
gctacagtcggggtttact

SEQ ID NO: 697407 - DNA, 19 bp, Mus musculus
  siRNA target sequence for Llglh (NM_008502.1,700-718).
cagtctgtggacaacgttt

SEQ ID NO: 697408 - DNA, 19 bp, Mus musculus
  siRNA target sequence for Llglh (NM_008502.1,757-775).
cgtgatggcagcagcatta

SEQ ID NO: 697409 - DNA, 19 bp, Mus musculus
  siRNA target sequence for Llglh (NM_008502.1,877-895).
ccctgcaaggccatcaaca

SEQ ID NO: 697410 - DNA, 19 bp, Mus musculus
  siRNA target sequence for Llglh (NM_008502.1,920-938).
caggagaccactttatcat

SEQ ID NO: 697411 - DNA, 19 bp, Mus musculus
  siRNA target sequence for Llglh (NM_008502.1,922-940).
ggagaccactttatcatct

SEQ ID NO: 697412 - DNA, 19 bp, Mus musculus
  siRNA target sequence for Llglh (NM_008502.1,1415-1433).
cgctaaggccactctacaa

SEQ ID NO: 697413 - DNA, 19 bp, Mus musculus
  siRNA target sequence for Llglh (NM_008502.1,1455-1473).
ccagacggactgtgaacat

SEQ ID NO: 697414 - DNA, 19 bp, Mus musculus
  siRNA target sequence for Llglh (NM_008502.1,1576-1594).
gttgcgctttgcaagtaca

SEQ ID NO: 697415 - DNA, 19 bp, Mus musculus
  siRNA target sequence for Llglh (NM_008502.1,1682-1700).
ccaacgtggatcttcttca

SEQ ID NO: 697416 - DNA, 19 bp, Mus musculus
  siRNA target sequence for Llglh (NM_008502.1,1929-1947).
ccttcaccccaatgattct

SEQ ID NO: 697417 - DNA, 19 bp, Mus musculus
  siRNA target sequence for Llglh (NM_008502.1,2163-2181).
ctcgctctccggtgttgta

SEQ ID NO: 697418 - DNA, 19 bp, Mus musculus
  siRNA target sequence for Llglh (NM_008502.1,2348-2366).
gcaaggaggtgcagctaat

SEQ ID NO: 697419 - DNA, 19 bp, Mus musculus
  siRNA target sequence for Llglh (NM_008502.1,2494-2512).
gcatctgaggaacaattca

SEQ ID NO: 697420 - DNA, 19 bp, Mus musculus
  siRNA target sequence for Llglh (NM_008502.1,2495-2513).
catctgaggaacaattcaa

SEQ ID NO: 697421 - DNA, 19 bp, Mus musculus
  siRNA target sequence for Llglh (NM_008502.1,2529-2547).
caaggtgagtgctaagact

SEQ ID NO: 697422 - DNA, 19 bp, Mus musculus
  siRNA target sequence for Llglh (NM_008502.1,2768-2786).
gtcacggccagggctttta

SEQ ID NO: 697423 - DNA, 19 bp, Mus musculus
  siRNA target sequence for Llglh (NM_008502.1,2770-2788).
cacggccagggcttttact

SEQ ID NO: 697424 - DNA, 19 bp, Mus musculus
  siRNA target sequence for Llglh (NM_008502.1,2778-2796).
gggcttttacttgatttct

SEQ ID NO: 697425 - DNA, 19 bp, Mus musculus
  siRNA target sequence for Llglh (NM_008502.1,2790-2808).
gatttctccatcggaattt

SEQ ID NO: 697426 - DNA, 19 bp, Mus musculus
  siRNA target sequence for Llglh (NM_008502.1,2821-2839).
ctgagtgctcgcaacatca

SEQ ID NO: 697427 - DNA, 19 bp, Mus musculus
  siRNA target sequence for Llglh (NM_008502.1,2838-2856).
cacagaaccactatgttct

SEQ ID NO: 697428 - DNA, 19 bp, Mus musculus
  siRNA target sequence for Llglh (NM_008502.1,2990-3008).
gcaagcgagctgataccat

SEQ ID NO: 697429 - DNA, 19 bp, Mus musculus
  siRNA target sequence for Llglh (NM_008502.1,3030-3048).
ctcgcctgtgtccattgat

SEQ ID NO: 697430 - DNA, 19 bp, Mus musculus
  siRNA target sequence for Llglh (NM_008502.1,3033-3051).
gcctgtgtccattgattca

SEQ ID NO: 697431 - DNA, 19 bp, Mus musculus
  siRNA target sequence for Llglh (NM_008502.1,3086-3104).
gggatgtcaccgtggaata

SEQ ID NO: 697432 - DNA, 19 bp, Mus musculus
  siRNA target sequence for Llglh (NM_008502.1,3087-3105).
ggatgtcaccgtggaatat

SEQ ID NO: 697433 - DNA, 19 bp, Mus musculus
  siRNA target sequence for Lnk (NM_008507.2,970-988).
ggaggtccgaccatgtaca

SEQ ID NO: 697434 - DNA, 19 bp, Mus musculus
  siRNA target sequence for Lnk (NM_008507.2,1070-1088).
gaacagcagctgaactcat

SEQ ID NO: 697435 - DNA, 19 bp, Mus musculus
  siRNA target sequence for Lnk (NM_008507.2,1140-1158).
ccgagttacctctttcctt

SEQ ID NO: 697436 - DNA, 19 bp, Mus musculus
  siRNA target sequence for Lnk (NM_008507.2,1141-1159).
cgagttacctctttcctta

SEQ ID NO: 697437 - DNA, 19 bp, Mus musculus
  siRNA target sequence for Lnk (NM_008507.2,1241-1259).
gacccagcctgccagaaaa

SEQ ID NO: 697438 - DNA, 19 bp, Mus musculus
  siRNA target sequence for Lnk (NM_008507.2,1251-1269).
gccagaaaacagatcactt

SEQ ID NO: 697439 - DNA, 19 bp, Mus musculus
  siRNA target sequence for Lnk (NM_008507.2,1381-1399).
gtcccggagaggagagtat

SEQ ID NO: 697440 - DNA, 19 bp, Mus musculus
  siRNA target sequence for Lnk (NM_008507.2,1383-1401).
cccggagaggagagtatgt

SEQ ID NO: 697441 - DNA, 19 bp, Mus musculus
  siRNA target sequence for Lnk (NM_008507.2,1384-1402).
ccggagaggagagtatgta

SEQ ID NO: 697442 - DNA, 19 bp, Mus musculus
  siRNA target sequence for Lnk (NM_008507.2,1386-1404).
ggagaggagagtatgtact

SEQ ID NO: 697443 - DNA, 19 bp, Mus musculus
  siRNA target sequence for Lnk (NM_008507.2,1394-1412).
gagtatgtactcacattca

SEQ ID NO: 697444 - DNA, 19 bp, Mus musculus
  siRNA target sequence for Lnk (NM_008507.2,1491-1509).
cctcggtggtagatatgct

SEQ ID NO: 697445 - DNA, 19 bp, Mus musculus
  siRNA target sequence for Lnk (NM_008507.2,1823-1841).
cgggactcggactatgaca

SEQ ID NO: 697446 - DNA, 19 bp, Mus musculus
  siRNA target sequence for Lnk (NM_008507.2,1824-1842).
gggactcggactatgacat

SEQ ID NO: 697447 - DNA, 19 bp, Mus musculus
  siRNA target sequence for Lor (NM_008508.1,220-238).
cggaggcggtggttcctat

SEQ ID NO: 697448 - DNA, 19 bp, Mus musculus
  siRNA target sequence for Lor (NM_008508.1,862-880).
cggatcgtcccaacagtat

SEQ ID NO: 697449 - DNA, 19 bp, Mus musculus
  siRNA target sequence for Lrmp (NM_008511.2,496-514).
ctagactgtaccagaatga

SEQ ID NO: 697450 - DNA, 19 bp, Mus musculus
  siRNA target sequence for Lrmp (NM_008511.2,572-590).
cacagctcagggagtatct

SEQ ID NO: 697451 - DNA, 19 bp, Mus musculus
  siRNA target sequence for Lrmp (NM_008511.2,574-592).
cagctcagggagtatctca

SEQ ID NO: 697452 - DNA, 19 bp, Mus musculus
  siRNA target sequence for Lrmp (NM_008511.2,872-890).
gagagacggagatttccat

SEQ ID NO: 697453 - DNA, 19 bp, Mus musculus
  siRNA target sequence for Lrmp (NM_008511.2,980-998).
ggttatctttgggacttaa

SEQ ID NO: 697454 - DNA, 19 bp, Mus musculus
  siRNA target sequence for Lrmp (NM_008511.2,1353-1371).
gcagaacgacaggtctttt

SEQ ID NO: 697455 - DNA, 19 bp, Mus musculus
  siRNA target sequence for Lrmp (NM_008511.2,1387-1405).
gaagatgactgtcagatta

SEQ ID NO: 697456 - DNA, 19 bp, Mus musculus
  siRNA target sequence for Lrmp (NM_008511.2,1410-1428).
gcgttcatcttctctaaat

SEQ ID NO: 697457 - DNA, 19 bp, Mus musculus
  siRNA target sequence for Lrmp (NM_008511.2,1411-1429).
cgttcatcttctctaaatt

SEQ ID NO: 697458 - DNA, 19 bp, Mus musculus
  siRNA target sequence for Lrmp (NM_008511.2,1464-1482).
ctctttgcccaggaatctt

SEQ ID NO: 697459 - DNA, 19 bp, Mus musculus
  siRNA target sequence for Lrmp (NM_008511.2,1498-1516).
gtgtcaggcatggaaaata

SEQ ID NO: 697460 - DNA, 19 bp, Mus musculus
  siRNA target sequence for Lrmp (NM_008511.2,1500-1518).
gtcaggcatggaaaataat

SEQ ID NO: 697461 - DNA, 19 bp, Mus musculus
  siRNA target sequence for Lrmp (NM_008511.2,1594-1612).
cgcttcatcagcacctatt

SEQ ID NO: 697462 - DNA, 19 bp, Mus musculus
  siRNA target sequence for Lrmp (NM_008511.2,1826-1844).
ggctcacggggctcatcat

SEQ ID NO: 697463 - DNA, 19 bp, Mus musculus
  siRNA target sequence for Lrmp (NM_008511.2,1832-1850).
cggggctcatcatcatact

SEQ ID NO: 697464 - DNA, 19 bp, Mus musculus
  siRNA target sequence for Lrrfip1 (NM_008515.1,171-189).
cgcaaaacaaggaaatcga

SEQ ID NO: 697465 - DNA, 19 bp, Mus musculus
  siRNA target sequence for Lrrfip1 (NM_008515.1,295-313).
gcagaaagagatctatcaa

SEQ ID NO: 697466 - DNA, 19 bp, Mus musculus
  siRNA target sequence for Lrrfip1 (NM_008515.1,392-410).
cgtagattccggagaaaca

SEQ ID NO: 697467 - DNA, 19 bp, Mus musculus
  siRNA target sequence for Lrrfip1 (NM_008515.1,472-490).
cggttatgacggagactat

SEQ ID NO: 697468 - DNA, 19 bp, Mus musculus
  siRNA target sequence for Lrrfip1 (NM_008515.1,473-491).
ggttatgacggagactatt

SEQ ID NO: 697469 - DNA, 19 bp, Mus musculus
  siRNA target sequence for Lrrfip1 (NM_008515.1,500-518).
cagtccctaagtagaagat

SEQ ID NO: 697470 - DNA, 19 bp, Mus musculus
  siRNA target sequence for Lrrfip1 (NM_008515.1,502-520).
gtccctaagtagaagatct

SEQ ID NO: 697471 - DNA, 19 bp, Mus musculus
  siRNA target sequence for Lrrfip1 (NM_008515.1,985-1003).
ctcgctggccgaagttgaa

SEQ ID NO: 697472 - DNA, 19 bp, Mus musculus
  siRNA target sequence for Lrrfip1 (NM_008515.1,987-1005).
cgctggccgaagttgaaga

SEQ ID NO: 697473 - DNA, 19 bp, Mus musculus
  siRNA target sequence for Lrrfip1 (NM_008515.1,1296-1314).
ctgatcttcaggaaacgat

SEQ ID NO: 697474 - DNA, 19 bp, Mus musculus
  siRNA target sequence for Lrrfip1 (NM_008515.1,1301-1319).
cttcaggaaacgatagaat

SEQ ID NO: 697475 - DNA, 19 bp, Mus musculus
  siRNA target sequence for Lrrfip1 (NM_008515.1,1333-1351).
gataggggcattagaaaga

SEQ ID NO: 697476 - DNA, 19 bp, Mus musculus
  siRNA target sequence for Lrrfip1 (NM_008515.1,1358-1376).
gagttctttgattccataa

SEQ ID NO: 697477 - DNA, 19 bp, Mus musculus
  siRNA target sequence for Lrrfip1 (NM_008515.1,1566-1584).
ggaccctagacgttaggtt

SEQ ID NO: 697478 - DNA, 19 bp, Mus musculus
  siRNA target sequence for Lrrfip1 (NM_008515.1,1571-1589).
ctagacgttaggttgaaaa

SEQ ID NO: 697479 - DNA, 19 bp, Mus musculus
  siRNA target sequence for Lrrfip1 (NM_008515.1,1611-1629).
gtctgttggaacagattaa

SEQ ID NO: 697480 - DNA, 19 bp, Mus musculus
  siRNA target sequence for Lrrfip1 (NM_008515.1,1686-1704).
gagccgaggacggtatctt

SEQ ID NO: 697481 - DNA, 19 bp, Mus musculus
  siRNA target sequence for Lrrfip1 (NM_008515.1,1713-1731).
ggacagacgcgcatgtcat

SEQ ID NO: 697482 - DNA, 19 bp, Mus musculus
  siRNA target sequence for Lrrfip1 (NM_008515.1,1757-1775).
cagatcagcgacctcaaat

SEQ ID NO: 697483 - DNA, 19 bp, Mus musculus
  siRNA target sequence for Lrrfip1 (NM_008515.1,1762-1780).
cagcgacctcaaatttaaa

SEQ ID NO: 697484 - DNA, 19 bp, Mus musculus
  siRNA target sequence for Lrrfip1 (NM_008515.1,1764-1782).
gcgacctcaaatttaaact

SEQ ID NO: 697485 - DNA, 19 bp, Mus musculus
  siRNA target sequence for Lrrfip1 (NM_008515.1,1801-1819).
gataactgccttagaacaa

SEQ ID NO: 697486 - DNA, 19 bp, Mus musculus
  siRNA target sequence for Lrrfip1 (NM_008515.1,1808-1826).
gccttagaacaaaatgtaa

SEQ ID NO: 697487 - DNA, 19 bp, Mus musculus
  siRNA target sequence for Lrrfip1 (NM_008515.1,1809-1827).
ccttagaacaaaatgtaat

SEQ ID NO: 697488 - DNA, 19 bp, Mus musculus
  siRNA target sequence for Lrrfip1 (NM_008515.1,1841-1859).
caagtaacgcgctatcgat

SEQ ID NO: 697489 - DNA, 19 bp, Mus musculus
  siRNA target sequence for Lrrfip1 (NM_008515.1,1931-1949).
cgctctgcactggacaaaa

SEQ ID NO: 697490 - DNA, 19 bp, Mus musculus
  siRNA target sequence for Lrrn1 (NM_008516.1,756-774).
gtgctgggcttgctgataa

SEQ ID NO: 697491 - DNA, 19 bp, Mus musculus
  siRNA target sequence for Lrrn1 (NM_008516.1,759-777).
ctgggcttgctgataactt

SEQ ID NO: 697492 - DNA, 19 bp, Mus musculus
  siRNA target sequence for Lrrn1 (NM_008516.1,764-782).
cttgctgataacttcatta

SEQ ID NO: 697493 - DNA, 19 bp, Mus musculus
  siRNA target sequence for Lrrn1 (NM_008516.1,814-832).
cccagctttgtgtttgtga

SEQ ID NO: 697494 - DNA, 19 bp, Mus musculus
  siRNA target sequence for Lrrn1 (NM_008516.1,831-849).
gaaattcgtccttggttta

SEQ ID NO: 697495 - DNA, 19 bp, Mus musculus
  siRNA target sequence for Lrrn1 (NM_008516.1,875-893).
caccaccgtggattgtaat

SEQ ID NO: 697496 - DNA, 19 bp, Mus musculus
  siRNA target sequence for Lrrn1 (NM_008516.1,877-895).
ccaccgtggattgtaatga

SEQ ID NO: 697497 - DNA, 19 bp, Mus musculus
  siRNA target sequence for Lrrn1 (NM_008516.1,1031-1049).
caactttacaaacatcaaa

SEQ ID NO: 697498 - DNA, 19 bp, Mus musculus
  siRNA target sequence for Lrrn1 (NM_008516.1,1085-1103).
cctgcatctagaggaaaat

SEQ ID NO: 697499 - DNA, 19 bp, Mus musculus
  siRNA target sequence for Lrrn1 (NM_008516.1,1199-1217).
cgccttttctggcttgaaa

SEQ ID NO: 697500 - DNA, 19 bp, Mus musculus
  siRNA target sequence for Lrrn1 (NM_008516.1,1207-1225).
ctggcttgaaaaatctctt

SEQ ID NO: 697501 - DNA, 19 bp, Mus musculus
  siRNA target sequence for Lrrn1 (NM_008516.1,1233-1251).
cacctgaattccaataagt

SEQ ID NO: 697502 - DNA, 19 bp, Mus musculus
  siRNA target sequence for Lrrn1 (NM_008516.1,1236-1254).
ctgaattccaataagttga

SEQ ID NO: 697503 - DNA, 19 bp, Mus musculus
  siRNA target sequence for Lrrn1 (NM_008516.1,1262-1280).
cgatagccgctggtttgat

SEQ ID NO: 697504 - DNA, 19 bp, Mus musculus
  siRNA target sequence for Lrrn1 (NM_008516.1,1263-1281).
gatagccgctggtttgatt

SEQ ID NO: 697505 - DNA, 19 bp, Mus musculus
  siRNA target sequence for Lrrn1 (NM_008516.1,1416-1434).
gccttggtaggcttggata

SEQ ID NO: 697506 - DNA, 19 bp, Mus musculus
  siRNA target sequence for Lrrn1 (NM_008516.1,1437-1455).
ctcgagagcctgtctttct

SEQ ID NO: 697507 - DNA, 19 bp, Mus musculus
  siRNA target sequence for Lrrn1 (NM_008516.1,1439-1457).
cgagagcctgtctttctat

SEQ ID NO: 697508 - DNA, 19 bp, Mus musculus
  siRNA target sequence for Lrrn1 (NM_008516.1,1725-1743).
ccggctctagaaagcttaa

SEQ ID NO: 697509 - DNA, 19 bp, Mus musculus
  siRNA target sequence for Lrrn1 (NM_008516.1,1726-1744).
cggctctagaaagcttaat

SEQ ID NO: 697510 - DNA, 19 bp, Mus musculus
  siRNA target sequence for Lrrn1 (NM_008516.1,1731-1749).
ctagaaagcttaatgttga

SEQ ID NO: 697511 - DNA, 19 bp, Mus musculus
  siRNA target sequence for Lrrn1 (NM_008516.1,1734-1752).
gaaagcttaatgttgaaca

SEQ ID NO: 697512 - DNA, 19 bp, Mus musculus
  siRNA target sequence for Lrrn1 (NM_008516.1,1738-1756).
gcttaatgttgaacaacaa

SEQ ID NO: 697513 - DNA, 19 bp, Mus musculus
  siRNA target sequence for Lrrn1 (NM_008516.1,1739-1757).
cttaatgttgaacaacaat

SEQ ID NO: 697514 - DNA, 19 bp, Mus musculus
  siRNA target sequence for Lrrn1 (NM_008516.1,1768-1786).
ccgtgtaccaaaaaacagt

SEQ ID NO: 697515 - DNA, 19 bp, Mus musculus
  siRNA target sequence for Lrrn1 (NM_008516.1,1848-1866).
gtcatccactggatcaact

SEQ ID NO: 697516 - DNA, 19 bp, Mus musculus
  siRNA target sequence for Lrrn1 (NM_008516.1,1914-1932).
gccatgccaccggaataca

SEQ ID NO: 697517 - DNA, 19 bp, Mus musculus
  siRNA target sequence for Lrrn1 (NM_008516.1,1976-1994).
gcagtgcctcccgatgata

SEQ ID NO: 697518 - DNA, 19 bp, Mus musculus
  siRNA target sequence for Lrrn1 (NM_008516.1,2005-2023).
cattccctaatcatctaaa

SEQ ID NO: 697519 - DNA, 19 bp, Mus musculus
  siRNA target sequence for Lrrn1 (NM_008516.1,2094-2112).
gtcactcccattggaaata

SEQ ID NO: 697520 - DNA, 19 bp, Mus musculus
  siRNA target sequence for Lrrn1 (NM_008516.1,2128-2146).
ctctttcagacaaatacaa

SEQ ID NO: 697521 - DNA, 19 bp, Mus musculus
  siRNA target sequence for Lrrn1 (NM_008516.1,2160-2178).
ggcaccttggagatagcaa

SEQ ID NO: 697522 - DNA, 19 bp, Mus musculus
  siRNA target sequence for Lrrn1 (NM_008516.1,2161-2179).
gcaccttggagatagcaaa

SEQ ID NO: 697523 - DNA, 19 bp, Mus musculus
  siRNA target sequence for Lrrn1 (NM_008516.1,2165-2183).
cttggagatagcaaacata

SEQ ID NO: 697524 - DNA, 19 bp, Mus musculus
  siRNA target sequence for Lrrn1 (NM_008516.1,2242-2260).
ctcgagtggcaactatcaa

SEQ ID NO: 697525 - DNA, 19 bp, Mus musculus
  siRNA target sequence for Lrrn1 (NM_008516.1,2247-2265).
gtggcaactatcaaggtta

SEQ ID NO: 697526 - DNA, 19 bp, Mus musculus
  siRNA target sequence for Lrrn1 (NM_008516.1,2283-2301).
ggtgcacaggtgctgaaaa

SEQ ID NO: 697527 - DNA, 19 bp, Mus musculus
  siRNA target sequence for Lrrn1 (NM_008516.1,2284-2302).
gtgcacaggtgctgaaaat

SEQ ID NO: 697528 - DNA, 19 bp, Mus musculus
  siRNA target sequence for Lrrn1 (NM_008516.1,2286-2304).
gcacaggtgctgaaaatat

SEQ ID NO: 697529 - DNA, 19 bp, Mus musculus
  siRNA target sequence for Lrrn1 (NM_008516.1,2315-2333).
gacagaatctcattcgatt

SEQ ID NO: 697530 - DNA, 19 bp, Mus musculus
  siRNA target sequence for Lrrn1 (NM_008516.1,2325-2343).
cattcgattttagtatctt

SEQ ID NO: 697531 - DNA, 19 bp, Mus musculus
  siRNA target sequence for Lrrn1 (NM_008516.1,2361-2379).
gtcatgacatcgaacttga

SEQ ID NO: 697532 - DNA, 19 bp, Mus musculus
  siRNA target sequence for Lrrn1 (NM_008516.1,2383-2401).
ggtcatctgccactatgaa

SEQ ID NO: 697533 - DNA, 19 bp, Mus musculus
  siRNA target sequence for Lrrn1 (NM_008516.1,2405-2423).
cgacaacccccacataaca

SEQ ID NO: 697534 - DNA, 19 bp, Mus musculus
  siRNA target sequence for Lrrn1 (NM_008516.1,2411-2429).
cccccacataacatacaca

SEQ ID NO: 697535 - DNA, 19 bp, Mus musculus
  siRNA target sequence for Lrrn1 (NM_008516.1,2432-2450).
cagggtgccagtagatgtt

SEQ ID NO: 697536 - DNA, 19 bp, Mus musculus
  siRNA target sequence for Lrrn1 (NM_008516.1,2434-2452).
gggtgccagtagatgttca

SEQ ID NO: 697537 - DNA, 19 bp, Mus musculus
  siRNA target sequence for Lrrn1 (NM_008516.1,2435-2453).
ggtgccagtagatgttcat

SEQ ID NO: 697538 - DNA, 19 bp, Mus musculus
  siRNA target sequence for Lrrn1 (NM_008516.1,2438-2456).
gccagtagatgttcatgaa

SEQ ID NO: 697539 - DNA, 19 bp, Mus musculus
  siRNA target sequence for Lrrn1 (NM_008516.1,2439-2457).
ccagtagatgttcatgaat

SEQ ID NO: 697540 - DNA, 19 bp, Mus musculus
  siRNA target sequence for Lrrn1 (NM_008516.1,2440-2458).
cagtagatgttcatgaata

SEQ ID NO: 697541 - DNA, 19 bp, Mus musculus
  siRNA target sequence for Lrrn1 (NM_008516.1,2652-2670).
gcatccatcgctatttaca

SEQ ID NO: 697542 - DNA, 19 bp, Mus musculus
  siRNA target sequence for Lrrn1 (NM_008516.1,2653-2671).
catccatcgctatttacat

SEQ ID NO: 697543 - DNA, 19 bp, Mus musculus
  siRNA target sequence for Lrrn1 (NM_008516.1,2700-2718).
caccattcgctgaaaaagt

SEQ ID NO: 697544 - DNA, 19 bp, Mus musculus
  siRNA target sequence for Lrrn1 (NM_008516.1,2702-2720).
ccattcgctgaaaaagtat

SEQ ID NO: 697545 - DNA, 19 bp, Mus musculus
  siRNA target sequence for Lrrn1 (NM_008516.1,2703-2721).
cattcgctgaaaaagtata

SEQ ID NO: 697546 - DNA, 19 bp, Mus musculus
  siRNA target sequence for Lrrn1 (NM_008516.1,2753-2771).
gctgtaccccccactcatt

SEQ ID NO: 697547 - DNA, 19 bp, Mus musculus
  siRNA target sequence for Lrrn1 (NM_008516.1,2754-2772).
ctgtaccccccactcatta

SEQ ID NO: 697548 - DNA, 19 bp, Mus musculus
  siRNA target sequence for Lrrn1 (NM_008516.1,2838-2856).
gacacatccagaagctatt

SEQ ID NO: 697549 - DNA, 19 bp, Mus musculus
  siRNA target sequence for Klrb1b (NM_008526.1,59-77).
cactggtctatgcagattt

SEQ ID NO: 697550 - DNA, 19 bp, Mus musculus
  siRNA target sequence for Klrb1b (NM_008526.1,61-79).
ctggtctatgcagatttaa

SEQ ID NO: 697551 - DNA, 19 bp, Mus musculus
  siRNA target sequence for Klrb1b (NM_008526.1,66-84).
ctatgcagatttaaaccta

SEQ ID NO: 697552 - DNA, 19 bp, Mus musculus
  siRNA target sequence for Klrb1b (NM_008526.1,90-108).
gatccaagaacctaagcat

SEQ ID NO: 697553 - DNA, 19 bp, Mus musculus
  siRNA target sequence for Klrb1b (NM_008526.1,269-287).
gcgcggatgttcaagagaa

SEQ ID NO: 697554 - DNA, 19 bp, Mus musculus
  siRNA target sequence for Klrb1b (NM_008526.1,285-303).
gaacagaacacatacaaca

SEQ ID NO: 697555 - DNA, 19 bp, Mus musculus
  siRNA target sequence for Tacstd1 (NM_008532.1,523-541).
ggacctactggatcatcat

SEQ ID NO: 697556 - DNA, 19 bp, Mus musculus
  siRNA target sequence for Tacstd1 (NM_008532.1,526-544).
cctactggatcatcattga

SEQ ID NO: 697557 - DNA, 19 bp, Mus musculus
  siRNA target sequence for Tacstd1 (NM_008532.1,527-545).
ctactggatcatcattgaa

SEQ ID NO: 697558 - DNA, 19 bp, Mus musculus
  siRNA target sequence for Tacstd1 (NM_008532.1,608-626).
ggcgttcacatctcgatat

SEQ ID NO: 697559 - DNA, 19 bp, Mus musculus
  siRNA target sequence for Tacstd1 (NM_008532.1,609-627).
gcgttcacatctcgatata

SEQ ID NO: 697560 - DNA, 19 bp, Mus musculus
  siRNA target sequence for Tacstd1 (NM_008532.1,610-628).
cgttcacatctcgatataa

SEQ ID NO: 697561 - DNA, 19 bp, Mus musculus
  siRNA target sequence for Tacstd1 (NM_008532.1,619-637).
ctcgatataagctgaatca

SEQ ID NO: 697562 - DNA, 19 bp, Mus musculus
  siRNA target sequence for Tacstd1 (NM_008532.1,621-639).
cgatataagctgaatcaga

SEQ ID NO: 697563 - DNA, 19 bp, Mus musculus
  siRNA target sequence for Tacstd1 (NM_008532.1,622-640).
gatataagctgaatcagaa

SEQ ID NO: 697564 - DNA, 19 bp, Mus musculus
  siRNA target sequence for Tacstd1 (NM_008532.1,732-750).
gctgatgtggcttactatt

SEQ ID NO: 697565 - DNA, 19 bp, Mus musculus
  siRNA target sequence for Tacstd1 (NM_008532.1,768-786).
ggggagtccctgttccatt

SEQ ID NO: 697566 - DNA, 19 bp, Mus musculus
  siRNA target sequence for Tacstd1 (NM_008532.1,775-793).
ccctgttccattcttctaa

SEQ ID NO: 697567 - DNA, 19 bp, Mus musculus
  siRNA target sequence for Tacstd1 (NM_008532.1,777-795).
ctgttccattcttctaaga

SEQ ID NO: 697568 - DNA, 19 bp, Mus musculus
  siRNA target sequence for Tacstd1 (NM_008532.1,840-858).
gggcagactctgatttact

SEQ ID NO: 697569 - DNA, 19 bp, Mus musculus
  siRNA target sequence for Tacstd1 (NM_008532.1,841-859).
ggcagactctgatttacta

SEQ ID NO: 697570 - DNA, 19 bp, Mus musculus
  siRNA target sequence for Tacstd1 (NM_008532.1,851-869).
gatttactacgttgatgaa

SEQ ID NO: 697571 - DNA, 19 bp, Mus musculus
  siRNA target sequence for Tacstd1 (NM_008532.1,905-923).
cgggatcatcgctgtcatt

SEQ ID NO: 697572 - DNA, 19 bp, Mus musculus
  siRNA target sequence for Tacstd1 (NM_008532.1,952-970).
ggattgttgtcctggttat

SEQ ID NO: 697573 - DNA, 19 bp, Mus musculus
  siRNA target sequence for Tacstd1 (NM_008532.1,953-971).
gattgttgtcctggttata

SEQ ID NO: 697574 - DNA, 19 bp, Mus musculus
  siRNA target sequence for Tacstd1 (NM_008532.1,957-975).
gttgtcctggttatatcta

SEQ ID NO: 697575 - DNA, 19 bp, Mus musculus
  siRNA target sequence for Tacstd1 (NM_008532.1,1028-1046).
gatccacagagagcttaat

SEQ ID NO: 697576 - DNA, 19 bp, Mus musculus
  siRNA target sequence for Ascl2 (NM_008554.1,142-160).
gttcctcgcgagcactttt

SEQ ID NO: 697577 - DNA, 19 bp, Mus musculus
  siRNA target sequence for Ascl2 (NM_008554.1,145-163).
cctcgcgagcacttttcct

SEQ ID NO: 697578 - DNA, 19 bp, Mus musculus
  siRNA target sequence for Ascl2 (NM_008554.1,190-208).
gcccaggggctgaatgcaa

SEQ ID NO: 697579 - DNA, 19 bp, Mus musculus
  siRNA target sequence for Ascl2 (NM_008554.1,397-415).
cgcgtaaagctggtaaact

SEQ ID NO: 697580 - DNA, 19 bp, Mus musculus
  siRNA target sequence for Ascl2 (NM_008554.1,398-416).
gcgtaaagctggtaaactt

SEQ ID NO: 697581 - DNA, 19 bp, Mus musculus
  siRNA target sequence for Ascl2 (NM_008554.1,492-510).
ctccgcggtagagtacatt

SEQ ID NO: 697582 - DNA, 19 bp, Mus musculus
  siRNA target sequence for Mcpr (NM_008569.1,465-483).
ggaaagctggcagttaaga

SEQ ID NO: 697583 - DNA, 19 bp, Mus musculus
  siRNA target sequence for Mcpr (NM_008569.1,466-484).
gaaagctggcagttaagaa

SEQ ID NO: 697584 - DNA, 19 bp, Mus musculus
  siRNA target sequence for Mcpr (NM_008569.1,629-647).
cattgtggtgtgacttcat

SEQ ID NO: 697585 - DNA, 19 bp, Mus musculus
  siRNA target sequence for Mcpr (NM_008569.1,675-693).
ctataagagccatgaacta

SEQ ID NO: 697586 - DNA, 19 bp, Mus musculus
  siRNA target sequence for Mcpr (NM_008569.1,688-706).
gaactagagaaatgcatat

SEQ ID NO: 697587 - DNA, 19 bp, Mus musculus
  siRNA target sequence for Mcpr (NM_008569.1,715-733).
cagagttcatgtatgaaca

SEQ ID NO: 697588 - DNA, 19 bp, Mus musculus
  siRNA target sequence for Mcpr (NM_008569.1,740-758).
gcatagacgggaaggatta

SEQ ID NO: 697589 - DNA, 19 bp, Mus musculus
  siRNA target sequence for Mcpr (NM_008569.1,741-759).
catagacgggaaggattat

SEQ ID NO: 697590 - DNA, 19 bp, Mus musculus
  siRNA target sequence for Mcpr (NM_008569.1,747-765).
cgggaaggattatatagct

SEQ ID NO: 697591 - DNA, 19 bp, Mus musculus
  siRNA target sequence for Mcpr (NM_008569.1,773-791).
cttttcaggtggcaaatgt

SEQ ID NO: 697592 - DNA, 19 bp, Mus musculus
  siRNA target sequence for Mcpr (NM_008569.1,854-872).
gtctacctagagaaccttt

SEQ ID NO: 697593 - DNA, 19 bp, Mus musculus
  siRNA target sequence for Mcpr (NM_008569.1,863-881).
gagaacctttgcctactat

SEQ ID NO: 697594 - DNA, 19 bp, Mus musculus
  siRNA target sequence for Mcpr (NM_008569.1,865-883).
gaacctttgcctactatgt

SEQ ID NO: 697595 - DNA, 19 bp, Mus musculus
  siRNA target sequence for Mcpr (NM_008569.1,868-886).
cctttgcctactatgttca

SEQ ID NO: 697596 - DNA, 19 bp, Mus musculus
  siRNA target sequence for Mcpr (NM_008569.1,894-912).
gcacccactggatgagata

SEQ ID NO: 697597 - DNA, 19 bp, Mus musculus
  siRNA target sequence for Mcpr (NM_008569.1,909-927).
gataactccacttgtttgt

SEQ ID NO: 697598 - DNA, 19 bp, Mus musculus
  siRNA target sequence for Mcpr (NM_008569.1,926-944).
gtaaatccggaagtctttt

SEQ ID NO: 697599 - DNA, 19 bp, Mus musculus
  siRNA target sequence for Mcpr (NM_008569.1,947-965).
gctcatcacgggtacagta

SEQ ID NO: 697600 - DNA, 19 bp, Mus musculus
  siRNA target sequence for Mcpr (NM_008569.1,948-966).
ctcatcacgggtacagtat

SEQ ID NO: 697601 - DNA, 19 bp, Mus musculus
  siRNA target sequence for Mcpr (NM_008569.1,950-968).
catcacgggtacagtatgt

SEQ ID NO: 697602 - DNA, 19 bp, Mus musculus
  siRNA target sequence for Mcpr (NM_008569.1,953-971).
cacgggtacagtatgttgt

SEQ ID NO: 697603 - DNA, 19 bp, Mus musculus
  siRNA target sequence for Mcpr (NM_008569.1,956-974).
gggtacagtatgttgtaga

SEQ ID NO: 697604 - DNA, 19 bp, Mus musculus
  siRNA target sequence for Mcpr (NM_008569.1,1025-1043).
cctatgatgctgttcagaa

SEQ ID NO: 697605 - DNA, 19 bp, Mus musculus
  siRNA target sequence for Mcpr (NM_008569.1,1083-1101).
ggaagagaatgctgtttta

SEQ ID NO: 697606 - DNA, 19 bp, Mus musculus
  siRNA target sequence for Mcpr (NM_008569.1,1126-1144).
ctgcagaatgcaactacta

SEQ ID NO: 697607 - DNA, 19 bp, Mus musculus
  siRNA target sequence for Mcpr (NM_008569.1,1199-1217).
cttcgccgttccagaatta

SEQ ID NO: 697608 - DNA, 19 bp, Mus musculus
  siRNA target sequence for Mcpr (NM_008569.1,1203-1221).
gccgttccagaattactct

SEQ ID NO: 697609 - DNA, 19 bp, Mus musculus
  siRNA target sequence for Mcpr (NM_008569.1,1204-1222).
ccgttccagaattactctt

SEQ ID NO: 697610 - DNA, 19 bp, Mus musculus
  siRNA target sequence for Mcpr (NM_008569.1,1266-1284).
ctctcggtcgccttccatt

SEQ ID NO: 697611 - DNA, 19 bp, Mus musculus
  siRNA target sequence for Mcpr (NM_008569.1,1271-1289).
ggtcgccttccatttccaa

SEQ ID NO: 697612 - DNA, 19 bp, Mus musculus
  siRNA target sequence for Mcpr (NM_008569.1,1351-1369).
caaagattcaacctttcaa

SEQ ID NO: 697613 - DNA, 19 bp, Mus musculus
  siRNA target sequence for Mcpr (NM_008569.1,1409-1427).
ctccgagtggcagtttcaa

SEQ ID NO: 697614 - DNA, 19 bp, Mus musculus
  siRNA target sequence for Mcpr (NM_008569.1,1418-1436).
gcagtttcaacgactcatt

SEQ ID NO: 697615 - DNA, 19 bp, Mus musculus
  siRNA target sequence for Mcpr (NM_008569.1,1419-1437).
cagtttcaacgactcattt

SEQ ID NO: 697616 - DNA, 19 bp, Mus musculus
  siRNA target sequence for Mcpr (NM_008569.1,1466-1484).
ctgagctgtgcattgatca

SEQ ID NO: 697617 - DNA, 19 bp, Mus musculus
  siRNA target sequence for Mcpr (NM_008569.1,1470-1488).
gctgtgcattgatcactta

SEQ ID NO: 697618 - DNA, 19 bp, Mus musculus
  siRNA target sequence for Mcpr (NM_008569.1,1471-1489).
ctgtgcattgatcacttat

SEQ ID NO: 697619 - DNA, 19 bp, Mus musculus
  siRNA target sequence for Mcpr (NM_008569.1,1493-1511).
ctgagacacttccgaatat

SEQ ID NO: 697620 - DNA, 19 bp, Mus musculus
  siRNA target sequence for Mcpr (NM_008569.1,1495-1513).
gagacacttccgaatataa

SEQ ID NO: 697621 - DNA, 19 bp, Mus musculus
  siRNA target sequence for Mcpr (NM_008569.1,1499-1517).
cacttccgaatataagaga

SEQ ID NO: 697622 - DNA, 19 bp, Mus musculus
  siRNA target sequence for Mcpr (NM_008569.1,1504-1522).
ccgaatataagagagaaaa

SEQ ID NO: 697623 - DNA, 19 bp, Mus musculus
  siRNA target sequence for Mcpr (NM_008569.1,1531-1549).
gcctccaaggtatttataa

SEQ ID NO: 697624 - DNA, 19 bp, Mus musculus
  siRNA target sequence for Mcpr (NM_008569.1,1590-1608).
ggaggcccagcttcagtta

SEQ ID NO: 697625 - DNA, 19 bp, Mus musculus
  siRNA target sequence for Mcpr (NM_008569.1,1600-1618).
cttcagttacgctgtgtaa

SEQ ID NO: 697626 - DNA, 19 bp, Mus musculus
  siRNA target sequence for Mcpr (NM_008569.1,1765-1783).
cgggtggggaaagtcttta

SEQ ID NO: 697627 - DNA, 19 bp, Mus musculus
  siRNA target sequence for Mcpr (NM_008569.1,1865-1883).
caaagcctctgagtaaatt

SEQ ID NO: 697628 - DNA, 19 bp, Mus musculus
  siRNA target sequence for Mcpr (NM_008569.1,1924-1942).
ccagaattgagggattctt

SEQ ID NO: 697629 - DNA, 19 bp, Mus musculus
  siRNA target sequence for Mcpr (NM_008569.1,1927-1945).
gaattgagggattcttcaa

SEQ ID NO: 697630 - DNA, 19 bp, Mus musculus
  siRNA target sequence for Mcpr (NM_008569.1,1932-1950).
gagggattcttcaaaactt

SEQ ID NO: 697631 - DNA, 19 bp, Mus musculus
  siRNA target sequence for Mcpr (NM_008569.1,1943-1961).
caaaacttaatgattctct

SEQ ID NO: 697632 - DNA, 19 bp, Mus musculus
  siRNA target sequence for Mcpr (NM_008569.1,1984-2002).
cagcagcttggaacttaca

SEQ ID NO: 697633 - DNA, 19 bp, Mus musculus
  siRNA target sequence for Mcpr (NM_008569.1,1989-2007).
gcttggaacttacattcat

SEQ ID NO: 697634 - DNA, 19 bp, Mus musculus
  siRNA target sequence for Mcpr (NM_008569.1,2014-2032).
cgagaccctgttcataaca

SEQ ID NO: 697635 - DNA, 19 bp, Mus musculus
  siRNA target sequence for Mcpr (NM_008569.1,2060-2078).
ccatggttcggatcactat

SEQ ID NO: 697636 - DNA, 19 bp, Mus musculus
  siRNA target sequence for Mcpr (NM_008569.1,2088-2106).
ggccacctcggaattagta

SEQ ID NO: 697637 - DNA, 19 bp, Mus musculus
  siRNA target sequence for Mcpr (NM_008569.1,2090-2108).
ccacctcggaattagtaca

SEQ ID NO: 697638 - DNA, 19 bp, Mus musculus
  siRNA target sequence for Mcpr (NM_008569.1,2091-2109).
cacctcggaattagtacaa

SEQ ID NO: 697639 - DNA, 19 bp, Mus musculus
  siRNA target sequence for Mcpr (NM_008569.1,2111-2129).
cgtgtctgcaagcaattaa

SEQ ID NO: 697640 - DNA, 19 bp, Mus musculus
  siRNA target sequence for Mcpr (NM_008569.1,2114-2132).
gtctgcaagcaattaagtt

SEQ ID NO: 697641 - DNA, 19 bp, Mus musculus
  siRNA target sequence for Mcpr (NM_008569.1,2116-2134).
ctgcaagcaattaagttca

SEQ ID NO: 697642 - DNA, 19 bp, Mus musculus
  siRNA target sequence for Mcpr (NM_008569.1,2163-2181).
gctcgtcaagtggtacaat

SEQ ID NO: 697643 - DNA, 19 bp, Mus musculus
  siRNA target sequence for Mcpr (NM_008569.1,2233-2251).
gtgatttgtctcttgaaca

SEQ ID NO: 697644 - DNA, 19 bp, Mus musculus
  siRNA target sequence for Mcpr (NM_008569.1,2250-2268).
catgatgggttataacaca

SEQ ID NO: 697645 - DNA, 19 bp, Mus musculus
  siRNA target sequence for Mcpr (NM_008569.1,2279-2297).
catggacccgaagttttga

SEQ ID NO: 697646 - DNA, 19 bp, Mus musculus
  siRNA target sequence for Mcpr (NM_008569.1,2282-2300).
ggacccgaagttttgactt

SEQ ID NO: 697647 - DNA, 19 bp, Mus musculus
  siRNA target sequence for Mcpr (NM_008569.1,2283-2301).
gacccgaagttttgacttt

SEQ ID NO: 697648 - DNA, 19 bp, Mus musculus
  siRNA target sequence for Mcpr (NM_008569.1,2364-2382).
cgaggactgggagtactta

SEQ ID NO: 697649 - DNA, 19 bp, Mus musculus
  siRNA target sequence for Mcpr (NM_008569.1,2368-2386).
gactgggagtacttactga

SEQ ID NO: 697650 - DNA, 19 bp, Mus musculus
  siRNA target sequence for Mcpr (NM_008569.1,2407-2425).
gttgagtctcatcttttga

SEQ ID NO: 697651 - DNA, 19 bp, Mus musculus
  siRNA target sequence for Mcpr (NM_008569.1,2412-2430).
gtctcatcttttgaacaaa

SEQ ID NO: 697652 - DNA, 19 bp, Mus musculus
  siRNA target sequence for Mcpr (NM_008569.1,2427-2445).
caaatctctatgtttgact

SEQ ID NO: 697653 - DNA, 19 bp, Mus musculus
  siRNA target sequence for Mcpr (NM_008569.1,2511-2529).
ccttctctttgctcacatt

SEQ ID NO: 697654 - DNA, 19 bp, Mus musculus
  siRNA target sequence for Mcpr (NM_008569.1,2568-2586).
gctcaagttgaatactcta

SEQ ID NO: 697655 - DNA, 19 bp, Mus musculus
  siRNA target sequence for Mcpr (NM_008569.1,2584-2602).
ctaatgggagaaggaattt

SEQ ID NO: 697656 - DNA, 19 bp, Mus musculus
  siRNA target sequence for Mcpr (NM_008569.1,2654-2672).
cttacttggaccattacta

SEQ ID NO: 697657 - DNA, 19 bp, Mus musculus
  siRNA target sequence for Mcpr (NM_008569.1,2683-2701).
ccaactcttgtcaaaacca

SEQ ID NO: 697658 - DNA, 19 bp, Mus musculus
  siRNA target sequence for Mcpr (NM_008569.1,2694-2712).
caaaaccactggacaagta

SEQ ID NO: 697659 - DNA, 19 bp, Mus musculus
  siRNA target sequence for Mcpr (NM_008569.1,2729-2747).
gtcagatgggatttatgca

SEQ ID NO: 697660 - DNA, 19 bp, Mus musculus
  siRNA target sequence for Mcpr (NM_008569.1,2745-2763).
gcatcatcccccatttttt

SEQ ID NO: 697661 - DNA, 19 bp, Mus musculus
  siRNA target sequence for Mcpr (NM_008569.1,2768-2786).
ctgagccaccaagtattta

SEQ ID NO: 697662 - DNA, 19 bp, Mus musculus
  siRNA target sequence for Mcpr (NM_008569.1,2819-2837).
ggatgccaccctatcctta

SEQ ID NO: 697663 - DNA, 19 bp, Mus musculus
  siRNA target sequence for Mcpr (NM_008569.1,2823-2841).
gccaccctatccttacctt

SEQ ID NO: 697664 - DNA, 19 bp, Mus musculus
  siRNA target sequence for Mcpr (NM_008569.1,2927-2945).
cttgccagtacttatccaa

SEQ ID NO: 697665 - DNA, 19 bp, Mus musculus
  siRNA target sequence for Mcpr (NM_008569.1,3050-3068).
ggatggccagtgtaggatt

SEQ ID NO: 697666 - DNA, 19 bp, Mus musculus
  siRNA target sequence for Mcpr (NM_008569.1,3055-3073).
gccagtgtaggattcactt

SEQ ID NO: 697667 - DNA, 19 bp, Mus musculus
  siRNA target sequence for Mcpr (NM_008569.1,3188-3206).
gacgtcaggatctttccaa

SEQ ID NO: 697668 - DNA, 19 bp, Mus musculus
  siRNA target sequence for Mcpr (NM_008569.1,3309-3327).
gaaccatgaggttatgtca

SEQ ID NO: 697669 - DNA, 19 bp, Mus musculus
  siRNA target sequence for Mcpr (NM_008569.1,3312-3330).
ccatgaggttatgtcatta

SEQ ID NO: 697670 - DNA, 19 bp, Mus musculus
  siRNA target sequence for Mcpr (NM_008569.1,3313-3331).
catgaggttatgtcattaa

SEQ ID NO: 697671 - DNA, 19 bp, Mus musculus
  siRNA target sequence for Mcpr (NM_008569.1,3361-3379).
gtgcgaaggctgcttcaaa

SEQ ID NO: 697672 - DNA, 19 bp, Mus musculus
  siRNA target sequence for Mcpr (NM_008569.1,3494-3512).
cagtaggacgaggaatgtt

SEQ ID NO: 697673 - DNA, 19 bp, Mus musculus
  siRNA target sequence for Mcpr (NM_008569.1,3496-3514).
gtaggacgaggaatgttta

SEQ ID NO: 697674 - DNA, 19 bp, Mus musculus
  siRNA target sequence for Mcpr (NM_008569.1,3499-3517).
ggacgaggaatgtttacct

SEQ ID NO: 697675 - DNA, 19 bp, Mus musculus
  siRNA target sequence for Mcpr (NM_008569.1,3500-3518).
gacgaggaatgtttacctt

SEQ ID NO: 697676 - DNA, 19 bp, Mus musculus
  siRNA target sequence for Mcpr (NM_008569.1,3546-3564).
gccgttgcctgttcctaaa

SEQ ID NO: 697677 - DNA, 19 bp, Mus musculus
  siRNA target sequence for Mcpr (NM_008569.1,3547-3565).
ccgttgcctgttcctaaat

SEQ ID NO: 697678 - DNA, 19 bp, Mus musculus
  siRNA target sequence for Mcpr (NM_008569.1,3548-3566).
cgttgcctgttcctaaatt

SEQ ID NO: 697679 - DNA, 19 bp, Mus musculus
  siRNA target sequence for Mcpr (NM_008569.1,3554-3572).
ctgttcctaaattgaatct

SEQ ID NO: 697680 - DNA, 19 bp, Mus musculus
  siRNA target sequence for Mcpr (NM_008569.1,3583-3601).
gcccctccacgaaacacaa

SEQ ID NO: 697681 - DNA, 19 bp, Mus musculus
  siRNA target sequence for Mcpr (NM_008569.1,3651-3669).
ctgggccagctttcataat

SEQ ID NO: 697682 - DNA, 19 bp, Mus musculus
  siRNA target sequence for Mcpr (NM_008569.1,3697-3715).
ccagcctcccagatagact

SEQ ID NO: 697683 - DNA, 19 bp, Mus musculus
  siRNA target sequence for Mcpr (NM_008569.1,3718-3736).
gcttggatcgtttacaaca

SEQ ID NO: 697684 - DNA, 19 bp, Mus musculus
  siRNA target sequence for Mcpr (NM_008569.1,3719-3737).
cttggatcgtttacaacaa

SEQ ID NO: 697685 - DNA, 19 bp, Mus musculus
  siRNA target sequence for Mcpr (NM_008569.1,3748-3766).
gctgagttagccaatgagt

SEQ ID NO: 697686 - DNA, 19 bp, Mus musculus
  siRNA target sequence for Mcpr (NM_008569.1,3780-3798).
catggccctgggtctgaat

SEQ ID NO: 697687 - DNA, 19 bp, Mus musculus
  siRNA target sequence for Mcpr (NM_008569.1,3816-3834).
ggctactctcaatatccat

SEQ ID NO: 697688 - DNA, 19 bp, Mus musculus
  siRNA target sequence for Mcpr (NM_008569.1,3821-3839).
ctctcaatatccatgacta

SEQ ID NO: 697689 - DNA, 19 bp, Mus musculus
  siRNA target sequence for Mcpr (NM_008569.1,3823-3841).
ctcaatatccatgactatt

SEQ ID NO: 697690 - DNA, 19 bp, Mus musculus
  siRNA target sequence for Mcpr (NM_008569.1,3978-3996).
gcttgacgtgcctcacaat

SEQ ID NO: 697691 - DNA, 19 bp, Mus musculus
  siRNA target sequence for Mcpr (NM_008569.1,4094-4112).
ctggtccagaaatggaata

SEQ ID NO: 697692 - DNA, 19 bp, Mus musculus
  siRNA target sequence for Mcpr (NM_008569.1,4096-4114).
ggtccagaaatggaatact

SEQ ID NO: 697693 - DNA, 19 bp, Mus musculus
  siRNA target sequence for Mcpr (NM_008569.1,4154-4172).
ccctgggcatggtttgctt

SEQ ID NO: 697694 - DNA, 19 bp, Mus musculus
  siRNA target sequence for Mcpr (NM_008569.1,4175-4193).
ggcatggcagcaatttgat

SEQ ID NO: 697695 - DNA, 19 bp, Mus musculus
  siRNA target sequence for Mcpr (NM_008569.1,4176-4194).
gcatggcagcaatttgatt

SEQ ID NO: 697696 - DNA, 19 bp, Mus musculus
  siRNA target sequence for Mcpr (NM_008569.1,4244-4262).
gaggccataggcgatttca

SEQ ID NO: 697697 - DNA, 19 bp, Mus musculus
  siRNA target sequence for Mcpr (NM_008569.1,4246-4264).
ggccataggcgatttcaaa

SEQ ID NO: 697698 - DNA, 19 bp, Mus musculus
  siRNA target sequence for Mcpr (NM_008569.1,4248-4266).
ccataggcgatttcaaact

SEQ ID NO: 697699 - DNA, 19 bp, Mus musculus
  siRNA target sequence for Mcpr (NM_008569.1,4355-4373).
ctctggcgttggctatgat

SEQ ID NO: 697700 - DNA, 19 bp, Mus musculus
  siRNA target sequence for Mcpr (NM_008569.1,4357-4375).
ctggcgttggctatgatct

SEQ ID NO: 697701 - DNA, 19 bp, Mus musculus
  siRNA target sequence for Mcpr (NM_008569.1,4360-4378).
gcgttggctatgatctact

SEQ ID NO: 697702 - DNA, 19 bp, Mus musculus
  siRNA target sequence for Mcpr (NM_008569.1,4361-4379).
cgttggctatgatctactt

SEQ ID NO: 697703 - DNA, 19 bp, Mus musculus
  siRNA target sequence for Mcpr (NM_008569.1,4371-4389).
gatctacttaaaaaccaat

SEQ ID NO: 697704 - DNA, 19 bp, Mus musculus
  siRNA target sequence for Mcpr (NM_008569.1,4421-4439).
ctgataccatgtatttgct

SEQ ID NO: 697705 - DNA, 19 bp, Mus musculus
  siRNA target sequence for Mcpr (NM_008569.1,4504-4522).
gatatcttaccaaattcca

SEQ ID NO: 697706 - DNA, 19 bp, Mus musculus
  siRNA target sequence for Mcpr (NM_008569.1,4533-4551).
cagcaatgttcctcagatt

SEQ ID NO: 697707 - DNA, 19 bp, Mus musculus
  siRNA target sequence for Mcpr (NM_008569.1,4535-4553).
gcaatgttcctcagattat

SEQ ID NO: 697708 - DNA, 19 bp, Mus musculus
  siRNA target sequence for Mcpr (NM_008569.1,4571-4589).
ctctgagtgaaattgaatt

SEQ ID NO: 697709 - DNA, 19 bp, Mus musculus
  siRNA target sequence for Mcpr (NM_008569.1,4625-4643).
cgcaagcacacgtctacat

SEQ ID NO: 697710 - DNA, 19 bp, Mus musculus
  siRNA target sequence for Mcpr (NM_008569.1,4627-4645).
caagcacacgtctacatca

SEQ ID NO: 697711 - DNA, 19 bp, Mus musculus
  siRNA target sequence for Mcpr (NM_008569.1,4662-4680).
gtctctagggtttcgattt

SEQ ID NO: 697712 - DNA, 19 bp, Mus musculus
  siRNA target sequence for Mcpr (NM_008569.1,4681-4699).
gctggctcagaaaacttat

SEQ ID NO: 697713 - DNA, 19 bp, Mus musculus
  siRNA target sequence for Mcpr (NM_008569.1,4726-4744).
gcaaaagattttatgaatt

SEQ ID NO: 697714 - DNA, 19 bp, Mus musculus
  siRNA target sequence for Mcpr (NM_008569.1,4753-4771).
gcacccaatgcttctgtaa

SEQ ID NO: 697715 - DNA, 19 bp, Mus musculus
  siRNA target sequence for Mcpr (NM_008569.1,4766-4784).
ctgtaacagggccctataa

SEQ ID NO: 697716 - DNA, 19 bp, Mus musculus
  siRNA target sequence for Mcpr (NM_008569.1,5040-5058).
cactgacaaccggtatcat

SEQ ID NO: 697717 - DNA, 19 bp, Mus musculus
  siRNA target sequence for Mcpr (NM_008569.1,5066-5084).
cccttcggcacctctatgt

SEQ ID NO: 697718 - DNA, 19 bp, Mus musculus
  siRNA target sequence for Mcpr (NM_008569.1,5113-5131).
cctgtggatgtggatacaa

SEQ ID NO: 697719 - DNA, 19 bp, Mus musculus
  siRNA target sequence for Mcpr (NM_008569.1,5114-5132).
ctgtggatgtggatacaaa

SEQ ID NO: 697720 - DNA, 19 bp, Mus musculus
  siRNA target sequence for Mcpr (NM_008569.1,5142-5160).
ctatgcccttatagaagtt

SEQ ID NO: 697721 - DNA, 19 bp, Mus musculus
  siRNA target sequence for Mcpr (NM_008569.1,5146-5164).
gcccttatagaagttactt

SEQ ID NO: 697722 - DNA, 19 bp, Mus musculus
  siRNA target sequence for Mcpr (NM_008569.1,5171-5189).
gcactcagtggtatgaaca

SEQ ID NO: 697723 - DNA, 19 bp, Mus musculus
  siRNA target sequence for Mcpr (NM_008569.1,5224-5242).
ccagaacttcatcttttaa

SEQ ID NO: 697724 - DNA, 19 bp, Mus musculus
  siRNA target sequence for Mcpr (NM_008569.1,5271-5289).
ctgggaactgctcatagat

SEQ ID NO: 697725 - DNA, 19 bp, Mus musculus
  siRNA target sequence for Mcpr (NM_008569.1,5274-5292).
ggaactgctcatagattta

SEQ ID NO: 697726 - DNA, 19 bp, Mus musculus
  siRNA target sequence for Mcpr (NM_008569.1,5275-5293).
gaactgctcatagatttaa

SEQ ID NO: 697727 - DNA, 19 bp, Mus musculus
  siRNA target sequence for Mcpr (NM_008569.1,5307-5325).
gcacttgaggtctattctt

SEQ ID NO: 697728 - DNA, 19 bp, Mus musculus
  siRNA target sequence for Mcpr (NM_008569.1,5327-5345).
cgaaggatggagttttata

SEQ ID NO: 697729 - DNA, 19 bp, Mus musculus
  siRNA target sequence for Mcpr (NM_008569.1,5328-5346).
gaaggatggagttttatat

SEQ ID NO: 697730 - DNA, 19 bp, Mus musculus
  siRNA target sequence for Mcpr (NM_008569.1,5363-5381).
gacagctctcctacaaaga

SEQ ID NO: 697731 - DNA, 19 bp, Mus musculus
  siRNA target sequence for Mcpr (NM_008569.1,5400-5418).
gagtttgttggcacaaact

SEQ ID NO: 697732 - DNA, 19 bp, Mus musculus
  siRNA target sequence for Mcpr (NM_008569.1,5409-5427).
ggcacaaactgttgctaat

SEQ ID NO: 697733 - DNA, 19 bp, Mus musculus
  siRNA target sequence for Mcpr (NM_008569.1,5445-5463).
ggctttcaagcctgaaaca

SEQ ID NO: 697734 - DNA, 19 bp, Mus musculus
  siRNA target sequence for Mcpr (NM_008569.1,5447-5465).
ctttcaagcctgaaacaat

SEQ ID NO: 697735 - DNA, 19 bp, Mus musculus
  siRNA target sequence for Mcpr (NM_008569.1,5556-5574).
ggacctcttttcttcgata

SEQ ID NO: 697736 - DNA, 19 bp, Mus musculus
  siRNA target sequence for Mcpr (NM_008569.1,5607-5625).
gatgttgcctgcctacata

SEQ ID NO: 697737 - DNA, 19 bp, Mus musculus
  siRNA target sequence for Mcpr (NM_008569.1,5667-5685).
gtcagacacatctgatctt

SEQ ID NO: 697738 - DNA, 19 bp, Mus musculus
  siRNA target sequence for Mcpr (NM_008569.1,5688-5706).
gcagataaagttgatatta

SEQ ID NO: 697739 - DNA, 19 bp, Mus musculus
  siRNA target sequence for Mcpr (NM_008569.1,5733-5751).
ggataggcagcatacctat

SEQ ID NO: 697740 - DNA, 19 bp, Mus musculus
  siRNA target sequence for Mcpr (NM_008569.1,5738-5756).
ggcagcatacctatcctaa

SEQ ID NO: 697741 - DNA, 19 bp, Mus musculus
  siRNA target sequence for Mcpr (NM_008569.1,5753-5771).
ctaagcgagggctcttcat

SEQ ID NO: 697742 - DNA, 19 bp, Mus musculus
  siRNA target sequence for Mcpr (NM_008569.1,5757-5775).
gcgagggctcttcataaat

SEQ ID NO: 697743 - DNA, 19 bp, Mus musculus
  siRNA target sequence for Mcpr (NM_008569.1,5758-5776).
cgagggctcttcataaatt

SEQ ID NO: 697744 - DNA, 19 bp, Mus musculus
  siRNA target sequence for Mcpr (NM_008569.1,5793-5811).
ggtgaagtgcactgttgat

SEQ ID NO: 697745 - DNA, 19 bp, Mus musculus
  siRNA target sequence for Mcpr (NM_008569.1,5870-5888).
gtgggcagcctgttgagaa

SEQ ID NO: 697746 - DNA, 19 bp, Mus musculus
  siRNA target sequence for Mcpr (NM_008569.1,5884-5902).
gagaagtctcagctaaaca

SEQ ID NO: 697747 - DNA, 19 bp, Mus musculus
  siRNA target sequence for Mcpr (NM_008569.1,6021-6039).
gcccgtccgggctttgcta

SEQ ID NO: 697748 - DNA, 19 bp, Mus musculus
  siRNA target sequence for Mcpr (NM_008569.1,6022-6040).
cccgtccgggctttgctaa

SEQ ID NO: 697749 - DNA, 19 bp, Mus musculus
  siRNA target sequence for Mesp1 (NM_008588.1,760-778).
cgacatgctggctcttcta

SEQ ID NO: 697750 - DNA, 19 bp, Mus musculus
  siRNA target sequence for Mesp2 (NM_008589.1,742-760).
ctgggatcagccatgagta

SEQ ID NO: 697751 - DNA, 19 bp, Mus musculus
  siRNA target sequence for Mesp2 (NM_008589.1,852-870).
ggtgacacctccttattgt

SEQ ID NO: 697752 - DNA, 19 bp, Mus musculus
  siRNA target sequence for Mesp2 (NM_008589.1,1016-1034).
cagagctgactaaagtgta

SEQ ID NO: 697753 - DNA, 19 bp, Mus musculus
  siRNA target sequence for Mesp2 (NM_008589.1,1021-1039).
ctgactaaagtgtatcaga

SEQ ID NO: 697754 - DNA, 19 bp, Mus musculus
  siRNA target sequence for Mesp2 (NM_008589.1,1290-1308).
ggaaggacccccactgaat

SEQ ID NO: 697755 - DNA, 19 bp, Mus musculus
  siRNA target sequence for Mesp2 (NM_008589.1,1291-1309).
gaaggacccccactgaata

SEQ ID NO: 697756 - DNA, 19 bp, Mus musculus
  siRNA target sequence for Mor1 (NM_008617.2,140-158).
gcacttcggcccagaacaa

SEQ ID NO: 697757 - DNA, 19 bp, Mus musculus
  siRNA target sequence for Mor1 (NM_008617.2,141-159).
cacttcggcccagaacaat

SEQ ID NO: 697758 - DNA, 19 bp, Mus musculus
  siRNA target sequence for Mor1 (NM_008617.2,301-319).
gagaccagagcaaatgtga

SEQ ID NO: 697759 - DNA, 19 bp, Mus musculus
  siRNA target sequence for Mor1 (NM_008617.2,346-364).
ccagattgcctcaaaggtt

SEQ ID NO: 697760 - DNA, 19 bp, Mus musculus
  siRNA target sequence for Mor1 (NM_008617.2,413-431).
cacgggatgacctgttcaa

SEQ ID NO: 697761 - DNA, 19 bp, Mus musculus
  siRNA target sequence for Mor1 (NM_008617.2,485-503).
ctgaagccatggtttgcat

SEQ ID NO: 697762 - DNA, 19 bp, Mus musculus
  siRNA target sequence for Mor1 (NM_008617.2,722-740).
gtaccccgaaggttgactt

SEQ ID NO: 697763 - DNA, 19 bp, Mus musculus
  siRNA target sequence for Mor1 (NM_008617.2,931-949).
gagacggaatgcacttact

SEQ ID NO: 697764 - DNA, 19 bp, Mus musculus
  siRNA target sequence for Mor1 (NM_008617.2,937-955).
gaatgcacttacttctcta

SEQ ID NO: 697765 - DNA, 19 bp, Mus musculus
  siRNA target sequence for Mor1 (NM_008617.2,1004-1022).
gcaagatcactccttttga

SEQ ID NO: 697766 - DNA, 19 bp, Mus musculus
  siRNA target sequence for Mor2 (NM_008618.2,134-152).
gctggtcaaattgcatatt

SEQ ID NO: 697767 - DNA, 19 bp, Mus musculus
  siRNA target sequence for Mor2 (NM_008618.2,146-164).
gcatattcactgttgtaca

SEQ ID NO: 697768 - DNA, 19 bp, Mus musculus
  siRNA target sequence for Mor2 (NM_008618.2,155-173).
ctgttgtacagtattggaa

SEQ ID NO: 697769 - DNA, 19 bp, Mus musculus
  siRNA target sequence for Mor2 (NM_008618.2,157-175).
gttgtacagtattggaaat

SEQ ID NO: 697770 - DNA, 19 bp, Mus musculus
  siRNA target sequence for Mor2 (NM_008618.2,160-178).
gtacagtattggaaatgga

SEQ ID NO: 697771 - DNA, 19 bp, Mus musculus
  siRNA target sequence for Mor2 (NM_008618.2,190-208).
gaaagaccagcccatcatt

SEQ ID NO: 697772 - DNA, 19 bp, Mus musculus
  siRNA target sequence for Mor2 (NM_008618.2,435-453).
gcacagccttggagaaata

SEQ ID NO: 697773 - DNA, 19 bp, Mus musculus
  siRNA target sequence for Mor2 (NM_008618.2,445-463).
ggagaaatacgccaagaaa

SEQ ID NO: 697774 - DNA, 19 bp, Mus musculus
  siRNA target sequence for Mor2 (NM_008618.2,448-466).
gaaatacgccaagaaatca

SEQ ID NO: 697775 - DNA, 19 bp, Mus musculus
  siRNA target sequence for Mor2 (NM_008618.2,456-474).
ccaagaaatcagttaaggt

SEQ ID NO: 697776 - DNA, 19 bp, Mus musculus
  siRNA target sequence for Mor2 (NM_008618.2,485-503).
ggaaacccagccaatacga

SEQ ID NO: 697777 - DNA, 19 bp, Mus musculus
  siRNA target sequence for Mor2 (NM_008618.2,486-504).
gaaacccagccaatacgaa

SEQ ID NO: 697778 - DNA, 19 bp, Mus musculus
  siRNA target sequence for Mor2 (NM_008618.2,534-552).
cgatccccaaggagaattt

SEQ ID NO: 697779 - DNA, 19 bp, Mus musculus
  siRNA target sequence for Mor2 (NM_008618.2,571-589).
ggaccacaaccgagcaaaa

SEQ ID NO: 697780 - DNA, 19 bp, Mus musculus
  siRNA target sequence for Mor2 (NM_008618.2,574-592).
ccacaaccgagcaaaatct

SEQ ID NO: 697781 - DNA, 19 bp, Mus musculus
  siRNA target sequence for Mor2 (NM_008618.2,577-595).
caaccgagcaaaatctcaa

SEQ ID NO: 697782 - DNA, 19 bp, Mus musculus
  siRNA target sequence for Mor2 (NM_008618.2,580-598).
ccgagcaaaatctcaaatt

SEQ ID NO: 697783 - DNA, 19 bp, Mus musculus
  siRNA target sequence for Mor2 (NM_008618.2,610-628).
cggtgtaaccgctgatgat

SEQ ID NO: 697784 - DNA, 19 bp, Mus musculus
  siRNA target sequence for Mor2 (NM_008618.2,612-630).
gtgtaaccgctgatgatgt

SEQ ID NO: 697785 - DNA, 19 bp, Mus musculus
  siRNA target sequence for Mor2 (NM_008618.2,614-632).
gtaaccgctgatgatgtaa

SEQ ID NO: 697786 - DNA, 19 bp, Mus musculus
  siRNA target sequence for Mor2 (NM_008618.2,619-637).
cgctgatgatgtaaagaat

SEQ ID NO: 697787 - DNA, 19 bp, Mus musculus
  siRNA target sequence for Mor2 (NM_008618.2,629-647).
gtaaagaatgtcattatct

SEQ ID NO: 697788 - DNA, 19 bp, Mus musculus
  siRNA target sequence for Mor2 (NM_008618.2,667-685).
ccagtatccagatgtcaat

SEQ ID NO: 697789 - DNA, 19 bp, Mus musculus
  siRNA target sequence for Mor2 (NM_008618.2,670-688).
gtatccagatgtcaatcat

SEQ ID NO: 697790 - DNA, 19 bp, Mus musculus
  siRNA target sequence for Mor2 (NM_008618.2,712-730).
ggaagtcggtgtgtatgaa

SEQ ID NO: 697791 - DNA, 19 bp, Mus musculus
  siRNA target sequence for Mor2 (NM_008618.2,814-832).
gctgtccagtgcaatgtct

SEQ ID NO: 697792 - DNA, 19 bp, Mus musculus
  siRNA target sequence for Mor2 (NM_008618.2,896-914).
gtgtcgatgggtgttatct

SEQ ID NO: 697793 - DNA, 19 bp, Mus musculus
  siRNA target sequence for Mor2 (NM_008618.2,898-916).
gtcgatgggtgttatctct

SEQ ID NO: 697794 - DNA, 19 bp, Mus musculus
  siRNA target sequence for Mor2 (NM_008618.2,941-959).
gatgacctgctctactcat

SEQ ID NO: 697795 - DNA, 19 bp, Mus musculus
  siRNA target sequence for Mor2 (NM_008618.2,957-975).
cattccctgtcgtgatcaa

SEQ ID NO: 697796 - DNA, 19 bp, Mus musculus
  siRNA target sequence for Mor2 (NM_008618.2,961-979).
ccctgtcgtgatcaagaat

SEQ ID NO: 697797 - DNA, 19 bp, Mus musculus
  siRNA target sequence for Mor2 (NM_008618.2,976-994).
gaataagacctggaagttt

SEQ ID NO: 697798 - DNA, 19 bp, Mus musculus
  siRNA target sequence for Mor2 (NM_008618.2,1001-1019).
ggcctccccattaatgact

SEQ ID NO: 697799 - DNA, 19 bp, Mus musculus
  siRNA target sequence for Mor2 (NM_008618.2,1002-1020).
gcctccccattaatgactt

SEQ ID NO: 697800 - DNA, 19 bp, Mus musculus
  siRNA target sequence for Mpa2 (NM_008620.1,848-866).
ccaattggatcctacgttt

SEQ ID NO: 697801 - DNA, 19 bp, Mus musculus
  siRNA target sequence for Mpa2 (NM_008620.1,849-867).
caattggatcctacgttta

SEQ ID NO: 697802 - DNA, 19 bp, Mus musculus
  siRNA target sequence for Mpa2 (NM_008620.1,1845-1863).
gattcccttgtggaaagta

SEQ ID NO: 697803 - DNA, 19 bp, Mus musculus
  siRNA target sequence for Mpa2 (NM_008620.1,1849-1867).
cccttgtggaaagtatttt

SEQ ID NO: 697804 - DNA, 19 bp, Mus musculus
  siRNA target sequence for Mpa2 (NM_008620.1,1913-1931).
ggctataagcagcgtttta

SEQ ID NO: 697805 - DNA, 19 bp, Mus musculus
  siRNA target sequence for Mpa2 (NM_008620.1,1914-1932).
gctataagcagcgttttat

SEQ ID NO: 697806 - DNA, 19 bp, Mus musculus
  siRNA target sequence for Mtap7 (NM_008635.1,65-83).
cagcgtctgatggctataa

SEQ ID NO: 697807 - DNA, 19 bp, Mus musculus
  siRNA target sequence for Mtap7 (NM_008635.1,77-95).
gctataaagtacaagagaa

SEQ ID NO: 697808 - DNA, 19 bp, Mus musculus
  siRNA target sequence for Mtap7 (NM_008635.1,218-236).
gccgagaggaacgagaaaa

SEQ ID NO: 697809 - DNA, 19 bp, Mus musculus
  siRNA target sequence for Mtap7 (NM_008635.1,427-445).
gtccgacggacgatggaaa

SEQ ID NO: 697810 - DNA, 19 bp, Mus musculus
  siRNA target sequence for Mtap7 (NM_008635.1,540-558).
ctcagtttccaccatgaat

SEQ ID NO: 697811 - DNA, 19 bp, Mus musculus
  siRNA target sequence for Mtap7 (NM_008635.1,542-560).
cagtttccaccatgaatct

SEQ ID NO: 697812 - DNA, 19 bp, Mus musculus
  siRNA target sequence for Mtap7 (NM_008635.1,548-566).
ccaccatgaatctttcgaa

SEQ ID NO: 697813 - DNA, 19 bp, Mus musculus
  siRNA target sequence for Mtap7 (NM_008635.1,549-567).
caccatgaatctttcgaaa

SEQ ID NO: 697814 - DNA, 19 bp, Mus musculus
  siRNA target sequence for Mtap7 (NM_008635.1,555-573).
gaatctttcgaaacatgtt

SEQ ID NO: 697815 - DNA, 19 bp, Mus musculus
  siRNA target sequence for Mtap7 (NM_008635.1,568-586).
catgttgatcctgtcatta

SEQ ID NO: 697816 - DNA, 19 bp, Mus musculus
  siRNA target sequence for Mtap7 (NM_008635.1,603-621).
ctcgtctgcaactttgcta

SEQ ID NO: 697817 - DNA, 19 bp, Mus musculus
  siRNA target sequence for Mtap7 (NM_008635.1,605-623).
cgtctgcaactttgctaaa

SEQ ID NO: 697818 - DNA, 19 bp, Mus musculus
  siRNA target sequence for Mtap7 (NM_008635.1,618-636).
gctaaactctccagataga

SEQ ID NO: 697819 - DNA, 19 bp, Mus musculus
  siRNA target sequence for Mtap7 (NM_008635.1,685-703).
cttctgacgcccacacatt

SEQ ID NO: 697820 - DNA, 19 bp, Mus musculus
  siRNA target sequence for Mtap7 (NM_008635.1,803-821).
cagtggaccgaccaaaact

SEQ ID NO: 697821 - DNA, 19 bp, Mus musculus
  siRNA target sequence for Mtap7 (NM_008635.1,805-823).
gtggaccgaccaaaactct

SEQ ID NO: 697822 - DNA, 19 bp, Mus musculus
  siRNA target sequence for Mtap7 (NM_008635.1,807-825).
ggaccgaccaaaactcttt

SEQ ID NO: 697823 - DNA, 19 bp, Mus musculus
  siRNA target sequence for Mtap7 (NM_008635.1,811-829).
cgaccaaaactctttgtaa

SEQ ID NO: 697824 - DNA, 19 bp, Mus musculus
  siRNA target sequence for Mtap7 (NM_008635.1,868-886).
ggactagcgagccataaaa

SEQ ID NO: 697825 - DNA, 19 bp, Mus musculus
  siRNA target sequence for Mtap7 (NM_008635.1,939-957).
gactctgtctccatctaat

SEQ ID NO: 697826 - DNA, 19 bp, Mus musculus
  siRNA target sequence for Mtap7 (NM_008635.1,943-961).
ctgtctccatctaatctca

SEQ ID NO: 697827 - DNA, 19 bp, Mus musculus
  siRNA target sequence for Mtap7 (NM_008635.1,945-963).
gtctccatctaatctcaaa

SEQ ID NO: 697828 - DNA, 19 bp, Mus musculus
  siRNA target sequence for Mtap7 (NM_008635.1,1175-1193).
gcagggtgccattagtgaa

SEQ ID NO: 697829 - DNA, 19 bp, Mus musculus
  siRNA target sequence for Mtap7 (NM_008635.1,1334-1352).
ctgtcggtgtagttcctaa

SEQ ID NO: 697830 - DNA, 19 bp, Mus musculus
  siRNA target sequence for Mtap7 (NM_008635.1,1338-1356).
cggtgtagttcctaagact

SEQ ID NO: 697831 - DNA, 19 bp, Mus musculus
  siRNA target sequence for Mtap7 (NM_008635.1,1753-1771).
cgacttgaagagattatga

SEQ ID NO: 697832 - DNA, 19 bp, Mus musculus
  siRNA target sequence for Mtap7 (NM_008635.1,1815-1833).
gcaaagaaatggtgacata

SEQ ID NO: 697833 - DNA, 19 bp, Mus musculus
  siRNA target sequence for Mtap7 (NM_008635.1,1995-2013).
cggaatgtccatacaaaat

SEQ ID NO: 697834 - DNA, 19 bp, Mus musculus
  siRNA target sequence for Mtap7 (NM_008635.1,1997-2015).
gaatgtccatacaaaatga

SEQ ID NO: 697835 - DNA, 19 bp, Mus musculus
  siRNA target sequence for Mtap7 (NM_008635.1,2105-2123).
caattttggcctttaatga

SEQ ID NO: 697836 - DNA, 19 bp, Mus musculus
  siRNA target sequence for Mtap7 (NM_008635.1,2170-2188).
caacagaccgcagaagtta

SEQ ID NO: 697837 - DNA, 19 bp, Mus musculus
  siRNA target sequence for Mtap7 (NM_008635.1,2173-2191).
cagaccgcagaagttatat

SEQ ID NO: 697838 - DNA, 19 bp, Mus musculus
  siRNA target sequence for Muc10 (NM_008644.1,125-143).
gggcctgttggctcttact

SEQ ID NO: 697839 - DNA, 19 bp, Mus musculus
  siRNA target sequence for Muc10 (NM_008644.1,126-144).
ggcctgttggctcttactt

SEQ ID NO: 697840 - DNA, 19 bp, Mus musculus
  siRNA target sequence for Muc10 (NM_008644.1,128-146).
cctgttggctcttacttca

SEQ ID NO: 697841 - DNA, 19 bp, Mus musculus
  siRNA target sequence for Muc10 (NM_008644.1,131-149).
gttggctcttacttcatat

SEQ ID NO: 697842 - DNA, 19 bp, Mus musculus
  siRNA target sequence for Muc10 (NM_008644.1,194-212).
ccctgtcagaaaatatcta

SEQ ID NO: 697843 - DNA, 19 bp, Mus musculus
  siRNA target sequence for Muc10 (NM_008644.1,196-214).
ctgtcagaaaatatctaga

SEQ ID NO: 697844 - DNA, 19 bp, Mus musculus
  siRNA target sequence for Muc10 (NM_008644.1,213-231).
gaagacccaagatatccaa

SEQ ID NO: 697845 - DNA, 19 bp, Mus musculus
  siRNA target sequence for Muc10 (NM_008644.1,232-250).
gatatccaagaccacatta

SEQ ID NO: 697846 - DNA, 19 bp, Mus musculus
  siRNA target sequence for Muc10 (NM_008644.1,237-255).
ccaagaccacattattcct

SEQ ID NO: 697847 - DNA, 19 bp, Mus musculus
  siRNA target sequence for Muc10 (NM_008644.1,243-261).
ccacattattcctatggtt

SEQ ID NO: 697848 - DNA, 19 bp, Mus musculus
  siRNA target sequence for Muc10 (NM_008644.1,272-290).
ctctccaaagtttccaaaa

SEQ ID NO: 697849 - DNA, 19 bp, Mus musculus
  siRNA target sequence for Muc10 (NM_008644.1,286-304).
caaaagacaatcaatggta

SEQ ID NO: 697850 - DNA, 19 bp, Mus musculus
  siRNA target sequence for Muc10 (NM_008644.1,316-334).
ctccaggaactaccttaat

SEQ ID NO: 697851 - DNA, 19 bp, Mus musculus
  siRNA target sequence for Muc10 (NM_008644.1,341-359).
cagtcgccgttctcctaaa

SEQ ID NO: 697852 - DNA, 19 bp, Mus musculus
  siRNA target sequence for Muc10 (NM_008644.1,343-361).
gtcgccgttctcctaaatt

SEQ ID NO: 697853 - DNA, 19 bp, Mus musculus
  siRNA target sequence for Muc10 (NM_008644.1,347-365).
ccgttctcctaaatttcta

SEQ ID NO: 697854 - DNA, 19 bp, Mus musculus
  siRNA target sequence for Muc10 (NM_008644.1,348-366).
cgttctcctaaatttctat

SEQ ID NO: 697855 - DNA, 19 bp, Mus musculus
  siRNA target sequence for Muc10 (NM_008644.1,352-370).
ctcctaaatttctatgcat

SEQ ID NO: 697856 - DNA, 19 bp, Mus musculus
  siRNA target sequence for Muc10 (NM_008644.1,379-397).
gacagattatctctgataa

SEQ ID NO: 697857 - DNA, 19 bp, Mus musculus
  siRNA target sequence for Muc10 (NM_008644.1,509-527).
caacagaactaccacaaat

SEQ ID NO: 697858 - DNA, 19 bp, Mus musculus
  siRNA target sequence for Muc10 (NM_008644.1,790-808).
ccatacctacaacaactaa

SEQ ID NO: 697859 - DNA, 19 bp, Mus musculus
  siRNA target sequence for Muc10 (NM_008644.1,865-883).
caacatttgcggaagtgtt

SEQ ID NO: 697860 - DNA, 19 bp, Mus musculus
  siRNA target sequence for Muc10 (NM_008644.1,897-915).
cagcagatctttaggttaa

SEQ ID NO: 697861 - DNA, 19 bp, Mus musculus
  siRNA target sequence for Nbr1 (NM_008676.1,298-316).
cacaggttactctaaatgt

SEQ ID NO: 697862 - DNA, 19 bp, Mus musculus
  siRNA target sequence for Nbr1 (NM_008676.1,300-318).
caggttactctaaatgtga

SEQ ID NO: 697863 - DNA, 19 bp, Mus musculus
  siRNA target sequence for Nbr1 (NM_008676.1,367-385).
caacctgggctgatgttga

SEQ ID NO: 697864 - DNA, 19 bp, Mus musculus
  siRNA target sequence for Nbr1 (NM_008676.1,388-406).
ctatggtaaaagtttcatt

SEQ ID NO: 697865 - DNA, 19 bp, Mus musculus
  siRNA target sequence for Nbr1 (NM_008676.1,399-417).
gtttcatttgatctgaata

SEQ ID NO: 697866 - DNA, 19 bp, Mus musculus
  siRNA target sequence for Nbr1 (NM_008676.1,403-421).
catttgatctgaatactat

SEQ ID NO: 697867 - DNA, 19 bp, Mus musculus
  siRNA target sequence for Nbr1 (NM_008676.1,449-467).
cgaggagatatccatcaat

SEQ ID NO: 697868 - DNA, 19 bp, Mus musculus
  siRNA target sequence for Nbr1 (NM_008676.1,450-468).
gaggagatatccatcaata

SEQ ID NO: 697869 - DNA, 19 bp, Mus musculus
  siRNA target sequence for Nbr1 (NM_008676.1,452-470).
ggagatatccatcaatagt

SEQ ID NO: 697870 - DNA, 19 bp, Mus musculus
  siRNA target sequence for Nbr1 (NM_008676.1,455-473).
gatatccatcaatagtcaa

SEQ ID NO: 697871 - DNA, 19 bp, Mus musculus
  siRNA target sequence for Nbr1 (NM_008676.1,464-482).
caatagtcaaggtgaatat

SEQ ID NO: 697872 - DNA, 19 bp, Mus musculus
  siRNA target sequence for Nbr1 (NM_008676.1,492-510).
cttaagatggctaacatta

SEQ ID NO: 697873 - DNA, 19 bp, Mus musculus
  siRNA target sequence for Nbr1 (NM_008676.1,497-515).
gatggctaacattaagcaa

SEQ ID NO: 697874 - DNA, 19 bp, Mus musculus
  siRNA target sequence for Nbr1 (NM_008676.1,548-566).
gtaccatgttgtagatgaa

SEQ ID NO: 697875 - DNA, 19 bp, Mus musculus
  siRNA target sequence for Nbr1 (NM_008676.1,617-635).
gaagccacttgcacattat

SEQ ID NO: 697876 - DNA, 19 bp, Mus musculus
  siRNA target sequence for Nbr1 (NM_008676.1,620-638).
gccacttgcacattattct

SEQ ID NO: 697877 - DNA, 19 bp, Mus musculus
  siRNA target sequence for Nbr1 (NM_008676.1,621-639).
ccacttgcacattattctt

SEQ ID NO: 697878 - DNA, 19 bp, Mus musculus
  siRNA target sequence for Nbr1 (NM_008676.1,684-702).
cctgcaccagagcaatgtt

SEQ ID NO: 697879 - DNA, 19 bp, Mus musculus
  siRNA target sequence for Nbr1 (NM_008676.1,737-755).
caagcccccagattggttt

SEQ ID NO: 697880 - DNA, 19 bp, Mus musculus
  siRNA target sequence for Nbr1 (NM_008676.1,740-758).
gcccccagattggtttaca

SEQ ID NO: 697881 - DNA, 19 bp, Mus musculus
  siRNA target sequence for Nbr1 (NM_008676.1,741-759).
cccccagattggtttacaa

SEQ ID NO: 697882 - DNA, 19 bp, Mus musculus
  siRNA target sequence for Nbr1 (NM_008676.1,757-775).
caagctacctggagatgtt

SEQ ID NO: 697883 - DNA, 19 bp, Mus musculus
  siRNA target sequence for Nbr1 (NM_008676.1,767-785).
ggagatgttccgagaacaa

SEQ ID NO: 697884 - DNA, 19 bp, Mus musculus
  siRNA target sequence for Nbr1 (NM_008676.1,778-796).
gagaacaagtggttaagga

SEQ ID NO: 697885 - DNA, 19 bp, Mus musculus
  siRNA target sequence for Nbr1 (NM_008676.1,794-812).
ggaaacggtggagaaactt

SEQ ID NO: 697886 - DNA, 19 bp, Mus musculus
  siRNA target sequence for Nbr1 (NM_008676.1,873-891).
gaagtctcaatgcctattt

SEQ ID NO: 697887 - DNA, 19 bp, Mus musculus
  siRNA target sequence for Nbr1 (NM_008676.1,920-938).
ccagttcagctggcatatt

SEQ ID NO: 697888 - DNA, 19 bp, Mus musculus
  siRNA target sequence for Nbr1 (NM_008676.1,990-1008).
ctatgcccatcctacaaca

SEQ ID NO: 697889 - DNA, 19 bp, Mus musculus
  siRNA target sequence for Nbr1 (NM_008676.1,995-1013).
cccatcctacaacatttgt

SEQ ID NO: 697890 - DNA, 19 bp, Mus musculus
  siRNA target sequence for Nbr1 (NM_008676.1,1001-1019).
ctacaacatttgtgaagat

SEQ ID NO: 697891 - DNA, 19 bp, Mus musculus
  siRNA target sequence for Nbr1 (NM_008676.1,1033-1051).
catacacccatgacactaa

SEQ ID NO: 697892 - DNA, 19 bp, Mus musculus
  siRNA target sequence for Nbr1 (NM_008676.1,1044-1062).
gacactaaccatgttttgt

SEQ ID NO: 697893 - DNA, 19 bp, Mus musculus
  siRNA target sequence for Nbr1 (NM_008676.1,1046-1064).
cactaaccatgttttgtta

SEQ ID NO: 697894 - DNA, 19 bp, Mus musculus
  siRNA target sequence for Nbr1 (NM_008676.1,1048-1066).
ctaaccatgttttgttaaa

SEQ ID NO: 697895 - DNA, 19 bp, Mus musculus
  siRNA target sequence for Nbr1 (NM_008676.1,1070-1088).
gcggagacctgttgtgata

SEQ ID NO: 697896 - DNA, 19 bp, Mus musculus
  siRNA target sequence for Nbr1 (NM_008676.1,1071-1089).
cggagacctgttgtgatat

SEQ ID NO: 697897 - DNA, 19 bp, Mus musculus
  siRNA target sequence for Nbr1 (NM_008676.1,1274-1292).
gaagattcatttatggaat

SEQ ID NO: 697898 - DNA, 19 bp, Mus musculus
  siRNA target sequence for Nbr1 (NM_008676.1,1402-1420).
cactcagtgcagcatttgt

SEQ ID NO: 697899 - DNA, 19 bp, Mus musculus
  siRNA target sequence for Nbr1 (NM_008676.1,1433-1451).
gcctgatgggactcatctt

SEQ ID NO: 697900 - DNA, 19 bp, Mus musculus
  siRNA target sequence for Nbr1 (NM_008676.1,1454-1472).
gccaggaaccaagtttatt

SEQ ID NO: 697901 - DNA, 19 bp, Mus musculus
  siRNA target sequence for Nbr1 (NM_008676.1,1459-1477).
gaaccaagtttattaaaca

SEQ ID NO: 697902 - DNA, 19 bp, Mus musculus
  siRNA target sequence for Nbr1 (NM_008676.1,1643-1661).
cttggaggggacatacact

SEQ ID NO: 697903 - DNA, 19 bp, Mus musculus
  siRNA target sequence for Nbr1 (NM_008676.1,1667-1685).
ctggcgtctctctcacaaa

SEQ ID NO: 697904 - DNA, 19 bp, Mus musculus
  siRNA target sequence for Nbr1 (NM_008676.1,1704-1722).
cgggtttggtgcagtatca

SEQ ID NO: 697905 - DNA, 19 bp, Mus musculus
  siRNA target sequence for Nbr1 (NM_008676.1,1705-1723).
gggtttggtgcagtatcat

SEQ ID NO: 697906 - DNA, 19 bp, Mus musculus
  siRNA target sequence for Nbr1 (NM_008676.1,1717-1735).
gtatcatagtggatccttt

SEQ ID NO: 697907 - DNA, 19 bp, Mus musculus
  siRNA target sequence for Nbr1 (NM_008676.1,2076-2094).
gacagtcctttaatagaga

SEQ ID NO: 697908 - DNA, 19 bp, Mus musculus
  siRNA target sequence for Nbr1 (NM_008676.1,2098-2116).
caggcttggggcagataca

SEQ ID NO: 697909 - DNA, 19 bp, Mus musculus
  siRNA target sequence for Nbr1 (NM_008676.1,2194-2212).
cttcggtcgaagaaacaga

SEQ ID NO: 697910 - DNA, 19 bp, Mus musculus
  siRNA target sequence for Nbr1 (NM_008676.1,2309-2327).
gtccccacagagggaatta

SEQ ID NO: 697911 - DNA, 19 bp, Mus musculus
  siRNA target sequence for Nbr1 (NM_008676.1,2441-2459).
ggagattgtccacattgtt

SEQ ID NO: 697912 - DNA, 19 bp, Mus musculus
  siRNA target sequence for Nbr1 (NM_008676.1,3171-3189).
ctgagaaaacacaattaca

SEQ ID NO: 697913 - DNA, 19 bp, Mus musculus
  siRNA target sequence for Nbr1 (NM_008676.1,3175-3193).
gaaaacacaattacaatat

SEQ ID NO: 697914 - DNA, 19 bp, Mus musculus
  siRNA target sequence for Nbr1 (NM_008676.1,3213-3231).
ctccttcaagtgaataaca

SEQ ID NO: 697915 - DNA, 19 bp, Mus musculus
  siRNA target sequence for Ndrl (NM_008681.1,448-466).
ccttcccagtggtacatgt

SEQ ID NO: 697916 - DNA, 19 bp, Mus musculus
  siRNA target sequence for Ndrl (NM_008681.1,449-467).
cttcccagtggtacatgta

SEQ ID NO: 697917 - DNA, 19 bp, Mus musculus
  siRNA target sequence for Ndrl (NM_008681.1,462-480).
catgtacccctcaatggat

SEQ ID NO: 697918 - DNA, 19 bp, Mus musculus
  siRNA target sequence for Ndrl (NM_008681.1,606-624).
gggtctcgtgctcatgaat

SEQ ID NO: 697919 - DNA, 19 bp, Mus musculus
  siRNA target sequence for Ndrl (NM_008681.1,608-626).
gtctcgtgctcatgaatgt

SEQ ID NO: 697920 - DNA, 19 bp, Mus musculus
  siRNA target sequence for Ndrl (NM_008681.1,610-628).
ctcgtgctcatgaatgtga

SEQ ID NO: 697921 - DNA, 19 bp, Mus musculus
  siRNA target sequence for Ndrl (NM_008681.1,652-670).
gactgggctgcctctaaga

SEQ ID NO: 697922 - DNA, 19 bp, Mus musculus
  siRNA target sequence for Ndrl (NM_008681.1,790-808).
ccgagcaacctacacttat

SEQ ID NO: 697923 - DNA, 19 bp, Mus musculus
  siRNA target sequence for Ndrl (NM_008681.1,791-809).
cgagcaacctacacttatt

SEQ ID NO: 697924 - DNA, 19 bp, Mus musculus
  siRNA target sequence for Nedd1 (NM_008682.1,142-160).
gtcaccgcatggaatcagt

SEQ ID NO: 697925 - DNA, 19 bp, Mus musculus
  siRNA target sequence for Nedd1 (NM_008682.1,146-164).
ccgcatggaatcagttcaa

SEQ ID NO: 697926 - DNA, 19 bp, Mus musculus
  siRNA target sequence for Nedd1 (NM_008682.1,147-165).
cgcatggaatcagttcaat

SEQ ID NO: 697927 - DNA, 19 bp, Mus musculus
  siRNA target sequence for Nedd1 (NM_008682.1,1168-1186).
ggctcgaagcaaaagtaca

SEQ ID NO: 697928 - DNA, 19 bp, Mus musculus
  siRNA target sequence for Nedd1 (NM_008682.1,1172-1190).
cgaagcaaaagtacagata

SEQ ID NO: 697929 - DNA, 19 bp, Mus musculus
  siRNA target sequence for Nedd1 (NM_008682.1,1679-1697).
gtcaacggctcctcaacta

SEQ ID NO: 697930 - DNA, 19 bp, Mus musculus
  siRNA target sequence for Nedd1 (NM_008682.1,1681-1699).
caacggctcctcaactaca

SEQ ID NO: 697931 - DNA, 19 bp, Mus musculus
  siRNA target sequence for Nedd1 (NM_008682.1,1684-1702).
cggctcctcaactacagta

SEQ ID NO: 697932 - DNA, 19 bp, Mus musculus
  siRNA target sequence for Nedd1 (NM_008682.1,1740-1758).
gttcactctcagagaaaat

SEQ ID NO: 697933 - DNA, 19 bp, Mus musculus
  siRNA target sequence for Nedd1 (NM_008682.1,1743-1761).
cactctcagagaaaatagt

SEQ ID NO: 697934 - DNA, 19 bp, Mus musculus
  siRNA target sequence for Nfkbie (NM_008690.2,247-265).
ccggacgaggcggatgata

SEQ ID NO: 697935 - DNA, 19 bp, Mus musculus
  siRNA target sequence for Nfkbie (NM_008690.2,426-444).
gcgagcggactccacttat

SEQ ID NO: 697936 - DNA, 19 bp, Mus musculus
  siRNA target sequence for Nfkbie (NM_008690.2,452-470).
cctctctcactgaatcctt

SEQ ID NO: 697937 - DNA, 19 bp, Mus musculus
  siRNA target sequence for Nfkbie (NM_008690.2,562-580).
ctcgaggcgctcacataca

SEQ ID NO: 697938 - DNA, 19 bp, Mus musculus
  siRNA target sequence for Nfkbie (NM_008690.2,628-646).
gccccgtcggtgctattct

SEQ ID NO: 697939 - DNA, 19 bp, Mus musculus
  siRNA target sequence for Nfkbie (NM_008690.2,959-977).
ggaaccaaccgctcataga

SEQ ID NO: 697940 - DNA, 19 bp, Mus musculus
  siRNA target sequence for Nfkbie (NM_008690.2,960-978).
gaaccaaccgctcatagaa

SEQ ID NO: 697941 - DNA, 19 bp, Mus musculus
  siRNA target sequence for Nfkbie (NM_008690.2,1105-1123).
gtagatgcccgcatgctta

SEQ ID NO: 697942 - DNA, 19 bp, Mus musculus
  siRNA target sequence for Nfkbie (NM_008690.2,1159-1177).
ggcctcaacagcatctcat

SEQ ID NO: 697943 - DNA, 19 bp, Mus musculus
  siRNA target sequence for Nfkbie (NM_008690.2,1209-1227).
gctgctgaatgtagaagat

SEQ ID NO: 697944 - DNA, 19 bp, Mus musculus
  siRNA target sequence for Nfkbie (NM_008690.2,1294-1312).
ggcaaaccactgctatgta

SEQ ID NO: 697945 - DNA, 19 bp, Mus musculus
  siRNA target sequence for Nfkbie (NM_008690.2,1296-1314).
caaaccactgctatgtact

SEQ ID NO: 697946 - DNA, 19 bp, Mus musculus
  siRNA target sequence for Nipsnap1 (NM_008698.1,10-28).
ccgcggttgtgcatcatct

SEQ ID NO: 697947 - DNA, 19 bp, Mus musculus
  siRNA target sequence for Nipsnap1 (NM_008698.1,206-224).
ctagtaatctctacaagat

SEQ ID NO: 697948 - DNA, 19 bp, Mus musculus
  siRNA target sequence for Nipsnap1 (NM_008698.1,579-597).
caagccaggaaccatgatt

SEQ ID NO: 697949 - DNA, 19 bp, Mus musculus
  siRNA target sequence for Nipsnap1 (NM_008698.1,657-675).
gggaggcttcttttcacaa

SEQ ID NO: 697950 - DNA, 19 bp, Mus musculus
  siRNA target sequence for Nipsnap1 (NM_008698.1,699-717).
ccacttatgggcctacaaa

SEQ ID NO: 697951 - DNA, 19 bp, Mus musculus
  siRNA target sequence for Nipsnap1 (NM_008698.1,707-725).
gggcctacaaagatttgca

SEQ ID NO: 697952 - DNA, 19 bp, Mus musculus
  siRNA target sequence for Nipsnap1 (NM_008698.1,770-788).
gggatgaaaatgtctacta

SEQ ID NO: 697953 - DNA, 19 bp, Mus musculus
  siRNA target sequence for Nipsnap1 (NM_008698.1,813-831).
ggagtcacgaatcatgatt

SEQ ID NO: 697954 - DNA, 19 bp, Mus musculus
  siRNA target sequence for Nptx1 (NM_008730.1,620-638).
gccaactcgggcaaacttt

SEQ ID NO: 697955 - DNA, 19 bp, Mus musculus
  siRNA target sequence for Nptx1 (NM_008730.1,673-691).
cagtacagccgcctcaatt

SEQ ID NO: 697956 - DNA, 19 bp, Mus musculus
  siRNA target sequence for Nptx1 (NM_008730.1,675-693).
gtacagccgcctcaattct

SEQ ID NO: 697957 - DNA, 19 bp, Mus musculus
  siRNA target sequence for Nptx1 (NM_008730.1,925-943).
ccactgcggaccaactaca

SEQ ID NO: 697958 - DNA, 19 bp, Mus musculus
  siRNA target sequence for Nptx1 (NM_008730.1,926-944).
cactgcggaccaactacat

SEQ ID NO: 697959 - DNA, 19 bp, Mus musculus
  siRNA target sequence for Nptx1 (NM_008730.1,928-946).
ctgcggaccaactacatgt

SEQ ID NO: 697960 - DNA, 19 bp, Mus musculus
  siRNA target sequence for Nptx1 (NM_008730.1,930-948).
gcggaccaactacatgtat

SEQ ID NO: 697961 - DNA, 19 bp, Mus musculus
  siRNA target sequence for Nptx1 (NM_008730.1,1098-1116).
ccccatggagatactcatt

SEQ ID NO: 697962 - DNA, 19 bp, Mus musculus
  siRNA target sequence for Nptx1 (NM_008730.1,1128-1146).
ggccaagctgccgtttgta

SEQ ID NO: 697963 - DNA, 19 bp, Mus musculus
  siRNA target sequence for Nptx1 (NM_008730.1,1129-1147).
gccaagctgccgtttgtaa

SEQ ID NO: 697964 - DNA, 19 bp, Mus musculus
  siRNA target sequence for Nptx1 (NM_008730.1,1130-1148).
ccaagctgccgtttgtaat

SEQ ID NO: 697965 - DNA, 19 bp, Mus musculus
  siRNA target sequence for Nptx1 (NM_008730.1,1232-1250).
gtggcaatggagagaactt

SEQ ID NO: 697966 - DNA, 19 bp, Mus musculus
  siRNA target sequence for Nptx1 (NM_008730.1,1348-1366).
ggtgagctagcccatttca

SEQ ID NO: 697967 - DNA, 19 bp, Mus musculus
  siRNA target sequence for Nptx1 (NM_008730.1,1349-1367).
gtgagctagcccatttcaa

SEQ ID NO: 697968 - DNA, 19 bp, Mus musculus
  siRNA target sequence for Nptx1 (NM_008730.1,1461-1479).
gtcccagatcgagatcttt

SEQ ID NO: 697969 - DNA, 19 bp, Mus musculus
  siRNA target sequence for Nptx1 (NM_008730.1,1507-1525).
gcttgtcgccagatcaact

SEQ ID NO: 697970 - DNA, 19 bp, Mus musculus
  siRNA target sequence for Nxph2 (NM_008752.1,309-327).
gtgaagaagtgatacacaa

SEQ ID NO: 697971 - DNA, 19 bp, Mus musculus
  siRNA target sequence for Nxph2 (NM_008752.1,363-381).
ctgaaacattggttggaaa

SEQ ID NO: 697972 - DNA, 19 bp, Mus musculus
  siRNA target sequence for Nxph2 (NM_008752.1,369-387).
cattggttggaaatctgtt

SEQ ID NO: 697973 - DNA, 19 bp, Mus musculus
  siRNA target sequence for Nxph2 (NM_008752.1,405-423).
gtcctctgcgtctgtttgt

SEQ ID NO: 697974 - DNA, 19 bp, Mus musculus
  siRNA target sequence for Nxph2 (NM_008752.1,407-425).
cctctgcgtctgtttgtta

SEQ ID NO: 697975 - DNA, 19 bp, Mus musculus
  siRNA target sequence for Nxph2 (NM_008752.1,435-453).
cagatccaaagccatcata

SEQ ID NO: 697976 - DNA, 19 bp, Mus musculus
  siRNA target sequence for Nxph2 (NM_008752.1,458-476).
gacaacacgaaaaactttt

SEQ ID NO: 697977 - DNA, 19 bp, Mus musculus
  siRNA target sequence for Nxph2 (NM_008752.1,483-501).
ggctggcaaacataacaga

SEQ ID NO: 697978 - DNA, 19 bp, Mus musculus
  siRNA target sequence for Nxph2 (NM_008752.1,525-543).
ctaaaagacggccaatagt

SEQ ID NO: 697979 - DNA, 19 bp, Mus musculus
  siRNA target sequence for Nxph2 (NM_008752.1,581-599).
gatttccactctaacatta

SEQ ID NO: 697980 - DNA, 19 bp, Mus musculus
  siRNA target sequence for Nxph2 (NM_008752.1,586-604).
ccactctaacattaaaact

SEQ ID NO: 697981 - DNA, 19 bp, Mus musculus
  siRNA target sequence for Nxph2 (NM_008752.1,767-785).
gagactaaggaatccaaat

SEQ ID NO: 697982 - DNA, 19 bp, Mus musculus
  siRNA target sequence for Nxph2 (NM_008752.1,769-787).
gactaaggaatccaaatct

SEQ ID NO: 697983 - DNA, 19 bp, Mus musculus
  siRNA target sequence for Nxph2 (NM_008752.1,834-852).
ccgctttgtgcaatttcga

SEQ ID NO: 697984 - DNA, 19 bp, Mus musculus
  siRNA target sequence for Nxph2 (NM_008752.1,844-862).
caatttcgacccatccaaa

SEQ ID NO: 697985 - DNA, 19 bp, Mus musculus
  siRNA target sequence for Nxph2 (NM_008752.1,895-913).
gtcctggttatgttccaaa

SEQ ID NO: 697986 - DNA, 19 bp, Mus musculus
  siRNA target sequence for Nxph2 (NM_008752.1,900-918).
ggttatgttccaaaccatt

SEQ ID NO: 697987 - DNA, 19 bp, Mus musculus
  siRNA target sequence for Nxph2 (NM_008752.1,901-919).
gttatgttccaaaccattt

SEQ ID NO: 697988 - DNA, 19 bp, Mus musculus
  siRNA target sequence for Nxph2 (NM_008752.1,956-974).
gattataaacttgtacaaa

SEQ ID NO: 697989 - DNA, 19 bp, Mus musculus
  siRNA target sequence for Nxph2 (NM_008752.1,977-995).
gtttgtcctgactacaatt

SEQ ID NO: 697990 - DNA, 19 bp, Mus musculus
  siRNA target sequence for Oaz1 (NM_008753.3,198-216).
cgcaccatgccgcttctta

SEQ ID NO: 697991 - DNA, 19 bp, Mus musculus
  siRNA target sequence for Oaz1 (NM_008753.3,200-218).
caccatgccgcttcttagt

SEQ ID NO: 697992 - DNA, 19 bp, Mus musculus
  siRNA target sequence for Oaz1 (NM_008753.3,202-220).
ccatgccgcttcttagtca

SEQ ID NO: 697993 - DNA, 19 bp, Mus musculus
  siRNA target sequence for Oaz1 (NM_008753.3,261-279).
gcccttaattgctgtagta

SEQ ID NO: 697994 - DNA, 19 bp, Mus musculus
  siRNA target sequence for Oaz1 (NM_008753.3,262-280).
cccttaattgctgtagtaa

SEQ ID NO: 697995 - DNA, 19 bp, Mus musculus
  siRNA target sequence for Oaz1 (NM_008753.3,360-378).
gcgggatcacagtctttca

SEQ ID NO: 697996 - DNA, 19 bp, Mus musculus
  siRNA target sequence for Oaz1 (NM_008753.3,395-413).
ccgacgagcggctgaatgt

SEQ ID NO: 697997 - DNA, 19 bp, Mus musculus
  siRNA target sequence for Oaz1 (NM_008753.3,397-415).
gacgagcggctgaatgtga

SEQ ID NO: 697998 - DNA, 19 bp, Mus musculus
  siRNA target sequence for Olfr15 (NM_008762.1,63-81).
ccatctggagatcatcttt

SEQ ID NO: 697999 - DNA, 19 bp, Mus musculus
  siRNA target sequence for Olfr15 (NM_008762.1,94-112).
ctggcctcttacttgttga

SEQ ID NO: 698000 - DNA, 19 bp, Mus musculus
  siRNA target sequence for Olfr15 (NM_008762.1,205-223).
ctagaccttgcctttacta

SEQ ID NO: 698001 - DNA, 19 bp, Mus musculus
  siRNA target sequence for Olfr15 (NM_008762.1,235-253).
cctcagatgctgaaaaatt

SEQ ID NO: 698002 - DNA, 19 bp, Mus musculus
  siRNA target sequence for Olfr15 (NM_008762.1,279-297).
ctatggtgggtgtgtaact

SEQ ID NO: 698003 - DNA, 19 bp, Mus musculus
  siRNA target sequence for Olfr15 (NM_008762.1,287-305).
ggtgtgtaactcaactcta

SEQ ID NO: 698004 - DNA, 19 bp, Mus musculus
  siRNA target sequence for Olfr15 (NM_008762.1,288-306).
gtgtgtaactcaactctat

SEQ ID NO: 698005 - DNA, 19 bp, Mus musculus
  siRNA target sequence for Olfr15 (NM_008762.1,290-308).
gtgtaactcaactctatgt

SEQ ID NO: 698006 - DNA, 19 bp, Mus musculus
  siRNA target sequence for Olfr15 (NM_008762.1,292-310).
gtaactcaactctatgttt

SEQ ID NO: 698007 - DNA, 19 bp, Mus musculus
  siRNA target sequence for Olfr15 (NM_008762.1,296-314).
ctcaactctatgttttcct

SEQ ID NO: 698008 - DNA, 19 bp, Mus musculus
  siRNA target sequence for Olfr15 (NM_008762.1,427-445).
gggctggctgctattagct

SEQ ID NO: 698009 - DNA, 19 bp, Mus musculus
  siRNA target sequence for Olfr15 (NM_008762.1,460-478).
ggcaactccgtgattcagt

SEQ ID NO: 698010 - DNA, 19 bp, Mus musculus
  siRNA target sequence for Olfr15 (NM_008762.1,538-556).
gaggtacccgccatgatta

SEQ ID NO: 698011 - DNA, 19 bp, Mus musculus
  siRNA target sequence for Olfr15 (NM_008762.1,540-558).
ggtacccgccatgattaaa

SEQ ID NO: 698012 - DNA, 19 bp, Mus musculus
  siRNA target sequence for Olfr15 (NM_008762.1,541-559).
gtacccgccatgattaaat

SEQ ID NO: 698013 - DNA, 19 bp, Mus musculus
  siRNA target sequence for Olfr15 (NM_008762.1,592-610).
gtgctcaatggtgtttgta

SEQ ID NO: 698014 - DNA, 19 bp, Mus musculus
  siRNA target sequence for Olfr15 (NM_008762.1,601-619).
ggtgtttgtaccttcttca

SEQ ID NO: 698015 - DNA, 19 bp, Mus musculus
  siRNA target sequence for Olfr15 (NM_008762.1,698-716).
gacgtcgaaaggctttcaa

SEQ ID NO: 698016 - DNA, 19 bp, Mus musculus
  siRNA target sequence for Olfr15 (NM_008762.1,700-718).
cgtcgaaaggctttcaata

SEQ ID NO: 698017 - DNA, 19 bp, Mus musculus
  siRNA target sequence for Olfr15 (NM_008762.1,753-771).
ctatggctctgcgatctat

SEQ ID NO: 698018 - DNA, 19 bp, Mus musculus
  siRNA target sequence for Olfr15 (NM_008762.1,787-805).
gctaagagcagtaatcaaa

SEQ ID NO: 698019 - DNA, 19 bp, Mus musculus
  siRNA target sequence for Olfr16 (NM_008763.1,88-106).
gttttcctaaccatctaca

SEQ ID NO: 698020 - DNA, 19 bp, Mus musculus
  siRNA target sequence for Olfr16 (NM_008763.1,93-111).
cctaaccatctacatttta

SEQ ID NO: 698021 - DNA, 19 bp, Mus musculus
  siRNA target sequence for Olfr16 (NM_008763.1,121-139).
ggcaacatcattatagtga

SEQ ID NO: 698022 - DNA, 19 bp, Mus musculus
  siRNA target sequence for Olfr16 (NM_008763.1,248-266).
ccagcctgattttttacaa

SEQ ID NO: 698023 - DNA, 19 bp, Mus musculus
  siRNA target sequence for Olfr16 (NM_008763.1,291-309).
cgcaacccaaatgttcttt

SEQ ID NO: 698024 - DNA, 19 bp, Mus musculus
  siRNA target sequence for Olfr16 (NM_008763.1,456-474).
cctggttatggcagttctt

SEQ ID NO: 698025 - DNA, 19 bp, Mus musculus
  siRNA target sequence for Olfr16 (NM_008763.1,459-477).
ggttatggcagttcttcat

SEQ ID NO: 698026 - DNA, 19 bp, Mus musculus
  siRNA target sequence for Olfr16 (NM_008763.1,591-609).
caattatggtgtaagttca

SEQ ID NO: 698027 - DNA, 19 bp, Mus musculus
  siRNA target sequence for Olfr16 (NM_008763.1,598-616).
ggtgtaagttcatttgtaa

SEQ ID NO: 698028 - DNA, 19 bp, Mus musculus
  siRNA target sequence for Olfr16 (NM_008763.1,622-640).
gtgcccatagggctgatat

SEQ ID NO: 698029 - DNA, 19 bp, Mus musculus
  siRNA target sequence for Olfr16 (NM_008763.1,624-642).
gcccatagggctgatattt

SEQ ID NO: 698030 - DNA, 19 bp, Mus musculus
  siRNA target sequence for Olfr16 (NM_008763.1,661-679).
gtctcttccatccttaaaa

SEQ ID NO: 698031 - DNA, 19 bp, Mus musculus
  siRNA target sequence for Slc22a1l (NM_008767.1,211-229).
ggcaggggatcatcatact

SEQ ID NO: 698032 - DNA, 19 bp, Mus musculus
  siRNA target sequence for Slc22a1l (NM_008767.1,213-231).
caggggatcatcatactca

SEQ ID NO: 698033 - DNA, 19 bp, Mus musculus
  siRNA target sequence for Slc22a1l (NM_008767.1,300-318).
cggacactgggcctagatt

SEQ ID NO: 698034 - DNA, 19 bp, Mus musculus
  siRNA target sequence for Slc22a1l (NM_008767.1,302-320).
gacactgggcctagattct

SEQ ID NO: 698035 - DNA, 19 bp, Mus musculus
  siRNA target sequence for Slc22a1l (NM_008767.1,799-817).
gaaccaaggccagtgtatt

SEQ ID NO: 698036 - DNA, 19 bp, Mus musculus
  siRNA target sequence for Slc22a1l (NM_008767.1,987-1005).
gggatcctccagatgatga

SEQ ID NO: 698037 - DNA, 19 bp, Mus musculus
  siRNA target sequence for Slc22a1l (NM_008767.1,1028-1046).
gctgagcacccattttcca

SEQ ID NO: 698038 - DNA, 19 bp, Mus musculus
  siRNA target sequence for Slc22a1l (NM_008767.1,1292-1310).
cctgctgtaccgtagctat

SEQ ID NO: 698039 - DNA, 19 bp, Mus musculus
  siRNA target sequence for Cntn3 (NM_008779.1,240-258).
gcctggcaggtgaacttct

SEQ ID NO: 698040 - DNA, 19 bp, Mus musculus
  siRNA target sequence for Cntn3 (NM_008779.1,241-259).
cctggcaggtgaacttctt

SEQ ID NO: 698041 - DNA, 19 bp, Mus musculus
  siRNA target sequence for Cntn3 (NM_008779.1,242-260).
ctggcaggtgaacttcttt

SEQ ID NO: 698042 - DNA, 19 bp, Mus musculus
  siRNA target sequence for Cntn3 (NM_008779.1,244-262).
ggcaggtgaacttctttta

SEQ ID NO: 698043 - DNA, 19 bp, Mus musculus
  siRNA target sequence for Cntn3 (NM_008779.1,267-285).
gccctgtgtttatcaaaga

SEQ ID NO: 698044 - DNA, 19 bp, Mus musculus
  siRNA target sequence for Cntn3 (NM_008779.1,354-372).
gcaacccttcacctcatta

SEQ ID NO: 698045 - DNA, 19 bp, Mus musculus
  siRNA target sequence for Cntn3 (NM_008779.1,380-398).
cagctgaatggcagtgata

SEQ ID NO: 698046 - DNA, 19 bp, Mus musculus
  siRNA target sequence for Cntn3 (NM_008779.1,389-407).
ggcagtgatattgatacaa

SEQ ID NO: 698047 - DNA, 19 bp, Mus musculus
  siRNA target sequence for Cntn3 (NM_008779.1,391-409).
cagtgatattgatacaagt

SEQ ID NO: 698048 - DNA, 19 bp, Mus musculus
  siRNA target sequence for Cntn3 (NM_008779.1,405-423).
caagtctggaccatcgtta

SEQ ID NO: 698049 - DNA, 19 bp, Mus musculus
  siRNA target sequence for Cntn3 (NM_008779.1,408-426).
gtctggaccatcgttacaa

SEQ ID NO: 698050 - DNA, 19 bp, Mus musculus
  siRNA target sequence for Cntn3 (NM_008779.1,413-431).
gaccatcgttacaaactga

SEQ ID NO: 698051 - DNA, 19 bp, Mus musculus
  siRNA target sequence for Cntn3 (NM_008779.1,415-433).
ccatcgttacaaactgaat

SEQ ID NO: 698052 - DNA, 19 bp, Mus musculus
  siRNA target sequence for Cntn3 (NM_008779.1,434-452).
ggaggaaatctcatagtta

SEQ ID NO: 698053 - DNA, 19 bp, Mus musculus
  siRNA target sequence for Cntn3 (NM_008779.1,437-455).
ggaaatctcatagttatta

SEQ ID NO: 698054 - DNA, 19 bp, Mus musculus
  siRNA target sequence for Cntn3 (NM_008779.1,477-495).
caggaagttaccagtgttt

SEQ ID NO: 698055 - DNA, 19 bp, Mus musculus
  siRNA target sequence for Cntn3 (NM_008779.1,487-505).
ccagtgttttgcaacgaat

SEQ ID NO: 698056 - DNA, 19 bp, Mus musculus
  siRNA target sequence for Cntn3 (NM_008779.1,488-506).
cagtgttttgcaacgaatt

SEQ ID NO: 698057 - DNA, 19 bp, Mus musculus
  siRNA target sequence for Cntn3 (NM_008779.1,490-508).
gtgttttgcaacgaattct

SEQ ID NO: 698058 - DNA, 19 bp, Mus musculus
  siRNA target sequence for Cntn3 (NM_008779.1,492-510).
gttttgcaacgaattctct

SEQ ID NO: 698059 - DNA, 19 bp, Mus musculus
  siRNA target sequence for Cntn3 (NM_008779.1,501-519).
cgaattctcttggaacaat

SEQ ID NO: 698060 - DNA, 19 bp, Mus musculus
  siRNA target sequence for Cntn3 (NM_008779.1,640-658).
ctcaggagaactgtcatat

SEQ ID NO: 698061 - DNA, 19 bp, Mus musculus
  siRNA target sequence for Cntn3 (NM_008779.1,654-672).
catatgcttgggtcttcaa

SEQ ID NO: 698062 - DNA, 19 bp, Mus musculus
  siRNA target sequence for Cntn3 (NM_008779.1,665-683).
gtcttcaatgagtatccat

SEQ ID NO: 698063 - DNA, 19 bp, Mus musculus
  siRNA target sequence for Cntn3 (NM_008779.1,676-694).
gtatccatcatttgttgaa

SEQ ID NO: 698064 - DNA, 19 bp, Mus musculus
  siRNA target sequence for Cntn3 (NM_008779.1,724-742).
gacaggacacctctacata

SEQ ID NO: 698065 - DNA, 19 bp, Mus musculus
  siRNA target sequence for Cntn3 (NM_008779.1,728-746).
ggacacctctacatagcta

SEQ ID NO: 698066 - DNA, 19 bp, Mus musculus
  siRNA target sequence for Cntn3 (NM_008779.1,787-805).
gaccagcacggtgacaaat

SEQ ID NO: 698067 - DNA, 19 bp, Mus musculus
  siRNA target sequence for Cntn3 (NM_008779.1,797-815).
gtgacaaataccagagtat

SEQ ID NO: 698068 - DNA, 19 bp, Mus musculus
  siRNA target sequence for Cntn3 (NM_008779.1,902-920).
cttccagcagctaaaggtt

SEQ ID NO: 698069 - DNA, 19 bp, Mus musculus
  siRNA target sequence for Cntn3 (NM_008779.1,955-973).
ccctgttcctcagattaat

SEQ ID NO: 698070 - DNA, 19 bp, Mus musculus
  siRNA target sequence for Cntn3 (NM_008779.1,956-974).
cctgttcctcagattaatt

SEQ ID NO: 698071 - DNA, 19 bp, Mus musculus
  siRNA target sequence for Cntn3 (NM_008779.1,959-977).
gttcctcagattaattgga

SEQ ID NO: 698072 - DNA, 19 bp, Mus musculus
  siRNA target sequence for Cntn3 (NM_008779.1,965-983).
cagattaattggagaagaa

SEQ ID NO: 698073 - DNA, 19 bp, Mus musculus
  siRNA target sequence for Cntn3 (NM_008779.1,991-1009).
gatgccgtttcccaacaaa

SEQ ID NO: 698074 - DNA, 19 bp, Mus musculus
  siRNA target sequence for Cntn3 (NM_008779.1,994-1012).
gccgtttcccaacaaaatt

SEQ ID NO: 698075 - DNA, 19 bp, Mus musculus
  siRNA target sequence for Cntn3 (NM_008779.1,995-1013).
ccgtttcccaacaaaatta

SEQ ID NO: 698076 - DNA, 19 bp, Mus musculus
  siRNA target sequence for Cntn3 (NM_008779.1,1001-1019).
cccaacaaaattaagttga

SEQ ID NO: 698077 - DNA, 19 bp, Mus musculus
  siRNA target sequence for Cntn3 (NM_008779.1,1031-1049).
ggtatgctggaaattcaaa

SEQ ID NO: 698078 - DNA, 19 bp, Mus musculus
  siRNA target sequence for Cntn3 (NM_008779.1,1124-1142).
cggctcacttactatgcaa

SEQ ID NO: 698079 - DNA, 19 bp, Mus musculus
  siRNA target sequence for Cntn3 (NM_008779.1,1125-1143).
ggctcacttactatgcaaa

SEQ ID NO: 698080 - DNA, 19 bp, Mus musculus
  siRNA target sequence for Cntn3 (NM_008779.1,1131-1149).
cttactatgcaaaacctta

SEQ ID NO: 698081 - DNA, 19 bp, Mus musculus
  siRNA target sequence for Cntn3 (NM_008779.1,1184-1202).
gtggaggacagtctttatt

SEQ ID NO: 698082 - DNA, 19 bp, Mus musculus
  siRNA target sequence for Cntn3 (NM_008779.1,1222-1240).
gaagcctaaaccctcttat

SEQ ID NO: 698083 - DNA, 19 bp, Mus musculus
  siRNA target sequence for Cntn3 (NM_008779.1,1236-1254).
cttatcgatggctgaaaaa

SEQ ID NO: 698084 - DNA, 19 bp, Mus musculus
  siRNA target sequence for Cntn3 (NM_008779.1,1257-1275).
gagatgccttagtactaga

SEQ ID NO: 698085 - DNA, 19 bp, Mus musculus
  siRNA target sequence for Cntn3 (NM_008779.1,1681-1699).
gacagaacctacgagaata

SEQ ID NO: 698086 - DNA, 19 bp, Mus musculus
  siRNA target sequence for Cntn3 (NM_008779.1,1683-1701).
cagaacctacgagaataat

SEQ ID NO: 698087 - DNA, 19 bp, Mus musculus
  siRNA target sequence for Cntn3 (NM_008779.1,1685-1703).
gaacctacgagaataattt

SEQ ID NO: 698088 - DNA, 19 bp, Mus musculus
  siRNA target sequence for Cntn3 (NM_008779.1,1730-1748).
gttggtgagagcgtcattt

SEQ ID NO: 698089 - DNA, 19 bp, Mus musculus
  siRNA target sequence for Cntn3 (NM_008779.1,1769-1787).
gatcccctattagacataa

SEQ ID NO: 698090 - DNA, 19 bp, Mus musculus
  siRNA target sequence for Cntn3 (NM_008779.1,1773-1791).
ccctattagacataatgtt

SEQ ID NO: 698091 - DNA, 19 bp, Mus musculus
  siRNA target sequence for Cntn3 (NM_008779.1,1774-1792).
cctattagacataatgttt

SEQ ID NO: 698092 - DNA, 19 bp, Mus musculus
  siRNA target sequence for Cntn3 (NM_008779.1,1809-1827).
gagcccttacagactttaa

SEQ ID NO: 698093 - DNA, 19 bp, Mus musculus
  siRNA target sequence for Cntn3 (NM_008779.1,1861-1879).
gagttcatctggtgattta

SEQ ID NO: 698094 - DNA, 19 bp, Mus musculus
  siRNA target sequence for Cntn3 (NM_008779.1,1863-1881).
gttcatctggtgatttaat

SEQ ID NO: 698095 - DNA, 19 bp, Mus musculus
  siRNA target sequence for Cntn3 (NM_008779.1,1904-1922).
cacagtgggaagtacgtat

SEQ ID NO: 698096 - DNA, 19 bp, Mus musculus
  siRNA target sequence for Cntn3 (NM_008779.1,1988-2006).
gggccaccggaaaatgtga

SEQ ID NO: 698097 - DNA, 19 bp, Mus musculus
  siRNA target sequence for Cntn3 (NM_008779.1,1989-2007).
ggccaccggaaaatgtgaa

SEQ ID NO: 698098 - DNA, 19 bp, Mus musculus
  siRNA target sequence for Cntn3 (NM_008779.1,2051-2069).
gaaggcacggacagtcata

SEQ ID NO: 698099 - DNA, 19 bp, Mus musculus
  siRNA target sequence for Cntn3 (NM_008779.1,2062-2080).
cagtcatagcccagttata

SEQ ID NO: 698100 - DNA, 19 bp, Mus musculus
  siRNA target sequence for Cntn3 (NM_008779.1,2066-2084).
catagcccagttatatcgt

SEQ ID NO: 698101 - DNA, 19 bp, Mus musculus
  siRNA target sequence for Cntn3 (NM_008779.1,2171-2189).
gctactgtcgtggagttaa

SEQ ID NO: 698102 - DNA, 19 bp, Mus musculus
  siRNA target sequence for Cntn3 (NM_008779.1,2172-2190).
ctactgtcgtggagttaaa

SEQ ID NO: 698103 - DNA, 19 bp, Mus musculus
  siRNA target sequence for Cntn3 (NM_008779.1,2213-2231).
cgcattgtagccagtaaca

SEQ ID NO: 698104 - DNA, 19 bp, Mus musculus
  siRNA target sequence for Cntn3 (NM_008779.1,2215-2233).
cattgtagccagtaacaaa

SEQ ID NO: 698105 - DNA, 19 bp, Mus musculus
  siRNA target sequence for Cntn3 (NM_008779.1,2253-2271).
gtttaccctcagaaaaagt

SEQ ID NO: 698106 - DNA, 19 bp, Mus musculus
  siRNA target sequence for Cntn3 (NM_008779.1,2328-2346).
gaagccgatctgaactagt

SEQ ID NO: 698107 - DNA, 19 bp, Mus musculus
  siRNA target sequence for Cntn3 (NM_008779.1,2331-2349).
gccgatctgaactagtgat

SEQ ID NO: 698108 - DNA, 19 bp, Mus musculus
  siRNA target sequence for Cntn3 (NM_008779.1,2332-2350).
ccgatctgaactagtgata

SEQ ID NO: 698109 - DNA, 19 bp, Mus musculus
  siRNA target sequence for Cntn3 (NM_008779.1,2333-2351).
cgatctgaactagtgataa

SEQ ID NO: 698110 - DNA, 19 bp, Mus musculus
  siRNA target sequence for Cntn3 (NM_008779.1,2508-2526).
cgccatatgaagttaaagt

SEQ ID NO: 698111 - DNA, 19 bp, Mus musculus
  siRNA target sequence for Cntn3 (NM_008779.1,2525-2543).
gtgggagtttacaataaca

SEQ ID NO: 698112 - DNA, 19 bp, Mus musculus
  siRNA target sequence for Cntn3 (NM_008779.1,2680-2698).
gttgagcaatggacattta

SEQ ID NO: 698113 - DNA, 19 bp, Mus musculus
  siRNA target sequence for Cntn3 (NM_008779.1,2710-2728).
ggtgcggtactggaacaat

SEQ ID NO: 698114 - DNA, 19 bp, Mus musculus
  siRNA target sequence for Cntn3 (NM_008779.1,2741-2759).
gaatcatcccgcaaagtga

SEQ ID NO: 698115 - DNA, 19 bp, Mus musculus
  siRNA target sequence for Cntn3 (NM_008779.1,2823-2841).
cagctgtccgggcttacaa

SEQ ID NO: 698116 - DNA, 19 bp, Mus musculus
  siRNA target sequence for Cntn3 (NM_008779.1,2825-2843).
gctgtccgggcttacaaca

SEQ ID NO: 698117 - DNA, 19 bp, Mus musculus
  siRNA target sequence for Cntn3 (NM_008779.1,2929-2947).
gaatgctacagacactaaa

SEQ ID NO: 698118 - DNA, 19 bp, Mus musculus
  siRNA target sequence for Cntn3 (NM_008779.1,2939-2957).
gacactaaagtgctactta

SEQ ID NO: 698119 - DNA, 19 bp, Mus musculus
  siRNA target sequence for Cntn3 (NM_008779.1,2976-2994).
ccatggagaatgaatcaga

SEQ ID NO: 698120 - DNA, 19 bp, Mus musculus
  siRNA target sequence for Cntn3 (NM_008779.1,2996-3014).
gtaacaggctacaaggttt

SEQ ID NO: 698121 - DNA, 19 bp, Mus musculus
  siRNA target sequence for Cntn3 (NM_008779.1,3021-3039).
ggactagcagtcagaataa

SEQ ID NO: 698122 - DNA, 19 bp, Mus musculus
  siRNA target sequence for Cntn3 (NM_008779.1,3022-3040).
gactagcagtcagaataat

SEQ ID NO: 698123 - DNA, 19 bp, Mus musculus
  siRNA target sequence for Cntn3 (NM_008779.1,3041-3059).
gtgcacgtgctgaacacaa

SEQ ID NO: 698124 - DNA, 19 bp, Mus musculus
  siRNA target sequence for Cntn3 (NM_008779.1,3043-3061).
gcacgtgctgaacacaaat

SEQ ID NO: 698125 - DNA, 19 bp, Mus musculus
  siRNA target sequence for Cntn3 (NM_008779.1,3044-3062).
cacgtgctgaacacaaata

SEQ ID NO: 698126 - DNA, 19 bp, Mus musculus
  siRNA target sequence for Cntn3 (NM_008779.1,3046-3064).
cgtgctgaacacaaataaa

SEQ ID NO: 698127 - DNA, 19 bp, Mus musculus
  siRNA target sequence for Cntn3 (NM_008779.1,3198-3216).
ccacgtcagccatttctaa

SEQ ID NO: 698128 - DNA, 19 bp, Mus musculus
  siRNA target sequence for Cntn3 (NM_008779.1,3201-3219).
cgtcagccatttctaacat

SEQ ID NO: 698129 - DNA, 19 bp, Mus musculus
  siRNA target sequence for Tulp2 (NM_008807.1,334-352).
ctggctgggcggaaaagga

SEQ ID NO: 698130 - DNA, 19 bp, Mus musculus
  siRNA target sequence for Tulp2 (NM_008807.1,534-552).
gctgggagtcgtctgttat

SEQ ID NO: 698131 - DNA, 19 bp, Mus musculus
  siRNA target sequence for Tulp2 (NM_008807.1,538-556).
ggagtcgtctgttatgaga

SEQ ID NO: 698132 - DNA, 19 bp, Mus musculus
  siRNA target sequence for Tulp2 (NM_008807.1,652-670).
gatcaggattccatattga

SEQ ID NO: 698133 - DNA, 19 bp, Mus musculus
  siRNA target sequence for Tulp2 (NM_008807.1,746-764).
gcgcatacgtactcaattt

SEQ ID NO: 698134 - DNA, 19 bp, Mus musculus
  siRNA target sequence for Tulp2 (NM_008807.1,747-765).
cgcatacgtactcaatttt

SEQ ID NO: 698135 - DNA, 19 bp, Mus musculus
  siRNA target sequence for Tulp2 (NM_008807.1,749-767).
catacgtactcaattttca

SEQ ID NO: 698136 - DNA, 19 bp, Mus musculus
  siRNA target sequence for Tulp2 (NM_008807.1,782-800).
gggcttcagtcaagaactt

SEQ ID NO: 698137 - DNA, 19 bp, Mus musculus
  siRNA target sequence for Tulp2 (NM_008807.1,848-866).
gccgtgtggccccaaacat

SEQ ID NO: 698138 - DNA, 19 bp, Mus musculus
  siRNA target sequence for Tulp2 (NM_008807.1,849-867).
ccgtgtggccccaaacata

SEQ ID NO: 698139 - DNA, 19 bp, Mus musculus
  siRNA target sequence for Tulp2 (NM_008807.1,850-868).
cgtgtggccccaaacatat

SEQ ID NO: 698140 - DNA, 19 bp, Mus musculus
  siRNA target sequence for Tulp2 (NM_008807.1,873-891).
gatggatttccgatatcct

SEQ ID NO: 698141 - DNA, 19 bp, Mus musculus
  siRNA target sequence for Tulp2 (NM_008807.1,907-925).
gccttcgccatctgcttat

SEQ ID NO: 698142 - DNA, 19 bp, Mus musculus
  siRNA target sequence for Peg3 (NM_008817.1,80-98).
ggttccccaggcctaatga

SEQ ID NO: 698143 - DNA, 19 bp, Mus musculus
  siRNA target sequence for Peg3 (NM_008817.1,85-103).
cccaggcctaatgataact

SEQ ID NO: 698144 - DNA, 19 bp, Mus musculus
  siRNA target sequence for Peg3 (NM_008817.1,141-159).
ccaggagaggggttatgaa

SEQ ID NO: 698145 - DNA, 19 bp, Mus musculus
  siRNA target sequence for Peg3 (NM_008817.1,231-249).
gaggcgttaccactttgat

SEQ ID NO: 698146 - DNA, 19 bp, Mus musculus
  siRNA target sequence for Peg3 (NM_008817.1,234-252).
gcgttaccactttgattct

SEQ ID NO: 698147 - DNA, 19 bp, Mus musculus
  siRNA target sequence for Peg3 (NM_008817.1,263-281).
gttcgggccatgagcataa

SEQ ID NO: 698148 - DNA, 19 bp, Mus musculus
  siRNA target sequence for Peg3 (NM_008817.1,370-388).
gagtcgcagtcaatcgatt

SEQ ID NO: 698149 - DNA, 19 bp, Mus musculus
  siRNA target sequence for Peg3 (NM_008817.1,372-390).
gtcgcagtcaatcgatttt

SEQ ID NO: 698150 - DNA, 19 bp, Mus musculus
  siRNA target sequence for Peg3 (NM_008817.1,473-491).
ctagggagaacctctatga

SEQ ID NO: 698151 - DNA, 19 bp, Mus musculus
  siRNA target sequence for Peg3 (NM_008817.1,611-629).
cagagcaccgccaaatcca

SEQ ID NO: 698152 - DNA, 19 bp, Mus musculus
  siRNA target sequence for Peg3 (NM_008817.1,684-702).
gcctagcccgacctttagt

SEQ ID NO: 698153 - DNA, 19 bp, Mus musculus
  siRNA target sequence for Peg3 (NM_008817.1,686-704).
ctagcccgacctttagtga

SEQ ID NO: 698154 - DNA, 19 bp, Mus musculus
  siRNA target sequence for Peg3 (NM_008817.1,711-729).
gaagatgtatggcaaagat

SEQ ID NO: 698155 - DNA, 19 bp, Mus musculus
  siRNA target sequence for Peg3 (NM_008817.1,934-952).
ctgacctgtccaaacttca

SEQ ID NO: 698156 - DNA, 19 bp, Mus musculus
  siRNA target sequence for Peg3 (NM_008817.1,936-954).
gacctgtccaaacttcaat

SEQ ID NO: 698157 - DNA, 19 bp, Mus musculus
  siRNA target sequence for Peg3 (NM_008817.1,938-956).
cctgtccaaacttcaatga

SEQ ID NO: 698158 - DNA, 19 bp, Mus musculus
  siRNA target sequence for Peg3 (NM_008817.1,941-959).
gtccaaacttcaatgagtt

SEQ ID NO: 698159 - DNA, 19 bp, Mus musculus
  siRNA target sequence for Peg3 (NM_008817.1,955-973).
gagtttcggaagatgtaca

SEQ ID NO: 698160 - DNA, 19 bp, Mus musculus
  siRNA target sequence for Peg3 (NM_008817.1,1061-1079).
gaggaaacccatttgaaaa

SEQ ID NO: 698161 - DNA, 19 bp, Mus musculus
  siRNA target sequence for Peg3 (NM_008817.1,1144-1162).
gagaagctgttcgacttta

SEQ ID NO: 698162 - DNA, 19 bp, Mus musculus
  siRNA target sequence for Peg3 (NM_008817.1,1149-1167).
gctgttcgactttaacaat

SEQ ID NO: 698163 - DNA, 19 bp, Mus musculus
  siRNA target sequence for Peg3 (NM_008817.1,1197-1215).
ctccagcgagcatcagaaa

SEQ ID NO: 698164 - DNA, 19 bp, Mus musculus
  siRNA target sequence for Peg3 (NM_008817.1,1199-1217).
ccagcgagcatcagaaaaa

SEQ ID NO: 698165 - DNA, 19 bp, Mus musculus
  siRNA target sequence for Peg3 (NM_008817.1,1219-1237).
cgttcccgaaggaacttct

SEQ ID NO: 698166 - DNA, 19 bp, Mus musculus
  siRNA target sequence for Peg3 (NM_008817.1,1220-1238).
gttcccgaaggaacttctt

SEQ ID NO: 698167 - DNA, 19 bp, Mus musculus
  siRNA target sequence for Peg3 (NM_008817.1,1223-1241).
cccgaaggaacttctttga

SEQ ID NO: 698168 - DNA, 19 bp, Mus musculus
  siRNA target sequence for Peg3 (NM_008817.1,1242-1260).
gggcagaggatttgagaaa

SEQ ID NO: 698169 - DNA, 19 bp, Mus musculus
  siRNA target sequence for Peg3 (NM_008817.1,1257-1275).
gaaacccttcgttgaatct

SEQ ID NO: 698170 - DNA, 19 bp, Mus musculus
  siRNA target sequence for Peg3 (NM_008817.1,1276-1294).
cagaagagtcatactataa

SEQ ID NO: 698171 - DNA, 19 bp, Mus musculus
  siRNA target sequence for Peg3 (NM_008817.1,1278-1296).
gaagagtcatactataaca

SEQ ID NO: 698172 - DNA, 19 bp, Mus musculus
  siRNA target sequence for Peg3 (NM_008817.1,1281-1299).
gagtcatactataacaaga

SEQ ID NO: 698173 - DNA, 19 bp, Mus musculus
  siRNA target sequence for Peg3 (NM_008817.1,1348-1366).
cctaatgacaagctgaaat

SEQ ID NO: 698174 - DNA, 19 bp, Mus musculus
  siRNA target sequence for Peg3 (NM_008817.1,1349-1367).
ctaatgacaagctgaaatt

SEQ ID NO: 698175 - DNA, 19 bp, Mus musculus
  siRNA target sequence for Peg3 (NM_008817.1,1384-1402).
ggctcccagggcaaatcct

SEQ ID NO: 698176 - DNA, 19 bp, Mus musculus
  siRNA target sequence for Peg3 (NM_008817.1,1390-1408).
cagggcaaatcctatgaga

SEQ ID NO: 698177 - DNA, 19 bp, Mus musculus
  siRNA target sequence for Peg3 (NM_008817.1,1400-1418).
cctatgagaggtctgttat

SEQ ID NO: 698178 - DNA, 19 bp, Mus musculus
  siRNA target sequence for Peg3 (NM_008817.1,1401-1419).
ctatgagaggtctgttatt

SEQ ID NO: 698179 - DNA, 19 bp, Mus musculus
  siRNA target sequence for Peg3 (NM_008817.1,1405-1423).
gagaggtctgttattcata

SEQ ID NO: 698180 - DNA, 19 bp, Mus musculus
  siRNA target sequence for Peg3 (NM_008817.1,1409-1427).
ggtctgttattcatagctt

SEQ ID NO: 698181 - DNA, 19 bp, Mus musculus
  siRNA target sequence for Peg3 (NM_008817.1,1456-1474).
ggtggactggggttcagta

SEQ ID NO: 698182 - DNA, 19 bp, Mus musculus
  siRNA target sequence for Peg3 (NM_008817.1,1624-1642).
gagcaaatgaccatattca

SEQ ID NO: 698183 - DNA, 19 bp, Mus musculus
  siRNA target sequence for Peg3 (NM_008817.1,1626-1644).
gcaaatgaccatattcaat

SEQ ID NO: 698184 - DNA, 19 bp, Mus musculus
  siRNA target sequence for Peg3 (NM_008817.1,1654-1672).
ggggagaatcctccattta

SEQ ID NO: 698185 - DNA, 19 bp, Mus musculus
  siRNA target sequence for Peg3 (NM_008817.1,1655-1673).
gggagaatcctccatttat

SEQ ID NO: 698186 - DNA, 19 bp, Mus musculus
  siRNA target sequence for Peg3 (NM_008817.1,1656-1674).
ggagaatcctccatttata

SEQ ID NO: 698187 - DNA, 19 bp, Mus musculus
  siRNA target sequence for Peg3 (NM_008817.1,1745-1763).
caactaccacacaccaaat

SEQ ID NO: 698188 - DNA, 19 bp, Mus musculus
  siRNA target sequence for Peg3 (NM_008817.1,1773-1791).
gctgagcctccaagtcttt

SEQ ID NO: 698189 - DNA, 19 bp, Mus musculus
  siRNA target sequence for Peg3 (NM_008817.1,1866-1884).
gctcgtgccaaaaagaagt

SEQ ID NO: 698190 - DNA, 19 bp, Mus musculus
  siRNA target sequence for Peg3 (NM_008817.1,1867-1885).
ctcgtgccaaaaagaagta

SEQ ID NO: 698191 - DNA, 19 bp, Mus musculus
  siRNA target sequence for Peg3 (NM_008817.1,1869-1887).
cgtgccaaaaagaagtaca

SEQ ID NO: 698192 - DNA, 19 bp, Mus musculus
  siRNA target sequence for Peg3 (NM_008817.1,2114-2132).
gttatgcccaagaacgttt

SEQ ID NO: 698193 - DNA, 19 bp, Mus musculus
  siRNA target sequence for Peg3 (NM_008817.1,2137-2155).
caagaacaagtgcgtaaat

SEQ ID NO: 698194 - DNA, 19 bp, Mus musculus
  siRNA target sequence for Peg3 (NM_008817.1,2140-2158).
gaacaagtgcgtaaattca

SEQ ID NO: 698195 - DNA, 19 bp, Mus musculus
  siRNA target sequence for Peg3 (NM_008817.1,2211-2229).
ctatgcccaagagacattt

SEQ ID NO: 698196 - DNA, 19 bp, Mus musculus
  siRNA target sequence for Peg3 (NM_008817.1,2233-2251).
gccgaggagccccatgata

SEQ ID NO: 698197 - DNA, 19 bp, Mus musculus
  siRNA target sequence for Peg3 (NM_008817.1,2235-2253).
cgaggagccccatgataaa

SEQ ID NO: 698198 - DNA, 19 bp, Mus musculus
  siRNA target sequence for Peg3 (NM_008817.1,2241-2259).
gccccatgataaagaaact

SEQ ID NO: 698199 - DNA, 19 bp, Mus musculus
  siRNA target sequence for Peg3 (NM_008817.1,2254-2272).
gaaactcatggtcaaaaaa

SEQ ID NO: 698200 - DNA, 19 bp, Mus musculus
  siRNA target sequence for Peg3 (NM_008817.1,2264-2282).
gtcaaaaaattcatgacaa

SEQ ID NO: 698201 - DNA, 19 bp, Mus musculus
  siRNA target sequence for Peg3 (NM_008817.1,2278-2296).
gacaaagagccatatggta

SEQ ID NO: 698202 - DNA, 19 bp, Mus musculus
  siRNA target sequence for Peg3 (NM_008817.1,2676-2694).
cgctggtgatgcaatctat

SEQ ID NO: 698203 - DNA, 19 bp, Mus musculus
  siRNA target sequence for Peg3 (NM_008817.1,2680-2698).
ggtgatgcaatctatgaat

SEQ ID NO: 698204 - DNA, 19 bp, Mus musculus
  siRNA target sequence for Peg3 (NM_008817.1,2708-2726).
gtgggctgggctttactga

SEQ ID NO: 698205 - DNA, 19 bp, Mus musculus
  siRNA target sequence for Peg3 (NM_008817.1,2715-2733).
gggctttactgatctcaat

SEQ ID NO: 698206 - DNA, 19 bp, Mus musculus
  siRNA target sequence for Peg3 (NM_008817.1,2814-2832).
ccactccgtcagcgaattt

SEQ ID NO: 698207 - DNA, 19 bp, Mus musculus
  siRNA target sequence for Peg3 (NM_008817.1,2819-2837).
ccgtcagcgaatttgagaa

SEQ ID NO: 698208 - DNA, 19 bp, Mus musculus
  siRNA target sequence for Peg3 (NM_008817.1,2820-2838).
cgtcagcgaatttgagaaa

SEQ ID NO: 698209 - DNA, 19 bp, Mus musculus
  siRNA target sequence for Peg3 (NM_008817.1,2827-2845).
gaatttgagaaaaaatgct

SEQ ID NO: 698210 - DNA, 19 bp, Mus musculus
  siRNA target sequence for Peg3 (NM_008817.1,2870-2888).
caaaatgtggggagtcttt

SEQ ID NO: 698211 - DNA, 19 bp, Mus musculus
  siRNA target sequence for Peg3 (NM_008817.1,2878-2896).
ggggagtctttcattcaca

SEQ ID NO: 698212 - DNA, 19 bp, Mus musculus
  siRNA target sequence for Peg3 (NM_008817.1,2957-2975).
cctgtgatgacgctttcat

SEQ ID NO: 698213 - DNA, 19 bp, Mus musculus
  siRNA target sequence for Peg3 (NM_008817.1,2988-3006).
cgtgagaccaaggagaaat

SEQ ID NO: 698214 - DNA, 19 bp, Mus musculus
  siRNA target sequence for Peg3 (NM_008817.1,2989-3007).
gtgagaccaaggagaaatt

SEQ ID NO: 698215 - DNA, 19 bp, Mus musculus
  siRNA target sequence for Peg3 (NM_008817.1,3184-3202).
gagtatcaggggagtgaaa

SEQ ID NO: 698216 - DNA, 19 bp, Mus musculus
  siRNA target sequence for Peg3 (NM_008817.1,3186-3204).
gtatcaggggagtgaaaca

SEQ ID NO: 698217 - DNA, 19 bp, Mus musculus
  siRNA target sequence for Peg3 (NM_008817.1,3214-3232).
cttttcgagtgcacaatct

SEQ ID NO: 698218 - DNA, 19 bp, Mus musculus
  siRNA target sequence for Peg3 (NM_008817.1,3291-3309).
ggatgagccctatgagtat

SEQ ID NO: 698219 - DNA, 19 bp, Mus musculus
  siRNA target sequence for Peg3 (NM_008817.1,3358-3376).
cacatcccactgtacgaat

SEQ ID NO: 698220 - DNA, 19 bp, Mus musculus
  siRNA target sequence for Peg3 (NM_008817.1,3367-3385).
ctgtacgaatgcaaagatt

SEQ ID NO: 698221 - DNA, 19 bp, Mus musculus
  siRNA target sequence for Peg3 (NM_008817.1,3445-3463).
cgagaaggtgggtcagaaa

SEQ ID NO: 698222 - DNA, 19 bp, Mus musculus
  siRNA target sequence for Peg3 (NM_008817.1,3522-3540).
gcgaatccaggggtcaaat

SEQ ID NO: 698223 - DNA, 19 bp, Mus musculus
  siRNA target sequence for Peg3 (NM_008817.1,3810-3828).
gcccgatggtgcagacatt

SEQ ID NO: 698224 - DNA, 19 bp, Mus musculus
  siRNA target sequence for Peg3 (NM_008817.1,3868-3886).
gttgaagaaccatactaca

SEQ ID NO: 698225 - DNA, 19 bp, Mus musculus
  siRNA target sequence for Peg3 (NM_008817.1,3871-3889).
gaagaaccatactacaact

SEQ ID NO: 698226 - DNA, 19 bp, Mus musculus
  siRNA target sequence for Peg3 (NM_008817.1,3926-3944).
cctttggcgagcatctgaa

SEQ ID NO: 698227 - DNA, 19 bp, Mus musculus
  siRNA target sequence for Peg3 (NM_008817.1,3927-3945).
ctttggcgagcatctgaaa

SEQ ID NO: 698228 - DNA, 19 bp, Mus musculus
  siRNA target sequence for Peg3 (NM_008817.1,3947-3965).
gtcacgccagtgtgatcat

SEQ ID NO: 698229 - DNA, 19 bp, Mus musculus
  siRNA target sequence for Peg3 (NM_008817.1,3949-3967).
cacgccagtgtgatcatct

SEQ ID NO: 698230 - DNA, 19 bp, Mus musculus
  siRNA target sequence for Peg3 (NM_008817.1,4042-4060).
caggcagacgacaagtact

SEQ ID NO: 698231 - DNA, 19 bp, Mus musculus
  siRNA target sequence for Pep4 (NM_008820.1,539-557).
ccttcgagggcattagcaa

SEQ ID NO: 698232 - DNA, 19 bp, Mus musculus
  siRNA target sequence for Pep4 (NM_008820.1,544-562).
gagggcattagcaagttca

SEQ ID NO: 698233 - DNA, 19 bp, Mus musculus
  siRNA target sequence for Pep4 (NM_008820.1,546-564).
gggcattagcaagttcaat

SEQ ID NO: 698234 - DNA, 19 bp, Mus musculus
  siRNA target sequence for Pep4 (NM_008820.1,548-566).
gcattagcaagttcaatgt

SEQ ID NO: 698235 - DNA, 19 bp, Mus musculus
  siRNA target sequence for Pep4 (NM_008820.1,631-649).
gaggttttgcgctacacaa

SEQ ID NO: 698236 - DNA, 19 bp, Mus musculus
  siRNA target sequence for Pep4 (NM_008820.1,633-651).
ggttttgcgctacacaaat

SEQ ID NO: 698237 - DNA, 19 bp, Mus musculus
  siRNA target sequence for Pep4 (NM_008820.1,667-685).
gcccaccgtgaggtaatga

SEQ ID NO: 698238 - DNA, 19 bp, Mus musculus
  siRNA target sequence for Pep4 (NM_008820.1,668-686).
cccaccgtgaggtaatgaa

SEQ ID NO: 698239 - DNA, 19 bp, Mus musculus
  siRNA target sequence for Pep4 (NM_008820.1,727-745).
ctgttccagcattattgtt

SEQ ID NO: 698240 - DNA, 19 bp, Mus musculus
  siRNA target sequence for Pep4 (NM_008820.1,732-750).
ccagcattattgttactct

SEQ ID NO: 698241 - DNA, 19 bp, Mus musculus
  siRNA target sequence for Pep4 (NM_008820.1,733-751).
cagcattattgttactcta

SEQ ID NO: 698242 - DNA, 19 bp, Mus musculus
  siRNA target sequence for Pep4 (NM_008820.1,852-870).
gatcaaggatggagatatt

SEQ ID NO: 698243 - DNA, 19 bp, Mus musculus
  siRNA target sequence for Pep4 (NM_008820.1,931-949).
ccagccaaccggaagttca

SEQ ID NO: 698244 - DNA, 19 bp, Mus musculus
  siRNA target sequence for Pep4 (NM_008820.1,1022-1040).
gggtctggtggcctgatat

SEQ ID NO: 698245 - DNA, 19 bp, Mus musculus
  siRNA target sequence for Pep4 (NM_008820.1,1285-1303).
gtggagccaggcatctact

SEQ ID NO: 698246 - DNA, 19 bp, Mus musculus
  siRNA target sequence for Pep4 (NM_008820.1,1290-1308).
gccaggcatctacttcatt

SEQ ID NO: 698247 - DNA, 19 bp, Mus musculus
  siRNA target sequence for Pep4 (NM_008820.1,1292-1310).
caggcatctacttcattga

SEQ ID NO: 698248 - DNA, 19 bp, Mus musculus
  siRNA target sequence for Pep4 (NM_008820.1,1342-1360).
gcccaagcctgcttcttta

SEQ ID NO: 698249 - DNA, 19 bp, Mus musculus
  siRNA target sequence for Pep4 (NM_008820.1,1401-1419).
gcggatcgaggaagatgtt

SEQ ID NO: 698250 - DNA, 19 bp, Mus musculus
  siRNA target sequence for Pep4 (NM_008820.1,1403-1421).
ggatcgaggaagatgttgt

SEQ ID NO: 698251 - DNA, 19 bp, Mus musculus
  siRNA target sequence for Pet2 (NM_008821.1,1556-1574).
gagaatataagcatactca

SEQ ID NO: 698252 - DNA, 19 bp, Mus musculus
  siRNA target sequence for Pet2 (NM_008821.1,1615-1633).
gacaatttctgacattaaa

SEQ ID NO: 698253 - DNA, 19 bp, Mus musculus
  siRNA target sequence for Pet2 (NM_008821.1,1705-1723).
ccctcaaagtactgatgta

SEQ ID NO: 698254 - DNA, 19 bp, Mus musculus
  siRNA target sequence for Pet2 (NM_008821.1,1706-1724).
cctcaaagtactgatgtaa

SEQ ID NO: 698255 - DNA, 19 bp, Mus musculus
  siRNA target sequence for Pet2 (NM_008821.1,1707-1725).
ctcaaagtactgatgtaaa

SEQ ID NO: 698256 - DNA, 19 bp, Mus musculus
  siRNA target sequence for Pet2 (NM_008821.1,1709-1727).
caaagtactgatgtaaatt

SEQ ID NO: 698257 - DNA, 19 bp, Mus musculus
  siRNA target sequence for Pet2 (NM_008821.1,1789-1807).
caaagatggcgattccaat

SEQ ID NO: 698258 - DNA, 19 bp, Mus musculus
  siRNA target sequence for Pet2 (NM_008821.1,1855-1873).
ctcatatatccctcaaaat

SEQ ID NO: 698259 - DNA, 19 bp, Mus musculus
  siRNA target sequence for Pet2 (NM_008821.1,1857-1875).
catatatccctcaaaatgt

SEQ ID NO: 698260 - DNA, 19 bp, Mus musculus
  siRNA target sequence for Pet2 (NM_008821.1,1911-1929).
gaaggcgttttcatccata

SEQ ID NO: 698261 - DNA, 19 bp, Mus musculus
  siRNA target sequence for Pet2 (NM_008821.1,1965-1983).
gagggggaagcctgttcta

SEQ ID NO: 698262 - DNA, 19 bp, Mus musculus
  siRNA target sequence for Pet2 (NM_008821.1,1971-1989).
gaagcctgttctatccata

SEQ ID NO: 698263 - DNA, 19 bp, Mus musculus
  siRNA target sequence for Pet2 (NM_008821.1,1974-1992).
gcctgttctatccatatga

SEQ ID NO: 698264 - DNA, 19 bp, Mus musculus
  siRNA target sequence for Pet2 (NM_008821.1,2036-2054).
ctgttccaccgttatgagt

SEQ ID NO: 698265 - DNA, 19 bp, Mus musculus
  siRNA target sequence for Pet2 (NM_008821.1,2079-2097).
cacaggtagtacaaagcat

SEQ ID NO: 698266 - DNA, 19 bp, Mus musculus
  siRNA target sequence for Pet2 (NM_008821.1,2154-2172).
gttttttccaacgttatga

SEQ ID NO: 698267 - DNA, 19 bp, Mus musculus
  siRNA target sequence for Pet2 (NM_008821.1,2176-2194).
ggaggctagagaggttata

SEQ ID NO: 698268 - DNA, 19 bp, Mus musculus
  siRNA target sequence for Pet2 (NM_008821.1,2179-2197).
ggctagagaggttatagga

SEQ ID NO: 698269 - DNA, 19 bp, Mus musculus
  siRNA target sequence for Pet2 (NM_008821.1,2364-2382).
gcagtgagcaatatgacat

SEQ ID NO: 698270 - DNA, 19 bp, Mus musculus
  siRNA target sequence for Pet2 (NM_008821.1,2390-2408).
gatagcttgatagatgaat

SEQ ID NO: 698271 - DNA, 19 bp, Mus musculus
  siRNA target sequence for Pet2 (NM_008821.1,2487-2505).
caagtggtcgctttgtgta

SEQ ID NO: 698272 - DNA, 19 bp, Mus musculus
  siRNA target sequence for Pet2 (NM_008821.1,2511-2529).
cctgtggtgcaagattatt

SEQ ID NO: 698273 - DNA, 19 bp, Mus musculus
  siRNA target sequence for Pet2 (NM_008821.1,2512-2530).
ctgtggtgcaagattattt

SEQ ID NO: 698274 - DNA, 19 bp, Mus musculus
  siRNA target sequence for Pet2 (NM_008821.1,2514-2532).
gtggtgcaagattatttgt

SEQ ID NO: 698275 - DNA, 19 bp, Mus musculus
  siRNA target sequence for Pet2 (NM_008821.1,2542-2560).
ctcactagagcatgttttt

SEQ ID NO: 698276 - DNA, 19 bp, Mus musculus
  siRNA target sequence for Pet2 (NM_008821.1,2577-2595).
gtgtcaacactgttcattt

SEQ ID NO: 698277 - DNA, 19 bp, Mus musculus
  siRNA target sequence for Pet2 (NM_008821.1,2579-2597).
gtcaacactgttcatttta

SEQ ID NO: 698278 - DNA, 19 bp, Mus musculus
  siRNA target sequence for Pet2 (NM_008821.1,2625-2643).
gcagtgatgatctaaaagt

SEQ ID NO: 698279 - DNA, 19 bp, Mus musculus
  siRNA target sequence for Pet2 (NM_008821.1,2653-2671).
ggactggcttaaaaaacga

SEQ ID NO: 698280 - DNA, 19 bp, Mus musculus
  siRNA target sequence for Pet2 (NM_008821.1,2654-2672).
gactggcttaaaaaacgat

SEQ ID NO: 698281 - DNA, 19 bp, Mus musculus
  siRNA target sequence for Pet2 (NM_008821.1,2659-2677).
gcttaaaaaacgatcagta

SEQ ID NO: 698282 - DNA, 19 bp, Mus musculus
  siRNA target sequence for Pet2 (NM_008821.1,2670-2688).
gatcagtactgaactttga

SEQ ID NO: 698283 - DNA, 19 bp, Mus musculus
  siRNA target sequence for Pet2 (NM_008821.1,2804-2822).
gcaggcacccacatgacta

SEQ ID NO: 698284 - DNA, 19 bp, Mus musculus
  siRNA target sequence for Pet2 (NM_008821.1,2836-2854).
gcatgggggagcatctcat

SEQ ID NO: 698285 - DNA, 19 bp, Mus musculus
  siRNA target sequence for Pet2 (NM_008821.1,2837-2855).
catgggggagcatctcata

SEQ ID NO: 698286 - DNA, 19 bp, Mus musculus
  siRNA target sequence for Pet2 (NM_008821.1,2870-2888).
ccagattccccctttaggt

SEQ ID NO: 698287 - DNA, 19 bp, Mus musculus
  siRNA target sequence for Pet2 (NM_008821.1,2871-2889).
cagattccccctttaggtt

SEQ ID NO: 698288 - DNA, 19 bp, Mus musculus
  siRNA target sequence for Pet2 (NM_008821.1,2878-2896).
cccctttaggttcttaact

SEQ ID NO: 698289 - DNA, 19 bp, Mus musculus
  siRNA target sequence for Pet2 (NM_008821.1,2879-2897).
ccctttaggttcttaactt

SEQ ID NO: 698290 - DNA, 19 bp, Mus musculus
  siRNA target sequence for Pet2 (NM_008821.1,2939-2957).
gcccacccagcttcaaagt

SEQ ID NO: 698291 - DNA, 19 bp, Mus musculus
  siRNA target sequence for Pet2 (NM_008821.1,2991-3009).
gactgtatacagtctttgt

SEQ ID NO: 698292 - DNA, 19 bp, Mus musculus
  siRNA target sequence for Pet2 (NM_008821.1,3042-3060).
gtgggcaagatcagtttat

SEQ ID NO: 698293 - DNA, 19 bp, Mus musculus
  siRNA target sequence for Pet2 (NM_008821.1,3044-3062).
gggcaagatcagtttatga

SEQ ID NO: 698294 - DNA, 19 bp, Mus musculus
  siRNA target sequence for Pet2 (NM_008821.1,3196-3214).
gatcctggctagctacaat

SEQ ID NO: 698295 - DNA, 19 bp, Mus musculus
  siRNA target sequence for Pet2 (NM_008821.1,3297-3315).
ctacagtgaaaggtgtata

SEQ ID NO: 698296 - DNA, 19 bp, Mus musculus
  siRNA target sequence for Pet2 (NM_008821.1,3319-3337).
ctatggcccaagaagtgaa

SEQ ID NO: 698297 - DNA, 19 bp, Mus musculus
  siRNA target sequence for Pet2 (NM_008821.1,3324-3342).
gcccaagaagtgaattcgt

SEQ ID NO: 698298 - DNA, 19 bp, Mus musculus
  siRNA target sequence for Pet2 (NM_008821.1,3390-3408).
cctgccagatcgttcagtt

SEQ ID NO: 698299 - DNA, 19 bp, Mus musculus
  siRNA target sequence for Pet2 (NM_008821.1,3425-3443).
ggaggaacaataaactgta

SEQ ID NO: 698300 - DNA, 19 bp, Mus musculus
  siRNA target sequence for Pet2 (NM_008821.1,3426-3444).
gaggaacaataaactgtat

SEQ ID NO: 698301 - DNA, 19 bp, Mus musculus
  siRNA target sequence for Pet2 (NM_008821.1,3483-3501).
ggctagaccatgaagtcaa

SEQ ID NO: 698302 - DNA, 19 bp, Mus musculus
  siRNA target sequence for Pet2 (NM_008821.1,3484-3502).
gctagaccatgaagtcaaa

SEQ ID NO: 698303 - DNA, 19 bp, Mus musculus
  siRNA target sequence for Pet2 (NM_008821.1,3535-3553).
gcttgccggcttaaagaat

SEQ ID NO: 698304 - DNA, 19 bp, Mus musculus
  siRNA target sequence for Pet2 (NM_008821.1,3539-3557).
gccggcttaaagaatgtga

SEQ ID NO: 698305 - DNA, 19 bp, Mus musculus
  siRNA target sequence for Pet2 (NM_008821.1,3571-3589).
gctgaaacgagataatttt

SEQ ID NO: 698306 - DNA, 19 bp, Mus musculus
  siRNA target sequence for Pet2 (NM_008821.1,3596-3614).
cgccacacttccctgttta

SEQ ID NO: 698307 - DNA, 19 bp, Mus musculus
  siRNA target sequence for Pgk1 (NM_008828.1,486-504).
ccaaactaggagatgtcta

SEQ ID NO: 698308 - DNA, 19 bp, Mus musculus
  siRNA target sequence for Pgk1 (NM_008828.1,655-673).
cttgggaggcgctaaagtt

SEQ ID NO: 698309 - DNA, 19 bp, Mus musculus
  siRNA target sequence for Pgk1 (NM_008828.1,688-706).
gctgatcaataatatgcta

SEQ ID NO: 698310 - DNA, 19 bp, Mus musculus
  siRNA target sequence for Pgk1 (NM_008828.1,734-752).
ggtggaatggcctttacct

SEQ ID NO: 698311 - DNA, 19 bp, Mus musculus
  siRNA target sequence for Pgk1 (NM_008828.1,783-801).
gcacatctctgtatgatga

SEQ ID NO: 698312 - DNA, 19 bp, Mus musculus
  siRNA target sequence for Pgk1 (NM_008828.1,784-802).
cacatctctgtatgatgaa

SEQ ID NO: 698313 - DNA, 19 bp, Mus musculus
  siRNA target sequence for Pgk1 (NM_008828.1,786-804).
catctctgtatgatgaaga

SEQ ID NO: 698314 - DNA, 19 bp, Mus musculus
  siRNA target sequence for Phxr2 (NM_008833.1,162-180).
gaggaaagtggcagtacat

SEQ ID NO: 698315 - DNA, 19 bp, Mus musculus
  siRNA target sequence for Phxr2 (NM_008833.1,164-182).
ggaaagtggcagtacatat

SEQ ID NO: 698316 - DNA, 19 bp, Mus musculus
  siRNA target sequence for Phxr2 (NM_008833.1,172-190).
gcagtacatatgggattat

SEQ ID NO: 698317 - DNA, 19 bp, Mus musculus
  siRNA target sequence for Phxr2 (NM_008833.1,183-201).
gggattattagaaaatata

SEQ ID NO: 698318 - DNA, 19 bp, Mus musculus
  siRNA target sequence for Phxr2 (NM_008833.1,203-221).
gtctaaaaatatctaaaga

SEQ ID NO: 698319 - DNA, 19 bp, Mus musculus
  siRNA target sequence for Phxr2 (NM_008833.1,223-241).
gttggaggtctatatgata

SEQ ID NO: 698320 - DNA, 19 bp, Mus musculus
  siRNA target sequence for Phxr2 (NM_008833.1,251-269).
ctcaacaagggcagctatt

SEQ ID NO: 698321 - DNA, 19 bp, Mus musculus
  siRNA target sequence for Phxr2 (NM_008833.1,253-271).
caacaagggcagctattaa

SEQ ID NO: 698322 - DNA, 19 bp, Mus musculus
  siRNA target sequence for Phxr2 (NM_008833.1,297-315).
gtgggaccattcatttttt

SEQ ID NO: 698323 - DNA, 19 bp, Mus musculus
  siRNA target sequence for Phxr3 (NM_008834.1,1037-1055).
gcatcatcaaagcatcttt

SEQ ID NO: 698324 - DNA, 19 bp, Mus musculus
  siRNA target sequence for Phxr3 (NM_008834.1,1090-1108).
ctcagagaagcaacaaatt

SEQ ID NO: 698325 - DNA, 19 bp, Mus musculus
  siRNA target sequence for Phxr3 (NM_008834.1,1100-1118).
caacaaattataaatctga

SEQ ID NO: 698326 - DNA, 19 bp, Mus musculus
  siRNA target sequence for Phxr3 (NM_008834.1,1125-1143).
caagttaagtaataacatt

SEQ ID NO: 698327 - DNA, 19 bp, Mus musculus
  siRNA target sequence for Phxr3 (NM_008834.1,1148-1166).
cttgggaagctgttactaa

SEQ ID NO: 698328 - DNA, 19 bp, Mus musculus
  siRNA target sequence for Phxr3 (NM_008834.1,1151-1169).
gggaagctgttactaagat

SEQ ID NO: 698329 - DNA, 19 bp, Mus musculus
  siRNA target sequence for Phxr3 (NM_008834.1,1237-1255).
gggctctctcggagcttaa

SEQ ID NO: 698330 - DNA, 19 bp, Mus musculus
  siRNA target sequence for Phxr4 (NM_008835.1,292-310).
cttcccaaatccttttcta

SEQ ID NO: 698331 - DNA, 19 bp, Mus musculus
  siRNA target sequence for Phxr4 (NM_008835.1,325-343).
gcaggttttggtatagata

SEQ ID NO: 698332 - DNA, 19 bp, Mus musculus
  siRNA target sequence for Phxr4 (NM_008835.1,328-346).
ggttttggtatagatactt

SEQ ID NO: 698333 - DNA, 19 bp, Mus musculus
  siRNA target sequence for Phxr4 (NM_008835.1,349-367).
gtcatacccagtttttcta

SEQ ID NO: 698334 - DNA, 19 bp, Mus musculus
  siRNA target sequence for Phxr4 (NM_008835.1,365-383).
ctatgggcatgctagttgt

SEQ ID NO: 698335 - DNA, 19 bp, Mus musculus
  siRNA target sequence for Phxr5 (NM_008836.2,49-67).
ggcagcgttgcctgtgaat

SEQ ID NO: 698336 - DNA, 19 bp, Mus musculus
  siRNA target sequence for Phxr5 (NM_008836.2,117-135).
gtatgaactgtcaataagt

SEQ ID NO: 698337 - DNA, 19 bp, Mus musculus
  siRNA target sequence for Phxr5 (NM_008836.2,149-167).
cctacacagaggtcagaaa

SEQ ID NO: 698338 - DNA, 19 bp, Mus musculus
  siRNA target sequence for Phxr5 (NM_008836.2,177-195).
ggggacagccacaggtata

SEQ ID NO: 698339 - DNA, 19 bp, Mus musculus
  siRNA target sequence for Pja1 (NM_008853.1,388-406).
cagatcaactgccaatcaa

SEQ ID NO: 698340 - DNA, 19 bp, Mus musculus
  siRNA target sequence for Pja1 (NM_008853.1,622-640).
ggatgccaggagtgaacaa

SEQ ID NO: 698341 - DNA, 19 bp, Mus musculus
  siRNA target sequence for Pja1 (NM_008853.1,696-714).
gggcatacaccgacgatta

SEQ ID NO: 698342 - DNA, 19 bp, Mus musculus
  siRNA target sequence for Pja1 (NM_008853.1,698-716).
gcatacaccgacgattact

SEQ ID NO: 698343 - DNA, 19 bp, Mus musculus
  siRNA target sequence for Pja1 (NM_008853.1,699-717).
catacaccgacgattacta

SEQ ID NO: 698344 - DNA, 19 bp, Mus musculus
  siRNA target sequence for Pja1 (NM_008853.1,719-737).
cgatactacgaggaagatt

SEQ ID NO: 698345 - DNA, 19 bp, Mus musculus
  siRNA target sequence for Pja1 (NM_008853.1,895-913).
caatggcagtggttatcct

SEQ ID NO: 698346 - DNA, 19 bp, Mus musculus
  siRNA target sequence for Pja1 (NM_008853.1,976-994).
cccttggcttcgctacaat

SEQ ID NO: 698347 - DNA, 19 bp, Mus musculus
  siRNA target sequence for Pja1 (NM_008853.1,978-996).
cttggcttcgctacaatga

SEQ ID NO: 698348 - DNA, 19 bp, Mus musculus
  siRNA target sequence for Pja1 (NM_008853.1,986-1004).
cgctacaatgagaatgaaa

SEQ ID NO: 698349 - DNA, 19 bp, Mus musculus
  siRNA target sequence for Pja1 (NM_008853.1,1353-1371).
gtgcagtgggccaggaaat

SEQ ID NO: 698350 - DNA, 19 bp, Mus musculus
  siRNA target sequence for Pja1 (NM_008853.1,1507-1525).
gttcctccccgctctaaaa

SEQ ID NO: 698351 - DNA, 19 bp, Mus musculus
  siRNA target sequence for Pja1 (NM_008853.1,1528-1546).
caaggctcgtcgtaacagt

SEQ ID NO: 698352 - DNA, 19 bp, Mus musculus
  siRNA target sequence for Pja1 (NM_008853.1,1566-1584).
gtccgaaacccacaatact

SEQ ID NO: 698353 - DNA, 19 bp, Mus musculus
  siRNA target sequence for Pja1 (NM_008853.1,1569-1587).
cgaaacccacaatactaca

SEQ ID NO: 698354 - DNA, 19 bp, Mus musculus
  siRNA target sequence for Pnn (NM_008891.1,179-197).
gaggacgaggtagcttatt

SEQ ID NO: 698355 - DNA, 19 bp, Mus musculus
  siRNA target sequence for Pnn (NM_008891.1,182-200).
gacgaggtagcttattgct

SEQ ID NO: 698356 - DNA, 19 bp, Mus musculus
  siRNA target sequence for Pnn (NM_008891.1,184-202).
cgaggtagcttattgctaa

SEQ ID NO: 698357 - DNA, 19 bp, Mus musculus
  siRNA target sequence for Pnn (NM_008891.1,204-222).
gcgtggattctcagatagt

SEQ ID NO: 698358 - DNA, 19 bp, Mus musculus
  siRNA target sequence for Pnn (NM_008891.1,280-298).
ggggagcgtcggacaagaa

SEQ ID NO: 698359 - DNA, 19 bp, Mus musculus
  siRNA target sequence for Pnn (NM_008891.1,282-300).
ggagcgtcggacaagaaga

SEQ ID NO: 698360 - DNA, 19 bp, Mus musculus
  siRNA target sequence for Pnn (NM_008891.1,323-341).
cagaagacgatgatgttaa

SEQ ID NO: 698361 - DNA, 19 bp, Mus musculus
  siRNA target sequence for Pnn (NM_008891.1,432-450).
gcaaaggaaccgacgaata

SEQ ID NO: 698362 - DNA, 19 bp, Mus musculus
  siRNA target sequence for Pnn (NM_008891.1,433-451).
caaaggaaccgacgaatat

SEQ ID NO: 698363 - DNA, 19 bp, Mus musculus
  siRNA target sequence for Pnn (NM_008891.1,445-463).
cgaatatttggcttgttga

SEQ ID NO: 698364 - DNA, 19 bp, Mus musculus
  siRNA target sequence for Pnn (NM_008891.1,521-539).
gacgccaagaaattgaaca

SEQ ID NO: 698365 - DNA, 19 bp, Mus musculus
  siRNA target sequence for Pnn (NM_008891.1,569-587).
gaaagcaggttgaaaacga

SEQ ID NO: 698366 - DNA, 19 bp, Mus musculus
  siRNA target sequence for Pnn (NM_008891.1,666-684).
gctgcaagaagaatggaat

SEQ ID NO: 698367 - DNA, 19 bp, Mus musculus
  siRNA target sequence for Pnn (NM_008891.1,685-703).
gaacataatgccaagataa

SEQ ID NO: 698368 - DNA, 19 bp, Mus musculus
  siRNA target sequence for Pnn (NM_008891.1,688-706).
cataatgccaagataatta

SEQ ID NO: 698369 - DNA, 19 bp, Mus musculus
  siRNA target sequence for Pnn (NM_008891.1,694-712).
gccaagataattaagtata

SEQ ID NO: 698370 - DNA, 19 bp, Mus musculus
  siRNA target sequence for Pnn (NM_008891.1,725-743).
caaagccccatttgttcta

SEQ ID NO: 698371 - DNA, 19 bp, Mus musculus
  siRNA target sequence for Pnn (NM_008891.1,729-747).
gccccatttgttctatatt

SEQ ID NO: 698372 - DNA, 19 bp, Mus musculus
  siRNA target sequence for Pnn (NM_008891.1,732-750).
ccatttgttctatattcct

SEQ ID NO: 698373 - DNA, 19 bp, Mus musculus
  siRNA target sequence for Pnn (NM_008891.1,767-785).
ctacccaaaagctaataga

SEQ ID NO: 698374 - DNA, 19 bp, Mus musculus
  siRNA target sequence for Pnn (NM_008891.1,797-815).
gaaagatgaatgctttatt

SEQ ID NO: 698375 - DNA, 19 bp, Mus musculus
  siRNA target sequence for Pnn (NM_008891.1,817-835).
gaaggtagacgcatcgaat

SEQ ID NO: 698376 - DNA, 19 bp, Mus musculus
  siRNA target sequence for Pnn (NM_008891.1,831-849).
cgaatttgcagaacaaata

SEQ ID NO: 698377 - DNA, 19 bp, Mus musculus
  siRNA target sequence for Pnn (NM_008891.1,980-998).
caggtaatcagcacaatga

SEQ ID NO: 698378 - DNA, 19 bp, Mus musculus
  siRNA target sequence for Pnn (NM_008891.1,1035-1053).
ggaagcaggtatagttcat

SEQ ID NO: 698379 - DNA, 19 bp, Mus musculus
  siRNA target sequence for Pnn (NM_008891.1,1036-1054).
gaagcaggtatagttcata

SEQ ID NO: 698380 - DNA, 19 bp, Mus musculus
  siRNA target sequence for Pnn (NM_008891.1,1157-1175).
gtcagccagaagaagtgat

SEQ ID NO: 698381 - DNA, 19 bp, Mus musculus
  siRNA target sequence for Pnn (NM_008891.1,1217-1235).
ctgagcaggaagtaatgga

SEQ ID NO: 698382 - DNA, 19 bp, Mus musculus
  siRNA target sequence for Pnn (NM_008891.1,1219-1237).
gagcaggaagtaatggaaa

SEQ ID NO: 698383 - DNA, 19 bp, Mus musculus
  siRNA target sequence for Pnn (NM_008891.1,1238-1256).
ctaaccaagttgaaagtat

SEQ ID NO: 698384 - DNA, 19 bp, Mus musculus
  siRNA target sequence for Pnn (NM_008891.1,1293-1311).
gccagagatggaatttgat

SEQ ID NO: 698385 - DNA, 19 bp, Mus musculus
  siRNA target sequence for Pnn (NM_008891.1,1312-1330).
gttgagccagataaagaat

SEQ ID NO: 698386 - DNA, 19 bp, Mus musculus
  siRNA target sequence for Pnn (NM_008891.1,1577-1595).
ctccacctcaggttattca

SEQ ID NO: 698387 - DNA, 19 bp, Mus musculus
  siRNA target sequence for Pnn (NM_008891.1,1612-1630).
ctacctgagcggaaggatt

SEQ ID NO: 698388 - DNA, 19 bp, Mus musculus
  siRNA target sequence for Pnn (NM_008891.1,1634-1652).
ctctagagtctataaaact

SEQ ID NO: 698389 - DNA, 19 bp, Mus musculus
  siRNA target sequence for Pnn (NM_008891.1,1672-1690).
ccagtcttgacagtacatt

SEQ ID NO: 698390 - DNA, 19 bp, Mus musculus
  siRNA target sequence for Pnn (NM_008891.1,1734-1752).
gcgagcaaggaataaaaca

SEQ ID NO: 698391 - DNA, 19 bp, Mus musculus
  siRNA target sequence for Pnn (NM_008891.1,1958-1976).
gacataaccgagataggaa

SEQ ID NO: 698392 - DNA, 19 bp, Mus musculus
  siRNA target sequence for Pnn (NM_008891.1,1996-2014).
cggaagcgaagggatactt

SEQ ID NO: 698393 - DNA, 19 bp, Mus musculus
  siRNA target sequence for Pnn (NM_008891.1,2008-2026).
gatacttcaggactagaaa

SEQ ID NO: 698394 - DNA, 19 bp, Mus musculus
  siRNA target sequence for Pnn (NM_008891.1,2047-2065).
ggtggtagtagtagagata

SEQ ID NO: 698395 - DNA, 19 bp, Mus musculus
  siRNA target sequence for Pnn (NM_008891.1,2098-2116).
gacagaaaaaggtctatat

SEQ ID NO: 698396 - DNA, 19 bp, Mus musculus
  siRNA target sequence for Pnn (NM_008891.1,2128-2146).
cgatcaggcaaaagatctt

SEQ ID NO: 698397 - DNA, 19 bp, Mus musculus
  siRNA target sequence for Pp11r (NM_008902.1,34-52).
gggcaactcaagttggttt

SEQ ID NO: 698398 - DNA, 19 bp, Mus musculus
  siRNA target sequence for Pp11r (NM_008902.1,35-53).
ggcaactcaagttggtttt

SEQ ID NO: 698399 - DNA, 19 bp, Mus musculus
  siRNA target sequence for Pp11r (NM_008902.1,280-298).
gaataccctttcaacacat

SEQ ID NO: 698400 - DNA, 19 bp, Mus musculus
  siRNA target sequence for Pp11r (NM_008902.1,435-453).
ccacccttgccactgtaat

SEQ ID NO: 698401 - DNA, 19 bp, Mus musculus
  siRNA target sequence for Pp11r (NM_008902.1,457-475).
cgctgcccagagtttggaa

SEQ ID NO: 698402 - DNA, 19 bp, Mus musculus
  siRNA target sequence for Pp11r (NM_008902.1,533-551).
gcagcgatgccgtcactaa

SEQ ID NO: 698403 - DNA, 19 bp, Mus musculus
  siRNA target sequence for Pp11r (NM_008902.1,585-603).
cagggtagataccaacaaa

SEQ ID NO: 698404 - DNA, 19 bp, Mus musculus
  siRNA target sequence for Pp11r (NM_008902.1,683-701).
cagagccgctcttcactta

SEQ ID NO: 698405 - DNA, 19 bp, Mus musculus
  siRNA target sequence for Pp11r (NM_008902.1,717-735).
gttctccaagcctacctat

SEQ ID NO: 698406 - DNA, 19 bp, Mus musculus
  siRNA target sequence for Pp11r (NM_008902.1,728-746).
ctacctatgcagcctttat

SEQ ID NO: 698407 - DNA, 19 bp, Mus musculus
  siRNA target sequence for Pp11r (NM_008902.1,731-749).
cctatgcagcctttatcaa

SEQ ID NO: 698408 - DNA, 19 bp, Mus musculus
  siRNA target sequence for Pp11r (NM_008902.1,739-757).
gcctttatcaacttactca

SEQ ID NO: 698409 - DNA, 19 bp, Mus musculus
  siRNA target sequence for Pp11r (NM_008902.1,740-758).
cctttatcaacttactcaa

SEQ ID NO: 698410 - DNA, 19 bp, Mus musculus
  siRNA target sequence for Pp11r (NM_008902.1,780-798).
ccacggggagcatttcagt

SEQ ID NO: 698411 - DNA, 19 bp, Mus musculus
  siRNA target sequence for Pp11r (NM_008902.1,853-871).
gtcatgaaggaactctata

SEQ ID NO: 698412 - DNA, 19 bp, Mus musculus
  siRNA target sequence for Pp11r (NM_008902.1,891-909).
ccgttacagctcagaacaa

SEQ ID NO: 698413 - DNA, 19 bp, Mus musculus
  siRNA target sequence for Pp11r (NM_008902.1,948-966).
gtactcgagaggcaatgat

SEQ ID NO: 698414 - DNA, 19 bp, Mus musculus
  siRNA target sequence for Pp11r (NM_008902.1,972-990).
ggactcgagtggctttgaa

SEQ ID NO: 698415 - DNA, 19 bp, Mus musculus
  siRNA target sequence for Pp11r (NM_008902.1,975-993).
ctcgagtggctttgaacat

SEQ ID NO: 698416 - DNA, 19 bp, Mus musculus
  siRNA target sequence for Pp11r (NM_008902.1,1020-1038).
caaggtcactggctttcat

SEQ ID NO: 698417 - DNA, 19 bp, Mus musculus
  siRNA target sequence for Pp11r (NM_008902.1,1131-1149).
cctggccatgcagttcaat

SEQ ID NO: 698418 - DNA, 19 bp, Mus musculus
  siRNA target sequence for Pp11r (NM_008902.1,1132-1150).
ctggccatgcagttcaatt

SEQ ID NO: 698419 - DNA, 19 bp, Mus musculus
  siRNA target sequence for Pp11r (NM_008902.1,1206-1224).
cgagtttgccctttactct

SEQ ID NO: 698420 - DNA, 19 bp, Mus musculus
  siRNA target sequence for Pp11r (NM_008902.1,1322-1340).
gaaatggcaagaagtacat

SEQ ID NO: 698421 - DNA, 19 bp, Mus musculus
  siRNA target sequence for Ppargc1 (NM_008904.1,118-136).
ctctgtatggagtgacata

SEQ ID NO: 698422 - DNA, 19 bp, Mus musculus
  siRNA target sequence for Ppargc1 (NM_008904.1,120-138).
ctgtatggagtgacataga

SEQ ID NO: 698423 - DNA, 19 bp, Mus musculus
  siRNA target sequence for Ppargc1 (NM_008904.1,122-140).
gtatggagtgacatagagt

SEQ ID NO: 698424 - DNA, 19 bp, Mus musculus
  siRNA target sequence for Ppargc1 (NM_008904.1,175-193).
cccagatcttcctgaactt

SEQ ID NO: 698425 - DNA, 19 bp, Mus musculus
  siRNA target sequence for Ppargc1 (NM_008904.1,261-279).
gcgaccaatcggaaatcat

SEQ ID NO: 698426 - DNA, 19 bp, Mus musculus
  siRNA target sequence for Ppargc1 (NM_008904.1,262-280).
cgaccaatcggaaatcata

SEQ ID NO: 698427 - DNA, 19 bp, Mus musculus
  siRNA target sequence for Ppargc1 (NM_008904.1,263-281).
gaccaatcggaaatcatat

SEQ ID NO: 698428 - DNA, 19 bp, Mus musculus
  siRNA target sequence for Ppargc1 (NM_008904.1,266-284).
caatcggaaatcatatcca

SEQ ID NO: 698429 - DNA, 19 bp, Mus musculus
  siRNA target sequence for Ppargc1 (NM_008904.1,295-313).
caatgagcctgcgaacata

SEQ ID NO: 698430 - DNA, 19 bp, Mus musculus
  siRNA target sequence for Ppargc1 (NM_008904.1,397-415).
cggattgccctcatttgat

SEQ ID NO: 698431 - DNA, 19 bp, Mus musculus
  siRNA target sequence for Ppargc1 (NM_008904.1,500-518).
gaagagccgtctctactta

SEQ ID NO: 698432 - DNA, 19 bp, Mus musculus
  siRNA target sequence for Ppargc1 (NM_008904.1,602-620).
cacacccacaggatcagaa

SEQ ID NO: 698433 - DNA, 19 bp, Mus musculus
  siRNA target sequence for Ppargc1 (NM_008904.1,606-624).
cccacaggatcagaacaaa

SEQ ID NO: 698434 - DNA, 19 bp, Mus musculus
  siRNA target sequence for Ppargc1 (NM_008904.1,635-653).
gttaagaccgagaattcat

SEQ ID NO: 698435 - DNA, 19 bp, Mus musculus
  siRNA target sequence for Ppargc1 (NM_008904.1,711-729).
cagagcttctcaagtatct

SEQ ID NO: 698436 - DNA, 19 bp, Mus musculus
  siRNA target sequence for Ppargc1 (NM_008904.1,724-742).
gtatctgaccacaaacgat

SEQ ID NO: 698437 - DNA, 19 bp, Mus musculus
  siRNA target sequence for Ppargc1 (NM_008904.1,876-894).
ccccagagtcaccaaatga

SEQ ID NO: 698438 - DNA, 19 bp, Mus musculus
  siRNA target sequence for Ppargc1 (NM_008904.1,897-915).
ccaagggttccccatttga

SEQ ID NO: 698439 - DNA, 19 bp, Mus musculus
  siRNA target sequence for Ppargc1 (NM_008904.1,908-926).
ccatttgagaacaagacta

SEQ ID NO: 698440 - DNA, 19 bp, Mus musculus
  siRNA target sequence for Ppargc1 (NM_008904.1,922-940).
gactattgagcgaacctta

SEQ ID NO: 698441 - DNA, 19 bp, Mus musculus
  siRNA target sequence for Ppargc1 (NM_008904.1,978-996).
ccacaactcctcctcataa

SEQ ID NO: 698442 - DNA, 19 bp, Mus musculus
  siRNA target sequence for Ppargc1 (NM_008904.1,1134-1152).
ccgagcaatctgagttgta

SEQ ID NO: 698443 - DNA, 19 bp, Mus musculus
  siRNA target sequence for Ppargc1 (NM_008904.1,1185-1203).
gaggacacgaggaaaggaa

SEQ ID NO: 698444 - DNA, 19 bp, Mus musculus
  siRNA target sequence for Ppargc1 (NM_008904.1,1248-1266).
gtcagtcactcaattccaa

SEQ ID NO: 698445 - DNA, 19 bp, Mus musculus
  siRNA target sequence for Ppargc1 (NM_008904.1,1250-1268).
cagtcactcaattccaaaa

SEQ ID NO: 698446 - DNA, 19 bp, Mus musculus
  siRNA target sequence for Ppargc1 (NM_008904.1,1258-1276).
caattccaaaacggatata

SEQ ID NO: 698447 - DNA, 19 bp, Mus musculus
  siRNA target sequence for Ppargc1 (NM_008904.1,1263-1281).
ccaaaacggatatactcat

SEQ ID NO: 698448 - DNA, 19 bp, Mus musculus
  siRNA target sequence for Ppargc1 (NM_008904.1,1264-1282).
caaaacggatatactcatt

SEQ ID NO: 698449 - DNA, 19 bp, Mus musculus
  siRNA target sequence for Ppargc1 (NM_008904.1,1269-1287).
cggatatactcattaacat

SEQ ID NO: 698450 - DNA, 19 bp, Mus musculus
  siRNA target sequence for Ppargc1 (NM_008904.1,1270-1288).
ggatatactcattaacata

SEQ ID NO: 698451 - DNA, 19 bp, Mus musculus
  siRNA target sequence for Ppargc1 (NM_008904.1,1300-1318).
ccaagactctagacaacta

SEQ ID NO: 698452 - DNA, 19 bp, Mus musculus
  siRNA target sequence for Ppargc1 (NM_008904.1,1308-1326).
ctagacaactagacttcaa

SEQ ID NO: 698453 - DNA, 19 bp, Mus musculus
  siRNA target sequence for Ppargc1 (NM_008904.1,1425-1443).
cttgcagcaccagaaaaca

SEQ ID NO: 698454 - DNA, 19 bp, Mus musculus
  siRNA target sequence for Ppargc1 (NM_008904.1,1502-1520).
gctgtgtttgacgacaaat

SEQ ID NO: 698455 - DNA, 19 bp, Mus musculus
  siRNA target sequence for Ppargc1 (NM_008904.1,1667-1685).
ggcacgcagccctattcat

SEQ ID NO: 698456 - DNA, 19 bp, Mus musculus
  siRNA target sequence for Ppargc1 (NM_008904.1,1668-1686).
gcacgcagccctattcatt

SEQ ID NO: 698457 - DNA, 19 bp, Mus musculus
  siRNA target sequence for Ppargc1 (NM_008904.1,1671-1689).
cgcagccctattcattgtt

SEQ ID NO: 698458 - DNA, 19 bp, Mus musculus
  siRNA target sequence for Ppargc1 (NM_008904.1,1741-1759).
gtcaccaccgaaatcctta

SEQ ID NO: 698459 - DNA, 19 bp, Mus musculus
  siRNA target sequence for Ppargc1 (NM_008904.1,1743-1761).
caccaccgaaatccttatt

SEQ ID NO: 698460 - DNA, 19 bp, Mus musculus
  siRNA target sequence for Ppargc1 (NM_008904.1,1764-1782).
ctcaaagaccccaaaggat

SEQ ID NO: 698461 - DNA, 19 bp, Mus musculus
  siRNA target sequence for Ppargc1 (NM_008904.1,1780-1798).
gatgcgctctcgttcaaga

SEQ ID NO: 698462 - DNA, 19 bp, Mus musculus
  siRNA target sequence for Ppargc1 (NM_008904.1,1786-1804).
ctctcgttcaagatccttt

SEQ ID NO: 698463 - DNA, 19 bp, Mus musculus
  siRNA target sequence for Ppargc1 (NM_008904.1,1819-1837).
gtgttcccgatcaccatat

SEQ ID NO: 698464 - DNA, 19 bp, Mus musculus
  siRNA target sequence for Ppargc1 (NM_008904.1,1881-1899).
gatcctgttactactatga

SEQ ID NO: 698465 - DNA, 19 bp, Mus musculus
  siRNA target sequence for Ppargc1 (NM_008904.1,1927-1945).
ccgcaattctcccttgtat

SEQ ID NO: 698466 - DNA, 19 bp, Mus musculus
  siRNA target sequence for Ppargc1 (NM_008904.1,1984-2002).
caggtacgacagctatgaa

SEQ ID NO: 698467 - DNA, 19 bp, Mus musculus
  siRNA target sequence for Ppargc1 (NM_008904.1,2113-2131).
gcgccgtgtgatttacgtt

SEQ ID NO: 698468 - DNA, 19 bp, Mus musculus
  siRNA target sequence for Ppargc1 (NM_008904.1,2118-2136).
gtgtgatttacgttggtaa

SEQ ID NO: 698469 - DNA, 19 bp, Mus musculus
  siRNA target sequence for Ppargc1 (NM_008904.1,2120-2138).
gtgatttacgttggtaaaa

SEQ ID NO: 698470 - DNA, 19 bp, Mus musculus
  siRNA target sequence for Ppargc1 (NM_008904.1,2229-2247).
gagacagctatggtttcat

SEQ ID NO: 698471 - DNA, 19 bp, Mus musculus
  siRNA target sequence for Ppargc1 (NM_008904.1,2279-2297).
gctcttgagaatggatata

SEQ ID NO: 698472 - DNA, 19 bp, Mus musculus
  siRNA target sequence for Ppargc1 (NM_008904.1,2282-2300).
cttgagaatggatatactt

SEQ ID NO: 698473 - DNA, 19 bp, Mus musculus
  siRNA target sequence for Ppargc1 (NM_008904.1,2304-2322).
gcaggtcgaacgaaactga

SEQ ID NO: 698474 - DNA, 19 bp, Mus musculus
  siRNA target sequence for Ppargc1 (NM_008904.1,2323-2341).
cttcgagctgtacttttgt

SEQ ID NO: 698475 - DNA, 19 bp, Mus musculus
  siRNA target sequence for Ppargc1 (NM_008904.1,2340-2358).
gtggacggaagcaattttt

SEQ ID NO: 698476 - DNA, 19 bp, Mus musculus
  siRNA target sequence for Ppargc1 (NM_008904.1,2385-2403).
ccaactcagacgattttga

SEQ ID NO: 698477 - DNA, 19 bp, Mus musculus
  siRNA target sequence for Psmc3ip (NM_008949.2,126-144).
ggacgtgttcggaaaccta

SEQ ID NO: 698478 - DNA, 19 bp, Mus musculus
  siRNA target sequence for Psmc3ip (NM_008949.2,227-245).
cctacggcaagcagaaaat

SEQ ID NO: 698479 - DNA, 19 bp, Mus musculus
  siRNA target sequence for Psmc3ip (NM_008949.2,228-246).
ctacggcaagcagaaaatt

SEQ ID NO: 698480 - DNA, 19 bp, Mus musculus
  siRNA target sequence for Psmc3ip (NM_008949.2,254-272).
ccgatcagaaccagtttga

SEQ ID NO: 698481 - DNA, 19 bp, Mus musculus
  siRNA target sequence for Psmc3ip (NM_008949.2,370-388).
gccgagctgaaggaattaa

SEQ ID NO: 698482 - DNA, 19 bp, Mus musculus
  siRNA target sequence for Psmc3ip (NM_008949.2,375-393).
gctgaaggaattaacaagt

SEQ ID NO: 698483 - DNA, 19 bp, Mus musculus
  siRNA target sequence for Psmc3ip (NM_008949.2,441-459).
ggagtgtgctcaatacaca

SEQ ID NO: 698484 - DNA, 19 bp, Mus musculus
  siRNA target sequence for Psmc3ip (NM_008949.2,535-553).
cagaagtactgtaaagagt

SEQ ID NO: 698485 - DNA, 19 bp, Mus musculus
  siRNA target sequence for Psp (NM_008953.2,120-138).
ggcagcgctgtgaataatt

SEQ ID NO: 698486 - DNA, 19 bp, Mus musculus
  siRNA target sequence for Psp (NM_008953.2,121-139).
gcagcgctgtgaataattt

SEQ ID NO: 698487 - DNA, 19 bp, Mus musculus
  siRNA target sequence for Psp (NM_008953.2,125-143).
cgctgtgaataatttgaaa

SEQ ID NO: 698488 - DNA, 19 bp, Mus musculus
  siRNA target sequence for Psp (NM_008953.2,201-219).
cttcagcaagccacaagtt

SEQ ID NO: 698489 - DNA, 19 bp, Mus musculus
  siRNA target sequence for Psp (NM_008953.2,259-277).
cagcggaccttggcaattt

SEQ ID NO: 698490 - DNA, 19 bp, Mus musculus
  siRNA target sequence for Psp (NM_008953.2,262-280).
cggaccttggcaatttaaa

SEQ ID NO: 698491 - DNA, 19 bp, Mus musculus
  siRNA target sequence for Psp (NM_008953.2,300-318).
ggtttattgttgaaaatca

SEQ ID NO: 698492 - DNA, 19 bp, Mus musculus
  siRNA target sequence for Psp (NM_008953.2,426-444).
ggcaagacggtcgacattt

SEQ ID NO: 698493 - DNA, 19 bp, Mus musculus
  siRNA target sequence for Psp (NM_008953.2,428-446).
caagacggtcgacatttct

SEQ ID NO: 698494 - DNA, 19 bp, Mus musculus
  siRNA target sequence for Psp (NM_008953.2,431-449).
gacggtcgacatttctgtt

SEQ ID NO: 698495 - DNA, 19 bp, Mus musculus
  siRNA target sequence for Psp (NM_008953.2,447-465).
gtttccttggacctcataa

SEQ ID NO: 698496 - DNA, 19 bp, Mus musculus
  siRNA target sequence for Psp (NM_008953.2,527-545).
ctccagtaatacagataaa

SEQ ID NO: 698497 - DNA, 19 bp, Mus musculus
  siRNA target sequence for Psp (NM_008953.2,557-575).
cttgttgggaagacgatta

SEQ ID NO: 698498 - DNA, 19 bp, Mus musculus
  siRNA target sequence for Psp (NM_008953.2,725-743).
ggcaggacaggtacaactt

SEQ ID NO: 698499 - DNA, 19 bp, Mus musculus
  siRNA target sequence for Ptx3 (NM_008987.2,342-360).
gggacaagctgttcatcat

SEQ ID NO: 698500 - DNA, 19 bp, Mus musculus
  siRNA target sequence for Ptx3 (NM_008987.2,697-715).
gctgcccgcaggttgtgaa

SEQ ID NO: 698501 - DNA, 19 bp, Mus musculus
  siRNA target sequence for Ptx3 (NM_008987.2,731-749).
ccaatgcgttcgaagaaga

SEQ ID NO: 698502 - DNA, 19 bp, Mus musculus
  siRNA target sequence for Ptx3 (NM_008987.2,732-750).
caatgcgttcgaagaagat

SEQ ID NO: 698503 - DNA, 19 bp, Mus musculus
  siRNA target sequence for Ptx3 (NM_008987.2,736-754).
gcgttcgaagaagattttt

SEQ ID NO: 698504 - DNA, 19 bp, Mus musculus
  siRNA target sequence for Ptx3 (NM_008987.2,784-802).
gcttgaatcttttagtact

SEQ ID NO: 698505 - DNA, 19 bp, Mus musculus
  siRNA target sequence for Ptx3 (NM_008987.2,865-883).
gtggaacccctatgagatt

SEQ ID NO: 698506 - DNA, 19 bp, Mus musculus
  siRNA target sequence for Ptx3 (NM_008987.2,1136-1154).
gggggctttgacgaatcat

SEQ ID NO: 698507 - DNA, 19 bp, Mus musculus
  siRNA target sequence for Ptx3 (NM_008987.2,1141-1159).
ctttgacgaatcattagca

SEQ ID NO: 698508 - DNA, 19 bp, Mus musculus
  siRNA target sequence for Ptx3 (NM_008987.2,1145-1163).
gacgaatcattagcatttt

SEQ ID NO: 698509 - DNA, 19 bp, Mus musculus
  siRNA target sequence for Ptx3 (NM_008987.2,1170-1188).
gaatcacaggcttcaatat

SEQ ID NO: 698510 - DNA, 19 bp, Mus musculus
  siRNA target sequence for Ptx3 (NM_008987.2,1270-1288).
gtggggagtcacagagatt

SEQ ID NO: 698511 - DNA, 19 bp, Mus musculus
  siRNA target sequence for Ptx3 (NM_008987.2,1272-1290).
ggggagtcacagagattca

SEQ ID NO: 698512 - DNA, 19 bp, Mus musculus
  siRNA target sequence for Punc (NM_008988.1,835-853).
gggagtcctgcagataaca

SEQ ID NO: 698513 - DNA, 19 bp, Mus musculus
  siRNA target sequence for Punc (NM_008988.1,890-908).
gtggcctcaaacattgcta

SEQ ID NO: 698514 - DNA, 19 bp, Mus musculus
  siRNA target sequence for Punc (NM_008988.1,1245-1263).
ctccagcagagtttgttca

SEQ ID NO: 698515 - DNA, 19 bp, Mus musculus
  siRNA target sequence for Punc (NM_008988.1,1383-1401).
gccatgtcaggctcaagaa

SEQ ID NO: 698516 - DNA, 19 bp, Mus musculus
  siRNA target sequence for Punc (NM_008988.1,1385-1403).
catgtcaggctcaagaaca

SEQ ID NO: 698517 - DNA, 19 bp, Mus musculus
  siRNA target sequence for Punc (NM_008988.1,2200-2218).
ggtcctcctgtgtaaggat

SEQ ID NO: 698518 - DNA, 19 bp, Mus musculus
  siRNA target sequence for Raet1a (NM_009016.1,580-598).
cttatcctccatttaagta

SEQ ID NO: 698519 - DNA, 19 bp, Mus musculus
  siRNA target sequence for Raet1a (NM_009016.1,627-645).
cccaggggagacagcaaat

SEQ ID NO: 698520 - DNA, 19 bp, Mus musculus
  siRNA target sequence for Raet1a (NM_009016.1,650-668).
ctgaagtgggggaatgttt

SEQ ID NO: 698521 - DNA, 19 bp, Mus musculus
  siRNA target sequence for Raet1b (NM_009017.1,284-302).
gtgcttcgtgggtgaaata

SEQ ID NO: 698522 - DNA, 19 bp, Mus musculus
  siRNA target sequence for Raet1b (NM_009017.1,651-669).
gaatttgtgaaacaattga

SEQ ID NO: 698523 - DNA, 19 bp, Mus musculus
  siRNA target sequence for Rb1 (NM_009029.1,1019-1037).
ggttgaaagtctttctaaa

SEQ ID NO: 698524 - DNA, 19 bp, Mus musculus
  siRNA target sequence for Rb1 (NM_009029.1,1033-1051).
ctaaacgctatgaagaagt

SEQ ID NO: 698525 - DNA, 19 bp, Mus musculus
  siRNA target sequence for Rb1 (NM_009029.1,1039-1057).
gctatgaagaagtttatct

SEQ ID NO: 698526 - DNA, 19 bp, Mus musculus
  siRNA target sequence for Rb1 (NM_009029.1,1105-1123).
cacttcagactgatcctat

SEQ ID NO: 698527 - DNA, 19 bp, Mus musculus
  siRNA target sequence for Rb1 (NM_009029.1,1110-1128).
cagactgatcctatagaca

SEQ ID NO: 698528 - DNA, 19 bp, Mus musculus
  siRNA target sequence for Rb1 (NM_009029.1,1140-1158).
gagagaacgccacgaaaaa

SEQ ID NO: 698529 - DNA, 19 bp, Mus musculus
  siRNA target sequence for Rb1 (NM_009029.1,1144-1162).
gaacgccacgaaaaaacaa

SEQ ID NO: 698530 - DNA, 19 bp, Mus musculus
  siRNA target sequence for Rb1 (NM_009029.1,1198-1216).
ctccagttaggactgttat

SEQ ID NO: 698531 - DNA, 19 bp, Mus musculus
  siRNA target sequence for Rb1 (NM_009029.1,1200-1218).
ccagttaggactgttatga

SEQ ID NO: 698532 - DNA, 19 bp, Mus musculus
  siRNA target sequence for Rb1 (NM_009029.1,1222-1240).
ctattcaacaattaatggt

SEQ ID NO: 698533 - DNA, 19 bp, Mus musculus
  siRNA target sequence for Rb1 (NM_009029.1,1227-1245).
caacaattaatggtgattt

SEQ ID NO: 698534 - DNA, 19 bp, Mus musculus
  siRNA target sequence for Rb1 (NM_009029.1,1230-1248).
caattaatggtgattttaa

SEQ ID NO: 698535 - DNA, 19 bp, Mus musculus
  siRNA target sequence for Rb1 (NM_009029.1,1265-1283).
gccatcagaaaatctgatt

SEQ ID NO: 698536 - DNA, 19 bp, Mus musculus
  siRNA target sequence for Rb1 (NM_009029.1,1280-1298).
gatttcctacttcaataat

SEQ ID NO: 698537 - DNA, 19 bp, Mus musculus
  siRNA target sequence for Rb1 (NM_009029.1,1300-1318).
gcacagtgaatccaaaaga

SEQ ID NO: 698538 - DNA, 19 bp, Mus musculus
  siRNA target sequence for Rb1 (NM_009029.1,1403-1421).
cggagtacagcgatataaa

SEQ ID NO: 698539 - DNA, 19 bp, Mus musculus
  siRNA target sequence for Rb1 (NM_009029.1,1422-1440).
cttggagtccgattgtatt

SEQ ID NO: 698540 - DNA, 19 bp, Mus musculus
  siRNA target sequence for Rb1 (NM_009029.1,1451-1469).
ggaatccatgcttaaatca

SEQ ID NO: 698541 - DNA, 19 bp, Mus musculus
  siRNA target sequence for Rb1 (NM_009029.1,1457-1475).
catgcttaaatcagaagaa

SEQ ID NO: 698542 - DNA, 19 bp, Mus musculus
  siRNA target sequence for Rb1 (NM_009029.1,1506-1524).
ctcctaaatgacaacatct

SEQ ID NO: 698543 - DNA, 19 bp, Mus musculus
  siRNA target sequence for Rb1 (NM_009029.1,1515-1533).
gacaacatctttcatatgt

SEQ ID NO: 698544 - DNA, 19 bp, Mus musculus
  siRNA target sequence for Rb1 (NM_009029.1,1544-1562).
ctgtgctcttgaagttgta

SEQ ID NO: 698545 - DNA, 19 bp, Mus musculus
  siRNA target sequence for Rb1 (NM_009029.1,1557-1575).
gttgtaatggctacgtata

SEQ ID NO: 698546 - DNA, 19 bp, Mus musculus
  siRNA target sequence for Rb1 (NM_009029.1,1560-1578).
gtaatggctacgtatagca

SEQ ID NO: 698547 - DNA, 19 bp, Mus musculus
  siRNA target sequence for Rb1 (NM_009029.1,1570-1588).
cgtatagcagaagtacatt

SEQ ID NO: 698548 - DNA, 19 bp, Mus musculus
  siRNA target sequence for Rb1 (NM_009029.1,1582-1600).
gtacattgcagcatcttga

SEQ ID NO: 698549 - DNA, 19 bp, Mus musculus
  siRNA target sequence for Rb1 (NM_009029.1,1618-1636).
ccttcccgtggattctgaa

SEQ ID NO: 698550 - DNA, 19 bp, Mus musculus
  siRNA target sequence for Rb1 (NM_009029.1,1628-1646).
gattctgaacgtacttaat

SEQ ID NO: 698551 - DNA, 19 bp, Mus musculus
  siRNA target sequence for Rb1 (NM_009029.1,1632-1650).
ctgaacgtacttaatttaa

SEQ ID NO: 698552 - DNA, 19 bp, Mus musculus
  siRNA target sequence for Rb1 (NM_009029.1,1673-1691).
gattgaaagttttatcaaa

SEQ ID NO: 698553 - DNA, 19 bp, Mus musculus
  siRNA target sequence for Rb1 (NM_009029.1,1698-1716).
gccaacttgacaagagaaa

SEQ ID NO: 698554 - DNA, 19 bp, Mus musculus
  siRNA target sequence for Rb1 (NM_009029.1,1703-1721).
cttgacaagagaaatgata

SEQ ID NO: 698555 - DNA, 19 bp, Mus musculus
  siRNA target sequence for Rb1 (NM_009029.1,1735-1753).
gatgtgagcatcgaatcat

SEQ ID NO: 698556 - DNA, 19 bp, Mus musculus
  siRNA target sequence for Rb1 (NM_009029.1,1783-1801).
ctttatttgatctcattaa

SEQ ID NO: 698557 - DNA, 19 bp, Mus musculus
  siRNA target sequence for Rb1 (NM_009029.1,1860-1878).
cctctccagggtaaccata

SEQ ID NO: 698558 - DNA, 19 bp, Mus musculus
  siRNA target sequence for Rb1 (NM_009029.1,1892-1910).
gtatctttctcctctaaga

SEQ ID NO: 698559 - DNA, 19 bp, Mus musculus
  siRNA target sequence for Rb1 (NM_009029.1,1927-1945).
cttccactacacgtgtaaa

SEQ ID NO: 698560 - DNA, 19 bp, Mus musculus
  siRNA target sequence for Rb1 (NM_009029.1,1931-1949).
cactacacgtgtaaattct

SEQ ID NO: 698561 - DNA, 19 bp, Mus musculus
  siRNA target sequence for Rb1 (NM_009029.1,2049-2067).
gcatatctccgactaaata

SEQ ID NO: 698562 - DNA, 19 bp, Mus musculus
  siRNA target sequence for Rb1 (NM_009029.1,2100-2118).
gagctagagcacatcatct

SEQ ID NO: 698563 - DNA, 19 bp, Mus musculus
  siRNA target sequence for Rb1 (NM_009029.1,2126-2144).
gtttcagcatacattgcaa

SEQ ID NO: 698564 - DNA, 19 bp, Mus musculus
  siRNA target sequence for Rb1 (NM_009029.1,2137-2155).
cattgcaaaatgagtatga

SEQ ID NO: 698565 - DNA, 19 bp, Mus musculus
  siRNA target sequence for Rb1 (NM_009029.1,2290-2308).
cctttaaacgtgttttgat

SEQ ID NO: 698566 - DNA, 19 bp, Mus musculus
  siRNA target sequence for Rb1 (NM_009029.1,2321-2339).
gtttgattccattatagta

SEQ ID NO: 698567 - DNA, 19 bp, Mus musculus
  siRNA target sequence for Rb1 (NM_009029.1,2352-2370).
gttttcatgcagagactaa

SEQ ID NO: 698568 - DNA, 19 bp, Mus musculus
  siRNA target sequence for Rb1 (NM_009029.1,2414-2432).
gtcaccaatacctcacatt

SEQ ID NO: 698569 - DNA, 19 bp, Mus musculus
  siRNA target sequence for Rb1 (NM_009029.1,2433-2451).
cctcgaagcccttacaagt

SEQ ID NO: 698570 - DNA, 19 bp, Mus musculus
  siRNA target sequence for Rb1 (NM_009029.1,2434-2452).
ctcgaagcccttacaagtt

SEQ ID NO: 698571 - DNA, 19 bp, Mus musculus
  siRNA target sequence for Rb1 (NM_009029.1,2436-2454).
cgaagcccttacaagtttt

SEQ ID NO: 698572 - DNA, 19 bp, Mus musculus
  siRNA target sequence for Rb1 (NM_009029.1,2441-2459).
cccttacaagttttctagt

SEQ ID NO: 698573 - DNA, 19 bp, Mus musculus
  siRNA target sequence for Rb1 (NM_009029.1,2470-2488).
ggattcctggaggtaacat

SEQ ID NO: 698574 - DNA, 19 bp, Mus musculus
  siRNA target sequence for Rb1 (NM_009029.1,2475-2493).
cctggaggtaacatctata

SEQ ID NO: 698575 - DNA, 19 bp, Mus musculus
  siRNA target sequence for Rb1 (NM_009029.1,2476-2494).
ctggaggtaacatctatat

SEQ ID NO: 698576 - DNA, 19 bp, Mus musculus
  siRNA target sequence for Rb1 (NM_009029.1,2509-2527).
gtccttataaaatttcaga

SEQ ID NO: 698577 - DNA, 19 bp, Mus musculus
  siRNA target sequence for Rb1 (NM_009029.1,2554-2572).
ctccgagatcaagaatctt

SEQ ID NO: 698578 - DNA, 19 bp, Mus musculus
  siRNA target sequence for Rb1 (NM_009029.1,2573-2591).
ggtctcaattggtgaatca

SEQ ID NO: 698579 - DNA, 19 bp, Mus musculus
  siRNA target sequence for Rb1 (NM_009029.1,2576-2594).
ctcaattggtgaatcattt

SEQ ID NO: 698580 - DNA, 19 bp, Mus musculus
  siRNA target sequence for Rb1 (NM_009029.1,2624-2642).
ccagatggtgtgtaatagt

SEQ ID NO: 698581 - DNA, 19 bp, Mus musculus
  siRNA target sequence for Rb1 (NM_009029.1,2748-2766).
ctcccagcggagtccaaat

SEQ ID NO: 698582 - DNA, 19 bp, Mus musculus
  siRNA target sequence for Rb1 (NM_009029.1,2752-2770).
cagcggagtccaaattcca

SEQ ID NO: 698583 - DNA, 19 bp, Mus musculus
  siRNA target sequence for Rb1 (NM_009029.1,2795-2813).
cactcgaacacgaatgcaa

SEQ ID NO: 698584 - DNA, 19 bp, Mus musculus
  siRNA target sequence for Rb1 (NM_009029.1,2800-2818).
gaacacgaatgcaaaagca

SEQ ID NO: 698585 - DNA, 19 bp, Mus musculus
  siRNA target sequence for Rbm4 (NM_009032.1,620-638).
cagacttgaccgagcaata

SEQ ID NO: 698586 - DNA, 19 bp, Mus musculus
  siRNA target sequence for Rbm4 (NM_009032.1,622-640).
gacttgaccgagcaatata

SEQ ID NO: 698587 - DNA, 19 bp, Mus musculus
  siRNA target sequence for Rbm4 (NM_009032.1,624-642).
cttgaccgagcaatataat

SEQ ID NO: 698588 - DNA, 19 bp, Mus musculus
  siRNA target sequence for Rbm4 (NM_009032.1,633-651).
gcaatataatgagcaatat

SEQ ID NO: 698589 - DNA, 19 bp, Mus musculus
  siRNA target sequence for Rbm4 (NM_009032.1,666-684).
gccttacaccatgagttat

SEQ ID NO: 698590 - DNA, 19 bp, Mus musculus
  siRNA target sequence for Rbm4 (NM_009032.1,688-706).
gattcattgtattacaaca

SEQ ID NO: 698591 - DNA, 19 bp, Mus musculus
  siRNA target sequence for Rbm4 (NM_009032.1,718-736).
gcgctcgatgcctactaca

SEQ ID NO: 698592 - DNA, 19 bp, Mus musculus
  siRNA target sequence for Rbm4 (NM_009032.1,719-737).
cgctcgatgcctactacaa

SEQ ID NO: 698593 - DNA, 19 bp, Mus musculus
  siRNA target sequence for Rex3 (NM_009052.1,315-333).
cgaggctggcaaaaactgt

SEQ ID NO: 698594 - DNA, 19 bp, Mus musculus
  siRNA target sequence for Rex3 (NM_009052.1,370-388).
cagcccatcgctcactata

SEQ ID NO: 698595 - DNA, 19 bp, Mus musculus
  siRNA target sequence for Rex3 (NM_009052.1,373-391).
cccatcgctcactatagat

SEQ ID NO: 698596 - DNA, 19 bp, Mus musculus
  siRNA target sequence for Rpo1-3 (NM_009087.1,153-171).
gaaaaatatcaggattgaa

SEQ ID NO: 698597 - DNA, 19 bp, Mus musculus
  siRNA target sequence for Rpo1-3 (NM_009087.1,262-280).
cgaggaggaccatacacta

SEQ ID NO: 698598 - DNA, 19 bp, Mus musculus
  siRNA target sequence for Rpo1-3 (NM_009087.1,288-306).
gtctgcggtacataatcat

SEQ ID NO: 698599 - DNA, 19 bp, Mus musculus
  siRNA target sequence for Rpo1-3 (NM_009087.1,290-308).
ctgcggtacataatcatga

SEQ ID NO: 698600 - DNA, 19 bp, Mus musculus
  siRNA target sequence for Rpo1-3 (NM_009087.1,293-311).
cggtacataatcatgaaga

SEQ ID NO: 698601 - DNA, 19 bp, Mus musculus
  siRNA target sequence for Rpo1-3 (NM_009087.1,294-312).
ggtacataatcatgaagaa

SEQ ID NO: 698602 - DNA, 19 bp, Mus musculus
  siRNA target sequence for Rpo1-3 (NM_009087.1,310-328).
gaacccggaagtggaattt

SEQ ID NO: 698603 - DNA, 19 bp, Mus musculus
  siRNA target sequence for Rpo1-3 (NM_009087.1,347-365).
catccttcagagagcaaaa

SEQ ID NO: 698604 - DNA, 19 bp, Mus musculus
  siRNA target sequence for Rpo1-3 (NM_009087.1,401-419).
gctgttgagccgtttcaga

SEQ ID NO: 698605 - DNA, 19 bp, Mus musculus
  siRNA target sequence for Rpo1-3 (NM_009087.1,402-420).
ctgttgagccgtttcagaa

SEQ ID NO: 698606 - DNA, 19 bp, Mus musculus
  siRNA target sequence for Rpo1-3 (NM_009087.1,451-469).
gcatgtgcttgtcaagttt

SEQ ID NO: 698607 - DNA, 19 bp, Mus musculus
  siRNA target sequence for Rpo1-3 (NM_009087.1,473-491).
gccagcataaaggactata

SEQ ID NO: 698608 - DNA, 19 bp, Mus musculus
  siRNA target sequence for Rpo1-3 (NM_009087.1,474-492).
ccagcataaaggactataa

SEQ ID NO: 698609 - DNA, 19 bp, Mus musculus
  siRNA target sequence for Scg3 (NM_009130.1,386-404).
gacaaatccctgcataata

SEQ ID NO: 698610 - DNA, 19 bp, Mus musculus
  siRNA target sequence for Scg3 (NM_009130.1,394-412).
cctgcataatagagaatta

SEQ ID NO: 698611 - DNA, 19 bp, Mus musculus
  siRNA target sequence for Scg3 (NM_009130.1,397-415).
gcataatagagaattaagt

SEQ ID NO: 698612 - DNA, 19 bp, Mus musculus
  siRNA target sequence for Scg3 (NM_009130.1,423-441).
gacctttgaatgaacagat

SEQ ID NO: 698613 - DNA, 19 bp, Mus musculus
  siRNA target sequence for Scg3 (NM_009130.1,485-503).
gaaagcaagccgagtgaaa

SEQ ID NO: 698614 - DNA, 19 bp, Mus musculus
  siRNA target sequence for Scg3 (NM_009130.1,493-511).
gccgagtgaaagcaattat

SEQ ID NO: 698615 - DNA, 19 bp, Mus musculus
  siRNA target sequence for Scg3 (NM_009130.1,494-512).
ccgagtgaaagcaattatt

SEQ ID NO: 698616 - DNA, 19 bp, Mus musculus
  siRNA target sequence for Scg3 (NM_009130.1,516-534).
ctgtcgataacttgaatct

SEQ ID NO: 698617 - DNA, 19 bp, Mus musculus
  siRNA target sequence for Scg3 (NM_009130.1,535-553).
gctgagggcaataacagaa

SEQ ID NO: 698618 - DNA, 19 bp, Mus musculus
  siRNA target sequence for Scg3 (NM_009130.1,536-554).
ctgagggcaataacagaaa

SEQ ID NO: 698619 - DNA, 19 bp, Mus musculus
  siRNA target sequence for Scg3 (NM_009130.1,617-635).
gtggaagacgctgattcaa

SEQ ID NO: 698620 - DNA, 19 bp, Mus musculus
  siRNA target sequence for Scg3 (NM_009130.1,623-641).
gacgctgattcaaccaaaa

SEQ ID NO: 698621 - DNA, 19 bp, Mus musculus
  siRNA target sequence for Scg3 (NM_009130.1,625-643).
cgctgattcaaccaaaaat

SEQ ID NO: 698622 - DNA, 19 bp, Mus musculus
  siRNA target sequence for Scg3 (NM_009130.1,650-668).
ctgatcgatgagtacgatt

SEQ ID NO: 698623 - DNA, 19 bp, Mus musculus
  siRNA target sequence for Scg3 (NM_009130.1,685-703).
ggaccacaagtttcaagat

SEQ ID NO: 698624 - DNA, 19 bp, Mus musculus
  siRNA target sequence for Scg3 (NM_009130.1,706-724).
cccagacggccttcatcaa

SEQ ID NO: 698625 - DNA, 19 bp, Mus musculus
  siRNA target sequence for Scg3 (NM_009130.1,725-743).
ctggatggaactcctttaa

SEQ ID NO: 698626 - DNA, 19 bp, Mus musculus
  siRNA target sequence for Scg3 (NM_009130.1,738-756).
ctttaactgctgaagacat

SEQ ID NO: 698627 - DNA, 19 bp, Mus musculus
  siRNA target sequence for Scg3 (NM_009130.1,747-765).
ctgaagacatcgtccataa

SEQ ID NO: 698628 - DNA, 19 bp, Mus musculus
  siRNA target sequence for Scg3 (NM_009130.1,801-819).
gagtgtttgacaaaattgt

SEQ ID NO: 698629 - DNA, 19 bp, Mus musculus
  siRNA target sequence for Scg3 (NM_009130.1,909-927).
caaaagaggccaacaatta

SEQ ID NO: 698630 - DNA, 19 bp, Mus musculus
  siRNA target sequence for Scg3 (NM_009130.1,951-969).
caagcaggaccgagaatca

SEQ ID NO: 698631 - DNA, 19 bp, Mus musculus
  siRNA target sequence for Scg3 (NM_009130.1,1020-1038).
gcttcactaaccgtgaaaa

SEQ ID NO: 698632 - DNA, 19 bp, Mus musculus
  siRNA target sequence for Scg3 (NM_009130.1,1040-1058).
gatgagacggtgtctaaca

SEQ ID NO: 698633 - DNA, 19 bp, Mus musculus
  siRNA target sequence for Scg3 (NM_009130.1,1076-1094).
ggcttggaaaggagaacta

SEQ ID NO: 698634 - DNA, 19 bp, Mus musculus
  siRNA target sequence for Scg3 (NM_009130.1,1129-1147).
gtatttccccaacttctat

SEQ ID NO: 698635 - DNA, 19 bp, Mus musculus
  siRNA target sequence for Scg3 (NM_009130.1,1162-1180).
catcgactcagaaaaagaa

SEQ ID NO: 698636 - DNA, 19 bp, Mus musculus
  siRNA target sequence for Scg3 (NM_009130.1,1207-1225).
catcatgaagacattgatt

SEQ ID NO: 698637 - DNA, 19 bp, Mus musculus
  siRNA target sequence for Scg3 (NM_009130.1,1243-1261).
ggtgaaatacggtacgata

SEQ ID NO: 698638 - DNA, 19 bp, Mus musculus
  siRNA target sequence for Scg3 (NM_009130.1,1244-1262).
gtgaaatacggtacgatat

SEQ ID NO: 698639 - DNA, 19 bp, Mus musculus
  siRNA target sequence for Scg3 (NM_009130.1,1246-1264).
gaaatacggtacgatatct

SEQ ID NO: 698640 - DNA, 19 bp, Mus musculus
  siRNA target sequence for Scg3 (NM_009130.1,1275-1293).
gcgtgtcctaccttgaaaa

SEQ ID NO: 698641 - DNA, 19 bp, Mus musculus
  siRNA target sequence for Scg3 (NM_009130.1,1334-1352).
gaaaaaaatactactgata

SEQ ID NO: 698642 - DNA, 19 bp, Mus musculus
  siRNA target sequence for Scg3 (NM_009130.1,1438-1456).
ggaatacggaagcctaaaa

SEQ ID NO: 698643 - DNA, 19 bp, Mus musculus
  siRNA target sequence for Scg3 (NM_009130.1,1449-1467).
gcctaaaagactctacaaa

SEQ ID NO: 698644 - DNA, 19 bp, Mus musculus
  siRNA target sequence for Scg3 (NM_009130.1,1457-1475).
gactctacaaaagatgata

SEQ ID NO: 698645 - DNA, 19 bp, Mus musculus
  siRNA target sequence for Scg3 (NM_009130.1,1525-1543).
ctacttggaagccattaga

SEQ ID NO: 698646 - DNA, 19 bp, Mus musculus
  siRNA target sequence for Scg3 (NM_009130.1,1589-1607).
gaagattacgacctttcaa

SEQ ID NO: 698647 - DNA, 19 bp, Mus musculus
  siRNA target sequence for Scg3 (NM_009130.1,1592-1610).
gattacgacctttcaaaga

SEQ ID NO: 698648 - DNA, 19 bp, Mus musculus
  siRNA target sequence for Scrg1 (NM_009136.1,299-317).
gctacagaaagttgctaaa

SEQ ID NO: 698649 - DNA, 19 bp, Mus musculus
  siRNA target sequence for Scrg1 (NM_009136.1,303-321).
cagaaagttgctaaaggat

SEQ ID NO: 698650 - DNA, 19 bp, Mus musculus
  siRNA target sequence for Scrg1 (NM_009136.1,312-330).
gctaaaggatcgcaattgt

SEQ ID NO: 698651 - DNA, 19 bp, Mus musculus
  siRNA target sequence for Sdfr1 (NM_009145.1,110-128).
ctcagaacgaaccaagaat

SEQ ID NO: 698652 - DNA, 19 bp, Mus musculus
  siRNA target sequence for Sdfr1 (NM_009145.1,134-152).
ccagtgaagaggtcattat

SEQ ID NO: 698653 - DNA, 19 bp, Mus musculus
  siRNA target sequence for Sdfr1 (NM_009145.1,135-153).
cagtgaagaggtcattatt

SEQ ID NO: 698654 - DNA, 19 bp, Mus musculus
  siRNA target sequence for Sdfr1 (NM_009145.1,200-218).
gctctcacacccttatgta

SEQ ID NO: 698655 - DNA, 19 bp, Mus musculus
  siRNA target sequence for Sdfr1 (NM_009145.1,316-334).
ggcgaataccactgtgtat

SEQ ID NO: 698656 - DNA, 19 bp, Mus musculus
  siRNA target sequence for Sdfr1 (NM_009145.1,317-335).
gcgaataccactgtgtata

SEQ ID NO: 698657 - DNA, 19 bp, Mus musculus
  siRNA target sequence for Sdfr1 (NM_009145.1,345-363).
cagcgctcctaaagcaaat

SEQ ID NO: 698658 - DNA, 19 bp, Mus musculus
  siRNA target sequence for Sdfr1 (NM_009145.1,430-448).
gggcaggatgctatgatgt

SEQ ID NO: 698659 - DNA, 19 bp, Mus musculus
  siRNA target sequence for Sdfr1 (NM_009145.1,469-487).
ccccacccagagtggatat

SEQ ID NO: 698660 - DNA, 19 bp, Mus musculus
  siRNA target sequence for Sdfr1 (NM_009145.1,510-528).
gtttgaggagatttctaat

SEQ ID NO: 698661 - DNA, 19 bp, Mus musculus
  siRNA target sequence for Sdfr1 (NM_009145.1,559-577).
gagaattacactgaattga

SEQ ID NO: 698662 - DNA, 19 bp, Mus musculus
  siRNA target sequence for Sdfr1 (NM_009145.1,578-596).
gtattgtgaatctccaaat

SEQ ID NO: 698663 - DNA, 19 bp, Mus musculus
  siRNA target sequence for Sdfr1 (NM_009145.1,738-756).
ggtgatcattgttgtgtat

SEQ ID NO: 698664 - DNA, 19 bp, Mus musculus
  siRNA target sequence for Sdfr1 (NM_009145.1,799-817).
ccagctgggccaatgaaaa

SEQ ID NO: 698665 - DNA, 19 bp, Mus musculus
  siRNA target sequence for Sdfr1 (NM_009145.1,852-870).
gcgccagagaaacacaaat

SEQ ID NO: 698666 - DNA, 19 bp, Mus musculus
  siRNA target sequence for Sdfr1 (NM_009145.1,853-871).
cgccagagaaacacaaatt

SEQ ID NO: 698667 - DNA, 19 bp, Mus musculus
  siRNA target sequence for Sec8 (NM_009148.1,278-296).
cactaactcgaggaataaa

SEQ ID NO: 698668 - DNA, 19 bp, Mus musculus
  siRNA target sequence for Sec8 (NM_009148.1,280-298).
ctaactcgaggaataaaat

SEQ ID NO: 698669 - DNA, 19 bp, Mus musculus
  siRNA target sequence for Sec8 (NM_009148.1,332-350).
gatgctgctgcattgcaaa

SEQ ID NO: 698670 - DNA, 19 bp, Mus musculus
  siRNA target sequence for Sec8 (NM_009148.1,590-608).
cctgcacttggttctcata

SEQ ID NO: 698671 - DNA, 19 bp, Mus musculus
  siRNA target sequence for Sec8 (NM_009148.1,615-633).
ctgcaccgccatctgtata

SEQ ID NO: 698672 - DNA, 19 bp, Mus musculus
  siRNA target sequence for Sec8 (NM_009148.1,621-639).
cgccatctgtatatcaaat

SEQ ID NO: 698673 - DNA, 19 bp, Mus musculus
  siRNA target sequence for Sec8 (NM_009148.1,624-642).
catctgtatatcaaatcca

SEQ ID NO: 698674 - DNA, 19 bp, Mus musculus
  siRNA target sequence for Sec8 (NM_009148.1,649-667).
gggtggtacagcgtaacaa

SEQ ID NO: 698675 - DNA, 19 bp, Mus musculus
  siRNA target sequence for Sec8 (NM_009148.1,654-672).
gtacagcgtaacaaggaaa

SEQ ID NO: 698676 - DNA, 19 bp, Mus musculus
  siRNA target sequence for Sec8 (NM_009148.1,669-687).
gaaaaggggaagatgagtt

SEQ ID NO: 698677 - DNA, 19 bp, Mus musculus
  siRNA target sequence for Sec8 (NM_009148.1,674-692).
ggggaagatgagttctcat

SEQ ID NO: 698678 - DNA, 19 bp, Mus musculus
  siRNA target sequence for Sec8 (NM_009148.1,683-701).
gagttctcatggcaaagat

SEQ ID NO: 698679 - DNA, 19 bp, Mus musculus
  siRNA target sequence for Sec8 (NM_009148.1,711-729).
ggtcctctgattgatgttt

SEQ ID NO: 698680 - DNA, 19 bp, Mus musculus
  siRNA target sequence for Sec8 (NM_009148.1,739-757).
ctactccacgcaaattcct

SEQ ID NO: 698681 - DNA, 19 bp, Mus musculus
  siRNA target sequence for Sec8 (NM_009148.1,756-774).
cttgatgcttctcaatatt

SEQ ID NO: 698682 - DNA, 19 bp, Mus musculus
  siRNA target sequence for Sec8 (NM_009148.1,916-934).
cagttaaagccattaaaga

SEQ ID NO: 698683 - DNA, 19 bp, Mus musculus
  siRNA target sequence for Sec8 (NM_009148.1,1036-1054).
caaggttactcctagaact

SEQ ID NO: 698684 - DNA, 19 bp, Mus musculus
  siRNA target sequence for Sec8 (NM_009148.1,1059-1077).
gaactgttgtttgataagt

SEQ ID NO: 698685 - DNA, 19 bp, Mus musculus
  siRNA target sequence for Sec8 (NM_009148.1,1062-1080).
ctgttgtttgataagttta

SEQ ID NO: 698686 - DNA, 19 bp, Mus musculus
  siRNA target sequence for Sec8 (NM_009148.1,1152-1170).
caggaggagatcaaattat

SEQ ID NO: 698687 - DNA, 19 bp, Mus musculus
  siRNA target sequence for Sec8 (NM_009148.1,1154-1172).
ggaggagatcaaattatat

SEQ ID NO: 698688 - DNA, 19 bp, Mus musculus
  siRNA target sequence for Sec8 (NM_009148.1,1180-1198).
cagatgtgtgggtgaagat

SEQ ID NO: 698689 - DNA, 19 bp, Mus musculus
  siRNA target sequence for Sec8 (NM_009148.1,1225-1243).
ctgagtacttggatatgaa

SEQ ID NO: 698690 - DNA, 19 bp, Mus musculus
  siRNA target sequence for Sec8 (NM_009148.1,1263-1281).
gagccatcagcccaactaa

SEQ ID NO: 698691 - DNA, 19 bp, Mus musculus
  siRNA target sequence for Sec8 (NM_009148.1,1267-1285).
catcagcccaactaagcta

SEQ ID NO: 698692 - DNA, 19 bp, Mus musculus
  siRNA target sequence for Sec8 (NM_009148.1,1300-1318).
gagagttcgcagccttttt

SEQ ID NO: 698693 - DNA, 19 bp, Mus musculus
  siRNA target sequence for Sec8 (NM_009148.1,1394-1412).
cgcctatctccgagaacaa

SEQ ID NO: 698694 - DNA, 19 bp, Mus musculus
  siRNA target sequence for Sec8 (NM_009148.1,1395-1413).
gcctatctccgagaacaaa

SEQ ID NO: 698695 - DNA, 19 bp, Mus musculus
  siRNA target sequence for Sec8 (NM_009148.1,1450-1468).
gaggtcctgatgacaactt

SEQ ID NO: 698696 - DNA, 19 bp, Mus musculus
  siRNA target sequence for Sec8 (NM_009148.1,1479-1497).
ggaggaacaaaatttgtct

SEQ ID NO: 698697 - DNA, 19 bp, Mus musculus
  siRNA target sequence for Sec8 (NM_009148.1,1513-1531).
gaaatattaccgtcatatt

SEQ ID NO: 698698 - DNA, 19 bp, Mus musculus
  siRNA target sequence for Sec8 (NM_009148.1,1522-1540).
ccgtcatattccatccatt

SEQ ID NO: 698699 - DNA, 19 bp, Mus musculus
  siRNA target sequence for Sec8 (NM_009148.1,1523-1541).
cgtcatattccatccatta

SEQ ID NO: 698700 - DNA, 19 bp, Mus musculus
  siRNA target sequence for Sec8 (NM_009148.1,1537-1555).
cattactgagatttattca

SEQ ID NO: 698701 - DNA, 19 bp, Mus musculus
  siRNA target sequence for Sec8 (NM_009148.1,1595-1613).
gtgtcctcttcgagagttt

SEQ ID NO: 698702 - DNA, 19 bp, Mus musculus
  siRNA target sequence for Sec8 (NM_009148.1,1599-1617).
cctcttcgagagtttctta

SEQ ID NO: 698703 - DNA, 19 bp, Mus musculus
  siRNA target sequence for Sec8 (NM_009148.1,1614-1632).
cttaccgtgtatatcaaga

SEQ ID NO: 698704 - DNA, 19 bp, Mus musculus
  siRNA target sequence for Sec8 (NM_009148.1,1693-1711).
cctcagaccccttgaagat

SEQ ID NO: 698705 - DNA, 19 bp, Mus musculus
  siRNA target sequence for Sec8 (NM_009148.1,1758-1776).
cttctacagagcacaatca

SEQ ID NO: 698706 - DNA, 19 bp, Mus musculus
  siRNA target sequence for Sec8 (NM_009148.1,1778-1796).
cgtggagaagacagtacaa

SEQ ID NO: 698707 - DNA, 19 bp, Mus musculus
  siRNA target sequence for Sec8 (NM_009148.1,1789-1807).
cagtacaagacctcatgaa

SEQ ID NO: 698708 - DNA, 19 bp, Mus musculus
  siRNA target sequence for Sec8 (NM_009148.1,1794-1812).
caagacctcatgaacctta

SEQ ID NO: 698709 - DNA, 19 bp, Mus musculus
  siRNA target sequence for Sec8 (NM_009148.1,1820-1838).
cttgagtgcgtattcagat

SEQ ID NO: 698710 - DNA, 19 bp, Mus musculus
  siRNA target sequence for Sec8 (NM_009148.1,1825-1843).
gtgcgtattcagatcagtt

SEQ ID NO: 698711 - DNA, 19 bp, Mus musculus
  siRNA target sequence for Sec8 (NM_009148.1,1945-1963).
cttgggcaaaggatgatga

SEQ ID NO: 698712 - DNA, 19 bp, Mus musculus
  siRNA target sequence for Sec8 (NM_009148.1,2192-2210).
ggcaggtcgaacaaagtca

SEQ ID NO: 698713 - DNA, 19 bp, Mus musculus
  siRNA target sequence for Sec8 (NM_009148.1,2284-2302).
cagtgtctgaacagatcat

SEQ ID NO: 698714 - DNA, 19 bp, Mus musculus
  siRNA target sequence for Sec8 (NM_009148.1,2385-2403).
cattgtttccactatctca

SEQ ID NO: 698715 - DNA, 19 bp, Mus musculus
  siRNA target sequence for Sec8 (NM_009148.1,2628-2646).
ggcatcaagaaaatgtgta

SEQ ID NO: 698716 - DNA, 19 bp, Mus musculus
  siRNA target sequence for Sec8 (NM_009148.1,2636-2654).
gaaaatgtgtaggaacatt

SEQ ID NO: 698717 - DNA, 19 bp, Mus musculus
  siRNA target sequence for Sepp1 (NM_009155.2,139-157).
gccaaagctctgcttgtta

SEQ ID NO: 698718 - DNA, 19 bp, Mus musculus
  siRNA target sequence for Sepp1 (NM_009155.2,141-159).
caaagctctgcttgttaca

SEQ ID NO: 698719 - DNA, 19 bp, Mus musculus
  siRNA target sequence for Sepp1 (NM_009155.2,172-190).
ggtacataggagatcaaaa

SEQ ID NO: 698720 - DNA, 19 bp, Mus musculus
  siRNA target sequence for Sepp1 (NM_009155.2,173-191).
gtacataggagatcaaaat

SEQ ID NO: 698721 - DNA, 19 bp, Mus musculus
  siRNA target sequence for Sepp1 (NM_009155.2,218-236).
gacagtggttgctcttctt

SEQ ID NO: 698722 - DNA, 19 bp, Mus musculus
  siRNA target sequence for Sepp1 (NM_009155.2,278-296).
ggaagacctgcgcataaaa

SEQ ID NO: 698723 - DNA, 19 bp, Mus musculus
  siRNA target sequence for Sepp1 (NM_009155.2,284-302).
cctgcgcataaaactagaa

SEQ ID NO: 698724 - DNA, 19 bp, Mus musculus
  siRNA target sequence for Sepp1 (NM_009155.2,285-303).
ctgcgcataaaactagaaa

SEQ ID NO: 698725 - DNA, 19 bp, Mus musculus
  siRNA target sequence for Sepp1 (NM_009155.2,348-366).
ggatctccttcccaattaa

SEQ ID NO: 698726 - DNA, 19 bp, Mus musculus
  siRNA target sequence for Sepp1 (NM_009155.2,487-505).
gatgtggccgtcttgtgta

SEQ ID NO: 698727 - DNA, 19 bp, Mus musculus
  siRNA target sequence for Sepp1 (NM_009155.2,490-508).
gtggccgtcttgtgtatca

SEQ ID NO: 698728 - DNA, 19 bp, Mus musculus
  siRNA target sequence for Sepp1 (NM_009155.2,533-551).
cacattcccatatgttgaa

SEQ ID NO: 698729 - DNA, 19 bp, Mus musculus
  siRNA target sequence for Sepp1 (NM_009155.2,535-553).
cattcccatatgttgaaga

SEQ ID NO: 698730 - DNA, 19 bp, Mus musculus
  siRNA target sequence for Sepp1 (NM_009155.2,596-614).
caatctcacgagtcttgaa

SEQ ID NO: 698731 - DNA, 19 bp, Mus musculus
  siRNA target sequence for Sepp1 (NM_009155.2,602-620).
cacgagtcttgaagatgaa

SEQ ID NO: 698732 - DNA, 19 bp, Mus musculus
  siRNA target sequence for Sepp1 (NM_009155.2,640-658).
cctcagctactgccaataa

SEQ ID NO: 698733 - DNA, 19 bp, Mus musculus
  siRNA target sequence for Sepp1 (NM_009155.2,1001-1019).
gaagtcagggtctgcaatt

SEQ ID NO: 698734 - DNA, 19 bp, Mus musculus
  siRNA target sequence for Sepp1 (NM_009155.2,1004-1022).
gtcagggtctgcaattgct

SEQ ID NO: 698735 - DNA, 19 bp, Mus musculus
  siRNA target sequence for Sepp1 (NM_009155.2,1024-1042).
gacagtgtgcggaaaacct

SEQ ID NO: 698736 - DNA, 19 bp, Mus musculus
  siRNA target sequence for Sepw1 (NM_009156.1,56-74).
gccgttcgagtcgtgtatt

SEQ ID NO: 698737 - DNA, 19 bp, Mus musculus
  siRNA target sequence for Sepw1 (NM_009156.1,58-76).
cgttcgagtcgtgtattgt

SEQ ID NO: 698738 - DNA, 19 bp, Mus musculus
  siRNA target sequence for Sepw1 (NM_009156.1,139-157).
cggatgcctggacatttgt

SEQ ID NO: 698739 - DNA, 19 bp, Mus musculus
  siRNA target sequence for Sil (NM_009185.1,242-260).
caagcaagatggtaccttt

SEQ ID NO: 698740 - DNA, 19 bp, Mus musculus
  siRNA target sequence for Sil (NM_009185.1,261-279).
ccattttcccccatcaaaa

SEQ ID NO: 698741 - DNA, 19 bp, Mus musculus
  siRNA target sequence for Sil (NM_009185.1,291-309).
gaacccaatgccaattgga

SEQ ID NO: 698742 - DNA, 19 bp, Mus musculus
  siRNA target sequence for Sil (NM_009185.1,341-359).
gaaagccaaagcttatggt

SEQ ID NO: 698743 - DNA, 19 bp, Mus musculus
  siRNA target sequence for Sil (NM_009185.1,369-387).
ggccatccgacttgcttat

SEQ ID NO: 698744 - DNA, 19 bp, Mus musculus
  siRNA target sequence for Sil (NM_009185.1,372-390).
catccgacttgcttatcgt

SEQ ID NO: 698745 - DNA, 19 bp, Mus musculus
  siRNA target sequence for Sil (NM_009185.1,539-557).
ctcttcctggagatttttt

SEQ ID NO: 698746 - DNA, 19 bp, Mus musculus
  siRNA target sequence for Sil (NM_009185.1,564-582).
ctgcagagttcatattcaa

SEQ ID NO: 698747 - DNA, 19 bp, Mus musculus
  siRNA target sequence for Sil (NM_009185.1,593-611).
caagggatgtgatagttca

SEQ ID NO: 698748 - DNA, 19 bp, Mus musculus
  siRNA target sequence for Sil (NM_009185.1,596-614).
gggatgtgatagttcataa

SEQ ID NO: 698749 - DNA, 19 bp, Mus musculus
  siRNA target sequence for Sil (NM_009185.1,632-650).
cagctttaaaggctttaca

SEQ ID NO: 698750 - DNA, 19 bp, Mus musculus
  siRNA target sequence for Sil (NM_009185.1,654-672).
ccatgtgtgtagcaaagat

SEQ ID NO: 698751 - DNA, 19 bp, Mus musculus
  siRNA target sequence for Sil (NM_009185.1,655-673).
catgtgtgtagcaaagatt

SEQ ID NO: 698752 - DNA, 19 bp, Mus musculus
  siRNA target sequence for Sil (NM_009185.1,658-676).
gtgtgtagcaaagatttct

SEQ ID NO: 698753 - DNA, 19 bp, Mus musculus
  siRNA target sequence for Sil (NM_009185.1,766-784).
gtaactctagcaaattcct

SEQ ID NO: 698754 - DNA, 19 bp, Mus musculus
  siRNA target sequence for Sil (NM_009185.1,772-790).
ctagcaaattccttcaagt

SEQ ID NO: 698755 - DNA, 19 bp, Mus musculus
  siRNA target sequence for Sil (NM_009185.1,821-839).
ctacagcacttgcaagaaa

SEQ ID NO: 698756 - DNA, 19 bp, Mus musculus
  siRNA target sequence for Sil (NM_009185.1,826-844).
gcacttgcaagaaacctaa

SEQ ID NO: 698757 - DNA, 19 bp, Mus musculus
  siRNA target sequence for Sil (NM_009185.1,832-850).
gcaagaaacctaagtagta

SEQ ID NO: 698758 - DNA, 19 bp, Mus musculus
  siRNA target sequence for Sil (NM_009185.1,836-854).
gaaacctaagtagtaattt

SEQ ID NO: 698759 - DNA, 19 bp, Mus musculus
  siRNA target sequence for Sil (NM_009185.1,865-883).
caagttcagggaacctata

SEQ ID NO: 698760 - DNA, 19 bp, Mus musculus
  siRNA target sequence for Sil (NM_009185.1,875-893).
gaacctataaacatggata

SEQ ID NO: 698761 - DNA, 19 bp, Mus musculus
  siRNA target sequence for Sil (NM_009185.1,878-896).
cctataaacatggatatat

SEQ ID NO: 698762 - DNA, 19 bp, Mus musculus
  siRNA target sequence for Sil (NM_009185.1,978-996).
gctggctggaattatacat

SEQ ID NO: 698763 - DNA, 19 bp, Mus musculus
  siRNA target sequence for Sil (NM_009185.1,1016-1034).
gggcttgctgcttgagata

SEQ ID NO: 698764 - DNA, 19 bp, Mus musculus
  siRNA target sequence for Sil (NM_009185.1,1018-1036).
gcttgctgcttgagataca

SEQ ID NO: 698765 - DNA, 19 bp, Mus musculus
  siRNA target sequence for Sil (NM_009185.1,1035-1053).
catgttcagttcttccatt

SEQ ID NO: 698766 - DNA, 19 bp, Mus musculus
  siRNA target sequence for Sil (NM_009185.1,1096-1114).
ctttattcattgacacata

SEQ ID NO: 698767 - DNA, 19 bp, Mus musculus
  siRNA target sequence for Sil (NM_009185.1,1154-1172).
ggacgcccgaccttcagtt

SEQ ID NO: 698768 - DNA, 19 bp, Mus musculus
  siRNA target sequence for Sil (NM_009185.1,1155-1173).
gacgcccgaccttcagttt

SEQ ID NO: 698769 - DNA, 19 bp, Mus musculus
  siRNA target sequence for Sil (NM_009185.1,1157-1175).
cgcccgaccttcagtttca

SEQ ID NO: 698770 - DNA, 19 bp, Mus musculus
  siRNA target sequence for Sil (NM_009185.1,1159-1177).
cccgaccttcagtttcagt

SEQ ID NO: 698771 - DNA, 19 bp, Mus musculus
  siRNA target sequence for Sil (NM_009185.1,1161-1179).
cgaccttcagtttcagtta

SEQ ID NO: 698772 - DNA, 19 bp, Mus musculus
  siRNA target sequence for Sil (NM_009185.1,1200-1218).
gcatcttttcaataacgtt

SEQ ID NO: 698773 - DNA, 19 bp, Mus musculus
  siRNA target sequence for Sil (NM_009185.1,1228-1246).
ggcaaaaacccaatccatt

SEQ ID NO: 698774 - DNA, 19 bp, Mus musculus
  siRNA target sequence for Sil (NM_009185.1,1229-1247).
gcaaaaacccaatccattt

SEQ ID NO: 698775 - DNA, 19 bp, Mus musculus
  siRNA target sequence for Sil (NM_009185.1,1348-1366).
cctgggaaaataccaataa

SEQ ID NO: 698776 - DNA, 19 bp, Mus musculus
  siRNA target sequence for Sil (NM_009185.1,1432-1450).
gtgagtcagaagatttcta

SEQ ID NO: 698777 - DNA, 19 bp, Mus musculus
  siRNA target sequence for Sil (NM_009185.1,1458-1476).
gccatctgttcctgaactt

SEQ ID NO: 698778 - DNA, 19 bp, Mus musculus
  siRNA target sequence for Sil (NM_009185.1,1459-1477).
ccatctgttcctgaacttt

SEQ ID NO: 698779 - DNA, 19 bp, Mus musculus
  siRNA target sequence for Sil (NM_009185.1,1474-1492).
ctttcgctcgtgttagaca

SEQ ID NO: 698780 - DNA, 19 bp, Mus musculus
  siRNA target sequence for Sil (NM_009185.1,1478-1496).
cgctcgtgttagacaacaa

SEQ ID NO: 698781 - DNA, 19 bp, Mus musculus
  siRNA target sequence for Sil (NM_009185.1,1480-1498).
ctcgtgttagacaacaact

SEQ ID NO: 698782 - DNA, 19 bp, Mus musculus
  siRNA target sequence for Sil (NM_009185.1,1516-1534).
cagtctaaccctttggaaa

SEQ ID NO: 698783 - DNA, 19 bp, Mus musculus
  siRNA target sequence for Sil (NM_009185.1,1638-1656).
cccaacaaatcagttaagt

SEQ ID NO: 698784 - DNA, 19 bp, Mus musculus
  siRNA target sequence for Sil (NM_009185.1,1690-1708).
cagtcatctacctgtaaga

SEQ ID NO: 698785 - DNA, 19 bp, Mus musculus
  siRNA target sequence for Sil (NM_009185.1,1722-1740).
gttcaggaacactaatgct

SEQ ID NO: 698786 - DNA, 19 bp, Mus musculus
  siRNA target sequence for Sil (NM_009185.1,1725-1743).
caggaacactaatgctaaa

SEQ ID NO: 698787 - DNA, 19 bp, Mus musculus
  siRNA target sequence for Sil (NM_009185.1,1728-1746).
gaacactaatgctaaacca

SEQ ID NO: 698788 - DNA, 19 bp, Mus musculus
  siRNA target sequence for Sil (NM_009185.1,1779-1797).
gaaacttcaagcagtttct

SEQ ID NO: 698789 - DNA, 19 bp, Mus musculus
  siRNA target sequence for Sil (NM_009185.1,1799-1817).
ctgggagcatgcaaaagga

SEQ ID NO: 698790 - DNA, 19 bp, Mus musculus
  siRNA target sequence for Sil (NM_009185.1,1919-1937).
gaccaatggagcttcaagt

SEQ ID NO: 698791 - DNA, 19 bp, Mus musculus
  siRNA target sequence for Sil (NM_009185.1,1999-2017).
ggccatattcagtatagta

SEQ ID NO: 698792 - DNA, 19 bp, Mus musculus
  siRNA target sequence for Sil (NM_009185.1,2001-2019).
ccatattcagtatagtaca

SEQ ID NO: 698793 - DNA, 19 bp, Mus musculus
  siRNA target sequence for Sil (NM_009185.1,2002-2020).
catattcagtatagtacaa

SEQ ID NO: 698794 - DNA, 19 bp, Mus musculus
  siRNA target sequence for Sil (NM_009185.1,2131-2149).
gccatctactcgtcaagta

SEQ ID NO: 698795 - DNA, 19 bp, Mus musculus
  siRNA target sequence for Sil (NM_009185.1,2183-2201).
cctattctccccatagcaa

SEQ ID NO: 698796 - DNA, 19 bp, Mus musculus
  siRNA target sequence for Sil (NM_009185.1,2184-2202).
ctattctccccatagcaat

SEQ ID NO: 698797 - DNA, 19 bp, Mus musculus
  siRNA target sequence for Sil (NM_009185.1,2312-2330).
gactgtctcctgatgcata

SEQ ID NO: 698798 - DNA, 19 bp, Mus musculus
  siRNA target sequence for Sil (NM_009185.1,2321-2339).
ctgatgcataccgttttgt

SEQ ID NO: 698799 - DNA, 19 bp, Mus musculus
  siRNA target sequence for Sil (NM_009185.1,2323-2341).
gatgcataccgttttgtca

SEQ ID NO: 698800 - DNA, 19 bp, Mus musculus
  siRNA target sequence for Sil (NM_009185.1,2375-2393).
cacagatccagcgcttatt

SEQ ID NO: 698801 - DNA, 19 bp, Mus musculus
  siRNA target sequence for Sil (NM_009185.1,2379-2397).
gatccagcgcttattagaa

SEQ ID NO: 698802 - DNA, 19 bp, Mus musculus
  siRNA target sequence for Sil (NM_009185.1,2388-2406).
cttattagaagcacaatct

SEQ ID NO: 698803 - DNA, 19 bp, Mus musculus
  siRNA target sequence for Sil (NM_009185.1,2508-2526).
cttgcacatgagaaaaagt

SEQ ID NO: 698804 - DNA, 19 bp, Mus musculus
  siRNA target sequence for Sil (NM_009185.1,2511-2529).
gcacatgagaaaaagtgta

SEQ ID NO: 698805 - DNA, 19 bp, Mus musculus
  siRNA target sequence for Sil (NM_009185.1,2544-2562).
cacaggtgctagcttgttt

SEQ ID NO: 698806 - DNA, 19 bp, Mus musculus
  siRNA target sequence for Sil (NM_009185.1,2548-2566).
ggtgctagcttgttttgga

SEQ ID NO: 698807 - DNA, 19 bp, Mus musculus
  siRNA target sequence for Sil (NM_009185.1,2549-2567).
gtgctagcttgttttggaa

SEQ ID NO: 698808 - DNA, 19 bp, Mus musculus
  siRNA target sequence for Sil (NM_009185.1,2565-2583).
gaatgcagcaggtgatgat

SEQ ID NO: 698809 - DNA, 19 bp, Mus musculus
  siRNA target sequence for Sil (NM_009185.1,2597-2615).
cacagccgaagcaagatga

SEQ ID NO: 698810 - DNA, 19 bp, Mus musculus
  siRNA target sequence for Sil (NM_009185.1,2599-2617).
cagccgaagcaagatgata

SEQ ID NO: 698811 - DNA, 19 bp, Mus musculus
  siRNA target sequence for Sil (NM_009185.1,2607-2625).
gcaagatgataccaagatt

SEQ ID NO: 698812 - DNA, 19 bp, Mus musculus
  siRNA target sequence for Sil (NM_009185.1,2611-2629).
gatgataccaagatttcca

SEQ ID NO: 698813 - DNA, 19 bp, Mus musculus
  siRNA target sequence for Sil (NM_009185.1,2683-2701).
ggtagtgcatcttccttaa

SEQ ID NO: 698814 - DNA, 19 bp, Mus musculus
  siRNA target sequence for Sil (NM_009185.1,2684-2702).
gtagtgcatcttccttaaa

SEQ ID NO: 698815 - DNA, 19 bp, Mus musculus
  siRNA target sequence for Sil (NM_009185.1,2712-2730).
cattcctagttttgaagaa

SEQ ID NO: 698816 - DNA, 19 bp, Mus musculus
  siRNA target sequence for Sil (NM_009185.1,2815-2833).
gtgttcttcccaaatgcat

SEQ ID NO: 698817 - DNA, 19 bp, Mus musculus
  siRNA target sequence for Sil (NM_009185.1,2925-2943).
gccttaccggccatcagat

SEQ ID NO: 698818 - DNA, 19 bp, Mus musculus
  siRNA target sequence for Sil (NM_009185.1,2927-2945).
cttaccggccatcagataa

SEQ ID NO: 698819 - DNA, 19 bp, Mus musculus
  siRNA target sequence for Sil (NM_009185.1,2935-2953).
ccatcagataaccagaaaa

SEQ ID NO: 698820 - DNA, 19 bp, Mus musculus
  siRNA target sequence for Sil (NM_009185.1,2974-2992).
caagtgaaccacctactaa

SEQ ID NO: 698821 - DNA, 19 bp, Mus musculus
  siRNA target sequence for Sil (NM_009185.1,2977-2995).
gtgaaccacctactaagta

SEQ ID NO: 698822 - DNA, 19 bp, Mus musculus
  siRNA target sequence for Sil (NM_009185.1,3022-3040).
cctaccaaagcggtagtta

SEQ ID NO: 698823 - DNA, 19 bp, Mus musculus
  siRNA target sequence for Sil (NM_009185.1,3026-3044).
ccaaagcggtagttaccaa

SEQ ID NO: 698824 - DNA, 19 bp, Mus musculus
  siRNA target sequence for Sil (NM_009185.1,3108-3126).
ggtagacaaagattgtgta

SEQ ID NO: 698825 - DNA, 19 bp, Mus musculus
  siRNA target sequence for Sil (NM_009185.1,3152-3170).
ggagcctaggagtgaaaat

SEQ ID NO: 698826 - DNA, 19 bp, Mus musculus
  siRNA target sequence for Sil (NM_009185.1,3155-3173).
gcctaggagtgaaaatcga

SEQ ID NO: 698827 - DNA, 19 bp, Mus musculus
  siRNA target sequence for Sil (NM_009185.1,3172-3190).
gactctcccactaaagtga

SEQ ID NO: 698828 - DNA, 19 bp, Mus musculus
  siRNA target sequence for Sil (NM_009185.1,3247-3265).
gcagtgatctctggattaa

SEQ ID NO: 698829 - DNA, 19 bp, Mus musculus
  siRNA target sequence for Sil (NM_009185.1,3248-3266).
cagtgatctctggattaaa

SEQ ID NO: 698830 - DNA, 19 bp, Mus musculus
  siRNA target sequence for Sil (NM_009185.1,3270-3288).
catgtcgtttggtaatgtt

SEQ ID NO: 698831 - DNA, 19 bp, Mus musculus
  siRNA target sequence for Sil (NM_009185.1,3391-3409).
gctcggtcaaagcagaata

SEQ ID NO: 698832 - DNA, 19 bp, Mus musculus
  siRNA target sequence for Sil (NM_009185.1,3392-3410).
ctcggtcaaagcagaataa

SEQ ID NO: 698833 - DNA, 19 bp, Mus musculus
  siRNA target sequence for Sil (NM_009185.1,3422-3440).
ctgtcggccttctacatat

SEQ ID NO: 698834 - DNA, 19 bp, Mus musculus
  siRNA target sequence for Sil (NM_009185.1,3424-3442).
gtcggccttctacatatta

SEQ ID NO: 698835 - DNA, 19 bp, Mus musculus
  siRNA target sequence for Sil (NM_009185.1,3426-3444).
cggccttctacatattaat

SEQ ID NO: 698836 - DNA, 19 bp, Mus musculus
  siRNA target sequence for Sil (NM_009185.1,3427-3445).
ggccttctacatattaatt

SEQ ID NO: 698837 - DNA, 19 bp, Mus musculus
  siRNA target sequence for Sil (NM_009185.1,3429-3447).
ccttctacatattaattca

SEQ ID NO: 698838 - DNA, 19 bp, Mus musculus
  siRNA target sequence for Sil (NM_009185.1,3460-3478).
gtggggcttagcttagttt

SEQ ID NO: 698839 - DNA, 19 bp, Mus musculus
  siRNA target sequence for Sil (NM_009185.1,3462-3480).
ggggcttagcttagtttca

SEQ ID NO: 698840 - DNA, 19 bp, Mus musculus
  siRNA target sequence for Sil (NM_009185.1,3499-3517).
gcaaccaaaaaatacatga

SEQ ID NO: 698841 - DNA, 19 bp, Mus musculus
  siRNA target sequence for Sil (NM_009185.1,3595-3613).
gaccatgtgttgaacagaa

SEQ ID NO: 698842 - DNA, 19 bp, Mus musculus
  siRNA target sequence for Sil (NM_009185.1,3724-3742).
ccagtactgagaaatatca

SEQ ID NO: 698843 - DNA, 19 bp, Mus musculus
  siRNA target sequence for Sil (NM_009185.1,3727-3745).
gtactgagaaatatcacaa

SEQ ID NO: 698844 - DNA, 19 bp, Mus musculus
  siRNA target sequence for Sil (NM_009185.1,3915-3933).
gccatctcctgagacttta

SEQ ID NO: 698845 - DNA, 19 bp, Mus musculus
  siRNA target sequence for Sil (NM_009185.1,3916-3934).
ccatctcctgagactttaa

SEQ ID NO: 698846 - DNA, 19 bp, Mus musculus
  siRNA target sequence for Sil (NM_009185.1,3987-4005).
cagacagttacctaagtta

SEQ ID NO: 698847 - DNA, 19 bp, Mus musculus
  siRNA target sequence for Snap23 (NM_009222.2,212-230).
gggctcaccaggttactga

SEQ ID NO: 698848 - DNA, 19 bp, Mus musculus
  siRNA target sequence for Snap23 (NM_009222.2,213-231).
ggctcaccaggttactgat

SEQ ID NO: 698849 - DNA, 19 bp, Mus musculus
  siRNA target sequence for Snap23 (NM_009222.2,290-308).
gaatcaagaccatcactat

SEQ ID NO: 698850 - DNA, 19 bp, Mus musculus
  siRNA target sequence for Snap23 (NM_009222.2,381-399).
ggcagagaagactttaaca

SEQ ID NO: 698851 - DNA, 19 bp, Mus musculus
  siRNA target sequence for Snap23 (NM_009222.2,437-455).
gtaataggacaaagaactt

SEQ ID NO: 698852 - DNA, 19 bp, Mus musculus
  siRNA target sequence for Snap23 (NM_009222.2,508-526).
cctagcaatgtagtatcta

SEQ ID NO: 698853 - DNA, 19 bp, Mus musculus
  siRNA target sequence for Snap23 (NM_009222.2,528-546).
gcaaccgagccggattaca

SEQ ID NO: 698854 - DNA, 19 bp, Mus musculus
  siRNA target sequence for Snap23 (NM_009222.2,529-547).
caaccgagccggattacaa

SEQ ID NO: 698855 - DNA, 19 bp, Mus musculus
  siRNA target sequence for Snap23 (NM_009222.2,534-552).
gagccggattacaaatggt

SEQ ID NO: 698856 - DNA, 19 bp, Mus musculus
  siRNA target sequence for Snap23 (NM_009222.2,591-609).
cattaaacgtataactaat

SEQ ID NO: 698857 - DNA, 19 bp, Mus musculus
  siRNA target sequence for Snap23 (NM_009222.2,656-674).
gcatcctaggcaacctaaa

SEQ ID NO: 698858 - DNA, 19 bp, Mus musculus
  siRNA target sequence for Snap23 (NM_009222.2,748-766).
gacaccaacaagaatcgta

SEQ ID NO: 698859 - DNA, 19 bp, Mus musculus
  siRNA target sequence for Snap23 (NM_009222.2,752-770).
ccaacaagaatcgtattga

SEQ ID NO: 698860 - DNA, 19 bp, Mus musculus
  siRNA target sequence for Snap23 (NM_009222.2,756-774).
caagaatcgtattgacatt

SEQ ID NO: 698861 - DNA, 19 bp, Mus musculus
  siRNA target sequence for Serpina1d (NM_009246.1,947-965).
gcgatgctcagatccatat

SEQ ID NO: 698862 - DNA, 19 bp, Mus musculus
  siRNA target sequence for Serpina1d (NM_009246.1,1161-1179).
cttacaagtcgctacttat

SEQ ID NO: 698863 - DNA, 19 bp, Mus musculus
  siRNA target sequence for Sprr1a (NM_009264.1,451-469).
ccataccagcagaagacaa

SEQ ID NO: 698864 - DNA, 19 bp, Mus musculus
  siRNA target sequence for Sprr1a (NM_009264.1,452-470).
cataccagcagaagacaaa

SEQ ID NO: 698865 - DNA, 19 bp, Mus musculus
  siRNA target sequence for Sprr1b (NM_009265.2,443-461).
gccctgccaacccattgtt

SEQ ID NO: 698866 - DNA, 19 bp, Mus musculus
  siRNA target sequence for Sprr1b (NM_009265.2,490-508).
caatactagcccaacagaa

SEQ ID NO: 698867 - DNA, 19 bp, Mus musculus
  siRNA target sequence for Spt1 (NM_009267.1,397-415).
gtccaatgcaaaaactaaa

SEQ ID NO: 698868 - DNA, 19 bp, Mus musculus
  siRNA target sequence for Spt1 (NM_009267.1,444-462).
gtggggttgaaaaactaaa

SEQ ID NO: 698869 - DNA, 19 bp, Mus musculus
  siRNA target sequence for Spt1 (NM_009267.1,446-464).
ggggttgaaaaactaaaga

SEQ ID NO: 698870 - DNA, 19 bp, Mus musculus
  siRNA target sequence for Ss18 (NM_009280.1,1105-1123).
gctacgataggccttatga

SEQ ID NO: 698871 - DNA, 19 bp, Mus musculus
  siRNA target sequence for Zfp143 (NM_009281.2,162-180).
ggaaggtgtgagtttacaa

SEQ ID NO: 698872 - DNA, 19 bp, Mus musculus
  siRNA target sequence for Zfp143 (NM_009281.2,198-216).
cggctctactgcttacata

SEQ ID NO: 698873 - DNA, 19 bp, Mus musculus
  siRNA target sequence for Zfp143 (NM_009281.2,213-231).
catacagcataattctaaa

SEQ ID NO: 698874 - DNA, 19 bp, Mus musculus
  siRNA target sequence for Zfp143 (NM_009281.2,292-310).
cagcatgtccccataccta

SEQ ID NO: 698875 - DNA, 19 bp, Mus musculus
  siRNA target sequence for Zfp143 (NM_009281.2,298-316).
gtccccatacctaaaagta

SEQ ID NO: 698876 - DNA, 19 bp, Mus musculus
  siRNA target sequence for Zfp143 (NM_009281.2,300-318).
ccccatacctaaaagtaca

SEQ ID NO: 698877 - DNA, 19 bp, Mus musculus
  siRNA target sequence for Zfp143 (NM_009281.2,364-382).
gacgggaccactgcattta

SEQ ID NO: 698878 - DNA, 19 bp, Mus musculus
  siRNA target sequence for Zfp143 (NM_009281.2,368-386).
ggaccactgcatttatcca

SEQ ID NO: 698879 - DNA, 19 bp, Mus musculus
  siRNA target sequence for Zfp143 (NM_009281.2,390-408).
cacctcgaaagacagttat

SEQ ID NO: 698880 - DNA, 19 bp, Mus musculus
  siRNA target sequence for Zfp143 (NM_009281.2,392-410).
cctcgaaagacagttatga

SEQ ID NO: 698881 - DNA, 19 bp, Mus musculus
  siRNA target sequence for Zfp143 (NM_009281.2,419-437).
cacttcaggccgttcagtt

SEQ ID NO: 698882 - DNA, 19 bp, Mus musculus
  siRNA target sequence for Zfp143 (NM_009281.2,426-444).
ggccgttcagttagaagat

SEQ ID NO: 698883 - DNA, 19 bp, Mus musculus
  siRNA target sequence for Zfp143 (NM_009281.2,442-460).
gatgggacaacagcttata

SEQ ID NO: 698884 - DNA, 19 bp, Mus musculus
  siRNA target sequence for Zfp143 (NM_009281.2,475-493).
caagtcccacagtctgata

SEQ ID NO: 698885 - DNA, 19 bp, Mus musculus
  siRNA target sequence for Zfp143 (NM_009281.2,537-555).
cactggggatgccacaatt

SEQ ID NO: 698886 - DNA, 19 bp, Mus musculus
  siRNA target sequence for Zfp143 (NM_009281.2,551-569).
caattgacccagataccat

SEQ ID NO: 698887 - DNA, 19 bp, Mus musculus
  siRNA target sequence for Zfp143 (NM_009281.2,582-600).
gcagtacgcagcaaaggta

SEQ ID NO: 698888 - DNA, 19 bp, Mus musculus
  siRNA target sequence for Zfp143 (NM_009281.2,583-601).
cagtacgcagcaaaggtat

SEQ ID NO: 698889 - DNA, 19 bp, Mus musculus
  siRNA target sequence for Zfp143 (NM_009281.2,588-606).
cgcagcaaaggtatccatt

SEQ ID NO: 698890 - DNA, 19 bp, Mus musculus
  siRNA target sequence for Zfp143 (NM_009281.2,610-628).
ggcagtgacggtgtaacaa

SEQ ID NO: 698891 - DNA, 19 bp, Mus musculus
  siRNA target sequence for Zfp143 (NM_009281.2,698-716).
gggtaactcctaaatctca

SEQ ID NO: 698892 - DNA, 19 bp, Mus musculus
  siRNA target sequence for Zfp143 (NM_009281.2,756-774).
ctgtgggaaactctataca

SEQ ID NO: 698893 - DNA, 19 bp, Mus musculus
  siRNA target sequence for Zfp143 (NM_009281.2,776-794).
cagctcatcaccttaaggt

SEQ ID NO: 698894 - DNA, 19 bp, Mus musculus
  siRNA target sequence for Zfp143 (NM_009281.2,862-880).
gcaacaggttatggattaa

SEQ ID NO: 698895 - DNA, 19 bp, Mus musculus
  siRNA target sequence for Zfp143 (NM_009281.2,874-892).
ggattaaaaagtcatttca

SEQ ID NO: 698896 - DNA, 19 bp, Mus musculus
  siRNA target sequence for Zfp143 (NM_009281.2,912-930).
gccatatcggtgttcagaa

SEQ ID NO: 698897 - DNA, 19 bp, Mus musculus
  siRNA target sequence for Zfp143 (NM_009281.2,919-937).
cggtgttcagaagataatt

SEQ ID NO: 698898 - DNA, 19 bp, Mus musculus
  siRNA target sequence for Zfp143 (NM_009281.2,928-946).
gaagataattgtacaaagt

SEQ ID NO: 698899 - DNA, 19 bp, Mus musculus
  siRNA target sequence for Zfp143 (NM_009281.2,1005-1023).
ctttaagtgtcctattgaa

SEQ ID NO: 698900 - DNA, 19 bp, Mus musculus
  siRNA target sequence for Zfp143 (NM_009281.2,1024-1042).
ggctgtggtcggtccttta

SEQ ID NO: 698901 - DNA, 19 bp, Mus musculus
  siRNA target sequence for Zfp143 (NM_009281.2,1127-1145).
catttgccagcgcaactaa

SEQ ID NO: 698902 - DNA, 19 bp, Mus musculus
  siRNA target sequence for Zfp143 (NM_009281.2,1132-1150).
gccagcgcaactaattata

SEQ ID NO: 698903 - DNA, 19 bp, Mus musculus
  siRNA target sequence for Zfp143 (NM_009281.2,1133-1151).
ccagcgcaactaattataa

SEQ ID NO: 698904 - DNA, 19 bp, Mus musculus
  siRNA target sequence for Zfp143 (NM_009281.2,1182-1200).
gccatatgtctgtacagtt

SEQ ID NO: 698905 - DNA, 19 bp, Mus musculus
  siRNA target sequence for Zfp143 (NM_009281.2,1210-1228).
gacaaacggtttacagaat

SEQ ID NO: 698906 - DNA, 19 bp, Mus musculus
  siRNA target sequence for Zfp143 (NM_009281.2,1212-1230).
caaacggtttacagaatat

SEQ ID NO: 698907 - DNA, 19 bp, Mus musculus
  siRNA target sequence for Zfp143 (NM_009281.2,1216-1234).
cggtttacagaatattcca

SEQ ID NO: 698908 - DNA, 19 bp, Mus musculus
  siRNA target sequence for Zfp143 (NM_009281.2,1225-1243).
gaatattccagtttgtata

SEQ ID NO: 698909 - DNA, 19 bp, Mus musculus
  siRNA target sequence for Zfp143 (NM_009281.2,1254-1272).
cgttcacactcactctaaa

SEQ ID NO: 698910 - DNA, 19 bp, Mus musculus
  siRNA target sequence for Zfp143 (NM_009281.2,1262-1280).
ctcactctaaaccatacaa

SEQ ID NO: 698911 - DNA, 19 bp, Mus musculus
  siRNA target sequence for Zfp143 (NM_009281.2,1264-1282).
cactctaaaccatacaact

SEQ ID NO: 698912 - DNA, 19 bp, Mus musculus
  siRNA target sequence for Zfp143 (NM_009281.2,1292-1310).
gtgggaagacgtacaaaca

SEQ ID NO: 698913 - DNA, 19 bp, Mus musculus
  siRNA target sequence for Zfp143 (NM_009281.2,1296-1314).
gaagacgtacaaacagatt

SEQ ID NO: 698914 - DNA, 19 bp, Mus musculus
  siRNA target sequence for Zfp143 (NM_009281.2,1431-1449).
ccagatcacatatgttaca

SEQ ID NO: 698915 - DNA, 19 bp, Mus musculus
  siRNA target sequence for Zfp143 (NM_009281.2,1464-1482).
ggacattgtatctacacaa

SEQ ID NO: 698916 - DNA, 19 bp, Mus musculus
  siRNA target sequence for Zfp143 (NM_009281.2,1500-1518).
gtctgggctgagtcaacaa

SEQ ID NO: 698917 - DNA, 19 bp, Mus musculus
  siRNA target sequence for Zfp143 (NM_009281.2,1658-1676).
cagcaggaacacattctgt

SEQ ID NO: 698918 - DNA, 19 bp, Mus musculus
  siRNA target sequence for Zfp143 (NM_009281.2,1669-1687).
cattctgttgctatggtta

SEQ ID NO: 698919 - DNA, 19 bp, Mus musculus
  siRNA target sequence for Zfp143 (NM_009281.2,1732-1750).
gatctggcagcgttccata

SEQ ID NO: 698920 - DNA, 19 bp, Mus musculus
  siRNA target sequence for Zfp143 (NM_009281.2,1789-1807).
cacctagtaactacagaaa

SEQ ID NO: 698921 - DNA, 19 bp, Mus musculus
  siRNA target sequence for Zfp143 (NM_009281.2,1874-1892).
cgtctctggaagaagctat

SEQ ID NO: 698922 - DNA, 19 bp, Mus musculus
  siRNA target sequence for Zfp143 (NM_009281.2,1879-1897).
ctggaagaagctatcagaa

SEQ ID NO: 698923 - DNA, 19 bp, Mus musculus
  siRNA target sequence for Zfp143 (NM_009281.2,1885-1903).
gaagctatcagaatagcat

SEQ ID NO: 698924 - DNA, 19 bp, Mus musculus
  siRNA target sequence for Stra6 (NM_009291.1,390-408).
ccggggtgacagatgacta

SEQ ID NO: 698925 - DNA, 19 bp, Mus musculus
  siRNA target sequence for Stra6 (NM_009291.1,868-886).
cctattgggtactgtgtta

SEQ ID NO: 698926 - DNA, 19 bp, Mus musculus
  siRNA target sequence for Stra6 (NM_009291.1,930-948).
gtcctcaggatcctaagat

SEQ ID NO: 698927 - DNA, 19 bp, Mus musculus
  siRNA target sequence for Stra6 (NM_009291.1,932-950).
cctcaggatcctaagatct

SEQ ID NO: 698928 - DNA, 19 bp, Mus musculus
  siRNA target sequence for Stra6 (NM_009291.1,935-953).
caggatcctaagatctaca

SEQ ID NO: 698929 - DNA, 19 bp, Mus musculus
  siRNA target sequence for Stra6 (NM_009291.1,1014-1032).
ggtatccagtacaacttgt

SEQ ID NO: 698930 - DNA, 19 bp, Mus musculus
  siRNA target sequence for Stra6 (NM_009291.1,1081-1099).
cagctactccgagaagtat

SEQ ID NO: 698931 - DNA, 19 bp, Mus musculus
  siRNA target sequence for Stra6 (NM_009291.1,1083-1101).
gctactccgagaagtatct

SEQ ID NO: 698932 - DNA, 19 bp, Mus musculus
  siRNA target sequence for Stra6 (NM_009291.1,1510-1528).
gacacacagggccaatctt

SEQ ID NO: 698933 - DNA, 19 bp, Mus musculus
  siRNA target sequence for Stra6 (NM_009291.1,1564-1582).
cccccctcttcagagtatt

SEQ ID NO: 698934 - DNA, 19 bp, Mus musculus
  siRNA target sequence for Stra6 (NM_009291.1,1797-1815).
ctgtaatcctgcagaacat

SEQ ID NO: 698935 - DNA, 19 bp, Mus musculus
  siRNA target sequence for Stra6 (NM_009291.1,1879-1897).
gctctgcgtagctactttt

SEQ ID NO: 698936 - DNA, 19 bp, Mus musculus
  siRNA target sequence for Stra6 (NM_009291.1,2036-2054).
ggctaccacacataccaaa

SEQ ID NO: 698937 - DNA, 19 bp, Mus musculus
  siRNA target sequence for Stra6 (NM_009291.1,2268-2286).
ggggtctggcctacacatt

SEQ ID NO: 698938 - DNA, 19 bp, Mus musculus
  siRNA target sequence for Stra6 (NM_009291.1,2315-2333).
cggaaggcagcccttacta

SEQ ID NO: 698939 - DNA, 19 bp, Mus musculus
  siRNA target sequence for Stra6 (NM_009291.1,2317-2335).
gaaggcagcccttactagt

SEQ ID NO: 698940 - DNA, 19 bp, Mus musculus
  siRNA target sequence for Stra8 (NM_009292.1,122-140).
caaccaacccagtgatgat

SEQ ID NO: 698941 - DNA, 19 bp, Mus musculus
  siRNA target sequence for Stra8 (NM_009292.1,226-244).
ccctggtagggctcttcaa

SEQ ID NO: 698942 - DNA, 19 bp, Mus musculus
  siRNA target sequence for Stra8 (NM_009292.1,228-246).
ctggtagggctcttcaaca

SEQ ID NO: 698943 - DNA, 19 bp, Mus musculus
  siRNA target sequence for Stra8 (NM_009292.1,234-252).
gggctcttcaacaacctaa

SEQ ID NO: 698944 - DNA, 19 bp, Mus musculus
  siRNA target sequence for Stra8 (NM_009292.1,249-267).
ctaaggaaggcagtttact

SEQ ID NO: 698945 - DNA, 19 bp, Mus musculus
  siRNA target sequence for Stra8 (NM_009292.1,261-279).
gtttactcccagtctgata

SEQ ID NO: 698946 - DNA, 19 bp, Mus musculus
  siRNA target sequence for Stra8 (NM_009292.1,266-284).
ctcccagtctgatatcaca

SEQ ID NO: 698947 - DNA, 19 bp, Mus musculus
  siRNA target sequence for Stra8 (NM_009292.1,305-323).
gaataggacaaagattcat

SEQ ID NO: 698948 - DNA, 19 bp, Mus musculus
  siRNA target sequence for Stra8 (NM_009292.1,433-451).
gaatgtattccgagaatga

SEQ ID NO: 698949 - DNA, 19 bp, Mus musculus
  siRNA target sequence for Stra8 (NM_009292.1,452-470).
cagtgtattcctaaacagt

SEQ ID NO: 698950 - DNA, 19 bp, Mus musculus
  siRNA target sequence for Stra8 (NM_009292.1,454-472).
gtgtattcctaaacagttt

SEQ ID NO: 698951 - DNA, 19 bp, Mus musculus
  siRNA target sequence for Stra8 (NM_009292.1,719-737).
gccggacctcatggaattt

SEQ ID NO: 698952 - DNA, 19 bp, Mus musculus
  siRNA target sequence for Stra8 (NM_009292.1,721-739).
cggacctcatggaatttga

SEQ ID NO: 698953 - DNA, 19 bp, Mus musculus
  siRNA target sequence for Stra8 (NM_009292.1,738-756).
gaacggtatctcaactttt

SEQ ID NO: 698954 - DNA, 19 bp, Mus musculus
  siRNA target sequence for Stra8 (NM_009292.1,741-759).
cggtatctcaacttttaca

SEQ ID NO: 698955 - DNA, 19 bp, Mus musculus
  siRNA target sequence for Stra8 (NM_009292.1,771-789).
gacctcctgaccatgaaca

SEQ ID NO: 698956 - DNA, 19 bp, Mus musculus
  siRNA target sequence for Stra8 (NM_009292.1,1018-1036).
ccccagaagagatcctttt

SEQ ID NO: 698957 - DNA, 19 bp, Mus musculus
  siRNA target sequence for Stra8 (NM_009292.1,1019-1037).
cccagaagagatccttttt

SEQ ID NO: 698958 - DNA, 19 bp, Mus musculus
  siRNA target sequence for Stra8 (NM_009292.1,1080-1098).
gcccagcatatgtctaaca

SEQ ID NO: 698959 - DNA, 19 bp, Mus musculus
  siRNA target sequence for Stra8 (NM_009292.1,1093-1111).
ctaacatcagcgctatgtt

SEQ ID NO: 698960 - DNA, 19 bp, Mus musculus
  siRNA target sequence for Stra8 (NM_009292.1,1190-1208).
ctgtgttaacactccatta

SEQ ID NO: 698961 - DNA, 19 bp, Mus musculus
  siRNA target sequence for Sva (NM_009299.1,114-132).
ggtaccatggcttacacaa

SEQ ID NO: 698962 - DNA, 19 bp, Mus musculus
  siRNA target sequence for Sva (NM_009299.1,166-184).
gaaaatcactccaagtact

SEQ ID NO: 698963 - DNA, 19 bp, Mus musculus
  siRNA target sequence for Sva (NM_009299.1,176-194).
ccaagtactagcattacta

SEQ ID NO: 698964 - DNA, 19 bp, Mus musculus
  siRNA target sequence for Sva (NM_009299.1,180-198).
gtactagcattactaacaa

SEQ ID NO: 698965 - DNA, 19 bp, Mus musculus
  siRNA target sequence for Sva (NM_009299.1,183-201).
ctagcattactaacaaaaa

SEQ ID NO: 698966 - DNA, 19 bp, Mus musculus
  siRNA target sequence for Sva (NM_009299.1,215-233).
cgagtacaactgacagtta

SEQ ID NO: 698967 - DNA, 19 bp, Mus musculus
  siRNA target sequence for Sva (NM_009299.1,216-234).
gagtacaactgacagttaa

SEQ ID NO: 698968 - DNA, 19 bp, Mus musculus
  siRNA target sequence for Sva (NM_009299.1,221-239).
caactgacagttaaaaaca

SEQ ID NO: 698969 - DNA, 19 bp, Mus musculus
  siRNA target sequence for Sva (NM_009299.1,252-270).
gccaggaggtagaaataaa

SEQ ID NO: 698970 - DNA, 19 bp, Mus musculus
  siRNA target sequence for Sva (NM_009299.1,275-293).
gaacatgagagatacatca

SEQ ID NO: 698971 - DNA, 19 bp, Mus musculus
  siRNA target sequence for Sva (NM_009299.1,303-321).
ctggtccatcaacttttga

SEQ ID NO: 698972 - DNA, 19 bp, Mus musculus
  siRNA target sequence for Sva (NM_009299.1,305-323).
ggtccatcaacttttgaaa

SEQ ID NO: 698973 - DNA, 19 bp, Mus musculus
  siRNA target sequence for Sva (NM_009299.1,333-351).
gtaccattagcgatttctt

SEQ ID NO: 698974 - DNA, 19 bp, Mus musculus
  siRNA target sequence for Sva (NM_009299.1,343-361).
cgatttcttctgggatata

SEQ ID NO: 698975 - DNA, 19 bp, Mus musculus
  siRNA target sequence for Sva (NM_009299.1,399-417).
ccattctgccatataagaa

SEQ ID NO: 698976 - DNA, 19 bp, Mus musculus
  siRNA target sequence for Sva (NM_009299.1,430-448).
ctctgacgaaccactacta

SEQ ID NO: 698977 - DNA, 19 bp, Mus musculus
  siRNA target sequence for Sva (NM_009299.1,432-450).
ctgacgaaccactactata

SEQ ID NO: 698978 - DNA, 19 bp, Mus musculus
  siRNA target sequence for Sva (NM_009299.1,453-471).
gcgactcttaccaaatgta

SEQ ID NO: 698979 - DNA, 19 bp, Mus musculus
  siRNA target sequence for Sva (NM_009299.1,457-475).
ctcttaccaaatgtacaat

SEQ ID NO: 698980 - DNA, 19 bp, Mus musculus
  siRNA target sequence for Svp2 (NM_009300.1,75-93).
ggagccattgggaagaaaa

SEQ ID NO: 698981 - DNA, 19 bp, Mus musculus
  siRNA target sequence for Svp2 (NM_009300.1,78-96).
gccattgggaagaaaacta

SEQ ID NO: 698982 - DNA, 19 bp, Mus musculus
  siRNA target sequence for Svp2 (NM_009300.1,79-97).
ccattgggaagaaaactaa

SEQ ID NO: 698983 - DNA, 19 bp, Mus musculus
  siRNA target sequence for Svp2 (NM_009300.1,107-125).
cttgcagtcggaagaaact

SEQ ID NO: 698984 - DNA, 19 bp, Mus musculus
  siRNA target sequence for Svp2 (NM_009300.1,222-240).
gcttctgaggaaatgagta

SEQ ID NO: 698985 - DNA, 19 bp, Mus musculus
  siRNA target sequence for Svp2 (NM_009300.1,231-249).
gaaatgagtagtagtagta

SEQ ID NO: 698986 - DNA, 19 bp, Mus musculus
  siRNA target sequence for Svp2 (NM_009300.1,283-301).
gttctgatggttctaatat

SEQ ID NO: 698987 - DNA, 19 bp, Mus musculus
  siRNA target sequence for Svp2 (NM_009300.1,286-304).
ctgatggttctaatatgga

SEQ ID NO: 698988 - DNA, 19 bp, Mus musculus
  siRNA target sequence for Svp2 (NM_009300.1,332-350).
gaagagccggttttctcaa

SEQ ID NO: 698989 - DNA, 19 bp, Mus musculus
  siRNA target sequence for Svp2 (NM_009300.1,335-353).
gagccggttttctcaagat

SEQ ID NO: 698990 - DNA, 19 bp, Mus musculus
  siRNA target sequence for Svs5 (NM_009301.1,136-154).
ggcggaagacccttctagt

SEQ ID NO: 698991 - DNA, 19 bp, Mus musculus
  siRNA target sequence for Svs5 (NM_009301.1,137-155).
gcggaagacccttctagta

SEQ ID NO: 698992 - DNA, 19 bp, Mus musculus
  siRNA target sequence for Svs5 (NM_009301.1,139-157).
ggaagacccttctagtagt

SEQ ID NO: 698993 - DNA, 19 bp, Mus musculus
  siRNA target sequence for Svs5 (NM_009301.1,153-171).
gtagtcacatgggtataaa

SEQ ID NO: 698994 - DNA, 19 bp, Mus musculus
  siRNA target sequence for Svs5 (NM_009301.1,156-174).
gtcacatgggtataaagat

SEQ ID NO: 698995 - DNA, 19 bp, Mus musculus
  siRNA target sequence for Svs5 (NM_009301.1,229-247).
gaactcttggagtaacttt

SEQ ID NO: 698996 - DNA, 19 bp, Mus musculus
  siRNA target sequence for Svs5 (NM_009301.1,267-285).
gcatcagcagcgaaagctt

SEQ ID NO: 698997 - DNA, 19 bp, Mus musculus
  siRNA target sequence for Svs5 (NM_009301.1,329-347).
ggccattttggtctcaaaa

SEQ ID NO: 698998 - DNA, 19 bp, Mus musculus
  siRNA target sequence for Svs5 (NM_009301.1,330-348).
gccattttggtctcaaaat

SEQ ID NO: 698999 - DNA, 19 bp, Mus musculus
  siRNA target sequence for Svs5 (NM_009301.1,332-350).
cattttggtctcaaaatga

SEQ ID NO: 699000 - DNA, 19 bp, Mus musculus
  siRNA target sequence for Svs5 (NM_009301.1,343-361).
caaaatgagaggatctcaa

SEQ ID NO: 699001 - DNA, 19 bp, Mus musculus
  siRNA target sequence for Svs5 (NM_009301.1,395-413).
gtcaagagccggatactca

SEQ ID NO: 699002 - DNA, 19 bp, Mus musculus
  siRNA target sequence for Svs5 (NM_009301.1,397-415).
caagagccggatactcaaa

SEQ ID NO: 699003 - DNA, 19 bp, Mus musculus
  siRNA target sequence for Syt4 (NM_009308.2,53-71).
ccaccagccgcgtggaatt

SEQ ID NO: 699004 - DNA, 19 bp, Mus musculus
  siRNA target sequence for Syt4 (NM_009308.2,56-74).
ccagccgcgtggaattcga

SEQ ID NO: 699005 - DNA, 19 bp, Mus musculus
  siRNA target sequence for Syt4 (NM_009308.2,57-75).
cagccgcgtggaattcgat

SEQ ID NO: 699006 - DNA, 19 bp, Mus musculus
  siRNA target sequence for Syt4 (NM_009308.2,180-198).
gactcctccatacaagttt

SEQ ID NO: 699007 - DNA, 19 bp, Mus musculus
  siRNA target sequence for Syt4 (NM_009308.2,204-222).
cgtgcttaaaggagttgat

SEQ ID NO: 699008 - DNA, 19 bp, Mus musculus
  siRNA target sequence for Syt4 (NM_009308.2,412-430).
ctctttacggagacagaaa

SEQ ID NO: 699009 - DNA, 19 bp, Mus musculus
  siRNA target sequence for Syt4 (NM_009308.2,525-543).
gtacaacttcgagaagaaa

SEQ ID NO: 699010 - DNA, 19 bp, Mus musculus
  siRNA target sequence for Syt4 (NM_009308.2,545-563).
catttgtggtgaacatcaa

SEQ ID NO: 699011 - DNA, 19 bp, Mus musculus
  siRNA target sequence for Syt4 (NM_009308.2,584-602).
ccatggacgagcaatccat

SEQ ID NO: 699012 - DNA, 19 bp, Mus musculus
  siRNA target sequence for Syt4 (NM_009308.2,606-624).
ctctgacccgtacatcaaa

SEQ ID NO: 699013 - DNA, 19 bp, Mus musculus
  siRNA target sequence for Syt4 (NM_009308.2,612-630).
cccgtacatcaaaatgaca

SEQ ID NO: 699014 - DNA, 19 bp, Mus musculus
  siRNA target sequence for Syt4 (NM_009308.2,618-636).
catcaaaatgacaatctta

SEQ ID NO: 699015 - DNA, 19 bp, Mus musculus
  siRNA target sequence for Syt4 (NM_009308.2,678-696).
gacgctggaccctgttttt

SEQ ID NO: 699016 - DNA, 19 bp, Mus musculus
  siRNA target sequence for Syt4 (NM_009308.2,817-835).
cctctttcagggattgaat

SEQ ID NO: 699017 - DNA, 19 bp, Mus musculus
  siRNA target sequence for Syt4 (NM_009308.2,818-836).
ctctttcagggattgaatt

SEQ ID NO: 699018 - DNA, 19 bp, Mus musculus
  siRNA target sequence for Syt4 (NM_009308.2,820-838).
ctttcagggattgaattat

SEQ ID NO: 699019 - DNA, 19 bp, Mus musculus
  siRNA target sequence for Syt4 (NM_009308.2,916-934).
gtctctctctgttatcagt

SEQ ID NO: 699020 - DNA, 19 bp, Mus musculus
  siRNA target sequence for Syt4 (NM_009308.2,926-944).
gttatcagtccactacaaa

SEQ ID NO: 699021 - DNA, 19 bp, Mus musculus
  siRNA target sequence for Syt4 (NM_009308.2,974-992).
ggcacctaccgaaatctga

SEQ ID NO: 699022 - DNA, 19 bp, Mus musculus
  siRNA target sequence for Syt4 (NM_009308.2,1151-1169).
gtgttgaattcttggtttt

SEQ ID NO: 699023 - DNA, 19 bp, Mus musculus
  siRNA target sequence for Pvr (NM_009310.1,122-140).
caggtgctctccaattcga

SEQ ID NO: 699024 - DNA, 19 bp, Mus musculus
  siRNA target sequence for Pvr (NM_009310.1,411-429).
cgttccccacagacagtaa

SEQ ID NO: 699025 - DNA, 19 bp, Mus musculus
  siRNA target sequence for Acat2 (NM_009338.1,1027-1045).
ggtgtctgcggcaatagct

SEQ ID NO: 699026 - DNA, 19 bp, Mus musculus
  siRNA target sequence for Acat2 (NM_009338.1,1028-1046).
gtgtctgcggcaatagcta

SEQ ID NO: 699027 - DNA, 19 bp, Mus musculus
  siRNA target sequence for Acat2 (NM_009338.1,1030-1048).
gtctgcggcaatagctaaa

SEQ ID NO: 699028 - DNA, 19 bp, Mus musculus
  siRNA target sequence for Tcp10a (NM_009340.1,854-872).
caaacctcggacactacaa

SEQ ID NO: 699029 - DNA, 19 bp, Mus musculus
  siRNA target sequence for Tcp10a (NM_009340.1,1109-1127).
gaagtggtgcagtttccta

SEQ ID NO: 699030 - DNA, 19 bp, Mus musculus
  siRNA target sequence for Tcp10a (NM_009340.1,1257-1275).
ggaacggagacaaaaccat

SEQ ID NO: 699031 - DNA, 19 bp, Mus musculus
  siRNA target sequence for Tcp10a (NM_009340.1,1262-1280).
ggagacaaaaccatcatgt

SEQ ID NO: 699032 - DNA, 19 bp, Mus musculus
  siRNA target sequence for Tcp10a (NM_009340.1,1263-1281).
gagacaaaaccatcatgtt

SEQ ID NO: 699033 - DNA, 19 bp, Mus musculus
  siRNA target sequence for Tcp10a (NM_009340.1,1279-1297).
gttcagcaacggagagaaa

SEQ ID NO: 699034 - DNA, 19 bp, Mus musculus
  siRNA target sequence for Tcp10a (NM_009340.1,1314-1332).
ggttcaagcggaaggaatt

SEQ ID NO: 699035 - DNA, 19 bp, Mus musculus
  siRNA target sequence for Tcp10a (NM_009340.1,1348-1366).
caagactgtgtattgcaat

SEQ ID NO: 699036 - DNA, 19 bp, Mus musculus
  siRNA target sequence for Tcp10c (NM_009341.1,1580-1598).
gaatattccaacaaagtca

SEQ ID NO: 699037 - DNA, 19 bp, Mus musculus
  siRNA target sequence for Tep1 (NM_009351.1,241-259).
gcccctggagaaaatacat

SEQ ID NO: 699038 - DNA, 19 bp, Mus musculus
  siRNA target sequence for Tep1 (NM_009351.1,328-346).
ccagcccacggagagaata

SEQ ID NO: 699039 - DNA, 19 bp, Mus musculus
  siRNA target sequence for Tep1 (NM_009351.1,331-349).
gcccacggagagaatagat

SEQ ID NO: 699040 - DNA, 19 bp, Mus musculus
  siRNA target sequence for Tep1 (NM_009351.1,340-358).
gagaatagatgggcatata

SEQ ID NO: 699041 - DNA, 19 bp, Mus musculus
  siRNA target sequence for Tep1 (NM_009351.1,491-509).
gctactctccccactgtaa

SEQ ID NO: 699042 - DNA, 19 bp, Mus musculus
  siRNA target sequence for Tep1 (NM_009351.1,492-510).
ctactctccccactgtaaa

SEQ ID NO: 699043 - DNA, 19 bp, Mus musculus
  siRNA target sequence for Tep1 (NM_009351.1,542-560).
ggtcttcacatatctcata

SEQ ID NO: 699044 - DNA, 19 bp, Mus musculus
  siRNA target sequence for Tep1 (NM_009351.1,665-683).
ggacccagggccctgaaat

SEQ ID NO: 699045 - DNA, 19 bp, Mus musculus
  siRNA target sequence for Tep1 (NM_009351.1,820-838).
ggaggcaccggtcttaaaa

SEQ ID NO: 699046 - DNA, 19 bp, Mus musculus
  siRNA target sequence for Tep1 (NM_009351.1,824-842).
gcaccggtcttaaaactca

SEQ ID NO: 699047 - DNA, 19 bp, Mus musculus
  siRNA target sequence for Tep1 (NM_009351.1,1011-1029).
ccttggaaccggagttcat

SEQ ID NO: 699048 - DNA, 19 bp, Mus musculus
  siRNA target sequence for Tep1 (NM_009351.1,1016-1034).
gaaccggagttcatcctta

SEQ ID NO: 699049 - DNA, 19 bp, Mus musculus
  siRNA target sequence for Tep1 (NM_009351.1,1050-1068).
ctcggcagcaacttaacct

SEQ ID NO: 699050 - DNA, 19 bp, Mus musculus
  siRNA target sequence for Tep1 (NM_009351.1,1069-1087).
ccgggacatcgccaataca

SEQ ID NO: 699051 - DNA, 19 bp, Mus musculus
  siRNA target sequence for Tep1 (NM_009351.1,1072-1090).
ggacatcgccaatacagtt

SEQ ID NO: 699052 - DNA, 19 bp, Mus musculus
  siRNA target sequence for Tep1 (NM_009351.1,1125-1143).
cccatgtacgacggtatta

SEQ ID NO: 699053 - DNA, 19 bp, Mus musculus
  siRNA target sequence for Tep1 (NM_009351.1,1127-1145).
catgtacgacggtattact

SEQ ID NO: 699054 - DNA, 19 bp, Mus musculus
  siRNA target sequence for Tep1 (NM_009351.1,1138-1156).
gtattactccgccattgtt

SEQ ID NO: 699055 - DNA, 19 bp, Mus musculus
  siRNA target sequence for Tep1 (NM_009351.1,1253-1271).
gctgccatgaccgacaaat

SEQ ID NO: 699056 - DNA, 19 bp, Mus musculus
  siRNA target sequence for Tep1 (NM_009351.1,1267-1285).
caaatttgccgagtttgat

SEQ ID NO: 699057 - DNA, 19 bp, Mus musculus
  siRNA target sequence for Tep1 (NM_009351.1,1363-1381).
gacagaacgtccattttca

SEQ ID NO: 699058 - DNA, 19 bp, Mus musculus
  siRNA target sequence for Tep1 (NM_009351.1,1365-1383).
cagaacgtccattttcaga

SEQ ID NO: 699059 - DNA, 19 bp, Mus musculus
  siRNA target sequence for Tep1 (NM_009351.1,1484-1502).
cggttcactctgaagaagt

SEQ ID NO: 699060 - DNA, 19 bp, Mus musculus
  siRNA target sequence for Tep1 (NM_009351.1,1678-1696).
gagtttacggggaaacaaa

SEQ ID NO: 699061 - DNA, 19 bp, Mus musculus
  siRNA target sequence for Tep1 (NM_009351.1,1850-1868).
cggcagtttccattcagat

SEQ ID NO: 699062 - DNA, 19 bp, Mus musculus
  siRNA target sequence for Tep1 (NM_009351.1,1851-1869).
ggcagtttccattcagatt

SEQ ID NO: 699063 - DNA, 19 bp, Mus musculus
  siRNA target sequence for Tep1 (NM_009351.1,1877-1895).
gctcatgactctatcgata

SEQ ID NO: 699064 - DNA, 19 bp, Mus musculus
  siRNA target sequence for Tep1 (NM_009351.1,1878-1896).
ctcatgactctatcgataa

SEQ ID NO: 699065 - DNA, 19 bp, Mus musculus
  siRNA target sequence for Tep1 (NM_009351.1,1954-1972).
gaaacggataatgattaga

SEQ ID NO: 699066 - DNA, 19 bp, Mus musculus
  siRNA target sequence for Tep1 (NM_009351.1,1958-1976).
cggataatgattagaaact

SEQ ID NO: 699067 - DNA, 19 bp, Mus musculus
  siRNA target sequence for Tep1 (NM_009351.1,2035-2053).
gcttcgggcagcaatgact

SEQ ID NO: 699068 - DNA, 19 bp, Mus musculus
  siRNA target sequence for Tep1 (NM_009351.1,2036-2054).
cttcgggcagcaatgacta

SEQ ID NO: 699069 - DNA, 19 bp, Mus musculus
  siRNA target sequence for Tep1 (NM_009351.1,2211-2229).
gaaccctcttggtctatct

SEQ ID NO: 699070 - DNA, 19 bp, Mus musculus
  siRNA target sequence for Tep1 (NM_009351.1,2327-2345).
gccgagcaagtgactgttt

SEQ ID NO: 699071 - DNA, 19 bp, Mus musculus
  siRNA target sequence for Tep1 (NM_009351.1,2366-2384).
gtgaagacaccggtactta

SEQ ID NO: 699072 - DNA, 19 bp, Mus musculus
  siRNA target sequence for Tep1 (NM_009351.1,2368-2386).
gaagacaccggtacttaca

SEQ ID NO: 699073 - DNA, 19 bp, Mus musculus
  siRNA target sequence for Tep1 (NM_009351.1,2437-2455).
ggagttagaaggcaatgat

SEQ ID NO: 699074 - DNA, 19 bp, Mus musculus
  siRNA target sequence for Tep1 (NM_009351.1,2618-2636).
ggtgtcctcctacagaaaa

SEQ ID NO: 699075 - DNA, 19 bp, Mus musculus
  siRNA target sequence for Tep1 (NM_009351.1,2632-2650).
gaaaacacagtacatatca

SEQ ID NO: 699076 - DNA, 19 bp, Mus musculus
  siRNA target sequence for Tep1 (NM_009351.1,2693-2711).
gacgggatcctgaaattca

SEQ ID NO: 699077 - DNA, 19 bp, Mus musculus
  siRNA target sequence for Tep1 (NM_009351.1,2695-2713).
cgggatcctgaaattcatt

SEQ ID NO: 699078 - DNA, 19 bp, Mus musculus
  siRNA target sequence for Tep1 (NM_009351.1,2730-2748).
ctcgtctcctggaacatgt

SEQ ID NO: 699079 - DNA, 19 bp, Mus musculus
  siRNA target sequence for Tep1 (NM_009351.1,2740-2758).
ggaacatgtgggacaacta

SEQ ID NO: 699080 - DNA, 19 bp, Mus musculus
  siRNA target sequence for Tep1 (NM_009351.1,2744-2762).
catgtgggacaactagata

SEQ ID NO: 699081 - DNA, 19 bp, Mus musculus
  siRNA target sequence for Tep1 (NM_009351.1,2749-2767).
gggacaactagataaacta

SEQ ID NO: 699082 - DNA, 19 bp, Mus musculus
  siRNA target sequence for Tep1 (NM_009351.1,2751-2769).
gacaactagataaactatt

SEQ ID NO: 699083 - DNA, 19 bp, Mus musculus
  siRNA target sequence for Tep1 (NM_009351.1,2753-2771).
caactagataaactattca

SEQ ID NO: 699084 - DNA, 19 bp, Mus musculus
  siRNA target sequence for Tep1 (NM_009351.1,2870-2888).
cgcaatatccggcttttca

SEQ ID NO: 699085 - DNA, 19 bp, Mus musculus
  siRNA target sequence for Tep1 (NM_009351.1,2871-2889).
gcaatatccggcttttcat

SEQ ID NO: 699086 - DNA, 19 bp, Mus musculus
  siRNA target sequence for Tep1 (NM_009351.1,2872-2890).
caatatccggcttttcatt

SEQ ID NO: 699087 - DNA, 19 bp, Mus musculus
  siRNA target sequence for Tep1 (NM_009351.1,3001-3019).
cctgcgctggggtatcaca

SEQ ID NO: 699088 - DNA, 19 bp, Mus musculus
  siRNA target sequence for Tep1 (NM_009351.1,3103-3121).
ctcccgctatggctacatt

SEQ ID NO: 699089 - DNA, 19 bp, Mus musculus
  siRNA target sequence for Tep1 (NM_009351.1,3118-3136).
cattccccccagctatgat

SEQ ID NO: 699090 - DNA, 19 bp, Mus musculus
  siRNA target sequence for Tep1 (NM_009351.1,3141-3159).
ctgatcatccccactttca

SEQ ID NO: 699091 - DNA, 19 bp, Mus musculus
  siRNA target sequence for Tep1 (NM_009351.1,3248-3266).
gcccaagctctcatctact

SEQ ID NO: 699092 - DNA, 19 bp, Mus musculus
  siRNA target sequence for Tep1 (NM_009351.1,3366-3384).
gatatctacacgaacagaa

SEQ ID NO: 699093 - DNA, 19 bp, Mus musculus
  siRNA target sequence for Tep1 (NM_009351.1,3621-3639).
gccttcttcaggatacagt

SEQ ID NO: 699094 - DNA, 19 bp, Mus musculus
  siRNA target sequence for Tep1 (NM_009351.1,4591-4609).
ccagagtctacgcagttta

SEQ ID NO: 699095 - DNA, 19 bp, Mus musculus
  siRNA target sequence for Tep1 (NM_009351.1,4594-4612).
gagtctacgcagtttacta

SEQ ID NO: 699096 - DNA, 19 bp, Mus musculus
  siRNA target sequence for Tep1 (NM_009351.1,4669-4687).
gaggacaacaattaaacgt

SEQ ID NO: 699097 - DNA, 19 bp, Mus musculus
  siRNA target sequence for Tep1 (NM_009351.1,4802-4820).
gctctgaaagatttacctt

SEQ ID NO: 699098 - DNA, 19 bp, Mus musculus
  siRNA target sequence for Tep1 (NM_009351.1,4848-4866).
gtctccttgccgagtttct

SEQ ID NO: 699099 - DNA, 19 bp, Mus musculus
  siRNA target sequence for Tep1 (NM_009351.1,4928-4946).
gctcatgtgctctatgctt

SEQ ID NO: 699100 - DNA, 19 bp, Mus musculus
  siRNA target sequence for Tep1 (NM_009351.1,4980-4998).
cggcagatgttgctgtttt

SEQ ID NO: 699101 - DNA, 19 bp, Mus musculus
  siRNA target sequence for Tep1 (NM_009351.1,5128-5146).
cgaccagttcacactgaaa

SEQ ID NO: 699102 - DNA, 19 bp, Mus musculus
  siRNA target sequence for Tep1 (NM_009351.1,5257-5275).
gaccgccagtgggacaatt

SEQ ID NO: 699103 - DNA, 19 bp, Mus musculus
  siRNA target sequence for Tep1 (NM_009351.1,5259-5277).
ccgccagtgggacaattta

SEQ ID NO: 699104 - DNA, 19 bp, Mus musculus
  siRNA target sequence for Tep1 (NM_009351.1,5268-5286).
ggacaatttacctgttgaa

SEQ ID NO: 699105 - DNA, 19 bp, Mus musculus
  siRNA target sequence for Tep1 (NM_009351.1,5444-5462).
gcccaccagtaccaaatca

SEQ ID NO: 699106 - DNA, 19 bp, Mus musculus
  siRNA target sequence for Tep1 (NM_009351.1,5446-5464).
ccaccagtaccaaatcact

SEQ ID NO: 699107 - DNA, 19 bp, Mus musculus
  siRNA target sequence for Tep1 (NM_009351.1,5547-5565).
gacagctggcttttcagta

SEQ ID NO: 699108 - DNA, 19 bp, Mus musculus
  siRNA target sequence for Tep1 (NM_009351.1,5634-5652).
gggctggcagcattacctt

SEQ ID NO: 699109 - DNA, 19 bp, Mus musculus
  siRNA target sequence for Tep1 (NM_009351.1,5699-5717).
ggaccctctgtctgtagtt

SEQ ID NO: 699110 - DNA, 19 bp, Mus musculus
  siRNA target sequence for Tep1 (NM_009351.1,5700-5718).
gaccctctgtctgtagttt

SEQ ID NO: 699111 - DNA, 19 bp, Mus musculus
  siRNA target sequence for Tep1 (NM_009351.1,5888-5906).
gatggcaaggctcagttat

SEQ ID NO: 699112 - DNA, 19 bp, Mus musculus
  siRNA target sequence for Tep1 (NM_009351.1,5891-5909).
ggcaaggctcagttatggt

SEQ ID NO: 699113 - DNA, 19 bp, Mus musculus
  siRNA target sequence for Tep1 (NM_009351.1,6015-6033).
gagaagatggcattaacat

SEQ ID NO: 699114 - DNA, 19 bp, Mus musculus
  siRNA target sequence for Tep1 (NM_009351.1,6023-6041).
ggcattaacatctacaaga

SEQ ID NO: 699115 - DNA, 19 bp, Mus musculus
  siRNA target sequence for Tep1 (NM_009351.1,6024-6042).
gcattaacatctacaagat

SEQ ID NO: 699116 - DNA, 19 bp, Mus musculus
  siRNA target sequence for Tep1 (NM_009351.1,6103-6121).
gtggctgagccctagtgtt

SEQ ID NO: 699117 - DNA, 19 bp, Mus musculus
  siRNA target sequence for Tep1 (NM_009351.1,6105-6123).
ggctgagccctagtgtttt

SEQ ID NO: 699118 - DNA, 19 bp, Mus musculus
  siRNA target sequence for Tep1 (NM_009351.1,6149-6167).
ctgcatggttggatgttca

SEQ ID NO: 699119 - DNA, 19 bp, Mus musculus
  siRNA target sequence for Tep1 (NM_009351.1,6649-6667).
ggaggaacacattgtatct

SEQ ID NO: 699120 - DNA, 19 bp, Mus musculus
  siRNA target sequence for Tep1 (NM_009351.1,6673-6691).
ccgagatgggaccttgaaa

SEQ ID NO: 699121 - DNA, 19 bp, Mus musculus
  siRNA target sequence for Tep1 (NM_009351.1,6853-6871).
cctgttggtgtgccaaata

SEQ ID NO: 699122 - DNA, 19 bp, Mus musculus
  siRNA target sequence for Tep1 (NM_009351.1,6856-6874).
gttggtgtgccaaatacgt

SEQ ID NO: 699123 - DNA, 19 bp, Mus musculus
  siRNA target sequence for Tep1 (NM_009351.1,7038-7056).
gggcaccggatggttctat

SEQ ID NO: 699124 - DNA, 19 bp, Mus musculus
  siRNA target sequence for Tep1 (NM_009351.1,7057-7075).
ggtggtgtccggaaatgaa

SEQ ID NO: 699125 - DNA, 19 bp, Mus musculus
  siRNA target sequence for Tep1 (NM_009351.1,7153-7171).
ctggtactcggcaaattca

SEQ ID NO: 699126 - DNA, 19 bp, Mus musculus
  siRNA target sequence for Tep1 (NM_009351.1,7155-7173).
ggtactcggcaaattcatt

SEQ ID NO: 699127 - DNA, 19 bp, Mus musculus
  siRNA target sequence for Tep1 (NM_009351.1,7326-7344).
ctctcatcttgatgaaaga

SEQ ID NO: 699128 - DNA, 19 bp, Mus musculus
  siRNA target sequence for Tep1 (NM_009351.1,7373-7391).
gggtctattccatcttcta

SEQ ID NO: 699129 - DNA, 19 bp, Mus musculus
  siRNA target sequence for Tep1 (NM_009351.1,7466-7484).
ggggactccggattacttt

SEQ ID NO: 699130 - DNA, 19 bp, Mus musculus
  siRNA target sequence for Tep1 (NM_009351.1,7468-7486).
ggactccggattactttct

SEQ ID NO: 699131 - DNA, 19 bp, Mus musculus
  siRNA target sequence for Tep1 (NM_009351.1,7469-7487).
gactccggattactttcta

SEQ ID NO: 699132 - DNA, 19 bp, Mus musculus
  siRNA target sequence for Tep1 (NM_009351.1,7501-7519).
ggagtcaggggagtttgaa

SEQ ID NO: 699133 - DNA, 19 bp, Mus musculus
  siRNA target sequence for Tep1 (NM_009351.1,7583-7601).
gccaaacctgagtctgaat

SEQ ID NO: 699134 - DNA, 19 bp, Mus musculus
  siRNA target sequence for Tep1 (NM_009351.1,7585-7603).
caaacctgagtctgaatca

SEQ ID NO: 699135 - DNA, 19 bp, Mus musculus
  siRNA target sequence for Tep1 (NM_009351.1,7664-7682).
ggagaatggatcgtagata

SEQ ID NO: 699136 - DNA, 19 bp, Mus musculus
  siRNA target sequence for Tep1 (NM_009351.1,7667-7685).
gaatggatcgtagataaca

SEQ ID NO: 699137 - DNA, 19 bp, Mus musculus
  siRNA target sequence for Tep1 (NM_009351.1,7742-7760).
ccgcactcagagttggatt

SEQ ID NO: 699138 - DNA, 19 bp, Mus musculus
  siRNA target sequence for Tep1 (NM_009351.1,7743-7761).
cgcactcagagttggattt

SEQ ID NO: 699139 - DNA, 19 bp, Mus musculus
  siRNA target sequence for Tep1 (NM_009351.1,7744-7762).
gcactcagagttggatttt

SEQ ID NO: 699140 - DNA, 19 bp, Mus musculus
  siRNA target sequence for Tep1 (NM_009351.1,7774-7792).
ctggattgatcccacaaat

SEQ ID NO: 699141 - DNA, 19 bp, Mus musculus
  siRNA target sequence for Tep1 (NM_009351.1,7776-7794).
ggattgatcccacaaattt

SEQ ID NO: 699142 - DNA, 19 bp, Mus musculus
  siRNA target sequence for Tep1 (NM_009351.1,7777-7795).
gattgatcccacaaattta

SEQ ID NO: 699143 - DNA, 19 bp, Mus musculus
  siRNA target sequence for Tep1 (NM_009351.1,7875-7893).
cgaaggacagagatgttaa

SEQ ID NO: 699144 - DNA, 19 bp, Mus musculus
  siRNA target sequence for Tep1 (NM_009351.1,8006-8024).
gacacacaaggaaacttgt

SEQ ID NO: 699145 - DNA, 19 bp, Mus musculus
  siRNA target sequence for Tex261 (NM_009357.1,127-145).
cagagctgatagaagagta

SEQ ID NO: 699146 - DNA, 19 bp, Mus musculus
  siRNA target sequence for Tex261 (NM_009357.1,157-175).
ccagccgaatcatcaaata

SEQ ID NO: 699147 - DNA, 19 bp, Mus musculus
  siRNA target sequence for Tex261 (NM_009357.1,160-178).
gccgaatcatcaaatacat

SEQ ID NO: 699148 - DNA, 19 bp, Mus musculus
  siRNA target sequence for Tex261 (NM_009357.1,340-358).
ggctagtggtggtgaatca

SEQ ID NO: 699149 - DNA, 19 bp, Mus musculus
  siRNA target sequence for Tex261 (NM_009357.1,381-399).
gcggaagagtattatcctt

SEQ ID NO: 699150 - DNA, 19 bp, Mus musculus
  siRNA target sequence for Tex261 (NM_009357.1,382-400).
cggaagagtattatccttt

SEQ ID NO: 699151 - DNA, 19 bp, Mus musculus
  siRNA target sequence for Tex261 (NM_009357.1,411-429).
ctggcctacttcacattct

SEQ ID NO: 699152 - DNA, 19 bp, Mus musculus
  siRNA target sequence for Tex261 (NM_009357.1,513-531).
gacgtggtctccaattact

SEQ ID NO: 699153 - DNA, 19 bp, Mus musculus
  siRNA target sequence for Tex261 (NM_009357.1,516-534).
gtggtctccaattacttca

SEQ ID NO: 699154 - DNA, 19 bp, Mus musculus
  siRNA target sequence for Tex261 (NM_009357.1,603-621).
cccagtcggcagaagatat

SEQ ID NO: 699155 - DNA, 19 bp, Mus musculus
  siRNA target sequence for Tex261 (NM_009357.1,604-622).
ccagtcggcagaagatata

SEQ ID NO: 699156 - DNA, 19 bp, Mus musculus
  siRNA target sequence for Tex9 (NM_009359.1,357-375).
gtacaagcgtttaaatgaa

SEQ ID NO: 699157 - DNA, 19 bp, Mus musculus
  siRNA target sequence for Tex9 (NM_009359.1,444-462).
gcgagccaggcctttctca

SEQ ID NO: 699158 - DNA, 19 bp, Mus musculus
  siRNA target sequence for Tex9 (NM_009359.1,454-472).
cctttctcagcactaacta

SEQ ID NO: 699159 - DNA, 19 bp, Mus musculus
  siRNA target sequence for Tex9 (NM_009359.1,459-477).
ctcagcactaactacatca

SEQ ID NO: 699160 - DNA, 19 bp, Mus musculus
  siRNA target sequence for Tex9 (NM_009359.1,497-515).
ccagttcgagagatctgtt

SEQ ID NO: 699161 - DNA, 19 bp, Mus musculus
  siRNA target sequence for Tex9 (NM_009359.1,569-587).
ctggtcctgtaaacaagat

SEQ ID NO: 699162 - DNA, 19 bp, Mus musculus
  siRNA target sequence for Tex9 (NM_009359.1,717-735).
gacgattagcaggattgaa

SEQ ID NO: 699163 - DNA, 19 bp, Mus musculus
  siRNA target sequence for Tex9 (NM_009359.1,782-800).
gcttctgtggtgtgagtaa

SEQ ID NO: 699164 - DNA, 19 bp, Mus musculus
  siRNA target sequence for Tex9 (NM_009359.1,816-834).
ggctcagatccgatttcta

SEQ ID NO: 699165 - DNA, 19 bp, Mus musculus
  siRNA target sequence for Tex9 (NM_009359.1,817-835).
gctcagatccgatttctaa

SEQ ID NO: 699166 - DNA, 19 bp, Mus musculus
  siRNA target sequence for Tex9 (NM_009359.1,888-906).
cagtaagaaggaggataaa

SEQ ID NO: 699167 - DNA, 19 bp, Mus musculus
  siRNA target sequence for Tex9 (NM_009359.1,954-972).
gcgacaacagcgaacagtt

SEQ ID NO: 699168 - DNA, 19 bp, Mus musculus
  siRNA target sequence for Tex9 (NM_009359.1,955-973).
cgacaacagcgaacagtta

SEQ ID NO: 699169 - DNA, 19 bp, Mus musculus
  siRNA target sequence for Tex9 (NM_009359.1,977-995).
cccagcaatcccaaataga

SEQ ID NO: 699170 - DNA, 19 bp, Mus musculus
  siRNA target sequence for Tex9 (NM_009359.1,1061-1079).
cagtagaacgggaattaga

SEQ ID NO: 699171 - DNA, 19 bp, Mus musculus
  siRNA target sequence for Tex9 (NM_009359.1,1066-1084).
gaacgggaattagaaagta

SEQ ID NO: 699172 - DNA, 19 bp, Mus musculus
  siRNA target sequence for Tex9 (NM_009359.1,1069-1087).
cgggaattagaaagtaaaa

SEQ ID NO: 699173 - DNA, 19 bp, Mus musculus
  siRNA target sequence for Tex9 (NM_009359.1,1125-1143).
cacagaggtccgtctgaat

SEQ ID NO: 699174 - DNA, 19 bp, Mus musculus
  siRNA target sequence for Tex9 (NM_009359.1,1184-1202).
gtaaactcaggcaaactaa

SEQ ID NO: 699175 - DNA, 19 bp, Mus musculus
  siRNA target sequence for Tex9 (NM_009359.1,1207-1225).
gacaatcagtaccttaaca

SEQ ID NO: 699176 - DNA, 19 bp, Mus musculus
  siRNA target sequence for Tex9 (NM_009359.1,1209-1227).
caatcagtaccttaacaat

SEQ ID NO: 699177 - DNA, 19 bp, Mus musculus
  siRNA target sequence for Tex9 (NM_009359.1,1213-1231).
cagtaccttaacaatgact

SEQ ID NO: 699178 - DNA, 19 bp, Mus musculus
  siRNA target sequence for Tex9 (NM_009359.1,1215-1233).
gtaccttaacaatgactta

SEQ ID NO: 699179 - DNA, 19 bp, Mus musculus
  siRNA target sequence for Tff2 (NM_009363.2,141-159).
ccccacaacagaaagaact

SEQ ID NO: 699180 - DNA, 19 bp, Mus musculus
  siRNA target sequence for Tff2 (NM_009363.2,181-199).
gtgagcagtgctttgatct

SEQ ID NO: 699181 - DNA, 19 bp, Mus musculus
  siRNA target sequence for Tff2 (NM_009363.2,241-259).
gtttccacccacttccaaa

SEQ ID NO: 699182 - DNA, 19 bp, Mus musculus
  siRNA target sequence for Tff2 (NM_009363.2,249-267).
ccacttccaaaccaagaat

SEQ ID NO: 699183 - DNA, 19 bp, Mus musculus
  siRNA target sequence for Tff2 (NM_009363.2,288-306).
gtgtcagctcgcaagaatt

SEQ ID NO: 699184 - DNA, 19 bp, Mus musculus
  siRNA target sequence for Tff2 (NM_009363.2,290-308).
gtcagctcgcaagaattgt

SEQ ID NO: 699185 - DNA, 19 bp, Mus musculus
  siRNA target sequence for Tff2 (NM_009363.2,345-363).
cgaaactgctgcttttcca

SEQ ID NO: 699186 - DNA, 19 bp, Mus musculus
  siRNA target sequence for Tff2 (NM_009363.2,396-414).
ccacagtctgtggaagatt

SEQ ID NO: 699187 - DNA, 19 bp, Mus musculus
  siRNA target sequence for Tpbpa (NM_009411.2,91-109).
ctacaatcttcctagtcat

SEQ ID NO: 699188 - DNA, 19 bp, Mus musculus
  siRNA target sequence for Tpbpa (NM_009411.2,204-222).
gcagtgtggagtaagttta

SEQ ID NO: 699189 - DNA, 19 bp, Mus musculus
  siRNA target sequence for Tpbpa (NM_009411.2,205-223).
cagtgtggagtaagtttat

SEQ ID NO: 699190 - DNA, 19 bp, Mus musculus
  siRNA target sequence for Tpbpa (NM_009411.2,207-225).
gtgtggagtaagtttatga

SEQ ID NO: 699191 - DNA, 19 bp, Mus musculus
  siRNA target sequence for Tpbpa (NM_009411.2,263-281).
gacggaaggctccaacata

SEQ ID NO: 699192 - DNA, 19 bp, Mus musculus
  siRNA target sequence for Tpbpa (NM_009411.2,266-284).
ggaaggctccaacatagaa

SEQ ID NO: 699193 - DNA, 19 bp, Mus musculus
  siRNA target sequence for Tpbpa (NM_009411.2,270-288).
ggctccaacatagaaatga

SEQ ID NO: 699194 - DNA, 19 bp, Mus musculus
  siRNA target sequence for Tpbpa (NM_009411.2,292-310).
cctccggtcagctaactga

SEQ ID NO: 699195 - DNA, 19 bp, Mus musculus
  siRNA target sequence for Tpbpa (NM_009411.2,293-311).
ctccggtcagctaactgat

SEQ ID NO: 699196 - DNA, 19 bp, Mus musculus
  siRNA target sequence for Trh (NM_009426.1,204-222).
ggccagaacgtcgattctt

SEQ ID NO: 699197 - DNA, 19 bp, Mus musculus
  siRNA target sequence for Trh (NM_009426.1,206-224).
ccagaacgtcgattcttga

SEQ ID NO: 699198 - DNA, 19 bp, Mus musculus
  siRNA target sequence for Trh (NM_009426.1,333-351).
ccgaagagaggggagattt

SEQ ID NO: 699199 - DNA, 19 bp, Mus musculus
  siRNA target sequence for Trh (NM_009426.1,399-417).
gacgtgccaaccaagacaa

SEQ ID NO: 699200 - DNA, 19 bp, Mus musculus
  siRNA target sequence for Trh (NM_009426.1,404-422).
gccaaccaagacaaggatt

SEQ ID NO: 699201 - DNA, 19 bp, Mus musculus
  siRNA target sequence for Trh (NM_009426.1,459-477).
cgtcctggctaccagattt

SEQ ID NO: 699202 - DNA, 19 bp, Mus musculus
  siRNA target sequence for Trh (NM_009426.1,582-600).
caggccggaggttcataga

SEQ ID NO: 699203 - DNA, 19 bp, Mus musculus
  siRNA target sequence for Tsx (NM_009440.1,118-136).
caatggacttgccagaatt

SEQ ID NO: 699204 - DNA, 19 bp, Mus musculus
  siRNA target sequence for Tsx (NM_009440.1,366-384).
gacaataatgtgaaagtca

SEQ ID NO: 699205 - DNA, 19 bp, Mus musculus
  siRNA target sequence for Tsx (NM_009440.1,402-420).
gcaagcccctccatgtata

SEQ ID NO: 699206 - DNA, 19 bp, Mus musculus
  siRNA target sequence for Tsx (NM_009440.1,403-421).
caagcccctccatgtatat

SEQ ID NO: 699207 - DNA, 19 bp, Mus musculus
  siRNA target sequence for Tsx (NM_009440.1,406-424).
gcccctccatgtatatgga

SEQ ID NO: 699208 - DNA, 19 bp, Mus musculus
  siRNA target sequence for Tsx (NM_009440.1,486-504).
gccatgaacccaactgatt

SEQ ID NO: 699209 - DNA, 19 bp, Mus musculus
  siRNA target sequence for Ttc3 (NM_009441.1,40-58).
gtttggcagatgatatctt

SEQ ID NO: 699210 - DNA, 19 bp, Mus musculus
  siRNA target sequence for Ttc3 (NM_009441.1,104-122).
ctttaccactgacgattat

SEQ ID NO: 699211 - DNA, 19 bp, Mus musculus
  siRNA target sequence for Ttc3 (NM_009441.1,126-144).
cgagtaacccagctttact

SEQ ID NO: 699212 - DNA, 19 bp, Mus musculus
  siRNA target sequence for Ttc3 (NM_009441.1,127-145).
gagtaacccagctttacta

SEQ ID NO: 699213 - DNA, 19 bp, Mus musculus
  siRNA target sequence for Ttc3 (NM_009441.1,150-168).
ggcgtgggtatgcaatata

SEQ ID NO: 699214 - DNA, 19 bp, Mus musculus
  siRNA target sequence for Ttc3 (NM_009441.1,151-169).
gcgtgggtatgcaatataa

SEQ ID NO: 699215 - DNA, 19 bp, Mus musculus
  siRNA target sequence for Ttc3 (NM_009441.1,152-170).
cgtgggtatgcaatataaa

SEQ ID NO: 699216 - DNA, 19 bp, Mus musculus
  siRNA target sequence for Ttc3 (NM_009441.1,155-173).
gggtatgcaatataaagat

SEQ ID NO: 699217 - DNA, 19 bp, Mus musculus
  siRNA target sequence for Ttc3 (NM_009441.1,177-195).
gcccaaagtgagaaaaatt

SEQ ID NO: 699218 - DNA, 19 bp, Mus musculus
  siRNA target sequence for Ttc3 (NM_009441.1,178-196).
cccaaagtgagaaaaattt

SEQ ID NO: 699219 - DNA, 19 bp, Mus musculus
  siRNA target sequence for Ttc3 (NM_009441.1,239-257).
catcctgcaagattactgt

SEQ ID NO: 699220 - DNA, 19 bp, Mus musculus
  siRNA target sequence for Ttc3 (NM_009441.1,300-318).
catcaacacagttctataa

SEQ ID NO: 699221 - DNA, 19 bp, Mus musculus
  siRNA target sequence for Ttc3 (NM_009441.1,357-375).
cgtgctgctgagataagtt

SEQ ID NO: 699222 - DNA, 19 bp, Mus musculus
  siRNA target sequence for Ttc3 (NM_009441.1,361-379).
ctgctgagataagtttgaa

SEQ ID NO: 699223 - DNA, 19 bp, Mus musculus
  siRNA target sequence for Ttc3 (NM_009441.1,363-381).
gctgagataagtttgaaga

SEQ ID NO: 699224 - DNA, 19 bp, Mus musculus
  siRNA target sequence for Ttc3 (NM_009441.1,364-382).
ctgagataagtttgaagaa

SEQ ID NO: 699225 - DNA, 19 bp, Mus musculus
  siRNA target sequence for Ttc3 (NM_009441.1,416-434).
ggatttggcaaagaaagtt

SEQ ID NO: 699226 - DNA, 19 bp, Mus musculus
  siRNA target sequence for Ttc3 (NM_009441.1,450-468).
cttattgaaggcttattga

SEQ ID NO: 699227 - DNA, 19 bp, Mus musculus
  siRNA target sequence for Ttc3 (NM_009441.1,502-520).
caatggaagatgctttaaa

SEQ ID NO: 699228 - DNA, 19 bp, Mus musculus
  siRNA target sequence for Ttc3 (NM_009441.1,535-553).
cgggtgatgtaacaattct

SEQ ID NO: 699229 - DNA, 19 bp, Mus musculus
  siRNA target sequence for Ttc3 (NM_009441.1,543-561).
gtaacaattctacctaaat

SEQ ID NO: 699230 - DNA, 19 bp, Mus musculus
  siRNA target sequence for Ttc3 (NM_009441.1,580-598).
gctggcccatgctaagtat

SEQ ID NO: 699231 - DNA, 19 bp, Mus musculus
  siRNA target sequence for Ttc3 (NM_009441.1,621-639).
catattactagagttgtaa

SEQ ID NO: 699232 - DNA, 19 bp, Mus musculus
  siRNA target sequence for Ttc3 (NM_009441.1,653-671).
cttgctagaagaatttaga

SEQ ID NO: 699233 - DNA, 19 bp, Mus musculus
  siRNA target sequence for Ttc3 (NM_009441.1,817-835).
gtaaccgagctctctgttt

SEQ ID NO: 699234 - DNA, 19 bp, Mus musculus
  siRNA target sequence for Ttc3 (NM_009441.1,826-844).
ctctctgttttcttcgtat

SEQ ID NO: 699235 - DNA, 19 bp, Mus musculus
  siRNA target sequence for Ttc3 (NM_009441.1,837-855).
cttcgtatggggcagttta

SEQ ID NO: 699236 - DNA, 19 bp, Mus musculus
  siRNA target sequence for Ttc3 (NM_009441.1,905-923).
gccaaagggtcattatcgt

SEQ ID NO: 699237 - DNA, 19 bp, Mus musculus
  siRNA target sequence for Ttc3 (NM_009441.1,906-924).
ccaaagggtcattatcgtt

SEQ ID NO: 699238 - DNA, 19 bp, Mus musculus
  siRNA target sequence for Ttc3 (NM_009441.1,907-925).
caaagggtcattatcgtta

SEQ ID NO: 699239 - DNA, 19 bp, Mus musculus
  siRNA target sequence for Ttc3 (NM_009441.1,913-931).
gtcattatcgttattgtga

SEQ ID NO: 699240 - DNA, 19 bp, Mus musculus
  siRNA target sequence for Ttc3 (NM_009441.1,940-958).
gtatgctgggggaatatga

SEQ ID NO: 699241 - DNA, 19 bp, Mus musculus
  siRNA target sequence for Ttc3 (NM_009441.1,962-980).
ggccctgcaagcaaacata

SEQ ID NO: 699242 - DNA, 19 bp, Mus musculus
  siRNA target sequence for Ttc3 (NM_009441.1,963-981).
gccctgcaagcaaacataa

SEQ ID NO: 699243 - DNA, 19 bp, Mus musculus
  siRNA target sequence for Ttc3 (NM_009441.1,1011-1029).
gagggaatcaaggatctaa

SEQ ID NO: 699244 - DNA, 19 bp, Mus musculus
  siRNA target sequence for Ttc3 (NM_009441.1,1013-1031).
gggaatcaaggatctaatt

SEQ ID NO: 699245 - DNA, 19 bp, Mus musculus
  siRNA target sequence for Ttc3 (NM_009441.1,1015-1033).
gaatcaaggatctaattca

SEQ ID NO: 699246 - DNA, 19 bp, Mus musculus
  siRNA target sequence for Ttc3 (NM_009441.1,1034-1052).
gcagcatgtaaagttacaa

SEQ ID NO: 699247 - DNA, 19 bp, Mus musculus
  siRNA target sequence for Ttc3 (NM_009441.1,1068-1086).
ctacaaggtcggacatcaa

SEQ ID NO: 699248 - DNA, 19 bp, Mus musculus
  siRNA target sequence for Ttc3 (NM_009441.1,1071-1089).
caaggtcggacatcaaata

SEQ ID NO: 699249 - DNA, 19 bp, Mus musculus
  siRNA target sequence for Ttc3 (NM_009441.1,1074-1092).
ggtcggacatcaaataaga

SEQ ID NO: 699250 - DNA, 19 bp, Mus musculus
  siRNA target sequence for Ttc3 (NM_009441.1,1084-1102).
caaataagaatccaattaa

SEQ ID NO: 699251 - DNA, 19 bp, Mus musculus
  siRNA target sequence for Ttc3 (NM_009441.1,1120-1138).
gggcttacatacctagaaa

SEQ ID NO: 699252 - DNA, 19 bp, Mus musculus
  siRNA target sequence for Ttc3 (NM_009441.1,1122-1140).
gcttacatacctagaaact

SEQ ID NO: 699253 - DNA, 19 bp, Mus musculus
  siRNA target sequence for Ttc3 (NM_009441.1,1152-1170).
gcttttaggacatcactta

SEQ ID NO: 699254 - DNA, 19 bp, Mus musculus
  siRNA target sequence for Ttc3 (NM_009441.1,1219-1237).
caaatggtggcgatcagaa

SEQ ID NO: 699255 - DNA, 19 bp, Mus musculus
  siRNA target sequence for Ttc3 (NM_009441.1,1224-1242).
ggtggcgatcagaatcaaa

SEQ ID NO: 699256 - DNA, 19 bp, Mus musculus
  siRNA target sequence for Ttc3 (NM_009441.1,1225-1243).
gtggcgatcagaatcaaaa

SEQ ID NO: 699257 - DNA, 19 bp, Mus musculus
  siRNA target sequence for Ttc3 (NM_009441.1,1228-1246).
gcgatcagaatcaaaaggt

SEQ ID NO: 699258 - DNA, 19 bp, Mus musculus
  siRNA target sequence for Ttc3 (NM_009441.1,1383-1401).
gtgagtttacaagtagatt

SEQ ID NO: 699259 - DNA, 19 bp, Mus musculus
  siRNA target sequence for Ttc3 (NM_009441.1,1441-1459).
gagctgcacaccaggattt

SEQ ID NO: 699260 - DNA, 19 bp, Mus musculus
  siRNA target sequence for Ttc3 (NM_009441.1,1446-1464).
gcacaccaggattttgcta

SEQ ID NO: 699261 - DNA, 19 bp, Mus musculus
  siRNA target sequence for Ttc3 (NM_009441.1,1447-1465).
cacaccaggattttgctaa

SEQ ID NO: 699262 - DNA, 19 bp, Mus musculus
  siRNA target sequence for Ttc3 (NM_009441.1,1501-1519).
ggtacacggccctgttaga

SEQ ID NO: 699263 - DNA, 19 bp, Mus musculus
  siRNA target sequence for Ttc3 (NM_009441.1,1567-1585).
gtttagaccctcagaaaat

SEQ ID NO: 699264 - DNA, 19 bp, Mus musculus
  siRNA target sequence for Ttc3 (NM_009441.1,1595-1613).
gaacctggccatgattaat

SEQ ID NO: 699265 - DNA, 19 bp, Mus musculus
  siRNA target sequence for Ttc3 (NM_009441.1,1598-1616).
cctggccatgattaattat

SEQ ID NO: 699266 - DNA, 19 bp, Mus musculus
  siRNA target sequence for Ttc3 (NM_009441.1,1680-1698).
gaagccgaaaaccagttta

SEQ ID NO: 699267 - DNA, 19 bp, Mus musculus
  siRNA target sequence for Ttc3 (NM_009441.1,1683-1701).
gccgaaaaccagtttaaga

SEQ ID NO: 699268 - DNA, 19 bp, Mus musculus
  siRNA target sequence for Ttc3 (NM_009441.1,1694-1712).
gtttaagaggattatcgaa

SEQ ID NO: 699269 - DNA, 19 bp, Mus musculus
  siRNA target sequence for Ttc3 (NM_009441.1,1700-1718).
gaggattatcgaacactat

SEQ ID NO: 699270 - DNA, 19 bp, Mus musculus
  siRNA target sequence for Ttc3 (NM_009441.1,1742-1760).
ggcctactgcggaatagga

SEQ ID NO: 699271 - DNA, 19 bp, Mus musculus
  siRNA target sequence for Ttc3 (NM_009441.1,1743-1761).
gcctactgcggaataggaa

SEQ ID NO: 699272 - DNA, 19 bp, Mus musculus
  siRNA target sequence for Ttc3 (NM_009441.1,1750-1768).
gcggaataggaaaagtgta

SEQ ID NO: 699273 - DNA, 19 bp, Mus musculus
  siRNA target sequence for Ttc3 (NM_009441.1,1783-1801).
gatttctcgaagctcttaa

SEQ ID NO: 699274 - DNA, 19 bp, Mus musculus
  siRNA target sequence for Ttc3 (NM_009441.1,1788-1806).
ctcgaagctcttaatcact

SEQ ID NO: 699275 - DNA, 19 bp, Mus musculus
  siRNA target sequence for Ttc3 (NM_009441.1,1831-1849).
gtcgtctccctggaattct

SEQ ID NO: 699276 - DNA, 19 bp, Mus musculus
  siRNA target sequence for Ttc3 (NM_009441.1,1833-1851).
cgtctccctggaattctaa

SEQ ID NO: 699277 - DNA, 19 bp, Mus musculus
  siRNA target sequence for Ttc3 (NM_009441.1,1848-1866).
ctaacttggcccacaagta

SEQ ID NO: 699278 - DNA, 19 bp, Mus musculus
  siRNA target sequence for Ttc3 (NM_009441.1,1852-1870).
cttggcccacaagtaatgt

SEQ ID NO: 699279 - DNA, 19 bp, Mus musculus
  siRNA target sequence for Ttc3 (NM_009441.1,1856-1874).
gcccacaagtaatgtgatt

SEQ ID NO: 699280 - DNA, 19 bp, Mus musculus
  siRNA target sequence for Ttc3 (NM_009441.1,1885-1903).
ctaagccagaaaaagtcaa

SEQ ID NO: 699281 - DNA, 19 bp, Mus musculus
  siRNA target sequence for Ttc3 (NM_009441.1,1904-1922).
ggtgatgttagagaagttt

SEQ ID NO: 699282 - DNA, 19 bp, Mus musculus
  siRNA target sequence for Ttc3 (NM_009441.1,1907-1925).
gatgttagagaagtttgtt

SEQ ID NO: 699283 - DNA, 19 bp, Mus musculus
  siRNA target sequence for Ttc3 (NM_009441.1,1956-1974).
gctgtttgttgctatcaga

SEQ ID NO: 699284 - DNA, 19 bp, Mus musculus
  siRNA target sequence for Ttc3 (NM_009441.1,1973-1991).
gaagtgccgtggatattct

SEQ ID NO: 699285 - DNA, 19 bp, Mus musculus
  siRNA target sequence for Ttc3 (NM_009441.1,1976-1994).
gtgccgtggatattctaaa

SEQ ID NO: 699286 - DNA, 19 bp, Mus musculus
  siRNA target sequence for Ttc3 (NM_009441.1,1979-1997).
ccgtggatattctaaaatt

SEQ ID NO: 699287 - DNA, 19 bp, Mus musculus
  siRNA target sequence for Ttc3 (NM_009441.1,2021-2039).
ctttaagggttttatacga

SEQ ID NO: 699288 - DNA, 19 bp, Mus musculus
  siRNA target sequence for Ttc3 (NM_009441.1,2028-2046).
ggttttatacgaattagct

SEQ ID NO: 699289 - DNA, 19 bp, Mus musculus
  siRNA target sequence for Ttc3 (NM_009441.1,2059-2077).
gtaaggtagaatttcatat

SEQ ID NO: 699290 - DNA, 19 bp, Mus musculus
  siRNA target sequence for Ttc3 (NM_009441.1,2078-2096).
gaactgctggaaaaagtta

SEQ ID NO: 699291 - DNA, 19 bp, Mus musculus
  siRNA target sequence for Ttc3 (NM_009441.1,2149-2167).
gtctcactcccgattgtga

SEQ ID NO: 699292 - DNA, 19 bp, Mus musculus
  siRNA target sequence for Ttc3 (NM_009441.1,2158-2176).
ccgattgtgagggaatcat

SEQ ID NO: 699293 - DNA, 19 bp, Mus musculus
  siRNA target sequence for Ttc3 (NM_009441.1,2169-2187).
ggaatcatttctaagatta

SEQ ID NO: 699294 - DNA, 19 bp, Mus musculus
  siRNA target sequence for Ttc3 (NM_009441.1,2265-2283).
gttctgaaacagaaatgtt

SEQ ID NO: 699295 - DNA, 19 bp, Mus musculus
  siRNA target sequence for Ttc3 (NM_009441.1,2287-2305).
gcctagagaagttaagact

SEQ ID NO: 699296 - DNA, 19 bp, Mus musculus
  siRNA target sequence for Ttc3 (NM_009441.1,2440-2458).
ctcagcgttgtcagtttct

SEQ ID NO: 699297 - DNA, 19 bp, Mus musculus
  siRNA target sequence for Ttc3 (NM_009441.1,2444-2462).
gcgttgtcagtttcttgat

SEQ ID NO: 699298 - DNA, 19 bp, Mus musculus
  siRNA target sequence for Ttc3 (NM_009441.1,2486-2504).
gcagaatgctgacaagatt

SEQ ID NO: 699299 - DNA, 19 bp, Mus musculus
  siRNA target sequence for Ttc3 (NM_009441.1,2498-2516).
caagattaaatctgttgta

SEQ ID NO: 699300 - DNA, 19 bp, Mus musculus
  siRNA target sequence for Ttc3 (NM_009441.1,2562-2580).
ctgagcacggaagactata

SEQ ID NO: 699301 - DNA, 19 bp, Mus musculus
  siRNA target sequence for Ttc3 (NM_009441.1,2564-2582).
gagcacggaagactataca

SEQ ID NO: 699302 - DNA, 19 bp, Mus musculus
  siRNA target sequence for Ttc3 (NM_009441.1,2567-2585).
cacggaagactatacaaca

SEQ ID NO: 699303 - DNA, 19 bp, Mus musculus
  siRNA target sequence for Ttc3 (NM_009441.1,2659-2677).
gagtaaagacacggatatt

SEQ ID NO: 699304 - DNA, 19 bp, Mus musculus
  siRNA target sequence for Ttc3 (NM_009441.1,2762-2780).
cataggaccctttttcact

SEQ ID NO: 699305 - DNA, 19 bp, Mus musculus
  siRNA target sequence for Ttc3 (NM_009441.1,2871-2889).
ggaaagcagcttgattact

SEQ ID NO: 699306 - DNA, 19 bp, Mus musculus
  siRNA target sequence for Ttc3 (NM_009441.1,2974-2992).
gtgccttagacgagttctt

SEQ ID NO: 699307 - DNA, 19 bp, Mus musculus
  siRNA target sequence for Ttc3 (NM_009441.1,2977-2995).
ccttagacgagttctttga

SEQ ID NO: 699308 - DNA, 19 bp, Mus musculus
  siRNA target sequence for Ttc3 (NM_009441.1,2978-2996).
cttagacgagttctttgat

SEQ ID NO: 699309 - DNA, 19 bp, Mus musculus
  siRNA target sequence for Ttc3 (NM_009441.1,3005-3023).
cagccgatgcactgtacta

SEQ ID NO: 699310 - DNA, 19 bp, Mus musculus
  siRNA target sequence for Ttc3 (NM_009441.1,3039-3057).
gatgaaatgccgtttggtt

SEQ ID NO: 699311 - DNA, 19 bp, Mus musculus
  siRNA target sequence for Ttc3 (NM_009441.1,3179-3197).
caggcgcaattcagattct

SEQ ID NO: 699312 - DNA, 19 bp, Mus musculus
  siRNA target sequence for Ttc3 (NM_009441.1,3266-3284).
gcacagcagcgagtatgtt

SEQ ID NO: 699313 - DNA, 19 bp, Mus musculus
  siRNA target sequence for Ttc3 (NM_009441.1,3276-3294).
gagtatgttgtccgaaata

SEQ ID NO: 699314 - DNA, 19 bp, Mus musculus
  siRNA target sequence for Ttc3 (NM_009441.1,3323-3341).
gaaatgttcgactctgtat

SEQ ID NO: 699315 - DNA, 19 bp, Mus musculus
  siRNA target sequence for Ttc3 (NM_009441.1,3328-3346).
gttcgactctgtatgatta

SEQ ID NO: 699316 - DNA, 19 bp, Mus musculus
  siRNA target sequence for Ttc3 (NM_009441.1,3331-3349).
cgactctgtatgattattt

SEQ ID NO: 699317 - DNA, 19 bp, Mus musculus
  siRNA target sequence for Ttc3 (NM_009441.1,3476-3494).
cctgggctgtcctcgattt

SEQ ID NO: 699318 - DNA, 19 bp, Mus musculus
  siRNA target sequence for Ttc3 (NM_009441.1,3479-3497).
gggctgtcctcgatttgtt

SEQ ID NO: 699319 - DNA, 19 bp, Mus musculus
  siRNA target sequence for Ttc3 (NM_009441.1,3481-3499).
gctgtcctcgatttgttgt

SEQ ID NO: 699320 - DNA, 19 bp, Mus musculus
  siRNA target sequence for Ttc3 (NM_009441.1,3484-3502).
gtcctcgatttgttgtgat

SEQ ID NO: 699321 - DNA, 19 bp, Mus musculus
  siRNA target sequence for Ttc3 (NM_009441.1,3506-3524).
caactgcattgcattgaaa

SEQ ID NO: 699322 - DNA, 19 bp, Mus musculus
  siRNA target sequence for Ttc3 (NM_009441.1,3601-3619).
gagaatatttacgagttaa

SEQ ID NO: 699323 - DNA, 19 bp, Mus musculus
  siRNA target sequence for Ttc3 (NM_009441.1,3613-3631).
gagttaaactaccactaaa

SEQ ID NO: 699324 - DNA, 19 bp, Mus musculus
  siRNA target sequence for Ttc3 (NM_009441.1,3634-3652).
caactgctagggaatttca

SEQ ID NO: 699325 - DNA, 19 bp, Mus musculus
  siRNA target sequence for Ttc3 (NM_009441.1,3854-3872).
cacgccagctcctgaagaa

SEQ ID NO: 699326 - DNA, 19 bp, Mus musculus
  siRNA target sequence for Ttc3 (NM_009441.1,3870-3888).
gaagccaaaccaacatact

SEQ ID NO: 699327 - DNA, 19 bp, Mus musculus
  siRNA target sequence for Ttc3 (NM_009441.1,3883-3901).
catactgggctcaatcaca

SEQ ID NO: 699328 - DNA, 19 bp, Mus musculus
  siRNA target sequence for Ttc3 (NM_009441.1,3953-3971).
ccagcgaccagcgtacatt

SEQ ID NO: 699329 - DNA, 19 bp, Mus musculus
  siRNA target sequence for Ttc3 (NM_009441.1,3954-3972).
cagcgaccagcgtacatta

SEQ ID NO: 699330 - DNA, 19 bp, Mus musculus
  siRNA target sequence for Ttc3 (NM_009441.1,3957-3975).
cgaccagcgtacattaaca

SEQ ID NO: 699331 - DNA, 19 bp, Mus musculus
  siRNA target sequence for Ttc3 (NM_009441.1,3958-3976).
gaccagcgtacattaacat

SEQ ID NO: 699332 - DNA, 19 bp, Mus musculus
  siRNA target sequence for Ttc3 (NM_009441.1,3989-4007).
gtcgcagttcactagcatt

SEQ ID NO: 699333 - DNA, 19 bp, Mus musculus
  siRNA target sequence for Ttc3 (NM_009441.1,3993-4011).
cagttcactagcatttaca

SEQ ID NO: 699334 - DNA, 19 bp, Mus musculus
  siRNA target sequence for Ttc3 (NM_009441.1,3995-4013).
gttcactagcatttacaca

SEQ ID NO: 699335 - DNA, 19 bp, Mus musculus
  siRNA target sequence for Ttc3 (NM_009441.1,4058-4076).
gccagtggtgccatctttt

SEQ ID NO: 699336 - DNA, 19 bp, Mus musculus
  siRNA target sequence for Ttc3 (NM_009441.1,4119-4137).
gagagtcctaatctgaata

SEQ ID NO: 699337 - DNA, 19 bp, Mus musculus
  siRNA target sequence for Ttc3 (NM_009441.1,4121-4139).
gagtcctaatctgaatact

SEQ ID NO: 699338 - DNA, 19 bp, Mus musculus
  siRNA target sequence for Ttc3 (NM_009441.1,4155-4173).
gaccacatggcctctgaaa

SEQ ID NO: 699339 - DNA, 19 bp, Mus musculus
  siRNA target sequence for Ttc3 (NM_009441.1,4295-4313).
gtgggaagcttctctagaa

SEQ ID NO: 699340 - DNA, 19 bp, Mus musculus
  siRNA target sequence for Ttc3 (NM_009441.1,4297-4315).
gggaagcttctctagaaaa

SEQ ID NO: 699341 - DNA, 19 bp, Mus musculus
  siRNA target sequence for Ttc3 (NM_009441.1,4298-4316).
ggaagcttctctagaaaat

SEQ ID NO: 699342 - DNA, 19 bp, Mus musculus
  siRNA target sequence for Ttc3 (NM_009441.1,4369-4387).
ctaggagcatggtacatca

SEQ ID NO: 699343 - DNA, 19 bp, Mus musculus
  siRNA target sequence for Ttc3 (NM_009441.1,4403-4421).
gccgtatgagccgtttgaa

SEQ ID NO: 699344 - DNA, 19 bp, Mus musculus
  siRNA target sequence for Ttc3 (NM_009441.1,4404-4422).
ccgtatgagccgtttgaaa

SEQ ID NO: 699345 - DNA, 19 bp, Mus musculus
  siRNA target sequence for Ttc3 (NM_009441.1,4406-4424).
gtatgagccgtttgaaaca

SEQ ID NO: 699346 - DNA, 19 bp, Mus musculus
  siRNA target sequence for Ttc3 (NM_009441.1,4580-4598).
gatctcaaagacggaatta

SEQ ID NO: 699347 - DNA, 19 bp, Mus musculus
  siRNA target sequence for Ttc3 (NM_009441.1,4603-4621).
ggttcctccaagatttgga

SEQ ID NO: 699348 - DNA, 19 bp, Mus musculus
  siRNA target sequence for Ttc3 (NM_009441.1,4730-4748).
gaaaaatgatggattcgat

SEQ ID NO: 699349 - DNA, 19 bp, Mus musculus
  siRNA target sequence for Ttc3 (NM_009441.1,4737-4755).
gatggattcgataaggaat

SEQ ID NO: 699350 - DNA, 19 bp, Mus musculus
  siRNA target sequence for Ttc3 (NM_009441.1,4913-4931).
gcgagaagtgtgcaaacta

SEQ ID NO: 699351 - DNA, 19 bp, Mus musculus
  siRNA target sequence for Ttc3 (NM_009441.1,4932-4950).
cagggtgtggcgtcacaat

SEQ ID NO: 699352 - DNA, 19 bp, Mus musculus
  siRNA target sequence for Ttc3 (NM_009441.1,4936-4954).
gtgtggcgtcacaatcaga

SEQ ID NO: 699353 - DNA, 19 bp, Mus musculus
  siRNA target sequence for Ttc3 (NM_009441.1,4947-4965).
caatcagaagcctatctta

SEQ ID NO: 699354 - DNA, 19 bp, Mus musculus
  siRNA target sequence for Ttc3 (NM_009441.1,4985-5003).
cagtgattctgcaacgtat

SEQ ID NO: 699355 - DNA, 19 bp, Mus musculus
  siRNA target sequence for Ttc3 (NM_009441.1,5006-5024).
cgatgtggagtatgatata

SEQ ID NO: 699356 - DNA, 19 bp, Mus musculus
  siRNA target sequence for Ttc3 (NM_009441.1,5012-5030).
ggagtatgatatactttca

SEQ ID NO: 699357 - DNA, 19 bp, Mus musculus
  siRNA target sequence for Ttc3 (NM_009441.1,5013-5031).
gagtatgatatactttcat

SEQ ID NO: 699358 - DNA, 19 bp, Mus musculus
  siRNA target sequence for Ttc3 (NM_009441.1,5061-5079).
gagatcgagagcaaaaagt

SEQ ID NO: 699359 - DNA, 19 bp, Mus musculus
  siRNA target sequence for Ttc3 (NM_009441.1,5063-5081).
gatcgagagcaaaaagtct

SEQ ID NO: 699360 - DNA, 19 bp, Mus musculus
  siRNA target sequence for Ttc3 (NM_009441.1,5069-5087).
gagcaaaaagtctcagttt

SEQ ID NO: 699361 - DNA, 19 bp, Mus musculus
  siRNA target sequence for Ttc3 (NM_009441.1,5225-5243).
cggactggtggcttgtgta

SEQ ID NO: 699362 - DNA, 19 bp, Mus musculus
  siRNA target sequence for Ttc3 (NM_009441.1,5260-5278).
cagtcctcaatgatcctta

SEQ ID NO: 699363 - DNA, 19 bp, Mus musculus
  siRNA target sequence for Ttc3 (NM_009441.1,5410-5428).
ctgaggccgacgagaaact

SEQ ID NO: 699364 - DNA, 19 bp, Mus musculus
  siRNA target sequence for Ttc3 (NM_009441.1,5412-5430).
gaggccgacgagaaactat

SEQ ID NO: 699365 - DNA, 19 bp, Mus musculus
  siRNA target sequence for Ttc3 (NM_009441.1,5414-5432).
ggccgacgagaaactatct

SEQ ID NO: 699366 - DNA, 19 bp, Mus musculus
  siRNA target sequence for Ttc3 (NM_009441.1,5497-5515).
cagtgatattcccatgtta

SEQ ID NO: 699367 - DNA, 19 bp, Mus musculus
  siRNA target sequence for Ttc3 (NM_009441.1,5499-5517).
gtgatattcccatgttata

SEQ ID NO: 699368 - DNA, 19 bp, Mus musculus
  siRNA target sequence for Ttc3 (NM_009441.1,5526-5544).
gagcttgctgggtttatta

SEQ ID NO: 699369 - DNA, 19 bp, Mus musculus
  siRNA target sequence for Ttc3 (NM_009441.1,5572-5590).
cattctcgggattaactat

SEQ ID NO: 699370 - DNA, 19 bp, Mus musculus
  siRNA target sequence for Ttc3 (NM_009441.1,5625-5643).
gtcgatgagcaaaagaaga

SEQ ID NO: 699371 - DNA, 19 bp, Mus musculus
  siRNA target sequence for Ttc3 (NM_009441.1,5761-5779).
gccagaaaaaagatgatgt

SEQ ID NO: 699372 - DNA, 19 bp, Mus musculus
  siRNA target sequence for Ttc3 (NM_009441.1,5781-5799).
cctgcaccagatggaaatt

SEQ ID NO: 699373 - DNA, 19 bp, Mus musculus
  siRNA target sequence for Ttc3 (NM_009441.1,5793-5811).
ggaaattcctgtgagatat

SEQ ID NO: 699374 - DNA, 19 bp, Mus musculus
  siRNA target sequence for Upa (NM_009475.1,190-208).
gaaggtctgggatactaga

SEQ ID NO: 699375 - DNA, 19 bp, Mus musculus
  siRNA target sequence for Upa (NM_009475.1,273-291).
ctgcagctgccgaggaaaa

SEQ ID NO: 699376 - DNA, 19 bp, Mus musculus
  siRNA target sequence for Upa (NM_009475.1,494-512).
cactctatggaggattctt

SEQ ID NO: 699377 - DNA, 19 bp, Mus musculus
  siRNA target sequence for Utf1 (NM_009482.1,34-52).
cggaggttgcccgcttttt

SEQ ID NO: 699378 - DNA, 19 bp, Mus musculus
  siRNA target sequence for Utf1 (NM_009482.1,284-302).
ggcagactctgcctactta

SEQ ID NO: 699379 - DNA, 19 bp, Mus musculus
  siRNA target sequence for Utf1 (NM_009482.1,412-430).
ccgtccggacccttcgata

SEQ ID NO: 699380 - DNA, 19 bp, Mus musculus
  siRNA target sequence for Utf1 (NM_009482.1,413-431).
cgtccggacccttcgataa

SEQ ID NO: 699381 - DNA, 19 bp, Mus musculus
  siRNA target sequence for Utf1 (NM_009482.1,416-434).
ccggacccttcgataacca

SEQ ID NO: 699382 - DNA, 19 bp, Mus musculus
  siRNA target sequence for Utf1 (NM_009482.1,585-603).
gccgctggctgcggaaaat

SEQ ID NO: 699383 - DNA, 19 bp, Mus musculus
  siRNA target sequence for Utf1 (NM_009482.1,587-605).
cgctggctgcggaaaatga

SEQ ID NO: 699384 - DNA, 19 bp, Mus musculus
  siRNA target sequence for Utf1 (NM_009482.1,611-629).
ctgcccctgcgctcagatt

SEQ ID NO: 699385 - DNA, 19 bp, Mus musculus
  siRNA target sequence for Utf1 (NM_009482.1,655-673).
ggtgcccaccgcattacca

SEQ ID NO: 699386 - DNA, 19 bp, Mus musculus
  siRNA target sequence for Utf1 (NM_009482.1,823-841).
gctccccagtcgttgaata

SEQ ID NO: 699387 - DNA, 19 bp, Mus musculus
  siRNA target sequence for Utf1 (NM_009482.1,865-883).
cacttgggcgacatctcaa

SEQ ID NO: 699388 - DNA, 19 bp, Mus musculus
  siRNA target sequence for Utf1 (NM_009482.1,870-888).
gggcgacatctcaacagtt

SEQ ID NO: 699389 - DNA, 19 bp, Mus musculus
  siRNA target sequence for V2r2 (NM_009492.1,1596-1614).
gaacatcagtggatatgga

SEQ ID NO: 699390 - DNA, 19 bp, Mus musculus
  siRNA target sequence for Viaat (NM_009508.1,181-199).
gcgacgatctcgactttga

SEQ ID NO: 699391 - DNA, 19 bp, Mus musculus
  siRNA target sequence for Viaat (NM_009508.1,274-292).
ccgtcgagggagacattca

SEQ ID NO: 699392 - DNA, 19 bp, Mus musculus
  siRNA target sequence for Viaat (NM_009508.1,275-293).
cgtcgagggagacattcat

SEQ ID NO: 699393 - DNA, 19 bp, Mus musculus
  siRNA target sequence for Viaat (NM_009508.1,276-294).
gtcgagggagacattcatt

SEQ ID NO: 699394 - DNA, 19 bp, Mus musculus
  siRNA target sequence for Viaat (NM_009508.1,278-296).
cgagggagacattcattat

SEQ ID NO: 699395 - DNA, 19 bp, Mus musculus
  siRNA target sequence for Viaat (NM_009508.1,403-421).
cgggctggaacgtgacaaa

SEQ ID NO: 699396 - DNA, 19 bp, Mus musculus
  siRNA target sequence for Viaat (NM_009508.1,404-422).
gggctggaacgtgacaaat

SEQ ID NO: 699397 - DNA, 19 bp, Mus musculus
  siRNA target sequence for Viaat (NM_009508.1,681-699).
ctggtgatgacgtgtatct

SEQ ID NO: 699398 - DNA, 19 bp, Mus musculus
  siRNA target sequence for Viaat (NM_009508.1,761-779).
gaagtcctggtccatcata

SEQ ID NO: 699399 - DNA, 19 bp, Mus musculus
  siRNA target sequence for Viaat (NM_009508.1,800-818).
ctgcgccttcctgaagaat

SEQ ID NO: 699400 - DNA, 19 bp, Mus musculus
  siRNA target sequence for Viaat (NM_009508.1,859-877).
cccacttcgtcatcaacat

SEQ ID NO: 699401 - DNA, 19 bp, Mus musculus
  siRNA target sequence for Viaat (NM_009508.1,924-942).
gagaaggtgaagttctaca

SEQ ID NO: 699402 - DNA, 19 bp, Mus musculus
  siRNA target sequence for Viaat (NM_009508.1,941-959).
catcgacgtcaagaagttt

SEQ ID NO: 699403 - DNA, 19 bp, Mus musculus
  siRNA target sequence for Viaat (NM_009508.1,1311-1329).
ggcgacggtcgccttaagt

SEQ ID NO: 699404 - DNA, 19 bp, Mus musculus
  siRNA target sequence for Viaat (NM_009508.1,1558-1576).
ccggcttcgtgcattcact

SEQ ID NO: 699405 - DNA, 19 bp, Mus musculus
  siRNA target sequence for Vmp (NM_009513.1,304-322).
cctctatctgggagtatga

SEQ ID NO: 699406 - DNA, 19 bp, Mus musculus
  siRNA target sequence for Vmp (NM_009513.1,313-331).
gggagtatgaggatgattt

SEQ ID NO: 699407 - DNA, 19 bp, Mus musculus
  siRNA target sequence for Vmp (NM_009513.1,449-467).
ccccaaaatcgaagctttt

SEQ ID NO: 699408 - DNA, 19 bp, Mus musculus
  siRNA target sequence for Vmp (NM_009513.1,463-481).
cttttggcgaagctgattt

SEQ ID NO: 699409 - DNA, 19 bp, Mus musculus
  siRNA target sequence for Vmp (NM_009513.1,654-672).
gagcgaatcgcagacatta

SEQ ID NO: 699410 - DNA, 19 bp, Mus musculus
  siRNA target sequence for Vmp (NM_009513.1,656-674).
gcgaatcgcagacattaaa

SEQ ID NO: 699411 - DNA, 19 bp, Mus musculus
  siRNA target sequence for Vmp (NM_009513.1,678-696).
catacccagcccatcacta

SEQ ID NO: 699412 - DNA, 19 bp, Mus musculus
  siRNA target sequence for Vpreb3 (NM_009514.2,69-87).
cctctgctcctgataggaa

SEQ ID NO: 699413 - DNA, 19 bp, Mus musculus
  siRNA target sequence for Vpreb3 (NM_009514.2,74-92).
gctcctgataggaaccttt

SEQ ID NO: 699414 - DNA, 19 bp, Mus musculus
  siRNA target sequence for Vpreb3 (NM_009514.2,162-180).
ctcagctgcaccatcaatt

SEQ ID NO: 699415 - DNA, 19 bp, Mus musculus
  siRNA target sequence for Vpreb3 (NM_009514.2,235-253).
gaagtgctccccatcttct

SEQ ID NO: 699416 - DNA, 19 bp, Mus musculus
  siRNA target sequence for Vpreb3 (NM_009514.2,263-281).
cgcagaagaggaacactat

SEQ ID NO: 699417 - DNA, 19 bp, Mus musculus
  siRNA target sequence for Vpreb3 (NM_009514.2,293-311).
catccccgacagattctca

SEQ ID NO: 699418 - DNA, 19 bp, Mus musculus
  siRNA target sequence for Vpreb3 (NM_009514.2,372-390).
gatgatgccgattacttct

SEQ ID NO: 699419 - DNA, 19 bp, Mus musculus
  siRNA target sequence for Vpreb3 (NM_009514.2,375-393).
gatgccgattacttctgtt

SEQ ID NO: 699420 - DNA, 19 bp, Mus musculus
  siRNA target sequence for Vpreb3 (NM_009514.2,395-413).
catcgcccacacctttgaa

SEQ ID NO: 699421 - DNA, 19 bp, Mus musculus
  siRNA target sequence for Yap (NM_009534.1,345-363).
cttggaggcgctcttcaat

SEQ ID NO: 699422 - DNA, 19 bp, Mus musculus
  siRNA target sequence for Yap (NM_009534.1,635-653).
ggcagtcctcctttgagat

SEQ ID NO: 699423 - DNA, 19 bp, Mus musculus
  siRNA target sequence for Yap (NM_009534.1,696-714).
gacatcttctggtcaaaga

SEQ ID NO: 699424 - DNA, 19 bp, Mus musculus
  siRNA target sequence for Yap (NM_009534.1,698-716).
catcttctggtcaaagata

SEQ ID NO: 699425 - DNA, 19 bp, Mus musculus
  siRNA target sequence for Yap (NM_009534.1,704-722).
ctggtcaaagatacttctt

SEQ ID NO: 699426 - DNA, 19 bp, Mus musculus
  siRNA target sequence for Yap (NM_009534.1,706-724).
ggtcaaagatacttcttaa

SEQ ID NO: 699427 - DNA, 19 bp, Mus musculus
  siRNA target sequence for Yap (NM_009534.1,707-725).
gtcaaagatacttcttaaa

SEQ ID NO: 699428 - DNA, 19 bp, Mus musculus
  siRNA target sequence for Yap (NM_009534.1,713-731).
gatacttcttaaatcacaa

SEQ ID NO: 699429 - DNA, 19 bp, Mus musculus
  siRNA target sequence for Yap (NM_009534.1,727-745).
cacaacgatcagacaacaa

SEQ ID NO: 699430 - DNA, 19 bp, Mus musculus
  siRNA target sequence for Yap (NM_009534.1,767-785).
ccatgctttcgcaactgaa

SEQ ID NO: 699431 - DNA, 19 bp, Mus musculus
  siRNA target sequence for Yap (NM_009534.1,814-832).
ccccagacgctgatgaatt

SEQ ID NO: 699432 - DNA, 19 bp, Mus musculus
  siRNA target sequence for Yap (NM_009534.1,880-898).
gatggagaagtttactaca

SEQ ID NO: 699433 - DNA, 19 bp, Mus musculus
  siRNA target sequence for Yap (NM_009534.1,884-902).
gagaagtttactacataaa

SEQ ID NO: 699434 - DNA, 19 bp, Mus musculus
  siRNA target sequence for Yap (NM_009534.1,889-907).
gtttactacataaaccata

SEQ ID NO: 699435 - DNA, 19 bp, Mus musculus
  siRNA target sequence for Yap (NM_009534.1,1098-1116).
ggagagactgcggttgaaa

SEQ ID NO: 699436 - DNA, 19 bp, Mus musculus
  siRNA target sequence for Yap (NM_009534.1,1101-1119).
gagactgcggttgaaacaa

SEQ ID NO: 699437 - DNA, 19 bp, Mus musculus
  siRNA target sequence for Yap (NM_009534.1,1110-1128).
gttgaaacaacaggaatta

SEQ ID NO: 699438 - DNA, 19 bp, Mus musculus
  siRNA target sequence for Yap (NM_009534.1,1208-1226).
ctgggatgtctcaggaatt

SEQ ID NO: 699439 - DNA, 19 bp, Mus musculus
  siRNA target sequence for Yap (NM_009534.1,1217-1235).
ctcaggaattgagaacaat

SEQ ID NO: 699440 - DNA, 19 bp, Mus musculus
  siRNA target sequence for Yap (NM_009534.1,1222-1240).
gaattgagaacaatgacaa

SEQ ID NO: 699441 - DNA, 19 bp, Mus musculus
  siRNA target sequence for Yap (NM_009534.1,1251-1269).
cgatccctttcttaacagt

SEQ ID NO: 699442 - DNA, 19 bp, Mus musculus
  siRNA target sequence for Yap (NM_009534.1,1475-1493).
cactggaaggagatgcaat

SEQ ID NO: 699443 - DNA, 19 bp, Mus musculus
  siRNA target sequence for Yap (NM_009534.1,1484-1502).
gagatgcaatgaacataga

SEQ ID NO: 699444 - DNA, 19 bp, Mus musculus
  siRNA target sequence for Yap (NM_009534.1,1534-1552).
gcgctgagttccgaaatct

SEQ ID NO: 699445 - DNA, 19 bp, Mus musculus
  siRNA target sequence for Yap (NM_009534.1,1535-1553).
cgctgagttccgaaatctt

SEQ ID NO: 699446 - DNA, 19 bp, Mus musculus
  siRNA target sequence for Yap (NM_009534.1,1573-1591).
gctgccaccaagctagata

SEQ ID NO: 699447 - DNA, 19 bp, Mus musculus
  siRNA target sequence for Yap (NM_009534.1,1577-1595).
ccaccaagctagataaaga

SEQ ID NO: 699448 - DNA, 19 bp, Mus musculus
  siRNA target sequence for Yap (NM_009534.1,1578-1596).
caccaagctagataaagaa

SEQ ID NO: 699449 - DNA, 19 bp, Mus musculus
  siRNA target sequence for Plagl1 (NM_009538.1,538-556).
gctccattccgctgtcaaa

SEQ ID NO: 699450 - DNA, 19 bp, Mus musculus
  siRNA target sequence for Plagl1 (NM_009538.1,585-603).
gaagttcaccattcacaat

SEQ ID NO: 699451 - DNA, 19 bp, Mus musculus
  siRNA target sequence for Plagl1 (NM_009538.1,659-677).
ccttcgtctccaagtataa

SEQ ID NO: 699452 - DNA, 19 bp, Mus musculus
  siRNA target sequence for Plagl1 (NM_009538.1,782-800).
cccacgatcccaacaagat

SEQ ID NO: 699453 - DNA, 19 bp, Mus musculus
  siRNA target sequence for Plagl1 (NM_009538.1,784-802).
cacgatcccaacaagatct

SEQ ID NO: 699454 - DNA, 19 bp, Mus musculus
  siRNA target sequence for Plagl1 (NM_009538.1,814-832).
gacgattgcggcaagaagt

SEQ ID NO: 699455 - DNA, 19 bp, Mus musculus
  siRNA target sequence for Plagl1 (NM_009538.1,1005-1023).
gtgcgaccactgtgataga

SEQ ID NO: 699456 - DNA, 19 bp, Mus musculus
  siRNA target sequence for Plagl1 (NM_009538.1,1226-1244).
caacttcgttccagataaa

SEQ ID NO: 699457 - DNA, 19 bp, Mus musculus
  siRNA target sequence for Plagl1 (NM_009538.1,1724-1742).
ctcctcccccaattattct

SEQ ID NO: 699458 - DNA, 19 bp, Mus musculus
  siRNA target sequence for Plagl1 (NM_009538.1,1727-1745).
ctcccccaattattcttca

SEQ ID NO: 699459 - DNA, 19 bp, Mus musculus
  siRNA target sequence for Plagl1 (NM_009538.1,1773-1791).
ctcatatgccccatttgta

SEQ ID NO: 699460 - DNA, 19 bp, Mus musculus
  siRNA target sequence for Plagl1 (NM_009538.1,1810-1828).
gatggcaaggccttttgca

SEQ ID NO: 699461 - DNA, 19 bp, Mus musculus
  siRNA target sequence for Plagl1 (NM_009538.1,1865-1883).
ctcaggcgcctctcaagtt

SEQ ID NO: 699462 - DNA, 19 bp, Mus musculus
  siRNA target sequence for Plagl1 (NM_009538.1,1909-1927).
gaggggtttgggaaagtca

SEQ ID NO: 699463 - DNA, 19 bp, Mus musculus
  siRNA target sequence for Plagl1 (NM_009538.1,1945-1963).
ctggtagatgctgtgaata

SEQ ID NO: 699464 - DNA, 19 bp, Mus musculus
  siRNA target sequence for Plagl1 (NM_009538.1,1947-1965).
ggtagatgctgtgaatata

SEQ ID NO: 699465 - DNA, 19 bp, Mus musculus
  siRNA target sequence for Plagl1 (NM_009538.1,2077-2095).
ccactgccccataggataa

SEQ ID NO: 699466 - DNA, 19 bp, Mus musculus
  siRNA target sequence for Plagl1 (NM_009538.1,2080-2098).
ctgccccataggataacct

SEQ ID NO: 699467 - DNA, 19 bp, Mus musculus
  siRNA target sequence for Plagl1 (NM_009538.1,2506-2524).
gcaggactcgtctataaga

SEQ ID NO: 699468 - DNA, 19 bp, Mus musculus
  siRNA target sequence for Plagl1 (NM_009538.1,2507-2525).
caggactcgtctataagaa

SEQ ID NO: 699469 - DNA, 19 bp, Mus musculus
  siRNA target sequence for Plagl1 (NM_009538.1,2509-2527).
ggactcgtctataagaaat

SEQ ID NO: 699470 - DNA, 19 bp, Mus musculus
  siRNA target sequence for Zfa (NM_009540.2,893-911).
ccgaaacgagtcttgacaa

SEQ ID NO: 699471 - DNA, 19 bp, Mus musculus
  siRNA target sequence for Rnf103 (NM_009543.1,849-867).
gtacgagactggcatcttt

SEQ ID NO: 699472 - DNA, 19 bp, Mus musculus
  siRNA target sequence for Rnf103 (NM_009543.1,1128-1146).
ggttcaggtcatagcaaat

SEQ ID NO: 699473 - DNA, 19 bp, Mus musculus
  siRNA target sequence for Rnf103 (NM_009543.1,1154-1172).
gtcctttggtgggtaaaat

SEQ ID NO: 699474 - DNA, 19 bp, Mus musculus
  siRNA target sequence for Rnf103 (NM_009543.1,1216-1234).
cggacaggcactttcaact

SEQ ID NO: 699475 - DNA, 19 bp, Mus musculus
  siRNA target sequence for Rnf103 (NM_009543.1,1299-1317).
gccacaaacaagtacatct

SEQ ID NO: 699476 - DNA, 19 bp, Mus musculus
  siRNA target sequence for Rnf103 (NM_009543.1,1300-1318).
ccacaaacaagtacatcta

SEQ ID NO: 699477 - DNA, 19 bp, Mus musculus
  siRNA target sequence for Rnf103 (NM_009543.1,1301-1319).
cacaaacaagtacatctaa

SEQ ID NO: 699478 - DNA, 19 bp, Mus musculus
  siRNA target sequence for Rnf103 (NM_009543.1,1313-1331).
catctaaagggaaagtcat

SEQ ID NO: 699479 - DNA, 19 bp, Mus musculus
  siRNA target sequence for Rnf103 (NM_009543.1,1341-1359).
gtacagtggacgcaagatt

SEQ ID NO: 699480 - DNA, 19 bp, Mus musculus
  siRNA target sequence for Rnf103 (NM_009543.1,1344-1362).
cagtggacgcaagattgaa

SEQ ID NO: 699481 - DNA, 19 bp, Mus musculus
  siRNA target sequence for Rnf103 (NM_009543.1,1346-1364).
gtggacgcaagattgaagt

SEQ ID NO: 699482 - DNA, 19 bp, Mus musculus
  siRNA target sequence for Rnf103 (NM_009543.1,1349-1367).
gacgcaagattgaagtaga

SEQ ID NO: 699483 - DNA, 19 bp, Mus musculus
  siRNA target sequence for Rnf103 (NM_009543.1,1396-1414).
gcagcttctcggatcaaaa

SEQ ID NO: 699484 - DNA, 19 bp, Mus musculus
  siRNA target sequence for Rnf103 (NM_009543.1,1399-1417).
gcttctcggatcaaaacta

SEQ ID NO: 699485 - DNA, 19 bp, Mus musculus
  siRNA target sequence for Rnf103 (NM_009543.1,1400-1418).
cttctcggatcaaaactat

SEQ ID NO: 699486 - DNA, 19 bp, Mus musculus
  siRNA target sequence for Rnf103 (NM_009543.1,1403-1421).
ctcggatcaaaactatata

SEQ ID NO: 699487 - DNA, 19 bp, Mus musculus
  siRNA target sequence for Rnf103 (NM_009543.1,1467-1485).
ctgggtaaaaatataccta

SEQ ID NO: 699488 - DNA, 19 bp, Mus musculus
  siRNA target sequence for Rnf103 (NM_009543.1,1469-1487).
gggtaaaaatatacctatt

SEQ ID NO: 699489 - DNA, 19 bp, Mus musculus
  siRNA target sequence for Rnf103 (NM_009543.1,1501-1519).
caaccgccagctttcttct

SEQ ID NO: 699490 - DNA, 19 bp, Mus musculus
  siRNA target sequence for Rnf103 (NM_009543.1,1570-1588).
gtggaaaattggaacaaca

SEQ ID NO: 699491 - DNA, 19 bp, Mus musculus
  siRNA target sequence for Rnf103 (NM_009543.1,1584-1602).
caacaagagttatatgaca

SEQ ID NO: 699492 - DNA, 19 bp, Mus musculus
  siRNA target sequence for Rnf103 (NM_009543.1,1590-1608).
gagttatatgacagatatt

SEQ ID NO: 699493 - DNA, 19 bp, Mus musculus
  siRNA target sequence for Rnf103 (NM_009543.1,1599-1617).
gacagatattggtatttat

SEQ ID NO: 699494 - DNA, 19 bp, Mus musculus
  siRNA target sequence for Rnf103 (NM_009543.1,1620-1638).
catgccatcatacatactt

SEQ ID NO: 699495 - DNA, 19 bp, Mus musculus
  siRNA target sequence for Rnf103 (NM_009543.1,1624-1642).
ccatcatacatacttagaa

SEQ ID NO: 699496 - DNA, 19 bp, Mus musculus
  siRNA target sequence for Rnf103 (NM_009543.1,1640-1658).
gaactcctgaaggaattta

SEQ ID NO: 699497 - DNA, 19 bp, Mus musculus
  siRNA target sequence for Rnf103 (NM_009543.1,1671-1689).
ccacacaggtgaatttata

SEQ ID NO: 699498 - DNA, 19 bp, Mus musculus
  siRNA target sequence for Rnf103 (NM_009543.1,1693-1711).
cttcaggccatggattcat

SEQ ID NO: 699499 - DNA, 19 bp, Mus musculus
  siRNA target sequence for Rnf103 (NM_009543.1,1721-1739).
cattacaacctgaagtaaa

SEQ ID NO: 699500 - DNA, 19 bp, Mus musculus
  siRNA target sequence for Rnf103 (NM_009543.1,1730-1748).
ctgaagtaaatgatctgtt

SEQ ID NO: 699501 - DNA, 19 bp, Mus musculus
  siRNA target sequence for Rnf103 (NM_009543.1,1755-1773).
gagtttggttctagttaat

SEQ ID NO: 699502 - DNA, 19 bp, Mus musculus
  siRNA target sequence for Rnf103 (NM_009543.1,1757-1775).
gtttggttctagttaatct

SEQ ID NO: 699503 - DNA, 19 bp, Mus musculus
  siRNA target sequence for Rnf103 (NM_009543.1,1811-1829).
caaccatcaagcgatttgt

SEQ ID NO: 699504 - DNA, 19 bp, Mus musculus
  siRNA target sequence for Rnf103 (NM_009543.1,1821-1839).
gcgatttgtggttctcata

SEQ ID NO: 699505 - DNA, 19 bp, Mus musculus
  siRNA target sequence for Rnf103 (NM_009543.1,1822-1840).
cgatttgtggttctcataa

SEQ ID NO: 699506 - DNA, 19 bp, Mus musculus
  siRNA target sequence for Rnf103 (NM_009543.1,1830-1848).
ggttctcataagcacttta

SEQ ID NO: 699507 - DNA, 19 bp, Mus musculus
  siRNA target sequence for Rnf103 (NM_009543.1,1841-1859).
gcactttagggacatacaa

SEQ ID NO: 699508 - DNA, 19 bp, Mus musculus
  siRNA target sequence for Rnf103 (NM_009543.1,1851-1869).
gacatacaattccctatta

SEQ ID NO: 699509 - DNA, 19 bp, Mus musculus
  siRNA target sequence for Rnf103 (NM_009543.1,2014-2032).
cacccagccctgtttctca

SEQ ID NO: 699510 - DNA, 19 bp, Mus musculus
  siRNA target sequence for Rnf103 (NM_009543.1,2045-2063).
gacatggtttgctaattga

SEQ ID NO: 699511 - DNA, 19 bp, Mus musculus
  siRNA target sequence for Rnf103 (NM_009543.1,2079-2097).
gagacgtcgcagcaacaat

SEQ ID NO: 699512 - DNA, 19 bp, Mus musculus
  siRNA target sequence for Rnf103 (NM_009543.1,2081-2099).
gacgtcgcagcaacaatga

SEQ ID NO: 699513 - DNA, 19 bp, Mus musculus
  siRNA target sequence for Rnf103 (NM_009543.1,2084-2102).
gtcgcagcaacaatgatga

SEQ ID NO: 699514 - DNA, 19 bp, Mus musculus
  siRNA target sequence for Rnf103 (NM_009543.1,2088-2106).
cagcaacaatgatgaagtt

SEQ ID NO: 699515 - DNA, 19 bp, Mus musculus
  siRNA target sequence for Rnf103 (NM_009543.1,2091-2109).
caacaatgatgaagttaat

SEQ ID NO: 699516 - DNA, 19 bp, Mus musculus
  siRNA target sequence for Rnf103 (NM_009543.1,2101-2119).
gaagttaatgcgaataatt

SEQ ID NO: 699517 - DNA, 19 bp, Mus musculus
  siRNA target sequence for Rnf103 (NM_009543.1,2111-2129).
cgaataatttagaatggtt

SEQ ID NO: 699518 - DNA, 19 bp, Mus musculus
  siRNA target sequence for Rnf103 (NM_009543.1,2161-2179).
ctcttccacccgattgctt

SEQ ID NO: 699519 - DNA, 19 bp, Mus musculus
  siRNA target sequence for Rnf103 (NM_009543.1,2212-2230).
gacgaagaccctgacttat

SEQ ID NO: 699520 - DNA, 19 bp, Mus musculus
  siRNA target sequence for Rnf103 (NM_009543.1,2263-2281).
cttcaccctctgataccaa

SEQ ID NO: 699521 - DNA, 19 bp, Mus musculus
  siRNA target sequence for Rnf103 (NM_009543.1,2268-2286).
ccctctgataccaactgat

SEQ ID NO: 699522 - DNA, 19 bp, Mus musculus
  siRNA target sequence for Rnf103 (NM_009543.1,2269-2287).
cctctgataccaactgatt

SEQ ID NO: 699523 - DNA, 19 bp, Mus musculus
  siRNA target sequence for Rnf103 (NM_009543.1,2270-2288).
ctctgataccaactgatta

SEQ ID NO: 699524 - DNA, 19 bp, Mus musculus
  siRNA target sequence for Rnf103 (NM_009543.1,2272-2290).
ctgataccaactgattata

SEQ ID NO: 699525 - DNA, 19 bp, Mus musculus
  siRNA target sequence for Rnf103 (NM_009543.1,2307-2325).
gtggcgatttaaatgtctt

SEQ ID NO: 699526 - DNA, 19 bp, Mus musculus
  siRNA target sequence for Rnf103 (NM_009543.1,2391-2409).
caacatggacacttttagt

SEQ ID NO: 699527 - DNA, 19 bp, Mus musculus
  siRNA target sequence for Rnf103 (NM_009543.1,2394-2412).
catggacacttttagtagt

SEQ ID NO: 699528 - DNA, 19 bp, Mus musculus
  siRNA target sequence for Rnf103 (NM_009543.1,2397-2415).
ggacacttttagtagtagt

SEQ ID NO: 699529 - DNA, 19 bp, Mus musculus
  siRNA target sequence for Rnf103 (NM_009543.1,2398-2416).
gacacttttagtagtagta

SEQ ID NO: 699530 - DNA, 19 bp, Mus musculus
  siRNA target sequence for Rnf103 (NM_009543.1,2512-2530).
gagagcagcccatgtgaaa

SEQ ID NO: 699531 - DNA, 19 bp, Mus musculus
  siRNA target sequence for Rnf103 (NM_009543.1,2538-2556).
gaggtcgtatggatcacat

SEQ ID NO: 699532 - DNA, 19 bp, Mus musculus
  siRNA target sequence for Rnf103 (NM_009543.1,2541-2559).
gtcgtatggatcacataat

SEQ ID NO: 699533 - DNA, 19 bp, Mus musculus
  siRNA target sequence for Rnf103 (NM_009543.1,2544-2562).
gtatggatcacataatact

SEQ ID NO: 699534 - DNA, 19 bp, Mus musculus
  siRNA target sequence for Rnf103 (NM_009543.1,2574-2592).
ggaaccggactggttaact

SEQ ID NO: 699535 - DNA, 19 bp, Mus musculus
  siRNA target sequence for Rnf103 (NM_009543.1,2575-2593).
gaaccggactggttaactt

SEQ ID NO: 699536 - DNA, 19 bp, Mus musculus
  siRNA target sequence for Rnf103 (NM_009543.1,2610-2628).
gcactgtactgaatgtgtt

SEQ ID NO: 699537 - DNA, 19 bp, Mus musculus
  siRNA target sequence for Rnf103 (NM_009543.1,2675-2693).
cttgtggtcacgtgtttca

SEQ ID NO: 699538 - DNA, 19 bp, Mus musculus
  siRNA target sequence for Rnf103 (NM_009543.1,2683-2701).
cacgtgtttcaccagaatt

SEQ ID NO: 699539 - DNA, 19 bp, Mus musculus
  siRNA target sequence for Rnf103 (NM_009543.1,2688-2706).
gtttcaccagaattgcatt

SEQ ID NO: 699540 - DNA, 19 bp, Mus musculus
  siRNA target sequence for Zfp144 (NM_009545.1,414-432).
cggaccacacggattaaaa

SEQ ID NO: 699541 - DNA, 19 bp, Mus musculus
  siRNA target sequence for Zfp144 (NM_009545.1,415-433).
ggaccacacggattaaaat

SEQ ID NO: 699542 - DNA, 19 bp, Mus musculus
  siRNA target sequence for Zfp144 (NM_009545.1,464-482).
cctctgtgggggctatttt

SEQ ID NO: 699543 - DNA, 19 bp, Mus musculus
  siRNA target sequence for Zfp144 (NM_009545.1,493-511).
ccaccattgtggaatgctt

SEQ ID NO: 699544 - DNA, 19 bp, Mus musculus
  siRNA target sequence for Zfp144 (NM_009545.1,494-512).
caccattgtggaatgctta

SEQ ID NO: 699545 - DNA, 19 bp, Mus musculus
  siRNA target sequence for Zfp144 (NM_009545.1,574-592).
gtgacgtccaggtccataa

SEQ ID NO: 699546 - DNA, 19 bp, Mus musculus
  siRNA target sequence for Zfp144 (NM_009545.1,578-596).
cgtccaggtccataaaact

SEQ ID NO: 699547 - DNA, 19 bp, Mus musculus
  siRNA target sequence for Zfp144 (NM_009545.1,600-618).
ccactgctgagcatcagat

SEQ ID NO: 699548 - DNA, 19 bp, Mus musculus
  siRNA target sequence for Zfp144 (NM_009545.1,608-626).
gagcatcagatcagacaaa

SEQ ID NO: 699549 - DNA, 19 bp, Mus musculus
  siRNA target sequence for Zfp144 (NM_009545.1,650-668).
gttggtgcctgggcttttt

SEQ ID NO: 699550 - DNA, 19 bp, Mus musculus
  siRNA target sequence for Zfp144 (NM_009545.1,1049-1067).
ctacccctggcgaaggaat

SEQ ID NO: 699551 - DNA, 19 bp, Mus musculus
  siRNA target sequence for Zfp144 (NM_009545.1,1069-1087).
ggcctctccccctcaagta

SEQ ID NO: 699552 - DNA, 19 bp, Mus musculus
  siRNA target sequence for Zfp144 (NM_009545.1,1397-1415).
gcgcaagatgactgttaat

SEQ ID NO: 699553 - DNA, 19 bp, Mus musculus
  siRNA target sequence for Zfp185 (NM_009549.2,428-446).
gtcgccattccttgcaaaa

SEQ ID NO: 699554 - DNA, 19 bp, Mus musculus
  siRNA target sequence for Zfp185 (NM_009549.2,448-466).
gggttgatgtggtagatga

SEQ ID NO: 699555 - DNA, 19 bp, Mus musculus
  siRNA target sequence for Zfp185 (NM_009549.2,467-485).
ggacgtccttcctgagaaa

SEQ ID NO: 699556 - DNA, 19 bp, Mus musculus
  siRNA target sequence for Zfp185 (NM_009549.2,533-551).
ctcgacaaccgagaagatt

SEQ ID NO: 699557 - DNA, 19 bp, Mus musculus
  siRNA target sequence for Zfp185 (NM_009549.2,617-635).
gagcactccagattcttgt

SEQ ID NO: 699558 - DNA, 19 bp, Mus musculus
  siRNA target sequence for Zfp185 (NM_009549.2,766-784).
gtggagccgagcagcaaat

SEQ ID NO: 699559 - DNA, 19 bp, Mus musculus
  siRNA target sequence for Zfp185 (NM_009549.2,789-807).
gccgaggactgtactaaca

SEQ ID NO: 699560 - DNA, 19 bp, Mus musculus
  siRNA target sequence for Zfp185 (NM_009549.2,856-874).
cctctgaacaatctcaatt

SEQ ID NO: 699561 - DNA, 19 bp, Mus musculus
  siRNA target sequence for Zfp185 (NM_009549.2,903-921).
gactccagctcaactatca

SEQ ID NO: 699562 - DNA, 19 bp, Mus musculus
  siRNA target sequence for Zfp185 (NM_009549.2,935-953).
cgtgaaggagtacatgaat

SEQ ID NO: 699563 - DNA, 19 bp, Mus musculus
  siRNA target sequence for Zfp185 (NM_009549.2,1000-1018).
gtcccagcagcattgaaga

SEQ ID NO: 699564 - DNA, 19 bp, Mus musculus
  siRNA target sequence for Zfp185 (NM_009549.2,1021-1039).
cattggatctggcaaagaa

SEQ ID NO: 699565 - DNA, 19 bp, Mus musculus
  siRNA target sequence for Zfp185 (NM_009549.2,1075-1093).
ccgaaggggtctgtactta

SEQ ID NO: 699566 - DNA, 19 bp, Mus musculus
  siRNA target sequence for Zfp185 (NM_009549.2,1080-1098).
ggggtctgtacttactgta

SEQ ID NO: 699567 - DNA, 19 bp, Mus musculus
  siRNA target sequence for Zfp185 (NM_009549.2,1090-1108).
cttactgtagccatgagat

SEQ ID NO: 699568 - DNA, 19 bp, Mus musculus
  siRNA target sequence for Zfp185 (NM_009549.2,1100-1118).
ccatgagatccaagattgt

SEQ ID NO: 699569 - DNA, 19 bp, Mus musculus
  siRNA target sequence for Zfp185 (NM_009549.2,1109-1127).
ccaagattgtccgaagatt

SEQ ID NO: 699570 - DNA, 19 bp, Mus musculus
  siRNA target sequence for Zfp185 (NM_009549.2,1110-1128).
caagattgtccgaagatta

SEQ ID NO: 699571 - DNA, 19 bp, Mus musculus
  siRNA target sequence for Zfp185 (NM_009549.2,1120-1138).
cgaagattacccttgaaca

SEQ ID NO: 699572 - DNA, 19 bp, Mus musculus
  siRNA target sequence for Zfp185 (NM_009549.2,1121-1139).
gaagattacccttgaacat

SEQ ID NO: 699573 - DNA, 19 bp, Mus musculus
  siRNA target sequence for Zfp185 (NM_009549.2,1151-1169).
ctgccatgagtattgtttt

SEQ ID NO: 699574 - DNA, 19 bp, Mus musculus
  siRNA target sequence for Zfp185 (NM_009549.2,1153-1171).
gccatgagtattgttttaa

SEQ ID NO: 699575 - DNA, 19 bp, Mus musculus
  siRNA target sequence for Zfp185 (NM_009549.2,1155-1173).
catgagtattgttttaagt

SEQ ID NO: 699576 - DNA, 19 bp, Mus musculus
  siRNA target sequence for Zfp185 (NM_009549.2,1172-1190).
gtgcgggatttgcaataaa

SEQ ID NO: 699577 - DNA, 19 bp, Mus musculus
  siRNA target sequence for Zfp185 (NM_009549.2,1198-1216).
gtgatctcctagatcagat

SEQ ID NO: 699578 - DNA, 19 bp, Mus musculus
  siRNA target sequence for Zfp28 (NM_009552.1,242-260).
cgcgcacaaagctctgttt

SEQ ID NO: 699579 - DNA, 19 bp, Mus musculus
  siRNA target sequence for Zfp28 (NM_009552.1,243-261).
gcgcacaaagctctgtttt

SEQ ID NO: 699580 - DNA, 19 bp, Mus musculus
  siRNA target sequence for Zfp28 (NM_009552.1,616-634).
gtgaggagacattattcct

SEQ ID NO: 699581 - DNA, 19 bp, Mus musculus
  siRNA target sequence for Zfp29 (NM_009553.2,350-368).
ggttcaggtacctcaagaa

SEQ ID NO: 699582 - DNA, 19 bp, Mus musculus
  siRNA target sequence for Zfp29 (NM_009553.2,381-399).
gcagaggtcaccactatga

SEQ ID NO: 699583 - DNA, 19 bp, Mus musculus
  siRNA target sequence for Zfp29 (NM_009553.2,382-400).
cagaggtcaccactatgat

SEQ ID NO: 699584 - DNA, 19 bp, Mus musculus
  siRNA target sequence for Zfp29 (NM_009553.2,694-712).
cttttcggcacagtgattt

SEQ ID NO: 699585 - DNA, 19 bp, Mus musculus
  siRNA target sequence for Zfp29 (NM_009553.2,701-719).
gcacagtgattttgagata

SEQ ID NO: 699586 - DNA, 19 bp, Mus musculus
  siRNA target sequence for Zfp29 (NM_009553.2,726-744).
gagaatggggagaactcaa

SEQ ID NO: 699587 - DNA, 19 bp, Mus musculus
  siRNA target sequence for Zfp29 (NM_009553.2,728-746).
gaatggggagaactcaaat

SEQ ID NO: 699588 - DNA, 19 bp, Mus musculus
  siRNA target sequence for Zfp29 (NM_009553.2,1002-1020).
cggaaatcccaccttatca

SEQ ID NO: 699589 - DNA, 19 bp, Mus musculus
  siRNA target sequence for Zfp29 (NM_009553.2,1086-1104).
gacggctcgaactttagta

SEQ ID NO: 699590 - DNA, 19 bp, Mus musculus
  siRNA target sequence for Zfp29 (NM_009553.2,1088-1106).
cggctcgaactttagtaga

SEQ ID NO: 699591 - DNA, 19 bp, Mus musculus
  siRNA target sequence for Zfp29 (NM_009553.2,1168-1186).
gccggagtgcgaaccttat

SEQ ID NO: 699592 - DNA, 19 bp, Mus musculus
  siRNA target sequence for Zfp29 (NM_009553.2,1170-1188).
cggagtgcgaaccttatca

SEQ ID NO: 699593 - DNA, 19 bp, Mus musculus
  siRNA target sequence for Zfp29 (NM_009553.2,1337-1355).
caaccggtccagccttaat

SEQ ID NO: 699594 - DNA, 19 bp, Mus musculus
  siRNA target sequence for Zfp29 (NM_009553.2,1340-1358).
ccggtccagccttaatact

SEQ ID NO: 699595 - DNA, 19 bp, Mus musculus
  siRNA target sequence for Zfp29 (NM_009553.2,1342-1360).
ggtccagccttaatactca

SEQ ID NO: 699596 - DNA, 19 bp, Mus musculus
  siRNA target sequence for Zfp29 (NM_009553.2,1407-1425).
ggcgaaagcttcagttaca

SEQ ID NO: 699597 - DNA, 19 bp, Mus musculus
  siRNA target sequence for Zfp29 (NM_009553.2,1408-1426).
gcgaaagcttcagttacaa

SEQ ID NO: 699598 - DNA, 19 bp, Mus musculus
  siRNA target sequence for Zfp29 (NM_009553.2,1483-1501).
ccgagtgcggccagaagtt

SEQ ID NO: 699599 - DNA, 19 bp, Mus musculus
  siRNA target sequence for Zfp29 (NM_009553.2,1506-1524).
cagagctccgcgctcatta

SEQ ID NO: 699600 - DNA, 19 bp, Mus musculus
  siRNA target sequence for Zfp29 (NM_009553.2,2122-2140).
ggacgcacctgaaagagaa

SEQ ID NO: 699601 - DNA, 19 bp, Mus musculus
  siRNA target sequence for Zfp62 (NM_009562.1,318-336).
ggatgaggagtcgtctaaa

SEQ ID NO: 699602 - DNA, 19 bp, Mus musculus
  siRNA target sequence for Zfp62 (NM_009562.1,319-337).
gatgaggagtcgtctaaaa

SEQ ID NO: 699603 - DNA, 19 bp, Mus musculus
  siRNA target sequence for Zfp62 (NM_009562.1,327-345).
gtcgtctaaaaagaatgaa

SEQ ID NO: 699604 - DNA, 19 bp, Mus musculus
  siRNA target sequence for Zfp62 (NM_009562.1,329-347).
cgtctaaaaagaatgaaaa

SEQ ID NO: 699605 - DNA, 19 bp, Mus musculus
  siRNA target sequence for Zfp62 (NM_009562.1,397-415).
gatcatatgcagaaatcta

SEQ ID NO: 699606 - DNA, 19 bp, Mus musculus
  siRNA target sequence for Zfp62 (NM_009562.1,442-460).
cctaaatggaaaatactga

SEQ ID NO: 699607 - DNA, 19 bp, Mus musculus
  siRNA target sequence for Zfp62 (NM_009562.1,507-525).
cgcagcaaatataaaacta

SEQ ID NO: 699608 - DNA, 19 bp, Mus musculus
  siRNA target sequence for Zfp62 (NM_009562.1,554-572).
gtttctacccaagtacaaa

SEQ ID NO: 699609 - DNA, 19 bp, Mus musculus
  siRNA target sequence for Zfp62 (NM_009562.1,591-609).
ccccacagaaccaaattgt

SEQ ID NO: 699610 - DNA, 19 bp, Mus musculus
  siRNA target sequence for Zfp62 (NM_009562.1,624-642).
gcacacagagaacattaat

SEQ ID NO: 699611 - DNA, 19 bp, Mus musculus
  siRNA target sequence for Zfp62 (NM_009562.1,633-651).
gaacattaatggaaacgta

SEQ ID NO: 699612 - DNA, 19 bp, Mus musculus
  siRNA target sequence for Zfp62 (NM_009562.1,648-666).
cgtacaccctgctcatatt

SEQ ID NO: 699613 - DNA, 19 bp, Mus musculus
  siRNA target sequence for Zfp62 (NM_009562.1,658-676).
gctcatattgctgataaga

SEQ ID NO: 699614 - DNA, 19 bp, Mus musculus
  siRNA target sequence for Zfp62 (NM_009562.1,670-688).
gataagaaattacataagt

SEQ ID NO: 699615 - DNA, 19 bp, Mus musculus
  siRNA target sequence for Zfp62 (NM_009562.1,722-740).
ctcgtcttgttcaacataa

SEQ ID NO: 699616 - DNA, 19 bp, Mus musculus
  siRNA target sequence for Zfp62 (NM_009562.1,874-892).
gcctacatgtcctactcta

SEQ ID NO: 699617 - DNA, 19 bp, Mus musculus
  siRNA target sequence for Zfp62 (NM_009562.1,903-921).
ccacaaaagcactcattct

SEQ ID NO: 699618 - DNA, 19 bp, Mus musculus
  siRNA target sequence for Zfp62 (NM_009562.1,974-992).
ctgttctggaccagcataa

SEQ ID NO: 699619 - DNA, 19 bp, Mus musculus
  siRNA target sequence for Zfp62 (NM_009562.1,976-994).
gttctggaccagcataaaa

SEQ ID NO: 699620 - DNA, 19 bp, Mus musculus
  siRNA target sequence for Zfp62 (NM_009562.1,979-997).
ctggaccagcataaaagga

SEQ ID NO: 699621 - DNA, 19 bp, Mus musculus
  siRNA target sequence for Zfp62 (NM_009562.1,1122-1140).
gaaaaccttcagtaatagt

SEQ ID NO: 699622 - DNA, 19 bp, Mus musculus
  siRNA target sequence for Zfp62 (NM_009562.1,1254-1272).
ctttggtgataaaccttat

SEQ ID NO: 699623 - DNA, 19 bp, Mus musculus
  siRNA target sequence for Zfp62 (NM_009562.1,1447-1465).
gatatctgtggcaaagcat

SEQ ID NO: 699624 - DNA, 19 bp, Mus musculus
  siRNA target sequence for Zfp62 (NM_009562.1,1458-1476).
caaagcattcagctatagt

SEQ ID NO: 699625 - DNA, 19 bp, Mus musculus
  siRNA target sequence for Zfp62 (NM_009562.1,1478-1496).
caggccttgcagtccataa

SEQ ID NO: 699626 - DNA, 19 bp, Mus musculus
  siRNA target sequence for Zfp62 (NM_009562.1,1480-1498).
ggccttgcagtccataaaa

SEQ ID NO: 699627 - DNA, 19 bp, Mus musculus
  siRNA target sequence for Zfp62 (NM_009562.1,1483-1501).
cttgcagtccataaaagca

SEQ ID NO: 699628 - DNA, 19 bp, Mus musculus
  siRNA target sequence for Zfp62 (NM_009562.1,1638-1656).
gaacaattcaggtctcaaa

SEQ ID NO: 699629 - DNA, 19 bp, Mus musculus
  siRNA target sequence for Zfp62 (NM_009562.1,1782-1800).
cagctattgtgagaaatct

SEQ ID NO: 699630 - DNA, 19 bp, Mus musculus
  siRNA target sequence for Zfp62 (NM_009562.1,1893-1911).
caattcaggccttaaagta

SEQ ID NO: 699631 - DNA, 19 bp, Mus musculus
  siRNA target sequence for Zfp62 (NM_009562.1,2347-2365).
cctggcaagacgtcctata

SEQ ID NO: 699632 - DNA, 19 bp, Mus musculus
  siRNA target sequence for Zfp62 (NM_009562.1,2350-2368).
ggcaagacgtcctatacat

SEQ ID NO: 699633 - DNA, 19 bp, Mus musculus
  siRNA target sequence for Zfp62 (NM_009562.1,2355-2373).
gacgtcctatacatgtgat

SEQ ID NO: 699634 - DNA, 19 bp, Mus musculus
  siRNA target sequence for Zfp62 (NM_009562.1,2371-2389).
gatgaatgcggaaaagcat

SEQ ID NO: 699635 - DNA, 19 bp, Mus musculus
  siRNA target sequence for Zfp62 (NM_009562.1,2394-2412).
ctcaagcagaactcttata

SEQ ID NO: 699636 - DNA, 19 bp, Mus musculus
  siRNA target sequence for Zfp64 (NM_009564.1,229-247).
cctttgtggcccacaaaca

SEQ ID NO: 699637 - DNA, 19 bp, Mus musculus
  siRNA target sequence for Zfp64 (NM_009564.1,399-417).
gaacatggctaccaaactt

SEQ ID NO: 699638 - DNA, 19 bp, Mus musculus
  siRNA target sequence for Zfp64 (NM_009564.1,472-490).
ccaagtcacgcaccaaaaa

SEQ ID NO: 699639 - DNA, 19 bp, Mus musculus
  siRNA target sequence for Zfp64 (NM_009564.1,880-898).
gtagtgccaagttcaaaat

SEQ ID NO: 699640 - DNA, 19 bp, Mus musculus
  siRNA target sequence for Zfp64 (NM_009564.1,1451-1469).
ctcggacgtgactgtagta

SEQ ID NO: 699641 - DNA, 19 bp, Mus musculus
  siRNA target sequence for Zfp64 (NM_009564.1,1453-1471).
cggacgtgactgtagtaca

SEQ ID NO: 699642 - DNA, 19 bp, Mus musculus
  siRNA target sequence for Zfp67 (NM_009565.1,1228-1246).
gggctcggagatagctata

SEQ ID NO: 699643 - DNA, 19 bp, Mus musculus
  siRNA target sequence for Zfp67 (NM_009565.1,1230-1248).
gctcggagatagctatagt

SEQ ID NO: 699644 - DNA, 19 bp, Mus musculus
  siRNA target sequence for Zfp67 (NM_009565.1,1347-1365).
cgggctagcccagagtaat

SEQ ID NO: 699645 - DNA, 19 bp, Mus musculus
  siRNA target sequence for Zfp67 (NM_009565.1,1931-1949).
ctggcctcgacctttccaa

SEQ ID NO: 699646 - DNA, 19 bp, Mus musculus
  siRNA target sequence for Zfy2 (NM_009571.1,800-818).
cctttgacagccgacattt

SEQ ID NO: 699647 - DNA, 19 bp, Mus musculus
  siRNA target sequence for Zfy2 (NM_009571.1,940-958).
gcctagcaaaacagatcat

SEQ ID NO: 699648 - DNA, 19 bp, Mus musculus
  siRNA target sequence for Zfy2 (NM_009571.1,1380-1398).
ccactgccagtgctatgtt

SEQ ID NO: 699649 - DNA, 19 bp, Mus musculus
  siRNA target sequence for Zfy2 (NM_009571.1,1392-1410).
ctatgttacaccatgatga

SEQ ID NO: 699650 - DNA, 19 bp, Mus musculus
  siRNA target sequence for Znfn1a1 (NM_009578.1,57-75).
caagacatgtcccaagttt

SEQ ID NO: 699651 - DNA, 19 bp, Mus musculus
  siRNA target sequence for Znfn1a1 (NM_009578.1,291-309).
cccttcaaatgccatcttt

SEQ ID NO: 699652 - DNA, 19 bp, Mus musculus
  siRNA target sequence for Znfn1a1 (NM_009578.1,365-383).
cgttggtaagcctcacaaa

SEQ ID NO: 699653 - DNA, 19 bp, Mus musculus
  siRNA target sequence for Znfn1a1 (NM_009578.1,366-384).
gttggtaagcctcacaaat

SEQ ID NO: 699654 - DNA, 19 bp, Mus musculus
  siRNA target sequence for Znfn1a1 (NM_009578.1,374-392).
gcctcacaaatgtggatat

SEQ ID NO: 699655 - DNA, 19 bp, Mus musculus
  siRNA target sequence for Znfn1a1 (NM_009578.1,419-437).
ctctttagaggagcataaa

SEQ ID NO: 699656 - DNA, 19 bp, Mus musculus
  siRNA target sequence for Znfn1a1 (NM_009578.1,438-456).
gagcgatgccacaactact

SEQ ID NO: 699657 - DNA, 19 bp, Mus musculus
  siRNA target sequence for Znfn1a1 (NM_009578.1,580-598).
gcaatgtcgccaaacgtaa

SEQ ID NO: 699658 - DNA, 19 bp, Mus musculus
  siRNA target sequence for Znfn1a1 (NM_009578.1,862-880).
cacaggacgccgtggataa

SEQ ID NO: 699659 - DNA, 19 bp, Mus musculus
  siRNA target sequence for Znfn1a1 (NM_009578.1,864-882).
caggacgccgtggataact

SEQ ID NO: 699660 - DNA, 19 bp, Mus musculus
  siRNA target sequence for Znfn1a1 (NM_009578.1,984-1002).
cagcgcagcggccttatct

SEQ ID NO: 699661 - DNA, 19 bp, Mus musculus
  siRNA target sequence for Znfn1a1 (NM_009578.1,994-1012).
gccttatctacctaaccaa

SEQ ID NO: 699662 - DNA, 19 bp, Mus musculus
  siRNA target sequence for Znfn1a1 (NM_009578.1,1179-1197).
ctggatcacgtcatgtata

SEQ ID NO: 699663 - DNA, 19 bp, Mus musculus
  siRNA target sequence for Dnajc2 (NM_009583.1,197-215).
cagaaatgcttctacatct

SEQ ID NO: 699664 - DNA, 19 bp, Mus musculus
  siRNA target sequence for Dnajc2 (NM_009583.1,282-300).
gaattccccatgctgaaaa

SEQ ID NO: 699665 - DNA, 19 bp, Mus musculus
  siRNA target sequence for Dnajc2 (NM_009583.1,310-328).
ccaaagattggaagaatca

SEQ ID NO: 699666 - DNA, 19 bp, Mus musculus
  siRNA target sequence for Dnajc2 (NM_009583.1,349-367).
gacttggccacgtcagata

SEQ ID NO: 699667 - DNA, 19 bp, Mus musculus
  siRNA target sequence for Dnajc2 (NM_009583.1,351-369).
cttggccacgtcagataca

SEQ ID NO: 699668 - DNA, 19 bp, Mus musculus
  siRNA target sequence for Dnajc2 (NM_009583.1,406-424).
caatggtcttgaaacatca

SEQ ID NO: 699669 - DNA, 19 bp, Mus musculus
  siRNA target sequence for Dnajc2 (NM_009583.1,468-486).
gacaatgactacttcactt

SEQ ID NO: 699670 - DNA, 19 bp, Mus musculus
  siRNA target sequence for Dnajc2 (NM_009583.1,474-492).
gactacttcacttgcataa

SEQ ID NO: 699671 - DNA, 19 bp, Mus musculus
  siRNA target sequence for Dnajc2 (NM_009583.1,476-494).
ctacttcacttgcataact

SEQ ID NO: 699672 - DNA, 19 bp, Mus musculus
  siRNA target sequence for Dnajc2 (NM_009583.1,479-497).
cttcacttgcataactaaa

SEQ ID NO: 699673 - DNA, 19 bp, Mus musculus
  siRNA target sequence for Dnajc2 (NM_009583.1,482-500).
cacttgcataactaaagct

SEQ ID NO: 699674 - DNA, 19 bp, Mus musculus
  siRNA target sequence for Dnajc2 (NM_009583.1,533-551).
ggcatttaacagtgtagat

SEQ ID NO: 699675 - DNA, 19 bp, Mus musculus
  siRNA target sequence for Dnajc2 (NM_009583.1,663-681).
cccaagcttggtgatatga

SEQ ID NO: 699676 - DNA, 19 bp, Mus musculus
  siRNA target sequence for Dnajc2 (NM_009583.1,664-682).
ccaagcttggtgatatgaa

SEQ ID NO: 699677 - DNA, 19 bp, Mus musculus
  siRNA target sequence for Dnajc2 (NM_009583.1,680-698).
gaactcctcgtttgaagat

SEQ ID NO: 699678 - DNA, 19 bp, Mus musculus
  siRNA target sequence for Dnajc2 (NM_009583.1,683-701).
ctcctcgtttgaagatgta

SEQ ID NO: 699679 - DNA, 19 bp, Mus musculus
  siRNA target sequence for Dnajc2 (NM_009583.1,685-703).
cctcgtttgaagatgtaga

SEQ ID NO: 699680 - DNA, 19 bp, Mus musculus
  siRNA target sequence for Dnajc2 (NM_009583.1,686-704).
ctcgtttgaagatgtagat

SEQ ID NO: 699681 - DNA, 19 bp, Mus musculus
  siRNA target sequence for Dnajc2 (NM_009583.1,696-714).
gatgtagatgcgttttact

SEQ ID NO: 699682 - DNA, 19 bp, Mus musculus
  siRNA target sequence for Dnajc2 (NM_009583.1,826-844).
ccacgagggcacaaaggaa

SEQ ID NO: 699683 - DNA, 19 bp, Mus musculus
  siRNA target sequence for Dnajc2 (NM_009583.1,860-878).
cagaataagaacattagtt

SEQ ID NO: 699684 - DNA, 19 bp, Mus musculus
  siRNA target sequence for Dnajc2 (NM_009583.1,862-880).
gaataagaacattagttga

SEQ ID NO: 699685 - DNA, 19 bp, Mus musculus
  siRNA target sequence for Dnajc2 (NM_009583.1,900-918).
ccaaggataaaaaaattta

SEQ ID NO: 699686 - DNA, 19 bp, Mus musculus
  siRNA target sequence for Dnajc2 (NM_009583.1,1176-1194).
gaggcagaccgtgttaaaa

SEQ ID NO: 699687 - DNA, 19 bp, Mus musculus
  siRNA target sequence for Dnajc2 (NM_009583.1,1180-1198).
cagaccgtgttaaaatgat

SEQ ID NO: 699688 - DNA, 19 bp, Mus musculus
  siRNA target sequence for Dnajc2 (NM_009583.1,1217-1235).
ctgtgatcggcttgaacta

SEQ ID NO: 699689 - DNA, 19 bp, Mus musculus
  siRNA target sequence for Dnajc2 (NM_009583.1,1367-1385).
gcggcaagcatccaagaat

SEQ ID NO: 699690 - DNA, 19 bp, Mus musculus
  siRNA target sequence for Dnajc2 (NM_009583.1,1410-1428).
gggagtggcagtaaaaatt

SEQ ID NO: 699691 - DNA, 19 bp, Mus musculus
  siRNA target sequence for Dnajc2 (NM_009583.1,1437-1455).
gatgatctgcaattattaa

SEQ ID NO: 699692 - DNA, 19 bp, Mus musculus
  siRNA target sequence for Dnajc2 (NM_009583.1,1445-1463).
gcaattattaattaaagct

SEQ ID NO: 699693 - DNA, 19 bp, Mus musculus
  siRNA target sequence for Abpa (NM_009596.1,136-154).
gtacctgaaacaattcaat

SEQ ID NO: 699694 - DNA, 19 bp, Mus musculus
  siRNA target sequence for Abpa (NM_009596.1,235-253).
ggcaaccagtctcatcaat

SEQ ID NO: 699695 - DNA, 19 bp, Mus musculus
  siRNA target sequence for Abpa (NM_009596.1,236-254).
gcaaccagtctcatcaata

SEQ ID NO: 699696 - DNA, 19 bp, Mus musculus
  siRNA target sequence for Abpa (NM_009596.1,237-255).
caaccagtctcatcaataa

SEQ ID NO: 699697 - DNA, 19 bp, Mus musculus
  siRNA target sequence for Apbb2 (NM_009686.1,460-478).
gcaccttggcagtgtttat

SEQ ID NO: 699698 - DNA, 19 bp, Mus musculus
  siRNA target sequence for Apbb2 (NM_009686.1,489-507).
ggatccacagacattgcaa

SEQ ID NO: 699699 - DNA, 19 bp, Mus musculus
  siRNA target sequence for Apbb2 (NM_009686.1,490-508).
gatccacagacattgcaaa

SEQ ID NO: 699700 - DNA, 19 bp, Mus musculus
  siRNA target sequence for Apbb2 (NM_009686.1,550-568).
gttcctcccacaatgaact

SEQ ID NO: 699701 - DNA, 19 bp, Mus musculus
  siRNA target sequence for Apbb2 (NM_009686.1,553-571).
cctcccacaatgaactatt

SEQ ID NO: 699702 - DNA, 19 bp, Mus musculus
  siRNA target sequence for Apbb2 (NM_009686.1,554-572).
ctcccacaatgaactatta

SEQ ID NO: 699703 - DNA, 19 bp, Mus musculus
  siRNA target sequence for Apbb2 (NM_009686.1,616-634).
ccaaatgcaggaaaaaata

SEQ ID NO: 699704 - DNA, 19 bp, Mus musculus
  siRNA target sequence for Apbb2 (NM_009686.1,709-727).
ccaacatcaagctggttaa

SEQ ID NO: 699705 - DNA, 19 bp, Mus musculus
  siRNA target sequence for Apbb2 (NM_009686.1,713-731).
catcaagctggttaaaaat

SEQ ID NO: 699706 - DNA, 19 bp, Mus musculus
  siRNA target sequence for Apbb2 (NM_009686.1,793-811).
gccctgcagccgtcatcaa

SEQ ID NO: 699707 - DNA, 19 bp, Mus musculus
  siRNA target sequence for Apbb2 (NM_009686.1,821-839).
cgagaagctggaggttaaa

SEQ ID NO: 699708 - DNA, 19 bp, Mus musculus
  siRNA target sequence for Apbb2 (NM_009686.1,857-875).
gtcttcaggctgtgagatt

SEQ ID NO: 699709 - DNA, 19 bp, Mus musculus
  siRNA target sequence for Apbb2 (NM_009686.1,1265-1283).
ctggagtgatcactcattt

SEQ ID NO: 699710 - DNA, 19 bp, Mus musculus
  siRNA target sequence for Apbb2 (NM_009686.1,1422-1440).
gggtcacttagttctgtaa

SEQ ID NO: 699711 - DNA, 19 bp, Mus musculus
  siRNA target sequence for Apbb2 (NM_009686.1,1447-1465).
cgcccaccccagagaatga

SEQ ID NO: 699712 - DNA, 19 bp, Mus musculus
  siRNA target sequence for Apbb2 (NM_009686.1,1496-1514).
gaatgggggaaagattaat

SEQ ID NO: 699713 - DNA, 19 bp, Mus musculus
  siRNA target sequence for Apbb2 (NM_009686.1,1501-1519).
ggggaaagattaatagtga

SEQ ID NO: 699714 - DNA, 19 bp, Mus musculus
  siRNA target sequence for Apbb2 (NM_009686.1,1557-1575).
gaccccagtttaaaagagt

SEQ ID NO: 699715 - DNA, 19 bp, Mus musculus
  siRNA target sequence for Apbb2 (NM_009686.1,1584-1602).
gcaacgctacgctatgcat

SEQ ID NO: 699716 - DNA, 19 bp, Mus musculus
  siRNA target sequence for Apbb2 (NM_009686.1,1594-1612).
gctatgcatccttgaaact

SEQ ID NO: 699717 - DNA, 19 bp, Mus musculus
  siRNA target sequence for Apbb2 (NM_009686.1,1632-1650).
gatgacgatgattcttgta

SEQ ID NO: 699718 - DNA, 19 bp, Mus musculus
  siRNA target sequence for Apbb2 (NM_009686.1,1635-1653).
gacgatgattcttgtagta

SEQ ID NO: 699719 - DNA, 19 bp, Mus musculus
  siRNA target sequence for Apbb2 (NM_009686.1,1638-1656).
gatgattcttgtagtatca

SEQ ID NO: 699720 - DNA, 19 bp, Mus musculus
  siRNA target sequence for Apbb2 (NM_009686.1,1641-1659).
gattcttgtagtatcaaca

SEQ ID NO: 699721 - DNA, 19 bp, Mus musculus
  siRNA target sequence for Apbb2 (NM_009686.1,1662-1680).
gacccagaagccaagtgtt

SEQ ID NO: 699722 - DNA, 19 bp, Mus musculus
  siRNA target sequence for Apbb2 (NM_009686.1,1762-1780).
gcatccgacagctttccta

SEQ ID NO: 699723 - DNA, 19 bp, Mus musculus
  siRNA target sequence for Apbb2 (NM_009686.1,1881-1899).
gaccgctccgtgttacact

SEQ ID NO: 699724 - DNA, 19 bp, Mus musculus
  siRNA target sequence for Apbb2 (NM_009686.1,1985-2003).
ggacacaaggattctgaaa

SEQ ID NO: 699725 - DNA, 19 bp, Mus musculus
  siRNA target sequence for Apbb2 (NM_009686.1,2044-2062).
ccacaagtctccacgaaat

SEQ ID NO: 699726 - DNA, 19 bp, Mus musculus
  siRNA target sequence for Apbb2 (NM_009686.1,2467-2485).
gctttgagtgccatgtgtt

SEQ ID NO: 699727 - DNA, 19 bp, Mus musculus
  siRNA target sequence for Apbb2 (NM_009686.1,2496-2514).
cctaacgcagccaatgtgt

SEQ ID NO: 699728 - DNA, 19 bp, Mus musculus
  siRNA target sequence for Apbb2 (NM_009686.1,2536-2554).
gcatgttgcggtatcagaa

SEQ ID NO: 699729 - DNA, 19 bp, Mus musculus
  siRNA target sequence for Apbb2 (NM_009686.1,2626-2644).
gagtcacgaccaatgtgaa

SEQ ID NO: 699730 - DNA, 19 bp, Mus musculus
  siRNA target sequence for Apbb2 (NM_009686.1,2640-2658).
gtgaaacgaggggtcttat

SEQ ID NO: 699731 - DNA, 19 bp, Mus musculus
  siRNA target sequence for Aqr (NM_009702.1,163-181).
cctgcgcagcccaagaaaa

SEQ ID NO: 699732 - DNA, 19 bp, Mus musculus
  siRNA target sequence for Aqr (NM_009702.1,167-185).
cgcagcccaagaaaatcgt

SEQ ID NO: 699733 - DNA, 19 bp, Mus musculus
  siRNA target sequence for Aqr (NM_009702.1,222-240).
cactcagctagcatgtaaa

SEQ ID NO: 699734 - DNA, 19 bp, Mus musculus
  siRNA target sequence for Aqr (NM_009702.1,224-242).
ctcagctagcatgtaaata

SEQ ID NO: 699735 - DNA, 19 bp, Mus musculus
  siRNA target sequence for Aqr (NM_009702.1,245-263).
gggctcctcatatcaagaa

SEQ ID NO: 699736 - DNA, 19 bp, Mus musculus
  siRNA target sequence for Aqr (NM_009702.1,261-279).
gaagaaatcaccgtttgat

SEQ ID NO: 699737 - DNA, 19 bp, Mus musculus
  siRNA target sequence for Aqr (NM_009702.1,264-282).
gaaatcaccgtttgatata

SEQ ID NO: 699738 - DNA, 19 bp, Mus musculus
  siRNA target sequence for Aqr (NM_009702.1,269-287).
caccgtttgatataaaagt

SEQ ID NO: 699739 - DNA, 19 bp, Mus musculus
  siRNA target sequence for Aqr (NM_009702.1,271-289).
ccgtttgatataaaagtaa

SEQ ID NO: 699740 - DNA, 19 bp, Mus musculus
  siRNA target sequence for Aqr (NM_009702.1,325-343).
cggtttgccatcaggaaaa

SEQ ID NO: 699741 - DNA, 19 bp, Mus musculus
  siRNA target sequence for Aqr (NM_009702.1,410-428).
ccagcaaggcctatttaat

SEQ ID NO: 699742 - DNA, 19 bp, Mus musculus
  siRNA target sequence for Aqr (NM_009702.1,440-458).
gtatggtgaatgagaagtt

SEQ ID NO: 699743 - DNA, 19 bp, Mus musculus
  siRNA target sequence for Aqr (NM_009702.1,600-618).
cctggatcactgcttcaat

SEQ ID NO: 699744 - DNA, 19 bp, Mus musculus
  siRNA target sequence for Aqr (NM_009702.1,604-622).
gatcactgcttcaatagct

SEQ ID NO: 699745 - DNA, 19 bp, Mus musculus
  siRNA target sequence for Aqr (NM_009702.1,625-643).
gaagtagacttgataagga

SEQ ID NO: 699746 - DNA, 19 bp, Mus musculus
  siRNA target sequence for Aqr (NM_009702.1,687-705).
gcagcctgcacgattggaa

SEQ ID NO: 699747 - DNA, 19 bp, Mus musculus
  siRNA target sequence for Aqr (NM_009702.1,688-706).
cagcctgcacgattggaat

SEQ ID NO: 699748 - DNA, 19 bp, Mus musculus
  siRNA target sequence for Aqr (NM_009702.1,690-708).
gcctgcacgattggaatta

SEQ ID NO: 699749 - DNA, 19 bp, Mus musculus
  siRNA target sequence for Aqr (NM_009702.1,694-712).
gcacgattggaattagaat

SEQ ID NO: 699750 - DNA, 19 bp, Mus musculus
  siRNA target sequence for Aqr (NM_009702.1,695-713).
cacgattggaattagaatt

SEQ ID NO: 699751 - DNA, 19 bp, Mus musculus
  siRNA target sequence for Aqr (NM_009702.1,697-715).
cgattggaattagaattga

SEQ ID NO: 699752 - DNA, 19 bp, Mus musculus
  siRNA target sequence for Aqr (NM_009702.1,714-732).
gaaaaagacaccaaagcta

SEQ ID NO: 699753 - DNA, 19 bp, Mus musculus
  siRNA target sequence for Aqr (NM_009702.1,720-738).
gacaccaaagctaagaaaa

SEQ ID NO: 699754 - DNA, 19 bp, Mus musculus
  siRNA target sequence for Aqr (NM_009702.1,798-816).
ctaccaagaaagaaggttt

SEQ ID NO: 699755 - DNA, 19 bp, Mus musculus
  siRNA target sequence for Aqr (NM_009702.1,881-899).
ccatggacaaggttcatta

SEQ ID NO: 699756 - DNA, 19 bp, Mus musculus
  siRNA target sequence for Aqr (NM_009702.1,915-933).
cgaactgatgattgatcta

SEQ ID NO: 699757 - DNA, 19 bp, Mus musculus
  siRNA target sequence for Aqr (NM_009702.1,946-964).
cccacgaggcgctggttta

SEQ ID NO: 699758 - DNA, 19 bp, Mus musculus
  siRNA target sequence for Aqr (NM_009702.1,947-965).
ccacgaggcgctggtttaa

SEQ ID NO: 699759 - DNA, 19 bp, Mus musculus
  siRNA target sequence for Aqr (NM_009702.1,1095-1113).
cgaccagactggaaatgct

SEQ ID NO: 699760 - DNA, 19 bp, Mus musculus
  siRNA target sequence for Aqr (NM_009702.1,1126-1144).
gagatgaccacgattcact

SEQ ID NO: 699761 - DNA, 19 bp, Mus musculus
  siRNA target sequence for Aqr (NM_009702.1,1128-1146).
gatgaccacgattcactat

SEQ ID NO: 699762 - DNA, 19 bp, Mus musculus
  siRNA target sequence for Aqr (NM_009702.1,1136-1154).
cgattcactatgacagaat

SEQ ID NO: 699763 - DNA, 19 bp, Mus musculus
  siRNA target sequence for Aqr (NM_009702.1,1137-1155).
gattcactatgacagaatt

SEQ ID NO: 699764 - DNA, 19 bp, Mus musculus
  siRNA target sequence for Aqr (NM_009702.1,1188-1206).
ccccgagctctatgacttt

SEQ ID NO: 699765 - DNA, 19 bp, Mus musculus
  siRNA target sequence for Aqr (NM_009702.1,1212-1230).
ctccaatgtggcagaagta

SEQ ID NO: 699766 - DNA, 19 bp, Mus musculus
  siRNA target sequence for Aqr (NM_009702.1,1238-1256).
gagattccttggtcaagtt

SEQ ID NO: 699767 - DNA, 19 bp, Mus musculus
  siRNA target sequence for Aqr (NM_009702.1,1240-1258).
gattccttggtcaagtttt

SEQ ID NO: 699768 - DNA, 19 bp, Mus musculus
  siRNA target sequence for Aqr (NM_009702.1,1261-1279).
gggcctctcagttcaaaca

SEQ ID NO: 699769 - DNA, 19 bp, Mus musculus
  siRNA target sequence for Aqr (NM_009702.1,1314-1332).
gccaacgctccctaaaaat

SEQ ID NO: 699770 - DNA, 19 bp, Mus musculus
  siRNA target sequence for Aqr (NM_009702.1,1319-1337).
cgctccctaaaaatgaaga

SEQ ID NO: 699771 - DNA, 19 bp, Mus musculus
  siRNA target sequence for Aqr (NM_009702.1,1340-1358).
caacttttgataaagagtt

SEQ ID NO: 699772 - DNA, 19 bp, Mus musculus
  siRNA target sequence for Aqr (NM_009702.1,1387-1405).
gaacgccgcatctctcaaa

SEQ ID NO: 699773 - DNA, 19 bp, Mus musculus
  siRNA target sequence for Aqr (NM_009702.1,1391-1409).
gccgcatctctcaaattca

SEQ ID NO: 699774 - DNA, 19 bp, Mus musculus
  siRNA target sequence for Aqr (NM_009702.1,1416-1434).
gaatcagatgcctttgtat

SEQ ID NO: 699775 - DNA, 19 bp, Mus musculus
  siRNA target sequence for Aqr (NM_009702.1,1468-1486).
gtccctactgagtactatt

SEQ ID NO: 699776 - DNA, 19 bp, Mus musculus
  siRNA target sequence for Aqr (NM_009702.1,1470-1488).
ccctactgagtactattct

SEQ ID NO: 699777 - DNA, 19 bp, Mus musculus
  siRNA target sequence for Aqr (NM_009702.1,1505-1523).
ctctccccaagttgaatct

SEQ ID NO: 699778 - DNA, 19 bp, Mus musculus
  siRNA target sequence for Aqr (NM_009702.1,1518-1536).
gaatctgcagtttttgact

SEQ ID NO: 699779 - DNA, 19 bp, Mus musculus
  siRNA target sequence for Aqr (NM_009702.1,1575-1593).
cttagagtcaacttacgaa

SEQ ID NO: 699780 - DNA, 19 bp, Mus musculus
  siRNA target sequence for Aqr (NM_009702.1,1579-1597).
gagtcaacttacgaaatta

SEQ ID NO: 699781 - DNA, 19 bp, Mus musculus
  siRNA target sequence for Aqr (NM_009702.1,1581-1599).
gtcaacttacgaaattaga

SEQ ID NO: 699782 - DNA, 19 bp, Mus musculus
  siRNA target sequence for Aqr (NM_009702.1,1583-1601).
caacttacgaaattagaca

SEQ ID NO: 699783 - DNA, 19 bp, Mus musculus
  siRNA target sequence for Aqr (NM_009702.1,1689-1707).
gcccattgtggctttcact

SEQ ID NO: 699784 - DNA, 19 bp, Mus musculus
  siRNA target sequence for Aqr (NM_009702.1,1819-1837).
cttcgaaagcacgatgtat

SEQ ID NO: 699785 - DNA, 19 bp, Mus musculus
  siRNA target sequence for Aqr (NM_009702.1,1852-1870).
gtgcgtccaacaaaacctt

SEQ ID NO: 699786 - DNA, 19 bp, Mus musculus
  siRNA target sequence for Aqr (NM_009702.1,1868-1886).
cttacggcactaagtttga

SEQ ID NO: 699787 - DNA, 19 bp, Mus musculus
  siRNA target sequence for Aqr (NM_009702.1,2040-2058).
ggatccaaaccagtatcaa

SEQ ID NO: 699788 - DNA, 19 bp, Mus musculus
  siRNA target sequence for Aqr (NM_009702.1,2056-2074).
caacaggatatgaccaata

SEQ ID NO: 699789 - DNA, 19 bp, Mus musculus
  siRNA target sequence for Aqr (NM_009702.1,2059-2077).
caggatatgaccaatacga

SEQ ID NO: 699790 - DNA, 19 bp, Mus musculus
  siRNA target sequence for Aqr (NM_009702.1,2061-2079).
ggatatgaccaatacgata

SEQ ID NO: 699791 - DNA, 19 bp, Mus musculus
  siRNA target sequence for Aqr (NM_009702.1,2085-2103).
cggagccgaagatgtgtat

SEQ ID NO: 699792 - DNA, 19 bp, Mus musculus
  siRNA target sequence for Aqr (NM_009702.1,2087-2105).
gagccgaagatgtgtatga

SEQ ID NO: 699793 - DNA, 19 bp, Mus musculus
  siRNA target sequence for Aqr (NM_009702.1,2089-2107).
gccgaagatgtgtatgaca

SEQ ID NO: 699794 - DNA, 19 bp, Mus musculus
  siRNA target sequence for Aqr (NM_009702.1,2129-2147).
ggaaaccgaaggagaataa

SEQ ID NO: 699795 - DNA, 19 bp, Mus musculus
  siRNA target sequence for Aqr (NM_009702.1,2134-2152).
ccgaaggagaataacttca

SEQ ID NO: 699796 - DNA, 19 bp, Mus musculus
  siRNA target sequence for Aqr (NM_009702.1,2135-2153).
cgaaggagaataacttcaa

SEQ ID NO: 699797 - DNA, 19 bp, Mus musculus
  siRNA target sequence for Aqr (NM_009702.1,2204-2222).
cggactggctgcatgacat

SEQ ID NO: 699798 - DNA, 19 bp, Mus musculus
  siRNA target sequence for Aqr (NM_009702.1,2208-2226).
ctggctgcatgacatcatt

SEQ ID NO: 699799 - DNA, 19 bp, Mus musculus
  siRNA target sequence for Aqr (NM_009702.1,2232-2250).
ctatggggacccaagtagt

SEQ ID NO: 699800 - DNA, 19 bp, Mus musculus
  siRNA target sequence for Aqr (NM_009702.1,2241-2259).
cccaagtagtgcccattat

SEQ ID NO: 699801 - DNA, 19 bp, Mus musculus
  siRNA target sequence for Aqr (NM_009702.1,2242-2260).
ccaagtagtgcccattatt

SEQ ID NO: 699802 - DNA, 19 bp, Mus musculus
  siRNA target sequence for Aqr (NM_009702.1,2249-2267).
gtgcccattattcaaaaat

SEQ ID NO: 699803 - DNA, 19 bp, Mus musculus
  siRNA target sequence for Aqr (NM_009702.1,2289-2307).
ggatttcaatgacactttt

SEQ ID NO: 699804 - DNA, 19 bp, Mus musculus
  siRNA target sequence for Aqr (NM_009702.1,2339-2357).
ctggtcataatgtcaaagt

SEQ ID NO: 699805 - DNA, 19 bp, Mus musculus
  siRNA target sequence for Aqr (NM_009702.1,2379-2397).
ccaaatcccccctttcaga

SEQ ID NO: 699806 - DNA, 19 bp, Mus musculus
  siRNA target sequence for Aqr (NM_009702.1,2467-2485).
gaagaagcaaagaccttaa

SEQ ID NO: 699807 - DNA, 19 bp, Mus musculus
  siRNA target sequence for Aqr (NM_009702.1,2513-2531).
gaggcccttatccttacaa

SEQ ID NO: 699808 - DNA, 19 bp, Mus musculus
  siRNA target sequence for Aqr (NM_009702.1,2529-2547).
caaccagcccaaacgtaat

SEQ ID NO: 699809 - DNA, 19 bp, Mus musculus
  siRNA target sequence for Aqr (NM_009702.1,2533-2551).
cagcccaaacgtaatacaa

SEQ ID NO: 699810 - DNA, 19 bp, Mus musculus
  siRNA target sequence for Aqr (NM_009702.1,2647-2665).
gttgcagtccagatcatat

SEQ ID NO: 699811 - DNA, 19 bp, Mus musculus
  siRNA target sequence for Aqr (NM_009702.1,2651-2669).
cagtccagatcatatccaa

SEQ ID NO: 699812 - DNA, 19 bp, Mus musculus
  siRNA target sequence for Aqr (NM_009702.1,2655-2673).
ccagatcatatccaacatt

SEQ ID NO: 699813 - DNA, 19 bp, Mus musculus
  siRNA target sequence for Aqr (NM_009702.1,2656-2674).
cagatcatatccaacattt

SEQ ID NO: 699814 - DNA, 19 bp, Mus musculus
  siRNA target sequence for Aqr (NM_009702.1,2687-2705).
cagaacagaggactttaat

SEQ ID NO: 699815 - DNA, 19 bp, Mus musculus
  siRNA target sequence for Aqr (NM_009702.1,2751-2769).
catggctttagacattgat

SEQ ID NO: 699816 - DNA, 19 bp, Mus musculus
  siRNA target sequence for Aqr (NM_009702.1,2831-2849).
gcaggtatggaagagttaa

SEQ ID NO: 699817 - DNA, 19 bp, Mus musculus
  siRNA target sequence for Aqr (NM_009702.1,2834-2852).
ggtatggaagagttaatta

SEQ ID NO: 699818 - DNA, 19 bp, Mus musculus
  siRNA target sequence for Aqr (NM_009702.1,2856-2874).
cctagctcgaagaatagaa

SEQ ID NO: 699819 - DNA, 19 bp, Mus musculus
  siRNA target sequence for Aqr (NM_009702.1,2860-2878).
gctcgaagaatagaacttt

SEQ ID NO: 699820 - DNA, 19 bp, Mus musculus
  siRNA target sequence for Aqr (NM_009702.1,2861-2879).
ctcgaagaatagaactttt

SEQ ID NO: 699821 - DNA, 19 bp, Mus musculus
  siRNA target sequence for Aqr (NM_009702.1,2864-2882).
gaagaatagaacttttaga

SEQ ID NO: 699822 - DNA, 19 bp, Mus musculus
  siRNA target sequence for Aqr (NM_009702.1,2884-2902).
gaagtcaaacggttacaaa

SEQ ID NO: 699823 - DNA, 19 bp, Mus musculus
  siRNA target sequence for Aqr (NM_009702.1,2889-2907).
caaacggttacaaaagagt

SEQ ID NO: 699824 - DNA, 19 bp, Mus musculus
  siRNA target sequence for Aqr (NM_009702.1,2917-2935).
cccggagatgcttcgtata

SEQ ID NO: 699825 - DNA, 19 bp, Mus musculus
  siRNA target sequence for Aqr (NM_009702.1,2920-2938).
ggagatgcttcgtatacct

SEQ ID NO: 699826 - DNA, 19 bp, Mus musculus
  siRNA target sequence for Aqr (NM_009702.1,2926-2944).
gcttcgtatacctgtgaaa

SEQ ID NO: 699827 - DNA, 19 bp, Mus musculus
  siRNA target sequence for Aqr (NM_009702.1,2939-2957).
gtgaaactgccggctattt

SEQ ID NO: 699828 - DNA, 19 bp, Mus musculus
  siRNA target sequence for Aqr (NM_009702.1,2947-2965).
gccggctatttcttcttat

SEQ ID NO: 699829 - DNA, 19 bp, Mus musculus
  siRNA target sequence for Aqr (NM_009702.1,2948-2966).
ccggctatttcttcttata

SEQ ID NO: 699830 - DNA, 19 bp, Mus musculus
  siRNA target sequence for Aqr (NM_009702.1,2978-2996).
cccgctgggaagaatacat

SEQ ID NO: 699831 - DNA, 19 bp, Mus musculus
  siRNA target sequence for Aqr (NM_009702.1,3094-3112).
gctcctcagcccatcttta

SEQ ID NO: 699832 - DNA, 19 bp, Mus musculus
  siRNA target sequence for Aqr (NM_009702.1,3223-3241).
ggactggacagatccaaat

SEQ ID NO: 699833 - DNA, 19 bp, Mus musculus
  siRNA target sequence for Aqr (NM_009702.1,3261-3279).
caaaatcatcgctatgaca

SEQ ID NO: 699834 - DNA, 19 bp, Mus musculus
  siRNA target sequence for Aqr (NM_009702.1,3267-3285).
catcgctatgacatgtact

SEQ ID NO: 699835 - DNA, 19 bp, Mus musculus
  siRNA target sequence for Aqr (NM_009702.1,3270-3288).
cgctatgacatgtactcat

SEQ ID NO: 699836 - DNA, 19 bp, Mus musculus
  siRNA target sequence for Aqr (NM_009702.1,3302-3320).
gacacgacttggtcaagtt

SEQ ID NO: 699837 - DNA, 19 bp, Mus musculus
  siRNA target sequence for Aqr (NM_009702.1,3313-3331).
gtcaagttgggtttcaagt

SEQ ID NO: 699838 - DNA, 19 bp, Mus musculus
  siRNA target sequence for Aqr (NM_009702.1,3315-3333).
caagttgggtttcaagtat

SEQ ID NO: 699839 - DNA, 19 bp, Mus musculus
  siRNA target sequence for Aqr (NM_009702.1,3361-3379).
cagattctggagatcgaaa

SEQ ID NO: 699840 - DNA, 19 bp, Mus musculus
  siRNA target sequence for Aqr (NM_009702.1,3367-3385).
ctggagatcgaaaccttta

SEQ ID NO: 699841 - DNA, 19 bp, Mus musculus
  siRNA target sequence for Aqr (NM_009702.1,3424-3442).
cgattgaaacggtggatta

SEQ ID NO: 699842 - DNA, 19 bp, Mus musculus
  siRNA target sequence for Aqr (NM_009702.1,3425-3443).
gattgaaacggtggattat

SEQ ID NO: 699843 - DNA, 19 bp, Mus musculus
  siRNA target sequence for Aqr (NM_009702.1,3429-3447).
gaaacggtggattatgatt

SEQ ID NO: 699844 - DNA, 19 bp, Mus musculus
  siRNA target sequence for Aqr (NM_009702.1,3459-3477).
ccaattgcctccagtcatt

SEQ ID NO: 699845 - DNA, 19 bp, Mus musculus
  siRNA target sequence for Aqr (NM_009702.1,3581-3599).
ccagggcaagcttgtgtaa

SEQ ID NO: 699846 - DNA, 19 bp, Mus musculus
  siRNA target sequence for Aqr (NM_009702.1,3590-3608).
gcttgtgtaacctctacaa

SEQ ID NO: 699847 - DNA, 19 bp, Mus musculus
  siRNA target sequence for Aqr (NM_009702.1,3603-3621).
ctacaactggcgctacaaa

SEQ ID NO: 699848 - DNA, 19 bp, Mus musculus
  siRNA target sequence for Aqr (NM_009702.1,3609-3627).
ctggcgctacaaaaaccta

SEQ ID NO: 699849 - DNA, 19 bp, Mus musculus
  siRNA target sequence for Aqr (NM_009702.1,3737-3755).
cggagcctaacccttactt

SEQ ID NO: 699850 - DNA, 19 bp, Mus musculus
  siRNA target sequence for Aqr (NM_009702.1,3739-3757).
gagcctaacccttacttct

SEQ ID NO: 699851 - DNA, 19 bp, Mus musculus
  siRNA target sequence for Aqr (NM_009702.1,3784-3802).
gtagtggcgctcttcatgt

SEQ ID NO: 699852 - DNA, 19 bp, Mus musculus
  siRNA target sequence for Aqr (NM_009702.1,3790-3808).
gcgctcttcatgtacatgt

SEQ ID NO: 699853 - DNA, 19 bp, Mus musculus
  siRNA target sequence for Aqr (NM_009702.1,3818-3836).
gttaccctgcagacaagat

SEQ ID NO: 699854 - DNA, 19 bp, Mus musculus
  siRNA target sequence for Aqr (NM_009702.1,3827-3845).
cagacaagatcagtattct

SEQ ID NO: 699855 - DNA, 19 bp, Mus musculus
  siRNA target sequence for Aqr (NM_009702.1,3829-3847).
gacaagatcagtattctaa

SEQ ID NO: 699856 - DNA, 19 bp, Mus musculus
  siRNA target sequence for Aqr (NM_009702.1,3894-3912).
gcgctgtgggaataatcca

SEQ ID NO: 699857 - DNA, 19 bp, Mus musculus
  siRNA target sequence for Aqr (NM_009702.1,3915-3933).
gattggaaggccaaacaaa

SEQ ID NO: 699858 - DNA, 19 bp, Mus musculus
  siRNA target sequence for Aqr (NM_009702.1,3955-3973).
cagggtcagcagaacgatt

SEQ ID NO: 699859 - DNA, 19 bp, Mus musculus
  siRNA target sequence for Aqr (NM_009702.1,3957-3975).
gggtcagcagaacgattat

SEQ ID NO: 699860 - DNA, 19 bp, Mus musculus
  siRNA target sequence for Aqr (NM_009702.1,3958-3976).
ggtcagcagaacgattata

SEQ ID NO: 699861 - DNA, 19 bp, Mus musculus
  siRNA target sequence for Aqr (NM_009702.1,3959-3977).
gtcagcagaacgattatat

SEQ ID NO: 699862 - DNA, 19 bp, Mus musculus
  siRNA target sequence for Aqr (NM_009702.1,4144-4162).
ccactgcatttgcatatca

SEQ ID NO: 699863 - DNA, 19 bp, Mus musculus
  siRNA target sequence for Aqr (NM_009702.1,4145-4163).
cactgcatttgcatatcat

SEQ ID NO: 699864 - DNA, 19 bp, Mus musculus
  siRNA target sequence for Aqr (NM_009702.1,4211-4229).
ctcatgaagtgcaggtaat

SEQ ID NO: 699865 - DNA, 19 bp, Mus musculus
  siRNA target sequence for Aqr (NM_009702.1,4213-4231).
catgaagtgcaggtaatta

SEQ ID NO: 699866 - DNA, 19 bp, Mus musculus
  siRNA target sequence for Aqr (NM_009702.1,4216-4234).
gaagtgcaggtaattaaga

SEQ ID NO: 699867 - DNA, 19 bp, Mus musculus
  siRNA target sequence for Aqr (NM_009702.1,4241-4259).
cccagatggcgaactttgt

SEQ ID NO: 699868 - DNA, 19 bp, Mus musculus
  siRNA target sequence for Aqr (NM_009702.1,4249-4267).
gcgaactttgtgtacaaca

SEQ ID NO: 699869 - DNA, 19 bp, Mus musculus
  siRNA target sequence for Aqr (NM_009702.1,4250-4268).
cgaactttgtgtacaacat

SEQ ID NO: 699870 - DNA, 19 bp, Mus musculus
  siRNA target sequence for Aqr (NM_009702.1,4287-4305).
gactacccatcattatcat

SEQ ID NO: 699871 - DNA, 19 bp, Mus musculus
  siRNA target sequence for Aqr (NM_009702.1,4497-4515).
ctctgccccgtgtgacatt

SEQ ID NO: 699872 - DNA, 19 bp, Mus musculus
  siRNA target sequence for Neurog3 (NM_009719.4,492-510).
gcgcaagaaggccaatgat

SEQ ID NO: 699873 - DNA, 19 bp, Mus musculus
  siRNA target sequence for Neurog3 (NM_009719.4,579-597).
cccggatgacgccaaactt

SEQ ID NO: 699874 - DNA, 19 bp, Mus musculus
  siRNA target sequence for Neurog3 (NM_009719.4,580-598).
ccggatgacgccaaactta

SEQ ID NO: 699875 - DNA, 19 bp, Mus musculus
  siRNA target sequence for Neurog3 (NM_009719.4,582-600).
ggatgacgccaaacttaca

SEQ ID NO: 699876 - DNA, 19 bp, Mus musculus
  siRNA target sequence for Neurog3 (NM_009719.4,583-601).
gatgacgccaaacttacaa

SEQ ID NO: 699877 - DNA, 19 bp, Mus musculus
  siRNA target sequence for Neurog3 (NM_009719.4,828-846).
gcccagctccccatcctat

SEQ ID NO: 699878 - DNA, 19 bp, Mus musculus
  siRNA target sequence for Bcl7b (NM_009745.1,133-151).
gatacctccctgaggatat

SEQ ID NO: 699879 - DNA, 19 bp, Mus musculus
  siRNA target sequence for Bcl7b (NM_009745.1,192-210).
gtcaaaatcgaataataca

SEQ ID NO: 699880 - DNA, 19 bp, Mus musculus
  siRNA target sequence for Bcl7b (NM_009745.1,257-275).
cctccctcctccttgaatt

SEQ ID NO: 699881 - DNA, 19 bp, Mus musculus
  siRNA target sequence for Bcl7b (NM_009745.1,302-320).
ctgtgtcggatgtctatca

SEQ ID NO: 699882 - DNA, 19 bp, Mus musculus
  siRNA target sequence for Bcl7b (NM_009745.1,308-326).
cggatgtctatcaactcaa

SEQ ID NO: 699883 - DNA, 19 bp, Mus musculus
  siRNA target sequence for Bcl7b (NM_009745.1,556-574).
ggtgctccgcccttgaaga

SEQ ID NO: 699884 - DNA, 19 bp, Mus musculus
  siRNA target sequence for Bcl7b (NM_009745.1,559-577).
gctccgcccttgaagagat

SEQ ID NO: 699885 - DNA, 19 bp, Mus musculus
  siRNA target sequence for Bcl7b (NM_009745.1,562-580).
ccgcccttgaagagattct

SEQ ID NO: 699886 - DNA, 19 bp, Mus musculus
  siRNA target sequence for Bex2 (NM_009749.1,151-169).
gtggaacaaggcgtgaaaa

SEQ ID NO: 699887 - DNA, 19 bp, Mus musculus
  siRNA target sequence for Bex2 (NM_009749.1,220-238).
ccacaggatgctagcaaaa

SEQ ID NO: 699888 - DNA, 19 bp, Mus musculus
  siRNA target sequence for Bex2 (NM_009749.1,322-340).
cccatcgtgcactacagat

SEQ ID NO: 699889 - DNA, 19 bp, Mus musculus
  siRNA target sequence for Bfsp1 (NM_009751.1,340-358).
gacgagttccgcagcaaat

SEQ ID NO: 699890 - DNA, 19 bp, Mus musculus
  siRNA target sequence for Bfsp1 (NM_009751.1,345-363).
gttccgcagcaaatacgaa

SEQ ID NO: 699891 - DNA, 19 bp, Mus musculus
  siRNA target sequence for Bfsp1 (NM_009751.1,377-395).
gtcagttggtgctaaagga

SEQ ID NO: 699892 - DNA, 19 bp, Mus musculus
  siRNA target sequence for Bfsp1 (NM_009751.1,635-653).
cggccctggaacaagctat

SEQ ID NO: 699893 - DNA, 19 bp, Mus musculus
  siRNA target sequence for Bfsp1 (NM_009751.1,637-655).
gccctggaacaagctatta

SEQ ID NO: 699894 - DNA, 19 bp, Mus musculus
  siRNA target sequence for Bfsp1 (NM_009751.1,638-656).
ccctggaacaagctattaa

SEQ ID NO: 699895 - DNA, 19 bp, Mus musculus
  siRNA target sequence for Bfsp1 (NM_009751.1,751-769).
gagaggtcgtcctatgact

SEQ ID NO: 699896 - DNA, 19 bp, Mus musculus
  siRNA target sequence for Bfsp1 (NM_009751.1,816-834).
ccgttatcatcggatcatt

SEQ ID NO: 699897 - DNA, 19 bp, Mus musculus
  siRNA target sequence for Bfsp1 (NM_009751.1,818-836).
gttatcatcggatcattga

SEQ ID NO: 699898 - DNA, 19 bp, Mus musculus
  siRNA target sequence for Bfsp1 (NM_009751.1,918-936).
ccttggatccagtgtgaaa

SEQ ID NO: 699899 - DNA, 19 bp, Mus musculus
  siRNA target sequence for Bfsp1 (NM_009751.1,945-963).
cagggccgtgcaggatatt

SEQ ID NO: 699900 - DNA, 19 bp, Mus musculus
  siRNA target sequence for Bfsp1 (NM_009751.1,948-966).
ggccgtgcaggatattaca

SEQ ID NO: 699901 - DNA, 19 bp, Mus musculus
  siRNA target sequence for Bfsp1 (NM_009751.1,957-975).
ggatattacagcagctaaa

SEQ ID NO: 699902 - DNA, 19 bp, Mus musculus
  siRNA target sequence for Bfsp1 (NM_009751.1,1017-1035).
ggagattatagctcaagat

SEQ ID NO: 699903 - DNA, 19 bp, Mus musculus
  siRNA target sequence for Bfsp1 (NM_009751.1,1018-1036).
gagattatagctcaagata

SEQ ID NO: 699904 - DNA, 19 bp, Mus musculus
  siRNA target sequence for Bfsp1 (NM_009751.1,1220-1238).
ggaaactgtgcaaagtagt

SEQ ID NO: 699905 - DNA, 19 bp, Mus musculus
  siRNA target sequence for Bfsp1 (NM_009751.1,1298-1316).
ccaaaggacggcatgtact

SEQ ID NO: 699906 - DNA, 19 bp, Mus musculus
  siRNA target sequence for Bfsp1 (NM_009751.1,1318-1336).
gtcacaggggagtctagtt

SEQ ID NO: 699907 - DNA, 19 bp, Mus musculus
  siRNA target sequence for Bfsp1 (NM_009751.1,1320-1338).
cacaggggagtctagtttt

SEQ ID NO: 699908 - DNA, 19 bp, Mus musculus
  siRNA target sequence for Bfsp1 (NM_009751.1,1378-1396).
ggtggggtggtgatttcca

SEQ ID NO: 699909 - DNA, 19 bp, Mus musculus
  siRNA target sequence for Bfsp1 (NM_009751.1,1629-1647).
catacctggtcctgatgaa

SEQ ID NO: 699910 - DNA, 19 bp, Mus musculus
  siRNA target sequence for Bfsp1 (NM_009751.1,1696-1714).
gtggggcctgcgagtaaga

SEQ ID NO: 699911 - DNA, 19 bp, Mus musculus
  siRNA target sequence for Bfsp1 (NM_009751.1,1742-1760).
cgaaggctctgtctattaa

SEQ ID NO: 699912 - DNA, 19 bp, Mus musculus
  siRNA target sequence for Bfsp1 (NM_009751.1,1859-1877).
caaagggcaacaagaaact

SEQ ID NO: 699913 - DNA, 19 bp, Mus musculus
  siRNA target sequence for Cacybp (NM_009786.1,115-133).
cttccgttttggaagagtt

SEQ ID NO: 699914 - DNA, 19 bp, Mus musculus
  siRNA target sequence for Cacybp (NM_009786.1,143-161).
cctagaagaggtcaaagta

SEQ ID NO: 699915 - DNA, 19 bp, Mus musculus
  siRNA target sequence for Cacybp (NM_009786.1,173-191).
gtccactaggaaaagacta

SEQ ID NO: 699916 - DNA, 19 bp, Mus musculus
  siRNA target sequence for Cacybp (NM_009786.1,189-207).
ctacgtgatactcttacaa

SEQ ID NO: 699917 - DNA, 19 bp, Mus musculus
  siRNA target sequence for Cacybp (NM_009786.1,357-375).
cagtcagataagtttgtga

SEQ ID NO: 699918 - DNA, 19 bp, Mus musculus
  siRNA target sequence for Cacybp (NM_009786.1,714-732).
gacggagacgatgatatga

SEQ ID NO: 699919 - DNA, 19 bp, Mus musculus
  siRNA target sequence for Cacybp (NM_009786.1,726-744).
gatatgaagcgaaccatta

SEQ ID NO: 699920 - DNA, 19 bp, Mus musculus
  siRNA target sequence for Calmbp1 (NM_009791.2,400-418).
gcgagctgaagcctaaaga

SEQ ID NO: 699921 - DNA, 19 bp, Mus musculus
  siRNA target sequence for Calmbp1 (NM_009791.2,401-419).
cgagctgaagcctaaagaa

SEQ ID NO: 699922 - DNA, 19 bp, Mus musculus
  siRNA target sequence for Calmbp1 (NM_009791.2,402-420).
gagctgaagcctaaagaaa

SEQ ID NO: 699923 - DNA, 19 bp, Mus musculus
  siRNA target sequence for Calmbp1 (NM_009791.2,412-430).
ctaaagaaaaacttaccat

SEQ ID NO: 699924 - DNA, 19 bp, Mus musculus
  siRNA target sequence for Calmbp1 (NM_009791.2,501-519).
ctgaagcaccaggctatat

SEQ ID NO: 699925 - DNA, 19 bp, Mus musculus
  siRNA target sequence for Calmbp1 (NM_009791.2,561-579).
ctttggaataccagtaaga

SEQ ID NO: 699926 - DNA, 19 bp, Mus musculus
  siRNA target sequence for Calmbp1 (NM_009791.2,744-762).
ccatccattagtcctatta

SEQ ID NO: 699927 - DNA, 19 bp, Mus musculus
  siRNA target sequence for Calmbp1 (NM_009791.2,748-766).
ccattagtcctattagaga

SEQ ID NO: 699928 - DNA, 19 bp, Mus musculus
  siRNA target sequence for Calmbp1 (NM_009791.2,804-822).
gagtccactgcctattcat

SEQ ID NO: 699929 - DNA, 19 bp, Mus musculus
  siRNA target sequence for Calmbp1 (NM_009791.2,809-827).
cactgcctattcatctctt

SEQ ID NO: 699930 - DNA, 19 bp, Mus musculus
  siRNA target sequence for Calmbp1 (NM_009791.2,900-918).
gaagtcgcaaatgaaactt

SEQ ID NO: 699931 - DNA, 19 bp, Mus musculus
  siRNA target sequence for Calmbp1 (NM_009791.2,968-986).
cacgcttgccccaaactgt

SEQ ID NO: 699932 - DNA, 19 bp, Mus musculus
  siRNA target sequence for Calmbp1 (NM_009791.2,1022-1040).
ctttctaagtccagattct

SEQ ID NO: 699933 - DNA, 19 bp, Mus musculus
  siRNA target sequence for Calmbp1 (NM_009791.2,1054-1072).
ggtatacgtctgataatga

SEQ ID NO: 699934 - DNA, 19 bp, Mus musculus
  siRNA target sequence for Calmbp1 (NM_009791.2,1116-1134).
gatcccgcagagtctgtat

SEQ ID NO: 699935 - DNA, 19 bp, Mus musculus
  siRNA target sequence for Calmbp1 (NM_009791.2,1212-1230).
cttaaaaaagggctaaact

SEQ ID NO: 699936 - DNA, 19 bp, Mus musculus
  siRNA target sequence for Calmbp1 (NM_009791.2,1247-1265).
cgttttgtcgccaacacaa

SEQ ID NO: 699937 - DNA, 19 bp, Mus musculus
  siRNA target sequence for Calmbp1 (NM_009791.2,1248-1266).
gttttgtcgccaacacaat

SEQ ID NO: 699938 - DNA, 19 bp, Mus musculus
  siRNA target sequence for Calmbp1 (NM_009791.2,1255-1273).
cgccaacacaatttgtaaa

SEQ ID NO: 699939 - DNA, 19 bp, Mus musculus
  siRNA target sequence for Calmbp1 (NM_009791.2,1483-1501).
ctttttgtcaccagagtaa

SEQ ID NO: 699940 - DNA, 19 bp, Mus musculus
  siRNA target sequence for Calmbp1 (NM_009791.2,1511-1529).
caagagacgcccaattctt

SEQ ID NO: 699941 - DNA, 19 bp, Mus musculus
  siRNA target sequence for Calmbp1 (NM_009791.2,1533-1551).
gccactgttacgaaaagga

SEQ ID NO: 699942 - DNA, 19 bp, Mus musculus
  siRNA target sequence for Calmbp1 (NM_009791.2,1646-1664).
gggtagcctgagagagaaa

SEQ ID NO: 699943 - DNA, 19 bp, Mus musculus
  siRNA target sequence for Calmbp1 (NM_009791.2,1691-1709).
ggagccaggagtgagtaaa

SEQ ID NO: 699944 - DNA, 19 bp, Mus musculus
  siRNA target sequence for Calmbp1 (NM_009791.2,1694-1712).
gccaggagtgagtaaagct

SEQ ID NO: 699945 - DNA, 19 bp, Mus musculus
  siRNA target sequence for Calmbp1 (NM_009791.2,1749-1767).
gtcgttgctcggaaaagaa

SEQ ID NO: 699946 - DNA, 19 bp, Mus musculus
  siRNA target sequence for Calmbp1 (NM_009791.2,1833-1851).
gaagtcaaacgaatccatt

SEQ ID NO: 699947 - DNA, 19 bp, Mus musculus
  siRNA target sequence for Calmbp1 (NM_009791.2,1838-1856).
caaacgaatccatttttct

SEQ ID NO: 699948 - DNA, 19 bp, Mus musculus
  siRNA target sequence for Calmbp1 (NM_009791.2,1938-1956).
cggtcaggcctgaagaaga

SEQ ID NO: 699949 - DNA, 19 bp, Mus musculus
  siRNA target sequence for Calmbp1 (NM_009791.2,2022-2040).
gctgtagcacagtctcatt

SEQ ID NO: 699950 - DNA, 19 bp, Mus musculus
  siRNA target sequence for Calmbp1 (NM_009791.2,2025-2043).
gtagcacagtctcatttga

SEQ ID NO: 699951 - DNA, 19 bp, Mus musculus
  siRNA target sequence for Calmbp1 (NM_009791.2,2033-2051).
gtctcatttgacctttata

SEQ ID NO: 699952 - DNA, 19 bp, Mus musculus
  siRNA target sequence for Calmbp1 (NM_009791.2,2136-2154).
caggaacagggcttcactt

SEQ ID NO: 699953 - DNA, 19 bp, Mus musculus
  siRNA target sequence for Calmbp1 (NM_009791.2,2147-2165).
cttcacttggtggctaaat

SEQ ID NO: 699954 - DNA, 19 bp, Mus musculus
  siRNA target sequence for Calmbp1 (NM_009791.2,2156-2174).
gtggctaaattatatatta

SEQ ID NO: 699955 - DNA, 19 bp, Mus musculus
  siRNA target sequence for Calmbp1 (NM_009791.2,2189-2207).
cactgtaaaaaccaatgtt

SEQ ID NO: 699956 - DNA, 19 bp, Mus musculus
  siRNA target sequence for Calmbp1 (NM_009791.2,2238-2256).
ggagcggaaagccaacata

SEQ ID NO: 699957 - DNA, 19 bp, Mus musculus
  siRNA target sequence for Calmbp1 (NM_009791.2,2239-2257).
gagcggaaagccaacataa

SEQ ID NO: 699958 - DNA, 19 bp, Mus musculus
  siRNA target sequence for Calmbp1 (NM_009791.2,2241-2259).
gcggaaagccaacataaaa

SEQ ID NO: 699959 - DNA, 19 bp, Mus musculus
  siRNA target sequence for Calmbp1 (NM_009791.2,2269-2287).
cgaaagcacctactaaaga

SEQ ID NO: 699960 - DNA, 19 bp, Mus musculus
  siRNA target sequence for Calmbp1 (NM_009791.2,2294-2312).
gtctctcagagcttataca

SEQ ID NO: 699961 - DNA, 19 bp, Mus musculus
  siRNA target sequence for Calmbp1 (NM_009791.2,2313-2331).
gccagctgcaggctgaata

SEQ ID NO: 699962 - DNA, 19 bp, Mus musculus
  siRNA target sequence for Calmbp1 (NM_009791.2,2318-2336).
ctgcaggctgaatagatta

SEQ ID NO: 699963 - DNA, 19 bp, Mus musculus
  siRNA target sequence for Calmbp1 (NM_009791.2,2353-2371).
ccttgtttacttctgaaaa

SEQ ID NO: 699964 - DNA, 19 bp, Mus musculus
  siRNA target sequence for Calmbp1 (NM_009791.2,2354-2372).
cttgtttacttctgaaaaa

SEQ ID NO: 699965 - DNA, 19 bp, Mus musculus
  siRNA target sequence for Calmbp1 (NM_009791.2,2393-2411).
ggttgaaatcgaaattgaa

SEQ ID NO: 699966 - DNA, 19 bp, Mus musculus
  siRNA target sequence for Calmbp1 (NM_009791.2,2419-2437).
ggctacttgttcgaaaaga

SEQ ID NO: 699967 - DNA, 19 bp, Mus musculus
  siRNA target sequence for Calmbp1 (NM_009791.2,2439-2457).
cgacacctctggaaagata

SEQ ID NO: 699968 - DNA, 19 bp, Mus musculus
  siRNA target sequence for Calmbp1 (NM_009791.2,2440-2458).
gacacctctggaaagatat

SEQ ID NO: 699969 - DNA, 19 bp, Mus musculus
  siRNA target sequence for Calmbp1 (NM_009791.2,2486-2504).
gctcttgtcatataatcct

SEQ ID NO: 699970 - DNA, 19 bp, Mus musculus
  siRNA target sequence for Calmbp1 (NM_009791.2,2530-2548).
cagtttttggagaactgat

SEQ ID NO: 699971 - DNA, 19 bp, Mus musculus
  siRNA target sequence for Calmbp1 (NM_009791.2,2575-2593).
cgggattggcgatgttcat

SEQ ID NO: 699972 - DNA, 19 bp, Mus musculus
  siRNA target sequence for Calmbp1 (NM_009791.2,2576-2594).
gggattggcgatgttcatt

SEQ ID NO: 699973 - DNA, 19 bp, Mus musculus
  siRNA target sequence for Calmbp1 (NM_009791.2,2578-2596).
gattggcgatgttcattct

SEQ ID NO: 699974 - DNA, 19 bp, Mus musculus
  siRNA target sequence for Calmbp1 (NM_009791.2,2582-2600).
ggcgatgttcattctgaat

SEQ ID NO: 699975 - DNA, 19 bp, Mus musculus
  siRNA target sequence for Calmbp1 (NM_009791.2,2591-2609).
cattctgaatcgcttactt

SEQ ID NO: 699976 - DNA, 19 bp, Mus musculus
  siRNA target sequence for Calmbp1 (NM_009791.2,2619-2637).
gacatagcagctgaatata

SEQ ID NO: 699977 - DNA, 19 bp, Mus musculus
  siRNA target sequence for Calmbp1 (NM_009791.2,2621-2639).
catagcagctgaatataga

SEQ ID NO: 699978 - DNA, 19 bp, Mus musculus
  siRNA target sequence for Calmbp1 (NM_009791.2,2660-2678).
gtttcgggatggtcatgaa

SEQ ID NO: 699979 - DNA, 19 bp, Mus musculus
  siRNA target sequence for Calmbp1 (NM_009791.2,2676-2694).
gaagcagccttgtctaagt

SEQ ID NO: 699980 - DNA, 19 bp, Mus musculus
  siRNA target sequence for Calmbp1 (NM_009791.2,2679-2697).
gcagccttgtctaagttca

SEQ ID NO: 699981 - DNA, 19 bp, Mus musculus
  siRNA target sequence for Calmbp1 (NM_009791.2,2687-2705).
gtctaagttcacattgaaa

SEQ ID NO: 699982 - DNA, 19 bp, Mus musculus
  siRNA target sequence for Calmbp1 (NM_009791.2,2725-2743).
gtttccttgatcatgctaa

SEQ ID NO: 699983 - DNA, 19 bp, Mus musculus
  siRNA target sequence for Calmbp1 (NM_009791.2,2733-2751).
gatcatgctaaaatttcca

SEQ ID NO: 699984 - DNA, 19 bp, Mus musculus
  siRNA target sequence for Calmbp1 (NM_009791.2,2740-2758).
ctaaaatttccagacttat

SEQ ID NO: 699985 - DNA, 19 bp, Mus musculus
  siRNA target sequence for Calmbp1 (NM_009791.2,2749-2767).
ccagacttattgatcatga

SEQ ID NO: 699986 - DNA, 19 bp, Mus musculus
  siRNA target sequence for Calmbp1 (NM_009791.2,2750-2768).
cagacttattgatcatgat

SEQ ID NO: 699987 - DNA, 19 bp, Mus musculus
  siRNA target sequence for Calmbp1 (NM_009791.2,2803-2821).
ctagcaaagagcttcttct

SEQ ID NO: 699988 - DNA, 19 bp, Mus musculus
  siRNA target sequence for Calmbp1 (NM_009791.2,2900-2918).
cgttcagacaccacttgat

SEQ ID NO: 699989 - DNA, 19 bp, Mus musculus
  siRNA target sequence for Calmbp1 (NM_009791.2,2908-2926).
caccacttgatgaatttga

SEQ ID NO: 699990 - DNA, 19 bp, Mus musculus
  siRNA target sequence for Calmbp1 (NM_009791.2,3007-3025).
ggaatctgtccgacaaact

SEQ ID NO: 699991 - DNA, 19 bp, Mus musculus
  siRNA target sequence for Calmbp1 (NM_009791.2,3026-3044).
caggatccctgcaataagt

SEQ ID NO: 699992 - DNA, 19 bp, Mus musculus
  siRNA target sequence for Calmbp1 (NM_009791.2,3128-3146).
cgctatctcgtctaaggat

SEQ ID NO: 699993 - DNA, 19 bp, Mus musculus
  siRNA target sequence for Calmbp1 (NM_009791.2,3210-3228).
gtggatatttcccttaatt

SEQ ID NO: 699994 - DNA, 19 bp, Mus musculus
  siRNA target sequence for Calmbp1 (NM_009791.2,3220-3238).
cccttaatttagatcaatt

SEQ ID NO: 699995 - DNA, 19 bp, Mus musculus
  siRNA target sequence for Calmbp1 (NM_009791.2,3306-3324).
ccttcacaagctattacta

SEQ ID NO: 699996 - DNA, 19 bp, Mus musculus
  siRNA target sequence for Calmbp1 (NM_009791.2,3386-3404).
gttgatggattgggtaaat

SEQ ID NO: 699997 - DNA, 19 bp, Mus musculus
  siRNA target sequence for Calmbp1 (NM_009791.2,3405-3423).
gcagtttgtgccttctata

SEQ ID NO: 699998 - DNA, 19 bp, Mus musculus
  siRNA target sequence for Calmbp1 (NM_009791.2,3475-3493).
gctatttgatccaccatta

SEQ ID NO: 699999 - DNA, 19 bp, Mus musculus
  siRNA target sequence for Calmbp1 (NM_009791.2,3500-3518).
gtgctatgtgcctttcgat

SEQ ID NO: 700000 - DNA, 19 bp, Mus musculus
  siRNA target sequence for Calmbp1 (NM_009791.2,3507-3525).
gtgcctttcgatgctatat

SEQ ID NO: 700001 - DNA, 19 bp, Mus musculus
  siRNA target sequence for Calmbp1 (NM_009791.2,3564-3582).
ggttcagtggtattgaatt

SEQ ID NO: 700002 - DNA, 19 bp, Mus musculus
  siRNA target sequence for Calmbp1 (NM_009791.2,3627-3645).
gcgcttgatcacgaaagta

SEQ ID NO: 700003 - DNA, 19 bp, Mus musculus
  siRNA target sequence for Calmbp1 (NM_009791.2,3639-3657).
gaaagtactccagaaatgt

SEQ ID NO: 700004 - DNA, 19 bp, Mus musculus
  siRNA target sequence for Calmbp1 (NM_009791.2,3643-3661).
gtactccagaaatgtacaa

SEQ ID NO: 700005 - DNA, 19 bp, Mus musculus
  siRNA target sequence for Calmbp1 (NM_009791.2,3732-3750).
cctgctatgattcatcatt

SEQ ID NO: 700006 - DNA, 19 bp, Mus musculus
  siRNA target sequence for Calmbp1 (NM_009791.2,3755-3773).
catgtcaaatacaattcca

SEQ ID NO: 700007 - DNA, 19 bp, Mus musculus
  siRNA target sequence for Calmbp1 (NM_009791.2,3783-3801).
gtggttatcacctatttgt

SEQ ID NO: 700008 - DNA, 19 bp, Mus musculus
  siRNA target sequence for Calmbp1 (NM_009791.2,3785-3803).
ggttatcacctatttgtca

SEQ ID NO: 700009 - DNA, 19 bp, Mus musculus
  siRNA target sequence for Calmbp1 (NM_009791.2,3786-3804).
gttatcacctatttgtcat

SEQ ID NO: 700010 - DNA, 19 bp, Mus musculus
  siRNA target sequence for Calmbp1 (NM_009791.2,3824-3842).
ggatctccgtaaagaaata

SEQ ID NO: 700011 - DNA, 19 bp, Mus musculus
  siRNA target sequence for Calmbp1 (NM_009791.2,3825-3843).
gatctccgtaaagaaataa

SEQ ID NO: 700012 - DNA, 19 bp, Mus musculus
  siRNA target sequence for Calmbp1 (NM_009791.2,3852-3870).
cgacttatacagacaacat

SEQ ID NO: 700013 - DNA, 19 bp, Mus musculus
  siRNA target sequence for Calmbp1 (NM_009791.2,3964-3982).
gtagacgaagattgcaaaa

SEQ ID NO: 700014 - DNA, 19 bp, Mus musculus
  siRNA target sequence for Calmbp1 (NM_009791.2,3967-3985).
gacgaagattgcaaaaaaa

SEQ ID NO: 700015 - DNA, 19 bp, Mus musculus
  siRNA target sequence for Calmbp1 (NM_009791.2,3996-4014).
gctctggtcattcagaaat

SEQ ID NO: 700016 - DNA, 19 bp, Mus musculus
  siRNA target sequence for Calmbp1 (NM_009791.2,4043-4061).
gttgcggatgctgaaaaat

SEQ ID NO: 700017 - DNA, 19 bp, Mus musculus
  siRNA target sequence for Calmbp1 (NM_009791.2,4068-4086).
ctggcaaaacttcaaaata

SEQ ID NO: 700018 - DNA, 19 bp, Mus musculus
  siRNA target sequence for Calmbp1 (NM_009791.2,4098-4116).
ctcattcaggcttattgga

SEQ ID NO: 700019 - DNA, 19 bp, Mus musculus
  siRNA target sequence for Calmbp1 (NM_009791.2,4145-4163).
gaggttgaagcactattca

SEQ ID NO: 700020 - DNA, 19 bp, Mus musculus
  siRNA target sequence for Calmbp1 (NM_009791.2,4147-4165).
ggttgaagcactattcagt

SEQ ID NO: 700021 - DNA, 19 bp, Mus musculus
  siRNA target sequence for Calmbp1 (NM_009791.2,4169-4187).
ccttcagtctaggataaga

SEQ ID NO: 700022 - DNA, 19 bp, Mus musculus
  siRNA target sequence for Calmbp1 (NM_009791.2,4200-4218).
cttacatcttacaaacgat

SEQ ID NO: 700023 - DNA, 19 bp, Mus musculus
  siRNA target sequence for Calmbp1 (NM_009791.2,4204-4222).
catcttacaaacgatatct

SEQ ID NO: 700024 - DNA, 19 bp, Mus musculus
  siRNA target sequence for Calmbp1 (NM_009791.2,4246-4264).
ggcattggcgtgcctattt

SEQ ID NO: 700025 - DNA, 19 bp, Mus musculus
  siRNA target sequence for Calmbp1 (NM_009791.2,4247-4265).
gcattggcgtgcctattta

SEQ ID NO: 700026 - DNA, 19 bp, Mus musculus
  siRNA target sequence for Calmbp1 (NM_009791.2,4248-4266).
cattggcgtgcctatttaa

SEQ ID NO: 700027 - DNA, 19 bp, Mus musculus
  siRNA target sequence for Calmbp1 (NM_009791.2,4306-4324).
cctcatcccttgtaatcca

SEQ ID NO: 700028 - DNA, 19 bp, Mus musculus
  siRNA target sequence for Calmbp1 (NM_009791.2,4312-4330).
cccttgtaatccagtttat

SEQ ID NO: 700029 - DNA, 19 bp, Mus musculus
  siRNA target sequence for Calmbp1 (NM_009791.2,4317-4335).
gtaatccagtttatgttca

SEQ ID NO: 700030 - DNA, 19 bp, Mus musculus
  siRNA target sequence for Calmbp1 (NM_009791.2,4348-4366).
gacgcaagctgcagttaca

SEQ ID NO: 700031 - DNA, 19 bp, Mus musculus
  siRNA target sequence for Calmbp1 (NM_009791.2,4389-4407).
cagcgagcttttagagaat

SEQ ID NO: 700032 - DNA, 19 bp, Mus musculus
  siRNA target sequence for Calmbp1 (NM_009791.2,4418-4436).
gaaacaaatacgagaaaga

SEQ ID NO: 700033 - DNA, 19 bp, Mus musculus
  siRNA target sequence for Calmbp1 (NM_009791.2,4435-4453).
gatccgctgttgtgataca

SEQ ID NO: 700034 - DNA, 19 bp, Mus musculus
  siRNA target sequence for Calmbp1 (NM_009791.2,4501-4519).
ggtcttgtgttattgtcat

SEQ ID NO: 700035 - DNA, 19 bp, Mus musculus
  siRNA target sequence for Calmbp1 (NM_009791.2,4537-4555).
gctttcaagcccaaaagtt

SEQ ID NO: 700036 - DNA, 19 bp, Mus musculus
  siRNA target sequence for Calmbp1 (NM_009791.2,4538-4556).
ctttcaagcccaaaagtta

SEQ ID NO: 700037 - DNA, 19 bp, Mus musculus
  siRNA target sequence for Calmbp1 (NM_009791.2,4622-4640).
gctagcacacgctgactat

SEQ ID NO: 700038 - DNA, 19 bp, Mus musculus
  siRNA target sequence for Calmbp1 (NM_009791.2,4623-4641).
ctagcacacgctgactatt

SEQ ID NO: 700039 - DNA, 19 bp, Mus musculus
  siRNA target sequence for Calmbp1 (NM_009791.2,4740-4758).
cagtcctattggagaatga

SEQ ID NO: 700040 - DNA, 19 bp, Mus musculus
  siRNA target sequence for Calmbp1 (NM_009791.2,4757-4775).
gagacaggaaagagttaga

SEQ ID NO: 700041 - DNA, 19 bp, Mus musculus
  siRNA target sequence for Calmbp1 (NM_009791.2,4805-4823).
gttgcaagcacacataaga

SEQ ID NO: 700042 - DNA, 19 bp, Mus musculus
  siRNA target sequence for Calmbp1 (NM_009791.2,4912-4930).
gggttctagcatcttatca

SEQ ID NO: 700043 - DNA, 19 bp, Mus musculus
  siRNA target sequence for Calmbp1 (NM_009791.2,4939-4957).
ggtcttcagtcattgttct

SEQ ID NO: 700044 - DNA, 19 bp, Mus musculus
  siRNA target sequence for Calmbp1 (NM_009791.2,4940-4958).
gtcttcagtcattgttcta

SEQ ID NO: 700045 - DNA, 19 bp, Mus musculus
  siRNA target sequence for Calmbp1 (NM_009791.2,4942-4960).
cttcagtcattgttctaca

SEQ ID NO: 700046 - DNA, 19 bp, Mus musculus
  siRNA target sequence for Calmbp1 (NM_009791.2,5004-5022).
gctttagcatccgttataa

SEQ ID NO: 700047 - DNA, 19 bp, Mus musculus
  siRNA target sequence for Calmbp1 (NM_009791.2,5005-5023).
ctttagcatccgttataaa

SEQ ID NO: 700048 - DNA, 19 bp, Mus musculus
  siRNA target sequence for Calmbp1 (NM_009791.2,5011-5029).
catccgttataaagattca

SEQ ID NO: 700049 - DNA, 19 bp, Mus musculus
  siRNA target sequence for Calmbp1 (NM_009791.2,5032-5050).
catattatcgggcttatat

SEQ ID NO: 700050 - DNA, 19 bp, Mus musculus
  siRNA target sequence for Calmbp1 (NM_009791.2,5118-5136).
caatcacggaagcagtatt

SEQ ID NO: 700051 - DNA, 19 bp, Mus musculus
  siRNA target sequence for Calmbp1 (NM_009791.2,5149-5167).
cagctgcactgtttatcca

SEQ ID NO: 700052 - DNA, 19 bp, Mus musculus
  siRNA target sequence for Calmbp1 (NM_009791.2,5171-5189).
gtggtaccgttcccaaaaa

SEQ ID NO: 700053 - DNA, 19 bp, Mus musculus
  siRNA target sequence for Calmbp1 (NM_009791.2,5173-5191).
ggtaccgttcccaaaaact

SEQ ID NO: 700054 - DNA, 19 bp, Mus musculus
  siRNA target sequence for Calmbp1 (NM_009791.2,5223-5241).
gtgcgtgaatcctgtatca

SEQ ID NO: 700055 - DNA, 19 bp, Mus musculus
  siRNA target sequence for Calmbp1 (NM_009791.2,5225-5243).
gcgtgaatcctgtatcaaa

SEQ ID NO: 700056 - DNA, 19 bp, Mus musculus
  siRNA target sequence for Calmbp1 (NM_009791.2,5240-5258).
caaactgcagtcacacttt

SEQ ID NO: 700057 - DNA, 19 bp, Mus musculus
  siRNA target sequence for Calmbp1 (NM_009791.2,5280-5298).
cagttgaggttgcaatgta

SEQ ID NO: 700058 - DNA, 19 bp, Mus musculus
  siRNA target sequence for Calmbp1 (NM_009791.2,5296-5314).
gtaaagctgccatttctct

SEQ ID NO: 700059 - DNA, 19 bp, Mus musculus
  siRNA target sequence for Calmbp1 (NM_009791.2,5306-5324).
catttctctacagtcttat

SEQ ID NO: 700060 - DNA, 19 bp, Mus musculus
  siRNA target sequence for Calmbp1 (NM_009791.2,5313-5331).
ctacagtcttatttcagaa

SEQ ID NO: 700061 - DNA, 19 bp, Mus musculus
  siRNA target sequence for Calmbp1 (NM_009791.2,5344-5362).
ggcagcgctacctgaagat

SEQ ID NO: 700062 - DNA, 19 bp, Mus musculus
  siRNA target sequence for Calmbp1 (NM_009791.2,5346-5364).
cagcgctacctgaagatgt

SEQ ID NO: 700063 - DNA, 19 bp, Mus musculus
  siRNA target sequence for Calmbp1 (NM_009791.2,5379-5397).
gtcattcagagtttctact

SEQ ID NO: 700064 - DNA, 19 bp, Mus musculus
  siRNA target sequence for Calmbp1 (NM_009791.2,5410-5428).
cacaaatcagtcaaaggaa

SEQ ID NO: 700065 - DNA, 19 bp, Mus musculus
  siRNA target sequence for Calmbp1 (NM_009791.2,5444-5462).
caaaagagcagctatttgt

SEQ ID NO: 700066 - DNA, 19 bp, Mus musculus
  siRNA target sequence for Calmbp1 (NM_009791.2,5518-5536).
cggctgctgttacaattca

SEQ ID NO: 700067 - DNA, 19 bp, Mus musculus
  siRNA target sequence for Calmbp1 (NM_009791.2,5563-5581).
ggatgaaataccagactat

SEQ ID NO: 700068 - DNA, 19 bp, Mus musculus
  siRNA target sequence for Calmbp1 (NM_009791.2,5620-5638).
cacagaaggttgcttatga

SEQ ID NO: 700069 - DNA, 19 bp, Mus musculus
  siRNA target sequence for Calmbp1 (NM_009791.2,5747-5765).
gaagatccagtctacgttt

SEQ ID NO: 700070 - DNA, 19 bp, Mus musculus
  siRNA target sequence for Calmbp1 (NM_009791.2,5750-5768).
gatccagtctacgtttaga

SEQ ID NO: 700071 - DNA, 19 bp, Mus musculus
  siRNA target sequence for Calmbp1 (NM_009791.2,5775-5793).
gtggcccagcaacagtata

SEQ ID NO: 700072 - DNA, 19 bp, Mus musculus
  siRNA target sequence for Calmbp1 (NM_009791.2,5779-5797).
cccagcaacagtataaact

SEQ ID NO: 700073 - DNA, 19 bp, Mus musculus
  siRNA target sequence for Calmbp1 (NM_009791.2,5965-5983).
ccctcatacagtcatatta

SEQ ID NO: 700074 - DNA, 19 bp, Mus musculus
  siRNA target sequence for Calmbp1 (NM_009791.2,6036-6054).
cagattcagctgtgctata

SEQ ID NO: 700075 - DNA, 19 bp, Mus musculus
  siRNA target sequence for Calmbp1 (NM_009791.2,6047-6065).
gtgctatagggcttacaaa

SEQ ID NO: 700076 - DNA, 19 bp, Mus musculus
  siRNA target sequence for Calmbp1 (NM_009791.2,6049-6067).
gctatagggcttacaaagt

SEQ ID NO: 700077 - DNA, 19 bp, Mus musculus
  siRNA target sequence for Calmbp1 (NM_009791.2,6075-6093).
gaacagcgccacttatact

SEQ ID NO: 700078 - DNA, 19 bp, Mus musculus
  siRNA target sequence for Calmbp1 (NM_009791.2,6078-6096).
cagcgccacttatacttga

SEQ ID NO: 700079 - DNA, 19 bp, Mus musculus
  siRNA target sequence for Calmbp1 (NM_009791.2,6080-6098).
gcgccacttatacttgaaa

SEQ ID NO: 700080 - DNA, 19 bp, Mus musculus
  siRNA target sequence for Calmbp1 (NM_009791.2,6081-6099).
cgccacttatacttgaaaa

SEQ ID NO: 700081 - DNA, 19 bp, Mus musculus
  siRNA target sequence for Calmbp1 (NM_009791.2,6083-6101).
ccacttatacttgaaaaca

SEQ ID NO: 700082 - DNA, 19 bp, Mus musculus
  siRNA target sequence for Calmbp1 (NM_009791.2,6130-6148).
cttaccgtggtatgaaagt

SEQ ID NO: 700083 - DNA, 19 bp, Mus musculus
  siRNA target sequence for Calmbp1 (NM_009791.2,6173-6191).
caaagcagcggtcactata

SEQ ID NO: 700084 - DNA, 19 bp, Mus musculus
  siRNA target sequence for Calmbp1 (NM_009791.2,6177-6195).
gcagcggtcactatacagt

SEQ ID NO: 700085 - DNA, 19 bp, Mus musculus
  siRNA target sequence for Calmbp1 (NM_009791.2,6181-6199).
cggtcactatacagtctaa

SEQ ID NO: 700086 - DNA, 19 bp, Mus musculus
  siRNA target sequence for Calmbp1 (NM_009791.2,6182-6200).
ggtcactatacagtctaaa

SEQ ID NO: 700087 - DNA, 19 bp, Mus musculus
  siRNA target sequence for Calmbp1 (NM_009791.2,6183-6201).
gtcactatacagtctaaat

SEQ ID NO: 700088 - DNA, 19 bp, Mus musculus
  siRNA target sequence for Calmbp1 (NM_009791.2,6224-6242).
gaagtacacgacctataga

SEQ ID NO: 700089 - DNA, 19 bp, Mus musculus
  siRNA target sequence for Calmbp1 (NM_009791.2,6227-6245).
gtacacgacctatagaact

SEQ ID NO: 700090 - DNA, 19 bp, Mus musculus
  siRNA target sequence for Calmbp1 (NM_009791.2,6230-6248).
cacgacctatagaacttca

SEQ ID NO: 700091 - DNA, 19 bp, Mus musculus
  siRNA target sequence for Calmbp1 (NM_009791.2,6241-6259).
gaacttcagctattgtaat

SEQ ID NO: 700092 - DNA, 19 bp, Mus musculus
  siRNA target sequence for Calmbp1 (NM_009791.2,6244-6262).
cttcagctattgtaattca

SEQ ID NO: 700093 - DNA, 19 bp, Mus musculus
  siRNA target sequence for Calmbp1 (NM_009791.2,6266-6284).
gtggtaccggaatattaaa

SEQ ID NO: 700094 - DNA, 19 bp, Mus musculus
  siRNA target sequence for Calmbp1 (NM_009791.2,6268-6286).
ggtaccggaatattaaaat

SEQ ID NO: 700095 - DNA, 19 bp, Mus musculus
  siRNA target sequence for Calmbp1 (NM_009791.2,6300-6318).
catcaggaataccttaact

SEQ ID NO: 700096 - DNA, 19 bp, Mus musculus
  siRNA target sequence for Calmbp1 (NM_009791.2,6303-6321).
caggaataccttaacttaa

SEQ ID NO: 700097 - DNA, 19 bp, Mus musculus
  siRNA target sequence for Calmbp1 (NM_009791.2,6306-6324).
gaataccttaacttaagga

SEQ ID NO: 700098 - DNA, 19 bp, Mus musculus
  siRNA target sequence for Calmbp1 (NM_009791.2,6349-6367).
cgtatagaggcattagagt

SEQ ID NO: 700099 - DNA, 19 bp, Mus musculus
  siRNA target sequence for Calmbp1 (NM_009791.2,6370-6388).
ggagacgcattcaacacat

SEQ ID NO: 700100 - DNA, 19 bp, Mus musculus
  siRNA target sequence for Calmbp1 (NM_009791.2,6425-6443).
gatgcgtcagtcaagagta

SEQ ID NO: 700101 - DNA, 19 bp, Mus musculus
  siRNA target sequence for Calmbp1 (NM_009791.2,6439-6457).
gagtaaggtacctcaagat

SEQ ID NO: 700102 - DNA, 19 bp, Mus musculus
  siRNA target sequence for Calmbp1 (NM_009791.2,6441-6459).
gtaaggtacctcaagatga

SEQ ID NO: 700103 - DNA, 19 bp, Mus musculus
  siRNA target sequence for Calmbp1 (NM_009791.2,6485-6503).
gagatacagagcgtattat

SEQ ID NO: 700104 - DNA, 19 bp, Mus musculus
  siRNA target sequence for Calmbp1 (NM_009791.2,6487-6505).
gatacagagcgtattatct

SEQ ID NO: 700105 - DNA, 19 bp, Mus musculus
  siRNA target sequence for Calmbp1 (NM_009791.2,6493-6511).
gagcgtattatctaggtaa

SEQ ID NO: 700106 - DNA, 19 bp, Mus musculus
  siRNA target sequence for Calmbp1 (NM_009791.2,6496-6514).
cgtattatctaggtaagat

SEQ ID NO: 700107 - DNA, 19 bp, Mus musculus
  siRNA target sequence for Calmbp1 (NM_009791.2,6585-6603).
gtgaggcggactgtaagaa

SEQ ID NO: 700108 - DNA, 19 bp, Mus musculus
  siRNA target sequence for Calmbp1 (NM_009791.2,6589-6607).
ggcggactgtaagaaagat

SEQ ID NO: 700109 - DNA, 19 bp, Mus musculus
  siRNA target sequence for Calmbp1 (NM_009791.2,6652-6670).
ggcagcaaacttactttca

SEQ ID NO: 700110 - DNA, 19 bp, Mus musculus
  siRNA target sequence for Calmbp1 (NM_009791.2,6800-6818).
gagaactaggagacactta

SEQ ID NO: 700111 - DNA, 19 bp, Mus musculus
  siRNA target sequence for Calmbp1 (NM_009791.2,6830-6848).
cctggctgctactctcatt

SEQ ID NO: 700112 - DNA, 19 bp, Mus musculus
  siRNA target sequence for Calmbp1 (NM_009791.2,6924-6942).
cagtaccgtgcaagacttt

SEQ ID NO: 700113 - DNA, 19 bp, Mus musculus
  siRNA target sequence for Calmbp1 (NM_009791.2,6926-6944).
gtaccgtgcaagactttat

SEQ ID NO: 700114 - DNA, 19 bp, Mus musculus
  siRNA target sequence for Calmbp1 (NM_009791.2,6950-6968).
gtattcccgacaacagtta

SEQ ID NO: 700115 - DNA, 19 bp, Mus musculus
  siRNA target sequence for Calmbp1 (NM_009791.2,6955-6973).
cccgacaacagttactgtt

SEQ ID NO: 700116 - DNA, 19 bp, Mus musculus
  siRNA target sequence for Calmbp1 (NM_009791.2,6992-7010).
gatccagtcatcatacaga

SEQ ID NO: 700117 - DNA, 19 bp, Mus musculus
  siRNA target sequence for Calmbp1 (NM_009791.2,7194-7212).
gccgttagggggatgaaaa

SEQ ID NO: 700118 - DNA, 19 bp, Mus musculus
  siRNA target sequence for Calmbp1 (NM_009791.2,7197-7215).
gttagggggatgaaaacca

SEQ ID NO: 700119 - DNA, 19 bp, Mus musculus
  siRNA target sequence for Calmbp1 (NM_009791.2,7226-7244).
gaagactatgcattcttct

SEQ ID NO: 700120 - DNA, 19 bp, Mus musculus
  siRNA target sequence for Calmbp1 (NM_009791.2,7249-7267).
cccttattcagagtcaatt

SEQ ID NO: 700121 - DNA, 19 bp, Mus musculus
  siRNA target sequence for Calmbp1 (NM_009791.2,7251-7269).
cttattcagagtcaattta

SEQ ID NO: 700122 - DNA, 19 bp, Mus musculus
  siRNA target sequence for Calmbp1 (NM_009791.2,7259-7277).
gagtcaatttagagctttt

SEQ ID NO: 700123 - DNA, 19 bp, Mus musculus
  siRNA target sequence for Calmbp1 (NM_009791.2,7261-7279).
gtcaatttagagcttttat

SEQ ID NO: 700124 - DNA, 19 bp, Mus musculus
  siRNA target sequence for Calmbp1 (NM_009791.2,7347-7365).
ctttatgccaagcataaat

SEQ ID NO: 700125 - DNA, 19 bp, Mus musculus
  siRNA target sequence for Calmbp1 (NM_009791.2,7371-7389).
caattcttgcagttacgaa

SEQ ID NO: 700126 - DNA, 19 bp, Mus musculus
  siRNA target sequence for Calmbp1 (NM_009791.2,7403-7421).
catacagtcctcttatcga

SEQ ID NO: 700127 - DNA, 19 bp, Mus musculus
  siRNA target sequence for Calmbp1 (NM_009791.2,7427-7445).
gatggtacaaaagaagtta

SEQ ID NO: 700128 - DNA, 19 bp, Mus musculus
  siRNA target sequence for Calmbp1 (NM_009791.2,7430-7448).
ggtacaaaagaagttacaa

SEQ ID NO: 700129 - DNA, 19 bp, Mus musculus
  siRNA target sequence for Calmbp1 (NM_009791.2,7523-7541).
gaaatgtgcctcgattaga

SEQ ID NO: 700130 - DNA, 19 bp, Mus musculus
  siRNA target sequence for Calmbp1 (NM_009791.2,7528-7546).
gtgcctcgattagaattca

SEQ ID NO: 700131 - DNA, 19 bp, Mus musculus
  siRNA target sequence for Calmbp1 (NM_009791.2,7548-7566).
cagtgttatcgaacataca

SEQ ID NO: 700132 - DNA, 19 bp, Mus musculus
  siRNA target sequence for Calmbp1 (NM_009791.2,7615-7633).
gtgctgctgtcctaataca

SEQ ID NO: 700133 - DNA, 19 bp, Mus musculus
  siRNA target sequence for Calmbp1 (NM_009791.2,7654-7672).
ggcagcgttgcttctatca

SEQ ID NO: 700134 - DNA, 19 bp, Mus musculus
  siRNA target sequence for Calmbp1 (NM_009791.2,7655-7673).
gcagcgttgcttctatcaa

SEQ ID NO: 700135 - DNA, 19 bp, Mus musculus
  siRNA target sequence for Calmbp1 (NM_009791.2,7680-7698).
cggtgggcagcaaaggtaa

SEQ ID NO: 700136 - DNA, 19 bp, Mus musculus
  siRNA target sequence for Calmbp1 (NM_009791.2,7681-7699).
ggtgggcagcaaaggtaat

SEQ ID NO: 700137 - DNA, 19 bp, Mus musculus
  siRNA target sequence for Calmbp1 (NM_009791.2,7682-7700).
gtgggcagcaaaggtaata

SEQ ID NO: 700138 - DNA, 19 bp, Mus musculus
  siRNA target sequence for Calmbp1 (NM_009791.2,7787-7805).
gggtttaaacactgcaaaa

SEQ ID NO: 700139 - DNA, 19 bp, Mus musculus
  siRNA target sequence for Calmbp1 (NM_009791.2,7789-7807).
gtttaaacactgcaaaaca

SEQ ID NO: 700140 - DNA, 19 bp, Mus musculus
  siRNA target sequence for Calmbp1 (NM_009791.2,7835-7853).
gattacacagaagcatttt

SEQ ID NO: 700141 - DNA, 19 bp, Mus musculus
  siRNA target sequence for Calmbp1 (NM_009791.2,7899-7917).
caggctggatgtagaaaat

SEQ ID NO: 700142 - DNA, 19 bp, Mus musculus
  siRNA target sequence for Calmbp1 (NM_009791.2,7958-7976).
caggattcaagcttggtat

SEQ ID NO: 700143 - DNA, 19 bp, Mus musculus
  siRNA target sequence for Calmbp1 (NM_009791.2,7981-7999).
gttggagagcgcacaagaa

SEQ ID NO: 700144 - DNA, 19 bp, Mus musculus
  siRNA target sequence for Calmbp1 (NM_009791.2,7985-8003).
gagagcgcacaagaaatat

SEQ ID NO: 700145 - DNA, 19 bp, Mus musculus
  siRNA target sequence for Calmbp1 (NM_009791.2,7987-8005).
gagcgcacaagaaatatct

SEQ ID NO: 700146 - DNA, 19 bp, Mus musculus
  siRNA target sequence for Calmbp1 (NM_009791.2,7989-8007).
gcgcacaagaaatatctaa

SEQ ID NO: 700147 - DNA, 19 bp, Mus musculus
  siRNA target sequence for Calmbp1 (NM_009791.2,7991-8009).
gcacaagaaatatctaact

SEQ ID NO: 700148 - DNA, 19 bp, Mus musculus
  siRNA target sequence for Calmbp1 (NM_009791.2,7992-8010).
cacaagaaatatctaactt

SEQ ID NO: 700149 - DNA, 19 bp, Mus musculus
  siRNA target sequence for Calmbp1 (NM_009791.2,7994-8012).
caagaaatatctaacttta

SEQ ID NO: 700150 - DNA, 19 bp, Mus musculus
  siRNA target sequence for Calmbp1 (NM_009791.2,8087-8105).
ggcagctattataattcaa

SEQ ID NO: 700151 - DNA, 19 bp, Mus musculus
  siRNA target sequence for Calmbp1 (NM_009791.2,8088-8106).
gcagctattataattcaaa

SEQ ID NO: 700152 - DNA, 19 bp, Mus musculus
  siRNA target sequence for Calmbp1 (NM_009791.2,8108-8126).
gaaatggagagctacactt

SEQ ID NO: 700153 - DNA, 19 bp, Mus musculus
  siRNA target sequence for Calmbp1 (NM_009791.2,8113-8131).
ggagagctacactttctgt

SEQ ID NO: 700154 - DNA, 19 bp, Mus musculus
  siRNA target sequence for Calmbp1 (NM_009791.2,8114-8132).
gagagctacactttctgta

SEQ ID NO: 700155 - DNA, 19 bp, Mus musculus
  siRNA target sequence for Calmbp1 (NM_009791.2,8175-8193).
gtgattcaagcccacttta

SEQ ID NO: 700156 - DNA, 19 bp, Mus musculus
  siRNA target sequence for Calmbp1 (NM_009791.2,8225-8243).
gcagagatctgctgtttta

SEQ ID NO: 700157 - DNA, 19 bp, Mus musculus
  siRNA target sequence for Calmbp1 (NM_009791.2,8233-8251).
ctgctgttttaatcataca

SEQ ID NO: 700158 - DNA, 19 bp, Mus musculus
  siRNA target sequence for Calmbp1 (NM_009791.2,8286-8304).
gaaaggataaagtatatca

SEQ ID NO: 700159 - DNA, 19 bp, Mus musculus
  siRNA target sequence for Calmbp1 (NM_009791.2,8315-8333).
gtctacggttgttgtacaa

SEQ ID NO: 700160 - DNA, 19 bp, Mus musculus
  siRNA target sequence for Calmbp1 (NM_009791.2,8339-8357).
ggtgcgtggctggttagta

SEQ ID NO: 700161 - DNA, 19 bp, Mus musculus
  siRNA target sequence for Calmbp1 (NM_009791.2,8340-8358).
gtgcgtggctggttagtaa

SEQ ID NO: 700162 - DNA, 19 bp, Mus musculus
  siRNA target sequence for Calmbp1 (NM_009791.2,8344-8362).
gtggctggttagtaaggaa

SEQ ID NO: 700163 - DNA, 19 bp, Mus musculus
  siRNA target sequence for Calmbp1 (NM_009791.2,8429-8447).
gtgtgctcttaaaatccaa

SEQ ID NO: 700164 - DNA, 19 bp, Mus musculus
  siRNA target sequence for Calmbp1 (NM_009791.2,8481-8499).
gctaagaagcacatggatt

SEQ ID NO: 700165 - DNA, 19 bp, Mus musculus
  siRNA target sequence for Calmbp1 (NM_009791.2,8518-8536).
gatggtttcgaaaaagatt

SEQ ID NO: 700166 - DNA, 19 bp, Mus musculus
  siRNA target sequence for Calmbp1 (NM_009791.2,8521-8539).
ggtttcgaaaaagattaca

SEQ ID NO: 700167 - DNA, 19 bp, Mus musculus
  siRNA target sequence for Calmbp1 (NM_009791.2,8542-8560).
gaaagaggttcattgaaca

SEQ ID NO: 700168 - DNA, 19 bp, Mus musculus
  siRNA target sequence for Calmbp1 (NM_009791.2,8620-8638).
gggctgcatccgtgataca

SEQ ID NO: 700169 - DNA, 19 bp, Mus musculus
  siRNA target sequence for Calmbp1 (NM_009791.2,8686-8704).
ctagctgcgccactagaat

SEQ ID NO: 700170 - DNA, 19 bp, Mus musculus
  siRNA target sequence for Calmbp1 (NM_009791.2,8689-8707).
gctgcgccactagaattca

SEQ ID NO: 700171 - DNA, 19 bp, Mus musculus
  siRNA target sequence for Calmbp1 (NM_009791.2,8813-8831).
caagctgtacagaagaact

SEQ ID NO: 700172 - DNA, 19 bp, Mus musculus
  siRNA target sequence for Calmbp1 (NM_009791.2,8830-8848).
ctgagcgagcgcttcatca

SEQ ID NO: 700173 - DNA, 19 bp, Mus musculus
  siRNA target sequence for Calmbp1 (NM_009791.2,8850-8868).
ctgctcacctacaaacact

SEQ ID NO: 700174 - DNA, 19 bp, Mus musculus
  siRNA target sequence for Calmbp1 (NM_009791.2,8922-8940).
ccactttgctgtgagaata

SEQ ID NO: 700175 - DNA, 19 bp, Mus musculus
  siRNA target sequence for Calmbp1 (NM_009791.2,8923-8941).
cactttgctgtgagaatat

SEQ ID NO: 700176 - DNA, 19 bp, Mus musculus
  siRNA target sequence for Calmbp1 (NM_009791.2,8946-8964).
gaaagcggagcggtatcta

SEQ ID NO: 700177 - DNA, 19 bp, Mus musculus
  siRNA target sequence for Calmbp1 (NM_009791.2,8962-8980).
ctaccatctttgttgtgat

SEQ ID NO: 700178 - DNA, 19 bp, Mus musculus
  siRNA target sequence for Calmbp1 (NM_009791.2,9007-9025).
gtatggaagtcgttggata

SEQ ID NO: 700179 - DNA, 19 bp, Mus musculus
  siRNA target sequence for Calmbp1 (NM_009791.2,9011-9029).
ggaagtcgttggatatgct

SEQ ID NO: 700180 - DNA, 19 bp, Mus musculus
  siRNA target sequence for Calmbp1 (NM_009791.2,9234-9252).
gatgcacaaagtagatcta

SEQ ID NO: 700181 - DNA, 19 bp, Mus musculus
  siRNA target sequence for Calmbp1 (NM_009791.2,9250-9268).
ctaaagtcactgatcgtat

SEQ ID NO: 700182 - DNA, 19 bp, Mus musculus
  siRNA target sequence for Calmbp1 (NM_009791.2,9257-9275).
cactgatcgtatttatcgt

SEQ ID NO: 700183 - DNA, 19 bp, Mus musculus
  siRNA target sequence for Calmbp1 (NM_009791.2,9265-9283).
gtatttatcgtctctacaa

SEQ ID NO: 700184 - DNA, 19 bp, Mus musculus
  siRNA target sequence for Calmbp1 (NM_009791.2,9291-9309).
gttcctaagcataaagtaa

SEQ ID NO: 700185 - DNA, 19 bp, Mus musculus
  siRNA target sequence for Calmbp1 (NM_009791.2,9327-9345).
gataagcagaagcagaatt

SEQ ID NO: 700186 - DNA, 19 bp, Mus musculus
  siRNA target sequence for Calmbp1 (NM_009791.2,9364-9382).
gtataccagaaagaactat

SEQ ID NO: 700187 - DNA, 19 bp, Mus musculus
  siRNA target sequence for Calmbp1 (NM_009791.2,9386-9404).
gaccaggttagtttcaaga

SEQ ID NO: 700188 - DNA, 19 bp, Mus musculus
  siRNA target sequence for Calmbp1 (NM_009791.2,9389-9407).
caggttagtttcaagactt

SEQ ID NO: 700189 - DNA, 19 bp, Mus musculus
  siRNA target sequence for Calmbp1 (NM_009791.2,9451-9469).
caaactccctgcaagctat

SEQ ID NO: 700190 - DNA, 19 bp, Mus musculus
  siRNA target sequence for Calmbp1 (NM_009791.2,9455-9473).
ctccctgcaagctattcaa

SEQ ID NO: 700191 - DNA, 19 bp, Mus musculus
  siRNA target sequence for Calmbp1 (NM_009791.2,9457-9475).
ccctgcaagctattcaact

SEQ ID NO: 700192 - DNA, 19 bp, Mus musculus
  siRNA target sequence for Calmbp1 (NM_009791.2,9466-9484).
ctattcaactggtaatgga

SEQ ID NO: 700193 - DNA, 19 bp, Mus musculus
  siRNA target sequence for Cd83 (NM_009856.1,203-221).
ctcccggagagcaagcaaa

SEQ ID NO: 700194 - DNA, 19 bp, Mus musculus
  siRNA target sequence for Cd83 (NM_009856.1,259-277).
cctgacgatccaaaacact

SEQ ID NO: 700195 - DNA, 19 bp, Mus musculus
  siRNA target sequence for Cd83 (NM_009856.1,260-278).
ctgacgatccaaaacacta

SEQ ID NO: 700196 - DNA, 19 bp, Mus musculus
  siRNA target sequence for Cd83 (NM_009856.1,323-341).
ggagggcagcgcaacttga

SEQ ID NO: 700197 - DNA, 19 bp, Mus musculus
  siRNA target sequence for Cd83 (NM_009856.1,383-401).
gctacagagtcaactttca

SEQ ID NO: 700198 - DNA, 19 bp, Mus musculus
  siRNA target sequence for Cd83 (NM_009856.1,463-481).
cattttcacctgcaaattt

SEQ ID NO: 700199 - DNA, 19 bp, Mus musculus
  siRNA target sequence for Cd83 (NM_009856.1,475-493).
caaatttgcacgactacaa

SEQ ID NO: 700200 - DNA, 19 bp, Mus musculus
  siRNA target sequence for Cd83 (NM_009856.1,482-500).
gcacgactacaaagcattt

SEQ ID NO: 700201 - DNA, 19 bp, Mus musculus
  siRNA target sequence for Cd83 (NM_009856.1,519-537).
ctggtacggaacaagcttt

SEQ ID NO: 700202 - DNA, 19 bp, Mus musculus
  siRNA target sequence for Cd83 (NM_009856.1,547-565).
cacctccccaagcaaacat

SEQ ID NO: 700203 - DNA, 19 bp, Mus musculus
  siRNA target sequence for Col9a3 (NM_009936.1,581-599).
ggggcctactggctacaaa

SEQ ID NO: 700204 - DNA, 19 bp, Mus musculus
  siRNA target sequence for Col9a3 (NM_009936.1,689-707).
gggcccacgaggattaaga

SEQ ID NO: 700205 - DNA, 19 bp, Mus musculus
  siRNA target sequence for Col9a3 (NM_009936.1,856-874).
ggcctggtcccaaaggaat

SEQ ID NO: 700206 - DNA, 19 bp, Mus musculus
  siRNA target sequence for Col9a3 (NM_009936.1,1049-1067).
gggagaaccgggtagaact

SEQ ID NO: 700207 - DNA, 19 bp, Mus musculus
  siRNA target sequence for Copa (NM_009938.2,138-156).
cgggtcaaaggccttagtt

SEQ ID NO: 700208 - DNA, 19 bp, Mus musculus
  siRNA target sequence for Copa (NM_009938.2,139-157).
gggtcaaaggccttagttt

SEQ ID NO: 700209 - DNA, 19 bp, Mus musculus
  siRNA target sequence for Copa (NM_009938.2,140-158).
ggtcaaaggccttagtttt

SEQ ID NO: 700210 - DNA, 19 bp, Mus musculus
  siRNA target sequence for Copa (NM_009938.2,149-167).
ccttagttttcatcctaaa

SEQ ID NO: 700211 - DNA, 19 bp, Mus musculus
  siRNA target sequence for Copa (NM_009938.2,175-193).
ggatcctgaccagtttaca

SEQ ID NO: 700212 - DNA, 19 bp, Mus musculus
  siRNA target sequence for Copa (NM_009938.2,223-241).
ggatgtgcaccctaattga

SEQ ID NO: 700213 - DNA, 19 bp, Mus musculus
  siRNA target sequence for Copa (NM_009938.2,229-247).
gcaccctaattgacaaatt

SEQ ID NO: 700214 - DNA, 19 bp, Mus musculus
  siRNA target sequence for Copa (NM_009938.2,230-248).
caccctaattgacaaattt

SEQ ID NO: 700215 - DNA, 19 bp, Mus musculus
  siRNA target sequence for Copa (NM_009938.2,264-282).
ccagtgcgtggcattgact

SEQ ID NO: 700216 - DNA, 19 bp, Mus musculus
  siRNA target sequence for Copa (NM_009938.2,271-289).
gtggcattgacttccataa

SEQ ID NO: 700217 - DNA, 19 bp, Mus musculus
  siRNA target sequence for Copa (NM_009938.2,306-324).
gtctctggaggcgatgatt

SEQ ID NO: 700218 - DNA, 19 bp, Mus musculus
  siRNA target sequence for Copa (NM_009938.2,308-326).
ctctggaggcgatgattat

SEQ ID NO: 700219 - DNA, 19 bp, Mus musculus
  siRNA target sequence for Copa (NM_009938.2,310-328).
ctggaggcgatgattataa

SEQ ID NO: 700220 - DNA, 19 bp, Mus musculus
  siRNA target sequence for Copa (NM_009938.2,312-330).
ggaggcgatgattataaga

SEQ ID NO: 700221 - DNA, 19 bp, Mus musculus
  siRNA target sequence for Copa (NM_009938.2,313-331).
gaggcgatgattataagat

SEQ ID NO: 700222 - DNA, 19 bp, Mus musculus
  siRNA target sequence for Copa (NM_009938.2,315-333).
ggcgatgattataagatta

SEQ ID NO: 700223 - DNA, 19 bp, Mus musculus
  siRNA target sequence for Copa (NM_009938.2,374-392).
gctcgggcacttggattat

SEQ ID NO: 700224 - DNA, 19 bp, Mus musculus
  siRNA target sequence for Copa (NM_009938.2,375-393).
ctcgggcacttggattata

SEQ ID NO: 700225 - DNA, 19 bp, Mus musculus
  siRNA target sequence for Copa (NM_009938.2,395-413).
ccgtacaacgtttttccat

SEQ ID NO: 700226 - DNA, 19 bp, Mus musculus
  siRNA target sequence for Copa (NM_009938.2,502-520).
cggggcacaaccattatgt

SEQ ID NO: 700227 - DNA, 19 bp, Mus musculus
  siRNA target sequence for Copa (NM_009938.2,503-521).
ggggcacaaccattatgta

SEQ ID NO: 700228 - DNA, 19 bp, Mus musculus
  siRNA target sequence for Copa (NM_009938.2,509-527).
caaccattatgtaatgtgt

SEQ ID NO: 700229 - DNA, 19 bp, Mus musculus
  siRNA target sequence for Copa (NM_009938.2,582-600).
gtccgcgtttgggatattt

SEQ ID NO: 700230 - DNA, 19 bp, Mus musculus
  siRNA target sequence for Copa (NM_009938.2,584-602).
ccgcgtttgggatatttct

SEQ ID NO: 700231 - DNA, 19 bp, Mus musculus
  siRNA target sequence for Copa (NM_009938.2,663-681).
ggcgttgatctgtttggaa

SEQ ID NO: 700232 - DNA, 19 bp, Mus musculus
  siRNA target sequence for Copa (NM_009938.2,749-767).
cccgactatgccccttatt

SEQ ID NO: 700233 - DNA, 19 bp, Mus musculus
  siRNA target sequence for Copa (NM_009938.2,778-796).
cagatgaccggcaagtgaa

SEQ ID NO: 700234 - DNA, 19 bp, Mus musculus
  siRNA target sequence for Copa (NM_009938.2,800-818).
ctggcgtatgaatgaatca

SEQ ID NO: 700235 - DNA, 19 bp, Mus musculus
  siRNA target sequence for Copa (NM_009938.2,802-820).
ggcgtatgaatgaatcaaa

SEQ ID NO: 700236 - DNA, 19 bp, Mus musculus
  siRNA target sequence for Copa (NM_009938.2,846-864).
ggccattacaacaatgtgt

SEQ ID NO: 700237 - DNA, 19 bp, Mus musculus
  siRNA target sequence for Copa (NM_009938.2,964-982).
ctttccgtagggatcatga

SEQ ID NO: 700238 - DNA, 19 bp, Mus musculus
  siRNA target sequence for Copa (NM_009938.2,1038-1056).
gatggtgggatgattgtat

SEQ ID NO: 700239 - DNA, 19 bp, Mus musculus
  siRNA target sequence for Copa (NM_009938.2,1041-1059).
ggtgggatgattgtattta

SEQ ID NO: 700240 - DNA, 19 bp, Mus musculus
  siRNA target sequence for Copa (NM_009938.2,1042-1060).
gtgggatgattgtatttaa

SEQ ID NO: 700241 - DNA, 19 bp, Mus musculus
  siRNA target sequence for Copa (NM_009938.2,1045-1063).
ggatgattgtatttaagct

SEQ ID NO: 700242 - DNA, 19 bp, Mus musculus
  siRNA target sequence for Copa (NM_009938.2,1081-1099).
cctatgctgttcatggtaa

SEQ ID NO: 700243 - DNA, 19 bp, Mus musculus
  siRNA target sequence for Copa (NM_009938.2,1186-1204).
gttctaagtttccagtatt

SEQ ID NO: 700244 - DNA, 19 bp, Mus musculus
  siRNA target sequence for Copa (NM_009938.2,1189-1207).
ctaagtttccagtattcaa

SEQ ID NO: 700245 - DNA, 19 bp, Mus musculus
  siRNA target sequence for Copa (NM_009938.2,1198-1216).
cagtattcaacatgtcata

SEQ ID NO: 700246 - DNA, 19 bp, Mus musculus
  siRNA target sequence for Copa (NM_009938.2,1200-1218).
gtattcaacatgtcataca

SEQ ID NO: 700247 - DNA, 19 bp, Mus musculus
  siRNA target sequence for Copa (NM_009938.2,1247-1265).
caccagagcaagcaatcta

SEQ ID NO: 700248 - DNA, 19 bp, Mus musculus
  siRNA target sequence for Copa (NM_009938.2,1249-1267).
ccagagcaagcaatctaga

SEQ ID NO: 700249 - DNA, 19 bp, Mus musculus
  siRNA target sequence for Copa (NM_009938.2,1326-1344).
gcccctgaagggaaacgat

SEQ ID NO: 700250 - DNA, 19 bp, Mus musculus
  siRNA target sequence for Copa (NM_009938.2,1389-1407).
gtcctagatcgcatgcatt

SEQ ID NO: 700251 - DNA, 19 bp, Mus musculus
  siRNA target sequence for Copa (NM_009938.2,1399-1417).
gcatgcattcacttctgat

SEQ ID NO: 700252 - DNA, 19 bp, Mus musculus
  siRNA target sequence for Copa (NM_009938.2,1463-1481).
ctgtgatgaaatcttctat

SEQ ID NO: 700253 - DNA, 19 bp, Mus musculus
  siRNA target sequence for Copa (NM_009938.2,1552-1570).
ctctggcatcagtgaagat

SEQ ID NO: 700254 - DNA, 19 bp, Mus musculus
  siRNA target sequence for Copa (NM_009938.2,1598-1616).
ggcagacatgtctcatgta

SEQ ID NO: 700255 - DNA, 19 bp, Mus musculus
  siRNA target sequence for Copa (NM_009938.2,1738-1756).
ccacaagcaaccacatcaa

SEQ ID NO: 700256 - DNA, 19 bp, Mus musculus
  siRNA target sequence for Copa (NM_009938.2,1822-1840).
gagtgaagggcaataatgt

SEQ ID NO: 700257 - DNA, 19 bp, Mus musculus
  siRNA target sequence for Copa (NM_009938.2,1864-1882).
gtcctcgggtgctaaccat

SEQ ID NO: 700258 - DNA, 19 bp, Mus musculus
  siRNA target sequence for Copa (NM_009938.2,1887-1905).
cccactgagttcaagttca

SEQ ID NO: 700259 - DNA, 19 bp, Mus musculus
  siRNA target sequence for Copa (NM_009938.2,1908-1926).
ctggccctgatcaacagaa

SEQ ID NO: 700260 - DNA, 19 bp, Mus musculus
  siRNA target sequence for Copa (NM_009938.2,2016-2034).
gtggcgctgcattttgtaa

SEQ ID NO: 700261 - DNA, 19 bp, Mus musculus
  siRNA target sequence for Copa (NM_009938.2,2106-2124).
gccctggacgacaagaact

SEQ ID NO: 700262 - DNA, 19 bp, Mus musculus
  siRNA target sequence for Copa (NM_009938.2,2161-2179).
gcaatcaccaaattgtaga

SEQ ID NO: 700263 - DNA, 19 bp, Mus musculus
  siRNA target sequence for Copa (NM_009938.2,2185-2203).
gctatcagcgcaccaaaaa

SEQ ID NO: 700264 - DNA, 19 bp, Mus musculus
  siRNA target sequence for Copa (NM_009938.2,2193-2211).
cgcaccaaaaactttgaca

SEQ ID NO: 700265 - DNA, 19 bp, Mus musculus
  siRNA target sequence for Copa (NM_009938.2,2219-2237).
cttcctgtaccttattact

SEQ ID NO: 700266 - DNA, 19 bp, Mus musculus
  siRNA target sequence for Copa (NM_009938.2,2341-2359).
gagtacggatcctgaagaa

SEQ ID NO: 700267 - DNA, 19 bp, Mus musculus
  siRNA target sequence for Copa (NM_009938.2,2395-2413).
ctacccatggcttagatga

SEQ ID NO: 700268 - DNA, 19 bp, Mus musculus
  siRNA target sequence for Copa (NM_009938.2,2398-2416).
cccatggcttagatgaaga

SEQ ID NO: 700269 - DNA, 19 bp, Mus musculus
  siRNA target sequence for Copa (NM_009938.2,2453-2471).
ggagacaatcccagacatt

SEQ ID NO: 700270 - DNA, 19 bp, Mus musculus
  siRNA target sequence for Copa (NM_009938.2,2462-2480).
cccagacattgatcctaat

SEQ ID NO: 700271 - DNA, 19 bp, Mus musculus
  siRNA target sequence for Copa (NM_009938.2,2505-2523).
cctatcatgccattggata

SEQ ID NO: 700272 - DNA, 19 bp, Mus musculus
  siRNA target sequence for Copa (NM_009938.2,2543-2561).
cgtgtccaaagggttcttt

SEQ ID NO: 700273 - DNA, 19 bp, Mus musculus
  siRNA target sequence for Copa (NM_009938.2,2698-2716).
gtttgggagaggatgttct

SEQ ID NO: 700274 - DNA, 19 bp, Mus musculus
  siRNA target sequence for Copa (NM_009938.2,2704-2722).
gagaggatgttcttggaaa

SEQ ID NO: 700275 - DNA, 19 bp, Mus musculus
  siRNA target sequence for Copa (NM_009938.2,2857-2875).
cgcaaatctggtgcaataa

SEQ ID NO: 700276 - DNA, 19 bp, Mus musculus
  siRNA target sequence for Copa (NM_009938.2,2859-2877).
caaatctggtgcaataact

SEQ ID NO: 700277 - DNA, 19 bp, Mus musculus
  siRNA target sequence for Copa (NM_009938.2,2960-2978).
gtttggcccctataagcaa

SEQ ID NO: 700278 - DNA, 19 bp, Mus musculus
  siRNA target sequence for Copa (NM_009938.2,2965-2983).
gcccctataagcaactgtt

SEQ ID NO: 700279 - DNA, 19 bp, Mus musculus
  siRNA target sequence for Copa (NM_009938.2,3032-3050).
cttgccctccatgtatagt

SEQ ID NO: 700280 - DNA, 19 bp, Mus musculus
  siRNA target sequence for Copa (NM_009938.2,3099-3117).
gctgtaggcctaaagctta

SEQ ID NO: 700281 - DNA, 19 bp, Mus musculus
  siRNA target sequence for Copa (NM_009938.2,3100-3118).
ctgtaggcctaaagcttaa

SEQ ID NO: 700282 - DNA, 19 bp, Mus musculus
  siRNA target sequence for Copa (NM_009938.2,3122-3140).
cctgatccaacgtttgcaa

SEQ ID NO: 700283 - DNA, 19 bp, Mus musculus
  siRNA target sequence for Copa (NM_009938.2,3373-3391).
cctacttcacacactcaaa

SEQ ID NO: 700284 - DNA, 19 bp, Mus musculus
  siRNA target sequence for Copa (NM_009938.2,3424-3442).
ggacagccctcaacctttt

SEQ ID NO: 700285 - DNA, 19 bp, Mus musculus
  siRNA target sequence for Copa (NM_009938.2,3522-3540).
cagcagacaagaaaaatct

SEQ ID NO: 700286 - DNA, 19 bp, Mus musculus
  siRNA target sequence for Copa (NM_009938.2,3539-3557).
cttatctgcctgtgagaaa

SEQ ID NO: 700287 - DNA, 19 bp, Mus musculus
  siRNA target sequence for Copa (NM_009938.2,3571-3589).
cctgccagctcaattatga

SEQ ID NO: 700288 - DNA, 19 bp, Mus musculus
  siRNA target sequence for Copa (NM_009938.2,3593-3611).
gcacaacccctttgacatt

SEQ ID NO: 700289 - DNA, 19 bp, Mus musculus
  siRNA target sequence for Copa (NM_009938.2,3594-3612).
cacaacccctttgacattt

SEQ ID NO: 700290 - DNA, 19 bp, Mus musculus
  siRNA target sequence for Copa (NM_009938.2,3629-3647).
gcccatctaccgtggaaaa

SEQ ID NO: 700291 - DNA, 19 bp, Mus musculus
  siRNA target sequence for Copa (NM_009938.2,3690-3708).
gagttcaaggggcaaatct

SEQ ID NO: 700292 - DNA, 19 bp, Mus musculus
  siRNA target sequence for Copa (NM_009938.2,3725-3743).
gacagagattggcaaagat

SEQ ID NO: 700293 - DNA, 19 bp, Mus musculus
  siRNA target sequence for Copa (NM_009938.2,3757-3775).
ggatcagtcctcttcagtt

SEQ ID NO: 700294 - DNA, 19 bp, Mus musculus
  siRNA target sequence for Cpne6 (NM_009947.2,276-294).
gtgcttcgctcctgttcaa

SEQ ID NO: 700295 - DNA, 19 bp, Mus musculus
  siRNA target sequence for Cpne6 (NM_009947.2,310-328).
gggtgctggccattgaata

SEQ ID NO: 700296 - DNA, 19 bp, Mus musculus
  siRNA target sequence for Cpne6 (NM_009947.2,314-332).
gctggccattgaatacttt

SEQ ID NO: 700297 - DNA, 19 bp, Mus musculus
  siRNA target sequence for Cpne6 (NM_009947.2,315-333).
ctggccattgaatactttt

SEQ ID NO: 700298 - DNA, 19 bp, Mus musculus
  siRNA target sequence for Cpne6 (NM_009947.2,319-337).
ccattgaatacttttttga

SEQ ID NO: 700299 - DNA, 19 bp, Mus musculus
  siRNA target sequence for Cpne6 (NM_009947.2,427-445).
gcaccttgggccagattgt

SEQ ID NO: 700300 - DNA, 19 bp, Mus musculus
  siRNA target sequence for Cpne6 (NM_009947.2,448-466).
cacaaaccaaggtcactaa

SEQ ID NO: 700301 - DNA, 19 bp, Mus musculus
  siRNA target sequence for Cpne6 (NM_009947.2,467-485).
gccattactgctgaagaat

SEQ ID NO: 700302 - DNA, 19 bp, Mus musculus
  siRNA target sequence for Cpne6 (NM_009947.2,535-553).
caggtaccaacgactatgt

SEQ ID NO: 700303 - DNA, 19 bp, Mus musculus
  siRNA target sequence for Cpne6 (NM_009947.2,612-630).
cccttcatggagatttata

SEQ ID NO: 700304 - DNA, 19 bp, Mus musculus
  siRNA target sequence for Cpne6 (NM_009947.2,714-732).
cgcctgtccttgcattctt

SEQ ID NO: 700305 - DNA, 19 bp, Mus musculus
  siRNA target sequence for Cpne6 (NM_009947.2,715-733).
gcctgtccttgcattcttt

SEQ ID NO: 700306 - DNA, 19 bp, Mus musculus
  siRNA target sequence for Cpne6 (NM_009947.2,757-775).
cgctcaagttcctggtata

SEQ ID NO: 700307 - DNA, 19 bp, Mus musculus
  siRNA target sequence for Cpne6 (NM_009947.2,768-786).
ctggtatatgactatgact

SEQ ID NO: 700308 - DNA, 19 bp, Mus musculus
  siRNA target sequence for Cpne6 (NM_009947.2,820-838).
ccagcacattccaggaaat

SEQ ID NO: 700309 - DNA, 19 bp, Mus musculus
  siRNA target sequence for Cpne6 (NM_009947.2,823-841).
gcacattccaggaaatgca

SEQ ID NO: 700310 - DNA, 19 bp, Mus musculus
  siRNA target sequence for Cpne6 (NM_009947.2,947-965).
ccagtgcaccgtggaaaaa

SEQ ID NO: 700311 - DNA, 19 bp, Mus musculus
  siRNA target sequence for Cpne6 (NM_009947.2,1183-1201).
ctcgaatccccccaaactt

SEQ ID NO: 700312 - DNA, 19 bp, Mus musculus
  siRNA target sequence for Cpne6 (NM_009947.2,1235-1253).
cccagaaaatcctgaatgt

SEQ ID NO: 700313 - DNA, 19 bp, Mus musculus
  siRNA target sequence for Cpne6 (NM_009947.2,1379-1397).
cggccaagccacgaagtat

SEQ ID NO: 700314 - DNA, 19 bp, Mus musculus
  siRNA target sequence for Cpne6 (NM_009947.2,1380-1398).
ggccaagccacgaagtatt

SEQ ID NO: 700315 - DNA, 19 bp, Mus musculus
  siRNA target sequence for Cpne6 (NM_009947.2,1473-1491).
cgcctgcccatgtcaatca

SEQ ID NO: 700316 - DNA, 19 bp, Mus musculus
  siRNA target sequence for Cpne6 (NM_009947.2,1532-1550).
gctactggacggagatgat

SEQ ID NO: 700317 - DNA, 19 bp, Mus musculus
  siRNA target sequence for Cpne6 (NM_009947.2,1579-1597).
ctgcagcccgtgacattgt

SEQ ID NO: 700318 - DNA, 19 bp, Mus musculus
  siRNA target sequence for Cpne6 (NM_009947.2,1633-1651).
ccccctctgcactagctaa

SEQ ID NO: 700319 - DNA, 19 bp, Mus musculus
  siRNA target sequence for Cpne6 (NM_009947.2,1637-1655).
ctctgcactagctaagtgt

SEQ ID NO: 700320 - DNA, 19 bp, Mus musculus
  siRNA target sequence for Cpne6 (NM_009947.2,1672-1690).
cacggcaggtggtagagta

SEQ ID NO: 700321 - DNA, 19 bp, Mus musculus
  siRNA target sequence for Cpne6 (NM_009947.2,1730-1748).
ctccacgccagctatgact

SEQ ID NO: 700322 - DNA, 19 bp, Mus musculus
  siRNA target sequence for Cpt1b (NM_009948.1,136-154).
gaagaaacgccttattcga

SEQ ID NO: 700323 - DNA, 19 bp, Mus musculus
  siRNA target sequence for Cpt1b (NM_009948.1,143-161).
cgccttattcgaatcaaga

SEQ ID NO: 700324 - DNA, 19 bp, Mus musculus
  siRNA target sequence for Cpt1b (NM_009948.1,201-219).
gctggctggttgttgtcat

SEQ ID NO: 700325 - DNA, 19 bp, Mus musculus
  siRNA target sequence for Cpt1b (NM_009948.1,285-303).
gatgcctcccggaaaggta

SEQ ID NO: 700326 - DNA, 19 bp, Mus musculus
  siRNA target sequence for Cpt1b (NM_009948.1,369-387).
gggcgacaggcattttctt

SEQ ID NO: 700327 - DNA, 19 bp, Mus musculus
  siRNA target sequence for Cpt1b (NM_009948.1,466-484).
caagatctgggctatctgt

SEQ ID NO: 700328 - DNA, 19 bp, Mus musculus
  siRNA target sequence for Cpt1b (NM_009948.1,556-574).
cagcgtgccagccacaatt

SEQ ID NO: 700329 - DNA, 19 bp, Mus musculus
  siRNA target sequence for Cpt1b (NM_009948.1,558-576).
gcgtgccagccacaattca

SEQ ID NO: 700330 - DNA, 19 bp, Mus musculus
  siRNA target sequence for Cpt1b (NM_009948.1,699-717).
catggtgggcaactaacta

SEQ ID NO: 700331 - DNA, 19 bp, Mus musculus
  siRNA target sequence for Cpt1b (NM_009948.1,784-802).
ctattatgccatggatttt

SEQ ID NO: 700332 - DNA, 19 bp, Mus musculus
  siRNA target sequence for Cpt1b (NM_009948.1,803-821).
gtgcttattaagaacacaa

SEQ ID NO: 700333 - DNA, 19 bp, Mus musculus
  siRNA target sequence for Cpt1b (NM_009948.1,851-869).
gttcacgccatgatcatgt

SEQ ID NO: 700334 - DNA, 19 bp, Mus musculus
  siRNA target sequence for Cpt1b (NM_009948.1,1255-1273).
cgaacgtgctgctttcttt

SEQ ID NO: 700335 - DNA, 19 bp, Mus musculus
  siRNA target sequence for Cpt1b (NM_009948.1,1310-1328).
gacgatgagaccagtctta

SEQ ID NO: 700336 - DNA, 19 bp, Mus musculus
  siRNA target sequence for Cpt1b (NM_009948.1,1464-1482).
ggcacctctgggagtttgt

SEQ ID NO: 700337 - DNA, 19 bp, Mus musculus
  siRNA target sequence for Cpt1b (NM_009948.1,1683-1701).
gcaaaggtcttatcaagaa

SEQ ID NO: 700338 - DNA, 19 bp, Mus musculus
  siRNA target sequence for Cpt1b (NM_009948.1,1790-1808).
gcctcgatgacaagaatgt

SEQ ID NO: 700339 - DNA, 19 bp, Mus musculus
  siRNA target sequence for Cpt1b (NM_009948.1,2002-2020).
catcgtctccaagtactta

SEQ ID NO: 700340 - DNA, 19 bp, Mus musculus
  siRNA target sequence for Cpt1b (NM_009948.1,2041-2059).
ggctgaggtactttctgaa

SEQ ID NO: 700341 - DNA, 19 bp, Mus musculus
  siRNA target sequence for Cpt1b (NM_009948.1,2092-2110).
gttccagatctgcatgttt

SEQ ID NO: 700342 - DNA, 19 bp, Mus musculus
  siRNA target sequence for Cpt1b (NM_009948.1,2107-2125).
gtttgacccaaaacagtat

SEQ ID NO: 700343 - DNA, 19 bp, Mus musculus
  siRNA target sequence for Cpt1b (NM_009948.1,2174-2192).
ggctacggggtctcttaca

SEQ ID NO: 700344 - DNA, 19 bp, Mus musculus
  siRNA target sequence for Cpt1b (NM_009948.1,2175-2193).
gctacggggtctcttacat

SEQ ID NO: 700345 - DNA, 19 bp, Mus musculus
  siRNA target sequence for Cpt1b (NM_009948.1,2297-2315).
gacatcgccgaacttttca

SEQ ID NO: 700346 - DNA, 19 bp, Mus musculus
  siRNA target sequence for Cpt1b (NM_009948.1,2299-2317).
catcgccgaacttttcaaa

SEQ ID NO: 700347 - DNA, 19 bp, Mus musculus
  siRNA target sequence for Cpt1b (NM_009948.1,2303-2321).
gccgaacttttcaaaattt

SEQ ID NO: 700348 - DNA, 19 bp, Mus musculus
  siRNA target sequence for Pcdha7 (NM_009957.1,582-600).
ggttttgcggaaaccttta

SEQ ID NO: 700349 - DNA, 19 bp, Mus musculus
  siRNA target sequence for Pcdha7 (NM_009957.1,614-632).
ctgcagagattcgcttatt

SEQ ID NO: 700350 - DNA, 19 bp, Mus musculus
  siRNA target sequence for Pcdha7 (NM_009957.1,617-635).
cagagattcgcttattgct

SEQ ID NO: 700351 - DNA, 19 bp, Mus musculus
  siRNA target sequence for Pcdha7 (NM_009957.1,664-682).
ctgacaggcaccgttcaat

SEQ ID NO: 700352 - DNA, 19 bp, Mus musculus
  siRNA target sequence for Pcdha7 (NM_009957.1,666-684).
gacaggcaccgttcaatta

SEQ ID NO: 700353 - DNA, 19 bp, Mus musculus
  siRNA target sequence for Pcdha7 (NM_009957.1,668-686).
caggcaccgttcaattact

SEQ ID NO: 700354 - DNA, 19 bp, Mus musculus
  siRNA target sequence for Pcdha7 (NM_009957.1,670-688).
ggcaccgttcaattactca

SEQ ID NO: 700355 - DNA, 19 bp, Mus musculus
  siRNA target sequence for Pcdha7 (NM_009957.1,671-689).
gcaccgttcaattactcat

SEQ ID NO: 700356 - DNA, 19 bp, Mus musculus
  siRNA target sequence for Pcdha7 (NM_009957.1,815-833).
gcgtgaatggggacgttat

SEQ ID NO: 700357 - DNA, 19 bp, Mus musculus
  siRNA target sequence for Pcdha7 (NM_009957.1,817-835).
gtgaatggggacgttatgt

SEQ ID NO: 700358 - DNA, 19 bp, Mus musculus
  siRNA target sequence for Pcdha7 (NM_009957.1,934-952).
gagagtaaagcttacaaga

SEQ ID NO: 700359 - DNA, 19 bp, Mus musculus
  siRNA target sequence for Pcdha7 (NM_009957.1,936-954).
gagtaaagcttacaagatt

SEQ ID NO: 700360 - DNA, 19 bp, Mus musculus
  siRNA target sequence for Pcdha7 (NM_009957.1,956-974).
cattggaggcacgtgataa

SEQ ID NO: 700361 - DNA, 19 bp, Mus musculus
  siRNA target sequence for Pcdha7 (NM_009957.1,1042-1060).
ccacagttgacggttagtt

SEQ ID NO: 700362 - DNA, 19 bp, Mus musculus
  siRNA target sequence for Pcdha7 (NM_009957.1,1096-1114).
ggaagagtcgtcactttaa

SEQ ID NO: 700363 - DNA, 19 bp, Mus musculus
  siRNA target sequence for Pcdha7 (NM_009957.1,1097-1115).
gaagagtcgtcactttaat

SEQ ID NO: 700364 - DNA, 19 bp, Mus musculus
  siRNA target sequence for Pcdha7 (NM_009957.1,1248-1266).
gaccatcgctaactatgat

SEQ ID NO: 700365 - DNA, 19 bp, Mus musculus
  siRNA target sequence for Pcdha7 (NM_009957.1,1250-1268).
ccatcgctaactatgatgt

SEQ ID NO: 700366 - DNA, 19 bp, Mus musculus
  siRNA target sequence for Pcdha7 (NM_009957.1,1714-1732).
ggggttggtggcacaatga

SEQ ID NO: 700367 - DNA, 19 bp, Mus musculus
  siRNA target sequence for Pcdha7 (NM_009957.1,1715-1733).
gggttggtggcacaatgaa

SEQ ID NO: 700368 - DNA, 19 bp, Mus musculus
  siRNA target sequence for Pcdha7 (NM_009957.1,1716-1734).
ggttggtggcacaatgaat

SEQ ID NO: 700369 - DNA, 19 bp, Mus musculus
  siRNA target sequence for Pcdha7 (NM_009957.1,1731-1749).
gaatgaggtagtatcaaga

SEQ ID NO: 700370 - DNA, 19 bp, Mus musculus
  siRNA target sequence for Pcdha7 (NM_009957.1,1926-1944).
cttgcggcagtgcttgtta

SEQ ID NO: 700371 - DNA, 19 bp, Mus musculus
  siRNA target sequence for Pcdha7 (NM_009957.1,1931-1949).
ggcagtgcttgttagtgtt

SEQ ID NO: 700372 - DNA, 19 bp, Mus musculus
  siRNA target sequence for Pcdha7 (NM_009957.1,1941-1959).
gttagtgttggtgaaagat

SEQ ID NO: 700373 - DNA, 19 bp, Mus musculus
  siRNA target sequence for Pcdha5 (NM_009959.1,382-400).
gacaacccgcctaaattct

SEQ ID NO: 700374 - DNA, 19 bp, Mus musculus
  siRNA target sequence for Pcdha5 (NM_009959.1,384-402).
caacccgcctaaattctca

SEQ ID NO: 700375 - DNA, 19 bp, Mus musculus
  siRNA target sequence for Pcdha5 (NM_009959.1,399-417).
ctcacgacctgaacaaaga

SEQ ID NO: 700376 - DNA, 19 bp, Mus musculus
  siRNA target sequence for Pcdha5 (NM_009959.1,404-422).
gacctgaacaaagattatt

SEQ ID NO: 700377 - DNA, 19 bp, Mus musculus
  siRNA target sequence for Pcdha5 (NM_009959.1,406-424).
cctgaacaaagattattta

SEQ ID NO: 700378 - DNA, 19 bp, Mus musculus
  siRNA target sequence for Pcdha5 (NM_009959.1,460-478).
gtagagggcgcatctgatt

SEQ ID NO: 700379 - DNA, 19 bp, Mus musculus
  siRNA target sequence for Pcdha5 (NM_009959.1,465-483).
gggcgcatctgatttggat

SEQ ID NO: 700380 - DNA, 19 bp, Mus musculus
  siRNA target sequence for Pcdha5 (NM_009959.1,466-484).
ggcgcatctgatttggata

SEQ ID NO: 700381 - DNA, 19 bp, Mus musculus
  siRNA target sequence for Pcdha5 (NM_009959.1,467-485).
gcgcatctgatttggatat

SEQ ID NO: 700382 - DNA, 19 bp, Mus musculus
  siRNA target sequence for Pcdha5 (NM_009959.1,468-486).
cgcatctgatttggatata

SEQ ID NO: 700383 - DNA, 19 bp, Mus musculus
  siRNA target sequence for Pcdha5 (NM_009959.1,504-522).
gagttataagataaatcct

SEQ ID NO: 700384 - DNA, 19 bp, Mus musculus
  siRNA target sequence for Pcdha5 (NM_009959.1,566-584).
caagcgttttacaactagt

SEQ ID NO: 700385 - DNA, 19 bp, Mus musculus
  siRNA target sequence for Pcdha5 (NM_009959.1,588-606).
gaagaagcccctagataga

SEQ ID NO: 700386 - DNA, 19 bp, Mus musculus
  siRNA target sequence for Pcdha5 (NM_009959.1,630-648).
gttgctcattgcaattgat

SEQ ID NO: 700387 - DNA, 19 bp, Mus musculus
  siRNA target sequence for Pcdha5 (NM_009959.1,670-688).
ggtactgttcagttactga

SEQ ID NO: 700388 - DNA, 19 bp, Mus musculus
  siRNA target sequence for Pcdha5 (NM_009959.1,671-689).
gtactgttcagttactgat

SEQ ID NO: 700389 - DNA, 19 bp, Mus musculus
  siRNA target sequence for Pcdha5 (NM_009959.1,674-692).
ctgttcagttactgattga

SEQ ID NO: 700390 - DNA, 19 bp, Mus musculus
  siRNA target sequence for Pcdha5 (NM_009959.1,715-733).
gctccggagtttgataaat

SEQ ID NO: 700391 - DNA, 19 bp, Mus musculus
  siRNA target sequence for Pcdha5 (NM_009959.1,718-736).
ccggagtttgataaatcta

SEQ ID NO: 700392 - DNA, 19 bp, Mus musculus
  siRNA target sequence for Pcdha5 (NM_009959.1,720-738).
ggagtttgataaatctatt

SEQ ID NO: 700393 - DNA, 19 bp, Mus musculus
  siRNA target sequence for Pcdha5 (NM_009959.1,764-782).
cacccaacgggacattagt

SEQ ID NO: 700394 - DNA, 19 bp, Mus musculus
  siRNA target sequence for Pcdha5 (NM_009959.1,767-785).
ccaacgggacattagtcat

SEQ ID NO: 700395 - DNA, 19 bp, Mus musculus
  siRNA target sequence for Pcdha5 (NM_009959.1,768-786).
caacgggacattagtcatt

SEQ ID NO: 700396 - DNA, 19 bp, Mus musculus
  siRNA target sequence for Pcdha5 (NM_009959.1,771-789).
cgggacattagtcattaaa

SEQ ID NO: 700397 - DNA, 19 bp, Mus musculus
  siRNA target sequence for Pcdha5 (NM_009959.1,776-794).
cattagtcattaaactcaa

SEQ ID NO: 700398 - DNA, 19 bp, Mus musculus
  siRNA target sequence for Pcdha5 (NM_009959.1,802-820).
gatgcggatgagggaatta

SEQ ID NO: 700399 - DNA, 19 bp, Mus musculus
  siRNA target sequence for Pcdha5 (NM_009959.1,805-823).
gcggatgagggaattaata

SEQ ID NO: 700400 - DNA, 19 bp, Mus musculus
  siRNA target sequence for Pcdha5 (NM_009959.1,806-824).
cggatgagggaattaataa

SEQ ID NO: 700401 - DNA, 19 bp, Mus musculus
  siRNA target sequence for Pcdha5 (NM_009959.1,853-871).
gttcttgacgatgtaaaat

SEQ ID NO: 700402 - DNA, 19 bp, Mus musculus
  siRNA target sequence for Pcdha5 (NM_009959.1,856-874).
cttgacgatgtaaaatcta

SEQ ID NO: 700403 - DNA, 19 bp, Mus musculus
  siRNA target sequence for Pcdha5 (NM_009959.1,859-877).
gacgatgtaaaatctaaat

SEQ ID NO: 700404 - DNA, 19 bp, Mus musculus
  siRNA target sequence for Pcdha5 (NM_009959.1,865-883).
gtaaaatctaaatttacga

SEQ ID NO: 700405 - DNA, 19 bp, Mus musculus
  siRNA target sequence for Pcdha5 (NM_009959.1,995-1013).
gacactgcaaaattatagt

SEQ ID NO: 700406 - DNA, 19 bp, Mus musculus
  siRNA target sequence for Pcdha5 (NM_009959.1,999-1017).
ctgcaaaattatagtgaaa

SEQ ID NO: 700407 - DNA, 19 bp, Mus musculus
  siRNA target sequence for Pcdha5 (NM_009959.1,1014-1032).
gaaactagtggatgtaaat

SEQ ID NO: 700408 - DNA, 19 bp, Mus musculus
  siRNA target sequence for Pcdha5 (NM_009959.1,1042-1060).
cctgagatggccataacct

SEQ ID NO: 700409 - DNA, 19 bp, Mus musculus
  siRNA target sequence for Pcdha5 (NM_009959.1,1707-1725).
gggtagcggaggaactatt

SEQ ID NO: 700410 - DNA, 19 bp, Mus musculus
  siRNA target sequence for Pcdha5 (NM_009959.1,1709-1727).
gtagcggaggaactattga

SEQ ID NO: 700411 - DNA, 19 bp, Mus musculus
  siRNA target sequence for Pcdha5 (NM_009959.1,1712-1730).
gcggaggaactattgagtt

SEQ ID NO: 700412 - DNA, 19 bp, Mus musculus
  siRNA target sequence for Pcdha5 (NM_009959.1,1715-1733).
gaggaactattgagttgtt

SEQ ID NO: 700413 - DNA, 19 bp, Mus musculus
  siRNA target sequence for Pcdha5 (NM_009959.1,1717-1735).
ggaactattgagttgttgt

SEQ ID NO: 700414 - DNA, 19 bp, Mus musculus
  siRNA target sequence for Pcdha5 (NM_009959.1,1857-1875).
ccgcgtggggctatacact

SEQ ID NO: 700415 - DNA, 19 bp, Mus musculus
  siRNA target sequence for Pcdha5 (NM_009959.1,2057-2075).
cagactccacgctgataga

SEQ ID NO: 700416 - DNA, 19 bp, Mus musculus
  siRNA target sequence for Pcdha11 (NM_009960.1,496-514).
gctgtattggtctacagat

SEQ ID NO: 700417 - DNA, 19 bp, Mus musculus
  siRNA target sequence for Pcdha11 (NM_009960.1,499-517).
gtattggtctacagattaa

SEQ ID NO: 700418 - DNA, 19 bp, Mus musculus
  siRNA target sequence for Pcdha11 (NM_009960.1,536-554).
ctttagaaccaccaatcaa

SEQ ID NO: 700419 - DNA, 19 bp, Mus musculus
  siRNA target sequence for Pcdha11 (NM_009960.1,566-584).
ctaaaagaccgtcacttat

SEQ ID NO: 700420 - DNA, 19 bp, Mus musculus
  siRNA target sequence for Pcdha11 (NM_009960.1,572-590).
gaccgtcacttatattaaa

SEQ ID NO: 700421 - DNA, 19 bp, Mus musculus
  siRNA target sequence for Pcdha11 (NM_009960.1,574-592).
ccgtcacttatattaaaga

SEQ ID NO: 700422 - DNA, 19 bp, Mus musculus
  siRNA target sequence for Pcdha11 (NM_009960.1,575-593).
cgtcacttatattaaagaa

SEQ ID NO: 700423 - DNA, 19 bp, Mus musculus
  siRNA target sequence for Pcdha11 (NM_009960.1,595-613).
gttctagatcgggagaaaa

SEQ ID NO: 700424 - DNA, 19 bp, Mus musculus
  siRNA target sequence for Pcdha11 (NM_009960.1,609-627).
gaaaaccccggaacttaat

SEQ ID NO: 700425 - DNA, 19 bp, Mus musculus
  siRNA target sequence for Pcdha11 (NM_009960.1,614-632).
ccccggaacttaatttgct

SEQ ID NO: 700426 - DNA, 19 bp, Mus musculus
  siRNA target sequence for Pcdha11 (NM_009960.1,615-633).
cccggaacttaatttgcta

SEQ ID NO: 700427 - DNA, 19 bp, Mus musculus
  siRNA target sequence for Pcdha11 (NM_009960.1,616-634).
ccggaacttaatttgctat

SEQ ID NO: 700428 - DNA, 19 bp, Mus musculus
  siRNA target sequence for Pcdha11 (NM_009960.1,660-678).
ggagctcacgggtacagtt

SEQ ID NO: 700429 - DNA, 19 bp, Mus musculus
  siRNA target sequence for Pcdha11 (NM_009960.1,686-704).
gggttcgtgtcttagatgt

SEQ ID NO: 700430 - DNA, 19 bp, Mus musculus
  siRNA target sequence for Pcdha11 (NM_009960.1,687-705).
ggttcgtgtcttagatgtt

SEQ ID NO: 700431 - DNA, 19 bp, Mus musculus
  siRNA target sequence for Pcdha11 (NM_009960.1,692-710).
gtgtcttagatgttaacga

SEQ ID NO: 700432 - DNA, 19 bp, Mus musculus
  siRNA target sequence for Pcdha11 (NM_009960.1,721-739).
gtgttcgatcatttagaat

SEQ ID NO: 700433 - DNA, 19 bp, Mus musculus
  siRNA target sequence for Pcdha11 (NM_009960.1,736-754).
gaatacaaggtaagaataa

SEQ ID NO: 700434 - DNA, 19 bp, Mus musculus
  siRNA target sequence for Pcdha11 (NM_009960.1,818-836).
caaacgggcaactggtata

SEQ ID NO: 700435 - DNA, 19 bp, Mus musculus
  siRNA target sequence for Pcdha11 (NM_009960.1,822-840).
cgggcaactggtatactct

SEQ ID NO: 700436 - DNA, 19 bp, Mus musculus
  siRNA target sequence for Pcdha11 (NM_009960.1,823-841).
gggcaactggtatactctt

SEQ ID NO: 700437 - DNA, 19 bp, Mus musculus
  siRNA target sequence for Pcdha11 (NM_009960.1,824-842).
ggcaactggtatactcttt

SEQ ID NO: 700438 - DNA, 19 bp, Mus musculus
  siRNA target sequence for Pcdha11 (NM_009960.1,856-874).
cccactgggaggcatttat

SEQ ID NO: 700439 - DNA, 19 bp, Mus musculus
  siRNA target sequence for Pcdha11 (NM_009960.1,857-875).
ccactgggaggcatttatt

SEQ ID NO: 700440 - DNA, 19 bp, Mus musculus
  siRNA target sequence for Pcdha11 (NM_009960.1,905-923).
gggtcaacgggactttaga

SEQ ID NO: 700441 - DNA, 19 bp, Mus musculus
  siRNA target sequence for Pcdha11 (NM_009960.1,906-924).
ggtcaacgggactttagat

SEQ ID NO: 700442 - DNA, 19 bp, Mus musculus
  siRNA target sequence for Pcdha11 (NM_009960.1,907-925).
gtcaacgggactttagatt

SEQ ID NO: 700443 - DNA, 19 bp, Mus musculus
  siRNA target sequence for Pcdha11 (NM_009960.1,909-927).
caacgggactttagattat

SEQ ID NO: 700444 - DNA, 19 bp, Mus musculus
  siRNA target sequence for Pcdha11 (NM_009960.1,912-930).
cgggactttagattatgaa

SEQ ID NO: 700445 - DNA, 19 bp, Mus musculus
  siRNA target sequence for Pcdha11 (NM_009960.1,914-932).
ggactttagattatgaaga

SEQ ID NO: 700446 - DNA, 19 bp, Mus musculus
  siRNA target sequence for Pcdha11 (NM_009960.1,922-940).
gattatgaagagaacaaat

SEQ ID NO: 700447 - DNA, 19 bp, Mus musculus
  siRNA target sequence for Pcdha11 (NM_009960.1,936-954).
caaattgtatgaaatagaa

SEQ ID NO: 700448 - DNA, 19 bp, Mus musculus
  siRNA target sequence for Pcdha11 (NM_009960.1,1000-1018).
gtagtcttggtagaaatct

SEQ ID NO: 700449 - DNA, 19 bp, Mus musculus
  siRNA target sequence for Pcdha11 (NM_009960.1,1039-1057).
cctgaagtgacattaactt

SEQ ID NO: 700450 - DNA, 19 bp, Mus musculus
  siRNA target sequence for Pcdha11 (NM_009960.1,1086-1104).
ccagccaaatacagtcatt

SEQ ID NO: 700451 - DNA, 19 bp, Mus musculus
  siRNA target sequence for Pcdha11 (NM_009960.1,1116-1134).
cgtatccgaccttgattct

SEQ ID NO: 700452 - DNA, 19 bp, Mus musculus
  siRNA target sequence for Pcdha11 (NM_009960.1,1169-1187).
ccaatgtccccttcaagat

SEQ ID NO: 700453 - DNA, 19 bp, Mus musculus
  siRNA target sequence for Pcdha11 (NM_009960.1,1240-1258).
cgcgagagagtgtcaactt

SEQ ID NO: 700454 - DNA, 19 bp, Mus musculus
  siRNA target sequence for Pcdha11 (NM_009960.1,1241-1259).
gcgagagagtgtcaactta

SEQ ID NO: 700455 - DNA, 19 bp, Mus musculus
  siRNA target sequence for Pcdha11 (NM_009960.1,1245-1263).
gagagtgtcaacttatgat

SEQ ID NO: 700456 - DNA, 19 bp, Mus musculus
  siRNA target sequence for Pcdha11 (NM_009960.1,1251-1269).
gtcaacttatgatttggtt

SEQ ID NO: 700457 - DNA, 19 bp, Mus musculus
  siRNA target sequence for Pcdha11 (NM_009960.1,1256-1274).
cttatgatttggttgtgat

SEQ ID NO: 700458 - DNA, 19 bp, Mus musculus
  siRNA target sequence for Pcdha11 (NM_009960.1,1925-1943).
ctcggcagactctattggt

SEQ ID NO: 700459 - DNA, 19 bp, Mus musculus
  siRNA target sequence for Pcdha11 (NM_009960.1,1979-1997).
ccactgcaactgttttagt

SEQ ID NO: 700460 - DNA, 19 bp, Mus musculus
  siRNA target sequence for Pcdha10 (NM_009961.1,432-450).
ggaatcgagagctctagat

SEQ ID NO: 700461 - DNA, 19 bp, Mus musculus
  siRNA target sequence for Pcdha10 (NM_009961.1,442-460).
gctctagatcctcattttt

SEQ ID NO: 700462 - DNA, 19 bp, Mus musculus
  siRNA target sequence for Pcdha10 (NM_009961.1,517-535).
ctgagtcccagtgaatatt

SEQ ID NO: 700463 - DNA, 19 bp, Mus musculus
  siRNA target sequence for Pcdha10 (NM_009961.1,554-572).
ccacagatgagttggtaaa

SEQ ID NO: 700464 - DNA, 19 bp, Mus musculus
  siRNA target sequence for Pcdha10 (NM_009961.1,555-573).
cacagatgagttggtaaaa

SEQ ID NO: 700465 - DNA, 19 bp, Mus musculus
  siRNA target sequence for Pcdha10 (NM_009961.1,577-595).
ctccaactagtgttaaaga

SEQ ID NO: 700466 - DNA, 19 bp, Mus musculus
  siRNA target sequence for Pcdha10 (NM_009961.1,614-632).
gagcttcagagcttcactt

SEQ ID NO: 700467 - DNA, 19 bp, Mus musculus
  siRNA target sequence for Pcdha10 (NM_009961.1,671-689).
caggcaccttggagttaca

SEQ ID NO: 700468 - DNA, 19 bp, Mus musculus
  siRNA target sequence for Pcdha10 (NM_009961.1,673-691).
ggcaccttggagttacata

SEQ ID NO: 700469 - DNA, 19 bp, Mus musculus
  siRNA target sequence for Pcdha10 (NM_009961.1,674-692).
gcaccttggagttacatat

SEQ ID NO: 700470 - DNA, 19 bp, Mus musculus
  siRNA target sequence for Pcdha10 (NM_009961.1,675-693).
caccttggagttacatatt

SEQ ID NO: 700471 - DNA, 19 bp, Mus musculus
  siRNA target sequence for Pcdha10 (NM_009961.1,678-696).
cttggagttacatattaca

SEQ ID NO: 700472 - DNA, 19 bp, Mus musculus
  siRNA target sequence for Pcdha10 (NM_009961.1,747-765).
ggtgaagctggtagaaaat

SEQ ID NO: 700473 - DNA, 19 bp, Mus musculus
  siRNA target sequence for Pcdha10 (NM_009961.1,776-794).
gtaccgtggtcattagact

SEQ ID NO: 700474 - DNA, 19 bp, Mus musculus
  siRNA target sequence for Pcdha10 (NM_009961.1,780-798).
cgtggtcattagacttaat

SEQ ID NO: 700475 - DNA, 19 bp, Mus musculus
  siRNA target sequence for Pcdha10 (NM_009961.1,810-828).
ggacgaaggttcaaatggt

SEQ ID NO: 700476 - DNA, 19 bp, Mus musculus
  siRNA target sequence for Pcdha10 (NM_009961.1,867-885).
gaccgaagccacttttcat

SEQ ID NO: 700477 - DNA, 19 bp, Mus musculus
  siRNA target sequence for Pcdha10 (NM_009961.1,869-887).
ccgaagccacttttcatat

SEQ ID NO: 700478 - DNA, 19 bp, Mus musculus
  siRNA target sequence for Pcdha10 (NM_009961.1,870-888).
cgaagccacttttcatata

SEQ ID NO: 700479 - DNA, 19 bp, Mus musculus
  siRNA target sequence for Pcdha10 (NM_009961.1,878-896).
cttttcatatagattcagt

SEQ ID NO: 700480 - DNA, 19 bp, Mus musculus
  siRNA target sequence for Pcdha10 (NM_009961.1,941-959).
ctaatttatggaagattca

SEQ ID NO: 700481 - DNA, 19 bp, Mus musculus
  siRNA target sequence for Pcdha10 (NM_009961.1,997-1015).
ggtcactgcacaatcttaa

SEQ ID NO: 700482 - DNA, 19 bp, Mus musculus
  siRNA target sequence for Pcdha10 (NM_009961.1,998-1016).
gtcactgcacaatcttaat

SEQ ID NO: 700483 - DNA, 19 bp, Mus musculus
  siRNA target sequence for Pcdha10 (NM_009961.1,1002-1020).
ctgcacaatcttaattgaa

SEQ ID NO: 700484 - DNA, 19 bp, Mus musculus
  siRNA target sequence for Pcdha10 (NM_009961.1,1036-1054).
gataatgctcccaagataa

SEQ ID NO: 700485 - DNA, 19 bp, Mus musculus
  siRNA target sequence for Pcdha10 (NM_009961.1,1042-1060).
gctcccaagataatagtaa

SEQ ID NO: 700486 - DNA, 19 bp, Mus musculus
  siRNA target sequence for Pcdha10 (NM_009961.1,1045-1063).
cccaagataatagtaacat

SEQ ID NO: 700487 - DNA, 19 bp, Mus musculus
  siRNA target sequence for Pcdha10 (NM_009961.1,1100-1118).
ggacagttattgccttaat

SEQ ID NO: 700488 - DNA, 19 bp, Mus musculus
  siRNA target sequence for Pcdha10 (NM_009961.1,1865-1883).
ccttccgtgtgggactata

SEQ ID NO: 700489 - DNA, 19 bp, Mus musculus
  siRNA target sequence for Pcdha10 (NM_009961.1,1887-1905).
gggtgagatcagtatcact

SEQ ID NO: 700490 - DNA, 19 bp, Mus musculus
  siRNA target sequence for Pcdha10 (NM_009961.1,2137-2155).
ctcacactggtgttgtaca

SEQ ID NO: 700491 - DNA, 19 bp, Mus musculus
  siRNA target sequence for Pcdha10 (NM_009961.1,2291-2309).
caccgaagacagatctcat

SEQ ID NO: 700492 - DNA, 19 bp, Mus musculus
  siRNA target sequence for Pcdha10 (NM_009961.1,2354-2372).
gtggagtccagcaagagat

SEQ ID NO: 700493 - DNA, 19 bp, Mus musculus
  siRNA target sequence for Csf2ra (NM_009970.1,320-338).
gtgtcacgctggatgtcaa

SEQ ID NO: 700494 - DNA, 19 bp, Mus musculus
  siRNA target sequence for Csf2ra (NM_009970.1,373-391).
ctgagcttcgtcaacgaaa

SEQ ID NO: 700495 - DNA, 19 bp, Mus musculus
  siRNA target sequence for Csf2ra (NM_009970.1,715-733).
gtcaccgcgtcctgtaact

SEQ ID NO: 700496 - DNA, 19 bp, Mus musculus
  siRNA target sequence for Csf2ra (NM_009970.1,717-735).
caccgcgtcctgtaactct

SEQ ID NO: 700497 - DNA, 19 bp, Mus musculus
  siRNA target sequence for Csnb (NM_009972.1,380-398).
gaactggaatccttcctta

SEQ ID NO: 700498 - DNA, 19 bp, Mus musculus
  siRNA target sequence for Csnb (NM_009972.1,385-403).
ggaatccttccttaaagct

SEQ ID NO: 700499 - DNA, 19 bp, Mus musculus
  siRNA target sequence for Csnb (NM_009972.1,489-507).
gccttgccagtcttgctaa

SEQ ID NO: 700500 - DNA, 19 bp, Mus musculus
  siRNA target sequence for Csnb (NM_009972.1,490-508).
ccttgccagtcttgctaat

SEQ ID NO: 700501 - DNA, 19 bp, Mus musculus
  siRNA target sequence for Csnd (NM_009973.1,72-90).
cagaggatggagcaataca

SEQ ID NO: 700502 - DNA, 19 bp, Mus musculus
  siRNA target sequence for Csnd (NM_009973.1,123-141).
gaaaactttaagcagaata

SEQ ID NO: 700503 - DNA, 19 bp, Mus musculus
  siRNA target sequence for Csnd (NM_009973.1,168-186).
gaaactgtagagaacattt

SEQ ID NO: 700504 - DNA, 19 bp, Mus musculus
  siRNA target sequence for Csnd (NM_009973.1,221-239).
gaaggtatctgacatcatt

SEQ ID NO: 700505 - DNA, 19 bp, Mus musculus
  siRNA target sequence for Csnd (NM_009973.1,283-301).
gtgccagagagaaaactgt

SEQ ID NO: 700506 - DNA, 19 bp, Mus musculus
  siRNA target sequence for Csnd (NM_009973.1,300-318).
gtgatgactgaagaaagta

SEQ ID NO: 700507 - DNA, 19 bp, Mus musculus
  siRNA target sequence for Csnd (NM_009973.1,316-334).
gtaagaacatccaagacta

SEQ ID NO: 700508 - DNA, 19 bp, Mus musculus
  siRNA target sequence for Csnd (NM_009973.1,381-399).
gtaaagcttctccatcaat

SEQ ID NO: 700509 - DNA, 19 bp, Mus musculus
  siRNA target sequence for Cyp11b2 (NM_009991.2,539-557).
ctcgtgggagccttaccat

SEQ ID NO: 700510 - DNA, 19 bp, Mus musculus
  siRNA target sequence for Cyp11b2 (NM_009991.2,572-590).
gcctcttcaactacactat

SEQ ID NO: 700511 - DNA, 19 bp, Mus musculus
  siRNA target sequence for Cyp11b2 (NM_009991.2,679-697).
ctgcattctatgttcaagt

SEQ ID NO: 700512 - DNA, 19 bp, Mus musculus
  siRNA target sequence for Cyp11b2 (NM_009991.2,749-767).
ctcgggtgtggaaagaaca

SEQ ID NO: 700513 - DNA, 19 bp, Mus musculus
  siRNA target sequence for Cyp11b2 (NM_009991.2,862-880).
ggcattgtggcggaactaa

SEQ ID NO: 700514 - DNA, 19 bp, Mus musculus
  siRNA target sequence for Cyp11b2 (NM_009991.2,864-882).
cattgtggcggaactaata

SEQ ID NO: 700515 - DNA, 19 bp, Mus musculus
  siRNA target sequence for Cyp11b2 (NM_009991.2,897-915).
gcctctcgacgccatcaaa

SEQ ID NO: 700516 - DNA, 19 bp, Mus musculus
  siRNA target sequence for Cyp11b2 (NM_009991.2,907-925).
gccatcaaagcgaactcta

SEQ ID NO: 700517 - DNA, 19 bp, Mus musculus
  siRNA target sequence for Cyp11b2 (NM_009991.2,908-926).
ccatcaaagcgaactctat

SEQ ID NO: 700518 - DNA, 19 bp, Mus musculus
  siRNA target sequence for Cyp11b2 (NM_009991.2,956-974).
cagcaatccccttggtaat

SEQ ID NO: 700519 - DNA, 19 bp, Mus musculus
  siRNA target sequence for Cyp11b2 (NM_009991.2,958-976).
gcaatccccttggtaatga

SEQ ID NO: 700520 - DNA, 19 bp, Mus musculus
  siRNA target sequence for Cyp11b2 (NM_009991.2,990-1008).
ggctcggaacccagatgtt

SEQ ID NO: 700521 - DNA, 19 bp, Mus musculus
  siRNA target sequence for Cyp11b2 (NM_009991.2,1044-1062).
ggccagcatcgctgcaaat

SEQ ID NO: 700522 - DNA, 19 bp, Mus musculus
  siRNA target sequence for Cyp11b2 (NM_009991.2,1092-1110).
gctgagggctgcccttaaa

SEQ ID NO: 700523 - DNA, 19 bp, Mus musculus
  siRNA target sequence for Cyp11b2 (NM_009991.2,1198-1216).
gggacattggtcctacttt

SEQ ID NO: 700524 - DNA, 19 bp, Mus musculus
  siRNA target sequence for Cyp11b2 (NM_009991.2,1199-1217).
ggacattggtcctacttta

SEQ ID NO: 700525 - DNA, 19 bp, Mus musculus
  siRNA target sequence for Cyp11b2 (NM_009991.2,1200-1218).
gacattggtcctactttat

SEQ ID NO: 700526 - DNA, 19 bp, Mus musculus
  siRNA target sequence for Cyp11b2 (NM_009991.2,1253-1271).
caaggcctgaacgctatat

SEQ ID NO: 700527 - DNA, 19 bp, Mus musculus
  siRNA target sequence for Cyp11b2 (NM_009991.2,1374-1392).
gctcctgcttcaccatata

SEQ ID NO: 700528 - DNA, 19 bp, Mus musculus
  siRNA target sequence for Cyp11b2 (NM_009991.2,1380-1398).
gcttcaccatatactgaaa

SEQ ID NO: 700529 - DNA, 19 bp, Mus musculus
  siRNA target sequence for Cyp11b2 (NM_009991.2,1381-1399).
cttcaccatatactgaaaa

SEQ ID NO: 700530 - DNA, 19 bp, Mus musculus
  siRNA target sequence for Cyp11b2 (NM_009991.2,1437-1455).
gatggcctaccgctttgtt

SEQ ID NO: 700531 - DNA, 19 bp, Mus musculus
  siRNA target sequence for Cyp11b2 (NM_009991.2,1441-1459).
gcctaccgctttgttttga

SEQ ID NO: 700532 - DNA, 19 bp, Mus musculus
  siRNA target sequence for Cyp11b2 (NM_009991.2,1442-1460).
cctaccgctttgttttgat

SEQ ID NO: 700533 - DNA, 19 bp, Mus musculus
  siRNA target sequence for Cyp2b10 (NM_009998.2,1292-1310).
ccttctcaacaggacaaat

SEQ ID NO: 700534 - DNA, 19 bp, Mus musculus
  siRNA target sequence for Defcr4 (NM_010039.1,177-195).
gagaggtttgttatgctat

SEQ ID NO: 700535 - DNA, 19 bp, Mus musculus
  siRNA target sequence for Defcr4 (NM_010039.1,235-253).
gggacttgtggaatacgat

SEQ ID NO: 700536 - DNA, 19 bp, Mus musculus
  siRNA target sequence for Defcr4 (NM_010039.1,237-255).
gacttgtggaatacgattt

SEQ ID NO: 700537 - DNA, 19 bp, Mus musculus
  siRNA target sequence for Defcr4 (NM_010039.1,239-257).
cttgtggaatacgattttt

SEQ ID NO: 700538 - DNA, 19 bp, Mus musculus
  siRNA target sequence for Defcr4 (NM_010039.1,242-260).
gtggaatacgatttttgta

SEQ ID NO: 700539 - DNA, 19 bp, Mus musculus
  siRNA target sequence for Defcr4 (NM_010039.1,244-262).
ggaatacgatttttgtact

SEQ ID NO: 700540 - DNA, 19 bp, Mus musculus
  siRNA target sequence for Dmwd (NM_010058.1,120-138).
gcgactgcgcggagatcaa

SEQ ID NO: 700541 - DNA, 19 bp, Mus musculus
  siRNA target sequence for Dmwd (NM_010058.1,122-140).
gactgcgcggagatcaagt

SEQ ID NO: 700542 - DNA, 19 bp, Mus musculus
  siRNA target sequence for Dmwd (NM_010058.1,153-171).
cccgcgagggcttctacaa

SEQ ID NO: 700543 - DNA, 19 bp, Mus musculus
  siRNA target sequence for Dmwd (NM_010058.1,501-519).
ggtccatcgatctcaacaa

SEQ ID NO: 700544 - DNA, 19 bp, Mus musculus
  siRNA target sequence for Dmwd (NM_010058.1,661-679).
caccagcaagctattcaat

SEQ ID NO: 700545 - DNA, 19 bp, Mus musculus
  siRNA target sequence for Dmwd (NM_010058.1,697-715).
caagaccaaggtgacatat

SEQ ID NO: 700546 - DNA, 19 bp, Mus musculus
  siRNA target sequence for Dmwd (NM_010058.1,808-826).
caccccaccccagtatagt

SEQ ID NO: 700547 - DNA, 19 bp, Mus musculus
  siRNA target sequence for Dmwd (NM_010058.1,854-872).
gtctatgcagccaaaagca

SEQ ID NO: 700548 - DNA, 19 bp, Mus musculus
  siRNA target sequence for Dmwd (NM_010058.1,917-935).
cccctcaatgagtttgcat

SEQ ID NO: 700549 - DNA, 19 bp, Mus musculus
  siRNA target sequence for Dmwd (NM_010058.1,1374-1392).
gggacctcacagaagatgt

SEQ ID NO: 700550 - DNA, 19 bp, Mus musculus
  siRNA target sequence for Dmwd (NM_010058.1,1676-1694).
catagcctgggaaacatca

SEQ ID NO: 700551 - DNA, 19 bp, Mus musculus
  siRNA target sequence for Dmwd (NM_010058.1,1857-1875).
gcctgaccgtgctactgtt

SEQ ID NO: 700552 - DNA, 19 bp, Mus musculus
  siRNA target sequence for Dmwd (NM_010058.1,1871-1889).
ctgttcctggaggattgta

SEQ ID NO: 700553 - DNA, 19 bp, Mus musculus
  siRNA target sequence for Dmwd (NM_010058.1,2001-2019).
ccagcaagtcagttgtaga

SEQ ID NO: 700554 - DNA, 19 bp, Mus musculus
  siRNA target sequence for Leftb (NM_010094.1,562-580).
ccgcactgcccttatcgat

SEQ ID NO: 700555 - DNA, 19 bp, Mus musculus
  siRNA target sequence for Epn2 (NM_010148.1,275-293).
ggcagatgaaaaacattgt

SEQ ID NO: 700556 - DNA, 19 bp, Mus musculus
  siRNA target sequence for Epn2 (NM_010148.1,429-447).
ggtttggaagcgacttaat

SEQ ID NO: 700557 - DNA, 19 bp, Mus musculus
  siRNA target sequence for Epn2 (NM_010148.1,598-616).
ggcaaagaccagggtatta

SEQ ID NO: 700558 - DNA, 19 bp, Mus musculus
  siRNA target sequence for Epn2 (NM_010148.1,730-748).
ggcgtgggcagcaaccaaa

SEQ ID NO: 700559 - DNA, 19 bp, Mus musculus
  siRNA target sequence for Epn2 (NM_010148.1,731-749).
gcgtgggcagcaaccaaat

SEQ ID NO: 700560 - DNA, 19 bp, Mus musculus
  siRNA target sequence for Epn2 (NM_010148.1,952-970).
gctgagcagtcatcagaaa

SEQ ID NO: 700561 - DNA, 19 bp, Mus musculus
  siRNA target sequence for Epn2 (NM_010148.1,1013-1031).
ggggtgatgacctcagatt

SEQ ID NO: 700562 - DNA, 19 bp, Mus musculus
  siRNA target sequence for Epn2 (NM_010148.1,1126-1144).
cagactaccttgttggatt

SEQ ID NO: 700563 - DNA, 19 bp, Mus musculus
  siRNA target sequence for Epn2 (NM_010148.1,1130-1148).
ctaccttgttggatttaat

SEQ ID NO: 700564 - DNA, 19 bp, Mus musculus
  siRNA target sequence for Epn2 (NM_010148.1,1161-1179).
cagctcaggccctgttaca

SEQ ID NO: 700565 - DNA, 19 bp, Mus musculus
  siRNA target sequence for Epn2 (NM_010148.1,1163-1181).
gctcaggccctgttacaca

SEQ ID NO: 700566 - DNA, 19 bp, Mus musculus
  siRNA target sequence for Epn2 (NM_010148.1,1243-1261).
gtggctccttcgaacatta

SEQ ID NO: 700567 - DNA, 19 bp, Mus musculus
  siRNA target sequence for Epn2 (NM_010148.1,1245-1263).
ggctccttcgaacattact

SEQ ID NO: 700568 - DNA, 19 bp, Mus musculus
  siRNA target sequence for Epn2 (NM_010148.1,1247-1265).
ctccttcgaacattactga

SEQ ID NO: 700569 - DNA, 19 bp, Mus musculus
  siRNA target sequence for Epn2 (NM_010148.1,1267-1285).
ccgtggccatcgtttggta

SEQ ID NO: 700570 - DNA, 19 bp, Mus musculus
  siRNA target sequence for Epn2 (NM_010148.1,1452-1470).
ctttgagctcttcagtaat

SEQ ID NO: 700571 - DNA, 19 bp, Mus musculus
  siRNA target sequence for Epn2 (NM_010148.1,1456-1474).
gagctcttcagtaatttca

SEQ ID NO: 700572 - DNA, 19 bp, Mus musculus
  siRNA target sequence for Epn2 (NM_010148.1,1473-1491).
caacggtacagttaaagat

SEQ ID NO: 700573 - DNA, 19 bp, Mus musculus
  siRNA target sequence for Epn2 (NM_010148.1,1476-1494).
cggtacagttaaagatgat

SEQ ID NO: 700574 - DNA, 19 bp, Mus musculus
  siRNA target sequence for Epn2 (NM_010148.1,1477-1495).
ggtacagttaaagatgatt

SEQ ID NO: 700575 - DNA, 19 bp, Mus musculus
  siRNA target sequence for Epn2 (NM_010148.1,1507-1525).
gacaaccttcgaacttcaa

SEQ ID NO: 700576 - DNA, 19 bp, Mus musculus
  siRNA target sequence for Epn2 (NM_010148.1,1509-1527).
caaccttcgaacttcaaaa

SEQ ID NO: 700577 - DNA, 19 bp, Mus musculus
  siRNA target sequence for Epn2 (NM_010148.1,1577-1595).
cgagccctgacctctttga

SEQ ID NO: 700578 - DNA, 19 bp, Mus musculus
  siRNA target sequence for Epn2 (NM_010148.1,1594-1612).
gagtctcaatccttgactt

SEQ ID NO: 700579 - DNA, 19 bp, Mus musculus
  siRNA target sequence for AA175286 (NM_010156.2,164-182).
cggtgtgctgtcttgaaaa

SEQ ID NO: 700580 - DNA, 19 bp, Mus musculus
  siRNA target sequence for AA175286 (NM_010156.2,189-207).
caactgattttgtagagat

SEQ ID NO: 700581 - DNA, 19 bp, Mus musculus
  siRNA target sequence for AA175286 (NM_010156.2,203-221).
gagattggagaacaagtaa

SEQ ID NO: 700582 - DNA, 19 bp, Mus musculus
  siRNA target sequence for AA175286 (NM_010156.2,277-295).
ccttgtggatgatttcgaa

SEQ ID NO: 700583 - DNA, 19 bp, Mus musculus
  siRNA target sequence for AA175286 (NM_010156.2,411-429).
cagatgaaagtgcaaagtt

SEQ ID NO: 700584 - DNA, 19 bp, Mus musculus
  siRNA target sequence for AA175286 (NM_010156.2,431-449).
gcaaatagcatttcactaa

SEQ ID NO: 700585 - DNA, 19 bp, Mus musculus
  siRNA target sequence for AA175286 (NM_010156.2,439-457).
catttcactaaaataccaa

SEQ ID NO: 700586 - DNA, 19 bp, Mus musculus
  siRNA target sequence for AA175286 (NM_010156.2,480-498).
cctttgaggccaaactaca

SEQ ID NO: 700587 - DNA, 19 bp, Mus musculus
  siRNA target sequence for AA175286 (NM_010156.2,520-538).
gaactgtgaaaacttttat

SEQ ID NO: 700588 - DNA, 19 bp, Mus musculus
  siRNA target sequence for AA175286 (NM_010156.2,550-568).
cttgaaaggcaactttgat

SEQ ID NO: 700589 - DNA, 19 bp, Mus musculus
  siRNA target sequence for AA175286 (NM_010156.2,553-571).
gaaaggcaactttgataca

SEQ ID NO: 700590 - DNA, 19 bp, Mus musculus
  siRNA target sequence for AA175286 (NM_010156.2,558-576).
gcaactttgatacaactta

SEQ ID NO: 700591 - DNA, 19 bp, Mus musculus
  siRNA target sequence for AA175286 (NM_010156.2,562-580).
ctttgatacaacttacata

SEQ ID NO: 700592 - DNA, 19 bp, Mus musculus
  siRNA target sequence for AA175286 (NM_010156.2,566-584).
gatacaacttacataaaga

SEQ ID NO: 700593 - DNA, 19 bp, Mus musculus
  siRNA target sequence for AA175286 (NM_010156.2,573-591).
cttacataaagaatgtagt

SEQ ID NO: 700594 - DNA, 19 bp, Mus musculus
  siRNA target sequence for AA175286 (NM_010156.2,583-601).
gaatgtagtgaagaatact

SEQ ID NO: 700595 - DNA, 19 bp, Mus musculus
  siRNA target sequence for AA175286 (NM_010156.2,630-648).
gggcccagctcatttctta

SEQ ID NO: 700596 - DNA, 19 bp, Mus musculus
  siRNA target sequence for AA175286 (NM_010156.2,652-670).
ggcattactcaactcttat

SEQ ID NO: 700597 - DNA, 19 bp, Mus musculus
  siRNA target sequence for AA175286 (NM_010156.2,721-739).
cacttacaccaagaaatat

SEQ ID NO: 700598 - DNA, 19 bp, Mus musculus
  siRNA target sequence for AA175286 (NM_010156.2,788-806).
ctaataagaactgaagttt

SEQ ID NO: 700599 - DNA, 19 bp, Mus musculus
  siRNA target sequence for AA175286 (NM_010156.2,817-835).
gaggtacactggtatacgt

SEQ ID NO: 700600 - DNA, 19 bp, Mus musculus
  siRNA target sequence for AA175286 (NM_010156.2,823-841).
cactggtatacgtatcatt

SEQ ID NO: 700601 - DNA, 19 bp, Mus musculus
  siRNA target sequence for AA175286 (NM_010156.2,825-843).
ctggtatacgtatcattca

SEQ ID NO: 700602 - DNA, 19 bp, Mus musculus
  siRNA target sequence for AA175286 (NM_010156.2,834-852).
gtatcattcaccctctaat

SEQ ID NO: 700603 - DNA, 19 bp, Mus musculus
  siRNA target sequence for AA175286 (NM_010156.2,886-904).
ctacagaatggataagtgt

SEQ ID NO: 700604 - DNA, 19 bp, Mus musculus
  siRNA target sequence for AA175286 (NM_010156.2,931-949).
gaatgtattgtatgattct

SEQ ID NO: 700605 - DNA, 19 bp, Mus musculus
  siRNA target sequence for AA175286 (NM_010156.2,980-998).
gtgcaaactctattgctta

SEQ ID NO: 700606 - DNA, 19 bp, Mus musculus
  siRNA target sequence for AA175286 (NM_010156.2,983-1001).
caaactctattgcttacaa

SEQ ID NO: 700607 - DNA, 19 bp, Mus musculus
  siRNA target sequence for AA175286 (NM_010156.2,1039-1057).
cttttccccattgattgaa

SEQ ID NO: 700608 - DNA, 19 bp, Mus musculus
  siRNA target sequence for AA175286 (NM_010156.2,1047-1065).
cattgattgaagaattgca

SEQ ID NO: 700609 - DNA, 19 bp, Mus musculus
  siRNA target sequence for AA175286 (NM_010156.2,1087-1105).
cttgatcgcaggaagtgat

SEQ ID NO: 700610 - DNA, 19 bp, Mus musculus
  siRNA target sequence for AA175286 (NM_010156.2,1101-1119).
gtgatcgattcccacaaaa

SEQ ID NO: 700611 - DNA, 19 bp, Mus musculus
  siRNA target sequence for AA175286 (NM_010156.2,1106-1124).
cgattcccacaaaatgcat

SEQ ID NO: 700612 - DNA, 19 bp, Mus musculus
  siRNA target sequence for AA175286 (NM_010156.2,1111-1129).
cccacaaaatgcattcatt

SEQ ID NO: 700613 - DNA, 19 bp, Mus musculus
  siRNA target sequence for AA175286 (NM_010156.2,1126-1144).
catttgtcaagctttagca

SEQ ID NO: 700614 - DNA, 19 bp, Mus musculus
  siRNA target sequence for AA175286 (NM_010156.2,1210-1228).
gaaagcacctaagaattct

SEQ ID NO: 700615 - DNA, 19 bp, Mus musculus
  siRNA target sequence for AA175286 (NM_010156.2,1214-1232).
gcacctaagaattcttata

SEQ ID NO: 700616 - DNA, 19 bp, Mus musculus
  siRNA target sequence for AA175286 (NM_010156.2,1222-1240).
gaattcttatatttcagat

SEQ ID NO: 700617 - DNA, 19 bp, Mus musculus
  siRNA target sequence for AA175286 (NM_010156.2,1242-1260).
cacttggtcaagtttacaa

SEQ ID NO: 700618 - DNA, 19 bp, Mus musculus
  siRNA target sequence for AA175286 (NM_010156.2,1244-1262).
cttggtcaagtttacaaaa

SEQ ID NO: 700619 - DNA, 19 bp, Mus musculus
  siRNA target sequence for AA175286 (NM_010156.2,1351-1369).
ggcttcaaaagccttcaaa

SEQ ID NO: 700620 - DNA, 19 bp, Mus musculus
  siRNA target sequence for AA175286 (NM_010156.2,1366-1384).
caaagagtctcagaatcaa

SEQ ID NO: 700621 - DNA, 19 bp, Mus musculus
  siRNA target sequence for AA175286 (NM_010156.2,1388-1406).
gatagtaaggactatggaa

SEQ ID NO: 700622 - DNA, 19 bp, Mus musculus
  siRNA target sequence for AA175286 (NM_010156.2,1412-1430).
gcatggtcaccacagaatt

SEQ ID NO: 700623 - DNA, 19 bp, Mus musculus
  siRNA target sequence for AA175286 (NM_010156.2,1465-1483).
cttcttcggagaaatagaa

SEQ ID NO: 700624 - DNA, 19 bp, Mus musculus
  siRNA target sequence for AA175286 (NM_010156.2,1468-1486).
cttcggagaaatagaagta

SEQ ID NO: 700625 - DNA, 19 bp, Mus musculus
  siRNA target sequence for AA175286 (NM_010156.2,1513-1531).
gctcacaccccttttccat

SEQ ID NO: 700626 - DNA, 19 bp, Mus musculus
  siRNA target sequence for AA175286 (NM_010156.2,1514-1532).
ctcacaccccttttccata

SEQ ID NO: 700627 - DNA, 19 bp, Mus musculus
  siRNA target sequence for AA175286 (NM_010156.2,1577-1595).
ggaaaggggaccatccttt

SEQ ID NO: 700628 - DNA, 19 bp, Mus musculus
  siRNA target sequence for AA175286 (NM_010156.2,1608-1626).
gtgaatattgtgttgttct

SEQ ID NO: 700629 - DNA, 19 bp, Mus musculus
  siRNA target sequence for AA175286 (NM_010156.2,1619-1637).
gttgttctcagcaaattta

SEQ ID NO: 700630 - DNA, 19 bp, Mus musculus
  siRNA target sequence for AA175286 (NM_010156.2,1622-1640).
gttctcagcaaatttacat

SEQ ID NO: 700631 - DNA, 19 bp, Mus musculus
  siRNA target sequence for AA175286 (NM_010156.2,1642-1660).
ccttctacagaatttacat

SEQ ID NO: 700632 - DNA, 19 bp, Mus musculus
  siRNA target sequence for AA175286 (NM_010156.2,1662-1680).
cagatttggaaagatgttt

SEQ ID NO: 700633 - DNA, 19 bp, Mus musculus
  siRNA target sequence for AA175286 (NM_010156.2,1740-1758).
cagaactcttactaagtaa

SEQ ID NO: 700634 - DNA, 19 bp, Mus musculus
  siRNA target sequence for AA175286 (NM_010156.2,1773-1791).
gtttcaagaaatatgtaga

SEQ ID NO: 700635 - DNA, 19 bp, Mus musculus
  siRNA target sequence for AA175286 (NM_010156.2,1877-1895).
gcttggcgagcagatacat

SEQ ID NO: 700636 - DNA, 19 bp, Mus musculus
  siRNA target sequence for AA175286 (NM_010156.2,1901-1919).
ggactccttgaatatctta

SEQ ID NO: 700637 - DNA, 19 bp, Mus musculus
  siRNA target sequence for AA175286 (NM_010156.2,1902-1920).
gactccttgaatatcttaa

SEQ ID NO: 700638 - DNA, 19 bp, Mus musculus
  siRNA target sequence for AA175286 (NM_010156.2,1906-1924).
ccttgaatatcttaatcca

SEQ ID NO: 700639 - DNA, 19 bp, Mus musculus
  siRNA target sequence for AA175286 (NM_010156.2,1961-1979).
ggaaactataccttcctat

SEQ ID NO: 700640 - DNA, 19 bp, Mus musculus
  siRNA target sequence for AA175286 (NM_010156.2,2017-2035).
gaccaaggacatacaaaat

SEQ ID NO: 700641 - DNA, 19 bp, Mus musculus
  siRNA target sequence for AA175286 (NM_010156.2,2024-2042).
gacatacaaaatttcattt

SEQ ID NO: 700642 - DNA, 19 bp, Mus musculus
  siRNA target sequence for AA175286 (NM_010156.2,2050-2068).
cattattctcagttgtcta

SEQ ID NO: 700643 - DNA, 19 bp, Mus musculus
  siRNA target sequence for AA175286 (NM_010156.2,2072-2090).
cccagttccaagtatatct

SEQ ID NO: 700644 - DNA, 19 bp, Mus musculus
  siRNA target sequence for AA175286 (NM_010156.2,2093-2111).
ccatttagcacactgaaaa

SEQ ID NO: 700645 - DNA, 19 bp, Mus musculus
  siRNA target sequence for AA175286 (NM_010156.2,2094-2112).
catttagcacactgaaaaa

SEQ ID NO: 700646 - DNA, 19 bp, Mus musculus
  siRNA target sequence for AA175286 (NM_010156.2,2134-2152).
gattgtggggctaactcat

SEQ ID NO: 700647 - DNA, 19 bp, Mus musculus
  siRNA target sequence for AA175286 (NM_010156.2,2138-2156).
gtggggctaactcattcat

SEQ ID NO: 700648 - DNA, 19 bp, Mus musculus
  siRNA target sequence for AA175286 (NM_010156.2,2154-2172).
catatcctgatccttattt

SEQ ID NO: 700649 - DNA, 19 bp, Mus musculus
  siRNA target sequence for AA175286 (NM_010156.2,2219-2237).
gactccacactaatagaaa

SEQ ID NO: 700650 - DNA, 19 bp, Mus musculus
  siRNA target sequence for AA175286 (NM_010156.2,2243-2261).
gtctcatccttgaatcgat

SEQ ID NO: 700651 - DNA, 19 bp, Mus musculus
  siRNA target sequence for AA175286 (NM_010156.2,2363-2381).
gaaatcgagcgctacttca

SEQ ID NO: 700652 - DNA, 19 bp, Mus musculus
  siRNA target sequence for AA175286 (NM_010156.2,2384-2402).
gaagtgcaagattcaaatt

SEQ ID NO: 700653 - DNA, 19 bp, Mus musculus
  siRNA target sequence for AA175286 (NM_010156.2,2482-2500).
caaactaatctcactagaa

SEQ ID NO: 700654 - DNA, 19 bp, Mus musculus
  siRNA target sequence for Fcgr3 (NM_010188.2,707-725).
ctgctttctccctagtgat

SEQ ID NO: 700655 - DNA, 19 bp, Mus musculus
  siRNA target sequence for Fcgr3 (NM_010188.2,766-784).
gtacggagaaatcttcaaa

SEQ ID NO: 700656 - DNA, 19 bp, Mus musculus
  siRNA target sequence for Fem1a (NM_010192.2,1626-1644).
gtgcccctcgcggtaaaaa

SEQ ID NO: 700657 - DNA, 19 bp, Mus musculus
  siRNA target sequence for Fga (NM_010196.1,108-126).
ctacagataccgaagataa

SEQ ID NO: 700658 - DNA, 19 bp, Mus musculus
  siRNA target sequence for Fga (NM_010196.1,117-135).
ccgaagataaaggtgaatt

SEQ ID NO: 700659 - DNA, 19 bp, Mus musculus
  siRNA target sequence for Fga (NM_010196.1,211-229).
gcccttctgctctgatgat

SEQ ID NO: 700660 - DNA, 19 bp, Mus musculus
  siRNA target sequence for Fga (NM_010196.1,259-277).
caggatgaaagggttgatt

SEQ ID NO: 700661 - DNA, 19 bp, Mus musculus
  siRNA target sequence for Fga (NM_010196.1,285-303).
ccaaccaggattttacaaa

SEQ ID NO: 700662 - DNA, 19 bp, Mus musculus
  siRNA target sequence for Fga (NM_010196.1,316-334).
gctcaaaaactcactattt

SEQ ID NO: 700663 - DNA, 19 bp, Mus musculus
  siRNA target sequence for Fga (NM_010196.1,375-393).
ggaatatcatggagtattt

SEQ ID NO: 700664 - DNA, 19 bp, Mus musculus
  siRNA target sequence for Fga (NM_010196.1,406-424).
cgcgaatgccaacaacttt

SEQ ID NO: 700665 - DNA, 19 bp, Mus musculus
  siRNA target sequence for Fga (NM_010196.1,455-473).
ctgaggcgcagaattgaga

SEQ ID NO: 700666 - DNA, 19 bp, Mus musculus
  siRNA target sequence for Fga (NM_010196.1,475-493).
cctgaggcgaaaagtcata

SEQ ID NO: 700667 - DNA, 19 bp, Mus musculus
  siRNA target sequence for Fga (NM_010196.1,496-514).
gaaagcgcaacagattcaa

SEQ ID NO: 700668 - DNA, 19 bp, Mus musculus
  siRNA target sequence for Fga (NM_010196.1,533-551).
cgggctcagttgatagaca

SEQ ID NO: 700669 - DNA, 19 bp, Mus musculus
  siRNA target sequence for Fga (NM_010196.1,534-552).
gggctcagttgatagacat

SEQ ID NO: 700670 - DNA, 19 bp, Mus musculus
  siRNA target sequence for Fga (NM_010196.1,563-581).
gaggtggatattgatatca

SEQ ID NO: 700671 - DNA, 19 bp, Mus musculus
  siRNA target sequence for Fga (NM_010196.1,580-598).
caagatccgctcttgcaaa

SEQ ID NO: 700672 - DNA, 19 bp, Mus musculus
  siRNA target sequence for Fga (NM_010196.1,613-631).
ggctgtaaaccgtgagata

SEQ ID NO: 700673 - DNA, 19 bp, Mus musculus
  siRNA target sequence for Fga (NM_010196.1,614-632).
gctgtaaaccgtgagataa

SEQ ID NO: 700674 - DNA, 19 bp, Mus musculus
  siRNA target sequence for Fga (NM_010196.1,643-661).
ctatgaaggtcaccaaaaa

SEQ ID NO: 700675 - DNA, 19 bp, Mus musculus
  siRNA target sequence for Fga (NM_010196.1,718-736).
gccagcactaaaaatgtct

SEQ ID NO: 700676 - DNA, 19 bp, Mus musculus
  siRNA target sequence for Fga (NM_010196.1,1000-1018).
gtctggaagtgatggaaat

SEQ ID NO: 700677 - DNA, 19 bp, Mus musculus
  siRNA target sequence for Fga (NM_010196.1,1184-1202).
ggtaaagcggtcacttcta

SEQ ID NO: 700678 - DNA, 19 bp, Mus musculus
  siRNA target sequence for Fga (NM_010196.1,1185-1203).
gtaaagcggtcacttctaa

SEQ ID NO: 700679 - DNA, 19 bp, Mus musculus
  siRNA target sequence for Fga (NM_010196.1,1265-1283).
catcgttcatgctctaaaa

SEQ ID NO: 700680 - DNA, 19 bp, Mus musculus
  siRNA target sequence for Fga (NM_010196.1,1268-1286).
cgttcatgctctaaaacca

SEQ ID NO: 700681 - DNA, 19 bp, Mus musculus
  siRNA target sequence for Fga (NM_010196.1,1368-1386).
gcgatgccaccgagttaga

SEQ ID NO: 700682 - DNA, 19 bp, Mus musculus
  siRNA target sequence for Fga (NM_010196.1,1373-1391).
gccaccgagttagacatat

SEQ ID NO: 700683 - DNA, 19 bp, Mus musculus
  siRNA target sequence for Fga (NM_010196.1,1385-1403).
gacatatcccacagtttta

SEQ ID NO: 700684 - DNA, 19 bp, Mus musculus
  siRNA target sequence for Fjx1 (NM_010218.1,871-889).
gatctgatcctcttcgatt

SEQ ID NO: 700685 - DNA, 19 bp, Mus musculus
  siRNA target sequence for Fjx1 (NM_010218.1,941-959).
gggacccacgcgttatgca

SEQ ID NO: 700686 - DNA, 19 bp, Mus musculus
  siRNA target sequence for Fjx1 (NM_010218.1,1052-1070).
gcatgtgggacaagtataa

SEQ ID NO: 700687 - DNA, 19 bp, Mus musculus
  siRNA target sequence for Fjx1 (NM_010218.1,1056-1074).
gtgggacaagtataacgaa

SEQ ID NO: 700688 - DNA, 19 bp, Mus musculus
  siRNA target sequence for Fjx1 (NM_010218.1,1081-1099).
ctacagtcggtgtgtgtat

SEQ ID NO: 700689 - DNA, 19 bp, Mus musculus
  siRNA target sequence for Brd2 (NM_010238.1,762-780).
ccagggaaaaggattcgaa

SEQ ID NO: 700690 - DNA, 19 bp, Mus musculus
  siRNA target sequence for Brd2 (NM_010238.1,763-781).
cagggaaaaggattcgaaa

SEQ ID NO: 700691 - DNA, 19 bp, Mus musculus
  siRNA target sequence for Brd2 (NM_010238.1,792-810).
ctgtatgagggatttgaga

SEQ ID NO: 700692 - DNA, 19 bp, Mus musculus
  siRNA target sequence for Brd2 (NM_010238.1,821-839).
ggcttctgtaccagcttta

SEQ ID NO: 700693 - DNA, 19 bp, Mus musculus
  siRNA target sequence for Brd2 (NM_010238.1,823-841).
cttctgtaccagctttaca

SEQ ID NO: 700694 - DNA, 19 bp, Mus musculus
  siRNA target sequence for Brd2 (NM_010238.1,826-844).
ctgtaccagctttacaact

SEQ ID NO: 700695 - DNA, 19 bp, Mus musculus
  siRNA target sequence for Brd2 (NM_010238.1,998-1016).
gctgggtttgccggattat

SEQ ID NO: 700696 - DNA, 19 bp, Mus musculus
  siRNA target sequence for Brd2 (NM_010238.1,1002-1020).
ggtttgccggattatcaca

SEQ ID NO: 700697 - DNA, 19 bp, Mus musculus
  siRNA target sequence for Brd2 (NM_010238.1,1003-1021).
gtttgccggattatcacaa

SEQ ID NO: 700698 - DNA, 19 bp, Mus musculus
  siRNA target sequence for Brd2 (NM_010238.1,1007-1025).
gccggattatcacaaaatt

SEQ ID NO: 700699 - DNA, 19 bp, Mus musculus
  siRNA target sequence for Brd2 (NM_010238.1,1008-1026).
ccggattatcacaaaatta

SEQ ID NO: 700700 - DNA, 19 bp, Mus musculus
  siRNA target sequence for Brd2 (NM_010238.1,1058-1076).
gaggagacttgaaaacaat

SEQ ID NO: 700701 - DNA, 19 bp, Mus musculus
  siRNA target sequence for Brd2 (NM_010238.1,1084-1102).
gggctgcctcagaatgtat

SEQ ID NO: 700702 - DNA, 19 bp, Mus musculus
  siRNA target sequence for Brd2 (NM_010238.1,1104-1122).
caggattttaatactatgt

SEQ ID NO: 700703 - DNA, 19 bp, Mus musculus
  siRNA target sequence for Brd2 (NM_010238.1,1145-1163).
caagcccaccgatgatatt

SEQ ID NO: 700704 - DNA, 19 bp, Mus musculus
  siRNA target sequence for Brd2 (NM_010238.1,1153-1171).
ccgatgatattgtcctaat

SEQ ID NO: 700705 - DNA, 19 bp, Mus musculus
  siRNA target sequence for Brd2 (NM_010238.1,1242-1260).
gtgaccatccctaaaaaca

SEQ ID NO: 700706 - DNA, 19 bp, Mus musculus
  siRNA target sequence for Brd2 (NM_010238.1,1343-1361).
gcatacagccctgtataca

SEQ ID NO: 700707 - DNA, 19 bp, Mus musculus
  siRNA target sequence for Brd2 (NM_010238.1,1362-1380).
ccaccacctgaaataccta

SEQ ID NO: 700708 - DNA, 19 bp, Mus musculus
  siRNA target sequence for Brd2 (NM_010238.1,1401-1419).
cacccatcagtcatctctt

SEQ ID NO: 700709 - DNA, 19 bp, Mus musculus
  siRNA target sequence for Brd2 (NM_010238.1,1454-1472).
cccactccttgctgtatca

SEQ ID NO: 700710 - DNA, 19 bp, Mus musculus
  siRNA target sequence for Brd2 (NM_010238.1,1686-1704).
caacaccagagctctaaga

SEQ ID NO: 700711 - DNA, 19 bp, Mus musculus
  siRNA target sequence for Brd2 (NM_010238.1,1923-1941).
gctgatgtacggcttatgt

SEQ ID NO: 700712 - DNA, 19 bp, Mus musculus
  siRNA target sequence for Brd2 (NM_010238.1,1924-1942).
ctgatgtacggcttatgtt

SEQ ID NO: 700713 - DNA, 19 bp, Mus musculus
  siRNA target sequence for Brd2 (NM_010238.1,2252-2270).
gcttcgggcagttcatgaa

SEQ ID NO: 700714 - DNA, 19 bp, Mus musculus
  siRNA target sequence for Brd2 (NM_010238.1,2283-2301).
ctgtcccagggcccaatat

SEQ ID NO: 700715 - DNA, 19 bp, Mus musculus
  siRNA target sequence for Brd2 (NM_010238.1,2285-2303).
gtcccagggcccaatatct

SEQ ID NO: 700716 - DNA, 19 bp, Mus musculus
  siRNA target sequence for Brd2 (NM_010238.1,2287-2305).
cccagggcccaatatctaa

SEQ ID NO: 700717 - DNA, 19 bp, Mus musculus
  siRNA target sequence for Brd2 (NM_010238.1,2371-2389).
gaattgggatcgatgaaga

SEQ ID NO: 700718 - DNA, 19 bp, Mus musculus
  siRNA target sequence for Brd2 (NM_010238.1,2377-2395).
ggatcgatgaagatgataa

SEQ ID NO: 700719 - DNA, 19 bp, Mus musculus
  siRNA target sequence for Brd2 (NM_010238.1,2453-2471).
gggtagcaatgctactaca

SEQ ID NO: 700720 - DNA, 19 bp, Mus musculus
  siRNA target sequence for Brd2 (NM_010238.1,2506-2524).
gtagcaacaagctacctaa

SEQ ID NO: 700721 - DNA, 19 bp, Mus musculus
  siRNA target sequence for Brd2 (NM_010238.1,2513-2531).
caagctacctaaaaagtct

SEQ ID NO: 700722 - DNA, 19 bp, Mus musculus
  siRNA target sequence for Brd2 (NM_010238.1,2590-2608).
gcaggcccatgagttatga

SEQ ID NO: 700723 - DNA, 19 bp, Mus musculus
  siRNA target sequence for Brd2 (NM_010238.1,2591-2609).
caggcccatgagttatgat

SEQ ID NO: 700724 - DNA, 19 bp, Mus musculus
  siRNA target sequence for Brd2 (NM_010238.1,2617-2635).
gacagttaagcctggatat

SEQ ID NO: 700725 - DNA, 19 bp, Mus musculus
  siRNA target sequence for Brd2 (NM_010238.1,2619-2637).
cagttaagcctggatatca

SEQ ID NO: 700726 - DNA, 19 bp, Mus musculus
  siRNA target sequence for Brd2 (NM_010238.1,2621-2639).
gttaagcctggatatcaat

SEQ ID NO: 700727 - DNA, 19 bp, Mus musculus
  siRNA target sequence for Brd2 (NM_010238.1,2626-2644).
gcctggatatcaataagtt

SEQ ID NO: 700728 - DNA, 19 bp, Mus musculus
  siRNA target sequence for Brd2 (NM_010238.1,2627-2645).
cctggatatcaataagtta

SEQ ID NO: 700729 - DNA, 19 bp, Mus musculus
  siRNA target sequence for Brd2 (NM_010238.1,2658-2676).
ctgggtcgagtagtacata

SEQ ID NO: 700730 - DNA, 19 bp, Mus musculus
  siRNA target sequence for Brd2 (NM_010238.1,2661-2679).
ggtcgagtagtacatatca

SEQ ID NO: 700731 - DNA, 19 bp, Mus musculus
  siRNA target sequence for Brd2 (NM_010238.1,2662-2680).
gtcgagtagtacatatcat

SEQ ID NO: 700732 - DNA, 19 bp, Mus musculus
  siRNA target sequence for Brd2 (NM_010238.1,2694-2712).
ccctctctacgtgattcaa

SEQ ID NO: 700733 - DNA, 19 bp, Mus musculus
  siRNA target sequence for Brd2 (NM_010238.1,2695-2713).
cctctctacgtgattcaaa

SEQ ID NO: 700734 - DNA, 19 bp, Mus musculus
  siRNA target sequence for Brd2 (NM_010238.1,2745-2763).
ctcaagccgtccacactta

SEQ ID NO: 700735 - DNA, 19 bp, Mus musculus
  siRNA target sequence for Brd2 (NM_010238.1,2766-2784).
gagcttgagcgatatgttt

SEQ ID NO: 700736 - DNA, 19 bp, Mus musculus
  siRNA target sequence for Brd2 (NM_010238.1,2768-2786).
gcttgagcgatatgtttta

SEQ ID NO: 700737 - DNA, 19 bp, Mus musculus
  siRNA target sequence for Brd2 (NM_010238.1,2805-2823).
ccccggaagccctacacta

SEQ ID NO: 700738 - DNA, 19 bp, Mus musculus
  siRNA target sequence for Brd2 (NM_010238.1,2806-2824).
cccggaagccctacactat

SEQ ID NO: 700739 - DNA, 19 bp, Mus musculus
  siRNA target sequence for Brd2 (NM_010238.1,2807-2825).
ccggaagccctacactatt

SEQ ID NO: 700740 - DNA, 19 bp, Mus musculus
  siRNA target sequence for Brd2 (NM_010238.1,2808-2826).
cggaagccctacactatta

SEQ ID NO: 700741 - DNA, 19 bp, Mus musculus
  siRNA target sequence for Brd2 (NM_010238.1,3049-3067).
cagacaccagcgattcaga

SEQ ID NO: 700742 - DNA, 19 bp, Mus musculus
  siRNA target sequence for Fv1 (NM_010244.2,120-138).
gctcttcaaacctgaactt

SEQ ID NO: 700743 - DNA, 19 bp, Mus musculus
  siRNA target sequence for Fv1 (NM_010244.2,141-159).
cgaggactctccggataat

SEQ ID NO: 700744 - DNA, 19 bp, Mus musculus
  siRNA target sequence for Fv1 (NM_010244.2,240-258).
cttttcgagcggtaaggaa

SEQ ID NO: 700745 - DNA, 19 bp, Mus musculus
  siRNA target sequence for Fv1 (NM_010244.2,245-263).
cgagcggtaaggaacttaa

SEQ ID NO: 700746 - DNA, 19 bp, Mus musculus
  siRNA target sequence for Fv1 (NM_010244.2,246-264).
gagcggtaaggaacttaat

SEQ ID NO: 700747 - DNA, 19 bp, Mus musculus
  siRNA target sequence for Fv1 (NM_010244.2,248-266).
gcggtaaggaacttaatga

SEQ ID NO: 700748 - DNA, 19 bp, Mus musculus
  siRNA target sequence for Fv1 (NM_010244.2,267-285).
ctctgtgtaccatactttt

SEQ ID NO: 700749 - DNA, 19 bp, Mus musculus
  siRNA target sequence for Fv1 (NM_010244.2,269-287).
ctgtgtaccatacttttga

SEQ ID NO: 700750 - DNA, 19 bp, Mus musculus
  siRNA target sequence for Fv1 (NM_010244.2,296-314).
gcaagattagggactatga

SEQ ID NO: 700751 - DNA, 19 bp, Mus musculus
  siRNA target sequence for Fv1 (NM_010244.2,336-354).
ggcatttctggataaagta

SEQ ID NO: 700752 - DNA, 19 bp, Mus musculus
  siRNA target sequence for Fv1 (NM_010244.2,369-387).
ccaattcagagatgaaatt

SEQ ID NO: 700753 - DNA, 19 bp, Mus musculus
  siRNA target sequence for Fv1 (NM_010244.2,391-409).
cagctccgaatgcacataa

SEQ ID NO: 700754 - DNA, 19 bp, Mus musculus
  siRNA target sequence for Fv1 (NM_010244.2,393-411).
gctccgaatgcacataaat

SEQ ID NO: 700755 - DNA, 19 bp, Mus musculus
  siRNA target sequence for Fv1 (NM_010244.2,396-414).
ccgaatgcacataaatgat

SEQ ID NO: 700756 - DNA, 19 bp, Mus musculus
  siRNA target sequence for Fv1 (NM_010244.2,398-416).
gaatgcacataaatgatct

SEQ ID NO: 700757 - DNA, 19 bp, Mus musculus
  siRNA target sequence for Fv1 (NM_010244.2,440-458).
gggagactcttctttccta

SEQ ID NO: 700758 - DNA, 19 bp, Mus musculus
  siRNA target sequence for Fv1 (NM_010244.2,456-474).
ctaccgccacaggattgaa

SEQ ID NO: 700759 - DNA, 19 bp, Mus musculus
  siRNA target sequence for Fv4 (NM_010245.1,4-22).
gagagtccagcgttctcaa

SEQ ID NO: 700760 - DNA, 19 bp, Mus musculus
  siRNA target sequence for Fv4 (NM_010245.1,6-24).
gagtccagcgttctcaaaa

SEQ ID NO: 700761 - DNA, 19 bp, Mus musculus
  siRNA target sequence for Fv4 (NM_010245.1,25-43).
ccccttaaagataagacta

SEQ ID NO: 700762 - DNA, 19 bp, Mus musculus
  siRNA target sequence for Fv4 (NM_010245.1,26-44).
cccttaaagataagactat

SEQ ID NO: 700763 - DNA, 19 bp, Mus musculus
  siRNA target sequence for Fv4 (NM_010245.1,89-107).
gagggttagcgcataaaga

SEQ ID NO: 700764 - DNA, 19 bp, Mus musculus
  siRNA target sequence for Fv4 (NM_010245.1,91-109).
gggttagcgcataaagaca

SEQ ID NO: 700765 - DNA, 19 bp, Mus musculus
  siRNA target sequence for Fv4 (NM_010245.1,113-131).
cccacctgatatacaatct

SEQ ID NO: 700766 - DNA, 19 bp, Mus musculus
  siRNA target sequence for Fv4 (NM_010245.1,114-132).
ccacctgatatacaatcta

SEQ ID NO: 700767 - DNA, 19 bp, Mus musculus
  siRNA target sequence for Fv4 (NM_010245.1,115-133).
cacctgatatacaatctaa

SEQ ID NO: 700768 - DNA, 19 bp, Mus musculus
  siRNA target sequence for Fv4 (NM_010245.1,130-148).
ctaacctgggaagtaacaa

SEQ ID NO: 700769 - DNA, 19 bp, Mus musculus
  siRNA target sequence for Fv4 (NM_010245.1,305-323).
cttgttgctcgggagataa

SEQ ID NO: 700770 - DNA, 19 bp, Mus musculus
  siRNA target sequence for Fv4 (NM_010245.1,358-376).
gaacccttaacctcttact

SEQ ID NO: 700771 - DNA, 19 bp, Mus musculus
  siRNA target sequence for Fv4 (NM_010245.1,395-413).
cctggaatagaatgaaact

SEQ ID NO: 700772 - DNA, 19 bp, Mus musculus
  siRNA target sequence for Fv4 (NM_010245.1,431-449).
cacccaaagagggattcta

SEQ ID NO: 700773 - DNA, 19 bp, Mus musculus
  siRNA target sequence for Fv4 (NM_010245.1,496-514).
ggtccagaagcctattatt

SEQ ID NO: 700774 - DNA, 19 bp, Mus musculus
  siRNA target sequence for Fv4 (NM_010245.1,550-568).
gcctggaaaccaacttcat

SEQ ID NO: 700775 - DNA, 19 bp, Mus musculus
  siRNA target sequence for Fv4 (NM_010245.1,617-635).
ccaaagcctgcaaaaataa

SEQ ID NO: 700776 - DNA, 19 bp, Mus musculus
  siRNA target sequence for Fv4 (NM_010245.1,760-778).
gggatccggctaagaataa

SEQ ID NO: 700777 - DNA, 19 bp, Mus musculus
  siRNA target sequence for Fv4 (NM_010245.1,762-780).
gatccggctaagaataaca

SEQ ID NO: 700778 - DNA, 19 bp, Mus musculus
  siRNA target sequence for Fv4 (NM_010245.1,765-783).
ccggctaagaataacagat

SEQ ID NO: 700779 - DNA, 19 bp, Mus musculus
  siRNA target sequence for Fv4 (NM_010245.1,798-816).
cccgatagggccaaatcct

SEQ ID NO: 700780 - DNA, 19 bp, Mus musculus
  siRNA target sequence for Fv4 (NM_010245.1,956-974).
ccggagataggctacttaa

SEQ ID NO: 700781 - DNA, 19 bp, Mus musculus
  siRNA target sequence for Fv4 (NM_010245.1,957-975).
cggagataggctacttaat

SEQ ID NO: 700782 - DNA, 19 bp, Mus musculus
  siRNA target sequence for Fv4 (NM_010245.1,958-976).
ggagataggctacttaatt

SEQ ID NO: 700783 - DNA, 19 bp, Mus musculus
  siRNA target sequence for Fv4 (NM_010245.1,988-1006).
gcctacctcgcactcaata

SEQ ID NO: 700784 - DNA, 19 bp, Mus musculus
  siRNA target sequence for Fv4 (NM_010245.1,989-1007).
cctacctcgcactcaatat

SEQ ID NO: 700785 - DNA, 19 bp, Mus musculus
  siRNA target sequence for Fv4 (NM_010245.1,993-1011).
cctcgcactcaatatgact

SEQ ID NO: 700786 - DNA, 19 bp, Mus musculus
  siRNA target sequence for Fv4 (NM_010245.1,994-1012).
ctcgcactcaatatgacta

SEQ ID NO: 700787 - DNA, 19 bp, Mus musculus
  siRNA target sequence for Fv4 (NM_010245.1,1052-1070).
ctgagcctccctattatga

SEQ ID NO: 700788 - DNA, 19 bp, Mus musculus
  siRNA target sequence for Fv4 (NM_010245.1,1077-1095).
ggcagtattgggagattat

SEQ ID NO: 700789 - DNA, 19 bp, Mus musculus
  siRNA target sequence for Fv4 (NM_010245.1,1078-1096).
gcagtattgggagattata

SEQ ID NO: 700790 - DNA, 19 bp, Mus musculus
  siRNA target sequence for Fv4 (NM_010245.1,1081-1099).
gtattgggagattatacta

SEQ ID NO: 700791 - DNA, 19 bp, Mus musculus
  siRNA target sequence for Fv4 (NM_010245.1,1086-1104).
gggagattatactaaacat

SEQ ID NO: 700792 - DNA, 19 bp, Mus musculus
  siRNA target sequence for Fv4 (NM_010245.1,1088-1106).
gagattatactaaacatga

SEQ ID NO: 700793 - DNA, 19 bp, Mus musculus
  siRNA target sequence for Fv4 (NM_010245.1,1127-1145).
cctccagagcccaacataa

SEQ ID NO: 700794 - DNA, 19 bp, Mus musculus
  siRNA target sequence for Fv4 (NM_010245.1,1131-1149).
cagagcccaacataaacta

SEQ ID NO: 700795 - DNA, 19 bp, Mus musculus
  siRNA target sequence for Fv4 (NM_010245.1,1136-1154).
cccaacataaactaacctt

SEQ ID NO: 700796 - DNA, 19 bp, Mus musculus
  siRNA target sequence for Fv4 (NM_010245.1,1138-1156).
caacataaactaaccttat

SEQ ID NO: 700797 - DNA, 19 bp, Mus musculus
  siRNA target sequence for Fv4 (NM_010245.1,1147-1165).
ctaaccttatctgaagtaa

SEQ ID NO: 700798 - DNA, 19 bp, Mus musculus
  siRNA target sequence for Fv4 (NM_010245.1,1166-1184).
ctggtcagggaaaatgtct

SEQ ID NO: 700799 - DNA, 19 bp, Mus musculus
  siRNA target sequence for Fv4 (NM_010245.1,1202-1220).
ctcaccaggctctatgtaa

SEQ ID NO: 700800 - DNA, 19 bp, Mus musculus
  siRNA target sequence for Fv4 (NM_010245.1,1233-1251).
caccgtaagtggttccaat

SEQ ID NO: 700801 - DNA, 19 bp, Mus musculus
  siRNA target sequence for Fv4 (NM_010245.1,1235-1253).
ccgtaagtggttccaatta

SEQ ID NO: 700802 - DNA, 19 bp, Mus musculus
  siRNA target sequence for Fv4 (NM_010245.1,1313-1331).
ctactactgtacttaactt

SEQ ID NO: 700803 - DNA, 19 bp, Mus musculus
  siRNA target sequence for Fv4 (NM_010245.1,1430-1448).
ggagagagcctgtgtcatt

SEQ ID NO: 700804 - DNA, 19 bp, Mus musculus
  siRNA target sequence for Fv4 (NM_010245.1,1449-1467).
gaccctcgccctactatta

SEQ ID NO: 700805 - DNA, 19 bp, Mus musculus
  siRNA target sequence for Fv4 (NM_010245.1,1572-1590).
cctcaaagctgttgaagaa

SEQ ID NO: 700806 - DNA, 19 bp, Mus musculus
  siRNA target sequence for Fv4 (NM_010245.1,1573-1591).
ctcaaagctgttgaagaat

SEQ ID NO: 700807 - DNA, 19 bp, Mus musculus
  siRNA target sequence for Fv4 (NM_010245.1,1582-1600).
gttgaagaatcaattacta

SEQ ID NO: 700808 - DNA, 19 bp, Mus musculus
  siRNA target sequence for Fv4 (NM_010245.1,1644-1662).
gaaccgcagaggcttagat

SEQ ID NO: 700809 - DNA, 19 bp, Mus musculus
  siRNA target sequence for Fv4 (NM_010245.1,1647-1665).
ccgcagaggcttagatcta

SEQ ID NO: 700810 - DNA, 19 bp, Mus musculus
  siRNA target sequence for Fv4 (NM_010245.1,1725-1743).
cgaccatacaggattagtt

SEQ ID NO: 700811 - DNA, 19 bp, Mus musculus
  siRNA target sequence for Fv4 (NM_010245.1,1872-1890).
gggccctctgatagtactt

SEQ ID NO: 700812 - DNA, 19 bp, Mus musculus
  siRNA target sequence for Fv4 (NM_010245.1,1873-1891).
ggccctctgatagtacttt

SEQ ID NO: 700813 - DNA, 19 bp, Mus musculus
  siRNA target sequence for Fv4 (NM_010245.1,1874-1892).
gccctctgatagtactttt

SEQ ID NO: 700814 - DNA, 19 bp, Mus musculus
  siRNA target sequence for Gdap1 (NM_010267.2,187-205).
caaaaggtgcgcttggtaa

SEQ ID NO: 700815 - DNA, 19 bp, Mus musculus
  siRNA target sequence for Gdap1 (NM_010267.2,192-210).
ggtgcgcttggtaattgct

SEQ ID NO: 700816 - DNA, 19 bp, Mus musculus
  siRNA target sequence for Gdap1 (NM_010267.2,316-334).
gtccacggggagaacataa

SEQ ID NO: 700817 - DNA, 19 bp, Mus musculus
  siRNA target sequence for Gdap1 (NM_010267.2,321-339).
cggggagaacataatctgt

SEQ ID NO: 700818 - DNA, 19 bp, Mus musculus
  siRNA target sequence for Gdap1 (NM_010267.2,338-356).
gtgaggccactcagatcat

SEQ ID NO: 700819 - DNA, 19 bp, Mus musculus
  siRNA target sequence for Gdap1 (NM_010267.2,344-362).
ccactcagatcattgatta

SEQ ID NO: 700820 - DNA, 19 bp, Mus musculus
  siRNA target sequence for Gdap1 (NM_010267.2,385-403).
gaaagaacacccaggttaa

SEQ ID NO: 700821 - DNA, 19 bp, Mus musculus
  siRNA target sequence for Gdap1 (NM_010267.2,409-427).
gatgaaggaagcatgtatt

SEQ ID NO: 700822 - DNA, 19 bp, Mus musculus
  siRNA target sequence for Gdap1 (NM_010267.2,464-482).
ccttgccaatggatgctta

SEQ ID NO: 700823 - DNA, 19 bp, Mus musculus
  siRNA target sequence for Gdap1 (NM_010267.2,468-486).
gccaatggatgcttacaca

SEQ ID NO: 700824 - DNA, 19 bp, Mus musculus
  siRNA target sequence for Gdap1 (NM_010267.2,525-543).
catgatccccgcttatgca

SEQ ID NO: 700825 - DNA, 19 bp, Mus musculus
  siRNA target sequence for Gdap1 (NM_010267.2,625-643).
gcatacattgccaaacaga

SEQ ID NO: 700826 - DNA, 19 bp, Mus musculus
  siRNA target sequence for Gdap1 (NM_010267.2,664-682).
cttgatcatgacaatgtca

SEQ ID NO: 700827 - DNA, 19 bp, Mus musculus
  siRNA target sequence for Gdap1 (NM_010267.2,667-685).
gatcatgacaatgtcaaat

SEQ ID NO: 700828 - DNA, 19 bp, Mus musculus
  siRNA target sequence for Gdap1 (NM_010267.2,673-691).
gacaatgtcaaatacttga

SEQ ID NO: 700829 - DNA, 19 bp, Mus musculus
  siRNA target sequence for Gdap1 (NM_010267.2,723-741).
ggatcaggtggaaactgaa

SEQ ID NO: 700830 - DNA, 19 bp, Mus musculus
  siRNA target sequence for Gdap1 (NM_010267.2,724-742).
gatcaggtggaaactgaat

SEQ ID NO: 700831 - DNA, 19 bp, Mus musculus
  siRNA target sequence for Gdap1 (NM_010267.2,729-747).
ggtggaaactgaattacaa

SEQ ID NO: 700832 - DNA, 19 bp, Mus musculus
  siRNA target sequence for Gdap1 (NM_010267.2,893-911).
gaccgaacttggaaaccta

SEQ ID NO: 700833 - DNA, 19 bp, Mus musculus
  siRNA target sequence for Gdap1 (NM_010267.2,896-914).
cgaacttggaaacctatta

SEQ ID NO: 700834 - DNA, 19 bp, Mus musculus
  siRNA target sequence for Gdap1 (NM_010267.2,955-973).
ggacatgtcaacaatatat

SEQ ID NO: 700835 - DNA, 19 bp, Mus musculus
  siRNA target sequence for Gdap1 (NM_010267.2,956-974).
gacatgtcaacaatatatt

SEQ ID NO: 700836 - DNA, 19 bp, Mus musculus
  siRNA target sequence for Gdap1 (NM_010267.2,961-979).
gtcaacaatatattaatct

SEQ ID NO: 700837 - DNA, 19 bp, Mus musculus
  siRNA target sequence for Gdap1 (NM_010267.2,963-981).
caacaatatattaatctct

SEQ ID NO: 700838 - DNA, 19 bp, Mus musculus
  siRNA target sequence for Gdap1 (NM_010267.2,998-1016).
cattccgggtggccaaaaa

SEQ ID NO: 700839 - DNA, 19 bp, Mus musculus
  siRNA target sequence for Gdap1 (NM_010267.2,1040-1058).
gcacccttgtggttggttt

SEQ ID NO: 700840 - DNA, 19 bp, Mus musculus
  siRNA target sequence for Gdap1 (NM_010267.2,1101-1119).
gagacttggcagcatgata

SEQ ID NO: 700841 - DNA, 19 bp, Mus musculus
  siRNA target sequence for Gdap1 (NM_010267.2,1126-1144).
cttagacccagaccaaatt

SEQ ID NO: 700842 - DNA, 19 bp, Mus musculus
  siRNA target sequence for Gdap10 (NM_010268.1,2766-2784).
gagctaggcttgattcaaa

SEQ ID NO: 700843 - DNA, 19 bp, Mus musculus
  siRNA target sequence for Gdap10 (NM_010268.1,2812-2830).
gcacccacagtgaacacat

SEQ ID NO: 700844 - DNA, 19 bp, Mus musculus
  siRNA target sequence for Gdap10 (NM_010268.1,2813-2831).
cacccacagtgaacacatt

SEQ ID NO: 700845 - DNA, 19 bp, Mus musculus
  siRNA target sequence for Gdap2 (NM_010269.1,272-290).
gcgactcgtacgaagatga

SEQ ID NO: 700846 - DNA, 19 bp, Mus musculus
  siRNA target sequence for Gdap2 (NM_010269.1,273-291).
cgactcgtacgaagatgaa

SEQ ID NO: 700847 - DNA, 19 bp, Mus musculus
  siRNA target sequence for Gdap2 (NM_010269.1,276-294).
ctcgtacgaagatgaagta

SEQ ID NO: 700848 - DNA, 19 bp, Mus musculus
  siRNA target sequence for Gdap2 (NM_010269.1,336-354).
cagcagatcaccttttgtt

SEQ ID NO: 700849 - DNA, 19 bp, Mus musculus
  siRNA target sequence for Gdap2 (NM_010269.1,338-356).
gcagatcaccttttgttta

SEQ ID NO: 700850 - DNA, 19 bp, Mus musculus
  siRNA target sequence for Gdap2 (NM_010269.1,359-377).
gtcgggacgtcaatggaaa

SEQ ID NO: 700851 - DNA, 19 bp, Mus musculus
  siRNA target sequence for Gdap2 (NM_010269.1,362-380).
gggacgtcaatggaaaagt

SEQ ID NO: 700852 - DNA, 19 bp, Mus musculus
  siRNA target sequence for Gdap2 (NM_010269.1,510-528).
ggaccttcagaaactcaaa

SEQ ID NO: 700853 - DNA, 19 bp, Mus musculus
  siRNA target sequence for Gdap2 (NM_010269.1,533-551).
gccgaactggtgaagcaaa

SEQ ID NO: 700854 - DNA, 19 bp, Mus musculus
  siRNA target sequence for Gdap2 (NM_010269.1,535-553).
cgaactggtgaagcaaaat

SEQ ID NO: 700855 - DNA, 19 bp, Mus musculus
  siRNA target sequence for Gdap2 (NM_010269.1,536-554).
gaactggtgaagcaaaatt

SEQ ID NO: 700856 - DNA, 19 bp, Mus musculus
  siRNA target sequence for Gdap2 (NM_010269.1,555-573).
gacgaaaggctttaaccta

SEQ ID NO: 700857 - DNA, 19 bp, Mus musculus
  siRNA target sequence for Gdap2 (NM_010269.1,571-589).
ctagctgctcggttcatca

SEQ ID NO: 700858 - DNA, 19 bp, Mus musculus
  siRNA target sequence for Gdap2 (NM_010269.1,575-593).
ctgctcggttcatcattca

SEQ ID NO: 700859 - DNA, 19 bp, Mus musculus
  siRNA target sequence for Gdap2 (NM_010269.1,577-595).
gctcggttcatcattcaca

SEQ ID NO: 700860 - DNA, 19 bp, Mus musculus
  siRNA target sequence for Gdap2 (NM_010269.1,732-750).
gcgaggttatccactagaa

SEQ ID NO: 700861 - DNA, 19 bp, Mus musculus
  siRNA target sequence for Gdap2 (NM_010269.1,843-861).
cgaagaggccacttaccaa

SEQ ID NO: 700862 - DNA, 19 bp, Mus musculus
  siRNA target sequence for Gdap2 (NM_010269.1,922-940).
ctacctgcagacattggaa

SEQ ID NO: 700863 - DNA, 19 bp, Mus musculus
  siRNA target sequence for Gdap2 (NM_010269.1,961-979).
gtgcccgagcggcaaatta

SEQ ID NO: 700864 - DNA, 19 bp, Mus musculus
  siRNA target sequence for Gdap2 (NM_010269.1,963-981).
gcccgagcggcaaattaga

SEQ ID NO: 700865 - DNA, 19 bp, Mus musculus
  siRNA target sequence for Gdap2 (NM_010269.1,964-982).
cccgagcggcaaattagaa

SEQ ID NO: 700866 - DNA, 19 bp, Mus musculus
  siRNA target sequence for Gdap2 (NM_010269.1,965-983).
ccgagcggcaaattagaat

SEQ ID NO: 700867 - DNA, 19 bp, Mus musculus
  siRNA target sequence for Gdap2 (NM_010269.1,967-985).
gagcggcaaattagaatca

SEQ ID NO: 700868 - DNA, 19 bp, Mus musculus
  siRNA target sequence for Gdap2 (NM_010269.1,969-987).
gcggcaaattagaatcagt

SEQ ID NO: 700869 - DNA, 19 bp, Mus musculus
  siRNA target sequence for Gdap2 (NM_010269.1,1278-1296).
ggtagttggaagaaacatt

SEQ ID NO: 700870 - DNA, 19 bp, Mus musculus
  siRNA target sequence for Gdap2 (NM_010269.1,1320-1338).
caaggccctcttgtatttt

SEQ ID NO: 700871 - DNA, 19 bp, Mus musculus
  siRNA target sequence for Gdap2 (NM_010269.1,1325-1343).
ccctcttgtattttatcca

SEQ ID NO: 700872 - DNA, 19 bp, Mus musculus
  siRNA target sequence for Gdap2 (NM_010269.1,1341-1359).
ccatgtaatggatcacatt

SEQ ID NO: 700873 - DNA, 19 bp, Mus musculus
  siRNA target sequence for Gdap2 (NM_010269.1,1472-1490).
ggaatttgaaggctgttta

SEQ ID NO: 700874 - DNA, 19 bp, Mus musculus
  siRNA target sequence for Gdap2 (NM_010269.1,1473-1491).
gaatttgaaggctgtttat

SEQ ID NO: 700875 - DNA, 19 bp, Mus musculus
  siRNA target sequence for Gdap2 (NM_010269.1,1479-1497).
gaaggctgtttatttcgtt

SEQ ID NO: 700876 - DNA, 19 bp, Mus musculus
  siRNA target sequence for Gdap2 (NM_010269.1,1596-1614).
gctcttctctgccatatca

SEQ ID NO: 700877 - DNA, 19 bp, Mus musculus
  siRNA target sequence for Gdap2 (NM_010269.1,1613-1631).
caccagagcagatagactt

SEQ ID NO: 700878 - DNA, 19 bp, Mus musculus
  siRNA target sequence for Gdap2 (NM_010269.1,1690-1708).
cctccatcaccagatttgt

SEQ ID NO: 700879 - DNA, 19 bp, Mus musculus
  siRNA target sequence for Gilz (NM_010286.2,305-323).
cgttaaactggataacagt

SEQ ID NO: 700880 - DNA, 19 bp, Mus musculus
  siRNA target sequence for Gilz (NM_010286.2,442-460).
gtgagctgcttgagaagaa

SEQ ID NO: 700881 - DNA, 19 bp, Mus musculus
  siRNA target sequence for Gja10 (NM_010289.1,42-60).
ccactcccactccactata

SEQ ID NO: 700882 - DNA, 19 bp, Mus musculus
  siRNA target sequence for Gja10 (NM_010289.1,172-190).
cagcccggttgcaacaata

SEQ ID NO: 700883 - DNA, 19 bp, Mus musculus
  siRNA target sequence for Gja10 (NM_010289.1,175-193).
cccggttgcaacaatatct

SEQ ID NO: 700884 - DNA, 19 bp, Mus musculus
  siRNA target sequence for Gja10 (NM_010289.1,177-195).
cggttgcaacaatatctgt

SEQ ID NO: 700885 - DNA, 19 bp, Mus musculus
  siRNA target sequence for Gja10 (NM_010289.1,179-197).
gttgcaacaatatctgtta

SEQ ID NO: 700886 - DNA, 19 bp, Mus musculus
  siRNA target sequence for Gja10 (NM_010289.1,183-201).
caacaatatctgttacgat

SEQ ID NO: 700887 - DNA, 19 bp, Mus musculus
  siRNA target sequence for Gja10 (NM_010289.1,211-229).
cccatctctttgatcagat

SEQ ID NO: 700888 - DNA, 19 bp, Mus musculus
  siRNA target sequence for Gja10 (NM_010289.1,212-230).
ccatctctttgatcagatt

SEQ ID NO: 700889 - DNA, 19 bp, Mus musculus
  siRNA target sequence for Gja10 (NM_010289.1,381-399).
gcaacaaagggtagataaa

SEQ ID NO: 700890 - DNA, 19 bp, Mus musculus
  siRNA target sequence for Gja10 (NM_010289.1,459-477).
gctgcgcacctatgtctta

SEQ ID NO: 700891 - DNA, 19 bp, Mus musculus
  siRNA target sequence for Gja10 (NM_010289.1,463-481).
cgcacctatgtcttacaca

SEQ ID NO: 700892 - DNA, 19 bp, Mus musculus
  siRNA target sequence for Gja10 (NM_010289.1,464-482).
gcacctatgtcttacacat

SEQ ID NO: 700893 - DNA, 19 bp, Mus musculus
  siRNA target sequence for Gja10 (NM_010289.1,488-506).
ccagatcagtgctagaagt

SEQ ID NO: 700894 - DNA, 19 bp, Mus musculus
  siRNA target sequence for Gja10 (NM_010289.1,489-507).
cagatcagtgctagaagta

SEQ ID NO: 700895 - DNA, 19 bp, Mus musculus
  siRNA target sequence for Gja10 (NM_010289.1,499-517).
ctagaagtagggttcatga

SEQ ID NO: 700896 - DNA, 19 bp, Mus musculus
  siRNA target sequence for Gja10 (NM_010289.1,510-528).
gttcatgataggccaatat

SEQ ID NO: 700897 - DNA, 19 bp, Mus musculus
  siRNA target sequence for Gja10 (NM_010289.1,513-531).
catgataggccaatatatt

SEQ ID NO: 700898 - DNA, 19 bp, Mus musculus
  siRNA target sequence for Gja10 (NM_010289.1,544-562).
caaatgcaccccatttaca

SEQ ID NO: 700899 - DNA, 19 bp, Mus musculus
  siRNA target sequence for Gja10 (NM_010289.1,658-676).
gccatctccttgttactca

SEQ ID NO: 700900 - DNA, 19 bp, Mus musculus
  siRNA target sequence for Gja10 (NM_010289.1,665-683).
ccttgttactcaatatcct

SEQ ID NO: 700901 - DNA, 19 bp, Mus musculus
  siRNA target sequence for Gja10 (NM_010289.1,673-691).
ctcaatatcctggaaatat

SEQ ID NO: 700902 - DNA, 19 bp, Mus musculus
  siRNA target sequence for Gja10 (NM_010289.1,675-693).
caatatcctggaaatattt

SEQ ID NO: 700903 - DNA, 19 bp, Mus musculus
  siRNA target sequence for Gja10 (NM_010289.1,694-712).
catctcggcatcaggaaaa

SEQ ID NO: 700904 - DNA, 19 bp, Mus musculus
  siRNA target sequence for Gja10 (NM_010289.1,721-739).
gcactcgatggcaaatcca

SEQ ID NO: 700905 - DNA, 19 bp, Mus musculus
  siRNA target sequence for Gja10 (NM_010289.1,766-784).
ggccctccattccattcaa

SEQ ID NO: 700906 - DNA, 19 bp, Mus musculus
  siRNA target sequence for Gja10 (NM_010289.1,768-786).
ccctccattccattcaaca

SEQ ID NO: 700907 - DNA, 19 bp, Mus musculus
  siRNA target sequence for Gja10 (NM_010289.1,844-862).
ctacttcaagccaacaata

SEQ ID NO: 700908 - DNA, 19 bp, Mus musculus
  siRNA target sequence for Gja10 (NM_010289.1,867-885).
gcaagtcatccgagtcaat

SEQ ID NO: 700909 - DNA, 19 bp, Mus musculus
  siRNA target sequence for Gja10 (NM_010289.1,868-886).
caagtcatccgagtcaata

SEQ ID NO: 700910 - DNA, 19 bp, Mus musculus
  siRNA target sequence for Gja10 (NM_010289.1,926-944).
ggcaacttgaggtagatgt

SEQ ID NO: 700911 - DNA, 19 bp, Mus musculus
  siRNA target sequence for Gja10 (NM_010289.1,927-945).
gcaacttgaggtagatgta

SEQ ID NO: 700912 - DNA, 19 bp, Mus musculus
  siRNA target sequence for Gja10 (NM_010289.1,1250-1268).
gggtttggacagacagatt

SEQ ID NO: 700913 - DNA, 19 bp, Mus musculus
  siRNA target sequence for Gja10 (NM_010289.1,1367-1385).
cctgcttggatttttcaca

SEQ ID NO: 700914 - DNA, 19 bp, Mus musculus
  siRNA target sequence for Gja10 (NM_010289.1,1426-1444).
cacagagcatcgatggtaa

SEQ ID NO: 700915 - DNA, 19 bp, Mus musculus
  siRNA target sequence for Gja10 (NM_010289.1,1430-1448).
gagcatcgatggtaagtaa

SEQ ID NO: 700916 - DNA, 19 bp, Mus musculus
  siRNA target sequence for Gja10 (NM_010289.1,1432-1450).
gcatcgatggtaagtaaaa

SEQ ID NO: 700917 - DNA, 19 bp, Mus musculus
  siRNA target sequence for Gp1ba (NM_010326.1,111-129).
ctgccaagtcccttgcatt

SEQ ID NO: 700918 - DNA, 19 bp, Mus musculus
  siRNA target sequence for Gp1ba (NM_010326.1,132-150).
cagcacacttgtagtatct

SEQ ID NO: 700919 - DNA, 19 bp, Mus musculus
  siRNA target sequence for Gp1ba (NM_010326.1,295-313).
ctcacctcacttatctgta

SEQ ID NO: 700920 - DNA, 19 bp, Mus musculus
  siRNA target sequence for Gp1ba (NM_010326.1,337-355).
gcctgcagaccaatggtaa

SEQ ID NO: 700921 - DNA, 19 bp, Mus musculus
  siRNA target sequence for Gp1ba (NM_010326.1,338-356).
cctgcagaccaatggtaaa

SEQ ID NO: 700922 - DNA, 19 bp, Mus musculus
  siRNA target sequence for Gp1ba (NM_010326.1,346-364).
ccaatggtaaactgataaa

SEQ ID NO: 700923 - DNA, 19 bp, Mus musculus
  siRNA target sequence for Gp1ba (NM_010326.1,447-465).
gacgtctccttcaacaagt

SEQ ID NO: 700924 - DNA, 19 bp, Mus musculus
  siRNA target sequence for Gp1ba (NM_010326.1,654-672).
gataccctctaccttcaaa

SEQ ID NO: 700925 - DNA, 19 bp, Mus musculus
  siRNA target sequence for Gp1ba (NM_010326.1,674-692).
gaactggcttcgcacaata

SEQ ID NO: 700926 - DNA, 19 bp, Mus musculus
  siRNA target sequence for Gp1ba (NM_010326.1,677-695).
ctggcttcgcacaatacca

SEQ ID NO: 700927 - DNA, 19 bp, Mus musculus
  siRNA target sequence for Gp1ba (NM_010326.1,795-813).
gaaaatgccaacaatgtct

SEQ ID NO: 700928 - DNA, 19 bp, Mus musculus
  siRNA target sequence for Gp1ba (NM_010326.1,914-932).
gaagggctgccctactagt

SEQ ID NO: 700929 - DNA, 19 bp, Mus musculus
  siRNA target sequence for Gp1ba (NM_010326.1,917-935).
gggctgccctactagtagt

SEQ ID NO: 700930 - DNA, 19 bp, Mus musculus
  siRNA target sequence for Gp1ba (NM_010326.1,934-952).
gtggtgacacagactatga

SEQ ID NO: 700931 - DNA, 19 bp, Mus musculus
  siRNA target sequence for Gp1ba (NM_010326.1,993-1011).
gaggtcaagttctctacta

SEQ ID NO: 700932 - DNA, 19 bp, Mus musculus
  siRNA target sequence for Gp1ba (NM_010326.1,1004-1022).
ctctactaacactaaagtt

SEQ ID NO: 700933 - DNA, 19 bp, Mus musculus
  siRNA target sequence for Gp1ba (NM_010326.1,1006-1024).
ctactaacactaaagttca

SEQ ID NO: 700934 - DNA, 19 bp, Mus musculus
  siRNA target sequence for Gp1ba (NM_010326.1,1046-1064).
cgccgcagcaccttctact

SEQ ID NO: 700935 - DNA, 19 bp, Mus musculus
  siRNA target sequence for Gp1ba (NM_010326.1,1047-1065).
gccgcagcaccttctactt

SEQ ID NO: 700936 - DNA, 19 bp, Mus musculus
  siRNA target sequence for Gp1ba (NM_010326.1,1049-1067).
cgcagcaccttctacttct

SEQ ID NO: 700937 - DNA, 19 bp, Mus musculus
  siRNA target sequence for Gp1ba (NM_010326.1,1189-1207).
ccttctacagtctaaaact

SEQ ID NO: 700938 - DNA, 19 bp, Mus musculus
  siRNA target sequence for Gp1ba (NM_010326.1,1196-1214).
cagtctaaaactcaatact

SEQ ID NO: 700939 - DNA, 19 bp, Mus musculus
  siRNA target sequence for Gp1ba (NM_010326.1,1274-1292).
caacatccaaccaatgctt

SEQ ID NO: 700940 - DNA, 19 bp, Mus musculus
  siRNA target sequence for Gp1ba (NM_010326.1,1653-1671).
gagcccagcaccactttaa

SEQ ID NO: 700941 - DNA, 19 bp, Mus musculus
  siRNA target sequence for Gp1ba (NM_010326.1,1655-1673).
gcccagcaccactttaact

SEQ ID NO: 700942 - DNA, 19 bp, Mus musculus
  siRNA target sequence for Gp1ba (NM_010326.1,1657-1675).
ccagcaccactttaactaa

SEQ ID NO: 700943 - DNA, 19 bp, Mus musculus
  siRNA target sequence for Gp1ba (NM_010326.1,1658-1676).
cagcaccactttaactaat

SEQ ID NO: 700944 - DNA, 19 bp, Mus musculus
  siRNA target sequence for Gp1ba (NM_010326.1,1733-1751).
cccaattgagacaatttta

SEQ ID NO: 700945 - DNA, 19 bp, Mus musculus
  siRNA target sequence for Gp1ba (NM_010326.1,1820-1838).
gcagaacagctttctcaat

SEQ ID NO: 700946 - DNA, 19 bp, Mus musculus
  siRNA target sequence for Gp1ba (NM_010326.1,1841-1859).
cccagaggtagctctagta

SEQ ID NO: 700947 - DNA, 19 bp, Mus musculus
  siRNA target sequence for Gp1ba (NM_010326.1,1842-1860).
ccagaggtagctctagtaa

SEQ ID NO: 700948 - DNA, 19 bp, Mus musculus
  siRNA target sequence for Gp1ba (NM_010326.1,1851-1869).
gctctagtaagctctgata

SEQ ID NO: 700949 - DNA, 19 bp, Mus musculus
  siRNA target sequence for Gp1ba (NM_010326.1,1854-1872).
ctagtaagctctgatactt

SEQ ID NO: 700950 - DNA, 19 bp, Mus musculus
  siRNA target sequence for Gp1ba (NM_010326.1,2266-2284).
ggtactcaggccatagtct

SEQ ID NO: 700951 - DNA, 19 bp, Mus musculus
  siRNA target sequence for Gpaa1 (NM_010331.2,144-162).
cgtcttgcgccttaacaca

SEQ ID NO: 700952 - DNA, 19 bp, Mus musculus
  siRNA target sequence for Gpaa1 (NM_010331.2,237-255).
cacttacatgtctgagaat

SEQ ID NO: 700953 - DNA, 19 bp, Mus musculus
  siRNA target sequence for Gpaa1 (NM_010331.2,414-432).
gagcttctcccgcaaacta

SEQ ID NO: 700954 - DNA, 19 bp, Mus musculus
  siRNA target sequence for Gpaa1 (NM_010331.2,547-565).
ggtccagatgccaccaata

SEQ ID NO: 700955 - DNA, 19 bp, Mus musculus
  siRNA target sequence for Gpaa1 (NM_010331.2,685-703).
gaagcctaccatgacatta

SEQ ID NO: 700956 - DNA, 19 bp, Mus musculus
  siRNA target sequence for Gpaa1 (NM_010331.2,693-711).
ccatgacattaatgttaca

SEQ ID NO: 700957 - DNA, 19 bp, Mus musculus
  siRNA target sequence for Gpaa1 (NM_010331.2,1051-1069).
ctacgcggcatcaatagct

SEQ ID NO: 700958 - DNA, 19 bp, Mus musculus
  siRNA target sequence for Gpaa1 (NM_010331.2,1067-1085).
gcttccgccaatacaagta

SEQ ID NO: 700959 - DNA, 19 bp, Mus musculus
  siRNA target sequence for Gpaa1 (NM_010331.2,1068-1086).
cttccgccaatacaagtat

SEQ ID NO: 700960 - DNA, 19 bp, Mus musculus
  siRNA target sequence for Gpaa1 (NM_010331.2,1071-1089).
ccgccaatacaagtatgat

SEQ ID NO: 700961 - DNA, 19 bp, Mus musculus
  siRNA target sequence for Gpaa1 (NM_010331.2,1072-1090).
cgccaatacaagtatgatt

SEQ ID NO: 700962 - DNA, 19 bp, Mus musculus
  siRNA target sequence for Gpaa1 (NM_010331.2,1073-1091).
gccaatacaagtatgattt

SEQ ID NO: 700963 - DNA, 19 bp, Mus musculus
  siRNA target sequence for Gpaa1 (NM_010331.2,1150-1168).
cgcctgcaccagtcattct

SEQ ID NO: 700964 - DNA, 19 bp, Mus musculus
  siRNA target sequence for Gpaa1 (NM_010331.2,1153-1171).
ctgcaccagtcattcttct

SEQ ID NO: 700965 - DNA, 19 bp, Mus musculus
  siRNA target sequence for Gpaa1 (NM_010331.2,1156-1174).
caccagtcattcttcttct

SEQ ID NO: 700966 - DNA, 19 bp, Mus musculus
  siRNA target sequence for Gpaa1 (NM_010331.2,1430-1448).
ctgtgctgggccaacattt

SEQ ID NO: 700967 - DNA, 19 bp, Mus musculus
  siRNA target sequence for Gpaa1 (NM_010331.2,1434-1452).
gctgggccaacatttagct

SEQ ID NO: 700968 - DNA, 19 bp, Mus musculus
  siRNA target sequence for Gpaa1 (NM_010331.2,1435-1453).
ctgggccaacatttagcta

SEQ ID NO: 700969 - DNA, 19 bp, Mus musculus
  siRNA target sequence for Gpaa1 (NM_010331.2,1494-1512).
gacgctgctcgcgatttat

SEQ ID NO: 700970 - DNA, 19 bp, Mus musculus
  siRNA target sequence for Gpaa1 (NM_010331.2,1496-1514).
cgctgctcgcgatttatgt

SEQ ID NO: 700971 - DNA, 19 bp, Mus musculus
  siRNA target sequence for Gpaa1 (NM_010331.2,1497-1515).
gctgctcgcgatttatgta

SEQ ID NO: 700972 - DNA, 19 bp, Mus musculus
  siRNA target sequence for Gpaa1 (NM_010331.2,1578-1596).
ctggatggcactgaaacta

SEQ ID NO: 700973 - DNA, 19 bp, Mus musculus
  siRNA target sequence for Gpaa1 (NM_010331.2,1580-1598).
ggatggcactgaaactagt

SEQ ID NO: 700974 - DNA, 19 bp, Mus musculus
  siRNA target sequence for Gpaa1 (NM_010331.2,1631-1649).
gcattgctctcctcaattt

SEQ ID NO: 700975 - DNA, 19 bp, Mus musculus
  siRNA target sequence for Gsg1 (NM_010352.1,168-186).
gaccagcggaccttcattt

SEQ ID NO: 700976 - DNA, 19 bp, Mus musculus
  siRNA target sequence for Gsg1 (NM_010352.1,170-188).
ccagcggaccttcatttct

SEQ ID NO: 700977 - DNA, 19 bp, Mus musculus
  siRNA target sequence for Gsg1 (NM_010352.1,297-315).
gcagccaagtgctttgaca

SEQ ID NO: 700978 - DNA, 19 bp, Mus musculus
  siRNA target sequence for Gsg1 (NM_010352.1,333-351).
gggggcatcgccaacacat

SEQ ID NO: 700979 - DNA, 19 bp, Mus musculus
  siRNA target sequence for Gsg1 (NM_010352.1,472-490).
gcagacgtttcattgaact

SEQ ID NO: 700980 - DNA, 19 bp, Mus musculus
  siRNA target sequence for Gsg1 (NM_010352.1,557-575).
ccccactctccgatttgga

SEQ ID NO: 700981 - DNA, 19 bp, Mus musculus
  siRNA target sequence for Gsg1 (NM_010352.1,624-642).
cccgtggcaaaggtctttt

SEQ ID NO: 700982 - DNA, 19 bp, Mus musculus
  siRNA target sequence for Gsg1 (NM_010352.1,797-815).
gatggtggctcatatgcta

SEQ ID NO: 700983 - DNA, 19 bp, Mus musculus
  siRNA target sequence for Gsg1 (NM_010352.1,800-818).
ggtggctcatatgctatat

SEQ ID NO: 700984 - DNA, 19 bp, Mus musculus
  siRNA target sequence for Gsg1 (NM_010352.1,801-819).
gtggctcatatgctatatt

SEQ ID NO: 700985 - DNA, 19 bp, Mus musculus
  siRNA target sequence for Gsg1 (NM_010352.1,803-821).
ggctcatatgctatattca

SEQ ID NO: 700986 - DNA, 19 bp, Mus musculus
  siRNA target sequence for Gsg1 (NM_010352.1,805-823).
ctcatatgctatattcaca

SEQ ID NO: 700987 - DNA, 19 bp, Mus musculus
  siRNA target sequence for Gsg1 (NM_010352.1,830-848).
ccaggcaactgccaactta

SEQ ID NO: 700988 - DNA, 19 bp, Mus musculus
  siRNA target sequence for Gsg1 (NM_010352.1,863-881).
gaccacactcttggaatta

SEQ ID NO: 700989 - DNA, 19 bp, Mus musculus
  siRNA target sequence for Gsg1 (NM_010352.1,934-952).
cggtcaccaccttcaacat

SEQ ID NO: 700990 - DNA, 19 bp, Mus musculus
  siRNA target sequence for Gsg1 (NM_010352.1,936-954).
gtcaccaccttcaacatgt

SEQ ID NO: 700991 - DNA, 19 bp, Mus musculus
  siRNA target sequence for Gsg1 (NM_010352.1,961-979).
ggatggtgctggagttcaa

SEQ ID NO: 700992 - DNA, 19 bp, Mus musculus
  siRNA target sequence for Baiap1 (NM_010367.1,1206-1224).
ggaggccgtcaccttcaaa

SEQ ID NO: 700993 - DNA, 19 bp, Mus musculus
  siRNA target sequence for Baiap1 (NM_010367.1,4314-4332).
cgctgcatgtatgagaaat

SEQ ID NO: 700994 - DNA, 19 bp, Mus musculus
  siRNA target sequence for Baiap1 (NM_010367.1,4316-4334).
ctgcatgtatgagaaatga

SEQ ID NO: 700995 - DNA, 19 bp, Mus musculus
  siRNA target sequence for Baiap1 (NM_010367.1,4356-4374).
ctaccttatgggccataat

SEQ ID NO: 700996 - DNA, 19 bp, Mus musculus
  siRNA target sequence for Baiap1 (NM_010367.1,4359-4377).
ccttatgggccataatcaa

SEQ ID NO: 700997 - DNA, 19 bp, Mus musculus
  siRNA target sequence for Baiap1 (NM_010367.1,4360-4378).
cttatgggccataatcaaa

SEQ ID NO: 700998 - DNA, 19 bp, Mus musculus
  siRNA target sequence for H2-DMb2 (NM_010388.1,80-98).
gcacgtgcgtgctgaatga

SEQ ID NO: 700999 - DNA, 19 bp, Mus musculus
  siRNA target sequence for H2-DMb2 (NM_010388.1,216-234).
ggctgaaataatttcaaat

SEQ ID NO: 701000 - DNA, 19 bp, Mus musculus
  siRNA target sequence for H2-DMb2 (NM_010388.1,243-261).
cgaacaggagagccttatt

SEQ ID NO: 701001 - DNA, 19 bp, Mus musculus
  siRNA target sequence for H2-DMb2 (NM_010388.1,256-274).
cttattcatcgcttgcaaa

SEQ ID NO: 701002 - DNA, 19 bp, Mus musculus
  siRNA target sequence for H2-Q5 (NM_010393.1,263-281).
caaagatcgccaaaaacaa

SEQ ID NO: 701003 - DNA, 19 bp, Mus musculus
  siRNA target sequence for H2-Q5 (NM_010393.1,622-640).
ccaccagaggcaaaagtga

SEQ ID NO: 701004 - DNA, 19 bp, Mus musculus
  siRNA target sequence for H2-T17 (NM_010396.2,327-345).
cggatccctttgggtattt

SEQ ID NO: 701005 - DNA, 19 bp, Mus musculus
  siRNA target sequence for H2-T17 (NM_010396.2,329-347).
gatccctttgggtatttct

SEQ ID NO: 701006 - DNA, 19 bp, Mus musculus
  siRNA target sequence for H2-T17 (NM_010396.2,332-350).
ccctttgggtatttctaca

SEQ ID NO: 701007 - DNA, 19 bp, Mus musculus
  siRNA target sequence for Hap1 (NM_010404.2,153-171).
gaaccgggtccggacaaaa

SEQ ID NO: 701008 - DNA, 19 bp, Mus musculus
  siRNA target sequence for Hap1 (NM_010404.2,157-175).
cgggtccggacaaaaatca

SEQ ID NO: 701009 - DNA, 19 bp, Mus musculus
  siRNA target sequence for Hap1 (NM_010404.2,236-254).
ccatggacccgctacgtat

SEQ ID NO: 701010 - DNA, 19 bp, Mus musculus
  siRNA target sequence for Hap1 (NM_010404.2,237-255).
catggacccgctacgtatt

SEQ ID NO: 701011 - DNA, 19 bp, Mus musculus
  siRNA target sequence for Hap1 (NM_010404.2,240-258).
ggacccgctacgtattcca

SEQ ID NO: 701012 - DNA, 19 bp, Mus musculus
  siRNA target sequence for Hap1 (NM_010404.2,363-381).
ctgagcgtgcggcgtttat

SEQ ID NO: 701013 - DNA, 19 bp, Mus musculus
  siRNA target sequence for Hap1 (NM_010404.2,367-385).
gcgtgcggcgtttattcga

SEQ ID NO: 701014 - DNA, 19 bp, Mus musculus
  siRNA target sequence for Hap1 (NM_010404.2,414-432).
caccacccacgaagaagat

SEQ ID NO: 701015 - DNA, 19 bp, Mus musculus
  siRNA target sequence for Hap1 (NM_010404.2,416-434).
ccacccacgaagaagatca

SEQ ID NO: 701016 - DNA, 19 bp, Mus musculus
  siRNA target sequence for Hap1 (NM_010404.2,446-464).
gtcaaagtgatgttgtatt

SEQ ID NO: 701017 - DNA, 19 bp, Mus musculus
  siRNA target sequence for Hap1 (NM_010404.2,536-554).
gtcttgatggaggagaata

SEQ ID NO: 701018 - DNA, 19 bp, Mus musculus
  siRNA target sequence for Hap1 (NM_010404.2,1147-1165).
ctcctacatgcaggattat

SEQ ID NO: 701019 - DNA, 19 bp, Mus musculus
  siRNA target sequence for Hap1 (NM_010404.2,1236-1254).
ctgtcacccactatggata

SEQ ID NO: 701020 - DNA, 19 bp, Mus musculus
  siRNA target sequence for Hap1 (NM_010404.2,1240-1258).
cacccactatggatacagt

SEQ ID NO: 701021 - DNA, 19 bp, Mus musculus
  siRNA target sequence for Hap1 (NM_010404.2,1335-1353).
ctgaccctgcgtatttcat

SEQ ID NO: 701022 - DNA, 19 bp, Mus musculus
  siRNA target sequence for Hap1 (NM_010404.2,1413-1431).
ccccaccggctcaagatct

SEQ ID NO: 701023 - DNA, 19 bp, Mus musculus
  siRNA target sequence for Hap1 (NM_010404.2,1430-1448).
ctcaagccacctgaagatt

SEQ ID NO: 701024 - DNA, 19 bp, Mus musculus
  siRNA target sequence for Hap1 (NM_010404.2,1432-1450).
caagccacctgaagatttt

SEQ ID NO: 701025 - DNA, 19 bp, Mus musculus
  siRNA target sequence for Hap1 (NM_010404.2,1786-1804).
ctttcgatcatcaaccata

SEQ ID NO: 701026 - DNA, 19 bp, Mus musculus
  siRNA target sequence for Hemt1 (NM_010416.1,201-219).
gaacaaggcctcaaacctt

SEQ ID NO: 701027 - DNA, 19 bp, Mus musculus
  siRNA target sequence for Hemt1 (NM_010416.1,255-273).
ctcatgtcagacaactcta

SEQ ID NO: 701028 - DNA, 19 bp, Mus musculus
  siRNA target sequence for Hivep2 (NM_010437.1,103-121).
gctctaggacaaaaagcta

SEQ ID NO: 701029 - DNA, 19 bp, Mus musculus
  siRNA target sequence for Hivep2 (NM_010437.1,184-202).
cttaagatgagcactttca

SEQ ID NO: 701030 - DNA, 19 bp, Mus musculus
  siRNA target sequence for Hivep2 (NM_010437.1,302-320).
gcgagggcctacatcaagt

SEQ ID NO: 701031 - DNA, 19 bp, Mus musculus
  siRNA target sequence for Hivep2 (NM_010437.1,365-383).
gccaacactcgctctcttt

SEQ ID NO: 701032 - DNA, 19 bp, Mus musculus
  siRNA target sequence for Hivep2 (NM_010437.1,483-501).
cgcctctgaggacctattt

SEQ ID NO: 701033 - DNA, 19 bp, Mus musculus
  siRNA target sequence for Hivep2 (NM_010437.1,493-511).
gacctatttccttttccaa

SEQ ID NO: 701034 - DNA, 19 bp, Mus musculus
  siRNA target sequence for Hivep2 (NM_010437.1,520-538).
cacagcggtggttatccta

SEQ ID NO: 701035 - DNA, 19 bp, Mus musculus
  siRNA target sequence for Hivep2 (NM_010437.1,525-543).
cggtggttatcctagaaaa

SEQ ID NO: 701036 - DNA, 19 bp, Mus musculus
  siRNA target sequence for Hivep2 (NM_010437.1,562-580).
cctgcttacagccaatact

SEQ ID NO: 701037 - DNA, 19 bp, Mus musculus
  siRNA target sequence for Hivep2 (NM_010437.1,573-591).
ccaatactcccagaaaagt

SEQ ID NO: 701038 - DNA, 19 bp, Mus musculus
  siRNA target sequence for Hivep2 (NM_010437.1,574-592).
caatactcccagaaaagta

SEQ ID NO: 701039 - DNA, 19 bp, Mus musculus
  siRNA target sequence for Hivep2 (NM_010437.1,579-597).
ctcccagaaaagtatcgaa

SEQ ID NO: 701040 - DNA, 19 bp, Mus musculus
  siRNA target sequence for Hivep2 (NM_010437.1,680-698).
cgaaacccagcgtcttaaa

SEQ ID NO: 701041 - DNA, 19 bp, Mus musculus
  siRNA target sequence for Hivep2 (NM_010437.1,689-707).
gcgtcttaaagaaacacat

SEQ ID NO: 701042 - DNA, 19 bp, Mus musculus
  siRNA target sequence for Hivep2 (NM_010437.1,729-747).
gccgtatccatgtatacct

SEQ ID NO: 701043 - DNA, 19 bp, Mus musculus
  siRNA target sequence for Hivep2 (NM_010437.1,730-748).
ccgtatccatgtatacctt

SEQ ID NO: 701044 - DNA, 19 bp, Mus musculus
  siRNA target sequence for Hivep2 (NM_010437.1,795-813).
gtctcatgcccatgcaatt

SEQ ID NO: 701045 - DNA, 19 bp, Mus musculus
  siRNA target sequence for Hivep2 (NM_010437.1,797-815).
ctcatgcccatgcaattaa

SEQ ID NO: 701046 - DNA, 19 bp, Mus musculus
  siRNA target sequence for Hivep2 (NM_010437.1,864-882).
cgaggctggttttatcgat

SEQ ID NO: 701047 - DNA, 19 bp, Mus musculus
  siRNA target sequence for Hivep2 (NM_010437.1,869-887).
ctggttttatcgatgtaga

SEQ ID NO: 701048 - DNA, 19 bp, Mus musculus
  siRNA target sequence for Hivep2 (NM_010437.1,928-946).
gatgaggagagctctttat

SEQ ID NO: 701049 - DNA, 19 bp, Mus musculus
  siRNA target sequence for Hivep2 (NM_010437.1,985-1003).
gtccctttggacattgcta

SEQ ID NO: 701050 - DNA, 19 bp, Mus musculus
  siRNA target sequence for Hivep2 (NM_010437.1,1022-1040).
ggtccttggaagaatcttt

SEQ ID NO: 701051 - DNA, 19 bp, Mus musculus
  siRNA target sequence for Hivep2 (NM_010437.1,1098-1116).
cagtgagggctctcagtat

SEQ ID NO: 701052 - DNA, 19 bp, Mus musculus
  siRNA target sequence for Hivep2 (NM_010437.1,1100-1118).
gtgagggctctcagtatct

SEQ ID NO: 701053 - DNA, 19 bp, Mus musculus
  siRNA target sequence for Hivep2 (NM_010437.1,1272-1290).
ggactctggttacttttct

SEQ ID NO: 701054 - DNA, 19 bp, Mus musculus
  siRNA target sequence for Hivep2 (NM_010437.1,1329-1347).
cacaaacgccaagtcttat

SEQ ID NO: 701055 - DNA, 19 bp, Mus musculus
  siRNA target sequence for Hivep2 (NM_010437.1,1331-1349).
caaacgccaagtcttatga

SEQ ID NO: 701056 - DNA, 19 bp, Mus musculus
  siRNA target sequence for Hivep2 (NM_010437.1,1341-1359).
gtcttatgaagaaatcatt

SEQ ID NO: 701057 - DNA, 19 bp, Mus musculus
  siRNA target sequence for Hivep2 (NM_010437.1,1375-1393).
cgacttagtccaaggaata

SEQ ID NO: 701058 - DNA, 19 bp, Mus musculus
  siRNA target sequence for Hivep2 (NM_010437.1,1389-1407).
gaatacacttagtgttact

SEQ ID NO: 701059 - DNA, 19 bp, Mus musculus
  siRNA target sequence for Hivep2 (NM_010437.1,1442-1460).
ggggcatcatggaaccatt

SEQ ID NO: 701060 - DNA, 19 bp, Mus musculus
  siRNA target sequence for Hivep2 (NM_010437.1,1446-1464).
catcatggaaccattacct

SEQ ID NO: 701061 - DNA, 19 bp, Mus musculus
  siRNA target sequence for Hivep2 (NM_010437.1,1456-1474).
ccattacctcatttaaaca

SEQ ID NO: 701062 - DNA, 19 bp, Mus musculus
  siRNA target sequence for Hivep2 (NM_010437.1,1478-1496).
ggttggaggtcaagatgtt

SEQ ID NO: 701063 - DNA, 19 bp, Mus musculus
  siRNA target sequence for Hivep2 (NM_010437.1,1479-1497).
gttggaggtcaagatgttt

SEQ ID NO: 701064 - DNA, 19 bp, Mus musculus
  siRNA target sequence for Hivep2 (NM_010437.1,1540-1558).
gaccccggtcaaatcaaca

SEQ ID NO: 701065 - DNA, 19 bp, Mus musculus
  siRNA target sequence for Hivep2 (NM_010437.1,1543-1561).
cccggtcaaatcaacatgt

SEQ ID NO: 701066 - DNA, 19 bp, Mus musculus
  siRNA target sequence for Hivep2 (NM_010437.1,1544-1562).
ccggtcaaatcaacatgtt

SEQ ID NO: 701067 - DNA, 19 bp, Mus musculus
  siRNA target sequence for Hivep2 (NM_010437.1,1546-1564).
ggtcaaatcaacatgttga

SEQ ID NO: 701068 - DNA, 19 bp, Mus musculus
  siRNA target sequence for Hivep2 (NM_010437.1,1547-1565).
gtcaaatcaacatgttgaa

SEQ ID NO: 701069 - DNA, 19 bp, Mus musculus
  siRNA target sequence for Hivep2 (NM_010437.1,1603-1621).
gccatcccgtcctctgtta

SEQ ID NO: 701070 - DNA, 19 bp, Mus musculus
  siRNA target sequence for Hivep2 (NM_010437.1,1608-1626).
cccgtcctctgttaggaat

SEQ ID NO: 701071 - DNA, 19 bp, Mus musculus
  siRNA target sequence for Hivep2 (NM_010437.1,1662-1680).
caatccaatgctcttagaa

SEQ ID NO: 701072 - DNA, 19 bp, Mus musculus
  siRNA target sequence for Hivep2 (NM_010437.1,1689-1707).
ggactcttcaccccttatt

SEQ ID NO: 701073 - DNA, 19 bp, Mus musculus
  siRNA target sequence for Hivep2 (NM_010437.1,1690-1708).
gactcttcaccccttatta

SEQ ID NO: 701074 - DNA, 19 bp, Mus musculus
  siRNA target sequence for Hivep2 (NM_010437.1,1692-1710).
ctcttcaccccttattaga

SEQ ID NO: 701075 - DNA, 19 bp, Mus musculus
  siRNA target sequence for Hivep2 (NM_010437.1,1733-1751).
cagcaacaaatttaagtgt

SEQ ID NO: 701076 - DNA, 19 bp, Mus musculus
  siRNA target sequence for Hivep2 (NM_010437.1,1998-2016).
cgatgtctgccgtaaacca

SEQ ID NO: 701077 - DNA, 19 bp, Mus musculus
  siRNA target sequence for Hivep2 (NM_010437.1,1999-2017).
gatgtctgccgtaaaccat

SEQ ID NO: 701078 - DNA, 19 bp, Mus musculus
  siRNA target sequence for Hivep2 (NM_010437.1,2006-2024).
gccgtaaaccatacaagaa

SEQ ID NO: 701079 - DNA, 19 bp, Mus musculus
  siRNA target sequence for Hivep2 (NM_010437.1,2007-2025).
ccgtaaaccatacaagaaa

SEQ ID NO: 701080 - DNA, 19 bp, Mus musculus
  siRNA target sequence for Hivep2 (NM_010437.1,2008-2026).
cgtaaaccatacaagaaat

SEQ ID NO: 701081 - DNA, 19 bp, Mus musculus
  siRNA target sequence for Hivep2 (NM_010437.1,2073-2091).
gcaaggaggggaatatttt

SEQ ID NO: 701082 - DNA, 19 bp, Mus musculus
  siRNA target sequence for Hivep2 (NM_010437.1,2507-2525).
gatctgagtcaacagaaat

SEQ ID NO: 701083 - DNA, 19 bp, Mus musculus
  siRNA target sequence for Hivep2 (NM_010437.1,2510-2528).
ctgagtcaacagaaatggt

SEQ ID NO: 701084 - DNA, 19 bp, Mus musculus
  siRNA target sequence for Hivep2 (NM_010437.1,2698-2716).
cttgttcgccagcacaata

SEQ ID NO: 701085 - DNA, 19 bp, Mus musculus
  siRNA target sequence for Hivep2 (NM_010437.1,2824-2842).
cagagaagcgaaactcttt

SEQ ID NO: 701086 - DNA, 19 bp, Mus musculus
  siRNA target sequence for Hivep2 (NM_010437.1,2997-3015).
ctccatgtcctttgataga

SEQ ID NO: 701087 - DNA, 19 bp, Mus musculus
  siRNA target sequence for Hivep2 (NM_010437.1,3060-3078).
cgggaagcattctgagttt

SEQ ID NO: 701088 - DNA, 19 bp, Mus musculus
  siRNA target sequence for Hivep2 (NM_010437.1,3083-3101).
ctgtccctgcgggttcata

SEQ ID NO: 701089 - DNA, 19 bp, Mus musculus
  siRNA target sequence for Hivep2 (NM_010437.1,3085-3103).
gtccctgcgggttcatact

SEQ ID NO: 701090 - DNA, 19 bp, Mus musculus
  siRNA target sequence for Hivep2 (NM_010437.1,3087-3105).
ccctgcgggttcatactca

SEQ ID NO: 701091 - DNA, 19 bp, Mus musculus
  siRNA target sequence for Hivep2 (NM_010437.1,3088-3106).
cctgcgggttcatactcat

SEQ ID NO: 701092 - DNA, 19 bp, Mus musculus
  siRNA target sequence for Hivep2 (NM_010437.1,3089-3107).
ctgcgggttcatactcatt

SEQ ID NO: 701093 - DNA, 19 bp, Mus musculus
  siRNA target sequence for Hivep2 (NM_010437.1,3091-3109).
gcgggttcatactcattgt

SEQ ID NO: 701094 - DNA, 19 bp, Mus musculus
  siRNA target sequence for Hivep2 (NM_010437.1,3179-3197).
cgacggaagtcccagaaat

SEQ ID NO: 701095 - DNA, 19 bp, Mus musculus
  siRNA target sequence for Hivep2 (NM_010437.1,3180-3198).
gacggaagtcccagaaata

SEQ ID NO: 701096 - DNA, 19 bp, Mus musculus
  siRNA target sequence for Hivep2 (NM_010437.1,3190-3208).
ccagaaatacggagtaaat

SEQ ID NO: 701097 - DNA, 19 bp, Mus musculus
  siRNA target sequence for Hivep2 (NM_010437.1,3193-3211).
gaaatacggagtaaatcgt

SEQ ID NO: 701098 - DNA, 19 bp, Mus musculus
  siRNA target sequence for Hivep2 (NM_010437.1,3199-3217).
cggagtaaatcgtttgatt

SEQ ID NO: 701099 - DNA, 19 bp, Mus musculus
  siRNA target sequence for Hivep2 (NM_010437.1,3200-3218).
ggagtaaatcgtttgatta

SEQ ID NO: 701100 - DNA, 19 bp, Mus musculus
  siRNA target sequence for Hivep2 (NM_010437.1,3201-3219).
gagtaaatcgtttgattat

SEQ ID NO: 701101 - DNA, 19 bp, Mus musculus
  siRNA target sequence for Hivep2 (NM_010437.1,3599-3617).
ccgaacagccacatctgtt

SEQ ID NO: 701102 - DNA, 19 bp, Mus musculus
  siRNA target sequence for Hivep2 (NM_010437.1,3600-3618).
cgaacagccacatctgttt

SEQ ID NO: 701103 - DNA, 19 bp, Mus musculus
  siRNA target sequence for Hivep2 (NM_010437.1,3625-3643).
caagatgcggtcccatttt

SEQ ID NO: 701104 - DNA, 19 bp, Mus musculus
  siRNA target sequence for Hivep2 (NM_010437.1,3678-3696).
cccgactgtgtgtatggtt

SEQ ID NO: 701105 - DNA, 19 bp, Mus musculus
  siRNA target sequence for Hivep2 (NM_010437.1,3760-3778).
cctcagaacagctacagta

SEQ ID NO: 701106 - DNA, 19 bp, Mus musculus
  siRNA target sequence for Hivep2 (NM_010437.1,3789-3807).
ccaagctgaccttcattct

SEQ ID NO: 701107 - DNA, 19 bp, Mus musculus
  siRNA target sequence for Hivep2 (NM_010437.1,3790-3808).
caagctgaccttcattcta

SEQ ID NO: 701108 - DNA, 19 bp, Mus musculus
  siRNA target sequence for Hivep2 (NM_010437.1,3876-3894).
gcagacttacccgtgttat

SEQ ID NO: 701109 - DNA, 19 bp, Mus musculus
  siRNA target sequence for Hivep2 (NM_010437.1,3877-3895).
cagacttacccgtgttatt

SEQ ID NO: 701110 - DNA, 19 bp, Mus musculus
  siRNA target sequence for Hivep2 (NM_010437.1,3888-3906).
gtgttattccggaacatca

SEQ ID NO: 701111 - DNA, 19 bp, Mus musculus
  siRNA target sequence for Hivep2 (NM_010437.1,3994-4012).
gaagatttcgcctcagaaa

SEQ ID NO: 701112 - DNA, 19 bp, Mus musculus
  siRNA target sequence for Hivep2 (NM_010437.1,4100-4118).
caagcatttctcagatact

SEQ ID NO: 701113 - DNA, 19 bp, Mus musculus
  siRNA target sequence for Hivep2 (NM_010437.1,4148-4166).
gcaaggtcgatgagaatat

SEQ ID NO: 701114 - DNA, 19 bp, Mus musculus
  siRNA target sequence for Hivep2 (NM_010437.1,4196-4214).
ccatgcaagggataggatt

SEQ ID NO: 701115 - DNA, 19 bp, Mus musculus
  siRNA target sequence for Hivep2 (NM_010437.1,4197-4215).
catgcaagggataggatta

SEQ ID NO: 701116 - DNA, 19 bp, Mus musculus
  siRNA target sequence for Hivep2 (NM_010437.1,4240-4258).
cacacgggcttggaaaaat

SEQ ID NO: 701117 - DNA, 19 bp, Mus musculus
  siRNA target sequence for Hivep2 (NM_010437.1,4469-4487).
gtgccgtggagctaaccaa

SEQ ID NO: 701118 - DNA, 19 bp, Mus musculus
  siRNA target sequence for Hivep2 (NM_010437.1,4652-4670).
ctcccaacagggagattct

SEQ ID NO: 701119 - DNA, 19 bp, Mus musculus
  siRNA target sequence for Hivep2 (NM_010437.1,4885-4903).
ggaaatgtggcaaattcca

SEQ ID NO: 701120 - DNA, 19 bp, Mus musculus
  siRNA target sequence for Hivep2 (NM_010437.1,4916-4934).
cagacgtggccgatttcca

SEQ ID NO: 701121 - DNA, 19 bp, Mus musculus
  siRNA target sequence for Hivep2 (NM_010437.1,4925-4943).
ccgatttccagcagatact

SEQ ID NO: 701122 - DNA, 19 bp, Mus musculus
  siRNA target sequence for Hivep2 (NM_010437.1,4951-4969).
cccagtctgcggacaacta

SEQ ID NO: 701123 - DNA, 19 bp, Mus musculus
  siRNA target sequence for Hivep2 (NM_010437.1,5028-5046).
cttcaaatcctccgtttat

SEQ ID NO: 701124 - DNA, 19 bp, Mus musculus
  siRNA target sequence for Hivep2 (NM_010437.1,5031-5049).
caaatcctccgtttatgct

SEQ ID NO: 701125 - DNA, 19 bp, Mus musculus
  siRNA target sequence for Hivep2 (NM_010437.1,5047-5065).
gcttcatggtgcattagtt

SEQ ID NO: 701126 - DNA, 19 bp, Mus musculus
  siRNA target sequence for Hivep2 (NM_010437.1,5231-5249).
ctgatgcgcccttcttgtt

SEQ ID NO: 701127 - DNA, 19 bp, Mus musculus
  siRNA target sequence for Hivep2 (NM_010437.1,5241-5259).
cttcttgtttggcaacaaa

SEQ ID NO: 701128 - DNA, 19 bp, Mus musculus
  siRNA target sequence for Hivep2 (NM_010437.1,5247-5265).
gtttggcaacaaactagaa

SEQ ID NO: 701129 - DNA, 19 bp, Mus musculus
  siRNA target sequence for Hivep2 (NM_010437.1,5306-5324).
gagagattcacggagataa

SEQ ID NO: 701130 - DNA, 19 bp, Mus musculus
  siRNA target sequence for Hivep2 (NM_010437.1,5310-5328).
gattcacggagataaagat

SEQ ID NO: 701131 - DNA, 19 bp, Mus musculus
  siRNA target sequence for Hivep2 (NM_010437.1,5376-5394).
ggggtacaaatccaatgaa

SEQ ID NO: 701132 - DNA, 19 bp, Mus musculus
  siRNA target sequence for Hivep2 (NM_010437.1,5387-5405).
ccaatgaagattatgtgta

SEQ ID NO: 701133 - DNA, 19 bp, Mus musculus
  siRNA target sequence for Hivep2 (NM_010437.1,5416-5434).
cgtggacggggaaagtata

SEQ ID NO: 701134 - DNA, 19 bp, Mus musculus
  siRNA target sequence for Hivep2 (NM_010437.1,5417-5435).
gtggacggggaaagtatat

SEQ ID NO: 701135 - DNA, 19 bp, Mus musculus
  siRNA target sequence for Hivep2 (NM_010437.1,5466-5484).
gccaagtatgctcaaaaaa

SEQ ID NO: 701136 - DNA, 19 bp, Mus musculus
  siRNA target sequence for Hivep2 (NM_010437.1,5487-5505).
catacgcactcatactgat

SEQ ID NO: 701137 - DNA, 19 bp, Mus musculus
  siRNA target sequence for Hivep2 (NM_010437.1,5579-5597).
ctaaggcccacatgaaaaa

SEQ ID NO: 701138 - DNA, 19 bp, Mus musculus
  siRNA target sequence for Hivep2 (NM_010437.1,5583-5601).
ggcccacatgaaaaagtgt

SEQ ID NO: 701139 - DNA, 19 bp, Mus musculus
  siRNA target sequence for Hivep2 (NM_010437.1,5608-5626).
ctgggcgtgtcgatgacat

SEQ ID NO: 701140 - DNA, 19 bp, Mus musculus
  siRNA target sequence for Hivep2 (NM_010437.1,5616-5634).
gtcgatgacatcagtagat

SEQ ID NO: 701141 - DNA, 19 bp, Mus musculus
  siRNA target sequence for Hivep2 (NM_010437.1,5821-5839).
cccaaaacaaggtcaagaa

SEQ ID NO: 701142 - DNA, 19 bp, Mus musculus
  siRNA target sequence for Hivep2 (NM_010437.1,5865-5883).
ctcctccttgcctgtcaat

SEQ ID NO: 701143 - DNA, 19 bp, Mus musculus
  siRNA target sequence for Hivep2 (NM_010437.1,5898-5916).
ccatggcgtcccttcagat

SEQ ID NO: 701144 - DNA, 19 bp, Mus musculus
  siRNA target sequence for Hivep2 (NM_010437.1,5899-5917).
catggcgtcccttcagata

SEQ ID NO: 701145 - DNA, 19 bp, Mus musculus
  siRNA target sequence for Hivep2 (NM_010437.1,5926-5944).
ggacattcgtcattgatca

SEQ ID NO: 701146 - DNA, 19 bp, Mus musculus
  siRNA target sequence for Hivep2 (NM_010437.1,5936-5954).
cattgatcagctatttggt

SEQ ID NO: 701147 - DNA, 19 bp, Mus musculus
  siRNA target sequence for Hivep2 (NM_010437.1,5952-5970).
ggtcactctaccgagtatt

SEQ ID NO: 701148 - DNA, 19 bp, Mus musculus
  siRNA target sequence for Hivep2 (NM_010437.1,5963-5981).
cgagtattcaggttactca

SEQ ID NO: 701149 - DNA, 19 bp, Mus musculus
  siRNA target sequence for Hivep2 (NM_010437.1,6103-6121).
gacgaagaggccatgttgt

SEQ ID NO: 701150 - DNA, 19 bp, Mus musculus
  siRNA target sequence for Hivep2 (NM_010437.1,6174-6192).
ctccccaggctatgattct

SEQ ID NO: 701151 - DNA, 19 bp, Mus musculus
  siRNA target sequence for Hivep2 (NM_010437.1,6191-6209).
cttcaccctgtcgagataa

SEQ ID NO: 701152 - DNA, 19 bp, Mus musculus
  siRNA target sequence for Hivep2 (NM_010437.1,6212-6230).
cgccaaagaggtatctgat

SEQ ID NO: 701153 - DNA, 19 bp, Mus musculus
  siRNA target sequence for Hivep2 (NM_010437.1,6213-6231).
gccaaagaggtatctgata

SEQ ID NO: 701154 - DNA, 19 bp, Mus musculus
  siRNA target sequence for Hivep2 (NM_010437.1,6399-6417).
ggacattacagcaagaaga

SEQ ID NO: 701155 - DNA, 19 bp, Mus musculus
  siRNA target sequence for Hivep2 (NM_010437.1,6474-6492).
cagaagggctttatatcct

SEQ ID NO: 701156 - DNA, 19 bp, Mus musculus
  siRNA target sequence for Hivep2 (NM_010437.1,6476-6494).
gaagggctttatatcctaa

SEQ ID NO: 701157 - DNA, 19 bp, Mus musculus
  siRNA target sequence for Hivep2 (NM_010437.1,6512-6530).
gacagtatctacaaacaga

SEQ ID NO: 701158 - DNA, 19 bp, Mus musculus
  siRNA target sequence for Hivep2 (NM_010437.1,6543-6561).
ggggcctcctaatctaaga

SEQ ID NO: 701159 - DNA, 19 bp, Mus musculus
  siRNA target sequence for Hivep2 (NM_010437.1,6544-6562).
gggcctcctaatctaagaa

SEQ ID NO: 701160 - DNA, 19 bp, Mus musculus
  siRNA target sequence for Hivep2 (NM_010437.1,6546-6564).
gcctcctaatctaagaaga

SEQ ID NO: 701161 - DNA, 19 bp, Mus musculus
  siRNA target sequence for Hivep2 (NM_010437.1,6571-6589).
cctcaggttccttacttca

SEQ ID NO: 701162 - DNA, 19 bp, Mus musculus
  siRNA target sequence for Hivep2 (NM_010437.1,6696-6714).
gcaagtacgagctcctata

SEQ ID NO: 701163 - DNA, 19 bp, Mus musculus
  siRNA target sequence for Hivep2 (NM_010437.1,6761-6779).
ctgccctttccggtttaca

SEQ ID NO: 701164 - DNA, 19 bp, Mus musculus
  siRNA target sequence for Hivep2 (NM_010437.1,6938-6956).
ccccacggctattgatgaa

SEQ ID NO: 701165 - DNA, 19 bp, Mus musculus
  siRNA target sequence for Hivep2 (NM_010437.1,6939-6957).
cccacggctattgatgaaa

SEQ ID NO: 701166 - DNA, 19 bp, Mus musculus
  siRNA target sequence for Hivep2 (NM_010437.1,6941-6959).
cacggctattgatgaaaca

SEQ ID NO: 701167 - DNA, 19 bp, Mus musculus
  siRNA target sequence for Hivep2 (NM_010437.1,6943-6961).
cggctattgatgaaacaga

SEQ ID NO: 701168 - DNA, 19 bp, Mus musculus
  siRNA target sequence for Hivep2 (NM_010437.1,7036-7054).
gcctcactccggattgcaa

SEQ ID NO: 701169 - DNA, 19 bp, Mus musculus
  siRNA target sequence for Hivep2 (NM_010437.1,7085-7103).
ctcccacatgggtacaaga

SEQ ID NO: 701170 - DNA, 19 bp, Mus musculus
  siRNA target sequence for Hivep2 (NM_010437.1,7130-7148).
cacacgtcagcattagaca

SEQ ID NO: 701171 - DNA, 19 bp, Mus musculus
  siRNA target sequence for Hivep2 (NM_010437.1,7134-7152).
cgtcagcattagacacttt

SEQ ID NO: 701172 - DNA, 19 bp, Mus musculus
  siRNA target sequence for Hivep2 (NM_010437.1,7190-7208).
cccaccctgacttacatga

SEQ ID NO: 701173 - DNA, 19 bp, Mus musculus
  siRNA target sequence for Hivep2 (NM_010437.1,7213-7231).
gaaaaggacacttttggta

SEQ ID NO: 701174 - DNA, 19 bp, Mus musculus
  siRNA target sequence for Hivep2 (NM_010437.1,7246-7264).
gtagctcaccccacgtttt

SEQ ID NO: 701175 - DNA, 19 bp, Mus musculus
  siRNA target sequence for Hivep2 (NM_010437.1,7249-7267).
gctcaccccacgttttaca

SEQ ID NO: 701176 - DNA, 19 bp, Mus musculus
  siRNA target sequence for Hivep2 (NM_010437.1,7305-7323).
gagcagcaaggaattatct

SEQ ID NO: 701177 - DNA, 19 bp, Mus musculus
  siRNA target sequence for Hivep2 (NM_010437.1,7307-7325).
gcagcaaggaattatcttt

SEQ ID NO: 701178 - DNA, 19 bp, Mus musculus
  siRNA target sequence for Hivep2 (NM_010437.1,7308-7326).
cagcaaggaattatcttta

SEQ ID NO: 701179 - DNA, 19 bp, Mus musculus
  siRNA target sequence for Hoxd4 (NM_010469.1,1249-1267).
cgtatatggtgaactctaa

SEQ ID NO: 701180 - DNA, 19 bp, Mus musculus
  siRNA target sequence for Hoxd4 (NM_010469.1,1268-1286).
gtacgtggaccccaagttt

SEQ ID NO: 701181 - DNA, 19 bp, Mus musculus
  siRNA target sequence for Hoxd4 (NM_010469.1,1291-1309).
cgtgcgaggaatatttgca

SEQ ID NO: 701182 - DNA, 19 bp, Mus musculus
  siRNA target sequence for Ica1 (NM_010492.2,126-144).
gtcaggacacaaatgttat

SEQ ID NO: 701183 - DNA, 19 bp, Mus musculus
  siRNA target sequence for Ica1 (NM_010492.2,159-177).
ggaccggtttgctcaagat

SEQ ID NO: 701184 - DNA, 19 bp, Mus musculus
  siRNA target sequence for Ica1 (NM_010492.2,160-178).
gaccggtttgctcaagata

SEQ ID NO: 701185 - DNA, 19 bp, Mus musculus
  siRNA target sequence for Ica1 (NM_010492.2,163-181).
cggtttgctcaagataagt

SEQ ID NO: 701186 - DNA, 19 bp, Mus musculus
  siRNA target sequence for Ica1 (NM_010492.2,165-183).
gtttgctcaagataagtca

SEQ ID NO: 701187 - DNA, 19 bp, Mus musculus
  siRNA target sequence for Ica1 (NM_010492.2,218-236).
ccaagcaggcctttatcaa

SEQ ID NO: 701188 - DNA, 19 bp, Mus musculus
  siRNA target sequence for Ica1 (NM_010492.2,346-364).
gcaatcgtgctctatcaaa

SEQ ID NO: 701189 - DNA, 19 bp, Mus musculus
  siRNA target sequence for Ica1 (NM_010492.2,347-365).
caatcgtgctctatcaaaa

SEQ ID NO: 701190 - DNA, 19 bp, Mus musculus
  siRNA target sequence for Ica1 (NM_010492.2,351-369).
cgtgctctatcaaaagaga

SEQ ID NO: 701191 - DNA, 19 bp, Mus musculus
  siRNA target sequence for Ica1 (NM_010492.2,354-372).
gctctatcaaaagagaata

SEQ ID NO: 701192 - DNA, 19 bp, Mus musculus
  siRNA target sequence for Ica1 (NM_010492.2,361-379).
caaaagagaatatgtttct

SEQ ID NO: 701193 - DNA, 19 bp, Mus musculus
  siRNA target sequence for Ica1 (NM_010492.2,419-437).
ctcaaggcttccaagacaa

SEQ ID NO: 701194 - DNA, 19 bp, Mus musculus
  siRNA target sequence for Ica1 (NM_010492.2,440-458).
cccgagcaggaaaaatgat

SEQ ID NO: 701195 - DNA, 19 bp, Mus musculus
  siRNA target sequence for Ica1 (NM_010492.2,496-514).
caaaggttggccttgagaa

SEQ ID NO: 701196 - DNA, 19 bp, Mus musculus
  siRNA target sequence for Ica1 (NM_010492.2,524-542).
gtcgatttcaccaagaagt

SEQ ID NO: 701197 - DNA, 19 bp, Mus musculus
  siRNA target sequence for Ica1 (NM_010492.2,532-550).
caccaagaagtagaaactt

SEQ ID NO: 701198 - DNA, 19 bp, Mus musculus
  siRNA target sequence for Ica1 (NM_010492.2,556-574).
catcgggccatctctgata

SEQ ID NO: 701199 - DNA, 19 bp, Mus musculus
  siRNA target sequence for Ica1 (NM_010492.2,712-730).
gtccgccttgcgaaaaaaa

SEQ ID NO: 701200 - DNA, 19 bp, Mus musculus
  siRNA target sequence for Ica1 (NM_010492.2,715-733).
cgccttgcgaaaaaaaact

SEQ ID NO: 701201 - DNA, 19 bp, Mus musculus
  siRNA target sequence for Ica1 (NM_010492.2,717-735).
ccttgcgaaaaaaaacttt

SEQ ID NO: 701202 - DNA, 19 bp, Mus musculus
  siRNA target sequence for Ica1 (NM_010492.2,722-740).
cgaaaaaaaactttgacaa

SEQ ID NO: 701203 - DNA, 19 bp, Mus musculus
  siRNA target sequence for Ica1 (NM_010492.2,788-806).
gatgtaacctcttatctca

SEQ ID NO: 701204 - DNA, 19 bp, Mus musculus
  siRNA target sequence for Ica1 (NM_010492.2,837-855).
ccacttttgggagaaaact

SEQ ID NO: 701205 - DNA, 19 bp, Mus musculus
  siRNA target sequence for Ica1 (NM_010492.2,882-900).
gagcttcaaaggttatcaa

SEQ ID NO: 701206 - DNA, 19 bp, Mus musculus
  siRNA target sequence for Ica1 (NM_010492.2,888-906).
caaaggttatcaaccatat

SEQ ID NO: 701207 - DNA, 19 bp, Mus musculus
  siRNA target sequence for Ica1 (NM_010492.2,892-910).
ggttatcaaccatatgaat

SEQ ID NO: 701208 - DNA, 19 bp, Mus musculus
  siRNA target sequence for Ica1 (NM_010492.2,893-911).
gttatcaaccatatgaatt

SEQ ID NO: 701209 - DNA, 19 bp, Mus musculus
  siRNA target sequence for Ica1 (NM_010492.2,898-916).
caaccatatgaattcacaa

SEQ ID NO: 701210 - DNA, 19 bp, Mus musculus
  siRNA target sequence for Ica1 (NM_010492.2,942-960).
gaagaagctagttgagaaa

SEQ ID NO: 701211 - DNA, 19 bp, Mus musculus
  siRNA target sequence for Ica1 (NM_010492.2,1006-1024).
ccagagccgaggcagttaa

SEQ ID NO: 701212 - DNA, 19 bp, Mus musculus
  siRNA target sequence for Ica1 (NM_010492.2,1007-1025).
cagagccgaggcagttaat

SEQ ID NO: 701213 - DNA, 19 bp, Mus musculus
  siRNA target sequence for Ica1 (NM_010492.2,1009-1027).
gagccgaggcagttaattt

SEQ ID NO: 701214 - DNA, 19 bp, Mus musculus
  siRNA target sequence for Ica1 (NM_010492.2,1013-1031).
cgaggcagttaatttcttt

SEQ ID NO: 701215 - DNA, 19 bp, Mus musculus
  siRNA target sequence for Ica1 (NM_010492.2,1035-1053).
ggatgagcacaaagattca

SEQ ID NO: 701216 - DNA, 19 bp, Mus musculus
  siRNA target sequence for Ica1 (NM_010492.2,1072-1090).
gagggaacaagcgttttgt

SEQ ID NO: 701217 - DNA, 19 bp, Mus musculus
  siRNA target sequence for Ica1 (NM_010492.2,1074-1092).
gggaacaagcgttttgtct

SEQ ID NO: 701218 - DNA, 19 bp, Mus musculus
  siRNA target sequence for Ica1 (NM_010492.2,1095-1113).
cgtagacaaaggttctgta

SEQ ID NO: 701219 - DNA, 19 bp, Mus musculus
  siRNA target sequence for Ica1 (NM_010492.2,1133-1151).
ccatagatgaactattaga

SEQ ID NO: 701220 - DNA, 19 bp, Mus musculus
  siRNA target sequence for Ica1 (NM_010492.2,1191-1209).
gaccccagaacctgaaagt

SEQ ID NO: 701221 - DNA, 19 bp, Mus musculus
  siRNA target sequence for Ica1 (NM_010492.2,1368-1386).
gataggctccggattcctt

SEQ ID NO: 701222 - DNA, 19 bp, Mus musculus
  siRNA target sequence for Ica1 (NM_010492.2,1489-1507).
gacctcgaccccttatcaa

SEQ ID NO: 701223 - DNA, 19 bp, Mus musculus
  siRNA target sequence for Ica1 (NM_010492.2,1529-1547).
ctgataaagaacacgaatt

SEQ ID NO: 701224 - DNA, 19 bp, Mus musculus
  siRNA target sequence for Ica1 (NM_010492.2,1540-1558).
cacgaattgctcaatgcat

SEQ ID NO: 701225 - DNA, 19 bp, Mus musculus
  siRNA target sequence for Ifna4 (NM_010504.1,231-249).
catccttgtgctaagagat

SEQ ID NO: 701226 - DNA, 19 bp, Mus musculus
  siRNA target sequence for Ifna4 (NM_010504.1,234-252).
ccttgtgctaagagatctt

SEQ ID NO: 701227 - DNA, 19 bp, Mus musculus
  siRNA target sequence for Ifna9 (NM_010507.1,28-46).
gtcttggtggtgataagct

SEQ ID NO: 701228 - DNA, 19 bp, Mus musculus
  siRNA target sequence for Invs (NM_010569.2,206-224).
ctctacggggtcctcatta

SEQ ID NO: 701229 - DNA, 19 bp, Mus musculus
  siRNA target sequence for Invs (NM_010569.2,268-286).
cccttcagagactcattgt

SEQ ID NO: 701230 - DNA, 19 bp, Mus musculus
  siRNA target sequence for Invs (NM_010569.2,269-287).
ccttcagagactcattgtt

SEQ ID NO: 701231 - DNA, 19 bp, Mus musculus
  siRNA target sequence for Invs (NM_010569.2,325-343).
ggagaacaccacttatgta

SEQ ID NO: 701232 - DNA, 19 bp, Mus musculus
  siRNA target sequence for Invs (NM_010569.2,456-474).
ggaaattatcgctttatga

SEQ ID NO: 701233 - DNA, 19 bp, Mus musculus
  siRNA target sequence for Invs (NM_010569.2,574-592).
ctcttctgctgaagtttat

SEQ ID NO: 701234 - DNA, 19 bp, Mus musculus
  siRNA target sequence for Invs (NM_010569.2,606-624).
gtggatacacaggacaaaa

SEQ ID NO: 701235 - DNA, 19 bp, Mus musculus
  siRNA target sequence for Invs (NM_010569.2,805-823).
ccccgacagagtctttact

SEQ ID NO: 701236 - DNA, 19 bp, Mus musculus
  siRNA target sequence for Invs (NM_010569.2,807-825).
ccgacagagtctttactga

SEQ ID NO: 701237 - DNA, 19 bp, Mus musculus
  siRNA target sequence for Invs (NM_010569.2,808-826).
cgacagagtctttactgaa

SEQ ID NO: 701238 - DNA, 19 bp, Mus musculus
  siRNA target sequence for Invs (NM_010569.2,928-946).
cgtcttacgataacttatt

SEQ ID NO: 701239 - DNA, 19 bp, Mus musculus
  siRNA target sequence for Invs (NM_010569.2,929-947).
gtcttacgataacttattt

SEQ ID NO: 701240 - DNA, 19 bp, Mus musculus
  siRNA target sequence for Invs (NM_010569.2,1086-1104).
gctgaaacggtcaaagtgt

SEQ ID NO: 701241 - DNA, 19 bp, Mus musculus
  siRNA target sequence for Invs (NM_010569.2,1120-1138).
cagtgaaggatgattctga

SEQ ID NO: 701242 - DNA, 19 bp, Mus musculus
  siRNA target sequence for Invs (NM_010569.2,1198-1216).
ggacgatgctgagtctaaa

SEQ ID NO: 701243 - DNA, 19 bp, Mus musculus
  siRNA target sequence for Invs (NM_010569.2,1289-1307).
cgtcagcaccgtgaagtta

SEQ ID NO: 701244 - DNA, 19 bp, Mus musculus
  siRNA target sequence for Invs (NM_010569.2,1290-1308).
gtcagcaccgtgaagttat

SEQ ID NO: 701245 - DNA, 19 bp, Mus musculus
  siRNA target sequence for Invs (NM_010569.2,1292-1310).
cagcaccgtgaagttatta

SEQ ID NO: 701246 - DNA, 19 bp, Mus musculus
  siRNA target sequence for Invs (NM_010569.2,1294-1312).
gcaccgtgaagttattatt

SEQ ID NO: 701247 - DNA, 19 bp, Mus musculus
  siRNA target sequence for Invs (NM_010569.2,1297-1315).
ccgtgaagttattattgga

SEQ ID NO: 701248 - DNA, 19 bp, Mus musculus
  siRNA target sequence for Invs (NM_010569.2,1304-1322).
gttattattggacaatgat

SEQ ID NO: 701249 - DNA, 19 bp, Mus musculus
  siRNA target sequence for Invs (NM_010569.2,1336-1354).
ccactgacgtcatgaaaca

SEQ ID NO: 701250 - DNA, 19 bp, Mus musculus
  siRNA target sequence for Invs (NM_010569.2,1382-1400).
gggacacagagatgtgatt

SEQ ID NO: 701251 - DNA, 19 bp, Mus musculus
  siRNA target sequence for Invs (NM_010569.2,1395-1413).
gtgattcagacgcttatta

SEQ ID NO: 701252 - DNA, 19 bp, Mus musculus
  siRNA target sequence for Invs (NM_010569.2,1397-1415).
gattcagacgcttattaaa

SEQ ID NO: 701253 - DNA, 19 bp, Mus musculus
  siRNA target sequence for Invs (NM_010569.2,1417-1435).
gtggagcacgagtagatct

SEQ ID NO: 701254 - DNA, 19 bp, Mus musculus
  siRNA target sequence for Invs (NM_010569.2,1491-1509).
gacgtctgccagatactga

SEQ ID NO: 701255 - DNA, 19 bp, Mus musculus
  siRNA target sequence for Invs (NM_010569.2,1493-1511).
cgtctgccagatactgata

SEQ ID NO: 701256 - DNA, 19 bp, Mus musculus
  siRNA target sequence for Invs (NM_010569.2,1496-1514).
ctgccagatactgatagaa

SEQ ID NO: 701257 - DNA, 19 bp, Mus musculus
  siRNA target sequence for Invs (NM_010569.2,1526-1544).
cccaaacgtgcaggattat

SEQ ID NO: 701258 - DNA, 19 bp, Mus musculus
  siRNA target sequence for Invs (NM_010569.2,1572-1590).
gcgtacggagggtacatca

SEQ ID NO: 701259 - DNA, 19 bp, Mus musculus
  siRNA target sequence for Invs (NM_010569.2,1573-1591).
cgtacggagggtacatcaa

SEQ ID NO: 701260 - DNA, 19 bp, Mus musculus
  siRNA target sequence for Invs (NM_010569.2,1579-1597).
gagggtacatcaactgtat

SEQ ID NO: 701261 - DNA, 19 bp, Mus musculus
  siRNA target sequence for Invs (NM_010569.2,1604-1622).
gctcatggagaataatgca

SEQ ID NO: 701262 - DNA, 19 bp, Mus musculus
  siRNA target sequence for Invs (NM_010569.2,1661-1679).
gcactggtcctgtaacaat

SEQ ID NO: 701263 - DNA, 19 bp, Mus musculus
  siRNA target sequence for Invs (NM_010569.2,1682-1700).
ctaccttgatgccattaaa

SEQ ID NO: 701264 - DNA, 19 bp, Mus musculus
  siRNA target sequence for Invs (NM_010569.2,1726-1744).
ctaatcagatggagaacaa

SEQ ID NO: 701265 - DNA, 19 bp, Mus musculus
  siRNA target sequence for Invs (NM_010569.2,1753-1771).
ggtacacaccccttgatta

SEQ ID NO: 701266 - DNA, 19 bp, Mus musculus
  siRNA target sequence for Invs (NM_010569.2,1754-1772).
gtacacaccccttgattat

SEQ ID NO: 701267 - DNA, 19 bp, Mus musculus
  siRNA target sequence for Invs (NM_010569.2,1826-1844).
cctgtccatcgcagctata

SEQ ID NO: 701268 - DNA, 19 bp, Mus musculus
  siRNA target sequence for Invs (NM_010569.2,1829-1847).
gtccatcgcagctatacaa

SEQ ID NO: 701269 - DNA, 19 bp, Mus musculus
  siRNA target sequence for Invs (NM_010569.2,1831-1849).
ccatcgcagctatacaaga

SEQ ID NO: 701270 - DNA, 19 bp, Mus musculus
  siRNA target sequence for Invs (NM_010569.2,1848-1866).
gacatcgctgccttcaaaa

SEQ ID NO: 701271 - DNA, 19 bp, Mus musculus
  siRNA target sequence for Invs (NM_010569.2,1853-1871).
cgctgccttcaaaatccaa

SEQ ID NO: 701272 - DNA, 19 bp, Mus musculus
  siRNA target sequence for Invs (NM_010569.2,2108-2126).
ggacgcaacccctagcaaa

SEQ ID NO: 701273 - DNA, 19 bp, Mus musculus
  siRNA target sequence for Invs (NM_010569.2,2207-2225).
ccaaggggattcttccata

SEQ ID NO: 701274 - DNA, 19 bp, Mus musculus
  siRNA target sequence for Invs (NM_010569.2,2699-2717).
ccaggacaagcttatagga

SEQ ID NO: 701275 - DNA, 19 bp, Mus musculus
  siRNA target sequence for Invs (NM_010569.2,2761-2779).
caggatgcaagcagcttta

SEQ ID NO: 701276 - DNA, 19 bp, Mus musculus
  siRNA target sequence for Invs (NM_010569.2,2824-2842).
ccccacctggacagtgtat

SEQ ID NO: 701277 - DNA, 19 bp, Mus musculus
  siRNA target sequence for Invs (NM_010569.2,3141-3159).
ggctcgtcggccacaaagt

SEQ ID NO: 701278 - DNA, 19 bp, Mus musculus
  siRNA target sequence for Invs (NM_010569.2,3142-3160).
gctcgtcggccacaaagta

SEQ ID NO: 701279 - DNA, 19 bp, Mus musculus
  siRNA target sequence for Invs (NM_010569.2,3182-3200).
gcagatctacggttgttct

SEQ ID NO: 701280 - DNA, 19 bp, Mus musculus
  siRNA target sequence for Invs (NM_010569.2,3185-3203).
gatctacggttgttctcaa

SEQ ID NO: 701281 - DNA, 19 bp, Mus musculus
  siRNA target sequence for Invs (NM_010569.2,3188-3206).
ctacggttgttctcaagaa

SEQ ID NO: 701282 - DNA, 19 bp, Mus musculus
  siRNA target sequence for Invs (NM_010569.2,3213-3231).
ggacatcatcccatcaaat

SEQ ID NO: 701283 - DNA, 19 bp, Mus musculus
  siRNA target sequence for Invs (NM_010569.2,3216-3234).
catcatcccatcaaatctt

SEQ ID NO: 701284 - DNA, 19 bp, Mus musculus
  siRNA target sequence for Invs (NM_010569.2,3272-3290).
cagtttgcagtctatacat

SEQ ID NO: 701285 - DNA, 19 bp, Mus musculus
  siRNA target sequence for Invs (NM_010569.2,3274-3292).
gtttgcagtctatacatct

SEQ ID NO: 701286 - DNA, 19 bp, Mus musculus
  siRNA target sequence for Invs (NM_010569.2,3294-3312).
gacaacagtggaagatcaa

SEQ ID NO: 701287 - DNA, 19 bp, Mus musculus
  siRNA target sequence for Invs (NM_010569.2,3303-3321).
ggaagatcaaagaagttct

SEQ ID NO: 701288 - DNA, 19 bp, Mus musculus
  siRNA target sequence for Invs (NM_010569.2,3307-3325).
gatcaaagaagttctctta

SEQ ID NO: 701289 - DNA, 19 bp, Mus musculus
  siRNA target sequence for Invs (NM_010569.2,3330-3348).
ctgcaaccatccagtcaat

SEQ ID NO: 701290 - DNA, 19 bp, Mus musculus
  siRNA target sequence for Invs (NM_010569.2,3340-3358).
ccagtcaatcaaaaaacaa

SEQ ID NO: 701291 - DNA, 19 bp, Mus musculus
  siRNA target sequence for Itln (NM_010584.1,162-180).
ggtggggcaattctttctt

SEQ ID NO: 701292 - DNA, 19 bp, Mus musculus
  siRNA target sequence for Itln (NM_010584.1,229-247).
ggcacaagatggtctctat

SEQ ID NO: 701293 - DNA, 19 bp, Mus musculus
  siRNA target sequence for Itln (NM_010584.1,462-480).
ctgccacaagtgatgacta

SEQ ID NO: 701294 - DNA, 19 bp, Mus musculus
  siRNA target sequence for Itln (NM_010584.1,607-625).
gcagcacttgggacataat

SEQ ID NO: 701295 - DNA, 19 bp, Mus musculus
  siRNA target sequence for Itln (NM_010584.1,766-784).
ggaatttactgcaggatat

SEQ ID NO: 701296 - DNA, 19 bp, Mus musculus
  siRNA target sequence for Itln (NM_010584.1,785-803).
gttcagttcagagtgttta

SEQ ID NO: 701297 - DNA, 19 bp, Mus musculus
  siRNA target sequence for Itln (NM_010584.1,841-859).
gagggtcactggatgtaat

SEQ ID NO: 701298 - DNA, 19 bp, Mus musculus
  siRNA target sequence for Itln (NM_010584.1,852-870).
gatgtaatactgaacatca

SEQ ID NO: 701299 - DNA, 19 bp, Mus musculus
  siRNA target sequence for Itln (NM_010584.1,933-951).
catttgattgggatggata

SEQ ID NO: 701300 - DNA, 19 bp, Mus musculus
  siRNA target sequence for Itln (NM_010584.1,975-993).
gtagccggaagataactga

SEQ ID NO: 701301 - DNA, 19 bp, Mus musculus
  siRNA target sequence for Jak3 (NM_010589.1,120-138).
gcctccccagcgattgtca

SEQ ID NO: 701302 - DNA, 19 bp, Mus musculus
  siRNA target sequence for Jak3 (NM_010589.1,121-139).
cctccccagcgattgtcat

SEQ ID NO: 701303 - DNA, 19 bp, Mus musculus
  siRNA target sequence for Jak3 (NM_010589.1,124-142).
ccccagcgattgtcattct

SEQ ID NO: 701304 - DNA, 19 bp, Mus musculus
  siRNA target sequence for Jak3 (NM_010589.1,127-145).
cagcgattgtcattctctt

SEQ ID NO: 701305 - DNA, 19 bp, Mus musculus
  siRNA target sequence for Jak3 (NM_010589.1,153-171).
ctacttggctgaggattta

SEQ ID NO: 701306 - DNA, 19 bp, Mus musculus
  siRNA target sequence for Jak3 (NM_010589.1,309-327).
ctacaggctacgcttttat

SEQ ID NO: 701307 - DNA, 19 bp, Mus musculus
  siRNA target sequence for Jak3 (NM_010589.1,363-381).
ctttgggctgcgcaaagat

SEQ ID NO: 701308 - DNA, 19 bp, Mus musculus
  siRNA target sequence for Jak3 (NM_010589.1,367-385).
gggctgcgcaaagatttga

SEQ ID NO: 701309 - DNA, 19 bp, Mus musculus
  siRNA target sequence for Jak3 (NM_010589.1,389-407).
gtgccatccttgacttaca

SEQ ID NO: 701310 - DNA, 19 bp, Mus musculus
  siRNA target sequence for Jak3 (NM_010589.1,565-583).
ctgaagacggtcagttaca

SEQ ID NO: 701311 - DNA, 19 bp, Mus musculus
  siRNA target sequence for Jak3 (NM_010589.1,567-585).
gaagacggtcagttacaaa

SEQ ID NO: 701312 - DNA, 19 bp, Mus musculus
  siRNA target sequence for Jak3 (NM_010589.1,878-896).
gtgactttccggaaatcgt

SEQ ID NO: 701313 - DNA, 19 bp, Mus musculus
  siRNA target sequence for Jak3 (NM_010589.1,1053-1071).
ctgcgactccaggcattat

SEQ ID NO: 701314 - DNA, 19 bp, Mus musculus
  siRNA target sequence for Jak3 (NM_010589.1,1055-1073).
gcgactccaggcattattt

SEQ ID NO: 701315 - DNA, 19 bp, Mus musculus
  siRNA target sequence for Jak3 (NM_010589.1,1129-1147).
ggacccatcacgttagact

SEQ ID NO: 701316 - DNA, 19 bp, Mus musculus
  siRNA target sequence for Jak3 (NM_010589.1,1130-1148).
gacccatcacgttagactt

SEQ ID NO: 701317 - DNA, 19 bp, Mus musculus
  siRNA target sequence for Jak3 (NM_010589.1,1215-1233).
ggactatgacagctttctt

SEQ ID NO: 701318 - DNA, 19 bp, Mus musculus
  siRNA target sequence for Jak3 (NM_010589.1,1429-1447).
cccaaggaaaagtccaatt

SEQ ID NO: 701319 - DNA, 19 bp, Mus musculus
  siRNA target sequence for Jak3 (NM_010589.1,1521-1539).
gctgagcttccacacaatt

SEQ ID NO: 701320 - DNA, 19 bp, Mus musculus
  siRNA target sequence for Jak3 (NM_010589.1,1524-1542).
gagcttccacacaattcca

SEQ ID NO: 701321 - DNA, 19 bp, Mus musculus
  siRNA target sequence for Jak3 (NM_010589.1,1567-1585).
ctgggtcacggttctttta

SEQ ID NO: 701322 - DNA, 19 bp, Mus musculus
  siRNA target sequence for Jak3 (NM_010589.1,1570-1588).
ggtcacggttcttttacca

SEQ ID NO: 701323 - DNA, 19 bp, Mus musculus
  siRNA target sequence for Jak3 (NM_010589.1,1571-1589).
gtcacggttcttttaccaa

SEQ ID NO: 701324 - DNA, 19 bp, Mus musculus
  siRNA target sequence for Jak3 (NM_010589.1,1577-1595).
gttcttttaccaagatctt

SEQ ID NO: 701325 - DNA, 19 bp, Mus musculus
  siRNA target sequence for Jak3 (NM_010589.1,1676-1694).
ggaactgcatggagtcttt

SEQ ID NO: 701326 - DNA, 19 bp, Mus musculus
  siRNA target sequence for Jak3 (NM_010589.1,1879-1897).
ctggcatatgcccttaact

SEQ ID NO: 701327 - DNA, 19 bp, Mus musculus
  siRNA target sequence for Jak3 (NM_010589.1,2215-2233).
cagctgcccgctctcaaat

SEQ ID NO: 701328 - DNA, 19 bp, Mus musculus
  siRNA target sequence for Jak3 (NM_010589.1,2218-2236).
ctgcccgctctcaaatgga

SEQ ID NO: 701329 - DNA, 19 bp, Mus musculus
  siRNA target sequence for Jak3 (NM_010589.1,2314-2332).
gacctcaacggcctcatta

SEQ ID NO: 701330 - DNA, 19 bp, Mus musculus
  siRNA target sequence for Jak3 (NM_010589.1,2316-2334).
cctcaacggcctcattaca

SEQ ID NO: 701331 - DNA, 19 bp, Mus musculus
  siRNA target sequence for Jak3 (NM_010589.1,2317-2335).
ctcaacggcctcattacat

SEQ ID NO: 701332 - DNA, 19 bp, Mus musculus
  siRNA target sequence for Jak3 (NM_010589.1,2319-2337).
caacggcctcattacatca

SEQ ID NO: 701333 - DNA, 19 bp, Mus musculus
  siRNA target sequence for Jak3 (NM_010589.1,2322-2340).
cggcctcattacatcagat

SEQ ID NO: 701334 - DNA, 19 bp, Mus musculus
  siRNA target sequence for Jak3 (NM_010589.1,2323-2341).
ggcctcattacatcagatt

SEQ ID NO: 701335 - DNA, 19 bp, Mus musculus
  siRNA target sequence for Jak3 (NM_010589.1,2324-2342).
gcctcattacatcagatta

SEQ ID NO: 701336 - DNA, 19 bp, Mus musculus
  siRNA target sequence for Jak3 (NM_010589.1,2624-2642).
gcgacttcatcgtcaagta

SEQ ID NO: 701337 - DNA, 19 bp, Mus musculus
  siRNA target sequence for Jak3 (NM_010589.1,2978-2996).
ccctatctgacaacatctt

SEQ ID NO: 701338 - DNA, 19 bp, Mus musculus
  siRNA target sequence for Jak3 (NM_010589.1,2980-2998).
ctatctgacaacatcttct

SEQ ID NO: 701339 - DNA, 19 bp, Mus musculus
  siRNA target sequence for Jak3 (NM_010589.1,3020-3038).
gcttcggagtggtgttgta

SEQ ID NO: 701340 - DNA, 19 bp, Mus musculus
  siRNA target sequence for Jub (NM_010590.2,180-198).
gccagtcgtctgctagaaa

SEQ ID NO: 701341 - DNA, 19 bp, Mus musculus
  siRNA target sequence for Jub (NM_010590.2,184-202).
gtcgtctgctagaaaagtt

SEQ ID NO: 701342 - DNA, 19 bp, Mus musculus
  siRNA target sequence for Jub (NM_010590.2,186-204).
cgtctgctagaaaagttga

SEQ ID NO: 701343 - DNA, 19 bp, Mus musculus
  siRNA target sequence for Jub (NM_010590.2,413-431).
cgcacgcggctcctttgaa

SEQ ID NO: 701344 - DNA, 19 bp, Mus musculus
  siRNA target sequence for Jub (NM_010590.2,497-515).
gtcgtcgcctcctgatttt

SEQ ID NO: 701345 - DNA, 19 bp, Mus musculus
  siRNA target sequence for Jub (NM_010590.2,1205-1223).
gtgcaacaaaggtatctat

SEQ ID NO: 701346 - DNA, 19 bp, Mus musculus
  siRNA target sequence for Jub (NM_010590.2,1285-1303).
gctcctgtggacgaacttt

SEQ ID NO: 701347 - DNA, 19 bp, Mus musculus
  siRNA target sequence for Jub (NM_010590.2,1305-1323).
cggtgcaaggctttctaca

SEQ ID NO: 701348 - DNA, 19 bp, Mus musculus
  siRNA target sequence for Jub (NM_010590.2,1467-1485).
cgatgcatcgtatgtaaca

SEQ ID NO: 701349 - DNA, 19 bp, Mus musculus
  siRNA target sequence for Jub (NM_010590.2,1468-1486).
gatgcatcgtatgtaacaa

SEQ ID NO: 701350 - DNA, 19 bp, Mus musculus
  siRNA target sequence for Jub (NM_010590.2,1539-1557).
gttaccgactaccacaaaa

SEQ ID NO: 701351 - DNA, 19 bp, Mus musculus
  siRNA target sequence for Jub (NM_010590.2,1543-1561).
ccgactaccacaaaaatta

SEQ ID NO: 701352 - DNA, 19 bp, Mus musculus
  siRNA target sequence for Jub (NM_010590.2,1617-1635).
gacattgtgagggtgatat

SEQ ID NO: 701353 - DNA, 19 bp, Mus musculus
  siRNA target sequence for Jub (NM_010590.2,1636-1654).
ccatggaccgtgattatca

SEQ ID NO: 701354 - DNA, 19 bp, Mus musculus
  siRNA target sequence for Jub (NM_010590.2,1640-1658).
ggaccgtgattatcacttt

SEQ ID NO: 701355 - DNA, 19 bp, Mus musculus
  siRNA target sequence for Jub (NM_010590.2,1644-1662).
cgtgattatcactttgagt

SEQ ID NO: 701356 - DNA, 19 bp, Mus musculus
  siRNA target sequence for Jund1 (NM_010592.2,980-998).
cgcctggaggagaaagtca

SEQ ID NO: 701357 - DNA, 19 bp, Mus musculus
  siRNA target sequence for Klk11 (NM_010640.1,223-241).
gccatgtcagccagtataa

SEQ ID NO: 701358 - DNA, 19 bp, Mus musculus
  siRNA target sequence for Klk1 (NM_010645.2,340-358).
gaaccgcatccaaaatcct

SEQ ID NO: 701359 - DNA, 19 bp, Mus musculus
  siRNA target sequence for Klra13 (NM_010647.2,703-721).
ggattatgtatgtcgttat

SEQ ID NO: 701360 - DNA, 19 bp, Mus musculus
  siRNA target sequence for Klra13 (NM_010647.2,738-756).
caatggggactgtgataaa

SEQ ID NO: 701361 - DNA, 19 bp, Mus musculus
  siRNA target sequence for Krc (NM_010657.1,730-748).
gccattcagacgagtgttt

SEQ ID NO: 701362 - DNA, 19 bp, Mus musculus
  siRNA target sequence for Krc (NM_010657.1,732-750).
cattcagacgagtgtttct

SEQ ID NO: 701363 - DNA, 19 bp, Mus musculus
  siRNA target sequence for Krc (NM_010657.1,1199-1217).
caggcaagtatatatgtca

SEQ ID NO: 701364 - DNA, 19 bp, Mus musculus
  siRNA target sequence for Krc (NM_010657.1,1201-1219).
ggcaagtatatatgtcaat

SEQ ID NO: 701365 - DNA, 19 bp, Mus musculus
  siRNA target sequence for Krc (NM_010657.1,1202-1220).
gcaagtatatatgtcaata

SEQ ID NO: 701366 - DNA, 19 bp, Mus musculus
  siRNA target sequence for Krc (NM_010657.1,1325-1343).
ccaagagtaacctctacaa

SEQ ID NO: 701367 - DNA, 19 bp, Mus musculus
  siRNA target sequence for Krc (NM_010657.1,1355-1373).
cccatgcccaccgtatcaa

SEQ ID NO: 701368 - DNA, 19 bp, Mus musculus
  siRNA target sequence for Krc (NM_010657.1,1356-1374).
ccatgcccaccgtatcaaa

SEQ ID NO: 701369 - DNA, 19 bp, Mus musculus
  siRNA target sequence for Krc (NM_010657.1,1391-1409).
gctccagcagtgagatgta

SEQ ID NO: 701370 - DNA, 19 bp, Mus musculus
  siRNA target sequence for Krc (NM_010657.1,1545-1563).
ccccctgctctcaagtagt

SEQ ID NO: 701371 - DNA, 19 bp, Mus musculus
  siRNA target sequence for Krc (NM_010657.1,1552-1570).
ctctcaagtagtttgtaca

SEQ ID NO: 701372 - DNA, 19 bp, Mus musculus
  siRNA target sequence for Krc (NM_010657.1,2009-2027).
cacaagtgatcgaacatat

SEQ ID NO: 701373 - DNA, 19 bp, Mus musculus
  siRNA target sequence for Krc (NM_010657.1,2011-2029).
caagtgatcgaacatatca

SEQ ID NO: 701374 - DNA, 19 bp, Mus musculus
  siRNA target sequence for Krc (NM_010657.1,2143-2161).
ctctaccgggactcactat

SEQ ID NO: 701375 - DNA, 19 bp, Mus musculus
  siRNA target sequence for Krc (NM_010657.1,2309-2327).
gtagctactcctttgatga

SEQ ID NO: 701376 - DNA, 19 bp, Mus musculus
  siRNA target sequence for Krc (NM_010657.1,2356-2374).
cgcaacactcccgtgttta

SEQ ID NO: 701377 - DNA, 19 bp, Mus musculus
  siRNA target sequence for Krc (NM_010657.1,2378-2396).
cccacccacggatgctaaa

SEQ ID NO: 701378 - DNA, 19 bp, Mus musculus
  siRNA target sequence for Krc (NM_010657.1,2405-2423).
cagccattgaattaccttt

SEQ ID NO: 701379 - DNA, 19 bp, Mus musculus
  siRNA target sequence for Krc (NM_010657.1,2505-2523).
ggaaagcgaccttaccaaa

SEQ ID NO: 701380 - DNA, 19 bp, Mus musculus
  siRNA target sequence for Krc (NM_010657.1,2506-2524).
gaaagcgaccttaccaaaa

SEQ ID NO: 701381 - DNA, 19 bp, Mus musculus
  siRNA target sequence for Krc (NM_010657.1,2526-2544).
gaccaagaaggggttcaaa

SEQ ID NO: 701382 - DNA, 19 bp, Mus musculus
  siRNA target sequence for Krc (NM_010657.1,2546-2564).
caaaaggcgcgaactatga

SEQ ID NO: 701383 - DNA, 19 bp, Mus musculus
  siRNA target sequence for Krc (NM_010657.1,2551-2569).
ggcgcgaactatgaatgta

SEQ ID NO: 701384 - DNA, 19 bp, Mus musculus
  siRNA target sequence for Krc (NM_010657.1,2574-2592).
ctgcggtgctcggtacaaa

SEQ ID NO: 701385 - DNA, 19 bp, Mus musculus
  siRNA target sequence for Krc (NM_010657.1,2576-2594).
gcggtgctcggtacaaaaa

SEQ ID NO: 701386 - DNA, 19 bp, Mus musculus
  siRNA target sequence for Krc (NM_010657.1,2578-2596).
ggtgctcggtacaaaaaga

SEQ ID NO: 701387 - DNA, 19 bp, Mus musculus
  siRNA target sequence for Krc (NM_010657.1,2584-2602).
cggtacaaaaagagagata

SEQ ID NO: 701388 - DNA, 19 bp, Mus musculus
  siRNA target sequence for Krc (NM_010657.1,2585-2603).
ggtacaaaaagagagataa

SEQ ID NO: 701389 - DNA, 19 bp, Mus musculus
  siRNA target sequence for Krc (NM_010657.1,2611-2629).
gctcataagaagtactact

SEQ ID NO: 701390 - DNA, 19 bp, Mus musculus
  siRNA target sequence for Krc (NM_010657.1,2658-2676).
ctctgtaggtgctcatgaa

SEQ ID NO: 701391 - DNA, 19 bp, Mus musculus
  siRNA target sequence for Krc (NM_010657.1,2660-2678).
ctgtaggtgctcatgaagt

SEQ ID NO: 701392 - DNA, 19 bp, Mus musculus
  siRNA target sequence for Krc (NM_010657.1,2708-2726).
ggtcccagatgatgcatta

SEQ ID NO: 701393 - DNA, 19 bp, Mus musculus
  siRNA target sequence for Krc (NM_010657.1,2709-2727).
gtcccagatgatgcattat

SEQ ID NO: 701394 - DNA, 19 bp, Mus musculus
  siRNA target sequence for Krc (NM_010657.1,2711-2729).
cccagatgatgcattataa

SEQ ID NO: 701395 - DNA, 19 bp, Mus musculus
  siRNA target sequence for Krc (NM_010657.1,2712-2730).
ccagatgatgcattataaa

SEQ ID NO: 701396 - DNA, 19 bp, Mus musculus
  siRNA target sequence for Krc (NM_010657.1,2751-2769).
cactccgctgagaaaaaga

SEQ ID NO: 701397 - DNA, 19 bp, Mus musculus
  siRNA target sequence for Krc (NM_010657.1,2974-2992).
gaacaatgtccaaagaaat

SEQ ID NO: 701398 - DNA, 19 bp, Mus musculus
  siRNA target sequence for Krc (NM_010657.1,3141-3159).
ggtccggcagcccaacatt

SEQ ID NO: 701399 - DNA, 19 bp, Mus musculus
  siRNA target sequence for Krc (NM_010657.1,3493-3511).
gacacacgctccaaaacct

SEQ ID NO: 701400 - DNA, 19 bp, Mus musculus
  siRNA target sequence for Krc (NM_010657.1,3615-3633).
gactgagacccgaagcaaa

SEQ ID NO: 701401 - DNA, 19 bp, Mus musculus
  siRNA target sequence for Krc (NM_010657.1,3625-3643).
cgaagcaaatcctttgact

SEQ ID NO: 701402 - DNA, 19 bp, Mus musculus
  siRNA target sequence for Krc (NM_010657.1,3626-3644).
gaagcaaatcctttgacta

SEQ ID NO: 701403 - DNA, 19 bp, Mus musculus
  siRNA target sequence for Krc (NM_010657.1,4265-4283).
caaccctctccggatattt

SEQ ID NO: 701404 - DNA, 19 bp, Mus musculus
  siRNA target sequence for Krc (NM_010657.1,4311-4329).
gcagctccctggtgaaata

SEQ ID NO: 701405 - DNA, 19 bp, Mus musculus
  siRNA target sequence for Krc (NM_010657.1,4314-4332).
gctccctggtgaaatagaa

SEQ ID NO: 701406 - DNA, 19 bp, Mus musculus
  siRNA target sequence for Krc (NM_010657.1,4336-4354).
cacttgcccccagtcaaaa

SEQ ID NO: 701407 - DNA, 19 bp, Mus musculus
  siRNA target sequence for Krc (NM_010657.1,4539-4557).
gacccatatgccatcctat

SEQ ID NO: 701408 - DNA, 19 bp, Mus musculus
  siRNA target sequence for Krc (NM_010657.1,4543-4561).
catatgccatcctatggaa

SEQ ID NO: 701409 - DNA, 19 bp, Mus musculus
  siRNA target sequence for Krc (NM_010657.1,4564-4582).
gccatgtacaccactttgt

SEQ ID NO: 701410 - DNA, 19 bp, Mus musculus
  siRNA target sequence for Krc (NM_010657.1,4644-4662).
ggaaccctcctccaaaagt

SEQ ID NO: 701411 - DNA, 19 bp, Mus musculus
  siRNA target sequence for Krc (NM_010657.1,4648-4666).
ccctcctccaaaagtatga

SEQ ID NO: 701412 - DNA, 19 bp, Mus musculus
  siRNA target sequence for Krc (NM_010657.1,4699-4717).
cctgggccatcgagcataa

SEQ ID NO: 701413 - DNA, 19 bp, Mus musculus
  siRNA target sequence for Krc (NM_010657.1,4702-4720).
gggccatcgagcataagca

SEQ ID NO: 701414 - DNA, 19 bp, Mus musculus
  siRNA target sequence for Krc (NM_010657.1,4703-4721).
ggccatcgagcataagcaa

SEQ ID NO: 701415 - DNA, 19 bp, Mus musculus
  siRNA target sequence for Krc (NM_010657.1,4736-4754).
gttaccagacaccatatct

SEQ ID NO: 701416 - DNA, 19 bp, Mus musculus
  siRNA target sequence for Krc (NM_010657.1,4854-4872).
cccagctggcagtcttgaa

SEQ ID NO: 701417 - DNA, 19 bp, Mus musculus
  siRNA target sequence for Krc (NM_010657.1,4858-4876).
gctggcagtcttgaactta

SEQ ID NO: 701418 - DNA, 19 bp, Mus musculus
  siRNA target sequence for Krc (NM_010657.1,4862-4880).
gcagtcttgaacttaccat

SEQ ID NO: 701419 - DNA, 19 bp, Mus musculus
  siRNA target sequence for Krc (NM_010657.1,4867-4885).
cttgaacttaccatggaaa

SEQ ID NO: 701420 - DNA, 19 bp, Mus musculus
  siRNA target sequence for Krc (NM_010657.1,5076-5094).
cgacccaaaagaactttct

SEQ ID NO: 701421 - DNA, 19 bp, Mus musculus
  siRNA target sequence for Krc (NM_010657.1,5098-5116).
ctctctcattccacattgt

SEQ ID NO: 701422 - DNA, 19 bp, Mus musculus
  siRNA target sequence for Krc (NM_010657.1,5194-5212).
cctccaatgagtgtaaaga

SEQ ID NO: 701423 - DNA, 19 bp, Mus musculus
  siRNA target sequence for Krc (NM_010657.1,5285-5303).
cccctaaaccagccaaatt

SEQ ID NO: 701424 - DNA, 19 bp, Mus musculus
  siRNA target sequence for Krc (NM_010657.1,5308-5326).
gaaggtacggactcaaaga

SEQ ID NO: 701425 - DNA, 19 bp, Mus musculus
  siRNA target sequence for Krc (NM_010657.1,5350-5368).
cacacaaccactaatgtca

SEQ ID NO: 701426 - DNA, 19 bp, Mus musculus
  siRNA target sequence for Krc (NM_010657.1,5365-5383).
gtcagttggtgctatttaa

SEQ ID NO: 701427 - DNA, 19 bp, Mus musculus
  siRNA target sequence for Krc (NM_010657.1,5372-5390).
ggtgctatttaaactacat

SEQ ID NO: 701428 - DNA, 19 bp, Mus musculus
  siRNA target sequence for Krc (NM_010657.1,5436-5454).
cgctggttggtgcataagt

SEQ ID NO: 701429 - DNA, 19 bp, Mus musculus
  siRNA target sequence for Krc (NM_010657.1,5437-5455).
gctggttggtgcataagtt

SEQ ID NO: 701430 - DNA, 19 bp, Mus musculus
  siRNA target sequence for Krc (NM_010657.1,5438-5456).
ctggttggtgcataagttt

SEQ ID NO: 701431 - DNA, 19 bp, Mus musculus
  siRNA target sequence for Krc (NM_010657.1,5441-5459).
gttggtgcataagtttgta

SEQ ID NO: 701432 - DNA, 19 bp, Mus musculus
  siRNA target sequence for Krc (NM_010657.1,5444-5462).
ggtgcataagtttgtacaa

SEQ ID NO: 701433 - DNA, 19 bp, Mus musculus
  siRNA target sequence for Krc (NM_010657.1,5523-5541).
ggtgagcaaagagacatat

SEQ ID NO: 701434 - DNA, 19 bp, Mus musculus
  siRNA target sequence for Krc (NM_010657.1,5524-5542).
gtgagcaaagagacatata

SEQ ID NO: 701435 - DNA, 19 bp, Mus musculus
  siRNA target sequence for Krc (NM_010657.1,5751-5769).
cgaaggagggtacaaatca

SEQ ID NO: 701436 - DNA, 19 bp, Mus musculus
  siRNA target sequence for Krc (NM_010657.1,5802-5820).
ccgagggagatatgtttgt

SEQ ID NO: 701437 - DNA, 19 bp, Mus musculus
  siRNA target sequence for Krc (NM_010657.1,5901-5919).
gtgcaagcactgtcacttt

SEQ ID NO: 701438 - DNA, 19 bp, Mus musculus
  siRNA target sequence for Krc (NM_010657.1,7288-7306).
gccaaggtctccaagttta

SEQ ID NO: 701439 - DNA, 19 bp, Mus musculus
  siRNA target sequence for Krt1-c29 (NM_010666.1,146-164).
cctttgggggcagttcatt

SEQ ID NO: 701440 - DNA, 19 bp, Mus musculus
  siRNA target sequence for Krt1-c29 (NM_010666.1,451-469).
gcacacaacgccaacatca

SEQ ID NO: 701441 - DNA, 19 bp, Mus musculus
  siRNA target sequence for Krt1-c29 (NM_010666.1,461-479).
ccaacatcatcctgcaaaa

SEQ ID NO: 701442 - DNA, 19 bp, Mus musculus
  siRNA target sequence for Krt1-c29 (NM_010666.1,491-509).
gactgacggcggatgactt

SEQ ID NO: 701443 - DNA, 19 bp, Mus musculus
  siRNA target sequence for Krt1-c29 (NM_010666.1,548-566).
gcgtcgatgctgacatcaa

SEQ ID NO: 701444 - DNA, 19 bp, Mus musculus
  siRNA target sequence for Krt1-c29 (NM_010666.1,549-567).
cgtcgatgctgacatcaat

SEQ ID NO: 701445 - DNA, 19 bp, Mus musculus
  siRNA target sequence for Krt1-c29 (NM_010666.1,950-968).
ccctcttagccatgaaaca

SEQ ID NO: 701446 - DNA, 19 bp, Mus musculus
  siRNA target sequence for Krt1-c29 (NM_010666.1,1174-1192).
gacgagggctcttgtgtta

SEQ ID NO: 701447 - DNA, 19 bp, Mus musculus
  siRNA target sequence for Krt1-c29 (NM_010666.1,1237-1255).
cctaaaactgccatcgtta

SEQ ID NO: 701448 - DNA, 19 bp, Mus musculus
  siRNA target sequence for Krt1-c29 (NM_010666.1,1238-1256).
ctaaaactgccatcgttaa

SEQ ID NO: 701449 - DNA, 19 bp, Mus musculus
  siRNA target sequence for Krt1-c29 (NM_010666.1,1244-1262).
ctgccatcgttaaaactgt

SEQ ID NO: 701450 - DNA, 19 bp, Mus musculus
  siRNA target sequence for Krt1-c29 (NM_010666.1,1259-1277).
ctgtcgtggaagagttaga

SEQ ID NO: 701451 - DNA, 19 bp, Mus musculus
  siRNA target sequence for Krtap13 (NM_010671.1,518-536).
gctttcctaccagatatca

SEQ ID NO: 701452 - DNA, 19 bp, Mus musculus
  siRNA target sequence for Krtap13 (NM_010671.1,567-585).
cccttctagggatttctat

SEQ ID NO: 701453 - DNA, 19 bp, Mus musculus
  siRNA target sequence for Krtap13 (NM_010671.1,568-586).
ccttctagggatttctatt

SEQ ID NO: 701454 - DNA, 19 bp, Mus musculus
  siRNA target sequence for Krtap13 (NM_010671.1,575-593).
gggatttctattcttgtta

SEQ ID NO: 701455 - DNA, 19 bp, Mus musculus
  siRNA target sequence for Krtap13 (NM_010671.1,576-594).
ggatttctattcttgttat

SEQ ID NO: 701456 - DNA, 19 bp, Mus musculus
  siRNA target sequence for Krtap8-2 (NM_010676.1,154-172).
gctatggcagatatggata

SEQ ID NO: 701457 - DNA, 19 bp, Mus musculus
  siRNA target sequence for Krtap8-2 (NM_010676.1,207-225).
ggattctcccgattctact

SEQ ID NO: 701458 - DNA, 19 bp, Mus musculus
  siRNA target sequence for Lgals6 (NM_010707.1,76-94).
ctaccagcccacctacaat

SEQ ID NO: 701459 - DNA, 19 bp, Mus musculus
  siRNA target sequence for Lgals6 (NM_010707.1,95-113).
ccgactctgccctacaaga

SEQ ID NO: 701460 - DNA, 19 bp, Mus musculus
  siRNA target sequence for Lgals6 (NM_010707.1,183-201).
gacggttccacgtgaactt

SEQ ID NO: 701461 - DNA, 19 bp, Mus musculus
  siRNA target sequence for Lgals6 (NM_010707.1,241-259).
cttcaatccccgctttgat

SEQ ID NO: 701462 - DNA, 19 bp, Mus musculus
  siRNA target sequence for Lgals6 (NM_010707.1,476-494).
gaacttcagtccatcaact

SEQ ID NO: 701463 - DNA, 19 bp, Mus musculus
  siRNA target sequence for Lgals6 (NM_010707.1,599-617).
gtccgaagaaccatcataa

SEQ ID NO: 701464 - DNA, 19 bp, Mus musculus
  siRNA target sequence for Lrf (NM_010731.1,159-177).
gcgacgtggtgattcttgt

SEQ ID NO: 701465 - DNA, 19 bp, Mus musculus
  siRNA target sequence for Lrf (NM_010731.1,448-466).
gattctggcggctgatgat

SEQ ID NO: 701466 - DNA, 19 bp, Mus musculus
  siRNA target sequence for Lrf (NM_010731.1,550-568).
ccgcagtaaccccatgaat

SEQ ID NO: 701467 - DNA, 19 bp, Mus musculus
  siRNA target sequence for Lrf (NM_010731.1,551-569).
cgcagtaaccccatgaata

SEQ ID NO: 701468 - DNA, 19 bp, Mus musculus
  siRNA target sequence for Lrf (NM_010731.1,1005-1023).
cgctgctacagcagatgat

SEQ ID NO: 701469 - DNA, 19 bp, Mus musculus
  siRNA target sequence for Lrf (NM_010731.1,1116-1134).
cccacgagggggatgtgta

SEQ ID NO: 701470 - DNA, 19 bp, Mus musculus
  siRNA target sequence for Lrf (NM_010731.1,1273-1291).
gtgtaacatctgtaaagtt

SEQ ID NO: 701471 - DNA, 19 bp, Mus musculus
  siRNA target sequence for Lrf (NM_010731.1,1728-1746).
ccaccgccgagggtaactt

SEQ ID NO: 701472 - DNA, 19 bp, Mus musculus
  siRNA target sequence for Lrrn3 (NM_010733.1,774-792).
cttggcctagctatcacta

SEQ ID NO: 701473 - DNA, 19 bp, Mus musculus
  siRNA target sequence for Lrrn3 (NM_010733.1,784-802).
ctatcactacactagtaca

SEQ ID NO: 701474 - DNA, 19 bp, Mus musculus
  siRNA target sequence for Lrrn3 (NM_010733.1,790-808).
ctacactagtacaagctat

SEQ ID NO: 701475 - DNA, 19 bp, Mus musculus
  siRNA target sequence for Lrrn3 (NM_010733.1,793-811).
cactagtacaagctataga

SEQ ID NO: 701476 - DNA, 19 bp, Mus musculus
  siRNA target sequence for Lrrn3 (NM_010733.1,795-813).
ctagtacaagctatagata

SEQ ID NO: 701477 - DNA, 19 bp, Mus musculus
  siRNA target sequence for Lrrn3 (NM_010733.1,798-816).
gtacaagctatagataaaa

SEQ ID NO: 701478 - DNA, 19 bp, Mus musculus
  siRNA target sequence for Lrrn3 (NM_010733.1,819-837).
gtggattgcccccaattat

SEQ ID NO: 701479 - DNA, 19 bp, Mus musculus
  siRNA target sequence for Lrrn3 (NM_010733.1,821-839).
ggattgcccccaattatgt

SEQ ID NO: 701480 - DNA, 19 bp, Mus musculus
  siRNA target sequence for Lrrn3 (NM_010733.1,822-840).
gattgcccccaattatgta

SEQ ID NO: 701481 - DNA, 19 bp, Mus musculus
  siRNA target sequence for Lrrn3 (NM_010733.1,865-883).
ccccgagatccatctatat

SEQ ID NO: 701482 - DNA, 19 bp, Mus musculus
  siRNA target sequence for Lrrn3 (NM_010733.1,869-887).
gagatccatctatatggaa

SEQ ID NO: 701483 - DNA, 19 bp, Mus musculus
  siRNA target sequence for Lrrn3 (NM_010733.1,889-907).
catcgacagtggactgtaa

SEQ ID NO: 701484 - DNA, 19 bp, Mus musculus
  siRNA target sequence for Lrrn3 (NM_010733.1,892-910).
cgacagtggactgtaatga

SEQ ID NO: 701485 - DNA, 19 bp, Mus musculus
  siRNA target sequence for Lrrn3 (NM_010733.1,893-911).
gacagtggactgtaatgat

SEQ ID NO: 701486 - DNA, 19 bp, Mus musculus
  siRNA target sequence for Lrrn3 (NM_010733.1,895-913).
cagtggactgtaatgattt

SEQ ID NO: 701487 - DNA, 19 bp, Mus musculus
  siRNA target sequence for Lrrn3 (NM_010733.1,941-959).
gcctgccgacacacagatt

SEQ ID NO: 701488 - DNA, 19 bp, Mus musculus
  siRNA target sequence for Lrrn3 (NM_010733.1,963-981).
ctcctacagactaacaata

SEQ ID NO: 701489 - DNA, 19 bp, Mus musculus
  siRNA target sequence for Lrrn3 (NM_010733.1,965-983).
cctacagactaacaatatt

SEQ ID NO: 701490 - DNA, 19 bp, Mus musculus
  siRNA target sequence for Lrrn3 (NM_010733.1,973-991).
ctaacaatattgcaagaat

SEQ ID NO: 701491 - DNA, 19 bp, Mus musculus
  siRNA target sequence for Lrrn3 (NM_010733.1,1022-1040).
gactggcctggacttatct

SEQ ID NO: 701492 - DNA, 19 bp, Mus musculus
  siRNA target sequence for Lrrn3 (NM_010733.1,1024-1042).
ctggcctggacttatctca

SEQ ID NO: 701493 - DNA, 19 bp, Mus musculus
  siRNA target sequence for Lrrn3 (NM_010733.1,1131-1149).
ctgccggaaaagtgtctat

SEQ ID NO: 701494 - DNA, 19 bp, Mus musculus
  siRNA target sequence for Lrrn3 (NM_010733.1,1133-1151).
gccggaaaagtgtctatat

SEQ ID NO: 701495 - DNA, 19 bp, Mus musculus
  siRNA target sequence for Lrrn3 (NM_010733.1,1166-1184).
gcaggaactctacgttaat

SEQ ID NO: 701496 - DNA, 19 bp, Mus musculus
  siRNA target sequence for Lrrn3 (NM_010733.1,1170-1188).
gaactctacgttaatcaca

SEQ ID NO: 701497 - DNA, 19 bp, Mus musculus
  siRNA target sequence for Lrrn3 (NM_010733.1,1215-1233).
gccttcattggcctacata

SEQ ID NO: 701498 - DNA, 19 bp, Mus musculus
  siRNA target sequence for Lrrn3 (NM_010733.1,1216-1234).
ccttcattggcctacataa

SEQ ID NO: 701499 - DNA, 19 bp, Mus musculus
  siRNA target sequence for Lrrn3 (NM_010733.1,1217-1235).
cttcattggcctacataat

SEQ ID NO: 701500 - DNA, 19 bp, Mus musculus
  siRNA target sequence for Lrrn3 (NM_010733.1,1220-1238).
cattggcctacataatctt

SEQ ID NO: 701501 - DNA, 19 bp, Mus musculus
  siRNA target sequence for Lrrn3 (NM_010733.1,1242-1260).
cggcttcatctcaactcaa

SEQ ID NO: 701502 - DNA, 19 bp, Mus musculus
  siRNA target sequence for Lrrn3 (NM_010733.1,1277-1295).
caacagtcaatggtttgat

SEQ ID NO: 701503 - DNA, 19 bp, Mus musculus
  siRNA target sequence for Lrrn3 (NM_010733.1,1303-1321).
ccaatctcgagattctgat

SEQ ID NO: 701504 - DNA, 19 bp, Mus musculus
  siRNA target sequence for Lrrn3 (NM_010733.1,1379-1397).
gcttcgcagcctggttata

SEQ ID NO: 701505 - DNA, 19 bp, Mus musculus
  siRNA target sequence for Lrrn3 (NM_010733.1,1494-1512).
ccccaggttgcacttcaaa

SEQ ID NO: 701506 - DNA, 19 bp, Mus musculus
  siRNA target sequence for Lrrn3 (NM_010733.1,1496-1514).
ccaggttgcacttcaaaaa

SEQ ID NO: 701507 - DNA, 19 bp, Mus musculus
  siRNA target sequence for Lrrn3 (NM_010733.1,1515-1533).
gccgttaacctcaagtttt

SEQ ID NO: 701508 - DNA, 19 bp, Mus musculus
  siRNA target sequence for Lrrn3 (NM_010733.1,1516-1534).
ccgttaacctcaagttttt

SEQ ID NO: 701509 - DNA, 19 bp, Mus musculus
  siRNA target sequence for Lrrn3 (NM_010733.1,1561-1579).
gaatacggaggggtgattt

SEQ ID NO: 701510 - DNA, 19 bp, Mus musculus
  siRNA target sequence for Lrrn3 (NM_010733.1,1566-1584).
cggaggggtgattttagca

SEQ ID NO: 701511 - DNA, 19 bp, Mus musculus
  siRNA target sequence for Lrrn3 (NM_010733.1,1570-1588).
ggggtgattttagcaatat

SEQ ID NO: 701512 - DNA, 19 bp, Mus musculus
  siRNA target sequence for Lrrn3 (NM_010733.1,1582-1600).
gcaatatgctacatttgaa

SEQ ID NO: 701513 - DNA, 19 bp, Mus musculus
  siRNA target sequence for Lrrn3 (NM_010733.1,1601-1619).
ggaattggggataaacaat

SEQ ID NO: 701514 - DNA, 19 bp, Mus musculus
  siRNA target sequence for Lrrn3 (NM_010733.1,1645-1663).
gtctcgctgtggataactt

SEQ ID NO: 701515 - DNA, 19 bp, Mus musculus
  siRNA target sequence for Lrrn3 (NM_010733.1,1697-1715).
ccccagattgtcttacatt

SEQ ID NO: 701516 - DNA, 19 bp, Mus musculus
  siRNA target sequence for Lrrn3 (NM_010733.1,1718-1736).
ccctaatgcatttttcaga

SEQ ID NO: 701517 - DNA, 19 bp, Mus musculus
  siRNA target sequence for Lrrn3 (NM_010733.1,1812-1830).
ccgaacctcaaggaaatca

SEQ ID NO: 701518 - DNA, 19 bp, Mus musculus
  siRNA target sequence for Lrrn3 (NM_010733.1,1861-1879).
gtgtaatccgctggattaa

SEQ ID NO: 701519 - DNA, 19 bp, Mus musculus
  siRNA target sequence for Lrrn3 (NM_010733.1,1863-1881).
gtaatccgctggattaaca

SEQ ID NO: 701520 - DNA, 19 bp, Mus musculus
  siRNA target sequence for Lrrn3 (NM_010733.1,1892-1910).
caacattcggtttatggaa

SEQ ID NO: 701521 - DNA, 19 bp, Mus musculus
  siRNA target sequence for Lrrn3 (NM_010733.1,1927-1945).
gtgtggacccacctgaatt

SEQ ID NO: 701522 - DNA, 19 bp, Mus musculus
  siRNA target sequence for Lrrn3 (NM_010733.1,1931-1949).
ggacccacctgaattccaa

SEQ ID NO: 701523 - DNA, 19 bp, Mus musculus
  siRNA target sequence for Lrrn3 (NM_010733.1,1959-1977).
gttcggcaagtgcatttca

SEQ ID NO: 701524 - DNA, 19 bp, Mus musculus
  siRNA target sequence for Lrrn3 (NM_010733.1,1968-1986).
gtgcatttcagggatatga

SEQ ID NO: 701525 - DNA, 19 bp, Mus musculus
  siRNA target sequence for Lrrn3 (NM_010733.1,1976-1994).
cagggatatgatggaaatt

SEQ ID NO: 701526 - DNA, 19 bp, Mus musculus
  siRNA target sequence for Lrrn3 (NM_010733.1,2108-2126).
gatcacaccttctggtaaa

SEQ ID NO: 701527 - DNA, 19 bp, Mus musculus
  siRNA target sequence for Lrrn3 (NM_010733.1,2115-2133).
ccttctggtaaaaaactat

SEQ ID NO: 701528 - DNA, 19 bp, Mus musculus
  siRNA target sequence for Lrrn3 (NM_010733.1,2143-2161).
caatgagagagaagttcta

SEQ ID NO: 701529 - DNA, 19 bp, Mus musculus
  siRNA target sequence for Lrrn3 (NM_010733.1,2149-2167).
gagagaagttctatgttca

SEQ ID NO: 701530 - DNA, 19 bp, Mus musculus
  siRNA target sequence for Lrrn3 (NM_010733.1,2151-2169).
gagaagttctatgttcatt

SEQ ID NO: 701531 - DNA, 19 bp, Mus musculus
  siRNA target sequence for Lrrn3 (NM_010733.1,2241-2259).
ctagtcggtgctgatttga

SEQ ID NO: 701532 - DNA, 19 bp, Mus musculus
  siRNA target sequence for Lrrn3 (NM_010733.1,2250-2268).
gctgatttgaagtcgatta

SEQ ID NO: 701533 - DNA, 19 bp, Mus musculus
  siRNA target sequence for Lrrn3 (NM_010733.1,2251-2269).
ctgatttgaagtcgattat

SEQ ID NO: 701534 - DNA, 19 bp, Mus musculus
  siRNA target sequence for Lrrn3 (NM_010733.1,2258-2276).
gaagtcgattatgatcaaa

SEQ ID NO: 701535 - DNA, 19 bp, Mus musculus
  siRNA target sequence for Lrrn3 (NM_010733.1,2298-2316).
gataataatgggtcattga

SEQ ID NO: 701536 - DNA, 19 bp, Mus musculus
  siRNA target sequence for Lrrn3 (NM_010733.1,2360-2378).
ctggaaagcgagctctaaa

SEQ ID NO: 701537 - DNA, 19 bp, Mus musculus
  siRNA target sequence for Lrrn3 (NM_010733.1,2438-2456).
ccaaagtgctcgaatacca

SEQ ID NO: 701538 - DNA, 19 bp, Mus musculus
  siRNA target sequence for Lrrn3 (NM_010733.1,2439-2457).
caaagtgctcgaataccat

SEQ ID NO: 701539 - DNA, 19 bp, Mus musculus
  siRNA target sequence for Lrrn3 (NM_010733.1,2443-2461).
gtgctcgaataccatttga

SEQ ID NO: 701540 - DNA, 19 bp, Mus musculus
  siRNA target sequence for Lrrn3 (NM_010733.1,2446-2464).
ctcgaataccatttgatgt

SEQ ID NO: 701541 - DNA, 19 bp, Mus musculus
  siRNA target sequence for Lrrn3 (NM_010733.1,2454-2472).
ccatttgatgtcaaggtat

SEQ ID NO: 701542 - DNA, 19 bp, Mus musculus
  siRNA target sequence for Lrrn3 (NM_010733.1,2463-2481).
gtcaaggtatataatctta

SEQ ID NO: 701543 - DNA, 19 bp, Mus musculus
  siRNA target sequence for Lrrn3 (NM_010733.1,2465-2483).
caaggtatataatcttact

SEQ ID NO: 701544 - DNA, 19 bp, Mus musculus
  siRNA target sequence for Lrrn3 (NM_010733.1,2501-2519).
cgagtacaaaatttgtatt

SEQ ID NO: 701545 - DNA, 19 bp, Mus musculus
  siRNA target sequence for Lrrn3 (NM_010733.1,2526-2544).
cccaccgtctatcagaaaa

SEQ ID NO: 701546 - DNA, 19 bp, Mus musculus
  siRNA target sequence for Lrrn3 (NM_010733.1,2561-2579).
gaatgtcaccacaaaaagt

SEQ ID NO: 701547 - DNA, 19 bp, Mus musculus
  siRNA target sequence for Lrrn3 (NM_010733.1,2583-2601).
gagcatgacggaaaagaat

SEQ ID NO: 701548 - DNA, 19 bp, Mus musculus
  siRNA target sequence for Lrrn3 (NM_010733.1,2585-2603).
gcatgacggaaaagaatat

SEQ ID NO: 701549 - DNA, 19 bp, Mus musculus
  siRNA target sequence for Lrrn3 (NM_010733.1,2598-2616).
gaatatggaaagaatcata

SEQ ID NO: 701550 - DNA, 19 bp, Mus musculus
  siRNA target sequence for Lrrn3 (NM_010733.1,2651-2669).
gatcattggtgtaatgtgt

SEQ ID NO: 701551 - DNA, 19 bp, Mus musculus
  siRNA target sequence for Lrrn3 (NM_010733.1,2763-2781).
ctttaccctcctctaatca

SEQ ID NO: 701552 - DNA, 19 bp, Mus musculus
  siRNA target sequence for Lrrn3 (NM_010733.1,2808-2826).
cgggcaacactggaagtaa

SEQ ID NO: 701553 - DNA, 19 bp, Mus musculus
  siRNA target sequence for Lrrn3 (NM_010733.1,2841-2859).
ggagtgccgacaaatatgt

SEQ ID NO: 701554 - DNA, 19 bp, Mus musculus
  siRNA target sequence for Mad1l1 (NM_010752.1,1325-1343).
gtgagctgacccaaactga

SEQ ID NO: 701555 - DNA, 19 bp, Mus musculus
  siRNA target sequence for Mad1l1 (NM_010752.1,1526-1544).
ctgaatctagcttctcatt

SEQ ID NO: 701556 - DNA, 19 bp, Mus musculus
  siRNA target sequence for Mad1l1 (NM_010752.1,1564-1582).
gcactcagggtgactacaa

SEQ ID NO: 701557 - DNA, 19 bp, Mus musculus
  siRNA target sequence for Mad1l1 (NM_010752.1,1580-1598).
caaccagagtcgaaccaaa

SEQ ID NO: 701558 - DNA, 19 bp, Mus musculus
  siRNA target sequence for Mageb1 (NM_010759.1,6-24).
ctcctggaaagcttcaaaa

SEQ ID NO: 701559 - DNA, 19 bp, Mus musculus
  siRNA target sequence for Mageb1 (NM_010759.1,34-52).
ccattaagtccaaggtatt

SEQ ID NO: 701560 - DNA, 19 bp, Mus musculus
  siRNA target sequence for Mageb1 (NM_010759.1,61-79).
ggtagtacagaggtactta

SEQ ID NO: 701561 - DNA, 19 bp, Mus musculus
  siRNA target sequence for Mageb1 (NM_010759.1,72-90).
ggtacttacaggttgtcat

SEQ ID NO: 701562 - DNA, 19 bp, Mus musculus
  siRNA target sequence for Mageb1 (NM_010759.1,73-91).
gtacttacaggttgtcatt

SEQ ID NO: 701563 - DNA, 19 bp, Mus musculus
  siRNA target sequence for Ccndbp1 (NM_010761.1,219-237).
ctgacaacgcacttctcta

SEQ ID NO: 701564 - DNA, 19 bp, Mus musculus
  siRNA target sequence for Ccndbp1 (NM_010761.1,221-239).
gacaacgcacttctctaaa

SEQ ID NO: 701565 - DNA, 19 bp, Mus musculus
  siRNA target sequence for Ccndbp1 (NM_010761.1,223-241).
caacgcacttctctaaact

SEQ ID NO: 701566 - DNA, 19 bp, Mus musculus
  siRNA target sequence for Ccndbp1 (NM_010761.1,294-312).
gccatcgaggaaataatta

SEQ ID NO: 701567 - DNA, 19 bp, Mus musculus
  siRNA target sequence for Ccndbp1 (NM_010761.1,295-313).
ccatcgaggaaataattat

SEQ ID NO: 701568 - DNA, 19 bp, Mus musculus
  siRNA target sequence for Ccndbp1 (NM_010761.1,296-314).
catcgaggaaataattata

SEQ ID NO: 701569 - DNA, 19 bp, Mus musculus
  siRNA target sequence for Ccndbp1 (NM_010761.1,497-515).
gcctgagatcccaaaagat

SEQ ID NO: 701570 - DNA, 19 bp, Mus musculus
  siRNA target sequence for Ccndbp1 (NM_010761.1,499-517).
ctgagatcccaaaagataa

SEQ ID NO: 701571 - DNA, 19 bp, Mus musculus
  siRNA target sequence for Ccndbp1 (NM_010761.1,501-519).
gagatcccaaaagataaca

SEQ ID NO: 701572 - DNA, 19 bp, Mus musculus
  siRNA target sequence for Ccndbp1 (NM_010761.1,610-628).
cgtacagcggcctcttgaa

SEQ ID NO: 701573 - DNA, 19 bp, Mus musculus
  siRNA target sequence for Ccndbp1 (NM_010761.1,611-629).
gtacagcggcctcttgaat

SEQ ID NO: 701574 - DNA, 19 bp, Mus musculus
  siRNA target sequence for Ccndbp1 (NM_010761.1,617-635).
cggcctcttgaatgattct

SEQ ID NO: 701575 - DNA, 19 bp, Mus musculus
  siRNA target sequence for Ccndbp1 (NM_010761.1,685-703).
ccagcaatcgggactcata

SEQ ID NO: 701576 - DNA, 19 bp, Mus musculus
  siRNA target sequence for Ccndbp1 (NM_010761.1,704-722).
ctggtcagaggaagatcaa

SEQ ID NO: 701577 - DNA, 19 bp, Mus musculus
  siRNA target sequence for Ccndbp1 (NM_010761.1,760-778).
cccgagcttcactcaagaa

SEQ ID NO: 701578 - DNA, 19 bp, Mus musculus
  siRNA target sequence for Ccndbp1 (NM_010761.1,761-779).
ccgagcttcactcaagaaa

SEQ ID NO: 701579 - DNA, 19 bp, Mus musculus
  siRNA target sequence for Ccndbp1 (NM_010761.1,915-933).
ctcactgtgcggatcagtt

SEQ ID NO: 701580 - DNA, 19 bp, Mus musculus
  siRNA target sequence for Ccndbp1 (NM_010761.1,925-943).
ggatcagttctgcgaaatt

SEQ ID NO: 701581 - DNA, 19 bp, Mus musculus
  siRNA target sequence for Ccndbp1 (NM_010761.1,1041-1059).
gaccattgcatgaacagaa

SEQ ID NO: 701582 - DNA, 19 bp, Mus musculus
  siRNA target sequence for Mdm1 (NM_010785.1,80-98).
cctatttgtcagagtctta

SEQ ID NO: 701583 - DNA, 19 bp, Mus musculus
  siRNA target sequence for Mdm1 (NM_010785.1,134-152).
gacttagatcggatcagtt

SEQ ID NO: 701584 - DNA, 19 bp, Mus musculus
  siRNA target sequence for Mdm1 (NM_010785.1,150-168).
gttggggatcacgaaagaa

SEQ ID NO: 701585 - DNA, 19 bp, Mus musculus
  siRNA target sequence for Mdm1 (NM_010785.1,159-177).
cacgaaagaaccaggtttt

SEQ ID NO: 701586 - DNA, 19 bp, Mus musculus
  siRNA target sequence for Mdm1 (NM_010785.1,565-583).
gccgttgttcccacgaata

SEQ ID NO: 701587 - DNA, 19 bp, Mus musculus
  siRNA target sequence for Mdm1 (NM_010785.1,566-584).
ccgttgttcccacgaataa

SEQ ID NO: 701588 - DNA, 19 bp, Mus musculus
  siRNA target sequence for Mdm1 (NM_010785.1,567-585).
cgttgttcccacgaataat

SEQ ID NO: 701589 - DNA, 19 bp, Mus musculus
  siRNA target sequence for Mdm1 (NM_010785.1,586-604).
gccttgagaaattctgaat

SEQ ID NO: 701590 - DNA, 19 bp, Mus musculus
  siRNA target sequence for Mdm1 (NM_010785.1,591-609).
gagaaattctgaataccaa

SEQ ID NO: 701591 - DNA, 19 bp, Mus musculus
  siRNA target sequence for Mgat3 (NM_010795.2,40-58).
gacgctacaagctctttct

SEQ ID NO: 701592 - DNA, 19 bp, Mus musculus
  siRNA target sequence for Mgat3 (NM_010795.2,42-60).
cgctacaagctctttctca

SEQ ID NO: 701593 - DNA, 19 bp, Mus musculus
  siRNA target sequence for Mgat3 (NM_010795.2,104-122).
ctttaagaccttatcctat

SEQ ID NO: 701594 - DNA, 19 bp, Mus musculus
  siRNA target sequence for Mgat3 (NM_010795.2,162-180).
ctcgtatccagcttcttct

SEQ ID NO: 701595 - DNA, 19 bp, Mus musculus
  siRNA target sequence for Mgat3 (NM_010795.2,333-351).
gaggacaccacggagtatt

SEQ ID NO: 701596 - DNA, 19 bp, Mus musculus
  siRNA target sequence for Mgat3 (NM_010795.2,335-353).
ggacaccacggagtatttt

SEQ ID NO: 701597 - DNA, 19 bp, Mus musculus
  siRNA target sequence for Mgat3 (NM_010795.2,598-616).
cggtggtgcagtattccaa

SEQ ID NO: 701598 - DNA, 19 bp, Mus musculus
  siRNA target sequence for Mgat3 (NM_010795.2,651-669).
gtaccgaggcgggttatca

SEQ ID NO: 701599 - DNA, 19 bp, Mus musculus
  siRNA target sequence for Mgat3 (NM_010795.2,701-719).
gctggatgtgcgtttccat

SEQ ID NO: 701600 - DNA, 19 bp, Mus musculus
  siRNA target sequence for Mgat3 (NM_010795.2,743-761).
cttcgtggtctgtgaatct

SEQ ID NO: 701601 - DNA, 19 bp, Mus musculus
  siRNA target sequence for Mgat3 (NM_010795.2,746-764).
cgtggtctgtgaatctaat

SEQ ID NO: 701602 - DNA, 19 bp, Mus musculus
  siRNA target sequence for Mgat3 (NM_010795.2,838-856).
gccacaaggtgctctatgt

SEQ ID NO: 701603 - DNA, 19 bp, Mus musculus
  siRNA target sequence for Mgat3 (NM_010795.2,895-913).
gctggattgcggatgacta

SEQ ID NO: 701604 - DNA, 19 bp, Mus musculus
  siRNA target sequence for Mgat3 (NM_010795.2,966-984).
cccgatgacgtctttatca

SEQ ID NO: 701605 - DNA, 19 bp, Mus musculus
  siRNA target sequence for Mgat3 (NM_010795.2,967-985).
ccgatgacgtctttatcat

SEQ ID NO: 701606 - DNA, 19 bp, Mus musculus
  siRNA target sequence for Mgat3 (NM_010795.2,1018-1036).
gtgtgctgttcctcaaact

SEQ ID NO: 701607 - DNA, 19 bp, Mus musculus
  siRNA target sequence for Mgat3 (NM_010795.2,1074-1092).
cggaagtccctgtatggtt

SEQ ID NO: 701608 - DNA, 19 bp, Mus musculus
  siRNA target sequence for Mgat3 (NM_010795.2,1210-1228).
ccaacttccggcagtatga

SEQ ID NO: 701609 - DNA, 19 bp, Mus musculus
  siRNA target sequence for Mgat3 (NM_010795.2,1312-1330).
cacccgagggcatctactt

SEQ ID NO: 701610 - DNA, 19 bp, Mus musculus
  siRNA target sequence for Mgat3 (NM_010795.2,1314-1332).
cccgagggcatctacttta

SEQ ID NO: 701611 - DNA, 19 bp, Mus musculus
  siRNA target sequence for Mgat3 (NM_010795.2,1315-1333).
ccgagggcatctactttaa

SEQ ID NO: 701612 - DNA, 19 bp, Mus musculus
  siRNA target sequence for Mgat3 (NM_010795.2,1316-1334).
cgagggcatctactttaaa

SEQ ID NO: 701613 - DNA, 19 bp, Mus musculus
  siRNA target sequence for Mgat3 (NM_010795.2,1469-1487).
ccccagtgagcacatgtat

SEQ ID NO: 701614 - DNA, 19 bp, Mus musculus
  siRNA target sequence for Mgat3 (NM_010795.2,1479-1497).
cacatgtatgctcctaaat

SEQ ID NO: 701615 - DNA, 19 bp, Mus musculus
  siRNA target sequence for Mrvi1 (NM_010826.3,524-542).
cccctcggggcatgtcatt

SEQ ID NO: 701616 - DNA, 19 bp, Mus musculus
  siRNA target sequence for Mrvi1 (NM_010826.3,974-992).
ggaacttacagtagaacaa

SEQ ID NO: 701617 - DNA, 19 bp, Mus musculus
  siRNA target sequence for Mrvi1 (NM_010826.3,1622-1640).
ggatgtgatgcccaacatt

SEQ ID NO: 701618 - DNA, 19 bp, Mus musculus
  siRNA target sequence for Mrvi1 (NM_010826.3,1623-1641).
gatgtgatgcccaacattt

SEQ ID NO: 701619 - DNA, 19 bp, Mus musculus
  siRNA target sequence for Mrvi1 (NM_010826.3,1632-1650).
cccaacatttctgacatat

SEQ ID NO: 701620 - DNA, 19 bp, Mus musculus
  siRNA target sequence for Mrvi1 (NM_010826.3,1633-1651).
ccaacatttctgacatatt

SEQ ID NO: 701621 - DNA, 19 bp, Mus musculus
  siRNA target sequence for Mrvi1 (NM_010826.3,1646-1664).
catattgctgcgcaaactt

SEQ ID NO: 701622 - DNA, 19 bp, Mus musculus
  siRNA target sequence for Mrvi1 (NM_010826.3,1657-1675).
gcaaacttagggttcacaa

SEQ ID NO: 701623 - DNA, 19 bp, Mus musculus
  siRNA target sequence for Mrvi1 (NM_010826.3,1895-1913).
ccgggagacctatcagaaa

SEQ ID NO: 701624 - DNA, 19 bp, Mus musculus
  siRNA target sequence for Mrvi1 (NM_010826.3,1981-1999).
gtgctgttcgccaggaaaa

SEQ ID NO: 701625 - DNA, 19 bp, Mus musculus
  siRNA target sequence for Mrvi1 (NM_010826.3,1992-2010).
caggaaaagcgcatgtcaa

SEQ ID NO: 701626 - DNA, 19 bp, Mus musculus
  siRNA target sequence for Mrvi1 (NM_010826.3,2070-2088).
catgctgagctcatggaat

SEQ ID NO: 701627 - DNA, 19 bp, Mus musculus
  siRNA target sequence for Mrvi1 (NM_010826.3,2073-2091).
gctgagctcatggaattta

SEQ ID NO: 701628 - DNA, 19 bp, Mus musculus
  siRNA target sequence for Mrvi1 (NM_010826.3,2074-2092).
ctgagctcatggaatttaa

SEQ ID NO: 701629 - DNA, 19 bp, Mus musculus
  siRNA target sequence for Mrvi1 (NM_010826.3,2076-2094).
gagctcatggaatttaaga

SEQ ID NO: 701630 - DNA, 19 bp, Mus musculus
  siRNA target sequence for Mrvi1 (NM_010826.3,2078-2096).
gctcatggaatttaagaaa

SEQ ID NO: 701631 - DNA, 19 bp, Mus musculus
  siRNA target sequence for Mrvi1 (NM_010826.3,2639-2657).
cttcctacaagtcatgtat

SEQ ID NO: 701632 - DNA, 19 bp, Mus musculus
  siRNA target sequence for Mrvi1 (NM_010826.3,2643-2661).
ctacaagtcatgtatccta

SEQ ID NO: 701633 - DNA, 19 bp, Mus musculus
  siRNA target sequence for Mrvi1 (NM_010826.3,2646-2664).
caagtcatgtatcctaaat

SEQ ID NO: 701634 - DNA, 19 bp, Mus musculus
  siRNA target sequence for Mrvi1 (NM_010826.3,2724-2742).
gttctcgggctgtacagtt

SEQ ID NO: 701635 - DNA, 19 bp, Mus musculus
  siRNA target sequence for Mrvi1 (NM_010826.3,2729-2747).
cgggctgtacagttcctat

SEQ ID NO: 701636 - DNA, 19 bp, Mus musculus
  siRNA target sequence for Mrvi1 (NM_010826.3,2730-2748).
gggctgtacagttcctata

SEQ ID NO: 701637 - DNA, 19 bp, Mus musculus
  siRNA target sequence for Msl31 (NM_010832.2,208-226).
gctacacgatacagatgaa

SEQ ID NO: 701638 - DNA, 19 bp, Mus musculus
  siRNA target sequence for Msl31 (NM_010832.2,209-227).
ctacacgatacagatgaaa

SEQ ID NO: 701639 - DNA, 19 bp, Mus musculus
  siRNA target sequence for Msl31 (NM_010832.2,241-259).
gcgcaaattggccaaaaaa

SEQ ID NO: 701640 - DNA, 19 bp, Mus musculus
  siRNA target sequence for Msl31 (NM_010832.2,250-268).
ggccaaaaaagcaatagct

SEQ ID NO: 701641 - DNA, 19 bp, Mus musculus
  siRNA target sequence for Msl31 (NM_010832.2,314-332).
ggtgtcgactctgtcttaa

SEQ ID NO: 701642 - DNA, 19 bp, Mus musculus
  siRNA target sequence for Msl31 (NM_010832.2,315-333).
gtgtcgactctgtcttaaa

SEQ ID NO: 701643 - DNA, 19 bp, Mus musculus
  siRNA target sequence for Msl31 (NM_010832.2,336-354).
gcgtgccagttaaagaaaa

SEQ ID NO: 701644 - DNA, 19 bp, Mus musculus
  siRNA target sequence for Msl31 (NM_010832.2,431-449).
caccgtcagcgtcgtatta

SEQ ID NO: 701645 - DNA, 19 bp, Mus musculus
  siRNA target sequence for Msl31 (NM_010832.2,433-451).
ccgtcagcgtcgtattaaa

SEQ ID NO: 701646 - DNA, 19 bp, Mus musculus
  siRNA target sequence for Msl31 (NM_010832.2,435-453).
gtcagcgtcgtattaaagt

SEQ ID NO: 701647 - DNA, 19 bp, Mus musculus
  siRNA target sequence for Msl31 (NM_010832.2,437-455).
cagcgtcgtattaaagtaa

SEQ ID NO: 701648 - DNA, 19 bp, Mus musculus
  siRNA target sequence for Msl31 (NM_010832.2,459-477).
ctaaagcgaaaaaaaaggt

SEQ ID NO: 701649 - DNA, 19 bp, Mus musculus
  siRNA target sequence for Msl31 (NM_010832.2,484-502).
gctgcgttcaagaaaggaa

SEQ ID NO: 701650 - DNA, 19 bp, Mus musculus
  siRNA target sequence for Msl31 (NM_010832.2,506-524).
gatgaaagaacaatcacta

SEQ ID NO: 701651 - DNA, 19 bp, Mus musculus
  siRNA target sequence for Msl31 (NM_010832.2,513-531).
gaacaatcactatagatat

SEQ ID NO: 701652 - DNA, 19 bp, Mus musculus
  siRNA target sequence for Msl31 (NM_010832.2,554-572).
ctagaggatgactgttact

SEQ ID NO: 701653 - DNA, 19 bp, Mus musculus
  siRNA target sequence for Msl31 (NM_010832.2,557-575).
gaggatgactgttactata

SEQ ID NO: 701654 - DNA, 19 bp, Mus musculus
  siRNA target sequence for Msl31 (NM_010832.2,583-601).
gaggaaacggttagtgaaa

SEQ ID NO: 701655 - DNA, 19 bp, Mus musculus
  siRNA target sequence for Msl31 (NM_010832.2,644-662).
gtgaaacattttgctatta

SEQ ID NO: 701656 - DNA, 19 bp, Mus musculus
  siRNA target sequence for Msl31 (NM_010832.2,736-754).
cgtcccagctgaaaagaat

SEQ ID NO: 701657 - DNA, 19 bp, Mus musculus
  siRNA target sequence for Msl31 (NM_010832.2,775-793).
ggtggatggattacgaata

SEQ ID NO: 701658 - DNA, 19 bp, Mus musculus
  siRNA target sequence for Msl31 (NM_010832.2,776-794).
gtggatggattacgaataa

SEQ ID NO: 701659 - DNA, 19 bp, Mus musculus
  siRNA target sequence for Msl31 (NM_010832.2,779-797).
gatggattacgaataacct

SEQ ID NO: 701660 - DNA, 19 bp, Mus musculus
  siRNA target sequence for Msl31 (NM_010832.2,823-841).
gctctacccatatgaacaa

SEQ ID NO: 701661 - DNA, 19 bp, Mus musculus
  siRNA target sequence for Msl31 (NM_010832.2,824-842).
ctctacccatatgaacaaa

SEQ ID NO: 701662 - DNA, 19 bp, Mus musculus
  siRNA target sequence for Msl31 (NM_010832.2,855-873).
gggtgacatcgtcaaaatt

SEQ ID NO: 701663 - DNA, 19 bp, Mus musculus
  siRNA target sequence for Msl31 (NM_010832.2,856-874).
ggtgacatcgtcaaaattt

SEQ ID NO: 701664 - DNA, 19 bp, Mus musculus
  siRNA target sequence for Msl31 (NM_010832.2,857-875).
gtgacatcgtcaaaatttt

SEQ ID NO: 701665 - DNA, 19 bp, Mus musculus
  siRNA target sequence for Msl31 (NM_010832.2,878-896).
cttcctattaaggaaagta

SEQ ID NO: 701666 - DNA, 19 bp, Mus musculus
  siRNA target sequence for Msl31 (NM_010832.2,1062-1080).
ggcacagcaccaattgtga

SEQ ID NO: 701667 - DNA, 19 bp, Mus musculus
  siRNA target sequence for Msl31 (NM_010832.2,1184-1202).
gtgcacagcagatcatctt

SEQ ID NO: 701668 - DNA, 19 bp, Mus musculus
  siRNA target sequence for Msl31 (NM_010832.2,1297-1315).
gaaacttgtgcctgacaat

SEQ ID NO: 701669 - DNA, 19 bp, Mus musculus
  siRNA target sequence for Msl31 (NM_010832.2,1337-1355).
cctcccccttcgtacattt

SEQ ID NO: 701670 - DNA, 19 bp, Mus musculus
  siRNA target sequence for Msl31 (NM_010832.2,1338-1356).
ctcccccttcgtacattta

SEQ ID NO: 701671 - DNA, 19 bp, Mus musculus
  siRNA target sequence for Msl31 (NM_010832.2,1342-1360).
cccttcgtacatttatggt

SEQ ID NO: 701672 - DNA, 19 bp, Mus musculus
  siRNA target sequence for Msl31 (NM_010832.2,1366-1384).
gcatttgctccggttattt

SEQ ID NO: 701673 - DNA, 19 bp, Mus musculus
  siRNA target sequence for Msl31 (NM_010832.2,1372-1390).
gctccggttatttgtgaaa

SEQ ID NO: 701674 - DNA, 19 bp, Mus musculus
  siRNA target sequence for Myom1 (NM_010867.1,181-199).
ggtcccatcagcactatga

SEQ ID NO: 701675 - DNA, 19 bp, Mus musculus
  siRNA target sequence for Myom1 (NM_010867.1,182-200).
gtcccatcagcactatgat

SEQ ID NO: 701676 - DNA, 19 bp, Mus musculus
  siRNA target sequence for Myom1 (NM_010867.1,184-202).
cccatcagcactatgatct

SEQ ID NO: 701677 - DNA, 19 bp, Mus musculus
  siRNA target sequence for Myom1 (NM_010867.1,393-411).
cttggagcatcatcatcat

SEQ ID NO: 701678 - DNA, 19 bp, Mus musculus
  siRNA target sequence for Myom1 (NM_010867.1,406-424).
catcatcccggcattctca

SEQ ID NO: 701679 - DNA, 19 bp, Mus musculus
  siRNA target sequence for Myom1 (NM_010867.1,493-511).
ccagtctgctattagaaga

SEQ ID NO: 701680 - DNA, 19 bp, Mus musculus
  siRNA target sequence for Myom1 (NM_010867.1,494-512).
cagtctgctattagaagat

SEQ ID NO: 701681 - DNA, 19 bp, Mus musculus
  siRNA target sequence for Myom1 (NM_010867.1,496-514).
gtctgctattagaagatta

SEQ ID NO: 701682 - DNA, 19 bp, Mus musculus
  siRNA target sequence for Myom1 (NM_010867.1,500-518).
gctattagaagattattca

SEQ ID NO: 701683 - DNA, 19 bp, Mus musculus
  siRNA target sequence for Myom1 (NM_010867.1,510-528).
gattattcatccaagttga

SEQ ID NO: 701684 - DNA, 19 bp, Mus musculus
  siRNA target sequence for Myom1 (NM_010867.1,649-667).
cggaagaagaaagaattaa

SEQ ID NO: 701685 - DNA, 19 bp, Mus musculus
  siRNA target sequence for Myom1 (NM_010867.1,707-725).
gagtgaggaagctattgca

SEQ ID NO: 701686 - DNA, 19 bp, Mus musculus
  siRNA target sequence for Myom1 (NM_010867.1,792-810).
cgagaggaaacgtttgaaa

SEQ ID NO: 701687 - DNA, 19 bp, Mus musculus
  siRNA target sequence for Myom1 (NM_010867.1,815-833).
gtcgaggaacattgcaatt

SEQ ID NO: 701688 - DNA, 19 bp, Mus musculus
  siRNA target sequence for Myom1 (NM_010867.1,818-836).
gaggaacattgcaattcga

SEQ ID NO: 701689 - DNA, 19 bp, Mus musculus
  siRNA target sequence for Myom1 (NM_010867.1,886-904).
catatcacggcaagctaaa

SEQ ID NO: 701690 - DNA, 19 bp, Mus musculus
  siRNA target sequence for Myom1 (NM_010867.1,924-942).
gctcctgagtttatcatta

SEQ ID NO: 701691 - DNA, 19 bp, Mus musculus
  siRNA target sequence for Myom1 (NM_010867.1,1014-1032).
cctcggctcacgtggtata

SEQ ID NO: 701692 - DNA, 19 bp, Mus musculus
  siRNA target sequence for Myom1 (NM_010867.1,1015-1033).
ctcggctcacgtggtataa

SEQ ID NO: 701693 - DNA, 19 bp, Mus musculus
  siRNA target sequence for Myom1 (NM_010867.1,1034-1052).
gaaccaggtgcctataaat

SEQ ID NO: 701694 - DNA, 19 bp, Mus musculus
  siRNA target sequence for Myom1 (NM_010867.1,1045-1063).
ctataaatgtccatgcaaa

SEQ ID NO: 701695 - DNA, 19 bp, Mus musculus
  siRNA target sequence for Myom1 (NM_010867.1,1059-1077).
gcaaacccgggaaagtaca

SEQ ID NO: 701696 - DNA, 19 bp, Mus musculus
  siRNA target sequence for Myom1 (NM_010867.1,1060-1078).
caaacccgggaaagtacat

SEQ ID NO: 701697 - DNA, 19 bp, Mus musculus
  siRNA target sequence for Myom1 (NM_010867.1,1064-1082).
cccgggaaagtacatcatt

SEQ ID NO: 701698 - DNA, 19 bp, Mus musculus
  siRNA target sequence for Myom1 (NM_010867.1,1090-1108).
gatacggaatgcatactct

SEQ ID NO: 701699 - DNA, 19 bp, Mus musculus
  siRNA target sequence for Myom1 (NM_010867.1,1112-1130).
gatcagcaaatgtgacttt

SEQ ID NO: 701700 - DNA, 19 bp, Mus musculus
  siRNA target sequence for Myom1 (NM_010867.1,1151-1169).
ggcctcggcgatgaatgtt

SEQ ID NO: 701701 - DNA, 19 bp, Mus musculus
  siRNA target sequence for Myom1 (NM_010867.1,1153-1171).
cctcggcgatgaatgttca

SEQ ID NO: 701702 - DNA, 19 bp, Mus musculus
  siRNA target sequence for Myom1 (NM_010867.1,1154-1172).
ctcggcgatgaatgttcaa

SEQ ID NO: 701703 - DNA, 19 bp, Mus musculus
  siRNA target sequence for Myom1 (NM_010867.1,1191-1209).
gcctcagtcgtagtaaaga

SEQ ID NO: 701704 - DNA, 19 bp, Mus musculus
  siRNA target sequence for Myom1 (NM_010867.1,1193-1211).
ctcagtcgtagtaaagaga

SEQ ID NO: 701705 - DNA, 19 bp, Mus musculus
  siRNA target sequence for Myom1 (NM_010867.1,1195-1213).
cagtcgtagtaaagagata

SEQ ID NO: 701706 - DNA, 19 bp, Mus musculus
  siRNA target sequence for Myom1 (NM_010867.1,1197-1215).
gtcgtagtaaagagatata

SEQ ID NO: 701707 - DNA, 19 bp, Mus musculus
  siRNA target sequence for Myom1 (NM_010867.1,1277-1295).
gaccccttacggttatgca

SEQ ID NO: 701708 - DNA, 19 bp, Mus musculus
  siRNA target sequence for Myom1 (NM_010867.1,1498-1516).
cgttctctcacctcaacaa

SEQ ID NO: 701709 - DNA, 19 bp, Mus musculus
  siRNA target sequence for Myom1 (NM_010867.1,1499-1517).
gttctctcacctcaacaaa

SEQ ID NO: 701710 - DNA, 19 bp, Mus musculus
  siRNA target sequence for Myom1 (NM_010867.1,1549-1567).
gaatgggagagtattacga

SEQ ID NO: 701711 - DNA, 19 bp, Mus musculus
  siRNA target sequence for Myom1 (NM_010867.1,1555-1573).
gagagtattacgaacagta

SEQ ID NO: 701712 - DNA, 19 bp, Mus musculus
  siRNA target sequence for Myom1 (NM_010867.1,1656-1674).
gctaacaaggattacatca

SEQ ID NO: 701713 - DNA, 19 bp, Mus musculus
  siRNA target sequence for Myom1 (NM_010867.1,1713-1731).
cctatcctgggatacttta

SEQ ID NO: 701714 - DNA, 19 bp, Mus musculus
  siRNA target sequence for Myom1 (NM_010867.1,1714-1732).
ctatcctgggatactttat

SEQ ID NO: 701715 - DNA, 19 bp, Mus musculus
  siRNA target sequence for Myom1 (NM_010867.1,1719-1737).
ctgggatactttatcgata

SEQ ID NO: 701716 - DNA, 19 bp, Mus musculus
  siRNA target sequence for Myom1 (NM_010867.1,1821-1839).
gaaggccgttcctacatat

SEQ ID NO: 701717 - DNA, 19 bp, Mus musculus
  siRNA target sequence for Myom1 (NM_010867.1,1824-1842).
ggccgttcctacatattca

SEQ ID NO: 701718 - DNA, 19 bp, Mus musculus
  siRNA target sequence for Myom1 (NM_010867.1,1826-1844).
ccgttcctacatattcaga

SEQ ID NO: 701719 - DNA, 19 bp, Mus musculus
  siRNA target sequence for Myom1 (NM_010867.1,1847-1865).
ccgagctgtgaataaaact

SEQ ID NO: 701720 - DNA, 19 bp, Mus musculus
  siRNA target sequence for Myom1 (NM_010867.1,1874-1892).
cctgccatcccgagtttct

SEQ ID NO: 701721 - DNA, 19 bp, Mus musculus
  siRNA target sequence for Myom1 (NM_010867.1,1922-1940).
gaaagctagactaaaaagt

SEQ ID NO: 701722 - DNA, 19 bp, Mus musculus
  siRNA target sequence for Myom1 (NM_010867.1,1988-2006).
gcctacagagggtgtcatt

SEQ ID NO: 701723 - DNA, 19 bp, Mus musculus
  siRNA target sequence for Myom1 (NM_010867.1,2086-2104).
gaggccatgagggcattat

SEQ ID NO: 701724 - DNA, 19 bp, Mus musculus
  siRNA target sequence for Myom1 (NM_010867.1,2088-2106).
ggccatgagggcattatgt

SEQ ID NO: 701725 - DNA, 19 bp, Mus musculus
  siRNA target sequence for Myom1 (NM_010867.1,2089-2107).
gccatgagggcattatgta

SEQ ID NO: 701726 - DNA, 19 bp, Mus musculus
  siRNA target sequence for Myom1 (NM_010867.1,2090-2108).
ccatgagggcattatgtat

SEQ ID NO: 701727 - DNA, 19 bp, Mus musculus
  siRNA target sequence for Myom1 (NM_010867.1,2199-2217).
ctggtggaggggaagtctt

SEQ ID NO: 701728 - DNA, 19 bp, Mus musculus
  siRNA target sequence for Myom1 (NM_010867.1,2225-2243).
ccgtgtccgctgctcaaat

SEQ ID NO: 701729 - DNA, 19 bp, Mus musculus
  siRNA target sequence for Myom1 (NM_010867.1,2226-2244).
cgtgtccgctgctcaaatt

SEQ ID NO: 701730 - DNA, 19 bp, Mus musculus
  siRNA target sequence for Myom1 (NM_010867.1,2253-2271).
gttggtgagccctcagaaa

SEQ ID NO: 701731 - DNA, 19 bp, Mus musculus
  siRNA target sequence for Myom1 (NM_010867.1,2284-2302).
ccgtcgtaggggacaaact

SEQ ID NO: 701732 - DNA, 19 bp, Mus musculus
  siRNA target sequence for Myom1 (NM_010867.1,2285-2303).
cgtcgtaggggacaaactt

SEQ ID NO: 701733 - DNA, 19 bp, Mus musculus
  siRNA target sequence for Myom1 (NM_010867.1,2288-2306).
cgtaggggacaaacttgat

SEQ ID NO: 701734 - DNA, 19 bp, Mus musculus
  siRNA target sequence for Myom1 (NM_010867.1,2289-2307).
gtaggggacaaacttgata

SEQ ID NO: 701735 - DNA, 19 bp, Mus musculus
  siRNA target sequence for Myom1 (NM_010867.1,2333-2351).
cccaagtagaaatacagat

SEQ ID NO: 701736 - DNA, 19 bp, Mus musculus
  siRNA target sequence for Myom1 (NM_010867.1,2394-2412).
gaactggttgggtactaca

SEQ ID NO: 701737 - DNA, 19 bp, Mus musculus
  siRNA target sequence for Myom1 (NM_010867.1,2443-2461).
gggaaccctgcaataacaa

SEQ ID NO: 701738 - DNA, 19 bp, Mus musculus
  siRNA target sequence for Myom1 (NM_010867.1,2465-2483).
ggtgaagggctcacgattt

SEQ ID NO: 701739 - DNA, 19 bp, Mus musculus
  siRNA target sequence for Myom1 (NM_010867.1,2466-2484).
gtgaagggctcacgattta

SEQ ID NO: 701740 - DNA, 19 bp, Mus musculus
  siRNA target sequence for Myom1 (NM_010867.1,2468-2486).
gaagggctcacgatttact

SEQ ID NO: 701741 - DNA, 19 bp, Mus musculus
  siRNA target sequence for Myom1 (NM_010867.1,2471-2489).
gggctcacgatttacttgt

SEQ ID NO: 701742 - DNA, 19 bp, Mus musculus
  siRNA target sequence for Myom1 (NM_010867.1,2474-2492).
ctcacgatttacttgtcat

SEQ ID NO: 701743 - DNA, 19 bp, Mus musculus
  siRNA target sequence for Myom1 (NM_010867.1,2500-2518).
cgactgctcagagctatat

SEQ ID NO: 701744 - DNA, 19 bp, Mus musculus
  siRNA target sequence for Myom1 (NM_010867.1,2544-2562).
gctggacttagcgaatatt

SEQ ID NO: 701745 - DNA, 19 bp, Mus musculus
  siRNA target sequence for Myom1 (NM_010867.1,2563-2581).
cacaggattcggaagctat

SEQ ID NO: 701746 - DNA, 19 bp, Mus musculus
  siRNA target sequence for Myom1 (NM_010867.1,2567-2585).
ggattcggaagctattgaa

SEQ ID NO: 701747 - DNA, 19 bp, Mus musculus
  siRNA target sequence for Myom1 (NM_010867.1,2644-2662).
cgcctggtggactaacaga

SEQ ID NO: 701748 - DNA, 19 bp, Mus musculus
  siRNA target sequence for Myom1 (NM_010867.1,2718-2736).
ctcggtagcaaccctaata

SEQ ID NO: 701749 - DNA, 19 bp, Mus musculus
  siRNA target sequence for Myom1 (NM_010867.1,2769-2787).
ggccagaaagaagtaagta

SEQ ID NO: 701750 - DNA, 19 bp, Mus musculus
  siRNA target sequence for Myom1 (NM_010867.1,2902-2920).
catctgcgccctatgacat

SEQ ID NO: 701751 - DNA, 19 bp, Mus musculus
  siRNA target sequence for Myom1 (NM_010867.1,2907-2925).
gcgccctatgacatcactt

SEQ ID NO: 701752 - DNA, 19 bp, Mus musculus
  siRNA target sequence for Myom1 (NM_010867.1,2998-3016).
caggctattatgtgaacta

SEQ ID NO: 701753 - DNA, 19 bp, Mus musculus
  siRNA target sequence for Myom1 (NM_010867.1,3049-3067).
ggagggaagctaacatcaa

SEQ ID NO: 701754 - DNA, 19 bp, Mus musculus
  siRNA target sequence for Myom1 (NM_010867.1,3076-3094).
gcgatgcagcgtacaagat

SEQ ID NO: 701755 - DNA, 19 bp, Mus musculus
  siRNA target sequence for Myom1 (NM_010867.1,3077-3095).
cgatgcagcgtacaagatt

SEQ ID NO: 701756 - DNA, 19 bp, Mus musculus
  siRNA target sequence for Myom1 (NM_010867.1,3078-3096).
gatgcagcgtacaagatta

SEQ ID NO: 701757 - DNA, 19 bp, Mus musculus
  siRNA target sequence for Myom1 (NM_010867.1,3081-3099).
gcagcgtacaagattagca

SEQ ID NO: 701758 - DNA, 19 bp, Mus musculus
  siRNA target sequence for Myom1 (NM_010867.1,3082-3100).
cagcgtacaagattagcaa

SEQ ID NO: 701759 - DNA, 19 bp, Mus musculus
  siRNA target sequence for Myom1 (NM_010867.1,3129-3147).
caagtgtcagcaatgaaca

SEQ ID NO: 701760 - DNA, 19 bp, Mus musculus
  siRNA target sequence for Myom1 (NM_010867.1,3174-3192).
gtgagcgagtgcttcaagt

SEQ ID NO: 701761 - DNA, 19 bp, Mus musculus
  siRNA target sequence for Myom1 (NM_010867.1,3304-3322).
ctccagtcacgggttactt

SEQ ID NO: 701762 - DNA, 19 bp, Mus musculus
  siRNA target sequence for Myom1 (NM_010867.1,3307-3325).
cagtcacgggttactttgt

SEQ ID NO: 701763 - DNA, 19 bp, Mus musculus
  siRNA target sequence for Myom1 (NM_010867.1,3356-3374).
ccaatggcgaggacttaat

SEQ ID NO: 701764 - DNA, 19 bp, Mus musculus
  siRNA target sequence for Myom1 (NM_010867.1,3556-3574).
gagtcatttccttgaactt

SEQ ID NO: 701765 - DNA, 19 bp, Mus musculus
  siRNA target sequence for Myom1 (NM_010867.1,3566-3584).
cttgaactttgaatgtgat

SEQ ID NO: 701766 - DNA, 19 bp, Mus musculus
  siRNA target sequence for Myom1 (NM_010867.1,3592-3610).
ctcccaagtcagaattcgt

SEQ ID NO: 701767 - DNA, 19 bp, Mus musculus
  siRNA target sequence for Myom1 (NM_010867.1,3646-3664).
cacgattagaagtcgaaaa

SEQ ID NO: 701768 - DNA, 19 bp, Mus musculus
  siRNA target sequence for Myom1 (NM_010867.1,3648-3666).
cgattagaagtcgaaaaca

SEQ ID NO: 701769 - DNA, 19 bp, Mus musculus
  siRNA target sequence for Myom1 (NM_010867.1,3649-3667).
gattagaagtcgaaaacaa

SEQ ID NO: 701770 - DNA, 19 bp, Mus musculus
  siRNA target sequence for Myom1 (NM_010867.1,3696-3714).
gacctcgggacagatgatt

SEQ ID NO: 701771 - DNA, 19 bp, Mus musculus
  siRNA target sequence for Myom1 (NM_010867.1,3716-3734).
gggcacctattcttgtgat

SEQ ID NO: 701772 - DNA, 19 bp, Mus musculus
  siRNA target sequence for Myom1 (NM_010867.1,3757-3775).
cgtcaagctacctgataga

SEQ ID NO: 701773 - DNA, 19 bp, Mus musculus
  siRNA target sequence for Myom1 (NM_010867.1,3825-3843).
ccgactgtcccaactaagt

SEQ ID NO: 701774 - DNA, 19 bp, Mus musculus
  siRNA target sequence for Myom1 (NM_010867.1,3873-3891).
ggtcaggtccggttttgga

SEQ ID NO: 701775 - DNA, 19 bp, Mus musculus
  siRNA target sequence for Myom1 (NM_010867.1,3874-3892).
gtcaggtccggttttggat

SEQ ID NO: 701776 - DNA, 19 bp, Mus musculus
  siRNA target sequence for Myom1 (NM_010867.1,3994-4012).
cgggcatcattgaaatgtt

SEQ ID NO: 701777 - DNA, 19 bp, Mus musculus
  siRNA target sequence for Myom1 (NM_010867.1,4035-4053).
gatgaagggacgtacacat

SEQ ID NO: 701778 - DNA, 19 bp, Mus musculus
  siRNA target sequence for Myom1 (NM_010867.1,4042-4060).
ggacgtacacattccaaat

SEQ ID NO: 701779 - DNA, 19 bp, Mus musculus
  siRNA target sequence for Myom1 (NM_010867.1,4045-4063).
cgtacacattccaaattca

SEQ ID NO: 701780 - DNA, 19 bp, Mus musculus
  siRNA target sequence for Myom1 (NM_010867.1,4137-4155).
gaattccagcgacaagaat

SEQ ID NO: 701781 - DNA, 19 bp, Mus musculus
  siRNA target sequence for Myom1 (NM_010867.1,4297-4315).
ccgtggacgagaaacatga

SEQ ID NO: 701782 - DNA, 19 bp, Mus musculus
  siRNA target sequence for Myom1 (NM_010867.1,4316-4334).
ctttaaggatggcatttgt

SEQ ID NO: 701783 - DNA, 19 bp, Mus musculus
  siRNA target sequence for Myom1 (NM_010867.1,4358-4376).
caagaaagacgctggattt

SEQ ID NO: 701784 - DNA, 19 bp, Mus musculus
  siRNA target sequence for Myom1 (NM_010867.1,4367-4385).
cgctggattttatgaagtt

SEQ ID NO: 701785 - DNA, 19 bp, Mus musculus
  siRNA target sequence for Myom1 (NM_010867.1,4518-4536).
gagggcatccggctatact

SEQ ID NO: 701786 - DNA, 19 bp, Mus musculus
  siRNA target sequence for Myom1 (NM_010867.1,4557-4575).
gatgacttgaaagttaact

SEQ ID NO: 701787 - DNA, 19 bp, Mus musculus
  siRNA target sequence for Myom1 (NM_010867.1,4587-4605).
gggacggggattaagtaca

SEQ ID NO: 701788 - DNA, 19 bp, Mus musculus
  siRNA target sequence for Myom1 (NM_010867.1,4658-4676).
cgagcccactccgaatgat

SEQ ID NO: 701789 - DNA, 19 bp, Mus musculus
  siRNA target sequence for Myom1 (NM_010867.1,4659-4677).
gagcccactccgaatgata

SEQ ID NO: 701790 - DNA, 19 bp, Mus musculus
  siRNA target sequence for Myom1 (NM_010867.1,4661-4679).
gcccactccgaatgataaa

SEQ ID NO: 701791 - DNA, 19 bp, Mus musculus
  siRNA target sequence for Ndph (NM_010883.1,479-497).
ggccataatgggagataca

SEQ ID NO: 701792 - DNA, 19 bp, Mus musculus
  siRNA target sequence for Ndph (NM_010883.1,508-526).
cagacagttcatttctgat

SEQ ID NO: 701793 - DNA, 19 bp, Mus musculus
  siRNA target sequence for Ndph (NM_010883.1,549-567).
caccattatgtcgattcta

SEQ ID NO: 701794 - DNA, 19 bp, Mus musculus
  siRNA target sequence for Ndph (NM_010883.1,569-587).
cagtcacccactgtacaaa

SEQ ID NO: 701795 - DNA, 19 bp, Mus musculus
  siRNA target sequence for Nfkbia (NM_010907.1,307-325).
caatcatccacgaagagaa

SEQ ID NO: 701796 - DNA, 19 bp, Mus musculus
  siRNA target sequence for Nfkbia (NM_010907.1,762-780).
gtttcgctcttgttgaaat

SEQ ID NO: 701797 - DNA, 19 bp, Mus musculus
  siRNA target sequence for Nfkbia (NM_010907.1,933-951).
gacacggagtcagaattca

SEQ ID NO: 701798 - DNA, 19 bp, Mus musculus
  siRNA target sequence for Nfkbia (NM_010907.1,935-953).
cacggagtcagaattcaca

SEQ ID NO: 701799 - DNA, 19 bp, Mus musculus
  siRNA target sequence for Nfkbia (NM_010907.1,990-1008).
ggccagcgtctgacattat

SEQ ID NO: 701800 - DNA, 19 bp, Mus musculus
  siRNA target sequence for Nfkbil1 (NM_010909.1,438-456).
gccagggccctgatgctta

SEQ ID NO: 701801 - DNA, 19 bp, Mus musculus
  siRNA target sequence for Nfkbil1 (NM_010909.1,492-510).
catctgccatggggataaa

SEQ ID NO: 701802 - DNA, 19 bp, Mus musculus
  siRNA target sequence for Nfkbil1 (NM_010909.1,502-520).
ggggataaaaaataaggat

SEQ ID NO: 701803 - DNA, 19 bp, Mus musculus
  siRNA target sequence for Nfkbil1 (NM_010909.1,658-676).
catcgggaggtttgaagat

SEQ ID NO: 701804 - DNA, 19 bp, Mus musculus
  siRNA target sequence for Nfkbil1 (NM_010909.1,661-679).
cgggaggtttgaagatgat

SEQ ID NO: 701805 - DNA, 19 bp, Mus musculus
  siRNA target sequence for Nfkbil1 (NM_010909.1,1161-1179).
gattccgaagccagattga

SEQ ID NO: 701806 - DNA, 19 bp, Mus musculus
  siRNA target sequence for Ngfa (NM_010915.1,85-103).
caagtggactgtgagaatt

SEQ ID NO: 701807 - DNA, 19 bp, Mus musculus
  siRNA target sequence for Ngfa (NM_010915.1,486-504).
catcaagttcaaatatcca

SEQ ID NO: 701808 - DNA, 19 bp, Mus musculus
  siRNA target sequence for Ngfa (NM_010915.1,761-779).
gagaaactatggcgaataa

SEQ ID NO: 701809 - DNA, 19 bp, Mus musculus
  siRNA target sequence for Nsmaf (NM_010945.1,400-418).
caaaatcagtgatttttga

SEQ ID NO: 701810 - DNA, 19 bp, Mus musculus
  siRNA target sequence for Nsmaf (NM_010945.1,433-451).
ctcagcccattcttaagat

SEQ ID NO: 701811 - DNA, 19 bp, Mus musculus
  siRNA target sequence for Nsmaf (NM_010945.1,529-547).
ggggtatttcactcatttt

SEQ ID NO: 701812 - DNA, 19 bp, Mus musculus
  siRNA target sequence for Nsmaf (NM_010945.1,643-661).
ggaaggtggaagatgttgt

SEQ ID NO: 701813 - DNA, 19 bp, Mus musculus
  siRNA target sequence for Nsmaf (NM_010945.1,688-706).
catcctgccttgataaact

SEQ ID NO: 701814 - DNA, 19 bp, Mus musculus
  siRNA target sequence for Nsmaf (NM_010945.1,711-729).
gaccaaatggccatgataa

SEQ ID NO: 701815 - DNA, 19 bp, Mus musculus
  siRNA target sequence for Nsmaf (NM_010945.1,747-765).
cgtctggctaggacatcat

SEQ ID NO: 701816 - DNA, 19 bp, Mus musculus
  siRNA target sequence for Nsmaf (NM_010945.1,753-771).
gctaggacatcatttgaca

SEQ ID NO: 701817 - DNA, 19 bp, Mus musculus
  siRNA target sequence for Nsmaf (NM_010945.1,849-867).
cctgggcatgtgtgcatta

SEQ ID NO: 701818 - DNA, 19 bp, Mus musculus
  siRNA target sequence for Nsmaf (NM_010945.1,853-871).
ggcatgtgtgcattacaga

SEQ ID NO: 701819 - DNA, 19 bp, Mus musculus
  siRNA target sequence for Nsmaf (NM_010945.1,881-899).
gtatttccagcctctcaat

SEQ ID NO: 701820 - DNA, 19 bp, Mus musculus
  siRNA target sequence for Nsmaf (NM_010945.1,1008-1026).
gacctgtgttccgacatat

SEQ ID NO: 701821 - DNA, 19 bp, Mus musculus
  siRNA target sequence for Nsmaf (NM_010945.1,1013-1031).
gtgttccgacatataccta

SEQ ID NO: 701822 - DNA, 19 bp, Mus musculus
  siRNA target sequence for Nsmaf (NM_010945.1,1015-1033).
gttccgacatatacctaaa

SEQ ID NO: 701823 - DNA, 19 bp, Mus musculus
  siRNA target sequence for Nsmaf (NM_010945.1,1018-1036).
ccgacatatacctaaagtt

SEQ ID NO: 701824 - DNA, 19 bp, Mus musculus
  siRNA target sequence for Nsmaf (NM_010945.1,1020-1038).
gacatatacctaaagttct

SEQ ID NO: 701825 - DNA, 19 bp, Mus musculus
  siRNA target sequence for Nsmaf (NM_010945.1,1226-1244).
gtttccatggataataagt

SEQ ID NO: 701826 - DNA, 19 bp, Mus musculus
  siRNA target sequence for Nsmaf (NM_010945.1,1230-1248).
ccatggataataagtgatt

SEQ ID NO: 701827 - DNA, 19 bp, Mus musculus
  siRNA target sequence for Nsmaf (NM_010945.1,1231-1249).
catggataataagtgatta

SEQ ID NO: 701828 - DNA, 19 bp, Mus musculus
  siRNA target sequence for Nsmaf (NM_010945.1,1281-1299).
gcaaccttccgagatctta

SEQ ID NO: 701829 - DNA, 19 bp, Mus musculus
  siRNA target sequence for Nsmaf (NM_010945.1,1285-1303).
ccttccgagatcttagtaa

SEQ ID NO: 701830 - DNA, 19 bp, Mus musculus
  siRNA target sequence for Nsmaf (NM_010945.1,1404-1422).
ccaggctatgtgctctttt

SEQ ID NO: 701831 - DNA, 19 bp, Mus musculus
  siRNA target sequence for Nsmaf (NM_010945.1,1432-1450).
ggatcgcaccagagtatat

SEQ ID NO: 701832 - DNA, 19 bp, Mus musculus
  siRNA target sequence for Nsmaf (NM_010945.1,1461-1479).
caaaatggaagatttgata

SEQ ID NO: 701833 - DNA, 19 bp, Mus musculus
  siRNA target sequence for Nsmaf (NM_010945.1,1490-1508).
gatgtttaacagtattgca

SEQ ID NO: 701834 - DNA, 19 bp, Mus musculus
  siRNA target sequence for Nsmaf (NM_010945.1,1506-1524).
gcagaaacgtggaaaaact

SEQ ID NO: 701835 - DNA, 19 bp, Mus musculus
  siRNA target sequence for Nsmaf (NM_010945.1,1509-1527).
gaaacgtggaaaaactgtt

SEQ ID NO: 701836 - DNA, 19 bp, Mus musculus
  siRNA target sequence for Nsmaf (NM_010945.1,1529-1547).
ggatggtgcaacggatttt

SEQ ID NO: 701837 - DNA, 19 bp, Mus musculus
  siRNA target sequence for Nsmaf (NM_010945.1,1530-1548).
gatggtgcaacggatttta

SEQ ID NO: 701838 - DNA, 19 bp, Mus musculus
  siRNA target sequence for Nsmaf (NM_010945.1,1534-1552).
gtgcaacggattttaaaga

SEQ ID NO: 701839 - DNA, 19 bp, Mus musculus
  siRNA target sequence for Nsmaf (NM_010945.1,1536-1554).
gcaacggattttaaagagt

SEQ ID NO: 701840 - DNA, 19 bp, Mus musculus
  siRNA target sequence for Nsmaf (NM_010945.1,1581-1599).
gtcagctttttggtcaata

SEQ ID NO: 701841 - DNA, 19 bp, Mus musculus
  siRNA target sequence for Nsmaf (NM_010945.1,1585-1603).
gctttttggtcaatagtct

SEQ ID NO: 701842 - DNA, 19 bp, Mus musculus
  siRNA target sequence for Nsmaf (NM_010945.1,1743-1761).
gagtggattgatctgatat

SEQ ID NO: 701843 - DNA, 19 bp, Mus musculus
  siRNA target sequence for Nsmaf (NM_010945.1,1830-1848).
ggtggtgtagacttgaaca

SEQ ID NO: 701844 - DNA, 19 bp, Mus musculus
  siRNA target sequence for Nsmaf (NM_010945.1,1876-1894).
ccatgctgacccaaatttt

SEQ ID NO: 701845 - DNA, 19 bp, Mus musculus
  siRNA target sequence for Nsmaf (NM_010945.1,1880-1898).
gctgacccaaattttggaa

SEQ ID NO: 701846 - DNA, 19 bp, Mus musculus
  siRNA target sequence for Nsmaf (NM_010945.1,1881-1899).
ctgacccaaattttggaat

SEQ ID NO: 701847 - DNA, 19 bp, Mus musculus
  siRNA target sequence for Nsmaf (NM_010945.1,1883-1901).
gacccaaattttggaattt

SEQ ID NO: 701848 - DNA, 19 bp, Mus musculus
  siRNA target sequence for Nsmaf (NM_010945.1,1909-1927).
caccaaaacagctgtttgt

SEQ ID NO: 701849 - DNA, 19 bp, Mus musculus
  siRNA target sequence for Nsmaf (NM_010945.1,1945-1963).
ggatcacccccaagtttaa

SEQ ID NO: 701850 - DNA, 19 bp, Mus musculus
  siRNA target sequence for Nsmaf (NM_010945.1,1946-1964).
gatcacccccaagtttaaa

SEQ ID NO: 701851 - DNA, 19 bp, Mus musculus
  siRNA target sequence for Nsmaf (NM_010945.1,2023-2041).
gggaggagtcgtttgaaga

SEQ ID NO: 701852 - DNA, 19 bp, Mus musculus
  siRNA target sequence for Nsmaf (NM_010945.1,2094-2112).
ctacatgagcagtacaaga

SEQ ID NO: 701853 - DNA, 19 bp, Mus musculus
  siRNA target sequence for Nsmaf (NM_010945.1,2135-2153).
gatagcagtgtcttgcaat

SEQ ID NO: 701854 - DNA, 19 bp, Mus musculus
  siRNA target sequence for Nsmaf (NM_010945.1,2154-2172).
ggctcttcagtctttacca

SEQ ID NO: 701855 - DNA, 19 bp, Mus musculus
  siRNA target sequence for Nsmaf (NM_010945.1,2176-2194).
cccaagattccactttgaa

SEQ ID NO: 701856 - DNA, 19 bp, Mus musculus
  siRNA target sequence for Nsmaf (NM_010945.1,2203-2221).
ctaaggaatccaaaatgct

SEQ ID NO: 701857 - DNA, 19 bp, Mus musculus
  siRNA target sequence for Nsmaf (NM_010945.1,2219-2237).
gctacaaagaagtatatca

SEQ ID NO: 701858 - DNA, 19 bp, Mus musculus
  siRNA target sequence for Nsmaf (NM_010945.1,2230-2248).
gtatatcattttccaatat

SEQ ID NO: 701859 - DNA, 19 bp, Mus musculus
  siRNA target sequence for Nsmaf (NM_010945.1,2277-2295).
ggagacaccactgtcataa

SEQ ID NO: 701860 - DNA, 19 bp, Mus musculus
  siRNA target sequence for Nsmaf (NM_010945.1,2280-2298).
gacaccactgtcataagtt

SEQ ID NO: 701861 - DNA, 19 bp, Mus musculus
  siRNA target sequence for Nsmaf (NM_010945.1,2305-2323).
gggataacaacgtctattt

SEQ ID NO: 701862 - DNA, 19 bp, Mus musculus
  siRNA target sequence for Nsmaf (NM_010945.1,2315-2333).
cgtctatttttattccata

SEQ ID NO: 701863 - DNA, 19 bp, Mus musculus
  siRNA target sequence for Nsmaf (NM_010945.1,2341-2359).
gaagacgccaagatacact

SEQ ID NO: 701864 - DNA, 19 bp, Mus musculus
  siRNA target sequence for Nsmaf (NM_010945.1,2373-2391).
gatgctgtcagtaagatct

SEQ ID NO: 701865 - DNA, 19 bp, Mus musculus
  siRNA target sequence for Nsmaf (NM_010945.1,2376-2394).
gctgtcagtaagatctgtt

SEQ ID NO: 701866 - DNA, 19 bp, Mus musculus
  siRNA target sequence for Nsmaf (NM_010945.1,2482-2500).
gacaccagtttgacttact

SEQ ID NO: 701867 - DNA, 19 bp, Mus musculus
  siRNA target sequence for Nsmaf (NM_010945.1,2520-2538).
gtcagcgtcaatactatca

SEQ ID NO: 701868 - DNA, 19 bp, Mus musculus
  siRNA target sequence for Nsmaf (NM_010945.1,2522-2540).
cagcgtcaatactatcaat

SEQ ID NO: 701869 - DNA, 19 bp, Mus musculus
  siRNA target sequence for Nsmaf (NM_010945.1,2524-2542).
gcgtcaatactatcaattt

SEQ ID NO: 701870 - DNA, 19 bp, Mus musculus
  siRNA target sequence for Nsmaf (NM_010945.1,2525-2543).
cgtcaatactatcaattta

SEQ ID NO: 701871 - DNA, 19 bp, Mus musculus
  siRNA target sequence for Nsmaf (NM_010945.1,2528-2546).
caatactatcaatttaaat

SEQ ID NO: 701872 - DNA, 19 bp, Mus musculus
  siRNA target sequence for Nsmaf (NM_010945.1,2606-2624).
cactacagccactttatta

SEQ ID NO: 701873 - DNA, 19 bp, Mus musculus
  siRNA target sequence for Nsmaf (NM_010945.1,2702-2720).
cgtagatggatgtctcaat

SEQ ID NO: 701874 - DNA, 19 bp, Mus musculus
  siRNA target sequence for Nsmaf (NM_010945.1,2772-2790).
ccgcagaggtgctttgtct

SEQ ID NO: 701875 - DNA, 19 bp, Mus musculus
  siRNA target sequence for Nsmaf (NM_010945.1,2843-2861).
ggacctccttggagcaaaa

SEQ ID NO: 701876 - DNA, 19 bp, Mus musculus
  siRNA target sequence for Nsmaf (NM_010945.1,2919-2937).
cagtgtagcagtattatca

SEQ ID NO: 701877 - DNA, 19 bp, Mus musculus
  siRNA target sequence for Nsmaf (NM_010945.1,2949-2967).
gacagacaaattatgttct

SEQ ID NO: 701878 - DNA, 19 bp, Mus musculus
  siRNA target sequence for Nudc (NM_010948.1,181-199).
cttccttcgacgcaaaaca

SEQ ID NO: 701879 - DNA, 19 bp, Mus musculus
  siRNA target sequence for Nudc (NM_010948.1,188-206).
cgacgcaaaacagactttt

SEQ ID NO: 701880 - DNA, 19 bp, Mus musculus
  siRNA target sequence for Nudc (NM_010948.1,189-207).
gacgcaaaacagacttttt

SEQ ID NO: 701881 - DNA, 19 bp, Mus musculus
  siRNA target sequence for Nudc (NM_010948.1,191-209).
cgcaaaacagactttttca

SEQ ID NO: 701882 - DNA, 19 bp, Mus musculus
  siRNA target sequence for Nudc (NM_010948.1,420-438).
gactgcaactggagattga

SEQ ID NO: 701883 - DNA, 19 bp, Mus musculus
  siRNA target sequence for Nudc (NM_010948.1,703-721).
ccgggtgggccttaaagga

SEQ ID NO: 701884 - DNA, 19 bp, Mus musculus
  siRNA target sequence for Nudc (NM_010948.1,741-759).
gagaactctacaatgaagt

SEQ ID NO: 701885 - DNA, 19 bp, Mus musculus
  siRNA target sequence for Olfr41 (NM_010983.1,70-88).
ctgcgggcactactatttt

SEQ ID NO: 701886 - DNA, 19 bp, Mus musculus
  siRNA target sequence for Olfr41 (NM_010983.1,114-132).
ggtgctgactgaaaacata

SEQ ID NO: 701887 - DNA, 19 bp, Mus musculus
  siRNA target sequence for Olfr41 (NM_010983.1,118-136).
ctgactgaaaacatactca

SEQ ID NO: 701888 - DNA, 19 bp, Mus musculus
  siRNA target sequence for Olfr41 (NM_010983.1,223-241).
gtcactgttacgattccta

SEQ ID NO: 701889 - DNA, 19 bp, Mus musculus
  siRNA target sequence for Olfr41 (NM_010983.1,227-245).
ctgttacgattcctaagat

SEQ ID NO: 701890 - DNA, 19 bp, Mus musculus
  siRNA target sequence for Olfr41 (NM_010983.1,461-479).
gggctggaggttttggtat

SEQ ID NO: 701891 - DNA, 19 bp, Mus musculus
  siRNA target sequence for Olfr41 (NM_010983.1,652-670).
gtcactggggcttcctata

SEQ ID NO: 701892 - DNA, 19 bp, Mus musculus
  siRNA target sequence for Olfr41 (NM_010983.1,745-763).
cacctcactgttgtgatta

SEQ ID NO: 701893 - DNA, 19 bp, Mus musculus
  siRNA target sequence for Olfr41 (NM_010983.1,772-790).
gcagccagtattttcatct

SEQ ID NO: 701894 - DNA, 19 bp, Mus musculus
  siRNA target sequence for Olfr41 (NM_010983.1,805-823).
gcactctcagcttttgaca

SEQ ID NO: 701895 - DNA, 19 bp, Mus musculus
  siRNA target sequence for Olfr41 (NM_010983.1,887-905).
gcttgcgcaatcaagaagt

SEQ ID NO: 701896 - DNA, 19 bp, Mus musculus
  siRNA target sequence for Olfr41 (NM_010983.1,943-961).
ggccaggacgccaatacca

SEQ ID NO: 701897 - DNA, 19 bp, Mus musculus
  siRNA target sequence for Olfr49 (NM_010991.1,145-163).
gtggacaggcgcctttaca

SEQ ID NO: 701898 - DNA, 19 bp, Mus musculus
  siRNA target sequence for Olfr49 (NM_010991.1,281-299).
gttgtttcctccaagcatt

SEQ ID NO: 701899 - DNA, 19 bp, Mus musculus
  siRNA target sequence for Olfr49 (NM_010991.1,385-403).
cgttatgccaccattatga

SEQ ID NO: 701900 - DNA, 19 bp, Mus musculus
  siRNA target sequence for Olfr49 (NM_010991.1,391-409).
gccaccattatgagcaaaa

SEQ ID NO: 701901 - DNA, 19 bp, Mus musculus
  siRNA target sequence for Olfr49 (NM_010991.1,393-411).
caccattatgagcaaaaga

SEQ ID NO: 701902 - DNA, 19 bp, Mus musculus
  siRNA target sequence for Olfr49 (NM_010991.1,449-467).
gattgcttctcatcatagt

SEQ ID NO: 701903 - DNA, 19 bp, Mus musculus
  siRNA target sequence for Olfr49 (NM_010991.1,459-477).
catcatagttcctagttca

SEQ ID NO: 701904 - DNA, 19 bp, Mus musculus
  siRNA target sequence for Olfr49 (NM_010991.1,462-480).
catagttcctagttcaatt

SEQ ID NO: 701905 - DNA, 19 bp, Mus musculus
  siRNA target sequence for Olfr49 (NM_010991.1,466-484).
gttcctagttcaattgtat

SEQ ID NO: 701906 - DNA, 19 bp, Mus musculus
  siRNA target sequence for Olfr49 (NM_010991.1,470-488).
ctagttcaattgtatttca

SEQ ID NO: 701907 - DNA, 19 bp, Mus musculus
  siRNA target sequence for Olfr49 (NM_010991.1,541-559).
ccacttatggaactcatat

SEQ ID NO: 701908 - DNA, 19 bp, Mus musculus
  siRNA target sequence for Olfr49 (NM_010991.1,649-667).
ggccacattctctatacca

SEQ ID NO: 701909 - DNA, 19 bp, Mus musculus
  siRNA target sequence for Olfr49 (NM_010991.1,650-668).
gccacattctctataccat

SEQ ID NO: 701910 - DNA, 19 bp, Mus musculus
  siRNA target sequence for Olfr49 (NM_010991.1,651-669).
ccacattctctataccatt

SEQ ID NO: 701911 - DNA, 19 bp, Mus musculus
  siRNA target sequence for Olfr49 (NM_010991.1,790-808).
ggacagggggaggatcata

SEQ ID NO: 701912 - DNA, 19 bp, Mus musculus
  siRNA target sequence for Olfr49 (NM_010991.1,791-809).
gacagggggaggatcataa

SEQ ID NO: 701913 - DNA, 19 bp, Mus musculus
  siRNA target sequence for Sqstm1 (NM_011018.1,288-306).
ggctatgtcctatgtgaaa

SEQ ID NO: 701914 - DNA, 19 bp, Mus musculus
  siRNA target sequence for Sqstm1 (NM_011018.1,290-308).
ctatgtcctatgtgaaaga

SEQ ID NO: 701915 - DNA, 19 bp, Mus musculus
  siRNA target sequence for Sqstm1 (NM_011018.1,296-314).
cctatgtgaaagatgacat

SEQ ID NO: 701916 - DNA, 19 bp, Mus musculus
  siRNA target sequence for Sqstm1 (NM_011018.1,319-337).
cgcatctacattaaagaga

SEQ ID NO: 701917 - DNA, 19 bp, Mus musculus
  siRNA target sequence for Sqstm1 (NM_011018.1,439-457).
gtgggaactcgctataagt

SEQ ID NO: 701918 - DNA, 19 bp, Mus musculus
  siRNA target sequence for Sqstm1 (NM_011018.1,551-569).
gccacctctctgatagctt

SEQ ID NO: 701919 - DNA, 19 bp, Mus musculus
  siRNA target sequence for Sqstm1 (NM_011018.1,594-612).
gctgaaacatggacacttt

SEQ ID NO: 701920 - DNA, 19 bp, Mus musculus
  siRNA target sequence for Sqstm1 (NM_011018.1,788-806).
gcattgaggttgacattga

SEQ ID NO: 701921 - DNA, 19 bp, Mus musculus
  siRNA target sequence for Sqstm1 (NM_011018.1,841-859).
cccactaccccagaaagtt

SEQ ID NO: 701922 - DNA, 19 bp, Mus musculus
  siRNA target sequence for Sqstm1 (NM_011018.1,1042-1060).
gacgatgactggacacatt

SEQ ID NO: 701923 - DNA, 19 bp, Mus musculus
  siRNA target sequence for Sqstm1 (NM_011018.1,1045-1063).
gatgactggacacatttgt

SEQ ID NO: 701924 - DNA, 19 bp, Mus musculus
  siRNA target sequence for Ott (NM_011022.1,85-103).
ccatgaagacgaaattaga

SEQ ID NO: 701925 - DNA, 19 bp, Mus musculus
  siRNA target sequence for Pax2 (NM_011037.2,307-325).
cgacagaacccgactatgt

SEQ ID NO: 701926 - DNA, 19 bp, Mus musculus
  siRNA target sequence for Pax2 (NM_011037.2,308-326).
gacagaacccgactatgtt

SEQ ID NO: 701927 - DNA, 19 bp, Mus musculus
  siRNA target sequence for Pax2 (NM_011037.2,357-375).
cgagggcatctgcgataat

SEQ ID NO: 701928 - DNA, 19 bp, Mus musculus
  siRNA target sequence for Pax2 (NM_011037.2,605-623).
gcgaggaagtcgaggtata

SEQ ID NO: 701929 - DNA, 19 bp, Mus musculus
  siRNA target sequence for Pax2 (NM_011037.2,609-627).
ggaagtcgaggtatacact

SEQ ID NO: 701930 - DNA, 19 bp, Mus musculus
  siRNA target sequence for Pax2 (NM_011037.2,693-711).
gggctctgtccctaatgga

SEQ ID NO: 701931 - DNA, 19 bp, Mus musculus
  siRNA target sequence for Pax2 (NM_011037.2,831-849).
ggcatcagagcacatcaaa

SEQ ID NO: 701932 - DNA, 19 bp, Mus musculus
  siRNA target sequence for Pax2 (NM_011037.2,832-850).
gcatcagagcacatcaaat

SEQ ID NO: 701933 - DNA, 19 bp, Mus musculus
  siRNA target sequence for Pax2 (NM_011037.2,851-869).
cagaacaggggaatgaata

SEQ ID NO: 701934 - DNA, 19 bp, Mus musculus
  siRNA target sequence for Pax2 (NM_011037.2,853-871).
gaacaggggaatgaatact

SEQ ID NO: 701935 - DNA, 19 bp, Mus musculus
  siRNA target sequence for Pax2 (NM_011037.2,885-903).
gacccctgggcttgatgaa

SEQ ID NO: 701936 - DNA, 19 bp, Mus musculus
  siRNA target sequence for Pax2 (NM_011037.2,887-905).
cccctgggcttgatgaagt

SEQ ID NO: 701937 - DNA, 19 bp, Mus musculus
  siRNA target sequence for Pax2 (NM_011037.2,890-908).
ctgggcttgatgaagtcaa

SEQ ID NO: 701938 - DNA, 19 bp, Mus musculus
  siRNA target sequence for Pax2 (NM_011037.2,979-997).
gtgaccggtcgtgatatga

SEQ ID NO: 701939 - DNA, 19 bp, Mus musculus
  siRNA target sequence for Pax2 (NM_011037.2,1122-1140).
ccagtacaccgcctacaat

SEQ ID NO: 701940 - DNA, 19 bp, Mus musculus
  siRNA target sequence for Pex11a (NM_011068.1,214-232).
gtgagcactggccgtaaat

SEQ ID NO: 701941 - DNA, 19 bp, Mus musculus
  siRNA target sequence for Pex11a (NM_011068.1,218-236).
gcactggccgtaaatggtt

SEQ ID NO: 701942 - DNA, 19 bp, Mus musculus
  siRNA target sequence for Pex11a (NM_011068.1,306-324).
ccgcttatgcctgacatta

SEQ ID NO: 701943 - DNA, 19 bp, Mus musculus
  siRNA target sequence for Pex11a (NM_011068.1,330-348).
cctcaaccgcgtggtttat

SEQ ID NO: 701944 - DNA, 19 bp, Mus musculus
  siRNA target sequence for Pex11a (NM_011068.1,331-349).
ctcaaccgcgtggtttatt

SEQ ID NO: 701945 - DNA, 19 bp, Mus musculus
  siRNA target sequence for Pex11a (NM_011068.1,337-355).
cgcgtggtttattacatct

SEQ ID NO: 701946 - DNA, 19 bp, Mus musculus
  siRNA target sequence for Pex11a (NM_011068.1,428-446).
cggctcgccattactacta

SEQ ID NO: 701947 - DNA, 19 bp, Mus musculus
  siRNA target sequence for Pex11a (NM_011068.1,430-448).
gctcgccattactactact

SEQ ID NO: 701948 - DNA, 19 bp, Mus musculus
  siRNA target sequence for Pex11a (NM_011068.1,461-479).
gcctggtccgggatctgta

SEQ ID NO: 701949 - DNA, 19 bp, Mus musculus
  siRNA target sequence for Pex11a (NM_011068.1,462-480).
cctggtccgggatctgtat

SEQ ID NO: 701950 - DNA, 19 bp, Mus musculus
  siRNA target sequence for Pex11a (NM_011068.1,466-484).
gtccgggatctgtatgaga

SEQ ID NO: 701951 - DNA, 19 bp, Mus musculus
  siRNA target sequence for Pex11a (NM_011068.1,604-622).
ctcctattccagtctctaa

SEQ ID NO: 701952 - DNA, 19 bp, Mus musculus
  siRNA target sequence for Pex11a (NM_011068.1,755-773).
gtctcctcacggtagtgta

SEQ ID NO: 701953 - DNA, 19 bp, Mus musculus
  siRNA target sequence for Pex11b (NM_011069.2,163-181).
gggctagtcccgagttaca

SEQ ID NO: 701954 - DNA, 19 bp, Mus musculus
  siRNA target sequence for Pex11b (NM_011069.2,165-183).
gctagtcccgagttacaga

SEQ ID NO: 701955 - DNA, 19 bp, Mus musculus
  siRNA target sequence for Pex11b (NM_011069.2,169-187).
gtcccgagttacagaaaca

SEQ ID NO: 701956 - DNA, 19 bp, Mus musculus
  siRNA target sequence for Pex11b (NM_011069.2,289-307).
cagatgtcgttctgagatt

SEQ ID NO: 701957 - DNA, 19 bp, Mus musculus
  siRNA target sequence for Pex11b (NM_011069.2,391-409).
cccgagtggaccaggaaaa

SEQ ID NO: 701958 - DNA, 19 bp, Mus musculus
  siRNA target sequence for Pex11b (NM_011069.2,393-411).
cgagtggaccaggaaaagt

SEQ ID NO: 701959 - DNA, 19 bp, Mus musculus
  siRNA target sequence for Pex11b (NM_011069.2,415-433).
cacagcgttcattcagata

SEQ ID NO: 701960 - DNA, 19 bp, Mus musculus
  siRNA target sequence for Pex11b (NM_011069.2,417-435).
cagcgttcattcagatact

SEQ ID NO: 701961 - DNA, 19 bp, Mus musculus
  siRNA target sequence for Pex11b (NM_011069.2,419-437).
gcgttcattcagatactat

SEQ ID NO: 701962 - DNA, 19 bp, Mus musculus
  siRNA target sequence for Pex11b (NM_011069.2,440-458).
gttttccctcatcatgaat

SEQ ID NO: 701963 - DNA, 19 bp, Mus musculus
  siRNA target sequence for Pex11b (NM_011069.2,463-481).
gccgtgatgcttatgagat

SEQ ID NO: 701964 - DNA, 19 bp, Mus musculus
  siRNA target sequence for Pex11b (NM_011069.2,464-482).
ccgtgatgcttatgagatt

SEQ ID NO: 701965 - DNA, 19 bp, Mus musculus
  siRNA target sequence for Pex11b (NM_011069.2,484-502).
gcctattgatggaacaaga

SEQ ID NO: 701966 - DNA, 19 bp, Mus musculus
  siRNA target sequence for Pex11b (NM_011069.2,548-566).
ctcaggaggagtagaaact

SEQ ID NO: 701967 - DNA, 19 bp, Mus musculus
  siRNA target sequence for Pex11b (NM_011069.2,606-624).
ccacaactggctttgaagt

SEQ ID NO: 701968 - DNA, 19 bp, Mus musculus
  siRNA target sequence for Pex11b (NM_011069.2,607-625).
cacaactggctttgaagtt

SEQ ID NO: 701969 - DNA, 19 bp, Mus musculus
  siRNA target sequence for Pex11b (NM_011069.2,713-731).
catcccactggacaaacta

SEQ ID NO: 701970 - DNA, 19 bp, Mus musculus
  siRNA target sequence for Phxr1 (NM_011080.1,56-74).
cgtatgagttatacttaca

SEQ ID NO: 701971 - DNA, 19 bp, Mus musculus
  siRNA target sequence for Phxr1 (NM_011080.1,57-75).
gtatgagttatacttacat

SEQ ID NO: 701972 - DNA, 19 bp, Mus musculus
  siRNA target sequence for Pira1 (NM_011087.1,305-323).
cctacagcacccagtataa

SEQ ID NO: 701973 - DNA, 19 bp, Mus musculus
  siRNA target sequence for Pira1 (NM_011087.1,306-324).
ctacagcacccagtataaa

SEQ ID NO: 701974 - DNA, 19 bp, Mus musculus
  siRNA target sequence for Pira1 (NM_011087.1,309-327).
cagcacccagtataaatca

SEQ ID NO: 701975 - DNA, 19 bp, Mus musculus
  siRNA target sequence for Pira1 (NM_011087.1,517-535).
cagtataattactctacaa

SEQ ID NO: 701976 - DNA, 19 bp, Mus musculus
  siRNA target sequence for Pira4 (NM_011091.1,503-521).
gatgcaagactcacaatat

SEQ ID NO: 701977 - DNA, 19 bp, Mus musculus
  siRNA target sequence for Pira4 (NM_011091.1,516-534).
caatataacaactctacaa

SEQ ID NO: 701978 - DNA, 19 bp, Mus musculus
  siRNA target sequence for Plk (NM_011121.2,570-588).
ccccactggcgaaagaaat

SEQ ID NO: 701979 - DNA, 19 bp, Mus musculus
  siRNA target sequence for Plk (NM_011121.2,712-730).
caagatcgtgcctaagtct

SEQ ID NO: 701980 - DNA, 19 bp, Mus musculus
  siRNA target sequence for Plk (NM_011121.2,1062-1080).
caaccaaagtggaatatga

SEQ ID NO: 701981 - DNA, 19 bp, Mus musculus
  siRNA target sequence for Plk (NM_011121.2,1874-1892).
cccaattccttgatgaaga

SEQ ID NO: 701982 - DNA, 19 bp, Mus musculus
  siRNA target sequence for Plk (NM_011121.2,1894-1912).
gatcactctcctcaactat

SEQ ID NO: 701983 - DNA, 19 bp, Mus musculus
  siRNA target sequence for Plk (NM_011121.2,2112-2130).
cagcggtgacctacatcaa

SEQ ID NO: 701984 - DNA, 19 bp, Mus musculus
  siRNA target sequence for Prg (NM_011157.1,196-214).
gaccacagtttgacctaat

SEQ ID NO: 701985 - DNA, 19 bp, Mus musculus
  siRNA target sequence for Prg (NM_011157.1,209-227).
cctaatagatgaatccaat

SEQ ID NO: 701986 - DNA, 19 bp, Mus musculus
  siRNA target sequence for Prg (NM_011157.1,210-228).
ctaatagatgaatccaata

SEQ ID NO: 701987 - DNA, 19 bp, Mus musculus
  siRNA target sequence for Prg (NM_011157.1,230-248).
catcggccctcccatgaat

SEQ ID NO: 701988 - DNA, 19 bp, Mus musculus
  siRNA target sequence for Prg (NM_011157.1,233-251).
cggccctcccatgaataat

SEQ ID NO: 701989 - DNA, 19 bp, Mus musculus
  siRNA target sequence for Prg (NM_011157.1,236-254).
ccctcccatgaataatcct

SEQ ID NO: 701990 - DNA, 19 bp, Mus musculus
  siRNA target sequence for Prg (NM_011157.1,241-259).
ccatgaataatcctgtttt

SEQ ID NO: 701991 - DNA, 19 bp, Mus musculus
  siRNA target sequence for Prg (NM_011157.1,267-285).
ggaccctcaaaagatttca

SEQ ID NO: 701992 - DNA, 19 bp, Mus musculus
  siRNA target sequence for Prg (NM_011157.1,268-286).
gaccctcaaaagatttcat

SEQ ID NO: 701993 - DNA, 19 bp, Mus musculus
  siRNA target sequence for Prg (NM_011157.1,389-407).
ggaataccagccaacagat

SEQ ID NO: 701994 - DNA, 19 bp, Mus musculus
  siRNA target sequence for Prg (NM_011157.1,398-416).
gccaacagatgaaagcaat

SEQ ID NO: 701995 - DNA, 19 bp, Mus musculus
  siRNA target sequence for Prg (NM_011157.1,403-421).
cagatgaaagcaatattgt

SEQ ID NO: 701996 - DNA, 19 bp, Mus musculus
  siRNA target sequence for Prg (NM_011157.1,438-456).
ccttttgacaggattctca

SEQ ID NO: 701997 - DNA, 19 bp, Mus musculus
  siRNA target sequence for Prg (NM_011157.1,448-466).
ggattctcactgagcaaaa

SEQ ID NO: 701998 - DNA, 19 bp, Mus musculus
  siRNA target sequence for Prg (NM_011157.1,474-492).
caaccagaagacgatttta

SEQ ID NO: 701999 - DNA, 19 bp, Mus musculus
  siRNA target sequence for Prg (NM_011157.1,478-496).
cagaagacgattttattat

SEQ ID NO: 702000 - DNA, 19 bp, Mus musculus
  siRNA target sequence for Ptcra (NM_011195.1,392-410).
gctctccttgccttctgaa

SEQ ID NO: 702001 - DNA, 19 bp, Mus musculus
  siRNA target sequence for Ptcra (NM_011195.1,693-711).
cctcccacccacagaattt

SEQ ID NO: 702002 - DNA, 19 bp, Mus musculus
  siRNA target sequence for Pvt1 (NM_011222.1,70-88).
caagagcatttgtgagtat

SEQ ID NO: 702003 - DNA, 19 bp, Mus musculus
  siRNA target sequence for Pvt1 (NM_011222.1,118-136).
gtgcatcccagctataact

SEQ ID NO: 702004 - DNA, 19 bp, Mus musculus
  siRNA target sequence for Pvt1 (NM_011222.1,120-138).
gcatcccagctataactaa

SEQ ID NO: 702005 - DNA, 19 bp, Mus musculus
  siRNA target sequence for Pvt1 (NM_011222.1,124-142).
cccagctataactaaatca

SEQ ID NO: 702006 - DNA, 19 bp, Mus musculus
  siRNA target sequence for Pvt1 (NM_011222.1,182-200).
gattcacaggctttgatat

SEQ ID NO: 702007 - DNA, 19 bp, Mus musculus
  siRNA target sequence for Rad9 (NM_011237.1,502-520).
gcctcatgccctcacttat

SEQ ID NO: 702008 - DNA, 19 bp, Mus musculus
  siRNA target sequence for Rad9 (NM_011237.1,503-521).
cctcatgccctcacttatt

SEQ ID NO: 702009 - DNA, 19 bp, Mus musculus
  siRNA target sequence for Rad9 (NM_011237.1,781-799).
gcgaatttgcctcttacta

SEQ ID NO: 702010 - DNA, 19 bp, Mus musculus
  siRNA target sequence for Rad9 (NM_011237.1,782-800).
cgaatttgcctcttactat

SEQ ID NO: 702011 - DNA, 19 bp, Mus musculus
  siRNA target sequence for Rad9 (NM_011237.1,821-839).
ggccagtcatctttactat

SEQ ID NO: 702012 - DNA, 19 bp, Mus musculus
  siRNA target sequence for Rad9 (NM_011237.1,822-840).
gccagtcatctttactatt

SEQ ID NO: 702013 - DNA, 19 bp, Mus musculus
  siRNA target sequence for Rad9 (NM_011237.1,959-977).
gcacaccccacttagatga

SEQ ID NO: 702014 - DNA, 19 bp, Mus musculus
  siRNA target sequence for Rad9 (NM_011237.1,962-980).
caccccacttagatgactt

SEQ ID NO: 702015 - DNA, 19 bp, Mus musculus
  siRNA target sequence for Rad9 (NM_011237.1,967-985).
cacttagatgactttacca

SEQ ID NO: 702016 - DNA, 19 bp, Mus musculus
  siRNA target sequence for Rad9 (NM_011237.1,986-1004).
gtgatgacattgactgtta

SEQ ID NO: 702017 - DNA, 19 bp, Mus musculus
  siRNA target sequence for Rbig1 (NM_011248.1,293-311).
gggtacttggagttacctt

SEQ ID NO: 702018 - DNA, 19 bp, Mus musculus
  siRNA target sequence for Rbig1 (NM_011248.1,699-717).
gggagccagctgtaatgga

SEQ ID NO: 702019 - DNA, 19 bp, Mus musculus
  siRNA target sequence for Rbig1 (NM_011248.1,700-718).
ggagccagctgtaatggaa

SEQ ID NO: 702020 - DNA, 19 bp, Mus musculus
  siRNA target sequence for Rbig1 (NM_011248.1,971-989).
gctgatgcccctgtgaatt

SEQ ID NO: 702021 - DNA, 19 bp, Mus musculus
  siRNA target sequence for Rbig1 (NM_011248.1,972-990).
ctgatgcccctgtgaattt

SEQ ID NO: 702022 - DNA, 19 bp, Mus musculus
  siRNA target sequence for Rbig1 (NM_011248.1,1193-1211).
gtcccaccacaatttgtga

SEQ ID NO: 702023 - DNA, 19 bp, Mus musculus
  siRNA target sequence for Rbig1 (NM_011248.1,1239-1257).
ccggagcaaacgtgtcatt

SEQ ID NO: 702024 - DNA, 19 bp, Mus musculus
  siRNA target sequence for Rbig1 (NM_011248.1,1244-1262).
gcaaacgtgtcattccaat

SEQ ID NO: 702025 - DNA, 19 bp, Mus musculus
  siRNA target sequence for Rbig1 (NM_011248.1,1259-1277).
caatgtgagaccaaaggaa

SEQ ID NO: 702026 - DNA, 19 bp, Mus musculus
  siRNA target sequence for Rbig1 (NM_011248.1,1311-1329).
ggagtcaagtcctgctttt

SEQ ID NO: 702027 - DNA, 19 bp, Mus musculus
  siRNA target sequence for Rbig1 (NM_011248.1,1384-1402).
gctcaacatcactgaagta

SEQ ID NO: 702028 - DNA, 19 bp, Mus musculus
  siRNA target sequence for Rbig1 (NM_011248.1,1459-1477).
cctagcaaaggccctatta

SEQ ID NO: 702029 - DNA, 19 bp, Mus musculus
  siRNA target sequence for Rbig1 (NM_011248.1,1468-1486).
ggccctattagagataaaa

SEQ ID NO: 702030 - DNA, 19 bp, Mus musculus
  siRNA target sequence for Rbig1 (NM_011248.1,1571-1589).
ccatgcagagtgattggaa

SEQ ID NO: 702031 - DNA, 19 bp, Mus musculus
  siRNA target sequence for Rbig1 (NM_011248.1,1638-1656).
gggatgactcacagttcaa

SEQ ID NO: 702032 - DNA, 19 bp, Mus musculus
  siRNA target sequence for Rbig1 (NM_011248.1,1640-1658).
gatgactcacagttcaact

SEQ ID NO: 702033 - DNA, 19 bp, Mus musculus
  siRNA target sequence for Rbig1 (NM_011248.1,1643-1661).
gactcacagttcaacttaa

SEQ ID NO: 702034 - DNA, 19 bp, Mus musculus
  siRNA target sequence for Rbig1 (NM_011248.1,1647-1665).
cacagttcaacttaatgga

SEQ ID NO: 702035 - DNA, 19 bp, Mus musculus
  siRNA target sequence for Rbig1 (NM_011248.1,1742-1760).
ggggaggccacatggaata

SEQ ID NO: 702036 - DNA, 19 bp, Mus musculus
  siRNA target sequence for Rbig1 (NM_011248.1,1755-1773).
ggaatagctggcttaggaa

SEQ ID NO: 702037 - DNA, 19 bp, Mus musculus
  siRNA target sequence for Rbig1 (NM_011248.1,1765-1783).
gcttaggaagcaagaagat

SEQ ID NO: 702038 - DNA, 19 bp, Mus musculus
  siRNA target sequence for Rbig1 (NM_011248.1,1859-1877).
gtaaccgcaaacagcatta

SEQ ID NO: 702039 - DNA, 19 bp, Mus musculus
  siRNA target sequence for Rbig1 (NM_011248.1,1983-2001).
gggtgcagctggaaactta

SEQ ID NO: 702040 - DNA, 19 bp, Mus musculus
  siRNA target sequence for Rbig1 (NM_011248.1,2021-2039).
cccaacaccatctacttat

SEQ ID NO: 702041 - DNA, 19 bp, Mus musculus
  siRNA target sequence for Rbig1 (NM_011248.1,2022-2040).
ccaacaccatctacttatt

SEQ ID NO: 702042 - DNA, 19 bp, Mus musculus
  siRNA target sequence for Rbig1 (NM_011248.1,2026-2044).
caccatctacttattccta

SEQ ID NO: 702043 - DNA, 19 bp, Mus musculus
  siRNA target sequence for Rbig1 (NM_011248.1,2299-2317).
gggaagctggacaatgcta

SEQ ID NO: 702044 - DNA, 19 bp, Mus musculus
  siRNA target sequence for Rbig1 (NM_011248.1,2420-2438).
gctgaaagcccttttgtga

SEQ ID NO: 702045 - DNA, 19 bp, Mus musculus
  siRNA target sequence for Rbig1 (NM_011248.1,2562-2580).
gggtcatcactgaatacca

SEQ ID NO: 702046 - DNA, 19 bp, Mus musculus
  siRNA target sequence for Rbig1 (NM_011248.1,2606-2624).
cgattccacctcaatcgat

SEQ ID NO: 702047 - DNA, 19 bp, Mus musculus
  siRNA target sequence for Rbig1 (NM_011248.1,3119-3137).
cctgatccagatgatagat

SEQ ID NO: 702048 - DNA, 19 bp, Mus musculus
  siRNA target sequence for Rbig1 (NM_011248.1,3120-3138).
ctgatccagatgatagata

SEQ ID NO: 702049 - DNA, 19 bp, Mus musculus
  siRNA target sequence for Rbig1 (NM_011248.1,3126-3144).
cagatgatagatactacaa

SEQ ID NO: 702050 - DNA, 19 bp, Mus musculus
  siRNA target sequence for Rbig1 (NM_011248.1,3368-3386).
ctgggcaagcctgtacaaa

SEQ ID NO: 702051 - DNA, 19 bp, Mus musculus
  siRNA target sequence for Rbig1 (NM_011248.1,3380-3398).
gtacaaatgccatctttga

SEQ ID NO: 702052 - DNA, 19 bp, Mus musculus
  siRNA target sequence for Rbig1 (NM_011248.1,3589-3607).
ccccacttcttcttatgga

SEQ ID NO: 702053 - DNA, 19 bp, Mus musculus
  siRNA target sequence for Rbig1 (NM_011248.1,3610-3628).
gcagtccacagctactctt

SEQ ID NO: 702054 - DNA, 19 bp, Mus musculus
  siRNA target sequence for Rbig1 (NM_011248.1,3811-3829).
cagtcctgtccctagtaca

SEQ ID NO: 702055 - DNA, 19 bp, Mus musculus
  siRNA target sequence for Rest (NM_011263.1,32-50).
gaggaggcagtctcttcaa

SEQ ID NO: 702056 - DNA, 19 bp, Mus musculus
  siRNA target sequence for Rest (NM_011263.1,34-52).
ggaggcagtctcttcaaca

SEQ ID NO: 702057 - DNA, 19 bp, Mus musculus
  siRNA target sequence for Rest (NM_011263.1,74-92).
ccttaaccaacgacatgta

SEQ ID NO: 702058 - DNA, 19 bp, Mus musculus
  siRNA target sequence for Rest (NM_011263.1,128-146).
cccctcagctcatcatgtt

SEQ ID NO: 702059 - DNA, 19 bp, Mus musculus
  siRNA target sequence for Rest (NM_011263.1,212-230).
ggcagatggccgaattgat

SEQ ID NO: 702060 - DNA, 19 bp, Mus musculus
  siRNA target sequence for Rest (NM_011263.1,368-386).
cagctgccccagaaatata

SEQ ID NO: 702061 - DNA, 19 bp, Mus musculus
  siRNA target sequence for Rest (NM_011263.1,416-434).
cacccgtggcggaagacaa

SEQ ID NO: 702062 - DNA, 19 bp, Mus musculus
  siRNA target sequence for Rest (NM_011263.1,418-436).
cccgtggcggaagacaaat

SEQ ID NO: 702063 - DNA, 19 bp, Mus musculus
  siRNA target sequence for Rest (NM_011263.1,421-439).
gtggcggaagacaaatgca

SEQ ID NO: 702064 - DNA, 19 bp, Mus musculus
  siRNA target sequence for Rest (NM_011263.1,430-448).
gacaaatgcaggagttcta

SEQ ID NO: 702065 - DNA, 19 bp, Mus musculus
  siRNA target sequence for Rest (NM_011263.1,480-498).
gtacgaagccgaatctgaa

SEQ ID NO: 702066 - DNA, 19 bp, Mus musculus
  siRNA target sequence for Rest (NM_011263.1,511-529).
catcacatccggattcaca

SEQ ID NO: 702067 - DNA, 19 bp, Mus musculus
  siRNA target sequence for Rest (NM_011263.1,521-539).
ggattcacagcgctaagaa

SEQ ID NO: 702068 - DNA, 19 bp, Mus musculus
  siRNA target sequence for Rest (NM_011263.1,528-546).
cagcgctaagaagttcttt

SEQ ID NO: 702069 - DNA, 19 bp, Mus musculus
  siRNA target sequence for Rest (NM_011263.1,530-548).
gcgctaagaagttctttgt

SEQ ID NO: 702070 - DNA, 19 bp, Mus musculus
  siRNA target sequence for Rest (NM_011263.1,881-899).
caggagaacgcccgtataa

SEQ ID NO: 702071 - DNA, 19 bp, Mus musculus
  siRNA target sequence for Rest (NM_011263.1,883-901).
ggagaacgcccgtataaat

SEQ ID NO: 702072 - DNA, 19 bp, Mus musculus
  siRNA target sequence for Rest (NM_011263.1,891-909).
cccgtataaatgtgaactt

SEQ ID NO: 702073 - DNA, 19 bp, Mus musculus
  siRNA target sequence for Rest (NM_011263.1,924-942).
ctctcagaagactcatcta

SEQ ID NO: 702074 - DNA, 19 bp, Mus musculus
  siRNA target sequence for Rest (NM_011263.1,946-964).
cgacacatgcggactcatt

SEQ ID NO: 702075 - DNA, 19 bp, Mus musculus
  siRNA target sequence for Rest (NM_011263.1,986-1004).
gtgatcagtgcaattatgt

SEQ ID NO: 702076 - DNA, 19 bp, Mus musculus
  siRNA target sequence for Rest (NM_011263.1,996-1014).
caattatgtggcctctaat

SEQ ID NO: 702077 - DNA, 19 bp, Mus musculus
  siRNA target sequence for Rest (NM_011263.1,1054-1072).
gggcctaaacctcttaatt

SEQ ID NO: 702078 - DNA, 19 bp, Mus musculus
  siRNA target sequence for Rest (NM_011263.1,1074-1092).
cccgcactgtgactacaaa

SEQ ID NO: 702079 - DNA, 19 bp, Mus musculus
  siRNA target sequence for Rest (NM_011263.1,1075-1093).
ccgcactgtgactacaaaa

SEQ ID NO: 702080 - DNA, 19 bp, Mus musculus
  siRNA target sequence for Rest (NM_011263.1,1103-1121).
gaagcaacttcaaaaagca

SEQ ID NO: 702081 - DNA, 19 bp, Mus musculus
  siRNA target sequence for Rest (NM_011263.1,1166-1184).
gtgactacgcggcttctaa

SEQ ID NO: 702082 - DNA, 19 bp, Mus musculus
  siRNA target sequence for Rest (NM_011263.1,1168-1186).
gactacgcggcttctaaga

SEQ ID NO: 702083 - DNA, 19 bp, Mus musculus
  siRNA target sequence for Rest (NM_011263.1,1178-1196).
cttctaagaagtgtaatct

SEQ ID NO: 702084 - DNA, 19 bp, Mus musculus
  siRNA target sequence for Rest (NM_011263.1,1181-1199).
ctaagaagtgtaatctaca

SEQ ID NO: 702085 - DNA, 19 bp, Mus musculus
  siRNA target sequence for Rest (NM_011263.1,1188-1206).
gtgtaatctacaataccat

SEQ ID NO: 702086 - DNA, 19 bp, Mus musculus
  siRNA target sequence for Rest (NM_011263.1,1190-1208).
gtaatctacaataccattt

SEQ ID NO: 702087 - DNA, 19 bp, Mus musculus
  siRNA target sequence for Rest (NM_011263.1,1222-1240).
cccacctgtcccagcaaaa

SEQ ID NO: 702088 - DNA, 19 bp, Mus musculus
  siRNA target sequence for Rest (NM_011263.1,1374-1392).
cgagaaacctgtaaaagct

SEQ ID NO: 702089 - DNA, 19 bp, Mus musculus
  siRNA target sequence for Rest (NM_011263.1,1518-1536).
cggacaaacaggaaacaat

SEQ ID NO: 702090 - DNA, 19 bp, Mus musculus
  siRNA target sequence for Rest (NM_011263.1,1614-1632).
cgagggaccagtgacaaaa

SEQ ID NO: 702091 - DNA, 19 bp, Mus musculus
  siRNA target sequence for Rest (NM_011263.1,1615-1633).
gagggaccagtgacaaaaa

SEQ ID NO: 702092 - DNA, 19 bp, Mus musculus
  siRNA target sequence for Rest (NM_011263.1,1641-1659).
gaagtctgagtgcaaatca

SEQ ID NO: 702093 - DNA, 19 bp, Mus musculus
  siRNA target sequence for Rest (NM_011263.1,1644-1662).
gtctgagtgcaaatcaaaa

SEQ ID NO: 702094 - DNA, 19 bp, Mus musculus
  siRNA target sequence for Rest (NM_011263.1,1723-1741).
caaagcgcttcccttaaga

SEQ ID NO: 702095 - DNA, 19 bp, Mus musculus
  siRNA target sequence for Rest (NM_011263.1,1890-1908).
caccgggtcaggatcttct

SEQ ID NO: 702096 - DNA, 19 bp, Mus musculus
  siRNA target sequence for Rest (NM_011263.1,1988-2006).
cggtggagcctgctcaaat

SEQ ID NO: 702097 - DNA, 19 bp, Mus musculus
  siRNA target sequence for Rest (NM_011263.1,2283-2301).
cgtggagcccgctcagatt

SEQ ID NO: 702098 - DNA, 19 bp, Mus musculus
  siRNA target sequence for Rest (NM_011263.1,2368-2386).
gtgaagccaaccaaaagat

SEQ ID NO: 702099 - DNA, 19 bp, Mus musculus
  siRNA target sequence for Rest (NM_011263.1,2370-2388).
gaagccaaccaaaagatca

SEQ ID NO: 702100 - DNA, 19 bp, Mus musculus
  siRNA target sequence for Rest (NM_011263.1,2605-2623).
ggggaaggaactatagtat

SEQ ID NO: 702101 - DNA, 19 bp, Mus musculus
  siRNA target sequence for Rest (NM_011263.1,2688-2706).
ggagtctgcccgtgtttca

SEQ ID NO: 702102 - DNA, 19 bp, Mus musculus
  siRNA target sequence for Rest (NM_011263.1,2689-2707).
gagtctgcccgtgtttcat

SEQ ID NO: 702103 - DNA, 19 bp, Mus musculus
  siRNA target sequence for Rest (NM_011263.1,2909-2927).
ctatcacgttggctgaaaa

SEQ ID NO: 702104 - DNA, 19 bp, Mus musculus
  siRNA target sequence for Rest (NM_011263.1,2928-2946).
cgagtctcaggaaattgat

SEQ ID NO: 702105 - DNA, 19 bp, Mus musculus
  siRNA target sequence for Rest (NM_011263.1,3076-3094).
gggttggctggtaaagtga

SEQ ID NO: 702106 - DNA, 19 bp, Mus musculus
  siRNA target sequence for Rest (NM_011263.1,3127-3145).
cgttcttttagaaaggaaa

SEQ ID NO: 702107 - DNA, 19 bp, Mus musculus
  siRNA target sequence for Rest (NM_011263.1,3169-3187).
cgccacttggtgaatgtgt

SEQ ID NO: 702108 - DNA, 19 bp, Mus musculus
  siRNA target sequence for Sbp (NM_011321.1,259-277).
gtaactggactgatgtcta

SEQ ID NO: 702109 - DNA, 19 bp, Mus musculus
  siRNA target sequence for Sbp (NM_011321.1,458-476).
gcatctagtgactgtcaat

SEQ ID NO: 702110 - DNA, 19 bp, Mus musculus
  siRNA target sequence for Sbp (NM_011321.1,543-561).
ggcaatgaccattataata

SEQ ID NO: 702111 - DNA, 19 bp, Mus musculus
  siRNA target sequence for Serf1 (NM_011353.1,180-198).
cccgtggaaatcaaagaga

SEQ ID NO: 702112 - DNA, 19 bp, Mus musculus
  siRNA target sequence for Shyc (NM_011370.1,327-345).
caacgagcagccgaataga

SEQ ID NO: 702113 - DNA, 19 bp, Mus musculus
  siRNA target sequence for Shyc (NM_011370.1,330-348).
cgagcagccgaatagagtt

SEQ ID NO: 702114 - DNA, 19 bp, Mus musculus
  siRNA target sequence for Shyc (NM_011370.1,333-351).
gcagccgaatagagttgaa

SEQ ID NO: 702115 - DNA, 19 bp, Mus musculus
  siRNA target sequence for Shyc (NM_011370.1,334-352).
cagccgaatagagttgaaa

SEQ ID NO: 702116 - DNA, 19 bp, Mus musculus
  siRNA target sequence for Shyc (NM_011370.1,336-354).
gccgaatagagttgaaatt

SEQ ID NO: 702117 - DNA, 19 bp, Mus musculus
  siRNA target sequence for Shyc (NM_011370.1,337-355).
ccgaatagagttgaaattt

SEQ ID NO: 702118 - DNA, 19 bp, Mus musculus
  siRNA target sequence for Shyc (NM_011370.1,383-401).
ccgaggtcacaaaactgat

SEQ ID NO: 702119 - DNA, 19 bp, Mus musculus
  siRNA target sequence for Shyc (NM_011370.1,387-405).
ggtcacaaaactgatgaat

SEQ ID NO: 702120 - DNA, 19 bp, Mus musculus
  siRNA target sequence for Shyc (NM_011370.1,388-406).
gtcacaaaactgatgaatt

SEQ ID NO: 702121 - DNA, 19 bp, Mus musculus
  siRNA target sequence for Shyc (NM_011370.1,603-621).
ggctgctcagtttttacgt

SEQ ID NO: 702122 - DNA, 19 bp, Mus musculus
  siRNA target sequence for Shyc (NM_011370.1,604-622).
gctgctcagtttttacgta

SEQ ID NO: 702123 - DNA, 19 bp, Mus musculus
  siRNA target sequence for Shyc (NM_011370.1,605-623).
ctgctcagtttttacgtaa

SEQ ID NO: 702124 - DNA, 19 bp, Mus musculus
  siRNA target sequence for Shyc (NM_011370.1,607-625).
gctcagtttttacgtaaaa

SEQ ID NO: 702125 - DNA, 19 bp, Mus musculus
  siRNA target sequence for Shyc (NM_011370.1,608-626).
ctcagtttttacgtaaaat

SEQ ID NO: 702126 - DNA, 19 bp, Mus musculus
  siRNA target sequence for Shyc (NM_011370.1,681-699).
ccacaacaagattacacaa

SEQ ID NO: 702127 - DNA, 19 bp, Mus musculus
  siRNA target sequence for Shyc (NM_011370.1,684-702).
caacaagattacacaatct

SEQ ID NO: 702128 - DNA, 19 bp, Mus musculus
  siRNA target sequence for Shyc (NM_011370.1,720-738).
ggtcatttctggctatgaa

SEQ ID NO: 702129 - DNA, 19 bp, Mus musculus
  siRNA target sequence for Shyc (NM_011370.1,748-766).
gcagacatcgtgaatctgt

SEQ ID NO: 702130 - DNA, 19 bp, Mus musculus
  siRNA target sequence for Shyc (NM_011370.1,795-813).
cttgacacccagcgaaaaa

SEQ ID NO: 702131 - DNA, 19 bp, Mus musculus
  siRNA target sequence for Shyc (NM_011370.1,814-832).
cacatgcttctcaaagtca

SEQ ID NO: 702132 - DNA, 19 bp, Mus musculus
  siRNA target sequence for Shyc (NM_011370.1,860-878).
ggagtgtgagtaacatcta

SEQ ID NO: 702133 - DNA, 19 bp, Mus musculus
  siRNA target sequence for Shyc (NM_011370.1,899-917).
gaataaatttatccaaaat

SEQ ID NO: 702134 - DNA, 19 bp, Mus musculus
  siRNA target sequence for Shyc (NM_011370.1,911-929).
ccaaaatcgacaagtattt

SEQ ID NO: 702135 - DNA, 19 bp, Mus musculus
  siRNA target sequence for Shyc (NM_011370.1,990-1008).
caagaccagcgcacactat

SEQ ID NO: 702136 - DNA, 19 bp, Mus musculus
  siRNA target sequence for Shyc (NM_011370.1,1000-1018).
gcacactatgaggagaata

SEQ ID NO: 702137 - DNA, 19 bp, Mus musculus
  siRNA target sequence for Shyc (NM_011370.1,1096-1114).
gaccatatgcgtttcatct

SEQ ID NO: 702138 - DNA, 19 bp, Mus musculus
  siRNA target sequence for Shyc (NM_011370.1,1252-1270).
cacgcgatggaagtgtatt

SEQ ID NO: 702139 - DNA, 19 bp, Mus musculus
  siRNA target sequence for Shyc (NM_011370.1,1342-1360).
cgagccacacgctacaact

SEQ ID NO: 702140 - DNA, 19 bp, Mus musculus
  siRNA target sequence for Shyc (NM_011370.1,1694-1712).
cctccagcacgcagcttta

SEQ ID NO: 702141 - DNA, 19 bp, Mus musculus
  siRNA target sequence for Shyc (NM_011370.1,1708-1726).
ctttacatggtgagaacta

SEQ ID NO: 702142 - DNA, 19 bp, Mus musculus
  siRNA target sequence for Shyc (NM_011370.1,1713-1731).
catggtgagaactatgcta

SEQ ID NO: 702143 - DNA, 19 bp, Mus musculus
  siRNA target sequence for Shyc (NM_011370.1,1734-1752).
gtccctcattgcagacaaa

SEQ ID NO: 702144 - DNA, 19 bp, Mus musculus
  siRNA target sequence for Shyc (NM_011370.1,1754-1772).
gtggttccaagaaaacctt

SEQ ID NO: 702145 - DNA, 19 bp, Mus musculus
  siRNA target sequence for Shyc (NM_011370.1,1793-1811).
ccaccatattggacataga

SEQ ID NO: 702146 - DNA, 19 bp, Mus musculus
  siRNA target sequence for Shyc (NM_011370.1,1803-1821).
ggacatagaaaaatttcat

SEQ ID NO: 702147 - DNA, 19 bp, Mus musculus
  siRNA target sequence for Shyc (NM_011370.1,1822-1840).
cgagaatcattcttctaca

SEQ ID NO: 702148 - DNA, 19 bp, Mus musculus
  siRNA target sequence for Shyc (NM_011370.1,1833-1851).
cttctacactcacttgata

SEQ ID NO: 702149 - DNA, 19 bp, Mus musculus
  siRNA target sequence for Shyc (NM_011370.1,1836-1854).
ctacactcacttgataaat

SEQ ID NO: 702150 - DNA, 19 bp, Mus musculus
  siRNA target sequence for Shyc (NM_011370.1,2088-2106).
gtttctctatgatgagatt

SEQ ID NO: 702151 - DNA, 19 bp, Mus musculus
  siRNA target sequence for Shyc (NM_011370.1,2124-2142).
gtgttttgaccaatttgtt

SEQ ID NO: 702152 - DNA, 19 bp, Mus musculus
  siRNA target sequence for Shyc (NM_011370.1,2126-2144).
gttttgaccaatttgttta

SEQ ID NO: 702153 - DNA, 19 bp, Mus musculus
  siRNA target sequence for Shyc (NM_011370.1,2153-2171).
cagaccagatatttgcata

SEQ ID NO: 702154 - DNA, 19 bp, Mus musculus
  siRNA target sequence for Shyc (NM_011370.1,2196-2214).
gcttcttgacaaaaggtta

SEQ ID NO: 702155 - DNA, 19 bp, Mus musculus
  siRNA target sequence for Shyc (NM_011370.1,2210-2228).
ggttacggtcagaatgcaa

SEQ ID NO: 702156 - DNA, 19 bp, Mus musculus
  siRNA target sequence for Shyc (NM_011370.1,2211-2229).
gttacggtcagaatgcaaa

SEQ ID NO: 702157 - DNA, 19 bp, Mus musculus
  siRNA target sequence for Shyc (NM_011370.1,2216-2234).
ggtcagaatgcaaaaatca

SEQ ID NO: 702158 - DNA, 19 bp, Mus musculus
  siRNA target sequence for Shyc (NM_011370.1,2267-2285).
gctatgagacgctgttgaa

SEQ ID NO: 702159 - DNA, 19 bp, Mus musculus
  siRNA target sequence for Shyc (NM_011370.1,2301-2319).
gctgctcgggagatccatt

SEQ ID NO: 702160 - DNA, 19 bp, Mus musculus
  siRNA target sequence for Shyc (NM_011370.1,2304-2322).
gctcgggagatccattgat

SEQ ID NO: 702161 - DNA, 19 bp, Mus musculus
  siRNA target sequence for Shyc (NM_011370.1,2320-2338).
gatctcaaccgtctgatta

SEQ ID NO: 702162 - DNA, 19 bp, Mus musculus
  siRNA target sequence for Shyc (NM_011370.1,2358-2376).
catgtacaaatctctagaa

SEQ ID NO: 702163 - DNA, 19 bp, Mus musculus
  siRNA target sequence for Shyc (NM_011370.1,2379-2397).
ggcaattggacggtttgaa

SEQ ID NO: 702164 - DNA, 19 bp, Mus musculus
  siRNA target sequence for Shyc (NM_011370.1,2389-2407).
cggtttgaaagtgaagatt

SEQ ID NO: 702165 - DNA, 19 bp, Mus musculus
  siRNA target sequence for Shyc (NM_011370.1,2390-2408).
ggtttgaaagtgaagattt

SEQ ID NO: 702166 - DNA, 19 bp, Mus musculus
  siRNA target sequence for Shyc (NM_011370.1,2395-2413).
gaaagtgaagatttaacat

SEQ ID NO: 702167 - DNA, 19 bp, Mus musculus
  siRNA target sequence for Shyc (NM_011370.1,2421-2439).
cgagctagatggactctta

SEQ ID NO: 702168 - DNA, 19 bp, Mus musculus
  siRNA target sequence for Shyc (NM_011370.1,2424-2442).
gctagatggactcttagaa

SEQ ID NO: 702169 - DNA, 19 bp, Mus musculus
  siRNA target sequence for Shyc (NM_011370.1,2425-2443).
ctagatggactcttagaaa

SEQ ID NO: 702170 - DNA, 19 bp, Mus musculus
  siRNA target sequence for Shyc (NM_011370.1,2428-2446).
gatggactcttagaaatca

SEQ ID NO: 702171 - DNA, 19 bp, Mus musculus
  siRNA target sequence for Shyc (NM_011370.1,2533-2551).
gcaccttatggaagaatta

SEQ ID NO: 702172 - DNA, 19 bp, Mus musculus
  siRNA target sequence for Shyc (NM_011370.1,2620-2638).
cggtttgttcggacagtat

SEQ ID NO: 702173 - DNA, 19 bp, Mus musculus
  siRNA target sequence for Shyc (NM_011370.1,2622-2640).
gtttgttcggacagtatta

SEQ ID NO: 702174 - DNA, 19 bp, Mus musculus
  siRNA target sequence for Shyc (NM_011370.1,2626-2644).
gttcggacagtattaccat

SEQ ID NO: 702175 - DNA, 19 bp, Mus musculus
  siRNA target sequence for Shyc (NM_011370.1,2631-2649).
gacagtattaccattttct

SEQ ID NO: 702176 - DNA, 19 bp, Mus musculus
  siRNA target sequence for Shyc (NM_011370.1,2718-2736).
cctagcctactcaagcatt

SEQ ID NO: 702177 - DNA, 19 bp, Mus musculus
  siRNA target sequence for Shyc (NM_011370.1,2915-2933).
ggcttccgcgacatgagta

SEQ ID NO: 702178 - DNA, 19 bp, Mus musculus
  siRNA target sequence for Shyc (NM_011370.1,3110-3128).
ctcctttccagaatatctt

SEQ ID NO: 702179 - DNA, 19 bp, Mus musculus
  siRNA target sequence for Shyc (NM_011370.1,3158-3176).
gagttgatgccaaaatgaa

SEQ ID NO: 702180 - DNA, 19 bp, Mus musculus
  siRNA target sequence for Shyc (NM_011370.1,3207-3225).
ccttgtcccactgattgaa

SEQ ID NO: 702181 - DNA, 19 bp, Mus musculus
  siRNA target sequence for Shyc (NM_011370.1,3241-3259).
cagcaaattgcaattgcaa

SEQ ID NO: 702182 - DNA, 19 bp, Mus musculus
  siRNA target sequence for Shyc (NM_011370.1,3406-3424).
gtggagtttcacagactat

SEQ ID NO: 702183 - DNA, 19 bp, Mus musculus
  siRNA target sequence for Shyc (NM_011370.1,3457-3475).
gtagggacacacgagttta

SEQ ID NO: 702184 - DNA, 19 bp, Mus musculus
  siRNA target sequence for Shyc (NM_011370.1,3461-3479).
ggacacacgagtttacagt

SEQ ID NO: 702185 - DNA, 19 bp, Mus musculus
  siRNA target sequence for Shyc (NM_011370.1,3510-3528).
ggctggctgcatgatcatt

SEQ ID NO: 702186 - DNA, 19 bp, Mus musculus
  siRNA target sequence for Shyc (NM_011370.1,3515-3533).
gctgcatgatcattgtact

SEQ ID NO: 702187 - DNA, 19 bp, Mus musculus
  siRNA target sequence for Shyc (NM_011370.1,3516-3534).
ctgcatgatcattgtactt

SEQ ID NO: 702188 - DNA, 19 bp, Mus musculus
  siRNA target sequence for Shyc (NM_011370.1,3561-3579).
gttggatttctgctatcat

SEQ ID NO: 702189 - DNA, 19 bp, Mus musculus
  siRNA target sequence for Shyc (NM_011370.1,3564-3582).
ggatttctgctatcatctt

SEQ ID NO: 702190 - DNA, 19 bp, Mus musculus
  siRNA target sequence for Shyc (NM_011370.1,3570-3588).
ctgctatcatcttctcaaa

SEQ ID NO: 702191 - DNA, 19 bp, Mus musculus
  siRNA target sequence for Shyc (NM_011370.1,3573-3591).
ctatcatcttctcaaagtt

SEQ ID NO: 702192 - DNA, 19 bp, Mus musculus
  siRNA target sequence for Shyc (NM_011370.1,3658-3676).
cgcaagttccagattctca

SEQ ID NO: 702193 - DNA, 19 bp, Mus musculus
  siRNA target sequence for Slfn4 (NM_011410.1,700-718).
gactcaagcgcgaaaatat

SEQ ID NO: 702194 - DNA, 19 bp, Mus musculus
  siRNA target sequence for Slfn4 (NM_011410.1,702-720).
ctcaagcgcgaaaatatgt

SEQ ID NO: 702195 - DNA, 19 bp, Mus musculus
  siRNA target sequence for Slfn4 (NM_011410.1,704-722).
caagcgcgaaaatatgtta

SEQ ID NO: 702196 - DNA, 19 bp, Mus musculus
  siRNA target sequence for Slfn4 (NM_011410.1,859-877).
gtgggcagttatatagttt

SEQ ID NO: 702197 - DNA, 19 bp, Mus musculus
  siRNA target sequence for Slp (NM_011413.1,1207-1225).
gccttggtcagagaaatat

SEQ ID NO: 702198 - DNA, 19 bp, Mus musculus
  siRNA target sequence for Slp (NM_011413.1,1232-1250).
ctgaagcctctaacgttat

SEQ ID NO: 702199 - DNA, 19 bp, Mus musculus
  siRNA target sequence for Slp (NM_011413.1,1237-1255).
gcctctaacgttattgtca

SEQ ID NO: 702200 - DNA, 19 bp, Mus musculus
  siRNA target sequence for Slp (NM_011413.1,1238-1256).
cctctaacgttattgtcaa

SEQ ID NO: 702201 - DNA, 19 bp, Mus musculus
  siRNA target sequence for Slp (NM_011413.1,1239-1257).
ctctaacgttattgtcaaa

SEQ ID NO: 702202 - DNA, 19 bp, Mus musculus
  siRNA target sequence for Slp (NM_011413.1,1241-1259).
ctaacgttattgtcaaagt

SEQ ID NO: 702203 - DNA, 19 bp, Mus musculus
  siRNA target sequence for Slp (NM_011413.1,4262-4280).
ggagcgcctacgaagacta

SEQ ID NO: 702204 - DNA, 19 bp, Mus musculus
  siRNA target sequence for Slp (NM_011413.1,4263-4281).
gagcgcctacgaagactat

SEQ ID NO: 702205 - DNA, 19 bp, Mus musculus
  siRNA target sequence for Slp (NM_011413.1,4265-4283).
gcgcctacgaagactatga

SEQ ID NO: 702206 - DNA, 19 bp, Mus musculus
  siRNA target sequence for Slp (NM_011413.1,4266-4284).
cgcctacgaagactatgaa

SEQ ID NO: 702207 - DNA, 19 bp, Mus musculus
  siRNA target sequence for Smcy (NM_011419.1,91-109).
cgatcctcttggctatata

SEQ ID NO: 702208 - DNA, 19 bp, Mus musculus
  siRNA target sequence for Smcy (NM_011419.1,96-114).
ctcttggctatatagctaa

SEQ ID NO: 702209 - DNA, 19 bp, Mus musculus
  siRNA target sequence for Smcy (NM_011419.1,101-119).
ggctatatagctaaaatca

SEQ ID NO: 702210 - DNA, 19 bp, Mus musculus
  siRNA target sequence for Smcy (NM_011419.1,103-121).
ctatatagctaaaatcaga

SEQ ID NO: 702211 - DNA, 19 bp, Mus musculus
  siRNA target sequence for Smcy (NM_011419.1,180-198).
cttttgctgtagaagttga

SEQ ID NO: 702212 - DNA, 19 bp, Mus musculus
  siRNA target sequence for Smcy (NM_011419.1,186-204).
ctgtagaagttgataactt

SEQ ID NO: 702213 - DNA, 19 bp, Mus musculus
  siRNA target sequence for Smcy (NM_011419.1,219-237).
gaattcagaggctaaatga

SEQ ID NO: 702214 - DNA, 19 bp, Mus musculus
  siRNA target sequence for Smcy (NM_011419.1,302-320).
caaggttcttccttaaaga

SEQ ID NO: 702215 - DNA, 19 bp, Mus musculus
  siRNA target sequence for Smcy (NM_011419.1,336-354).
ggaagatcttggaccttta

SEQ ID NO: 702216 - DNA, 19 bp, Mus musculus
  siRNA target sequence for Smcy (NM_011419.1,346-364).
ggacctttacagccttaat

SEQ ID NO: 702217 - DNA, 19 bp, Mus musculus
  siRNA target sequence for Smcy (NM_011419.1,357-375).
gccttaataagattgtgat

SEQ ID NO: 702218 - DNA, 19 bp, Mus musculus
  siRNA target sequence for Smcy (NM_011419.1,445-463).
cccatcagggaaaaacatt

SEQ ID NO: 702219 - DNA, 19 bp, Mus musculus
  siRNA target sequence for Smcy (NM_011419.1,481-499).
ccactacgaacggatcatt

SEQ ID NO: 702220 - DNA, 19 bp, Mus musculus
  siRNA target sequence for Smcy (NM_011419.1,482-500).
cactacgaacggatcattt

SEQ ID NO: 702221 - DNA, 19 bp, Mus musculus
  siRNA target sequence for Smcy (NM_011419.1,492-510).
ggatcatttacccttatga

SEQ ID NO: 702222 - DNA, 19 bp, Mus musculus
  siRNA target sequence for Smcy (NM_011419.1,493-511).
gatcatttacccttatgaa

SEQ ID NO: 702223 - DNA, 19 bp, Mus musculus
  siRNA target sequence for Smcy (NM_011419.1,620-638).
cagccatcaaaattcagtt

SEQ ID NO: 702224 - DNA, 19 bp, Mus musculus
  siRNA target sequence for Smcy (NM_011419.1,706-724).
cccagagctaaagaaacta

SEQ ID NO: 702225 - DNA, 19 bp, Mus musculus
  siRNA target sequence for Smcy (NM_011419.1,826-844).
gacatgccctgcaactatt

SEQ ID NO: 702226 - DNA, 19 bp, Mus musculus
  siRNA target sequence for Smcy (NM_011419.1,831-849).
gccctgcaactattgtagt

SEQ ID NO: 702227 - DNA, 19 bp, Mus musculus
  siRNA target sequence for Smcy (NM_011419.1,834-852).
ctgcaactattgtagtgaa

SEQ ID NO: 702228 - DNA, 19 bp, Mus musculus
  siRNA target sequence for Smcy (NM_011419.1,877-895).
ggtgacatcagcattttca

SEQ ID NO: 702229 - DNA, 19 bp, Mus musculus
  siRNA target sequence for Smcy (NM_011419.1,894-912).
cagacaagaacttaaatca

SEQ ID NO: 702230 - DNA, 19 bp, Mus musculus
  siRNA target sequence for Smcy (NM_011419.1,896-914).
gacaagaacttaaatcaca

SEQ ID NO: 702231 - DNA, 19 bp, Mus musculus
  siRNA target sequence for Smcy (NM_011419.1,920-938).
gaaccttgtatgaagatga

SEQ ID NO: 702232 - DNA, 19 bp, Mus musculus
  siRNA target sequence for Smcy (NM_011419.1,969-987).
cccagtttatgaattcata

SEQ ID NO: 702233 - DNA, 19 bp, Mus musculus
  siRNA target sequence for Smcy (NM_011419.1,970-988).
ccagtttatgaattcatat

SEQ ID NO: 702234 - DNA, 19 bp, Mus musculus
  siRNA target sequence for Smcy (NM_011419.1,1002-1020).
gctctcgtggggatgaagt

SEQ ID NO: 702235 - DNA, 19 bp, Mus musculus
  siRNA target sequence for Smcy (NM_011419.1,1008-1026).
gtggggatgaagtcgataa

SEQ ID NO: 702236 - DNA, 19 bp, Mus musculus
  siRNA target sequence for Smcy (NM_011419.1,1010-1028).
ggggatgaagtcgataagt

SEQ ID NO: 702237 - DNA, 19 bp, Mus musculus
  siRNA target sequence for Smcy (NM_011419.1,1011-1029).
gggatgaagtcgataagtt

SEQ ID NO: 702238 - DNA, 19 bp, Mus musculus
  siRNA target sequence for Smcy (NM_011419.1,1125-1143).
gtatcttagcagagtgtaa

SEQ ID NO: 702239 - DNA, 19 bp, Mus musculus
  siRNA target sequence for Smcy (NM_011419.1,1129-1147).
cttagcagagtgtaagagt

SEQ ID NO: 702240 - DNA, 19 bp, Mus musculus
  siRNA target sequence for Smcy (NM_011419.1,1172-1190).
caggctacacaggagtata

SEQ ID NO: 702241 - DNA, 19 bp, Mus musculus
  siRNA target sequence for Smcy (NM_011419.1,1175-1193).
gctacacaggagtatactt

SEQ ID NO: 702242 - DNA, 19 bp, Mus musculus
  siRNA target sequence for Smcy (NM_011419.1,1365-1383).
gtgggtttcctgtcaacaa

SEQ ID NO: 702243 - DNA, 19 bp, Mus musculus
  siRNA target sequence for Smcy (NM_011419.1,1367-1385).
gggtttcctgtcaacaata

SEQ ID NO: 702244 - DNA, 19 bp, Mus musculus
  siRNA target sequence for Smcy (NM_011419.1,1640-1658).
gaacacttagaggatgtaa

SEQ ID NO: 702245 - DNA, 19 bp, Mus musculus
  siRNA target sequence for Smcy (NM_011419.1,1643-1661).
cacttagaggatgtaatga

SEQ ID NO: 702246 - DNA, 19 bp, Mus musculus
  siRNA target sequence for Smcy (NM_011419.1,1824-1842).
gctttaaccaaggctataa

SEQ ID NO: 702247 - DNA, 19 bp, Mus musculus
  siRNA target sequence for Smcy (NM_011419.1,1884-1902).
ctgttggacgccagtgtat

SEQ ID NO: 702248 - DNA, 19 bp, Mus musculus
  siRNA target sequence for Smcy (NM_011419.1,1890-1908).
gacgccagtgtattgaaca

SEQ ID NO: 702249 - DNA, 19 bp, Mus musculus
  siRNA target sequence for Smcy (NM_011419.1,1976-1994).
ccagagaagttggatctaa

SEQ ID NO: 702250 - DNA, 19 bp, Mus musculus
  siRNA target sequence for Smcy (NM_011419.1,2165-2183).
gccttggcctgttatgact

SEQ ID NO: 702251 - DNA, 19 bp, Mus musculus
  siRNA target sequence for Smcy (NM_011419.1,2224-2242).
gtgcaagtgctcaaggaat

SEQ ID NO: 702252 - DNA, 19 bp, Mus musculus
  siRNA target sequence for Smcy (NM_011419.1,2257-2275).
gtacaggtacacattggat

SEQ ID NO: 702253 - DNA, 19 bp, Mus musculus
  siRNA target sequence for Smcy (NM_011419.1,2305-2323).
gattcgagctgagtcattt

SEQ ID NO: 702254 - DNA, 19 bp, Mus musculus
  siRNA target sequence for Smcy (NM_011419.1,2370-2388).
gtcggaaacggagttttga

SEQ ID NO: 702255 - DNA, 19 bp, Mus musculus
  siRNA target sequence for Smcy (NM_011419.1,2373-2391).
ggaaacggagttttgaaga

SEQ ID NO: 702256 - DNA, 19 bp, Mus musculus
  siRNA target sequence for Smcy (NM_011419.1,2390-2408).
gagctaagagcattggaat

SEQ ID NO: 702257 - DNA, 19 bp, Mus musculus
  siRNA target sequence for Smcy (NM_011419.1,2413-2431).
ggctcgtgatagacgattt

SEQ ID NO: 702258 - DNA, 19 bp, Mus musculus
  siRNA target sequence for Smcy (NM_011419.1,2417-2435).
cgtgatagacgatttccta

SEQ ID NO: 702259 - DNA, 19 bp, Mus musculus
  siRNA target sequence for Smcy (NM_011419.1,2418-2436).
gtgatagacgatttcctaa

SEQ ID NO: 702260 - DNA, 19 bp, Mus musculus
  siRNA target sequence for Smcy (NM_011419.1,2420-2438).
gatagacgatttcctaata

SEQ ID NO: 702261 - DNA, 19 bp, Mus musculus
  siRNA target sequence for Smcy (NM_011419.1,2447-2465).
cttcagcgattgaagaaat

SEQ ID NO: 702262 - DNA, 19 bp, Mus musculus
  siRNA target sequence for Smcy (NM_011419.1,2498-2516).
gttcttggactgatcagta

SEQ ID NO: 702263 - DNA, 19 bp, Mus musculus
  siRNA target sequence for Smcy (NM_011419.1,2501-2519).
cttggactgatcagtaact

SEQ ID NO: 702264 - DNA, 19 bp, Mus musculus
  siRNA target sequence for Smcy (NM_011419.1,2601-2619).
ccatgcatcagattgatga

SEQ ID NO: 702265 - DNA, 19 bp, Mus musculus
  siRNA target sequence for Smcy (NM_011419.1,2602-2620).
catgcatcagattgatgaa

SEQ ID NO: 702266 - DNA, 19 bp, Mus musculus
  siRNA target sequence for Smcy (NM_011419.1,2605-2623).
gcatcagattgatgaagtt

SEQ ID NO: 702267 - DNA, 19 bp, Mus musculus
  siRNA target sequence for Smcy (NM_011419.1,2606-2624).
catcagattgatgaagtta

SEQ ID NO: 702268 - DNA, 19 bp, Mus musculus
  siRNA target sequence for Smcy (NM_011419.1,2633-2651).
cttcaacaggtggaatcat

SEQ ID NO: 702269 - DNA, 19 bp, Mus musculus
  siRNA target sequence for Smcy (NM_011419.1,2645-2663).
gaatcataccaaattgaga

SEQ ID NO: 702270 - DNA, 19 bp, Mus musculus
  siRNA target sequence for Smcy (NM_011419.1,2662-2680).
gacccgtgaggctctaact

SEQ ID NO: 702271 - DNA, 19 bp, Mus musculus
  siRNA target sequence for Smcy (NM_011419.1,2686-2704).
gccttacagtttagaaata

SEQ ID NO: 702272 - DNA, 19 bp, Mus musculus
  siRNA target sequence for Smcy (NM_011419.1,2785-2803).
ggcacaatggctagatcaa

SEQ ID NO: 702273 - DNA, 19 bp, Mus musculus
  siRNA target sequence for Smcy (NM_011419.1,2831-2849).
cagaggcactctttggtta

SEQ ID NO: 702274 - DNA, 19 bp, Mus musculus
  siRNA target sequence for Smcy (NM_011419.1,2851-2869).
catgaagaagcttttagtt

SEQ ID NO: 702275 - DNA, 19 bp, Mus musculus
  siRNA target sequence for Smcy (NM_011419.1,2933-2951).
ctgactattgcagaatgtt

SEQ ID NO: 702276 - DNA, 19 bp, Mus musculus
  siRNA target sequence for Smcy (NM_011419.1,2953-2971).
ggaggaaaaggcccatttt

SEQ ID NO: 702277 - DNA, 19 bp, Mus musculus
  siRNA target sequence for Smcy (NM_011419.1,2957-2975).
gaaaaggcccatttttgct

SEQ ID NO: 702278 - DNA, 19 bp, Mus musculus
  siRNA target sequence for Smcy (NM_011419.1,3002-3020).
gccactttggaagttataa

SEQ ID NO: 702279 - DNA, 19 bp, Mus musculus
  siRNA target sequence for Smcy (NM_011419.1,3003-3021).
ccactttggaagttataat

SEQ ID NO: 702280 - DNA, 19 bp, Mus musculus
  siRNA target sequence for Smcy (NM_011419.1,3004-3022).
cactttggaagttataata

SEQ ID NO: 702281 - DNA, 19 bp, Mus musculus
  siRNA target sequence for Smcy (NM_011419.1,3141-3159).
cctgtttggatgatttgga

SEQ ID NO: 702282 - DNA, 19 bp, Mus musculus
  siRNA target sequence for Smcy (NM_011419.1,3189-3207).
ctgtggagctagaggaatt

SEQ ID NO: 702283 - DNA, 19 bp, Mus musculus
  siRNA target sequence for Smcy (NM_011419.1,3191-3209).
gtggagctagaggaattga

SEQ ID NO: 702284 - DNA, 19 bp, Mus musculus
  siRNA target sequence for Smcy (NM_011419.1,3217-3235).
ggagaatcaggtactaaca

SEQ ID NO: 702285 - DNA, 19 bp, Mus musculus
  siRNA target sequence for Smcy (NM_011419.1,3251-3269).
gagaaagcttctaagactt

SEQ ID NO: 702286 - DNA, 19 bp, Mus musculus
  siRNA target sequence for Smcy (NM_011419.1,3253-3271).
gaaagcttctaagactttt

SEQ ID NO: 702287 - DNA, 19 bp, Mus musculus
  siRNA target sequence for Smcy (NM_011419.1,3346-3364).
gcgcagtcggtggattgaa

SEQ ID NO: 702288 - DNA, 19 bp, Mus musculus
  siRNA target sequence for Smcy (NM_011419.1,3347-3365).
cgcagtcggtggattgaaa

SEQ ID NO: 702289 - DNA, 19 bp, Mus musculus
  siRNA target sequence for Smcy (NM_011419.1,3348-3366).
gcagtcggtggattgaaaa

SEQ ID NO: 702290 - DNA, 19 bp, Mus musculus
  siRNA target sequence for Smcy (NM_011419.1,3362-3380).
gaaaaggagatgggattat

SEQ ID NO: 702291 - DNA, 19 bp, Mus musculus
  siRNA target sequence for Smcy (NM_011419.1,3442-3460).
gatcatggcctttaaggaa

SEQ ID NO: 702292 - DNA, 19 bp, Mus musculus
  siRNA target sequence for Smcy (NM_011419.1,3551-3569).
gcaacctccatctgtatat

SEQ ID NO: 702293 - DNA, 19 bp, Mus musculus
  siRNA target sequence for Smcy (NM_011419.1,3582-3600).
gtgcaggagtggaatctct

SEQ ID NO: 702294 - DNA, 19 bp, Mus musculus
  siRNA target sequence for Smcy (NM_011419.1,3653-3671).
cacctactcagctcagtaa

SEQ ID NO: 702295 - DNA, 19 bp, Mus musculus
  siRNA target sequence for Smcy (NM_011419.1,3938-3956).
caacaactacaggatgaat

SEQ ID NO: 702296 - DNA, 19 bp, Mus musculus
  siRNA target sequence for Smcy (NM_011419.1,3947-3965).
caggatgaattgagacata

SEQ ID NO: 702297 - DNA, 19 bp, Mus musculus
  siRNA target sequence for Smcy (NM_011419.1,4003-4021).
ctgtctcacagagaatagt

SEQ ID NO: 702298 - DNA, 19 bp, Mus musculus
  siRNA target sequence for Smcy (NM_011419.1,4097-4115).
ccaaaggaaagttcatgta

SEQ ID NO: 702299 - DNA, 19 bp, Mus musculus
  siRNA target sequence for Smcy (NM_011419.1,4098-4116).
caaaggaaagttcatgtaa

SEQ ID NO: 702300 - DNA, 19 bp, Mus musculus
  siRNA target sequence for Smcy (NM_011419.1,4127-4145).
gaactgctgccttcacttt

SEQ ID NO: 702301 - DNA, 19 bp, Mus musculus
  siRNA target sequence for Smcy (NM_011419.1,4281-4299).
ggcagaatcccaatctaga

SEQ ID NO: 702302 - DNA, 19 bp, Mus musculus
  siRNA target sequence for Smcy (NM_011419.1,4291-4309).
caatctagagcgcattcat

SEQ ID NO: 702303 - DNA, 19 bp, Mus musculus
  siRNA target sequence for Smcy (NM_011419.1,4415-4433).
ggtgaggattttactcaaa

SEQ ID NO: 702304 - DNA, 19 bp, Mus musculus
  siRNA target sequence for Smcy (NM_011419.1,4430-4448).
caaaaagagctagaatcaa

SEQ ID NO: 702305 - DNA, 19 bp, Mus musculus
  siRNA target sequence for Smcy (NM_011419.1,4454-4472).
gtcaagagttcaaggatta

SEQ ID NO: 702306 - DNA, 19 bp, Mus musculus
  siRNA target sequence for Smcy (NM_011419.1,4498-4516).
gccaatacttggggataat

SEQ ID NO: 702307 - DNA, 19 bp, Mus musculus
  siRNA target sequence for Smcy (NM_011419.1,4500-4518).
caatacttggggataatgt

SEQ ID NO: 702308 - DNA, 19 bp, Mus musculus
  siRNA target sequence for Smcy (NM_011419.1,4529-4547).
caccatacagaacatacaa

SEQ ID NO: 702309 - DNA, 19 bp, Mus musculus
  siRNA target sequence for Smcy (NM_011419.1,4538-4556).
gaacatacaaacatcttaa

SEQ ID NO: 702310 - DNA, 19 bp, Mus musculus
  siRNA target sequence for Smcy (NM_011419.1,4614-4632).
ccttaacacctttactaca

SEQ ID NO: 702311 - DNA, 19 bp, Mus musculus
  siRNA target sequence for Smcy (NM_011419.1,4622-4640).
cctttactacacctatctt

SEQ ID NO: 702312 - DNA, 19 bp, Mus musculus
  siRNA target sequence for Smr1 (NM_011422.1,101-119).
cttaggcctctgcattctt

SEQ ID NO: 702313 - DNA, 19 bp, Mus musculus
  siRNA target sequence for Smr1 (NM_011422.1,401-419).
cacagtacaagcaactaca

SEQ ID NO: 702314 - DNA, 19 bp, Mus musculus
  siRNA target sequence for Smr1 (NM_011422.1,426-444).
gctgccagtatctccataa

SEQ ID NO: 702315 - DNA, 19 bp, Mus musculus
  siRNA target sequence for Smr1 (NM_011422.1,456-474).
gctagagattccactgata

SEQ ID NO: 702316 - DNA, 19 bp, Mus musculus
  siRNA target sequence for Smr1 (NM_011422.1,457-475).
ctagagattccactgatat

SEQ ID NO: 702317 - DNA, 19 bp, Mus musculus
  siRNA target sequence for Smr1 (NM_011422.1,482-500).
gaggttgtgggaattaata

SEQ ID NO: 702318 - DNA, 19 bp, Mus musculus
  siRNA target sequence for Soat2 (NM_011433.1,227-245).
cctatgggaggctatgcaa

SEQ ID NO: 702319 - DNA, 19 bp, Mus musculus
  siRNA target sequence for Soat2 (NM_011433.1,232-250).
gggaggctatgcaagctta

SEQ ID NO: 702320 - DNA, 19 bp, Mus musculus
  siRNA target sequence for Soat2 (NM_011433.1,242-260).
gcaagcttaccccaaacaa

SEQ ID NO: 702321 - DNA, 19 bp, Mus musculus
  siRNA target sequence for Soat2 (NM_011433.1,275-293).
ctccgctgccccagattct

SEQ ID NO: 702322 - DNA, 19 bp, Mus musculus
  siRNA target sequence for Soat2 (NM_011433.1,352-370).
cactgatcgatgagctaat

SEQ ID NO: 702323 - DNA, 19 bp, Mus musculus
  siRNA target sequence for Soat2 (NM_011433.1,366-384).
ctaatggaggtgcaacatt

SEQ ID NO: 702324 - DNA, 19 bp, Mus musculus
  siRNA target sequence for Soat2 (NM_011433.1,392-410).
catctaccacatgttcata

SEQ ID NO: 702325 - DNA, 19 bp, Mus musculus
  siRNA target sequence for Soat2 (NM_011433.1,440-458).
cctggccatcgacttcatt

SEQ ID NO: 702326 - DNA, 19 bp, Mus musculus
  siRNA target sequence for Soat2 (NM_011433.1,785-803).
gactgtgcctgggatcttt

SEQ ID NO: 702327 - DNA, 19 bp, Mus musculus
  siRNA target sequence for Soat2 (NM_011433.1,861-879).
ctcttctgccctacactta

SEQ ID NO: 702328 - DNA, 19 bp, Mus musculus
  siRNA target sequence for Soat2 (NM_011433.1,923-941).
ctatgtggccaagaacttt

SEQ ID NO: 702329 - DNA, 19 bp, Mus musculus
  siRNA target sequence for Soat2 (NM_011433.1,1192-1210).
cttccttctccaactacta

SEQ ID NO: 702330 - DNA, 19 bp, Mus musculus
  siRNA target sequence for Soat2 (NM_011433.1,1241-1259).
gctgtacagctatgtgtat

SEQ ID NO: 702331 - DNA, 19 bp, Mus musculus
  siRNA target sequence for Soat2 (NM_011433.1,1247-1265).
cagctatgtgtatcaagat

SEQ ID NO: 702332 - DNA, 19 bp, Mus musculus
  siRNA target sequence for Soat2 (NM_011433.1,1327-1345).
ctgcggtggttcatgagta

SEQ ID NO: 702333 - DNA, 19 bp, Mus musculus
  siRNA target sequence for Soat2 (NM_011433.1,1329-1347).
gcggtggttcatgagtata

SEQ ID NO: 702334 - DNA, 19 bp, Mus musculus
  siRNA target sequence for Soat2 (NM_011433.1,1330-1348).
cggtggttcatgagtatat

SEQ ID NO: 702335 - DNA, 19 bp, Mus musculus
  siRNA target sequence for Soat2 (NM_011433.1,1377-1395).
ccggtcatgctgatgctat

SEQ ID NO: 702336 - DNA, 19 bp, Mus musculus
  siRNA target sequence for Soat2 (NM_011433.1,1378-1396).
cggtcatgctgatgctatt

SEQ ID NO: 702337 - DNA, 19 bp, Mus musculus
  siRNA target sequence for Soat2 (NM_011433.1,1545-1563).
cccctgccccagacaacat

SEQ ID NO: 702338 - DNA, 19 bp, Mus musculus
  siRNA target sequence for Sp3 (NM_011450.1,89-107).
cgcgcatgacgagaaaaca

SEQ ID NO: 702339 - DNA, 19 bp, Mus musculus
  siRNA target sequence for Sp3 (NM_011450.1,163-181).
caaaccgatgggaggtttt

SEQ ID NO: 702340 - DNA, 19 bp, Mus musculus
  siRNA target sequence for Sp3 (NM_011450.1,186-204).
gctacacctacaactataa

SEQ ID NO: 702341 - DNA, 19 bp, Mus musculus
  siRNA target sequence for Sp3 (NM_011450.1,306-324).
gttgcaccaggatcagatt

SEQ ID NO: 702342 - DNA, 19 bp, Mus musculus
  siRNA target sequence for Sp3 (NM_011450.1,309-327).
gcaccaggatcagattcat

SEQ ID NO: 702343 - DNA, 19 bp, Mus musculus
  siRNA target sequence for Sp3 (NM_011450.1,313-331).
caggatcagattcatcaaa

SEQ ID NO: 702344 - DNA, 19 bp, Mus musculus
  siRNA target sequence for Sp3 (NM_011450.1,334-352).
gcacagtgtccaatgttca

SEQ ID NO: 702345 - DNA, 19 bp, Mus musculus
  siRNA target sequence for Sp3 (NM_011450.1,337-355).
cagtgtccaatgttcagta

SEQ ID NO: 702346 - DNA, 19 bp, Mus musculus
  siRNA target sequence for Sp3 (NM_011450.1,341-359).
gtccaatgttcagtatcaa

SEQ ID NO: 702347 - DNA, 19 bp, Mus musculus
  siRNA target sequence for Sp3 (NM_011450.1,421-439).
cagataatgggggcataaa

SEQ ID NO: 702348 - DNA, 19 bp, Mus musculus
  siRNA target sequence for Sp3 (NM_011450.1,429-447).
gggggcataaatcaagaaa

SEQ ID NO: 702349 - DNA, 19 bp, Mus musculus
  siRNA target sequence for Sp3 (NM_011450.1,430-448).
ggggcataaatcaagaaaa

SEQ ID NO: 702350 - DNA, 19 bp, Mus musculus
  siRNA target sequence for Sp3 (NM_011450.1,449-467).
cagccaaattcagatcatt

SEQ ID NO: 702351 - DNA, 19 bp, Mus musculus
  siRNA target sequence for Sp3 (NM_011450.1,464-482).
cattcctggctctaatcaa

SEQ ID NO: 702352 - DNA, 19 bp, Mus musculus
  siRNA target sequence for Sp3 (NM_011450.1,498-516).
ggaacacctcctgctaata

SEQ ID NO: 702353 - DNA, 19 bp, Mus musculus
  siRNA target sequence for Sp3 (NM_011450.1,499-517).
gaacacctcctgctaatat

SEQ ID NO: 702354 - DNA, 19 bp, Mus musculus
  siRNA target sequence for Sp3 (NM_011450.1,502-520).
cacctcctgctaatatcca

SEQ ID NO: 702355 - DNA, 19 bp, Mus musculus
  siRNA target sequence for Sp3 (NM_011450.1,508-526).
ctgctaatatccagaatct

SEQ ID NO: 702356 - DNA, 19 bp, Mus musculus
  siRNA target sequence for Sp3 (NM_011450.1,511-529).
ctaatatccagaatctcat

SEQ ID NO: 702357 - DNA, 19 bp, Mus musculus
  siRNA target sequence for Sp3 (NM_011450.1,551-569).
ggttcagggagttgcaatt

SEQ ID NO: 702358 - DNA, 19 bp, Mus musculus
  siRNA target sequence for Sp3 (NM_011450.1,564-582).
gcaattggtggctcatcat

SEQ ID NO: 702359 - DNA, 19 bp, Mus musculus
  siRNA target sequence for Sp3 (NM_011450.1,586-604).
ctggccaaactcaagtagt

SEQ ID NO: 702360 - DNA, 19 bp, Mus musculus
  siRNA target sequence for Sp3 (NM_011450.1,595-613).
ctcaagtagtcgctaatgt

SEQ ID NO: 702361 - DNA, 19 bp, Mus musculus
  siRNA target sequence for Sp3 (NM_011450.1,621-639).
ggtctgccaggaaatatta

SEQ ID NO: 702362 - DNA, 19 bp, Mus musculus
  siRNA target sequence for Sp3 (NM_011450.1,653-671).
caatagtgtcgatctagat

SEQ ID NO: 702363 - DNA, 19 bp, Mus musculus
  siRNA target sequence for Sp3 (NM_011450.1,658-676).
gtgtcgatctagattcttt

SEQ ID NO: 702364 - DNA, 19 bp, Mus musculus
  siRNA target sequence for Sp3 (NM_011450.1,677-695).
gggactctcgggaagttct

SEQ ID NO: 702365 - DNA, 19 bp, Mus musculus
  siRNA target sequence for Sp3 (NM_011450.1,720-738).
gccgatggacatttgataa

SEQ ID NO: 702366 - DNA, 19 bp, Mus musculus
  siRNA target sequence for Sp3 (NM_011450.1,721-739).
ccgatggacatttgataaa

SEQ ID NO: 702367 - DNA, 19 bp, Mus musculus
  siRNA target sequence for Sp3 (NM_011450.1,744-762).
ggacaagctatggatagtt

SEQ ID NO: 702368 - DNA, 19 bp, Mus musculus
  siRNA target sequence for Sp3 (NM_011450.1,798-816).
cctgatgttaatgaaacta

SEQ ID NO: 702369 - DNA, 19 bp, Mus musculus
  siRNA target sequence for Sp3 (NM_011450.1,814-832).
ctaatgctgatacagattt

SEQ ID NO: 702370 - DNA, 19 bp, Mus musculus
  siRNA target sequence for Sp3 (NM_011450.1,856-874).
cacagttgcctgttacaat

SEQ ID NO: 702371 - DNA, 19 bp, Mus musculus
  siRNA target sequence for Sp3 (NM_011450.1,860-878).
gttgcctgttacaatagat

SEQ ID NO: 702372 - DNA, 19 bp, Mus musculus
  siRNA target sequence for Sp3 (NM_011450.1,929-947).
gcaagtccattcttcagat

SEQ ID NO: 702373 - DNA, 19 bp, Mus musculus
  siRNA target sequence for Sp3 (NM_011450.1,1022-1040).
gcctgttgtacaacatcta

SEQ ID NO: 702374 - DNA, 19 bp, Mus musculus
  siRNA target sequence for Sp3 (NM_011450.1,1075-1093).
cccaaattgtgcaaggtat

SEQ ID NO: 702375 - DNA, 19 bp, Mus musculus
  siRNA target sequence for Sp3 (NM_011450.1,1076-1094).
ccaaattgtgcaaggtatt

SEQ ID NO: 702376 - DNA, 19 bp, Mus musculus
  siRNA target sequence for Sp3 (NM_011450.1,1077-1095).
caaattgtgcaaggtatta

SEQ ID NO: 702377 - DNA, 19 bp, Mus musculus
  siRNA target sequence for Sp3 (NM_011450.1,1119-1137).
caagccagtggtcaaaata

SEQ ID NO: 702378 - DNA, 19 bp, Mus musculus
  siRNA target sequence for Sp3 (NM_011450.1,1126-1144).
gtggtcaaaatatatcaca

SEQ ID NO: 702379 - DNA, 19 bp, Mus musculus
  siRNA target sequence for Sp3 (NM_011450.1,1180-1198).
ctggaacctttttaattca

SEQ ID NO: 702380 - DNA, 19 bp, Mus musculus
  siRNA target sequence for Sp3 (NM_011450.1,1214-1232).
cccttctggacagataact

SEQ ID NO: 702381 - DNA, 19 bp, Mus musculus
  siRNA target sequence for Sp3 (NM_011450.1,1215-1233).
ccttctggacagataactt

SEQ ID NO: 702382 - DNA, 19 bp, Mus musculus
  siRNA target sequence for Sp3 (NM_011450.1,1293-1311).
gctgcccaacaaattactt

SEQ ID NO: 702383 - DNA, 19 bp, Mus musculus
  siRNA target sequence for Sp3 (NM_011450.1,1294-1312).
ctgcccaacaaattacttt

SEQ ID NO: 702384 - DNA, 19 bp, Mus musculus
  siRNA target sequence for Sp3 (NM_011450.1,1414-1432).
cagttacagtaaattctat

SEQ ID NO: 702385 - DNA, 19 bp, Mus musculus
  siRNA target sequence for Sp3 (NM_011450.1,1451-1469).
gctacatccaggagagaat

SEQ ID NO: 702386 - DNA, 19 bp, Mus musculus
  siRNA target sequence for Sp3 (NM_011450.1,1576-1594).
gagtacaagtggtagatga

SEQ ID NO: 702387 - DNA, 19 bp, Mus musculus
  siRNA target sequence for Sp3 (NM_011450.1,1646-1664).
cacctgtcccaactgtaaa

SEQ ID NO: 702388 - DNA, 19 bp, Mus musculus
  siRNA target sequence for Sp3 (NM_011450.1,1681-1699).
gtaccaatcttgggaaaaa

SEQ ID NO: 702389 - DNA, 19 bp, Mus musculus
  siRNA target sequence for Sp3 (NM_011450.1,1703-1721).
gcaacacatttgtcatata

SEQ ID NO: 702390 - DNA, 19 bp, Mus musculus
  siRNA target sequence for Sp3 (NM_011450.1,1783-1801).
cgggggagcgcccttttat

SEQ ID NO: 702391 - DNA, 19 bp, Mus musculus
  siRNA target sequence for Sp3 (NM_011450.1,1787-1805).
ggagcgcccttttatttgt

SEQ ID NO: 702392 - DNA, 19 bp, Mus musculus
  siRNA target sequence for Sp3 (NM_011450.1,1788-1806).
gagcgcccttttatttgta

SEQ ID NO: 702393 - DNA, 19 bp, Mus musculus
  siRNA target sequence for Sp3 (NM_011450.1,1791-1809).
cgcccttttatttgtaact

SEQ ID NO: 702394 - DNA, 19 bp, Mus musculus
  siRNA target sequence for Sp3 (NM_011450.1,1814-1832).
gttctgtggtaaaagattt

SEQ ID NO: 702395 - DNA, 19 bp, Mus musculus
  siRNA target sequence for Sp3 (NM_011450.1,1928-1946).
ccaccttgccaaacatatt

SEQ ID NO: 702396 - DNA, 19 bp, Mus musculus
  siRNA target sequence for Sp3 (NM_011450.1,2034-2052).
gcaggaggaacaacactta

SEQ ID NO: 702397 - DNA, 19 bp, Mus musculus
  siRNA target sequence for Sp3 (NM_011450.1,2035-2053).
caggaggaacaacacttat

SEQ ID NO: 702398 - DNA, 19 bp, Mus musculus
  siRNA target sequence for Sp3 (NM_011450.1,2047-2065).
cacttatccttgcaaatat

SEQ ID NO: 702399 - DNA, 19 bp, Mus musculus
  siRNA target sequence for Sp3 (NM_011450.1,2085-2103).
gggataggaactgtcaata

SEQ ID NO: 702400 - DNA, 19 bp, Mus musculus
  siRNA target sequence for Sp3 (NM_011450.1,2087-2105).
gataggaactgtcaatact

SEQ ID NO: 702401 - DNA, 19 bp, Mus musculus
  siRNA target sequence for Sprr2j (NM_011476.2,346-364).
gcttcagtagtcttcaaaa

SEQ ID NO: 702402 - DNA, 19 bp, Mus musculus
  siRNA target sequence for Sprr2j (NM_011476.2,381-399).
gaatccatcttacataagt

SEQ ID NO: 702403 - DNA, 19 bp, Mus musculus
  siRNA target sequence for Sprr3 (NM_011478.1,5-23).
gttcttaccagcaaaagca

SEQ ID NO: 702404 - DNA, 19 bp, Mus musculus
  siRNA target sequence for Sprr3 (NM_011478.1,83-101).
caccacaaggaaaatttgt

SEQ ID NO: 702405 - DNA, 19 bp, Mus musculus
  siRNA target sequence for Sprr3 (NM_011478.1,208-226).
gttcttgagccagattata

SEQ ID NO: 702406 - DNA, 19 bp, Mus musculus
  siRNA target sequence for Sprr3 (NM_011478.1,211-229).
cttgagccagattatacta

SEQ ID NO: 702407 - DNA, 19 bp, Mus musculus
  siRNA target sequence for Sprr3 (NM_011478.1,512-530).
cagaaccatgctctatcaa

SEQ ID NO: 702408 - DNA, 19 bp, Mus musculus
  siRNA target sequence for Sprr3 (NM_011478.1,535-553).
cgtgaacctggctacatga

SEQ ID NO: 702409 - DNA, 19 bp, Mus musculus
  siRNA target sequence for Sprr3 (NM_011478.1,612-630).
ccagggatcctctaaggta

SEQ ID NO: 702410 - DNA, 19 bp, Mus musculus
  siRNA target sequence for Znrf4 (NM_011483.1,186-204).
ccacggacgctcaggttaa

SEQ ID NO: 702411 - DNA, 19 bp, Mus musculus
  siRNA target sequence for Znrf4 (NM_011483.1,189-207).
cggacgctcaggttaactt

SEQ ID NO: 702412 - DNA, 19 bp, Mus musculus
  siRNA target sequence for Stk18 (NM_011495.1,199-217).
gagaggatcgaggacttta

SEQ ID NO: 702413 - DNA, 19 bp, Mus musculus
  siRNA target sequence for Stk18 (NM_011495.1,213-231).
ctttaaggttggaaatcta

SEQ ID NO: 702414 - DNA, 19 bp, Mus musculus
  siRNA target sequence for Stk18 (NM_011495.1,324-342).
gtacaaagctggaatggta

SEQ ID NO: 702415 - DNA, 19 bp, Mus musculus
  siRNA target sequence for Stk18 (NM_011495.1,339-357).
ggtacagagagtccaaaat

SEQ ID NO: 702416 - DNA, 19 bp, Mus musculus
  siRNA target sequence for Stk18 (NM_011495.1,523-541).
cacttcatgcaccagatta

SEQ ID NO: 702417 - DNA, 19 bp, Mus musculus
  siRNA target sequence for Stk18 (NM_011495.1,528-546).
catgcaccagattatcaca

SEQ ID NO: 702418 - DNA, 19 bp, Mus musculus
  siRNA target sequence for Stk18 (NM_011495.1,545-563).
caggaatgttatatcttca

SEQ ID NO: 702419 - DNA, 19 bp, Mus musculus
  siRNA target sequence for Stk18 (NM_011495.1,591-609).
cacactctctaacatctta

SEQ ID NO: 702420 - DNA, 19 bp, Mus musculus
  siRNA target sequence for Stk18 (NM_011495.1,593-611).
cactctctaacatcttact

SEQ ID NO: 702421 - DNA, 19 bp, Mus musculus
  siRNA target sequence for Stk18 (NM_011495.1,595-613).
ctctctaacatcttactta

SEQ ID NO: 702422 - DNA, 19 bp, Mus musculus
  siRNA target sequence for Stk18 (NM_011495.1,610-628).
cttacgcggaatatgaaca

SEQ ID NO: 702423 - DNA, 19 bp, Mus musculus
  siRNA target sequence for Stk18 (NM_011495.1,614-632).
cgcggaatatgaacataaa

SEQ ID NO: 702424 - DNA, 19 bp, Mus musculus
  siRNA target sequence for Stk18 (NM_011495.1,615-633).
gcggaatatgaacataaaa

SEQ ID NO: 702425 - DNA, 19 bp, Mus musculus
  siRNA target sequence for Stk18 (NM_011495.1,647-665).
gactagcaacgcagttgaa

SEQ ID NO: 702426 - DNA, 19 bp, Mus musculus
  siRNA target sequence for Stk18 (NM_011495.1,649-667).
ctagcaacgcagttgaata

SEQ ID NO: 702427 - DNA, 19 bp, Mus musculus
  siRNA target sequence for Stk18 (NM_011495.1,660-678).
gttgaatatgccacatgaa

SEQ ID NO: 702428 - DNA, 19 bp, Mus musculus
  siRNA target sequence for Stk18 (NM_011495.1,740-758).
cacatggacttgaatctga

SEQ ID NO: 702429 - DNA, 19 bp, Mus musculus
  siRNA target sequence for Stk18 (NM_011495.1,772-790).
ggctgtatgttttatacgt

SEQ ID NO: 702430 - DNA, 19 bp, Mus musculus
  siRNA target sequence for Stk18 (NM_011495.1,773-791).
gctgtatgttttatacgtt

SEQ ID NO: 702431 - DNA, 19 bp, Mus musculus
  siRNA target sequence for Stk18 (NM_011495.1,774-792).
ctgtatgttttatacgtta

SEQ ID NO: 702432 - DNA, 19 bp, Mus musculus
  siRNA target sequence for Stk18 (NM_011495.1,900-918).
ccttatccaccagttactt

SEQ ID NO: 702433 - DNA, 19 bp, Mus musculus
  siRNA target sequence for Stk18 (NM_011495.1,927-945).
ccctgcagatcggttaagt

SEQ ID NO: 702434 - DNA, 19 bp, Mus musculus
  siRNA target sequence for Stk18 (NM_011495.1,1010-1028).
ggactgtagaggactcaat

SEQ ID NO: 702435 - DNA, 19 bp, Mus musculus
  siRNA target sequence for Stk18 (NM_011495.1,1015-1033).
gtagaggactcaatggata

SEQ ID NO: 702436 - DNA, 19 bp, Mus musculus
  siRNA target sequence for Stk18 (NM_011495.1,1120-1138).
ggtcaaccacttccaaata

SEQ ID NO: 702437 - DNA, 19 bp, Mus musculus
  siRNA target sequence for Stk18 (NM_011495.1,1121-1139).
gtcaaccacttccaaataa

SEQ ID NO: 702438 - DNA, 19 bp, Mus musculus
  siRNA target sequence for Stk18 (NM_011495.1,1245-1263).
gggacgggggagagtgatt

SEQ ID NO: 702439 - DNA, 19 bp, Mus musculus
  siRNA target sequence for Stk18 (NM_011495.1,1247-1265).
gacgggggagagtgattga

SEQ ID NO: 702440 - DNA, 19 bp, Mus musculus
  siRNA target sequence for Stk18 (NM_011495.1,1370-1388).
gttgtcactcagtagaaat

SEQ ID NO: 702441 - DNA, 19 bp, Mus musculus
  siRNA target sequence for Stk18 (NM_011495.1,1403-1421).
gaagatcactggatgaaaa

SEQ ID NO: 702442 - DNA, 19 bp, Mus musculus
  siRNA target sequence for Stk18 (NM_011495.1,1406-1424).
gatcactggatgaaaatca

SEQ ID NO: 702443 - DNA, 19 bp, Mus musculus
  siRNA target sequence for Stk18 (NM_011495.1,1521-1539).
gcaaatgaatgctcattta

SEQ ID NO: 702444 - DNA, 19 bp, Mus musculus
  siRNA target sequence for Stk18 (NM_011495.1,1560-1578).
caccgttagcccaaacaga

SEQ ID NO: 702445 - DNA, 19 bp, Mus musculus
  siRNA target sequence for Stk18 (NM_011495.1,1564-1582).
gttagcccaaacagagatt

SEQ ID NO: 702446 - DNA, 19 bp, Mus musculus
  siRNA target sequence for Stk18 (NM_011495.1,1644-1662).
caagaatgctgatacttct

SEQ ID NO: 702447 - DNA, 19 bp, Mus musculus
  siRNA target sequence for Stk18 (NM_011495.1,1664-1682).
ccaatgttcatgctgtaaa

SEQ ID NO: 702448 - DNA, 19 bp, Mus musculus
  siRNA target sequence for Stk18 (NM_011495.1,1684-1702).
cagctgagtgccatgaaat

SEQ ID NO: 702449 - DNA, 19 bp, Mus musculus
  siRNA target sequence for Stk18 (NM_011495.1,1756-1774).
catcctcattctgaacaaa

SEQ ID NO: 702450 - DNA, 19 bp, Mus musculus
  siRNA target sequence for Stk18 (NM_011495.1,1812-1830).
gaaacctaccttaagaagt

SEQ ID NO: 702451 - DNA, 19 bp, Mus musculus
  siRNA target sequence for Stk18 (NM_011495.1,1816-1834).
cctaccttaagaagtatta

SEQ ID NO: 702452 - DNA, 19 bp, Mus musculus
  siRNA target sequence for Stk18 (NM_011495.1,1962-1980).
gaaagaagtgcttcagata

SEQ ID NO: 702453 - DNA, 19 bp, Mus musculus
  siRNA target sequence for Stk18 (NM_011495.1,1982-2000).
cgagtgatgggactatgat

SEQ ID NO: 702454 - DNA, 19 bp, Mus musculus
  siRNA target sequence for Stk18 (NM_011495.1,1991-2009).
ggactatgatcactgttta

SEQ ID NO: 702455 - DNA, 19 bp, Mus musculus
  siRNA target sequence for Stk18 (NM_011495.1,1992-2010).
gactatgatcactgtttat

SEQ ID NO: 702456 - DNA, 19 bp, Mus musculus
  siRNA target sequence for Stk18 (NM_011495.1,1994-2012).
ctatgatcactgtttatta

SEQ ID NO: 702457 - DNA, 19 bp, Mus musculus
  siRNA target sequence for Stk18 (NM_011495.1,2075-2093).
gtaggtacagctttgacaa

SEQ ID NO: 702458 - DNA, 19 bp, Mus musculus
  siRNA target sequence for Stk18 (NM_011495.1,2078-2096).
ggtacagctttgacaatct

SEQ ID NO: 702459 - DNA, 19 bp, Mus musculus
  siRNA target sequence for Stk18 (NM_011495.1,2109-2127).
ctggcggaaatatcagtat

SEQ ID NO: 702460 - DNA, 19 bp, Mus musculus
  siRNA target sequence for Stk18 (NM_011495.1,2113-2131).
cggaaatatcagtatgctt

SEQ ID NO: 702461 - DNA, 19 bp, Mus musculus
  siRNA target sequence for Stk18 (NM_011495.1,2124-2142).
gtatgcttccagattcatt

SEQ ID NO: 702462 - DNA, 19 bp, Mus musculus
  siRNA target sequence for Stk18 (NM_011495.1,2139-2157).
cattcagctagtaagatct

SEQ ID NO: 702463 - DNA, 19 bp, Mus musculus
  siRNA target sequence for Stk18 (NM_011495.1,2164-2182).
cccaaaatcacttatttta

SEQ ID NO: 702464 - DNA, 19 bp, Mus musculus
  siRNA target sequence for Stk18 (NM_011495.1,2183-2201).
caagatatgctaaatgtat

SEQ ID NO: 702465 - DNA, 19 bp, Mus musculus
  siRNA target sequence for Stk18 (NM_011495.1,2225-2243).
ctgatttcgaagtttggtt

SEQ ID NO: 702466 - DNA, 19 bp, Mus musculus
  siRNA target sequence for Stk18 (NM_011495.1,2232-2250).
cgaagtttggttttatgat

SEQ ID NO: 702467 - DNA, 19 bp, Mus musculus
  siRNA target sequence for Stk18 (NM_011495.1,2295-2313).
gaaaacagggatatcttat

SEQ ID NO: 702468 - DNA, 19 bp, Mus musculus
  siRNA target sequence for Stk18 (NM_011495.1,2300-2318).
cagggatatcttataattt

SEQ ID NO: 702469 - DNA, 19 bp, Mus musculus
  siRNA target sequence for Stk18 (NM_011495.1,2453-2471).
cattcttccctataatcgt

SEQ ID NO: 702470 - DNA, 19 bp, Mus musculus
  siRNA target sequence for Stk18 (NM_011495.1,2473-2491).
ggaagaaaacctggtaata

SEQ ID NO: 702471 - DNA, 19 bp, Mus musculus
  siRNA target sequence for Stk18 (NM_011495.1,2565-2583).
cagactgagcgtgaatagt

SEQ ID NO: 702472 - DNA, 19 bp, Mus musculus
  siRNA target sequence for Stk18 (NM_011495.1,2665-2683).
ggaacaggcgtctcttcaa

SEQ ID NO: 702473 - DNA, 19 bp, Mus musculus
  siRNA target sequence for Stk18 (NM_011495.1,2766-2784).
gtgggttcagtttaatgat

SEQ ID NO: 702474 - DNA, 19 bp, Mus musculus
  siRNA target sequence for Stk18 (NM_011495.1,2800-2818).
gtccaggcaggagtatctt

SEQ ID NO: 702475 - DNA, 19 bp, Mus musculus
  siRNA target sequence for Stk18 (NM_011495.1,2809-2827).
ggagtatcttccatcagtt

SEQ ID NO: 702476 - DNA, 19 bp, Mus musculus
  siRNA target sequence for Stk18 (NM_011495.1,2836-2854).
ccagatggtcagacaacta

SEQ ID NO: 702477 - DNA, 19 bp, Mus musculus
  siRNA target sequence for Stk18 (NM_011495.1,2881-2899).
gaatacatcaaacagaaat

SEQ ID NO: 702478 - DNA, 19 bp, Mus musculus
  siRNA target sequence for Stk18 (NM_011495.1,2933-2951).
ctaatccaactcctaattt

SEQ ID NO: 702479 - DNA, 19 bp, Mus musculus
  siRNA target sequence for Surf5 (NM_011513.1,288-306).
ggctcaaagacgacatcaa

SEQ ID NO: 702480 - DNA, 19 bp, Mus musculus
  siRNA target sequence for Surf5 (NM_011513.1,290-308).
ctcaaagacgacatcaagt

SEQ ID NO: 702481 - DNA, 19 bp, Mus musculus
  siRNA target sequence for Surf5 (NM_011513.1,334-352).
catcaagaccgccaagatt

SEQ ID NO: 702482 - DNA, 19 bp, Mus musculus
  siRNA target sequence for Surf5 (NM_011513.1,383-401).
cagggcgaacaggacaatt

SEQ ID NO: 702483 - DNA, 19 bp, Mus musculus
  siRNA target sequence for Surf5 (NM_011513.1,387-405).
gcgaacaggacaattatga

SEQ ID NO: 702484 - DNA, 19 bp, Mus musculus
  siRNA target sequence for Surf5 (NM_011513.1,438-456).
ctggtgagtcactgatgaa

SEQ ID NO: 702485 - DNA, 19 bp, Mus musculus
  siRNA target sequence for Surf5 (NM_011513.1,493-511).
cgacttcccgtctgtgaat

SEQ ID NO: 702486 - DNA, 19 bp, Mus musculus
  siRNA target sequence for Surf5 (NM_011513.1,592-610).
ggtctccattgacctatat

SEQ ID NO: 702487 - DNA, 19 bp, Mus musculus
  siRNA target sequence for Surf5 (NM_011513.1,628-646).
ctactcgtccaggtacaaa

SEQ ID NO: 702488 - DNA, 19 bp, Mus musculus
  siRNA target sequence for Sybl1 (NM_011515.1,161-179).
caggggaaccactatcctt

SEQ ID NO: 702489 - DNA, 19 bp, Mus musculus
  siRNA target sequence for Sybl1 (NM_011515.1,224-242).
gcagattctggctaagata

SEQ ID NO: 702490 - DNA, 19 bp, Mus musculus
  siRNA target sequence for Sybl1 (NM_011515.1,233-251).
ggctaagataccttctgaa

SEQ ID NO: 702491 - DNA, 19 bp, Mus musculus
  siRNA target sequence for Sybl1 (NM_011515.1,234-252).
gctaagataccttctgaaa

SEQ ID NO: 702492 - DNA, 19 bp, Mus musculus
  siRNA target sequence for Sybl1 (NM_011515.1,265-283).
cttactcacatggcaatta

SEQ ID NO: 702493 - DNA, 19 bp, Mus musculus
  siRNA target sequence for Sybl1 (NM_011515.1,348-366).
cgttctcgagcgttcagtt

SEQ ID NO: 702494 - DNA, 19 bp, Mus musculus
  siRNA target sequence for Sybl1 (NM_011515.1,349-367).
gttctcgagcgttcagttt

SEQ ID NO: 702495 - DNA, 19 bp, Mus musculus
  siRNA target sequence for Sybl1 (NM_011515.1,352-370).
ctcgagcgttcagtttttt

SEQ ID NO: 702496 - DNA, 19 bp, Mus musculus
  siRNA target sequence for Sybl1 (NM_011515.1,358-376).
cgttcagttttttgaatga

SEQ ID NO: 702497 - DNA, 19 bp, Mus musculus
  siRNA target sequence for Sybl1 (NM_011515.1,395-413).
gacaacttacggttcaaga

SEQ ID NO: 702498 - DNA, 19 bp, Mus musculus
  siRNA target sequence for Sybl1 (NM_011515.1,424-442).
cacttccttatgctatgaa

SEQ ID NO: 702499 - DNA, 19 bp, Mus musculus
  siRNA target sequence for Sybl1 (NM_011515.1,435-453).
gctatgaatagcgagtttt

SEQ ID NO: 702500 - DNA, 19 bp, Mus musculus
  siRNA target sequence for Sybl1 (NM_011515.1,440-458).
gaatagcgagttttcaagt

SEQ ID NO: 702501 - DNA, 19 bp, Mus musculus
  siRNA target sequence for Sybl1 (NM_011515.1,491-509).
gaataagagcctagacaaa

SEQ ID NO: 702502 - DNA, 19 bp, Mus musculus
  siRNA target sequence for Sybl1 (NM_011515.1,534-552).
gatgaactgaaaggaataa

SEQ ID NO: 702503 - DNA, 19 bp, Mus musculus
  siRNA target sequence for Sybl1 (NM_011515.1,547-565).
gaataatggtcagaaacat

SEQ ID NO: 702504 - DNA, 19 bp, Mus musculus
  siRNA target sequence for Sybl1 (NM_011515.1,586-604).
gagaaaggttggaattgct

SEQ ID NO: 702505 - DNA, 19 bp, Mus musculus
  siRNA target sequence for Sybl1 (NM_011515.1,593-611).
gttggaattgctgatagat

SEQ ID NO: 702506 - DNA, 19 bp, Mus musculus
  siRNA target sequence for Sybl1 (NM_011515.1,596-614).
ggaattgctgatagataaa

SEQ ID NO: 702507 - DNA, 19 bp, Mus musculus
  siRNA target sequence for Sybl1 (NM_011515.1,666-684).
cttgctcgagccatgtgta

SEQ ID NO: 702508 - DNA, 19 bp, Mus musculus
  siRNA target sequence for Sybl1 (NM_011515.1,670-688).
ctcgagccatgtgtatgaa

SEQ ID NO: 702509 - DNA, 19 bp, Mus musculus
  siRNA target sequence for Sybl1 (NM_011515.1,707-725).
catcatcatcattgtatca

SEQ ID NO: 702510 - DNA, 19 bp, Mus musculus
  siRNA target sequence for Tcof1 (NM_011552.1,75-93).
gagctgcttcccctcattt

SEQ ID NO: 702511 - DNA, 19 bp, Mus musculus
  siRNA target sequence for Tcof1 (NM_011552.1,80-98).
gcttcccctcatttaccat

SEQ ID NO: 702512 - DNA, 19 bp, Mus musculus
  siRNA target sequence for Tcof1 (NM_011552.1,85-103).
ccctcatttaccatcatct

SEQ ID NO: 702513 - DNA, 19 bp, Mus musculus
  siRNA target sequence for Tcof1 (NM_011552.1,391-409).
ccgcagctttgccatcaaa

SEQ ID NO: 702514 - DNA, 19 bp, Mus musculus
  siRNA target sequence for Tcof1 (NM_011552.1,392-410).
cgcagctttgccatcaaaa

SEQ ID NO: 702515 - DNA, 19 bp, Mus musculus
  siRNA target sequence for Tcof1 (NM_011552.1,788-806).
gcccacacctgctaaacca

SEQ ID NO: 702516 - DNA, 19 bp, Mus musculus
  siRNA target sequence for Tcof1 (NM_011552.1,1090-1108).
gcagtgaggacgattctga

SEQ ID NO: 702517 - DNA, 19 bp, Mus musculus
  siRNA target sequence for Tcof1 (NM_011552.1,1412-1430).
ggggtcatcgggaaaaggt

SEQ ID NO: 702518 - DNA, 19 bp, Mus musculus
  siRNA target sequence for Tcof1 (NM_011552.1,1468-1486).
ctctcagggtccaaatggt

SEQ ID NO: 702519 - DNA, 19 bp, Mus musculus
  siRNA target sequence for Tcof1 (NM_011552.1,1470-1488).
ctcagggtccaaatggtaa

SEQ ID NO: 702520 - DNA, 19 bp, Mus musculus
  siRNA target sequence for Tcof1 (NM_011552.1,1774-1792).
gcacctcgtcccattgtaa

SEQ ID NO: 702521 - DNA, 19 bp, Mus musculus
  siRNA target sequence for Tcof1 (NM_011552.1,2001-2019).
gggccttcggtcaaagcta

SEQ ID NO: 702522 - DNA, 19 bp, Mus musculus
  siRNA target sequence for Tcof1 (NM_011552.1,2002-2020).
ggccttcggtcaaagctat

SEQ ID NO: 702523 - DNA, 19 bp, Mus musculus
  siRNA target sequence for Tcof1 (NM_011552.1,2318-2336).
ctcagagagcagcagtaaa

SEQ ID NO: 702524 - DNA, 19 bp, Mus musculus
  siRNA target sequence for Tcof1 (NM_011552.1,2358-2376).
gagacgccagcccagataa

SEQ ID NO: 702525 - DNA, 19 bp, Mus musculus
  siRNA target sequence for Tcof1 (NM_011552.1,2363-2381).
gccagcccagataaaacct

SEQ ID NO: 702526 - DNA, 19 bp, Mus musculus
  siRNA target sequence for Tcof1 (NM_011552.1,2426-2444).
ggagtctcctaaaaaagga

SEQ ID NO: 702527 - DNA, 19 bp, Mus musculus
  siRNA target sequence for Tcof1 (NM_011552.1,2462-2480).
cggcaagacgggatcttca

SEQ ID NO: 702528 - DNA, 19 bp, Mus musculus
  siRNA target sequence for Tcof1 (NM_011552.1,3263-3281).
caactccttagcttcttct

SEQ ID NO: 702529 - DNA, 19 bp, Mus musculus
  siRNA target sequence for Tcof1 (NM_011552.1,3342-3360).
gacaccgcactccctaaaa

SEQ ID NO: 702530 - DNA, 19 bp, Mus musculus
  siRNA target sequence for Tcof1 (NM_011552.1,3353-3371).
ccctaaaaccggtaggaaa

SEQ ID NO: 702531 - DNA, 19 bp, Mus musculus
  siRNA target sequence for Tcof1 (NM_011552.1,3688-3706).
gcgctgtttccccagaaaa

SEQ ID NO: 702532 - DNA, 19 bp, Mus musculus
  siRNA target sequence for Tcof1 (NM_011552.1,3811-3829).
gcgagttgctggggataaa

SEQ ID NO: 702533 - DNA, 19 bp, Mus musculus
  siRNA target sequence for Tcof1 (NM_011552.1,3955-3973).
cctcgccgatccagaagaa

SEQ ID NO: 702534 - DNA, 19 bp, Mus musculus
  siRNA target sequence for Tcof1 (NM_011552.1,3958-3976).
cgccgatccagaagaagaa

SEQ ID NO: 702535 - DNA, 19 bp, Mus musculus
  siRNA target sequence for Sry (NM_011564.1,50-68).
gtggtgagaggcacaagtt

SEQ ID NO: 702536 - DNA, 19 bp, Mus musculus
  siRNA target sequence for Sry (NM_011564.1,78-96).
gaatcccagcatgcaaaat

SEQ ID NO: 702537 - DNA, 19 bp, Mus musculus
  siRNA target sequence for Sry (NM_011564.1,125-143).
ggtggaaaagccttacaga

SEQ ID NO: 702538 - DNA, 19 bp, Mus musculus
  siRNA target sequence for Sry (NM_011564.1,136-154).
cttacagaagccgaaaaaa

SEQ ID NO: 702539 - DNA, 19 bp, Mus musculus
  siRNA target sequence for Sry (NM_011564.1,227-245).
ctcatcggagggctaaagt

SEQ ID NO: 702540 - DNA, 19 bp, Mus musculus
  siRNA target sequence for Sry (NM_011564.1,229-247).
catcggagggctaaagtgt

SEQ ID NO: 702541 - DNA, 19 bp, Mus musculus
  siRNA target sequence for Sry (NM_011564.1,271-289).
cctgcagttgcctcaacaa

SEQ ID NO: 702542 - DNA, 19 bp, Mus musculus
  siRNA target sequence for Sry (NM_011564.1,1092-1110).
ccagcagcttacctactta

SEQ ID NO: 702543 - DNA, 19 bp, Mus musculus
  siRNA target sequence for Sry (NM_011564.1,1098-1116).
gcttacctacttactaaca

SEQ ID NO: 702544 - DNA, 19 bp, Mus musculus
  siRNA target sequence for Tex264 (NM_011573.1,593-611).
ctggcctttgctggttatt

SEQ ID NO: 702545 - DNA, 19 bp, Mus musculus
  siRNA target sequence for Tex264 (NM_011573.1,652-670).
cccaatccgcaacataact

SEQ ID NO: 702546 - DNA, 19 bp, Mus musculus
  siRNA target sequence for Tex264 (NM_011573.1,654-672).
caatccgcaacataactgt

SEQ ID NO: 702547 - DNA, 19 bp, Mus musculus
  siRNA target sequence for Tex264 (NM_011573.1,704-722).
gacactgggcaccttttca

SEQ ID NO: 702548 - DNA, 19 bp, Mus musculus
  siRNA target sequence for Tex264 (NM_011573.1,753-771).
gttccatcgctgtctacta

SEQ ID NO: 702549 - DNA, 19 bp, Mus musculus
  siRNA target sequence for Tex264 (NM_011573.1,756-774).
ccatcgctgtctactatga

SEQ ID NO: 702550 - DNA, 19 bp, Mus musculus
  siRNA target sequence for Tex264 (NM_011573.1,860-878).
ctcatccacctctatcaga

SEQ ID NO: 702551 - DNA, 19 bp, Mus musculus
  siRNA target sequence for Tex264 (NM_011573.1,990-1008).
ccttggatacctacatcaa

SEQ ID NO: 702552 - DNA, 19 bp, Mus musculus
  siRNA target sequence for Tex264 (NM_011573.1,1052-1070).
caagacaagatccatttca

SEQ ID NO: 702553 - DNA, 19 bp, Mus musculus
  siRNA target sequence for Tex264 (NM_011573.1,1055-1073).
gacaagatccatttcatgt

SEQ ID NO: 702554 - DNA, 19 bp, Mus musculus
  siRNA target sequence for Tex292 (NM_011574.1,136-154).
cacctgggagtgactaagt

SEQ ID NO: 702555 - DNA, 19 bp, Mus musculus
  siRNA target sequence for Tex292 (NM_011574.1,186-204).
gtccgacggcactgtcata

SEQ ID NO: 702556 - DNA, 19 bp, Mus musculus
  siRNA target sequence for Tex292 (NM_011574.1,189-207).
cgacggcactgtcataagt

SEQ ID NO: 702557 - DNA, 19 bp, Mus musculus
  siRNA target sequence for Tex292 (NM_011574.1,245-263).
ctactgggacactcgttaa

SEQ ID NO: 702558 - DNA, 19 bp, Mus musculus
  siRNA target sequence for Tex292 (NM_011574.1,342-360).
cgagggcacggtattccat

SEQ ID NO: 702559 - DNA, 19 bp, Mus musculus
  siRNA target sequence for Tex292 (NM_011574.1,343-361).
gagggcacggtattccatt

SEQ ID NO: 702560 - DNA, 19 bp, Mus musculus
  siRNA target sequence for Tex292 (NM_011574.1,347-365).
gcacggtattccatttcca

SEQ ID NO: 702561 - DNA, 19 bp, Mus musculus
  siRNA target sequence for Tex292 (NM_011574.1,489-507).
cgacacccacctggttatt

SEQ ID NO: 702562 - DNA, 19 bp, Mus musculus
  siRNA target sequence for Tex292 (NM_011574.1,528-546).
ggaggtaaagaattacgat

SEQ ID NO: 702563 - DNA, 19 bp, Mus musculus
  siRNA target sequence for Tex292 (NM_011574.1,570-588).
cccccatcggcgtctcatt

SEQ ID NO: 702564 - DNA, 19 bp, Mus musculus
  siRNA target sequence for Tex292 (NM_011574.1,580-598).
cgtctcatttcctgttcaa

SEQ ID NO: 702565 - DNA, 19 bp, Mus musculus
  siRNA target sequence for Tex292 (NM_011574.1,581-599).
gtctcatttcctgttcaaa

SEQ ID NO: 702566 - DNA, 19 bp, Mus musculus
  siRNA target sequence for Tex292 (NM_011574.1,674-692).
gcaagaacggagatactct

SEQ ID NO: 702567 - DNA, 19 bp, Mus musculus
  siRNA target sequence for Tex292 (NM_011574.1,675-693).
caagaacggagatactctt

SEQ ID NO: 702568 - DNA, 19 bp, Mus musculus
  siRNA target sequence for Tex292 (NM_011574.1,739-757).
ggccctgagaacattatct

SEQ ID NO: 702569 - DNA, 19 bp, Mus musculus
  siRNA target sequence for Tex292 (NM_011574.1,800-818).
cagcgtctcgcttttttct

SEQ ID NO: 702570 - DNA, 19 bp, Mus musculus
  siRNA target sequence for Tex292 (NM_011574.1,802-820).
gcgtctcgcttttttctct

SEQ ID NO: 702571 - DNA, 19 bp, Mus musculus
  siRNA target sequence for Tex292 (NM_011574.1,803-821).
cgtctcgcttttttctcta

SEQ ID NO: 702572 - DNA, 19 bp, Mus musculus
  siRNA target sequence for Tex292 (NM_011574.1,808-826).
cgcttttttctctatcgat

SEQ ID NO: 702573 - DNA, 19 bp, Mus musculus
  siRNA target sequence for Tex292 (NM_011574.1,809-827).
gcttttttctctatcgatt

SEQ ID NO: 702574 - DNA, 19 bp, Mus musculus
  siRNA target sequence for Tex292 (NM_011574.1,819-837).
ctatcgattgaaatatgaa

SEQ ID NO: 702575 - DNA, 19 bp, Mus musculus
  siRNA target sequence for Tex292 (NM_011574.1,927-945).
gctccttgtggcatccaat

SEQ ID NO: 702576 - DNA, 19 bp, Mus musculus
  siRNA target sequence for Tex292 (NM_011574.1,930-948).
ccttgtggcatccaatcaa

SEQ ID NO: 702577 - DNA, 19 bp, Mus musculus
  siRNA target sequence for Tex292 (NM_011574.1,1094-1112).
gagtccacgtatatgatct

SEQ ID NO: 702578 - DNA, 19 bp, Mus musculus
  siRNA target sequence for Tex292 (NM_011574.1,1194-1212).
cctggtcattgctcattct

SEQ ID NO: 702579 - DNA, 19 bp, Mus musculus
  siRNA target sequence for Tex292 (NM_011574.1,1211-1229).
ctgaccagcaggtatttga

SEQ ID NO: 702580 - DNA, 19 bp, Mus musculus
  siRNA target sequence for Tex292 (NM_011574.1,1239-1257).
cccagaaaagcagtataca

SEQ ID NO: 702581 - DNA, 19 bp, Mus musculus
  siRNA target sequence for Tex292 (NM_011574.1,1369-1387).
catgatgcctacatgttct

SEQ ID NO: 702582 - DNA, 19 bp, Mus musculus
  siRNA target sequence for Tex292 (NM_011574.1,1388-1406).
gcatcattgacaagtcatt

SEQ ID NO: 702583 - DNA, 19 bp, Mus musculus
  siRNA target sequence for Tex292 (NM_011574.1,1420-1438).
gagaaaactgtgctttata

SEQ ID NO: 702584 - DNA, 19 bp, Mus musculus
  siRNA target sequence for Tex292 (NM_011574.1,1442-1460).
cacttcctccgaaaaatga

SEQ ID NO: 702585 - DNA, 19 bp, Mus musculus
  siRNA target sequence for Tex292 (NM_011574.1,1481-1499).
ggacaacccatgggtttaa

SEQ ID NO: 702586 - DNA, 19 bp, Mus musculus
  siRNA target sequence for Tex292 (NM_011574.1,1482-1500).
gacaacccatgggtttaaa

SEQ ID NO: 702587 - DNA, 19 bp, Mus musculus
  siRNA target sequence for Tex292 (NM_011574.1,1484-1502).
caacccatgggtttaaaat

SEQ ID NO: 702588 - DNA, 19 bp, Mus musculus
  siRNA target sequence for Tex292 (NM_011574.1,1518-1536).
gcccttgctctttatggat

SEQ ID NO: 702589 - DNA, 19 bp, Mus musculus
  siRNA target sequence for Tex292 (NM_011574.1,1600-1618).
ccaccacccatcaaaaaga

SEQ ID NO: 702590 - DNA, 19 bp, Mus musculus
  siRNA target sequence for Tff3 (NM_011575.1,94-112).
ggatagctgcagattacgt

SEQ ID NO: 702591 - DNA, 19 bp, Mus musculus
  siRNA target sequence for Tff3 (NM_011575.1,95-113).
gatagctgcagattacgtt

SEQ ID NO: 702592 - DNA, 19 bp, Mus musculus
  siRNA target sequence for Tff3 (NM_011575.1,133-151).
gtatggtgccggcaaatgt

SEQ ID NO: 702593 - DNA, 19 bp, Mus musculus
  siRNA target sequence for Tff3 (NM_011575.1,181-199).
catcggagcagtgtaacaa

SEQ ID NO: 702594 - DNA, 19 bp, Mus musculus
  siRNA target sequence for Tff3 (NM_011575.1,261-279).
gagacagaatgcacatttt

SEQ ID NO: 702595 - DNA, 19 bp, Mus musculus
  siRNA target sequence for Tgfbr3 (NM_011578.1,402-420).
gggaggttcacatcctaaa

SEQ ID NO: 702596 - DNA, 19 bp, Mus musculus
  siRNA target sequence for Tgfbr3 (NM_011578.1,669-687).
ggagtttccctcaagaaaa

SEQ ID NO: 702597 - DNA, 19 bp, Mus musculus
  siRNA target sequence for Tgfbr3 (NM_011578.1,735-753).
cattcaccgaacttaagat

SEQ ID NO: 702598 - DNA, 19 bp, Mus musculus
  siRNA target sequence for Tgfbr3 (NM_011578.1,751-769).
gatagcaagaaatatctat

SEQ ID NO: 702599 - DNA, 19 bp, Mus musculus
  siRNA target sequence for Tgfbr3 (NM_011578.1,796-814).
ccctcccacgtgtaacata

SEQ ID NO: 702600 - DNA, 19 bp, Mus musculus
  siRNA target sequence for Tgfbr3 (NM_011578.1,804-822).
cgtgtaacatagggaaaaa

SEQ ID NO: 702601 - DNA, 19 bp, Mus musculus
  siRNA target sequence for Tgfbr3 (NM_011578.1,904-922).
gaaggaagtgcatatcatt

SEQ ID NO: 702602 - DNA, 19 bp, Mus musculus
  siRNA target sequence for Tgfbr3 (NM_011578.1,908-926).
gaagtgcatatcattgagt

SEQ ID NO: 702603 - DNA, 19 bp, Mus musculus
  siRNA target sequence for Tgfbr3 (NM_011578.1,911-929).
gtgcatatcattgagttaa

SEQ ID NO: 702604 - DNA, 19 bp, Mus musculus
  siRNA target sequence for Tgfbr3 (NM_011578.1,914-932).
catatcattgagttaatct

SEQ ID NO: 702605 - DNA, 19 bp, Mus musculus
  siRNA target sequence for Tgfbr3 (NM_011578.1,933-951).
cccccaactccaatcctta

SEQ ID NO: 702606 - DNA, 19 bp, Mus musculus
  siRNA target sequence for Tgfbr3 (NM_011578.1,954-972).
gcaccttccaggtggatat

SEQ ID NO: 702607 - DNA, 19 bp, Mus musculus
  siRNA target sequence for Tgfbr3 (NM_011578.1,955-973).
caccttccaggtggatata

SEQ ID NO: 702608 - DNA, 19 bp, Mus musculus
  siRNA target sequence for Tgfbr3 (NM_011578.1,957-975).
ccttccaggtggatataat

SEQ ID NO: 702609 - DNA, 19 bp, Mus musculus
  siRNA target sequence for Tgfbr3 (NM_011578.1,958-976).
cttccaggtggatataata

SEQ ID NO: 702610 - DNA, 19 bp, Mus musculus
  siRNA target sequence for Tgfbr3 (NM_011578.1,965-983).
gtggatataataattgaca

SEQ ID NO: 702611 - DNA, 19 bp, Mus musculus
  siRNA target sequence for Tgfbr3 (NM_011578.1,967-985).
ggatataataattgacata

SEQ ID NO: 702612 - DNA, 19 bp, Mus musculus
  siRNA target sequence for Tgfbr3 (NM_011578.1,1022-1040).
ctcgtcctgatcttgaagt

SEQ ID NO: 702613 - DNA, 19 bp, Mus musculus
  siRNA target sequence for Tgfbr3 (NM_011578.1,1059-1077).
gggtgatcaagtcttttga

SEQ ID NO: 702614 - DNA, 19 bp, Mus musculus
  siRNA target sequence for Tgfbr3 (NM_011578.1,1078-1096).
cgtcaagggaaacttgaaa

SEQ ID NO: 702615 - DNA, 19 bp, Mus musculus
  siRNA target sequence for Tgfbr3 (NM_011578.1,1143-1161).
ccatgacagtgaccaaatt

SEQ ID NO: 702616 - DNA, 19 bp, Mus musculus
  siRNA target sequence for Tgfbr3 (NM_011578.1,1147-1165).
gacagtgaccaaattggta

SEQ ID NO: 702617 - DNA, 19 bp, Mus musculus
  siRNA target sequence for Tgfbr3 (NM_011578.1,1151-1169).
gtgaccaaattggtaagaa

SEQ ID NO: 702618 - DNA, 19 bp, Mus musculus
  siRNA target sequence for Tgfbr3 (NM_011578.1,1153-1171).
gaccaaattggtaagaaat

SEQ ID NO: 702619 - DNA, 19 bp, Mus musculus
  siRNA target sequence for Tgfbr3 (NM_011578.1,1177-1195).
cccttccacccaagagaat

SEQ ID NO: 702620 - DNA, 19 bp, Mus musculus
  siRNA target sequence for Tgfbr3 (NM_011578.1,1182-1200).
ccacccaagagaatctgat

SEQ ID NO: 702621 - DNA, 19 bp, Mus musculus
  siRNA target sequence for Tgfbr3 (NM_011578.1,1250-1268).
gctcctgtggccaatagat

SEQ ID NO: 702622 - DNA, 19 bp, Mus musculus
  siRNA target sequence for Tgfbr3 (NM_011578.1,1251-1269).
ctcctgtggccaatagatt

SEQ ID NO: 702623 - DNA, 19 bp, Mus musculus
  siRNA target sequence for Tgfbr3 (NM_011578.1,1406-1424).
ggaggtttcccctttccat

SEQ ID NO: 702624 - DNA, 19 bp, Mus musculus
  siRNA target sequence for Tgfbr3 (NM_011578.1,1558-1576).
cgccctgtcagtcaaatgt

SEQ ID NO: 702625 - DNA, 19 bp, Mus musculus
  siRNA target sequence for Tgfbr3 (NM_011578.1,1560-1578).
ccctgtcagtcaaatgtga

SEQ ID NO: 702626 - DNA, 19 bp, Mus musculus
  siRNA target sequence for Tgfbr3 (NM_011578.1,1564-1582).
gtcagtcaaatgtgacaat

SEQ ID NO: 702627 - DNA, 19 bp, Mus musculus
  siRNA target sequence for Tgfbr3 (NM_011578.1,1681-1699).
gaatggtacccactttgtt

SEQ ID NO: 702628 - DNA, 19 bp, Mus musculus
  siRNA target sequence for Tgfbr3 (NM_011578.1,1746-1764).
ccccagatggtgtggttta

SEQ ID NO: 702629 - DNA, 19 bp, Mus musculus
  siRNA target sequence for Tgfbr3 (NM_011578.1,1748-1766).
ccagatggtgtggtttact

SEQ ID NO: 702630 - DNA, 19 bp, Mus musculus
  siRNA target sequence for Tgfbr3 (NM_011578.1,1751-1769).
gatggtgtggtttactata

SEQ ID NO: 702631 - DNA, 19 bp, Mus musculus
  siRNA target sequence for Tgfbr3 (NM_011578.1,1754-1772).
ggtgtggtttactataact

SEQ ID NO: 702632 - DNA, 19 bp, Mus musculus
  siRNA target sequence for Tgfbr3 (NM_011578.1,1759-1777).
ggtttactataactctatt

SEQ ID NO: 702633 - DNA, 19 bp, Mus musculus
  siRNA target sequence for Tgfbr3 (NM_011578.1,1817-1835).
ccagacggctacgaagatt

SEQ ID NO: 702634 - DNA, 19 bp, Mus musculus
  siRNA target sequence for Tgfbr3 (NM_011578.1,1837-1855).
ggagtcgggtgataatgga

SEQ ID NO: 702635 - DNA, 19 bp, Mus musculus
  siRNA target sequence for Tgfbr3 (NM_011578.1,1838-1856).
gagtcgggtgataatggat

SEQ ID NO: 702636 - DNA, 19 bp, Mus musculus
  siRNA target sequence for Tgfbr3 (NM_011578.1,1901-1919).
gctggagtggtagtgttta

SEQ ID NO: 702637 - DNA, 19 bp, Mus musculus
  siRNA target sequence for Tgfbr3 (NM_011578.1,1902-1920).
ctggagtggtagtgtttaa

SEQ ID NO: 702638 - DNA, 19 bp, Mus musculus
  siRNA target sequence for Tgfbr3 (NM_011578.1,1963-1981).
ccagctcgatggaaatgct

SEQ ID NO: 702639 - DNA, 19 bp, Mus musculus
  siRNA target sequence for Tgfbr3 (NM_011578.1,2111-2129).
gccatccaaacctgcttta

SEQ ID NO: 702640 - DNA, 19 bp, Mus musculus
  siRNA target sequence for Tgfbr3 (NM_011578.1,2112-2130).
ccatccaaacctgctttat

SEQ ID NO: 702641 - DNA, 19 bp, Mus musculus
  siRNA target sequence for Tgfbr3 (NM_011578.1,2116-2134).
ccaaacctgctttatctct

SEQ ID NO: 702642 - DNA, 19 bp, Mus musculus
  siRNA target sequence for Tgfbr3 (NM_011578.1,2389-2407).
cgcctgcacctctctagat

SEQ ID NO: 702643 - DNA, 19 bp, Mus musculus
  siRNA target sequence for Tgfbr3 (NM_011578.1,2424-2442).
ccatgatgcagaataagaa

SEQ ID NO: 702644 - DNA, 19 bp, Mus musculus
  siRNA target sequence for Tgfbr3 (NM_011578.1,2432-2450).
cagaataagaagacattca

SEQ ID NO: 702645 - DNA, 19 bp, Mus musculus
  siRNA target sequence for Tgfbr3 (NM_011578.1,2463-2481).
ccgtggtcctccaagtaga

SEQ ID NO: 702646 - DNA, 19 bp, Mus musculus
  siRNA target sequence for Tgfbr3 (NM_011578.1,2464-2482).
cgtggtcctccaagtagat

SEQ ID NO: 702647 - DNA, 19 bp, Mus musculus
  siRNA target sequence for Tgfbr3 (NM_011578.1,2465-2483).
gtggtcctccaagtagatt

SEQ ID NO: 702648 - DNA, 19 bp, Mus musculus
  siRNA target sequence for Tgfbr3 (NM_011578.1,2467-2485).
ggtcctccaagtagattat

SEQ ID NO: 702649 - DNA, 19 bp, Mus musculus
  siRNA target sequence for Tgfbr3 (NM_011578.1,2470-2488).
cctccaagtagattataaa

SEQ ID NO: 702650 - DNA, 19 bp, Mus musculus
  siRNA target sequence for Tgfbr3 (NM_011578.1,2575-2593).
cattgcgtttgcagcattt

SEQ ID NO: 702651 - DNA, 19 bp, Mus musculus
  siRNA target sequence for Tgfbr3 (NM_011578.1,2618-2636).
gccttgtggtatatctact

SEQ ID NO: 702652 - DNA, 19 bp, Mus musculus
  siRNA target sequence for Tgtp (NM_011579.2,277-295).
ccagctttgatgcattctt

SEQ ID NO: 702653 - DNA, 19 bp, Mus musculus
  siRNA target sequence for Tgtp (NM_011579.2,317-335).
caaaatcatctctgaatat

SEQ ID NO: 702654 - DNA, 19 bp, Mus musculus
  siRNA target sequence for Tgtp (NM_011579.2,336-354).
gacatcaccttgattatga

SEQ ID NO: 702655 - DNA, 19 bp, Mus musculus
  siRNA target sequence for Tgtp (NM_011579.2,353-371).
gacttacatagaggaaaat

SEQ ID NO: 702656 - DNA, 19 bp, Mus musculus
  siRNA target sequence for Tgtp (NM_011579.2,610-628).
gcattgggaccactaactt

SEQ ID NO: 702657 - DNA, 19 bp, Mus musculus
  siRNA target sequence for Tgtp (NM_011579.2,738-756).
gcacagatggggatgaatt

SEQ ID NO: 702658 - DNA, 19 bp, Mus musculus
  siRNA target sequence for Tgtp (NM_011579.2,741-759).
cagatggggatgaatttct

SEQ ID NO: 702659 - DNA, 19 bp, Mus musculus
  siRNA target sequence for Tgtp (NM_011579.2,776-794).
gatagacagcgacttagat

SEQ ID NO: 702660 - DNA, 19 bp, Mus musculus
  siRNA target sequence for Tgtp (NM_011579.2,803-821).
gaagtttaagcctaagagt

SEQ ID NO: 702661 - DNA, 19 bp, Mus musculus
  siRNA target sequence for Tgtp (NM_011579.2,912-930).
gtctctaacgttgatatat

SEQ ID NO: 702662 - DNA, 19 bp, Mus musculus
  siRNA target sequence for Tgtp (NM_011579.2,916-934).
ctaacgttgatatatcgaa

SEQ ID NO: 702663 - DNA, 19 bp, Mus musculus
  siRNA target sequence for Tgtp (NM_011579.2,920-938).
cgttgatatatcgaagtat

SEQ ID NO: 702664 - DNA, 19 bp, Mus musculus
  siRNA target sequence for Tgtp (NM_011579.2,924-942).
gatatatcgaagtatgact

SEQ ID NO: 702665 - DNA, 19 bp, Mus musculus
  siRNA target sequence for Tgtp (NM_011579.2,1009-1027).
ctttgcaaagtcttactga

SEQ ID NO: 702666 - DNA, 19 bp, Mus musculus
  siRNA target sequence for Tgtp (NM_011579.2,1020-1038).
cttactgaggccaccatta

SEQ ID NO: 702667 - DNA, 19 bp, Mus musculus
  siRNA target sequence for Tgtp (NM_011579.2,1054-1072).
ccctgaagcaaaaagtctt

SEQ ID NO: 702668 - DNA, 19 bp, Mus musculus
  siRNA target sequence for Tgtp (NM_011579.2,1082-1100).
catgaaggctggagcatta

SEQ ID NO: 702669 - DNA, 19 bp, Mus musculus
  siRNA target sequence for Tgtp (NM_011579.2,1110-1128).
ccacttggtggcatgatca

SEQ ID NO: 702670 - DNA, 19 bp, Mus musculus
  siRNA target sequence for Tgtp (NM_011579.2,1116-1134).
ggtggcatgatcagtgata

SEQ ID NO: 702671 - DNA, 19 bp, Mus musculus
  siRNA target sequence for Tgtp (NM_011579.2,1117-1135).
gtggcatgatcagtgatat

SEQ ID NO: 702672 - DNA, 19 bp, Mus musculus
  siRNA target sequence for Tgtp (NM_011579.2,1120-1138).
gcatgatcagtgatatctt

SEQ ID NO: 702673 - DNA, 19 bp, Mus musculus
  siRNA target sequence for Tgtp (NM_011579.2,1121-1139).
catgatcagtgatatctta

SEQ ID NO: 702674 - DNA, 19 bp, Mus musculus
  siRNA target sequence for Tgtp (NM_011579.2,1244-1262).
caaggtacaccttcgattt

SEQ ID NO: 702675 - DNA, 19 bp, Mus musculus
  siRNA target sequence for Tgtp (NM_011579.2,1283-1301).
caatgatgagtccttagaa

SEQ ID NO: 702676 - DNA, 19 bp, Mus musculus
  siRNA target sequence for Tgtp (NM_011579.2,1294-1312).
ccttagaagacaagctatt

SEQ ID NO: 702677 - DNA, 19 bp, Mus musculus
  siRNA target sequence for Tgtp (NM_011579.2,1302-1320).
gacaagctatttaaatata

SEQ ID NO: 702678 - DNA, 19 bp, Mus musculus
  siRNA target sequence for Tgtp (NM_011579.2,1370-1388).
ctatcgcatggcttattat

SEQ ID NO: 702679 - DNA, 19 bp, Mus musculus
  siRNA target sequence for Tgtp (NM_011579.2,1381-1399).
cttattatttgcagaatct

SEQ ID NO: 702680 - DNA, 19 bp, Mus musculus
  siRNA target sequence for Tgtp (NM_011579.2,1444-1462).
gtaaagcactttttgagaa

SEQ ID NO: 702681 - DNA, 19 bp, Mus musculus
  siRNA target sequence for Tgtp (NM_011579.2,1460-1478).
gaagaaggtgggaccatat

SEQ ID NO: 702682 - DNA, 19 bp, Mus musculus
  siRNA target sequence for Tgtp (NM_011579.2,1466-1484).
ggtgggaccatatatatct

SEQ ID NO: 702683 - DNA, 19 bp, Mus musculus
  siRNA target sequence for Tlm (NM_011601.1,24-42).
cagacctcagtcatctaga

SEQ ID NO: 702684 - DNA, 19 bp, Mus musculus
  siRNA target sequence for Tlm (NM_011601.1,74-92).
ctgaccttctggtgctttt

SEQ ID NO: 702685 - DNA, 19 bp, Mus musculus
  siRNA target sequence for Tlm (NM_011601.1,112-130).
ctctccactgttatgatgt

SEQ ID NO: 702686 - DNA, 19 bp, Mus musculus
  siRNA target sequence for Tlm (NM_011601.1,145-163).
ccagctcctgccaagatca

SEQ ID NO: 702687 - DNA, 19 bp, Mus musculus
  siRNA target sequence for Tlm (NM_011601.1,352-370).
ggattctttgattcaatgt

SEQ ID NO: 702688 - DNA, 19 bp, Mus musculus
  siRNA target sequence for Tlm (NM_011601.1,375-393).
cctccaatgcactcttgtt

SEQ ID NO: 702689 - DNA, 19 bp, Mus musculus
  siRNA target sequence for Tlm (NM_011601.1,578-596).
cagtgagtggtctttcctt

SEQ ID NO: 702690 - DNA, 19 bp, Mus musculus
  siRNA target sequence for Tlm (NM_011601.1,656-674).
gaaggcacggtagtactat

SEQ ID NO: 702691 - DNA, 19 bp, Mus musculus
  siRNA target sequence for Tnnt1 (NM_011618.1,262-280).
gcatggagaaagacttact

SEQ ID NO: 702692 - DNA, 19 bp, Mus musculus
  siRNA target sequence for Tnnt1 (NM_011618.1,517-535).
ccaacatgggagctcattt

SEQ ID NO: 702693 - DNA, 19 bp, Mus musculus
  siRNA target sequence for Tnnt1 (NM_011618.1,581-599).
gactggtcgggagatgaaa

SEQ ID NO: 702694 - DNA, 19 bp, Mus musculus
  siRNA target sequence for Tnnt1 (NM_011618.1,619-637).
ggaaaaagcccttgaacat

SEQ ID NO: 702695 - DNA, 19 bp, Mus musculus
  siRNA target sequence for Tnnt1 (NM_011618.1,628-646).
ccttgaacatcgactacat

SEQ ID NO: 702696 - DNA, 19 bp, Mus musculus
  siRNA target sequence for Tnnt1 (NM_011618.1,695-713).
ccaccagctggaatcagaa

SEQ ID NO: 702697 - DNA, 19 bp, Mus musculus
  siRNA target sequence for Tnnt1 (NM_011618.1,696-714).
caccagctggaatcagaaa

SEQ ID NO: 702698 - DNA, 19 bp, Mus musculus
  siRNA target sequence for Tpbg (NM_011627.2,784-802).
ccttacgtgcgcaaccttt

SEQ ID NO: 702699 - DNA, 19 bp, Mus musculus
  siRNA target sequence for Tpbg (NM_011627.2,790-808).
gtgcgcaaccttttcctta

SEQ ID NO: 702700 - DNA, 19 bp, Mus musculus
  siRNA target sequence for Tpbg (NM_011627.2,1042-1060).
gagctgatcctgaatcaca

SEQ ID NO: 702701 - DNA, 19 bp, Mus musculus
  siRNA target sequence for Tpbg (NM_011627.2,1179-1197).
gctagccagcaatcacttt

SEQ ID NO: 702702 - DNA, 19 bp, Mus musculus
  siRNA target sequence for Tpbg (NM_011627.2,1203-1221).
cctgcctcgggacttacta

SEQ ID NO: 702703 - DNA, 19 bp, Mus musculus
  siRNA target sequence for Tpbg (NM_011627.2,1447-1465).
gtggcttggcttaaagaga

SEQ ID NO: 702704 - DNA, 19 bp, Mus musculus
  siRNA target sequence for Tpbg (NM_011627.2,1621-1639).
gctctgataggcgctattt

SEQ ID NO: 702705 - DNA, 19 bp, Mus musculus
  siRNA target sequence for Tpbg (NM_011627.2,1622-1640).
ctctgataggcgctatttt

SEQ ID NO: 702706 - DNA, 19 bp, Mus musculus
  siRNA target sequence for Tpbg (NM_011627.2,1634-1652).
ctattttcctcctcgtttt

SEQ ID NO: 702707 - DNA, 19 bp, Mus musculus
  siRNA target sequence for Tpbg (NM_011627.2,1642-1660).
ctcctcgttttgtatttga

SEQ ID NO: 702708 - DNA, 19 bp, Mus musculus
  siRNA target sequence for Tpbg (NM_011627.2,1663-1681).
cgtaaaggcataaaaaagt

SEQ ID NO: 702709 - DNA, 19 bp, Mus musculus
  siRNA target sequence for Tpbg (NM_011627.2,1714-1732).
cacatggaagggtatcatt

SEQ ID NO: 702710 - DNA, 19 bp, Mus musculus
  siRNA target sequence for Tpbg (NM_011627.2,1719-1737).
ggaagggtatcattacaga

SEQ ID NO: 702711 - DNA, 19 bp, Mus musculus
  siRNA target sequence for Tpbg (NM_011627.2,1720-1738).
gaagggtatcattacagat

SEQ ID NO: 702712 - DNA, 19 bp, Mus musculus
  siRNA target sequence for Tpbg (NM_011627.2,1725-1743).
gtatcattacagatacgaa

SEQ ID NO: 702713 - DNA, 19 bp, Mus musculus
  siRNA target sequence for Tpbg (NM_011627.2,1750-1768).
gcggaccccagattaacaa

SEQ ID NO: 702714 - DNA, 19 bp, Mus musculus
  siRNA target sequence for Tpbg (NM_011627.2,1751-1769).
cggaccccagattaacaaa

SEQ ID NO: 702715 - DNA, 19 bp, Mus musculus
  siRNA target sequence for Tpbg (NM_011627.2,1752-1770).
ggaccccagattaacaaat

SEQ ID NO: 702716 - DNA, 19 bp, Mus musculus
  siRNA target sequence for Tpbg (NM_011627.2,1756-1774).
cccagattaacaaatctta

SEQ ID NO: 702717 - DNA, 19 bp, Mus musculus
  siRNA target sequence for Traf5 (NM_011633.1,371-389).
cagaactctggcaactcaa

SEQ ID NO: 702718 - DNA, 19 bp, Mus musculus
  siRNA target sequence for Traf5 (NM_011633.1,373-391).
gaactctggcaactcaatt

SEQ ID NO: 702719 - DNA, 19 bp, Mus musculus
  siRNA target sequence for Traf5 (NM_011633.1,378-396).
ctggcaactcaatttcctt

SEQ ID NO: 702720 - DNA, 19 bp, Mus musculus
  siRNA target sequence for Traf5 (NM_011633.1,465-483).
gccactccgtgcttcacaa

SEQ ID NO: 702721 - DNA, 19 bp, Mus musculus
  siRNA target sequence for Traf5 (NM_011633.1,530-548).
cggtctctgagagaattga

SEQ ID NO: 702722 - DNA, 19 bp, Mus musculus
  siRNA target sequence for Traf5 (NM_011633.1,531-549).
ggtctctgagagaattgaa

SEQ ID NO: 702723 - DNA, 19 bp, Mus musculus
  siRNA target sequence for Traf5 (NM_011633.1,558-576).
cgatctgcccggtagacaa

SEQ ID NO: 702724 - DNA, 19 bp, Mus musculus
  siRNA target sequence for Traf5 (NM_011633.1,615-633).
gctgcaaaagagaagttct

SEQ ID NO: 702725 - DNA, 19 bp, Mus musculus
  siRNA target sequence for Traf5 (NM_011633.1,665-683).
gggtgcaatgccaggatta

SEQ ID NO: 702726 - DNA, 19 bp, Mus musculus
  siRNA target sequence for Traf5 (NM_011633.1,666-684).
ggtgcaatgccaggattat

SEQ ID NO: 702727 - DNA, 19 bp, Mus musculus
  siRNA target sequence for Traf5 (NM_011633.1,667-685).
gtgcaatgccaggattatt

SEQ ID NO: 702728 - DNA, 19 bp, Mus musculus
  siRNA target sequence for Traf5 (NM_011633.1,669-687).
gcaatgccaggattattct

SEQ ID NO: 702729 - DNA, 19 bp, Mus musculus
  siRNA target sequence for Traf5 (NM_011633.1,933-951).
caagagctagggtgaatga

SEQ ID NO: 702730 - DNA, 19 bp, Mus musculus
  siRNA target sequence for Traf5 (NM_011633.1,946-964).
gaatgaacaccttactgta

SEQ ID NO: 702731 - DNA, 19 bp, Mus musculus
  siRNA target sequence for Traf5 (NM_011633.1,1087-1105).
gaagaactaccaactagaa

SEQ ID NO: 702732 - DNA, 19 bp, Mus musculus
  siRNA target sequence for Traf5 (NM_011633.1,1173-1191).
ccgtgaagaagttcgaaaa

SEQ ID NO: 702733 - DNA, 19 bp, Mus musculus
  siRNA target sequence for Traf5 (NM_011633.1,1201-1219).
gcagttcacacagatgttt

SEQ ID NO: 702734 - DNA, 19 bp, Mus musculus
  siRNA target sequence for Traf5 (NM_011633.1,1365-1383).
cggttgacagcgtgaaaca

SEQ ID NO: 702735 - DNA, 19 bp, Mus musculus
  siRNA target sequence for Traf5 (NM_011633.1,1367-1385).
gttgacagcgtgaaacaga

SEQ ID NO: 702736 - DNA, 19 bp, Mus musculus
  siRNA target sequence for Traf5 (NM_011633.1,1404-1422).
ccagtgaccagagattagt

SEQ ID NO: 702737 - DNA, 19 bp, Mus musculus
  siRNA target sequence for Traf5 (NM_011633.1,1405-1423).
cagtgaccagagattagtt

SEQ ID NO: 702738 - DNA, 19 bp, Mus musculus
  siRNA target sequence for Traf5 (NM_011633.1,1407-1425).
gtgaccagagattagttct

SEQ ID NO: 702739 - DNA, 19 bp, Mus musculus
  siRNA target sequence for Traf5 (NM_011633.1,1444-1462).
caagcacgacgcacacatt

SEQ ID NO: 702740 - DNA, 19 bp, Mus musculus
  siRNA target sequence for Traf5 (NM_011633.1,1714-1732).
ggtgatgcgcggtgagttt

SEQ ID NO: 702741 - DNA, 19 bp, Mus musculus
  siRNA target sequence for Traf5 (NM_011633.1,1792-1810).
cggcaagaagaaccatatt

SEQ ID NO: 702742 - DNA, 19 bp, Mus musculus
  siRNA target sequence for Traf5 (NM_011633.1,1794-1812).
gcaagaagaaccatattgt

SEQ ID NO: 702743 - DNA, 19 bp, Mus musculus
  siRNA target sequence for Traf5 (NM_011633.1,1854-1872).
ggccagatggcgagatgaa

SEQ ID NO: 702744 - DNA, 19 bp, Mus musculus
  siRNA target sequence for Traf5 (NM_011633.1,1856-1874).
ccagatggcgagatgaaca

SEQ ID NO: 702745 - DNA, 19 bp, Mus musculus
  siRNA target sequence for Traf5 (NM_011633.1,1857-1875).
cagatggcgagatgaacat

SEQ ID NO: 702746 - DNA, 19 bp, Mus musculus
  siRNA target sequence for Traf5 (NM_011633.1,1883-1901).
ggctgtccccgctttgtgt

SEQ ID NO: 702747 - DNA, 19 bp, Mus musculus
  siRNA target sequence for Traf5 (NM_011633.1,1943-1961).
gacgacacactgttcttga

SEQ ID NO: 702748 - DNA, 19 bp, Mus musculus
  siRNA target sequence for Traf5 (NM_011633.1,1945-1963).
cgacacactgttcttgaaa

SEQ ID NO: 702749 - DNA, 19 bp, Mus musculus
  siRNA target sequence for Traf5 (NM_011633.1,1960-1978).
gaaagtggccgtggattta

SEQ ID NO: 702750 - DNA, 19 bp, Mus musculus
  siRNA target sequence for Trip6 (NM_011639.2,293-311).
ctcaccccagggtcaactt

SEQ ID NO: 702751 - DNA, 19 bp, Mus musculus
  siRNA target sequence for Trip6 (NM_011639.2,321-339).
cccgcctgaacactgttat

SEQ ID NO: 702752 - DNA, 19 bp, Mus musculus
  siRNA target sequence for Trip6 (NM_011639.2,451-469).
ctggatgctgagatagatt

SEQ ID NO: 702753 - DNA, 19 bp, Mus musculus
  siRNA target sequence for Trip6 (NM_011639.2,681-699).
ccctgctttccctgtacaa

SEQ ID NO: 702754 - DNA, 19 bp, Mus musculus
  siRNA target sequence for Trip6 (NM_011639.2,683-701).
ctgctttccctgtacaagt

SEQ ID NO: 702755 - DNA, 19 bp, Mus musculus
  siRNA target sequence for Trip6 (NM_011639.2,686-704).
ctttccctgtacaagtgaa

SEQ ID NO: 702756 - DNA, 19 bp, Mus musculus
  siRNA target sequence for Trip6 (NM_011639.2,995-1013).
ctcccagtggggagtactt

SEQ ID NO: 702757 - DNA, 19 bp, Mus musculus
  siRNA target sequence for Trip6 (NM_011639.2,1077-1095).
ccgtgtcttccatattggt

SEQ ID NO: 702758 - DNA, 19 bp, Mus musculus
  siRNA target sequence for Trip6 (NM_011639.2,1078-1096).
cgtgtcttccatattggtt

SEQ ID NO: 702759 - DNA, 19 bp, Mus musculus
  siRNA target sequence for Trip6 (NM_011639.2,1083-1101).
cttccatattggttgcttt

SEQ ID NO: 702760 - DNA, 19 bp, Mus musculus
  siRNA target sequence for Tulp3 (NM_011657.1,180-198).
ccaggctgcgaaggttaaa

SEQ ID NO: 702761 - DNA, 19 bp, Mus musculus
  siRNA target sequence for Tulp3 (NM_011657.1,437-455).
caaaaacacggcatcttga

SEQ ID NO: 702762 - DNA, 19 bp, Mus musculus
  siRNA target sequence for Tulp3 (NM_011657.1,670-688).
cacggtgaagtgtaaagta

SEQ ID NO: 702763 - DNA, 19 bp, Mus musculus
  siRNA target sequence for Tulp3 (NM_011657.1,718-736).
cctcttccccacctactat

SEQ ID NO: 702764 - DNA, 19 bp, Mus musculus
  siRNA target sequence for Tulp3 (NM_011657.1,752-770).
gaggagaaccgcaagatat

SEQ ID NO: 702765 - DNA, 19 bp, Mus musculus
  siRNA target sequence for Tulp3 (NM_011657.1,754-772).
ggagaaccgcaagatattt

SEQ ID NO: 702766 - DNA, 19 bp, Mus musculus
  siRNA target sequence for Tulp3 (NM_011657.1,760-778).
ccgcaagatatttcttcta

SEQ ID NO: 702767 - DNA, 19 bp, Mus musculus
  siRNA target sequence for Tulp3 (NM_011657.1,791-809).
cggaaaaagagcaaaacgt

SEQ ID NO: 702768 - DNA, 19 bp, Mus musculus
  siRNA target sequence for Tulp3 (NM_011657.1,846-864).
ctcgtgaaggggaaagtta

SEQ ID NO: 702769 - DNA, 19 bp, Mus musculus
  siRNA target sequence for Tulp3 (NM_011657.1,976-994).
gctggctgctatctgttat

SEQ ID NO: 702770 - DNA, 19 bp, Mus musculus
  siRNA target sequence for Tulp3 (NM_011657.1,980-998).
gctgctatctgttatgaaa

SEQ ID NO: 702771 - DNA, 19 bp, Mus musculus
  siRNA target sequence for Tulp3 (NM_011657.1,1075-1093).
ccctttcaggccacgaaat

SEQ ID NO: 702772 - DNA, 19 bp, Mus musculus
  siRNA target sequence for Tulp3 (NM_011657.1,1077-1095).
ctttcaggccacgaaatga

SEQ ID NO: 702773 - DNA, 19 bp, Mus musculus
  siRNA target sequence for Tulp3 (NM_011657.1,1097-1115).
cacgagagcttgctttcaa

SEQ ID NO: 702774 - DNA, 19 bp, Mus musculus
  siRNA target sequence for Tulp3 (NM_011657.1,1191-1209).
cctacgtgctgaactttca

SEQ ID NO: 702775 - DNA, 19 bp, Mus musculus
  siRNA target sequence for Tulp3 (NM_011657.1,1221-1239).
cccaggcatccgtgaaaaa

SEQ ID NO: 702776 - DNA, 19 bp, Mus musculus
  siRNA target sequence for Tulp3 (NM_011657.1,1330-1348).
cccactgtgcgcacttcaa

SEQ ID NO: 702777 - DNA, 19 bp, Mus musculus
  siRNA target sequence for U2af1-rs1 (NM_011663.1,1201-1219).
gaccgcgattcctgagaaa

SEQ ID NO: 702778 - DNA, 19 bp, Mus musculus
  siRNA target sequence for U2af1-rs1 (NM_011663.1,1203-1221).
ccgcgattcctgagaaact

SEQ ID NO: 702779 - DNA, 19 bp, Mus musculus
  siRNA target sequence for U2af1-rs1 (NM_011663.1,1205-1223).
gcgattcctgagaaactca

SEQ ID NO: 702780 - DNA, 19 bp, Mus musculus
  siRNA target sequence for U2af1-rs1 (NM_011663.1,1220-1238).
ctcagccgaaaacaataca

SEQ ID NO: 702781 - DNA, 19 bp, Mus musculus
  siRNA target sequence for U2af1-rs1 (NM_011663.1,1367-1385).
gagatagagcggcaaagat

SEQ ID NO: 702782 - DNA, 19 bp, Mus musculus
  siRNA target sequence for U2af1-rs1 (NM_011663.1,1369-1387).
gatagagcggcaaagatta

SEQ ID NO: 702783 - DNA, 19 bp, Mus musculus
  siRNA target sequence for U2af1-rs1 (NM_011663.1,1375-1393).
gcggcaaagattacatgaa

SEQ ID NO: 702784 - DNA, 19 bp, Mus musculus
  siRNA target sequence for U2af1-rs1 (NM_011663.1,1418-1436).
gcgcaagaagaattcagaa

SEQ ID NO: 702785 - DNA, 19 bp, Mus musculus
  siRNA target sequence for U2af1-rs1 (NM_011663.1,1419-1437).
cgcaagaagaattcagaat

SEQ ID NO: 702786 - DNA, 19 bp, Mus musculus
  siRNA target sequence for U2af1-rs1 (NM_011663.1,1798-1816).
gtgcagaagggatgactat

SEQ ID NO: 702787 - DNA, 19 bp, Mus musculus
  siRNA target sequence for U2af1-rs1 (NM_011663.1,1915-1933).
ggtgattcagttcaaagta

SEQ ID NO: 702788 - DNA, 19 bp, Mus musculus
  siRNA target sequence for U2af1-rs1 (NM_011663.1,1916-1934).
gtgattcagttcaaagtaa

SEQ ID NO: 702789 - DNA, 19 bp, Mus musculus
  siRNA target sequence for Usp12 (NM_011669.1,145-163).
ctaatgacagtctccaaat

SEQ ID NO: 702790 - DNA, 19 bp, Mus musculus
  siRNA target sequence for Usp12 (NM_011669.1,188-206).
ccaatgcctcggcattaga

SEQ ID NO: 702791 - DNA, 19 bp, Mus musculus
  siRNA target sequence for Usp12 (NM_011669.1,213-231).
gattggtccagaacagttt

SEQ ID NO: 702792 - DNA, 19 bp, Mus musculus
  siRNA target sequence for Usp12 (NM_011669.1,232-250).
ccggtcaacgagcactatt

SEQ ID NO: 702793 - DNA, 19 bp, Mus musculus
  siRNA target sequence for Usp12 (NM_011669.1,233-251).
cggtcaacgagcactattt

SEQ ID NO: 702794 - DNA, 19 bp, Mus musculus
  siRNA target sequence for Usp12 (NM_011669.1,234-252).
ggtcaacgagcactatttt

SEQ ID NO: 702795 - DNA, 19 bp, Mus musculus
  siRNA target sequence for Usp12 (NM_011669.1,237-255).
caacgagcactattttgga

SEQ ID NO: 702796 - DNA, 19 bp, Mus musculus
  siRNA target sequence for Usp12 (NM_011669.1,240-258).
cgagcactattttggatta

SEQ ID NO: 702797 - DNA, 19 bp, Mus musculus
  siRNA target sequence for Usp12 (NM_011669.1,246-264).
ctattttggattagtcaat

SEQ ID NO: 702798 - DNA, 19 bp, Mus musculus
  siRNA target sequence for Usp12 (NM_011669.1,317-335).
gtccatttcgggaaaaagt

SEQ ID NO: 702799 - DNA, 19 bp, Mus musculus
  siRNA target sequence for Usp12 (NM_011669.1,320-338).
catttcgggaaaaagttct

SEQ ID NO: 702800 - DNA, 19 bp, Mus musculus
  siRNA target sequence for Usp12 (NM_011669.1,326-344).
gggaaaaagttctagcata

SEQ ID NO: 702801 - DNA, 19 bp, Mus musculus
  siRNA target sequence for Usp12 (NM_011669.1,461-479).
ggttgcggaaagaaaacga

SEQ ID NO: 702802 - DNA, 19 bp, Mus musculus
  siRNA target sequence for Usp12 (NM_011669.1,508-526).
gcccatgaattcttaaatt

SEQ ID NO: 702803 - DNA, 19 bp, Mus musculus
  siRNA target sequence for Usp12 (NM_011669.1,539-557).
caattgctgatattctaca

SEQ ID NO: 702804 - DNA, 19 bp, Mus musculus
  siRNA target sequence for Usp12 (NM_011669.1,545-563).
ctgatattctacaagaaga

SEQ ID NO: 702805 - DNA, 19 bp, Mus musculus
  siRNA target sequence for Usp12 (NM_011669.1,607-625).
gtggacaacgaggataaca

SEQ ID NO: 702806 - DNA, 19 bp, Mus musculus
  siRNA target sequence for Usp12 (NM_011669.1,657-675).
gatctttcagggaacatta

SEQ ID NO: 702807 - DNA, 19 bp, Mus musculus
  siRNA target sequence for Usp12 (NM_011669.1,660-678).
ctttcagggaacattaact

SEQ ID NO: 702808 - DNA, 19 bp, Mus musculus
  siRNA target sequence for Usp12 (NM_011669.1,694-712).
cttacttgtgaaactataa

SEQ ID NO: 702809 - DNA, 19 bp, Mus musculus
  siRNA target sequence for Usp12 (NM_011669.1,707-725).
ctataagcagcaaagatga

SEQ ID NO: 702810 - DNA, 19 bp, Mus musculus
  siRNA target sequence for Usp12 (NM_011669.1,745-763).
gttgacgtggaacaaaaca

SEQ ID NO: 702811 - DNA, 19 bp, Mus musculus
  siRNA target sequence for Usp12 (NM_011669.1,751-769).
gtggaacaaaacacatcaa

SEQ ID NO: 702812 - DNA, 19 bp, Mus musculus
  siRNA target sequence for Usp12 (NM_011669.1,753-771).
ggaacaaaacacatcaatt

SEQ ID NO: 702813 - DNA, 19 bp, Mus musculus
  siRNA target sequence for Usp12 (NM_011669.1,812-830).
gcagtgaatataagtacta

SEQ ID NO: 702814 - DNA, 19 bp, Mus musculus
  siRNA target sequence for Usp12 (NM_011669.1,862-880).
cacaagcggatgaaggtta

SEQ ID NO: 702815 - DNA, 19 bp, Mus musculus
  siRNA target sequence for Usp12 (NM_011669.1,940-958).
caccggtacacgaagcttt

SEQ ID NO: 702816 - DNA, 19 bp, Mus musculus
  siRNA target sequence for Usp12 (NM_011669.1,945-963).
gtacacgaagctttcttat

SEQ ID NO: 702817 - DNA, 19 bp, Mus musculus
  siRNA target sequence for Usp12 (NM_011669.1,1072-1090).
cccaaccgaggccattata

SEQ ID NO: 702818 - DNA, 19 bp, Mus musculus
  siRNA target sequence for Usp12 (NM_011669.1,1073-1091).
ccaaccgaggccattatat

SEQ ID NO: 702819 - DNA, 19 bp, Mus musculus
  siRNA target sequence for Usp12 (NM_011669.1,1074-1092).
caaccgaggccattatatt

SEQ ID NO: 702820 - DNA, 19 bp, Mus musculus
  siRNA target sequence for Usp12 (NM_011669.1,1077-1095).
ccgaggccattatattgca

SEQ ID NO: 702821 - DNA, 19 bp, Mus musculus
  siRNA target sequence for Usp12 (NM_011669.1,1082-1100).
gccattatattgcaatagt

SEQ ID NO: 702822 - DNA, 19 bp, Mus musculus
  siRNA target sequence for Usp12 (NM_011669.1,1152-1170).
cgatgcccaagctattgaa

SEQ ID NO: 702823 - DNA, 19 bp, Mus musculus
  siRNA target sequence for Usp12 (NM_011669.1,1217-1235).
gctacatccttttctatca

SEQ ID NO: 702824 - DNA, 19 bp, Mus musculus
  siRNA target sequence for Usf2 (NM_011680.1,234-252).
gcgttcggcgaccacaata

SEQ ID NO: 702825 - DNA, 19 bp, Mus musculus
  siRNA target sequence for Usf2 (NM_011680.1,235-253).
cgttcggcgaccacaatat

SEQ ID NO: 702826 - DNA, 19 bp, Mus musculus
  siRNA target sequence for Usf2 (NM_011680.1,266-284).
ccgtacagagagtaatgga

SEQ ID NO: 702827 - DNA, 19 bp, Mus musculus
  siRNA target sequence for Usf2 (NM_011680.1,493-511).
ctgtaattcaaaatccatt

SEQ ID NO: 702828 - DNA, 19 bp, Mus musculus
  siRNA target sequence for Usf2 (NM_011680.1,545-563).
cagcggggaggcacgattt

SEQ ID NO: 702829 - DNA, 19 bp, Mus musculus
  siRNA target sequence for Usf2 (NM_011680.1,548-566).
cggggaggcacgatttgct

SEQ ID NO: 702830 - DNA, 19 bp, Mus musculus
  siRNA target sequence for Usf2 (NM_011680.1,549-567).
ggggaggcacgatttgctt

SEQ ID NO: 702831 - DNA, 19 bp, Mus musculus
  siRNA target sequence for Usf2 (NM_011680.1,550-568).
gggaggcacgatttgctta

SEQ ID NO: 702832 - DNA, 19 bp, Mus musculus
  siRNA target sequence for Usf2 (NM_011680.1,551-569).
ggaggcacgatttgcttat

SEQ ID NO: 702833 - DNA, 19 bp, Mus musculus
  siRNA target sequence for Usf2 (NM_011680.1,552-570).
gaggcacgatttgcttatt

SEQ ID NO: 702834 - DNA, 19 bp, Mus musculus
  siRNA target sequence for Usf2 (NM_011680.1,554-572).
ggcacgatttgcttatttt

SEQ ID NO: 702835 - DNA, 19 bp, Mus musculus
  siRNA target sequence for Usf2 (NM_011680.1,635-653).
ggccggaggccagttctat

SEQ ID NO: 702836 - DNA, 19 bp, Mus musculus
  siRNA target sequence for Usf2 (NM_011680.1,637-655).
ccggaggccagttctatgt

SEQ ID NO: 702837 - DNA, 19 bp, Mus musculus
  siRNA target sequence for Usf2 (NM_011680.1,710-728).
ccggacacacccctattct

SEQ ID NO: 702838 - DNA, 19 bp, Mus musculus
  siRNA target sequence for Usf2 (NM_011680.1,719-737).
cccctattctccgaaaatt

SEQ ID NO: 702839 - DNA, 19 bp, Mus musculus
  siRNA target sequence for Usf2 (NM_011680.1,823-841).
ggatcgtccagctttccaa

SEQ ID NO: 702840 - DNA, 19 bp, Mus musculus
  siRNA target sequence for Usf2 (NM_011680.1,839-857).
caaaatcattccagattgt

SEQ ID NO: 702841 - DNA, 19 bp, Mus musculus
  siRNA target sequence for Usf2 (NM_011680.1,904-922).
ccaaggcttgcgattacat

SEQ ID NO: 702842 - DNA, 19 bp, Mus musculus
  siRNA target sequence for Vwf (NM_011708.2,123-141).
cttcatcaacacgtttgat

SEQ ID NO: 702843 - DNA, 19 bp, Mus musculus
  siRNA target sequence for Vwf (NM_011708.2,161-179).
cagggggctgcagttatct

SEQ ID NO: 702844 - DNA, 19 bp, Mus musculus
  siRNA target sequence for Vwf (NM_011708.2,187-205).
ggggactgccagaaacgtt

SEQ ID NO: 702845 - DNA, 19 bp, Mus musculus
  siRNA target sequence for Vwf (NM_011708.2,256-274).
gtgtatcttggggagtttt

SEQ ID NO: 702846 - DNA, 19 bp, Mus musculus
  siRNA target sequence for Vwf (NM_011708.2,485-503).
gcggtgattttaacatctt

SEQ ID NO: 702847 - DNA, 19 bp, Mus musculus
  siRNA target sequence for Vwf (NM_011708.2,540-558).
gacctcagacccctatgat

SEQ ID NO: 702848 - DNA, 19 bp, Mus musculus
  siRNA target sequence for Vwf (NM_011708.2,542-560).
cctcagacccctatgattt

SEQ ID NO: 702849 - DNA, 19 bp, Mus musculus
  siRNA target sequence for Vwf (NM_011708.2,741-759).
ggctctgtgtgagaagatt

SEQ ID NO: 702850 - DNA, 19 bp, Mus musculus
  siRNA target sequence for Vwf (NM_011708.2,794-812).
gtcctgtactccttgagta

SEQ ID NO: 702851 - DNA, 19 bp, Mus musculus
  siRNA target sequence for Vwf (NM_011708.2,884-902).
gcccagctggcatggaata

SEQ ID NO: 702852 - DNA, 19 bp, Mus musculus
  siRNA target sequence for Vwf (NM_011708.2,886-904).
ccagctggcatggaatata

SEQ ID NO: 702853 - DNA, 19 bp, Mus musculus
  siRNA target sequence for Vwf (NM_011708.2,887-905).
cagctggcatggaatataa

SEQ ID NO: 702854 - DNA, 19 bp, Mus musculus
  siRNA target sequence for Vwf (NM_011708.2,936-954).
ccagagcctgtctatcaat

SEQ ID NO: 702855 - DNA, 19 bp, Mus musculus
  siRNA target sequence for Vwf (NM_011708.2,941-959).
gcctgtctatcaatgaagt

SEQ ID NO: 702856 - DNA, 19 bp, Mus musculus
  siRNA target sequence for Vwf (NM_011708.2,1172-1190).
caggccaatcgcacttcaa

SEQ ID NO: 702857 - DNA, 19 bp, Mus musculus
  siRNA target sequence for Vwf (NM_011708.2,1174-1192).
ggccaatcgcacttcaaga

SEQ ID NO: 702858 - DNA, 19 bp, Mus musculus
  siRNA target sequence for Vwf (NM_011708.2,1218-1236).
cagtgggatctgccaatat

SEQ ID NO: 702859 - DNA, 19 bp, Mus musculus
  siRNA target sequence for Vwf (NM_011708.2,1263-1281).
cactttctccattgtcata

SEQ ID NO: 702860 - DNA, 19 bp, Mus musculus
  siRNA target sequence for Vwf (NM_011708.2,1452-1470).
cacagtgatggcttctgta

SEQ ID NO: 702861 - DNA, 19 bp, Mus musculus
  siRNA target sequence for Vwf (NM_011708.2,1533-1551).
gctgtccccagtctattct

SEQ ID NO: 702862 - DNA, 19 bp, Mus musculus
  siRNA target sequence for Vwf (NM_011708.2,1565-1583).
gcttgtgtgggaattacaa

SEQ ID NO: 702863 - DNA, 19 bp, Mus musculus
  siRNA target sequence for Vwf (NM_011708.2,1815-1833).
gcagaactgccgttatgat

SEQ ID NO: 702864 - DNA, 19 bp, Mus musculus
  siRNA target sequence for Vwf (NM_011708.2,1853-1871).
gccgggattgcctgtgtaa

SEQ ID NO: 702865 - DNA, 19 bp, Mus musculus
  siRNA target sequence for Vwf (NM_011708.2,1868-1886).
gtaacgcagtagctaacta

SEQ ID NO: 702866 - DNA, 19 bp, Mus musculus
  siRNA target sequence for Vwf (NM_011708.2,2173-2191).
caccataccatgtgttact

SEQ ID NO: 702867 - DNA, 19 bp, Mus musculus
  siRNA target sequence for Vwf (NM_011708.2,2268-2286).
cctgtctcaccgtagcaaa

SEQ ID NO: 702868 - DNA, 19 bp, Mus musculus
  siRNA target sequence for Vwf (NM_011708.2,2269-2287).
ctgtctcaccgtagcaaaa

SEQ ID NO: 702869 - DNA, 19 bp, Mus musculus
  siRNA target sequence for Vwf (NM_011708.2,2438-2456).
gcatggtccggcacgaaaa

SEQ ID NO: 702870 - DNA, 19 bp, Mus musculus
  siRNA target sequence for Vwf (NM_011708.2,2443-2461).
gtccggcacgaaaacaagt

SEQ ID NO: 702871 - DNA, 19 bp, Mus musculus
  siRNA target sequence for Vwf (NM_011708.2,2513-2531).
cgggagacacagtgaagat

SEQ ID NO: 702872 - DNA, 19 bp, Mus musculus
  siRNA target sequence for Vwf (NM_011708.2,2792-2810).
gaggggagcttgaactgtt

SEQ ID NO: 702873 - DNA, 19 bp, Mus musculus
  siRNA target sequence for Vwf (NM_011708.2,2812-2830).
gacggagaggtgaacgtta

SEQ ID NO: 702874 - DNA, 19 bp, Mus musculus
  siRNA target sequence for Vwf (NM_011708.2,2815-2833).
ggagaggtgaacgttaaga

SEQ ID NO: 702875 - DNA, 19 bp, Mus musculus
  siRNA target sequence for Vwf (NM_011708.2,3001-3019).
ggcatccagaacaatgact

SEQ ID NO: 702876 - DNA, 19 bp, Mus musculus
  siRNA target sequence for Vwf (NM_011708.2,3045-3063).
ggaagaccccgtcaacttt

SEQ ID NO: 702877 - DNA, 19 bp, Mus musculus
  siRNA target sequence for Vwf (NM_011708.2,3236-3254).
catacctggacatctgtat

SEQ ID NO: 702878 - DNA, 19 bp, Mus musculus
  siRNA target sequence for Vwf (NM_011708.2,3283-3301).
ggggactgcgcctgtttct

SEQ ID NO: 702879 - DNA, 19 bp, Mus musculus
  siRNA target sequence for Vwf (NM_011708.2,3285-3303).
ggactgcgcctgtttctgt

SEQ ID NO: 702880 - DNA, 19 bp, Mus musculus
  siRNA target sequence for Vwf (NM_011708.2,3421-3439).
gagtgtgagtggcgttata

SEQ ID NO: 702881 - DNA, 19 bp, Mus musculus
  siRNA target sequence for Vwf (NM_011708.2,3659-3677).
cacactgtcagaattgtca

SEQ ID NO: 702882 - DNA, 19 bp, Mus musculus
  siRNA target sequence for Vwf (NM_011708.2,3758-3776).
gctctaccaccccatatgt

SEQ ID NO: 702883 - DNA, 19 bp, Mus musculus
  siRNA target sequence for Vwf (NM_011708.2,3759-3777).
ctctaccaccccatatgtt

SEQ ID NO: 702884 - DNA, 19 bp, Mus musculus
  siRNA target sequence for Vwf (NM_011708.2,3944-3962).
gcgtggcagtggtagagta

SEQ ID NO: 702885 - DNA, 19 bp, Mus musculus
  siRNA target sequence for Vwf (NM_011708.2,4024-4042).
cgcatcaccagccagatta

SEQ ID NO: 702886 - DNA, 19 bp, Mus musculus
  siRNA target sequence for Vwf (NM_011708.2,4025-4043).
gcatcaccagccagattaa

SEQ ID NO: 702887 - DNA, 19 bp, Mus musculus
  siRNA target sequence for Vwf (NM_011708.2,4032-4050).
cagccagattaagtataca

SEQ ID NO: 702888 - DNA, 19 bp, Mus musculus
  siRNA target sequence for Vwf (NM_011708.2,4170-4188).
cccacggatggctaggaat

SEQ ID NO: 702889 - DNA, 19 bp, Mus musculus
  siRNA target sequence for Vwf (NM_011708.2,4171-4189).
ccacggatggctaggaatt

SEQ ID NO: 702890 - DNA, 19 bp, Mus musculus
  siRNA target sequence for Vwf (NM_011708.2,4172-4190).
cacggatggctaggaattt

SEQ ID NO: 702891 - DNA, 19 bp, Mus musculus
  siRNA target sequence for Vwf (NM_011708.2,4175-4193).
ggatggctaggaatttggt

SEQ ID NO: 702892 - DNA, 19 bp, Mus musculus
  siRNA target sequence for Vwf (NM_011708.2,4253-4271).
cccacgccagcctcaaaca

SEQ ID NO: 702893 - DNA, 19 bp, Mus musculus
  siRNA target sequence for Vwf (NM_011708.2,4455-4473).
ctcgtcaccgggaccaaaa

SEQ ID NO: 702894 - DNA, 19 bp, Mus musculus
  siRNA target sequence for Vwf (NM_011708.2,4528-4546).
ggtgaagccaacttcaata

SEQ ID NO: 702895 - DNA, 19 bp, Mus musculus
  siRNA target sequence for Vwf (NM_011708.2,4531-4549).
gaagccaacttcaataaga

SEQ ID NO: 702896 - DNA, 19 bp, Mus musculus
  siRNA target sequence for Vwf (NM_011708.2,4716-4734).
cggcaataggacaaacact

SEQ ID NO: 702897 - DNA, 19 bp, Mus musculus
  siRNA target sequence for Vwf (NM_011708.2,5107-5125).
ccagagtcttcctttgata

SEQ ID NO: 702898 - DNA, 19 bp, Mus musculus
  siRNA target sequence for Vwf (NM_011708.2,5135-5153).
gttttgccaaggctttcat

SEQ ID NO: 702899 - DNA, 19 bp, Mus musculus
  siRNA target sequence for Vwf (NM_011708.2,5183-5201).
cacaggtgtccgtgataca

SEQ ID NO: 702900 - DNA, 19 bp, Mus musculus
  siRNA target sequence for Vwf (NM_011708.2,5185-5203).
caggtgtccgtgatacagt

SEQ ID NO: 702901 - DNA, 19 bp, Mus musculus
  siRNA target sequence for Vwf (NM_011708.2,5210-5228).
gcatcaataccattgatgt

SEQ ID NO: 702902 - DNA, 19 bp, Mus musculus
  siRNA target sequence for Vwf (NM_011708.2,5325-5343).
ctttgccgtgcgctatgta

SEQ ID NO: 702903 - DNA, 19 bp, Mus musculus
  siRNA target sequence for Vwf (NM_011708.2,5329-5347).
gccgtgcgctatgtaactt

SEQ ID NO: 702904 - DNA, 19 bp, Mus musculus
  siRNA target sequence for Vwf (NM_011708.2,5331-5349).
cgtgcgctatgtaacttca

SEQ ID NO: 702905 - DNA, 19 bp, Mus musculus
  siRNA target sequence for Vwf (NM_011708.2,5334-5352).
gcgctatgtaacttcacaa

SEQ ID NO: 702906 - DNA, 19 bp, Mus musculus
  siRNA target sequence for Vwf (NM_011708.2,5335-5353).
cgctatgtaacttcacaaa

SEQ ID NO: 702907 - DNA, 19 bp, Mus musculus
  siRNA target sequence for Vwf (NM_011708.2,5336-5354).
gctatgtaacttcacaaat

SEQ ID NO: 702908 - DNA, 19 bp, Mus musculus
  siRNA target sequence for Vwf (NM_011708.2,5451-5469).
caaccgagtggcagtgttt

SEQ ID NO: 702909 - DNA, 19 bp, Mus musculus
  siRNA target sequence for Vwf (NM_011708.2,5531-5549).
ccagctccaatgtggtaaa

SEQ ID NO: 702910 - DNA, 19 bp, Mus musculus
  siRNA target sequence for Vwf (NM_011708.2,5737-5755).
cagagtcatcgtgtcaatt

SEQ ID NO: 702911 - DNA, 19 bp, Mus musculus
  siRNA target sequence for Vwf (NM_011708.2,5739-5757).
gagtcatcgtgtcaattgt

SEQ ID NO: 702912 - DNA, 19 bp, Mus musculus
  siRNA target sequence for Vwf (NM_011708.2,5887-5905).
gggcagaatttcaagctta

SEQ ID NO: 702913 - DNA, 19 bp, Mus musculus
  siRNA target sequence for Vwf (NM_011708.2,5912-5930).
gctgctcctatgtcatctt

SEQ ID NO: 702914 - DNA, 19 bp, Mus musculus
  siRNA target sequence for Vwf (NM_011708.2,6092-6110).
ccccgtacgttggtgaaaa

SEQ ID NO: 702915 - DNA, 19 bp, Mus musculus
  siRNA target sequence for Vwf (NM_011708.2,6094-6112).
ccgtacgttggtgaaaaca

SEQ ID NO: 702916 - DNA, 19 bp, Mus musculus
  siRNA target sequence for Vwf (NM_011708.2,6095-6113).
cgtacgttggtgaaaacat

SEQ ID NO: 702917 - DNA, 19 bp, Mus musculus
  siRNA target sequence for Vwf (NM_011708.2,6129-6147).
cggcgctatcatgtatgaa

SEQ ID NO: 702918 - DNA, 19 bp, Mus musculus
  siRNA target sequence for Vwf (NM_011708.2,6131-6149).
gcgctatcatgtatgaagt

SEQ ID NO: 702919 - DNA, 19 bp, Mus musculus
  siRNA target sequence for Vwf (NM_011708.2,6254-6272).
gcggaatctgtgatgaaaa

SEQ ID NO: 702920 - DNA, 19 bp, Mus musculus
  siRNA target sequence for Vwf (NM_011708.2,6462-6480).
cgctccagccacattccat

SEQ ID NO: 702921 - DNA, 19 bp, Mus musculus
  siRNA target sequence for Vwf (NM_011708.2,6463-6481).
gctccagccacattccata

SEQ ID NO: 702922 - DNA, 19 bp, Mus musculus
  siRNA target sequence for Vwf (NM_011708.2,6610-6628).
ccaccgtccctggtgtata

SEQ ID NO: 702923 - DNA, 19 bp, Mus musculus
  siRNA target sequence for Vwf (NM_011708.2,6614-6632).
cgtccctggtgtataacca

SEQ ID NO: 702924 - DNA, 19 bp, Mus musculus
  siRNA target sequence for Vwf (NM_011708.2,6655-6673).
cactgcgatgggaacacta

SEQ ID NO: 702925 - DNA, 19 bp, Mus musculus
  siRNA target sequence for Vwf (NM_011708.2,6848-6866).
gcctcagtgggagaaagat

SEQ ID NO: 702926 - DNA, 19 bp, Mus musculus
  siRNA target sequence for Vwf (NM_011708.2,6906-6924).
cacgtgtggcccatgtgaa

SEQ ID NO: 702927 - DNA, 19 bp, Mus musculus
  siRNA target sequence for Vwf (NM_011708.2,7436-7454).
caggtttttcttatgttct

SEQ ID NO: 702928 - DNA, 19 bp, Mus musculus
  siRNA target sequence for Vwf (NM_011708.2,7530-7548).
ccactcttcctggaaaagt

SEQ ID NO: 702929 - DNA, 19 bp, Mus musculus
  siRNA target sequence for Vwf (NM_011708.2,7624-7642).
gtgcagcagaggaacatct

SEQ ID NO: 702930 - DNA, 19 bp, Mus musculus
  siRNA target sequence for Vwf (NM_011708.2,7935-7953).
gcctacagcttgcactatt

SEQ ID NO: 702931 - DNA, 19 bp, Mus musculus
  siRNA target sequence for Vwf (NM_011708.2,8005-8023).
gatggctgtgacagtcatt

SEQ ID NO: 702932 - DNA, 19 bp, Mus musculus
  siRNA target sequence for Vwf (NM_011708.2,8008-8026).
ggctgtgacagtcatttgt

SEQ ID NO: 702933 - DNA, 19 bp, Mus musculus
  siRNA target sequence for Vwf (NM_011708.2,8070-8088).
cacgggctgcccaccattt

SEQ ID NO: 702934 - DNA, 19 bp, Mus musculus
  siRNA target sequence for Vwf (NM_011708.2,8072-8090).
cgggctgcccaccatttga

SEQ ID NO: 702935 - DNA, 19 bp, Mus musculus
  siRNA target sequence for Vwf (NM_011708.2,8073-8091).
gggctgcccaccatttgat

SEQ ID NO: 702936 - DNA, 19 bp, Mus musculus
  siRNA target sequence for Vwf (NM_011708.2,8075-8093).
gctgcccaccatttgatga

SEQ ID NO: 702937 - DNA, 19 bp, Mus musculus
  siRNA target sequence for Vwf (NM_011708.2,8078-8096).
gcccaccatttgatgaaca

SEQ ID NO: 702938 - DNA, 19 bp, Mus musculus
  siRNA target sequence for Vwf (NM_011708.2,8113-8131).
ggaggcaaaatcgtgaaaa

SEQ ID NO: 702939 - DNA, 19 bp, Mus musculus
  siRNA target sequence for Vwf (NM_011708.2,8114-8132).
gaggcaaaatcgtgaaaat

SEQ ID NO: 702940 - DNA, 19 bp, Mus musculus
  siRNA target sequence for Vwf (NM_011708.2,8227-8245).
gaggaagtggacattcatt

SEQ ID NO: 702941 - DNA, 19 bp, Mus musculus
  siRNA target sequence for Vwf (NM_011708.2,8272-8290).
gctgtgtactccattgaca

SEQ ID NO: 702942 - DNA, 19 bp, Mus musculus
  siRNA target sequence for Vwf (NM_011708.2,8273-8291).
ctgtgtactccattgacat

SEQ ID NO: 702943 - DNA, 19 bp, Mus musculus
  siRNA target sequence for Wbp5 (NM_011712.1,313-331).
gagaaatccgaagaaactt

SEQ ID NO: 702944 - DNA, 19 bp, Mus musculus
  siRNA target sequence for Wbp5 (NM_011712.1,315-333).
gaaatccgaagaaactttt

SEQ ID NO: 702945 - DNA, 19 bp, Mus musculus
  siRNA target sequence for Wbp5 (NM_011712.1,360-378).
ggattttcaggaggatata

SEQ ID NO: 702946 - DNA, 19 bp, Mus musculus
  siRNA target sequence for Wbp5 (NM_011712.1,479-497).
ctaaccgaagccatcctta

SEQ ID NO: 702947 - DNA, 19 bp, Mus musculus
  siRNA target sequence for Wbp5 (NM_011712.1,490-508).
catccttacccctatttaa

SEQ ID NO: 702948 - DNA, 19 bp, Mus musculus
  siRNA target sequence for Wiz (NM_011717.1,199-217).
gaaggtgatatctttccat

SEQ ID NO: 702949 - DNA, 19 bp, Mus musculus
  siRNA target sequence for Wiz (NM_011717.1,278-296).
gcatttctgtggctaactt

SEQ ID NO: 702950 - DNA, 19 bp, Mus musculus
  siRNA target sequence for Wiz (NM_011717.1,799-817).
cctagcctgaccaagaagt

SEQ ID NO: 702951 - DNA, 19 bp, Mus musculus
  siRNA target sequence for Wiz (NM_011717.1,1225-1243).
gtaactgagtggtatgtga

SEQ ID NO: 702952 - DNA, 19 bp, Mus musculus
  siRNA target sequence for Wiz (NM_011717.1,1391-1409).
gaagtccctctgatcttca

SEQ ID NO: 702953 - DNA, 19 bp, Mus musculus
  siRNA target sequence for Wiz (NM_011717.1,1394-1412).
gtccctctgatcttcacat

SEQ ID NO: 702954 - DNA, 19 bp, Mus musculus
  siRNA target sequence for Wiz (NM_011717.1,1415-1433).
cacctttgaccaagaagtt

SEQ ID NO: 702955 - DNA, 19 bp, Mus musculus
  siRNA target sequence for Wiz (NM_011717.1,1629-1647).
gggcacgcctcgagaagat

SEQ ID NO: 702956 - DNA, 19 bp, Mus musculus
  siRNA target sequence for Wiz (NM_011717.1,1630-1648).
ggcacgcctcgagaagata

SEQ ID NO: 702957 - DNA, 19 bp, Mus musculus
  siRNA target sequence for Wiz (NM_011717.1,1631-1649).
gcacgcctcgagaagatat

SEQ ID NO: 702958 - DNA, 19 bp, Mus musculus
  siRNA target sequence for Wiz (NM_011717.1,1687-1705).
gacatccggtgtgagtttt

SEQ ID NO: 702959 - DNA, 19 bp, Mus musculus
  siRNA target sequence for Wiz (NM_011717.1,1689-1707).
catccggtgtgagttttgt

SEQ ID NO: 702960 - DNA, 19 bp, Mus musculus
  siRNA target sequence for Wiz (NM_011717.1,1776-1794).
gactgagtggtctgtcaat

SEQ ID NO: 702961 - DNA, 19 bp, Mus musculus
  siRNA target sequence for Wiz (NM_011717.1,2159-2177).
caaagactctccatgagaa

SEQ ID NO: 702962 - DNA, 19 bp, Mus musculus
  siRNA target sequence for Wiz (NM_011717.1,2211-2229).
gctctgtggcctttacttt

SEQ ID NO: 702963 - DNA, 19 bp, Mus musculus
  siRNA target sequence for Wiz (NM_011717.1,2762-2780).
cgtcactggtcaagtttgt

SEQ ID NO: 702964 - DNA, 19 bp, Mus musculus
  siRNA target sequence for Zfp59 (NM_011762.2,240-258).
ccccccaaaatcgtattta

SEQ ID NO: 702965 - DNA, 19 bp, Mus musculus
  siRNA target sequence for Zfp59 (NM_011762.2,241-259).
cccccaaaatcgtatttat

SEQ ID NO: 702966 - DNA, 19 bp, Mus musculus
  siRNA target sequence for Zfp59 (NM_011762.2,242-260).
ccccaaaatcgtatttata

SEQ ID NO: 702967 - DNA, 19 bp, Mus musculus
  siRNA target sequence for Zfp59 (NM_011762.2,243-261).
cccaaaatcgtatttataa

SEQ ID NO: 702968 - DNA, 19 bp, Mus musculus
  siRNA target sequence for Zfp59 (NM_011762.2,245-263).
caaaatcgtatttataata

SEQ ID NO: 702969 - DNA, 19 bp, Mus musculus
  siRNA target sequence for Zfp59 (NM_011762.2,311-329).
cccaagggctcctggttta

SEQ ID NO: 702970 - DNA, 19 bp, Mus musculus
  siRNA target sequence for Zfp59 (NM_011762.2,622-640).
gaagcctttcagtcataat

SEQ ID NO: 702971 - DNA, 19 bp, Mus musculus
  siRNA target sequence for Zfp59 (NM_011762.2,645-663).
gcagacaggcttttcaaca

SEQ ID NO: 702972 - DNA, 19 bp, Mus musculus
  siRNA target sequence for Zfp59 (NM_011762.2,840-858).
gttttgtgcgccatcagaa

SEQ ID NO: 702973 - DNA, 19 bp, Mus musculus
  siRNA target sequence for Zfp59 (NM_011762.2,934-952).
gcaccagagcagtcatagt

SEQ ID NO: 702974 - DNA, 19 bp, Mus musculus
  siRNA target sequence for Zfp59 (NM_011762.2,937-955).
ccagagcagtcatagtgaa

SEQ ID NO: 702975 - DNA, 19 bp, Mus musculus
  siRNA target sequence for Zfp59 (NM_011762.2,1113-1131).
ctcacatggaagagaaata

SEQ ID NO: 702976 - DNA, 19 bp, Mus musculus
  siRNA target sequence for Zfp59 (NM_011762.2,1115-1133).
cacatggaagagaaatact

SEQ ID NO: 702977 - DNA, 19 bp, Mus musculus
  siRNA target sequence for Zfp59 (NM_011762.2,1331-1349).
cgtcaaaggtcaaaactaa

SEQ ID NO: 702978 - DNA, 19 bp, Mus musculus
  siRNA target sequence for Zfp59 (NM_011762.2,1341-1359).
caaaactaacggaacatga

SEQ ID NO: 702979 - DNA, 19 bp, Mus musculus
  siRNA target sequence for Zfp59 (NM_011762.2,1932-1950).
gttttgacatcctaaatat

SEQ ID NO: 702980 - DNA, 19 bp, Mus musculus
  siRNA target sequence for Zfp59 (NM_011762.2,1955-1973).
gtaataagaagtcttatga

SEQ ID NO: 702981 - DNA, 19 bp, Mus musculus
  siRNA target sequence for Znfn1a2 (NM_011770.2,147-165).
ggaaacagacgcaattgat

SEQ ID NO: 702982 - DNA, 19 bp, Mus musculus
  siRNA target sequence for Znfn1a2 (NM_011770.2,156-174).
cgcaattgatggctatata

SEQ ID NO: 702983 - DNA, 19 bp, Mus musculus
  siRNA target sequence for Znfn1a2 (NM_011770.2,157-175).
gcaattgatggctatataa

SEQ ID NO: 702984 - DNA, 19 bp, Mus musculus
  siRNA target sequence for Znfn1a2 (NM_011770.2,276-294).
gacaagcacaaattctgta

SEQ ID NO: 702985 - DNA, 19 bp, Mus musculus
  siRNA target sequence for Znfn1a2 (NM_011770.2,281-299).
gcacaaattctgtaaagct

SEQ ID NO: 702986 - DNA, 19 bp, Mus musculus
  siRNA target sequence for Znfn1a2 (NM_011770.2,381-399).
cctagaagaacccctaatt

SEQ ID NO: 702987 - DNA, 19 bp, Mus musculus
  siRNA target sequence for Znfn1a2 (NM_011770.2,461-479).
ggcttccgaatggtaaact

SEQ ID NO: 702988 - DNA, 19 bp, Mus musculus
  siRNA target sequence for Znfn1a2 (NM_011770.2,463-481).
cttccgaatggtaaactga

SEQ ID NO: 702989 - DNA, 19 bp, Mus musculus
  siRNA target sequence for Znfn1a2 (NM_011770.2,520-538).
gtgcttatggtacataaaa

SEQ ID NO: 702990 - DNA, 19 bp, Mus musculus
  siRNA target sequence for Znfn1a2 (NM_011770.2,660-678).
ctgtagctatgcttgtaga

SEQ ID NO: 702991 - DNA, 19 bp, Mus musculus
  siRNA target sequence for Znfn1a2 (NM_011770.2,789-807).
ggaacgctgtcacaactat

SEQ ID NO: 702992 - DNA, 19 bp, Mus musculus
  siRNA target sequence for Znfn1a2 (NM_011770.2,852-870).
ccatgtaccgcctatggaa

SEQ ID NO: 702993 - DNA, 19 bp, Mus musculus
  siRNA target sequence for Znfn1a2 (NM_011770.2,859-877).
ccgcctatggaagattgta

SEQ ID NO: 702994 - DNA, 19 bp, Mus musculus
  siRNA target sequence for Znfn1a2 (NM_011770.2,860-878).
cgcctatggaagattgtaa

SEQ ID NO: 702995 - DNA, 19 bp, Mus musculus
  siRNA target sequence for Znfn1a2 (NM_011770.2,888-906).
gcctatcatggacaacaat

SEQ ID NO: 702996 - DNA, 19 bp, Mus musculus
  siRNA target sequence for Znfn1a2 (NM_011770.2,889-907).
cctatcatggacaacaata

SEQ ID NO: 702997 - DNA, 19 bp, Mus musculus
  siRNA target sequence for Znfn1a2 (NM_011770.2,890-908).
ctatcatggacaacaatat

SEQ ID NO: 702998 - DNA, 19 bp, Mus musculus
  siRNA target sequence for Znfn1a2 (NM_011770.2,943-961).
gagaagctcacggcaaata

SEQ ID NO: 702999 - DNA, 19 bp, Mus musculus
  siRNA target sequence for Znfn1a2 (NM_011770.2,977-995).
gctccactcctcagaagtt

SEQ ID NO: 703000 - DNA, 19 bp, Mus musculus
  siRNA target sequence for Znfn1a2 (NM_011770.2,1075-1093).
ctgatgcagtctcatatga

SEQ ID NO: 703001 - DNA, 19 bp, Mus musculus
  siRNA target sequence for Znfn1a2 (NM_011770.2,1205-1223).
cttattctcaggtctatca

SEQ ID NO: 703002 - DNA, 19 bp, Mus musculus
  siRNA target sequence for Znfn1a2 (NM_011770.2,1211-1229).
ctcaggtctatcatccaaa

SEQ ID NO: 703003 - DNA, 19 bp, Mus musculus
  siRNA target sequence for Znfn1a2 (NM_011770.2,1251-1269).
cagggaaacatctgatagt

SEQ ID NO: 703004 - DNA, 19 bp, Mus musculus
  siRNA target sequence for Znfn1a2 (NM_011770.2,1253-1271).
gggaaacatctgatagtca

SEQ ID NO: 703005 - DNA, 19 bp, Mus musculus
  siRNA target sequence for Znfn1a2 (NM_011770.2,1259-1277).
catctgatagtcacgaaaa

SEQ ID NO: 703006 - DNA, 19 bp, Mus musculus
  siRNA target sequence for Znfn1a2 (NM_011770.2,1262-1280).
ctgatagtcacgaaaacaa

SEQ ID NO: 703007 - DNA, 19 bp, Mus musculus
  siRNA target sequence for Znfn1a2 (NM_011770.2,1316-1334).
gtcgaccccaggaaagaga

SEQ ID NO: 703008 - DNA, 19 bp, Mus musculus
  siRNA target sequence for Znfn1a2 (NM_011770.2,1336-1354).
gcctcgcccagcaatagct

SEQ ID NO: 703009 - DNA, 19 bp, Mus musculus
  siRNA target sequence for Znfn1a2 (NM_011770.2,1394-1412).
gccagtcctaccaaggaaa

SEQ ID NO: 703010 - DNA, 19 bp, Mus musculus
  siRNA target sequence for Znfn1a2 (NM_011770.2,1500-1518).
ctctctgaaggacatctat

SEQ ID NO: 703011 - DNA, 19 bp, Mus musculus
  siRNA target sequence for Znfn1a2 (NM_011770.2,1502-1520).
ctctgaaggacatctataa

SEQ ID NO: 703012 - DNA, 19 bp, Mus musculus
  siRNA target sequence for Znfn1a2 (NM_011770.2,1543-1561).
cagataagggccttcaagt

SEQ ID NO: 703013 - DNA, 19 bp, Mus musculus
  siRNA target sequence for Znfn1a2 (NM_011770.2,1571-1589).
gccgagtcctttttctaga

SEQ ID NO: 703014 - DNA, 19 bp, Mus musculus
  siRNA target sequence for Znfn1a2 (NM_011770.2,1585-1603).
ctagaccatgtcatgtaca

SEQ ID NO: 703015 - DNA, 19 bp, Mus musculus
  siRNA target sequence for Znfn1a2 (NM_011770.2,1668-1686).
ccaggaccgctacgaattt

SEQ ID NO: 703016 - DNA, 19 bp, Mus musculus
  siRNA target sequence for Znfn1a2 (NM_011770.2,1669-1687).
caggaccgctacgaatttt

SEQ ID NO: 703017 - DNA, 19 bp, Mus musculus
  siRNA target sequence for Znfn1a2 (NM_011770.2,1671-1689).
ggaccgctacgaattttca

SEQ ID NO: 703018 - DNA, 19 bp, Mus musculus
  siRNA target sequence for Znfn1a2 (NM_011770.2,1672-1690).
gaccgctacgaattttcat

SEQ ID NO: 703019 - DNA, 19 bp, Mus musculus
  siRNA target sequence for Znfn1a2 (NM_011770.2,1674-1692).
ccgctacgaattttcatca

SEQ ID NO: 703020 - DNA, 19 bp, Mus musculus
  siRNA target sequence for Znfn1a2 (NM_011770.2,1680-1698).
cgaattttcatcacacatt

SEQ ID NO: 703021 - DNA, 19 bp, Mus musculus
  siRNA target sequence for Znfn1a4 (NM_011772.1,1510-1528).
cgactgaacggccaacttt

SEQ ID NO: 703022 - DNA, 19 bp, Mus musculus
  siRNA target sequence for Znfn1a4 (NM_011772.1,1522-1540).
caactttcattgatcgttt

SEQ ID NO: 703023 - DNA, 19 bp, Mus musculus
  siRNA target sequence for Znfn1a4 (NM_011772.1,1618-1636).
cagaccttccctatgatgt

SEQ ID NO: 703024 - DNA, 19 bp, Mus musculus
  siRNA target sequence for Znfn1a4 (NM_011772.1,1641-1659).
gccagcggtggctatgaaa

SEQ ID NO: 703025 - DNA, 19 bp, Mus musculus
  siRNA target sequence for Znfn1a4 (NM_011772.1,1645-1663).
gcggtggctatgaaaagga

SEQ ID NO: 703026 - DNA, 19 bp, Mus musculus
  siRNA target sequence for Znfn1a4 (NM_011772.1,2214-2232).
ctggaccacgtcatgttca

SEQ ID NO: 703027 - DNA, 19 bp, Mus musculus
  siRNA target sequence for Agr2 (NM_011783.1,101-119).
ggtaccttggccaaagaca

SEQ ID NO: 703028 - DNA, 19 bp, Mus musculus
  siRNA target sequence for Agr2 (NM_011783.1,154-172).
ggactctcggcccaaacta

SEQ ID NO: 703029 - DNA, 19 bp, Mus musculus
  siRNA target sequence for Agr2 (NM_011783.1,220-238).
gacatacgaagaagcttta

SEQ ID NO: 703030 - DNA, 19 bp, Mus musculus
  siRNA target sequence for Agr2 (NM_011783.1,222-240).
catacgaagaagctttata

SEQ ID NO: 703031 - DNA, 19 bp, Mus musculus
  siRNA target sequence for Agr2 (NM_011783.1,226-244).
cgaagaagctttatacaga

SEQ ID NO: 703032 - DNA, 19 bp, Mus musculus
  siRNA target sequence for Agr2 (NM_011783.1,261-279).
gacccttgatggtcattca

SEQ ID NO: 703033 - DNA, 19 bp, Mus musculus
  siRNA target sequence for Agr2 (NM_011783.1,264-282).
ccttgatggtcattcatca

SEQ ID NO: 703034 - DNA, 19 bp, Mus musculus
  siRNA target sequence for Agr2 (NM_011783.1,299-317).
cacagtcaagccttaaaga

SEQ ID NO: 703035 - DNA, 19 bp, Mus musculus
  siRNA target sequence for Agr2 (NM_011783.1,303-321).
gtcaagccttaaagaaagt

SEQ ID NO: 703036 - DNA, 19 bp, Mus musculus
  siRNA target sequence for Agr2 (NM_011783.1,427-445).
ccccagaattgtgtttgta

SEQ ID NO: 703037 - DNA, 19 bp, Mus musculus
  siRNA target sequence for Agr2 (NM_011783.1,472-490).
catcactggacgatactca

SEQ ID NO: 703038 - DNA, 19 bp, Mus musculus
  siRNA target sequence for Agr2 (NM_011783.1,493-511).
ccggctctacgcttatgaa

SEQ ID NO: 703039 - DNA, 19 bp, Mus musculus
  siRNA target sequence for Agr2 (NM_011783.1,532-550).
gtacgacaacatgaagaaa

SEQ ID NO: 703040 - DNA, 19 bp, Mus musculus
  siRNA target sequence for Agr2 (NM_011783.1,560-578).
ctgctaaagacagaattgt

SEQ ID NO: 703041 - DNA, 19 bp, Mus musculus
  siRNA target sequence for Apc2 (NM_011789.1,6-24).
cagctccatggcctcatat

SEQ ID NO: 703042 - DNA, 19 bp, Mus musculus
  siRNA target sequence for Apc2 (NM_011789.1,8-26).
gctccatggcctcatatga

SEQ ID NO: 703043 - DNA, 19 bp, Mus musculus
  siRNA target sequence for Apc2 (NM_011789.1,57-75).
ggccgagaacactcactta

SEQ ID NO: 703044 - DNA, 19 bp, Mus musculus
  siRNA target sequence for Apc2 (NM_011789.1,82-100).
gagctgagggataactcta

SEQ ID NO: 703045 - DNA, 19 bp, Mus musculus
  siRNA target sequence for Apc2 (NM_011789.1,453-471).
gaagctatggtattactct

SEQ ID NO: 703046 - DNA, 19 bp, Mus musculus
  siRNA target sequence for Apc2 (NM_011789.1,508-526).
ccgcacgtggacacgtttt

SEQ ID NO: 703047 - DNA, 19 bp, Mus musculus
  siRNA target sequence for Apc2 (NM_011789.1,647-665).
cgcgcttggagcagattga

SEQ ID NO: 703048 - DNA, 19 bp, Mus musculus
  siRNA target sequence for Apc2 (NM_011789.1,649-667).
cgcttggagcagattgaca

SEQ ID NO: 703049 - DNA, 19 bp, Mus musculus
  siRNA target sequence for Apc2 (NM_011789.1,822-840).
ggtgttctggcttctatct

SEQ ID NO: 703050 - DNA, 19 bp, Mus musculus
  siRNA target sequence for Apc2 (NM_011789.1,823-841).
gtgttctggcttctatcta

SEQ ID NO: 703051 - DNA, 19 bp, Mus musculus
  siRNA target sequence for Apc2 (NM_011789.1,852-870).
gcgcgaccaggaagatact

SEQ ID NO: 703052 - DNA, 19 bp, Mus musculus
  siRNA target sequence for Apc2 (NM_011789.1,1045-1063).
gccctgcacaacatcgttt

SEQ ID NO: 703053 - DNA, 19 bp, Mus musculus
  siRNA target sequence for Apc2 (NM_011789.1,1168-1186).
cgggacagcgggacagaaa

SEQ ID NO: 703054 - DNA, 19 bp, Mus musculus
  siRNA target sequence for Apc2 (NM_011789.1,1170-1188).
ggacagcgggacagaaact

SEQ ID NO: 703055 - DNA, 19 bp, Mus musculus
  siRNA target sequence for Apc2 (NM_011789.1,1583-1601).
ccgccttgatggaatgtgt

SEQ ID NO: 703056 - DNA, 19 bp, Mus musculus
  siRNA target sequence for Apc2 (NM_011789.1,1617-1635).
ggagtcgaccctaaagagt

SEQ ID NO: 703057 - DNA, 19 bp, Mus musculus
  siRNA target sequence for Apc2 (NM_011789.1,1879-1897).
ctcacatcacacagtttga

SEQ ID NO: 703058 - DNA, 19 bp, Mus musculus
  siRNA target sequence for Apc2 (NM_011789.1,2002-2020).
ctcgtccactccaaacaca

SEQ ID NO: 703059 - DNA, 19 bp, Mus musculus
  siRNA target sequence for Apc2 (NM_011789.1,2067-2085).
ccaccgacccgccaagtat

SEQ ID NO: 703060 - DNA, 19 bp, Mus musculus
  siRNA target sequence for Apc2 (NM_011789.1,2117-2135).
cctgcgtgcccagtcttta

SEQ ID NO: 703061 - DNA, 19 bp, Mus musculus
  siRNA target sequence for Apc2 (NM_011789.1,2120-2138).
gcgtgcccagtctttacgt

SEQ ID NO: 703062 - DNA, 19 bp, Mus musculus
  siRNA target sequence for Apc2 (NM_011789.1,2187-2205).
gcatgcactcggtcactta

SEQ ID NO: 703063 - DNA, 19 bp, Mus musculus
  siRNA target sequence for Apc2 (NM_011789.1,2191-2209).
gcactcggtcacttagaga

SEQ ID NO: 703064 - DNA, 19 bp, Mus musculus
  siRNA target sequence for Apc2 (NM_011789.1,2192-2210).
cactcggtcacttagagaa

SEQ ID NO: 703065 - DNA, 19 bp, Mus musculus
  siRNA target sequence for Apc2 (NM_011789.1,2284-2302).
caggactatgcctctgatt

SEQ ID NO: 703066 - DNA, 19 bp, Mus musculus
  siRNA target sequence for Apc2 (NM_011789.1,2306-2324).
gctgctttgacgatgatga

SEQ ID NO: 703067 - DNA, 19 bp, Mus musculus
  siRNA target sequence for Apc2 (NM_011789.1,2307-2325).
ctgctttgacgatgatgat

SEQ ID NO: 703068 - DNA, 19 bp, Mus musculus
  siRNA target sequence for Apc2 (NM_011789.1,2941-2959).
gtgcgcacaatcaagttat

SEQ ID NO: 703069 - DNA, 19 bp, Mus musculus
  siRNA target sequence for Apc2 (NM_011789.1,2952-2970).
caagttatccccaacctat

SEQ ID NO: 703070 - DNA, 19 bp, Mus musculus
  siRNA target sequence for Apc2 (NM_011789.1,3083-3101).
gcaaagtccctgagaaact

SEQ ID NO: 703071 - DNA, 19 bp, Mus musculus
  siRNA target sequence for Apc2 (NM_011789.1,3441-3459).
ggtcctgagccgttgtagt

SEQ ID NO: 703072 - DNA, 19 bp, Mus musculus
  siRNA target sequence for Apc2 (NM_011789.1,3442-3460).
gtcctgagccgttgtagtt

SEQ ID NO: 703073 - DNA, 19 bp, Mus musculus
  siRNA target sequence for Apc2 (NM_011789.1,3690-3708).
cgcagactgtcgagaaaga

SEQ ID NO: 703074 - DNA, 19 bp, Mus musculus
  siRNA target sequence for Apc2 (NM_011789.1,3806-3824).
cccttcatgagctgtatgt

SEQ ID NO: 703075 - DNA, 19 bp, Mus musculus
  siRNA target sequence for Apc2 (NM_011789.1,3951-3969).
ggctcggtcagcaactgat

SEQ ID NO: 703076 - DNA, 19 bp, Mus musculus
  siRNA target sequence for Apc2 (NM_011789.1,3952-3970).
gctcggtcagcaactgata

SEQ ID NO: 703077 - DNA, 19 bp, Mus musculus
  siRNA target sequence for Apc2 (NM_011789.1,4067-4085).
cagtccctgtgtacatgtt

SEQ ID NO: 703078 - DNA, 19 bp, Mus musculus
  siRNA target sequence for Apc2 (NM_011789.1,4132-4150).
gagggcacacccgttaact

SEQ ID NO: 703079 - DNA, 19 bp, Mus musculus
  siRNA target sequence for Apc2 (NM_011789.1,4134-4152).
gggcacacccgttaacttt

SEQ ID NO: 703080 - DNA, 19 bp, Mus musculus
  siRNA target sequence for Apc2 (NM_011789.1,4135-4153).
ggcacacccgttaactttt

SEQ ID NO: 703081 - DNA, 19 bp, Mus musculus
  siRNA target sequence for Apc2 (NM_011789.1,4468-4486).
gtgtactgcttctatgact

SEQ ID NO: 703082 - DNA, 19 bp, Mus musculus
  siRNA target sequence for Apc2 (NM_011789.1,4739-4757).
cggagcagggtagtaaaca

SEQ ID NO: 703083 - DNA, 19 bp, Mus musculus
  siRNA target sequence for Apc2 (NM_011789.1,4789-4807).
gaacttctgcagagatgta

SEQ ID NO: 703084 - DNA, 19 bp, Mus musculus
  siRNA target sequence for Apc2 (NM_011789.1,4884-4902).
cataaggcccactgagata

SEQ ID NO: 703085 - DNA, 19 bp, Mus musculus
  siRNA target sequence for Apc2 (NM_011789.1,4962-4980).
ggagtggcaggctatccaa

SEQ ID NO: 703086 - DNA, 19 bp, Mus musculus
  siRNA target sequence for Apc2 (NM_011789.1,5176-5194).
ggcacaacttccactaaga

SEQ ID NO: 703087 - DNA, 19 bp, Mus musculus
  siRNA target sequence for Apc2 (NM_011789.1,5177-5195).
gcacaacttccactaagat

SEQ ID NO: 703088 - DNA, 19 bp, Mus musculus
  siRNA target sequence for Apc2 (NM_011789.1,5180-5198).
caacttccactaagatcaa

SEQ ID NO: 703089 - DNA, 19 bp, Mus musculus
  siRNA target sequence for Apc2 (NM_011789.1,5234-5252).
caaagggtacccagaaaat

SEQ ID NO: 703090 - DNA, 19 bp, Mus musculus
  siRNA target sequence for Apc2 (NM_011789.1,5279-5297).
ggggacggacagtgatcta

SEQ ID NO: 703091 - DNA, 19 bp, Mus musculus
  siRNA target sequence for Apc2 (NM_011789.1,5317-5335).
cgcactcagtccaaaggta

SEQ ID NO: 703092 - DNA, 19 bp, Mus musculus
  siRNA target sequence for Apc2 (NM_011789.1,5318-5336).
gcactcagtccaaaggtat

SEQ ID NO: 703093 - DNA, 19 bp, Mus musculus
  siRNA target sequence for Apc2 (NM_011789.1,5319-5337).
cactcagtccaaaggtatt

SEQ ID NO: 703094 - DNA, 19 bp, Mus musculus
  siRNA target sequence for Apc2 (NM_011789.1,5345-5363).
cttgtaccacacctaagaa

SEQ ID NO: 703095 - DNA, 19 bp, Mus musculus
  siRNA target sequence for Apc2 (NM_011789.1,5443-5461).
caccgaccgggcaagatct

SEQ ID NO: 703096 - DNA, 19 bp, Mus musculus
  siRNA target sequence for Apc2 (NM_011789.1,6341-6359).
cgacctggcgtcgaatcaa

SEQ ID NO: 703097 - DNA, 19 bp, Mus musculus
  siRNA target sequence for Apc2 (NM_011789.1,6342-6360).
gacctggcgtcgaatcaaa

SEQ ID NO: 703098 - DNA, 19 bp, Mus musculus
  siRNA target sequence for Apc2 (NM_011789.1,6344-6362).
cctggcgtcgaatcaaaga

SEQ ID NO: 703099 - DNA, 19 bp, Mus musculus
  siRNA target sequence for Apc2 (NM_011789.1,6345-6363).
ctggcgtcgaatcaaagat

SEQ ID NO: 703100 - DNA, 19 bp, Mus musculus
  siRNA target sequence for Apc2 (NM_011789.1,6347-6365).
ggcgtcgaatcaaagatga

SEQ ID NO: 703101 - DNA, 19 bp, Mus musculus
  siRNA target sequence for Apc2 (NM_011789.1,6348-6366).
gcgtcgaatcaaagatgaa

SEQ ID NO: 703102 - DNA, 19 bp, Mus musculus
  siRNA target sequence for Apc2 (NM_011789.1,6350-6368).
gtcgaatcaaagatgaaga

SEQ ID NO: 703103 - DNA, 19 bp, Mus musculus
  siRNA target sequence for Apc2 (NM_011789.1,6716-6734).
gggttccccccttcaacta

SEQ ID NO: 703104 - DNA, 19 bp, Mus musculus
  siRNA target sequence for Apc2 (NM_011789.1,6717-6735).
ggttccccccttcaactat

SEQ ID NO: 703105 - DNA, 19 bp, Mus musculus
  siRNA target sequence for Ash2l (NM_011791.1,193-211).
gcaaacttggttgatgtaa

SEQ ID NO: 703106 - DNA, 19 bp, Mus musculus
  siRNA target sequence for Ash2l (NM_011791.1,219-237).
ggagacagaatcttctaat

SEQ ID NO: 703107 - DNA, 19 bp, Mus musculus
  siRNA target sequence for Ash2l (NM_011791.1,222-240).
gacagaatcttctaatgga

SEQ ID NO: 703108 - DNA, 19 bp, Mus musculus
  siRNA target sequence for Ash2l (NM_011791.1,372-390).
cgctgacacctttggaata

SEQ ID NO: 703109 - DNA, 19 bp, Mus musculus
  siRNA target sequence for Ash2l (NM_011791.1,374-392).
ctgacacctttggaataga

SEQ ID NO: 703110 - DNA, 19 bp, Mus musculus
  siRNA target sequence for Ash2l (NM_011791.1,398-416).
cgtcatgtctgccttttat

SEQ ID NO: 703111 - DNA, 19 bp, Mus musculus
  siRNA target sequence for Ash2l (NM_011791.1,455-473).
gtgggaatacctactttct

SEQ ID NO: 703112 - DNA, 19 bp, Mus musculus
  siRNA target sequence for Ash2l (NM_011791.1,572-590).
ccaaagataaggatattat

SEQ ID NO: 703113 - DNA, 19 bp, Mus musculus
  siRNA target sequence for Ash2l (NM_011791.1,577-595).
gataaggatattataccat

SEQ ID NO: 703114 - DNA, 19 bp, Mus musculus
  siRNA target sequence for Ash2l (NM_011791.1,582-600).
ggatattataccatttatt

SEQ ID NO: 703115 - DNA, 19 bp, Mus musculus
  siRNA target sequence for Ash2l (NM_011791.1,631-649).
cagagacctggaaaaatga

SEQ ID NO: 703116 - DNA, 19 bp, Mus musculus
  siRNA target sequence for Ash2l (NM_011791.1,650-668).
cttggcccaataacattgt

SEQ ID NO: 703117 - DNA, 19 bp, Mus musculus
  siRNA target sequence for Ash2l (NM_011791.1,680-698).
gtaaggaaagagatgtgtt

SEQ ID NO: 703118 - DNA, 19 bp, Mus musculus
  siRNA target sequence for Ash2l (NM_011791.1,689-707).
gagatgtgttcttggtaaa

SEQ ID NO: 703119 - DNA, 19 bp, Mus musculus
  siRNA target sequence for Ash2l (NM_011791.1,774-792).
ggatcttagtaatattggt

SEQ ID NO: 703120 - DNA, 19 bp, Mus musculus
  siRNA target sequence for Ash2l (NM_011791.1,797-815).
cttatgacaaccagaaaca

SEQ ID NO: 703121 - DNA, 19 bp, Mus musculus
  siRNA target sequence for Ash2l (NM_011791.1,936-954).
ggccagaagtgatccttta

SEQ ID NO: 703122 - DNA, 19 bp, Mus musculus
  siRNA target sequence for Ash2l (NM_011791.1,939-957).
cagaagtgatcctttattt

SEQ ID NO: 703123 - DNA, 19 bp, Mus musculus
  siRNA target sequence for Ash2l (NM_011791.1,1059-1077).
cccggagaagcttgaactt

SEQ ID NO: 703124 - DNA, 19 bp, Mus musculus
  siRNA target sequence for Ash2l (NM_011791.1,1097-1115).
ctattcctggagaccttta

SEQ ID NO: 703125 - DNA, 19 bp, Mus musculus
  siRNA target sequence for Ash2l (NM_011791.1,1116-1134).
cagagcctgcttatatgaa

SEQ ID NO: 703126 - DNA, 19 bp, Mus musculus
  siRNA target sequence for Ash2l (NM_011791.1,1156-1174).
gatcgagctccccagttaa

SEQ ID NO: 703127 - DNA, 19 bp, Mus musculus
  siRNA target sequence for Ash2l (NM_011791.1,1159-1177).
cgagctccccagttaaaga

SEQ ID NO: 703128 - DNA, 19 bp, Mus musculus
  siRNA target sequence for Ash2l (NM_011791.1,1160-1178).
gagctccccagttaaagat

SEQ ID NO: 703129 - DNA, 19 bp, Mus musculus
  siRNA target sequence for Ash2l (NM_011791.1,1162-1180).
gctccccagttaaagatct

SEQ ID NO: 703130 - DNA, 19 bp, Mus musculus
  siRNA target sequence for Ash2l (NM_011791.1,1343-1361).
ctcccttaggctatgataa

SEQ ID NO: 703131 - DNA, 19 bp, Mus musculus
  siRNA target sequence for Ash2l (NM_011791.1,1347-1365).
cttaggctatgataagttt

SEQ ID NO: 703132 - DNA, 19 bp, Mus musculus
  siRNA target sequence for Ash2l (NM_011791.1,1447-1465).
gacgtcctagggttctata

SEQ ID NO: 703133 - DNA, 19 bp, Mus musculus
  siRNA target sequence for Ash2l (NM_011791.1,1503-1521).
gccggacacctacaaagat

SEQ ID NO: 703134 - DNA, 19 bp, Mus musculus
  siRNA target sequence for Ash2l (NM_011791.1,1504-1522).
ccggacacctacaaagata

SEQ ID NO: 703135 - DNA, 19 bp, Mus musculus
  siRNA target sequence for Ash2l (NM_011791.1,1583-1601).
cagagaagagcctaaaaca

SEQ ID NO: 703136 - DNA, 19 bp, Mus musculus
  siRNA target sequence for Ash2l (NM_011791.1,1602-1620).
gaccccccatagtgagata

SEQ ID NO: 703137 - DNA, 19 bp, Mus musculus
  siRNA target sequence for Ash2l (NM_011791.1,1605-1623).
cccccatagtgagataata

SEQ ID NO: 703138 - DNA, 19 bp, Mus musculus
  siRNA target sequence for Ash2l (NM_011791.1,1606-1624).
ccccatagtgagataatat

SEQ ID NO: 703139 - DNA, 19 bp, Mus musculus
  siRNA target sequence for Ash2l (NM_011791.1,1690-1708).
gccatctcactgtacaaga

SEQ ID NO: 703140 - DNA, 19 bp, Mus musculus
  siRNA target sequence for Ash2l (NM_011791.1,1728-1746).
ctttggaccatccttcaaa

SEQ ID NO: 703141 - DNA, 19 bp, Mus musculus
  siRNA target sequence for Ash2l (NM_011791.1,1743-1761).
caaataccctccaaaggat

SEQ ID NO: 703142 - DNA, 19 bp, Mus musculus
  siRNA target sequence for Cktsf1b1 (NM_011824.1,72-90).
gaatcgcaccgcatacact

SEQ ID NO: 703143 - DNA, 19 bp, Mus musculus
  siRNA target sequence for Cktsf1b1 (NM_011824.1,315-333).
cgtgacagagcgcaagtat

SEQ ID NO: 703144 - DNA, 19 bp, Mus musculus
  siRNA target sequence for Cktsf1b1 (NM_011824.1,392-410).
gcaacagccgcactatcat

SEQ ID NO: 703145 - DNA, 19 bp, Mus musculus
  siRNA target sequence for Cktsf1b1 (NM_011824.1,588-606).
gaagcagtgccgttgcata

SEQ ID NO: 703146 - DNA, 19 bp, Mus musculus
  siRNA target sequence for Cktsf1b1 (NM_011824.1,592-610).
cagtgccgttgcatatcca

SEQ ID NO: 703147 - DNA, 19 bp, Mus musculus
  siRNA target sequence for Prdc (NM_011825.1,293-311).
ggtaaaggtagctgaaaca

SEQ ID NO: 703148 - DNA, 19 bp, Mus musculus
  siRNA target sequence for Prdc (NM_011825.1,672-690).
ccacctttccgaatcaaga

SEQ ID NO: 703149 - DNA, 19 bp, Mus musculus
  siRNA target sequence for Prdc (NM_011825.1,673-691).
cacctttccgaatcaagaa

SEQ ID NO: 703150 - DNA, 19 bp, Mus musculus
  siRNA target sequence for Prdc (NM_011825.1,675-693).
cctttccgaatcaagaaaa

SEQ ID NO: 703151 - DNA, 19 bp, Mus musculus
  siRNA target sequence for Prdc (NM_011825.1,676-694).
ctttccgaatcaagaaaat

SEQ ID NO: 703152 - DNA, 19 bp, Mus musculus
  siRNA target sequence for Mab21l2 (NM_011839.2,615-633).
ctggtttaccagctcaata

SEQ ID NO: 703153 - DNA, 19 bp, Mus musculus
  siRNA target sequence for Mab21l2 (NM_011839.2,624-642).
cagctcaataaatactaca

SEQ ID NO: 703154 - DNA, 19 bp, Mus musculus
  siRNA target sequence for Mab21l2 (NM_011839.2,707-725).
gtcggatgtgctaaaggaa

SEQ ID NO: 703155 - DNA, 19 bp, Mus musculus
  siRNA target sequence for Mab21l2 (NM_011839.2,881-899).
ctgtgccgtgctcaaacta

SEQ ID NO: 703156 - DNA, 19 bp, Mus musculus
  siRNA target sequence for Mab21l2 (NM_011839.2,925-943).
ctctttgggtcgagttcat

SEQ ID NO: 703157 - DNA, 19 bp, Mus musculus
  siRNA target sequence for Mab21l2 (NM_011839.2,927-945).
ctttgggtcgagttcatca

SEQ ID NO: 703158 - DNA, 19 bp, Mus musculus
  siRNA target sequence for Mab21l2 (NM_011839.2,1029-1047).
cgggacgtggtcaagatga

SEQ ID NO: 703159 - DNA, 19 bp, Mus musculus
  siRNA target sequence for Mab21l2 (NM_011839.2,1030-1048).
gggacgtggtcaagatgat

SEQ ID NO: 703160 - DNA, 19 bp, Mus musculus
  siRNA target sequence for Mab21l2 (NM_011839.2,1086-1104).
cgctacgtggtgcaaatca

SEQ ID NO: 703161 - DNA, 19 bp, Mus musculus
  siRNA target sequence for Mab21l2 (NM_011839.2,1389-1407).
ggccagccgctcaataact

SEQ ID NO: 703162 - DNA, 19 bp, Mus musculus
  siRNA target sequence for Mab21l2 (NM_011839.2,1390-1408).
gccagccgctcaataacta

SEQ ID NO: 703163 - DNA, 19 bp, Mus musculus
  siRNA target sequence for Mab21l2 (NM_011839.2,1641-1659).
ctcaccaatcccaaaagct

SEQ ID NO: 703164 - DNA, 19 bp, Mus musculus
  siRNA target sequence for Mbc2 (NM_011843.1,227-245).
cgggtcttagcgtaggttt

SEQ ID NO: 703165 - DNA, 19 bp, Mus musculus
  siRNA target sequence for Mbc2 (NM_011843.1,236-254).
gcgtaggtttcgtgctttt

SEQ ID NO: 703166 - DNA, 19 bp, Mus musculus
  siRNA target sequence for Mbc2 (NM_011843.1,285-303).
ggtccgcgatgggaaagaa

SEQ ID NO: 703167 - DNA, 19 bp, Mus musculus
  siRNA target sequence for Mbc2 (NM_011843.1,351-369).
caccgcagagacgctttat

SEQ ID NO: 703168 - DNA, 19 bp, Mus musculus
  siRNA target sequence for Mbc2 (NM_011843.1,353-371).
ccgcagagacgctttatat

SEQ ID NO: 703169 - DNA, 19 bp, Mus musculus
  siRNA target sequence for Mbc2 (NM_011843.1,421-439).
gccgaatggctgaacaaga

SEQ ID NO: 703170 - DNA, 19 bp, Mus musculus
  siRNA target sequence for Mbc2 (NM_011843.1,457-475).
cccttcctaggccagtata

SEQ ID NO: 703171 - DNA, 19 bp, Mus musculus
  siRNA target sequence for Mbc2 (NM_011843.1,532-550).
ctgcagacattcacattca

SEQ ID NO: 703172 - DNA, 19 bp, Mus musculus
  siRNA target sequence for Mbc2 (NM_011843.1,564-582).
gggtgaaaagccattacga

SEQ ID NO: 703173 - DNA, 19 bp, Mus musculus
  siRNA target sequence for Mbc2 (NM_011843.1,565-583).
ggtgaaaagccattacgaa

SEQ ID NO: 703174 - DNA, 19 bp, Mus musculus
  siRNA target sequence for Mbc2 (NM_011843.1,566-584).
gtgaaaagccattacgaat

SEQ ID NO: 703175 - DNA, 19 bp, Mus musculus
  siRNA target sequence for Mbc2 (NM_011843.1,581-599).
gaatcattggcgtcaaagt

SEQ ID NO: 703176 - DNA, 19 bp, Mus musculus
  siRNA target sequence for Mbc2 (NM_011843.1,603-621).
ccctagtcagaggaaagat

SEQ ID NO: 703177 - DNA, 19 bp, Mus musculus
  siRNA target sequence for Mbc2 (NM_011843.1,605-623).
ctagtcagaggaaagatca

SEQ ID NO: 703178 - DNA, 19 bp, Mus musculus
  siRNA target sequence for Mbc2 (NM_011843.1,624-642).
gattctgttggacttgaat

SEQ ID NO: 703179 - DNA, 19 bp, Mus musculus
  siRNA target sequence for Mbc2 (NM_011843.1,636-654).
cttgaatgtcagctatgta

SEQ ID NO: 703180 - DNA, 19 bp, Mus musculus
  siRNA target sequence for Mbc2 (NM_011843.1,645-663).
cagctatgtaggtgatgta

SEQ ID NO: 703181 - DNA, 19 bp, Mus musculus
  siRNA target sequence for Mbc2 (NM_011843.1,647-665).
gctatgtaggtgatgtaca

SEQ ID NO: 703182 - DNA, 19 bp, Mus musculus
  siRNA target sequence for Mbc2 (NM_011843.1,672-690).
cgtggaggtgaagaaatat

SEQ ID NO: 703183 - DNA, 19 bp, Mus musculus
  siRNA target sequence for Mbc2 (NM_011843.1,728-746).
gtgtcttgcgagtgattct

SEQ ID NO: 703184 - DNA, 19 bp, Mus musculus
  siRNA target sequence for Mbc2 (NM_011843.1,781-799).
gctgtgtccatgttcttta

SEQ ID NO: 703185 - DNA, 19 bp, Mus musculus
  siRNA target sequence for Mbc2 (NM_011843.1,784-802).
gtgtccatgttctttatca

SEQ ID NO: 703186 - DNA, 19 bp, Mus musculus
  siRNA target sequence for Mbc2 (NM_011843.1,786-804).
gtccatgttctttatcaaa

SEQ ID NO: 703187 - DNA, 19 bp, Mus musculus
  siRNA target sequence for Mbc2 (NM_011843.1,806-824).
gcccgacgcttgacatcaa

SEQ ID NO: 703188 - DNA, 19 bp, Mus musculus
  siRNA target sequence for Mbc2 (NM_011843.1,808-826).
ccgacgcttgacatcaact

SEQ ID NO: 703189 - DNA, 19 bp, Mus musculus
  siRNA target sequence for Mbc2 (NM_011843.1,1031-1049).
gttccaaggacaagtatgt

SEQ ID NO: 703190 - DNA, 19 bp, Mus musculus
  siRNA target sequence for Mbc2 (NM_011843.1,1115-1133).
gcagccgtgtcatagatga

SEQ ID NO: 703191 - DNA, 19 bp, Mus musculus
  siRNA target sequence for Mbc2 (NM_011843.1,1203-1221).
ggtggaggtatttgacaaa

SEQ ID NO: 703192 - DNA, 19 bp, Mus musculus
  siRNA target sequence for Mbc2 (NM_011843.1,1260-1278).
ggacgtggggaaggtatta

SEQ ID NO: 703193 - DNA, 19 bp, Mus musculus
  siRNA target sequence for Mbc2 (NM_011843.1,1285-1303).
ggagtcctggataattggt

SEQ ID NO: 703194 - DNA, 19 bp, Mus musculus
  siRNA target sequence for Mbc2 (NM_011843.1,1330-1348).
gttcacttgagactagaat

SEQ ID NO: 703195 - DNA, 19 bp, Mus musculus
  siRNA target sequence for Mbc2 (NM_011843.1,1340-1358).
gactagaatggctatcact

SEQ ID NO: 703196 - DNA, 19 bp, Mus musculus
  siRNA target sequence for Mbc2 (NM_011843.1,1506-1524).
ccccatggtgcaactatca

SEQ ID NO: 703197 - DNA, 19 bp, Mus musculus
  siRNA target sequence for Mbc2 (NM_011843.1,1509-1527).
catggtgcaactatcagtt

SEQ ID NO: 703198 - DNA, 19 bp, Mus musculus
  siRNA target sequence for Mbc2 (NM_011843.1,1777-1795).
ctggtcatgcggatcttat

SEQ ID NO: 703199 - DNA, 19 bp, Mus musculus
  siRNA target sequence for Mbc2 (NM_011843.1,1780-1798).
gtcatgcggatcttatact

SEQ ID NO: 703200 - DNA, 19 bp, Mus musculus
  siRNA target sequence for Mbc2 (NM_011843.1,1782-1800).
catgcggatcttatactta

SEQ ID NO: 703201 - DNA, 19 bp, Mus musculus
  siRNA target sequence for Mbc2 (NM_011843.1,1785-1803).
gcggatcttatacttagat

SEQ ID NO: 703202 - DNA, 19 bp, Mus musculus
  siRNA target sequence for Mbc2 (NM_011843.1,1787-1805).
ggatcttatacttagatta

SEQ ID NO: 703203 - DNA, 19 bp, Mus musculus
  siRNA target sequence for Mbc2 (NM_011843.1,1888-1906).
ccacctcggccctatcaca

SEQ ID NO: 703204 - DNA, 19 bp, Mus musculus
  siRNA target sequence for Mbc2 (NM_011843.1,1920-1938).
ccactttgggactgagaat

SEQ ID NO: 703205 - DNA, 19 bp, Mus musculus
  siRNA target sequence for Mbc2 (NM_011843.1,1939-1957).
gttcttcggatccatgtat

SEQ ID NO: 703206 - DNA, 19 bp, Mus musculus
  siRNA target sequence for Mbc2 (NM_011843.1,2001-2019).
cctggtgaagggcaaatca

SEQ ID NO: 703207 - DNA, 19 bp, Mus musculus
  siRNA target sequence for Mbc2 (NM_011843.1,2024-2042).
cctacgtcaaactaaaggt

SEQ ID NO: 703208 - DNA, 19 bp, Mus musculus
  siRNA target sequence for Mbc2 (NM_011843.1,2054-2072).
gtttccggacccatgttgt

SEQ ID NO: 703209 - DNA, 19 bp, Mus musculus
  siRNA target sequence for Mbc2 (NM_011843.1,2090-2108).
cccgctggaatgaggtttt

SEQ ID NO: 703210 - DNA, 19 bp, Mus musculus
  siRNA target sequence for Mbc2 (NM_011843.1,2093-2111).
gctggaatgaggtttttga

SEQ ID NO: 703211 - DNA, 19 bp, Mus musculus
  siRNA target sequence for Mbc2 (NM_011843.1,2182-2200).
gactttttgggcaggtata

SEQ ID NO: 703212 - DNA, 19 bp, Mus musculus
  siRNA target sequence for Mbc2 (NM_011843.1,2453-2471).
ccagcccttacgctactat

SEQ ID NO: 703213 - DNA, 19 bp, Mus musculus
  siRNA target sequence for Mbc2 (NM_011843.1,2789-2807).
gctcctcctcgctcaatga

SEQ ID NO: 703214 - DNA, 19 bp, Mus musculus
  siRNA target sequence for Mbc2 (NM_011843.1,2956-2974).
caaaagctgatcagcatta

SEQ ID NO: 703215 - DNA, 19 bp, Mus musculus
  siRNA target sequence for Mbc2 (NM_011843.1,3013-3031).
ctcccagacccctatgtgt

SEQ ID NO: 703216 - DNA, 19 bp, Mus musculus
  siRNA target sequence for Nek4 (NM_011849.1,218-236).
gagacggcaagcagtatgt

SEQ ID NO: 703217 - DNA, 19 bp, Mus musculus
  siRNA target sequence for Nek4 (NM_011849.1,220-238).
gacggcaagcagtatgtca

SEQ ID NO: 703218 - DNA, 19 bp, Mus musculus
  siRNA target sequence for Nek4 (NM_011849.1,224-242).
gcaagcagtatgtcatcaa

SEQ ID NO: 703219 - DNA, 19 bp, Mus musculus
  siRNA target sequence for Nek4 (NM_011849.1,362-380).
gagacggtctgctctacat

SEQ ID NO: 703220 - DNA, 19 bp, Mus musculus
  siRNA target sequence for Nek4 (NM_011849.1,395-413).
gcgaaggaggtgatctgta

SEQ ID NO: 703221 - DNA, 19 bp, Mus musculus
  siRNA target sequence for Nek4 (NM_011849.1,489-507).
ggccttgcagtatttacat

SEQ ID NO: 703222 - DNA, 19 bp, Mus musculus
  siRNA target sequence for Nek4 (NM_011849.1,491-509).
ccttgcagtatttacatga

SEQ ID NO: 703223 - DNA, 19 bp, Mus musculus
  siRNA target sequence for Nek4 (NM_011849.1,674-692).
ccaacaaaccctacaacta

SEQ ID NO: 703224 - DNA, 19 bp, Mus musculus
  siRNA target sequence for Nek4 (NM_011849.1,675-693).
caacaaaccctacaactat

SEQ ID NO: 703225 - DNA, 19 bp, Mus musculus
  siRNA target sequence for Nek4 (NM_011849.1,744-762).
gaagcacgcttttaatgca

SEQ ID NO: 703226 - DNA, 19 bp, Mus musculus
  siRNA target sequence for Nek4 (NM_011849.1,760-778).
gcaaaagacatgaattctt

SEQ ID NO: 703227 - DNA, 19 bp, Mus musculus
  siRNA target sequence for Nek4 (NM_011849.1,807-825).
gccgccaatgccaaaagtt

SEQ ID NO: 703228 - DNA, 19 bp, Mus musculus
  siRNA target sequence for Nek4 (NM_011849.1,808-826).
ccgccaatgccaaaagttt

SEQ ID NO: 703229 - DNA, 19 bp, Mus musculus
  siRNA target sequence for Nek4 (NM_011849.1,809-827).
cgccaatgccaaaagttta

SEQ ID NO: 703230 - DNA, 19 bp, Mus musculus
  siRNA target sequence for Nek4 (NM_011849.1,811-829).
ccaatgccaaaagtttaca

SEQ ID NO: 703231 - DNA, 19 bp, Mus musculus
  siRNA target sequence for Nek4 (NM_011849.1,837-855).
gctggctgagctgataaga

SEQ ID NO: 703232 - DNA, 19 bp, Mus musculus
  siRNA target sequence for Nek4 (NM_011849.1,841-859).
gctgagctgataagaacaa

SEQ ID NO: 703233 - DNA, 19 bp, Mus musculus
  siRNA target sequence for Nek4 (NM_011849.1,842-860).
ctgagctgataagaacaat

SEQ ID NO: 703234 - DNA, 19 bp, Mus musculus
  siRNA target sequence for Nek4 (NM_011849.1,903-921).
cctgaggcagccctacata

SEQ ID NO: 703235 - DNA, 19 bp, Mus musculus
  siRNA target sequence for Nek4 (NM_011849.1,906-924).
gaggcagccctacataaaa

SEQ ID NO: 703236 - DNA, 19 bp, Mus musculus
  siRNA target sequence for Nek4 (NM_011849.1,908-926).
ggcagccctacataaaaca

SEQ ID NO: 703237 - DNA, 19 bp, Mus musculus
  siRNA target sequence for Nek4 (NM_011849.1,1040-1058).
caaatactgacgtgataca

SEQ ID NO: 703238 - DNA, 19 bp, Mus musculus
  siRNA target sequence for Nek4 (NM_011849.1,1092-1110).
gcatgtcatgggtgaagat

SEQ ID NO: 703239 - DNA, 19 bp, Mus musculus
  siRNA target sequence for Nek4 (NM_011849.1,1096-1114).
gtcatgggtgaagataaat

SEQ ID NO: 703240 - DNA, 19 bp, Mus musculus
  siRNA target sequence for Nek4 (NM_011849.1,1152-1170).
gagatcaccggctagtctt

SEQ ID NO: 703241 - DNA, 19 bp, Mus musculus
  siRNA target sequence for Nek4 (NM_011849.1,1175-1193).
gccacactggcaaacaaga

SEQ ID NO: 703242 - DNA, 19 bp, Mus musculus
  siRNA target sequence for Nek4 (NM_011849.1,1183-1201).
ggcaaacaagacatgaaca

SEQ ID NO: 703243 - DNA, 19 bp, Mus musculus
  siRNA target sequence for Nek4 (NM_011849.1,1212-1230).
gtcatgtgccacaatcagt

SEQ ID NO: 703244 - DNA, 19 bp, Mus musculus
  siRNA target sequence for Nek4 (NM_011849.1,1219-1237).
gccacaatcagtaggataa

SEQ ID NO: 703245 - DNA, 19 bp, Mus musculus
  siRNA target sequence for Nek4 (NM_011849.1,1221-1239).
cacaatcagtaggataaat

SEQ ID NO: 703246 - DNA, 19 bp, Mus musculus
  siRNA target sequence for Nek4 (NM_011849.1,1229-1247).
gtaggataaatatcgatat

SEQ ID NO: 703247 - DNA, 19 bp, Mus musculus
  siRNA target sequence for Nek4 (NM_011849.1,1232-1250).
ggataaatatcgatatctt

SEQ ID NO: 703248 - DNA, 19 bp, Mus musculus
  siRNA target sequence for Nek4 (NM_011849.1,1233-1251).
gataaatatcgatatctta

SEQ ID NO: 703249 - DNA, 19 bp, Mus musculus
  siRNA target sequence for Nek4 (NM_011849.1,1274-1292).
cgaacgctggtgtagttca

SEQ ID NO: 703250 - DNA, 19 bp, Mus musculus
  siRNA target sequence for Nek4 (NM_011849.1,1311-1329).
cgtggatgccgctgatgaa

SEQ ID NO: 703251 - DNA, 19 bp, Mus musculus
  siRNA target sequence for Nek4 (NM_011849.1,1314-1332).
ggatgccgctgatgaagta

SEQ ID NO: 703252 - DNA, 19 bp, Mus musculus
  siRNA target sequence for Nek4 (NM_011849.1,1391-1409).
gtgatcagcctggaaatct

SEQ ID NO: 703253 - DNA, 19 bp, Mus musculus
  siRNA target sequence for Nek4 (NM_011849.1,1464-1482).
gccattgtatccctcaaat

SEQ ID NO: 703254 - DNA, 19 bp, Mus musculus
  siRNA target sequence for Nek4 (NM_011849.1,1465-1483).
ccattgtatccctcaaata

SEQ ID NO: 703255 - DNA, 19 bp, Mus musculus
  siRNA target sequence for Nek4 (NM_011849.1,1466-1484).
cattgtatccctcaaataa

SEQ ID NO: 703256 - DNA, 19 bp, Mus musculus
  siRNA target sequence for Nek4 (NM_011849.1,1475-1493).
cctcaaataaagaccaaaa

SEQ ID NO: 703257 - DNA, 19 bp, Mus musculus
  siRNA target sequence for Nek4 (NM_011849.1,1495-1513).
ccagaccaggatcaagtta

SEQ ID NO: 703258 - DNA, 19 bp, Mus musculus
  siRNA target sequence for Nek4 (NM_011849.1,1503-1521).
ggatcaagttactggtatt

SEQ ID NO: 703259 - DNA, 19 bp, Mus musculus
  siRNA target sequence for Nek4 (NM_011849.1,1504-1522).
gatcaagttactggtatta

SEQ ID NO: 703260 - DNA, 19 bp, Mus musculus
  siRNA target sequence for Nek4 (NM_011849.1,1514-1532).
ctggtattatagaaaatca

SEQ ID NO: 703261 - DNA, 19 bp, Mus musculus
  siRNA target sequence for Nek4 (NM_011849.1,1557-1575).
gccacacagctctatgtct

SEQ ID NO: 703262 - DNA, 19 bp, Mus musculus
  siRNA target sequence for Nek4 (NM_011849.1,1664-1682).
ctcggcttttgccttctta

SEQ ID NO: 703263 - DNA, 19 bp, Mus musculus
  siRNA target sequence for Nek4 (NM_011849.1,1668-1686).
gcttttgccttcttatcct

SEQ ID NO: 703264 - DNA, 19 bp, Mus musculus
  siRNA target sequence for Nek4 (NM_011849.1,1749-1767).
ggctgggtgtgtaaacagt

SEQ ID NO: 703265 - DNA, 19 bp, Mus musculus
  siRNA target sequence for Nek4 (NM_011849.1,1750-1768).
gctgggtgtgtaaacagtt

SEQ ID NO: 703266 - DNA, 19 bp, Mus musculus
  siRNA target sequence for Nek4 (NM_011849.1,1792-1810).
gcaaaggatcgaccattat

SEQ ID NO: 703267 - DNA, 19 bp, Mus musculus
  siRNA target sequence for Nek4 (NM_011849.1,1928-1946).
ccatccctgcccaacgatt

SEQ ID NO: 703268 - DNA, 19 bp, Mus musculus
  siRNA target sequence for Nek4 (NM_011849.1,1958-1976).
gcagcatcactcagatgaa

SEQ ID NO: 703269 - DNA, 19 bp, Mus musculus
  siRNA target sequence for Nek4 (NM_011849.1,1961-1979).
gcatcactcagatgaatca

SEQ ID NO: 703270 - DNA, 19 bp, Mus musculus
  siRNA target sequence for Nek4 (NM_011849.1,1982-2000).
cactcccgagggaaaagga

SEQ ID NO: 703271 - DNA, 19 bp, Mus musculus
  siRNA target sequence for Nek4 (NM_011849.1,2019-2037).
cctgtctgaggatgagtta

SEQ ID NO: 703272 - DNA, 19 bp, Mus musculus
  siRNA target sequence for Nek4 (NM_011849.1,2045-2063).
ctacaagctcaactgataa

SEQ ID NO: 703273 - DNA, 19 bp, Mus musculus
  siRNA target sequence for Nek4 (NM_011849.1,2182-2200).
ctaaacccagggtcagaat

SEQ ID NO: 703274 - DNA, 19 bp, Mus musculus
  siRNA target sequence for Nek4 (NM_011849.1,2193-2211).
gtcagaattcagacttcat

SEQ ID NO: 703275 - DNA, 19 bp, Mus musculus
  siRNA target sequence for Nek4 (NM_011849.1,2280-2298).
gctgcctacgggtatcata

SEQ ID NO: 703276 - DNA, 19 bp, Mus musculus
  siRNA target sequence for Nek4 (NM_011849.1,2299-2317).
ccaggttctgaaaagatca

SEQ ID NO: 703277 - DNA, 19 bp, Mus musculus
  siRNA target sequence for Nek4 (NM_011849.1,2319-2337).
gagaatcgttgaagtctta

SEQ ID NO: 703278 - DNA, 19 bp, Mus musculus
  siRNA target sequence for Nek4 (NM_011849.1,2357-2375).
gcctggggattcaactctt

SEQ ID NO: 703279 - DNA, 19 bp, Mus musculus
  siRNA target sequence for Nek4 (NM_011849.1,2447-2465).
gagacaagtatacaactta

SEQ ID NO: 703280 - DNA, 19 bp, Mus musculus
  siRNA target sequence for Nek4 (NM_011849.1,2470-2488).
gtgaaagctcgccaattga

SEQ ID NO: 703281 - DNA, 19 bp, Mus musculus
  siRNA target sequence for Nek4 (NM_011849.1,2472-2490).
gaaagctcgccaattgaaa

SEQ ID NO: 703282 - DNA, 19 bp, Mus musculus
  siRNA target sequence for Nek4 (NM_011849.1,2477-2495).
ctcgccaattgaaattttt

SEQ ID NO: 703283 - DNA, 19 bp, Mus musculus
  siRNA target sequence for Nek4 (NM_011849.1,2480-2498).
gccaattgaaattttttga

SEQ ID NO: 703284 - DNA, 19 bp, Mus musculus
  siRNA target sequence for Nek4 (NM_011849.1,2481-2499).
ccaattgaaattttttgaa

SEQ ID NO: 703285 - DNA, 19 bp, Mus musculus
  siRNA target sequence for Odz4 (NM_011858.1,795-813).
ctgccgcacaggcactaat

SEQ ID NO: 703286 - DNA, 19 bp, Mus musculus
  siRNA target sequence for Odz4 (NM_011858.1,797-815).
gccgcacaggcactaattt

SEQ ID NO: 703287 - DNA, 19 bp, Mus musculus
  siRNA target sequence for Odz4 (NM_011858.1,799-817).
cgcacaggcactaatttca

SEQ ID NO: 703288 - DNA, 19 bp, Mus musculus
  siRNA target sequence for Odz4 (NM_011858.1,1075-1093).
ggtgctcccttgcattgtt

SEQ ID NO: 703289 - DNA, 19 bp, Mus musculus
  siRNA target sequence for Odz4 (NM_011858.1,1078-1096).
gctcccttgcattgttcat

SEQ ID NO: 703290 - DNA, 19 bp, Mus musculus
  siRNA target sequence for Odz4 (NM_011858.1,1100-1118).
cttcatcaacccctattga

SEQ ID NO: 703291 - DNA, 19 bp, Mus musculus
  siRNA target sequence for Odz4 (NM_011858.1,1222-1240).
gagtttgtccctaattcat

SEQ ID NO: 703292 - DNA, 19 bp, Mus musculus
  siRNA target sequence for Odz4 (NM_011858.1,1269-1287).
gggggtcgcagcaaacgat

SEQ ID NO: 703293 - DNA, 19 bp, Mus musculus
  siRNA target sequence for Odz4 (NM_011858.1,1763-1781).
cccgaccagcctttaacct

SEQ ID NO: 703294 - DNA, 19 bp, Mus musculus
  siRNA target sequence for Odz4 (NM_011858.1,1769-1787).
cagcctttaacctcaagaa

SEQ ID NO: 703295 - DNA, 19 bp, Mus musculus
  siRNA target sequence for Odz4 (NM_011858.1,1854-1872).
catcctgctcgcatacttt

SEQ ID NO: 703296 - DNA, 19 bp, Mus musculus
  siRNA target sequence for Odz4 (NM_011858.1,1882-1900).
cacctgtttggcctaaact

SEQ ID NO: 703297 - DNA, 19 bp, Mus musculus
  siRNA target sequence for Odz4 (NM_011858.1,1924-1942).
cagatgcagatgtatgaga

SEQ ID NO: 703298 - DNA, 19 bp, Mus musculus
  siRNA target sequence for Odz4 (NM_011858.1,2053-2071).
ggaaagccaagtagtttat

SEQ ID NO: 703299 - DNA, 19 bp, Mus musculus
  siRNA target sequence for Odz4 (NM_011858.1,2058-2076).
gccaagtagtttatttcca

SEQ ID NO: 703300 - DNA, 19 bp, Mus musculus
  siRNA target sequence for Odz4 (NM_011858.1,2117-2135).
gacgggcttcccagaagat

SEQ ID NO: 703301 - DNA, 19 bp, Mus musculus
  siRNA target sequence for Odz4 (NM_011858.1,2156-2174).
gatctcaggtgttcataga

SEQ ID NO: 703302 - DNA, 19 bp, Mus musculus
  siRNA target sequence for Odz4 (NM_011858.1,2185-2203).
cacctgaagttcaatgtgt

SEQ ID NO: 703303 - DNA, 19 bp, Mus musculus
  siRNA target sequence for Odz4 (NM_011858.1,2372-2390).
gccatgagaccggtttcat

SEQ ID NO: 703304 - DNA, 19 bp, Mus musculus
  siRNA target sequence for Odz4 (NM_011858.1,2449-2467).
gaagtggtttcatttctca

SEQ ID NO: 703305 - DNA, 19 bp, Mus musculus
  siRNA target sequence for Odz4 (NM_011858.1,2466-2484).
caccaccgccattgaatca

SEQ ID NO: 703306 - DNA, 19 bp, Mus musculus
  siRNA target sequence for Odz4 (NM_011858.1,2468-2486).
ccaccgccattgaatcagt

SEQ ID NO: 703307 - DNA, 19 bp, Mus musculus
  siRNA target sequence for Odz4 (NM_011858.1,2474-2492).
ccattgaatcagtggataa

SEQ ID NO: 703308 - DNA, 19 bp, Mus musculus
  siRNA target sequence for Odz4 (NM_011858.1,2603-2621).
gtgggaacggccagtacat

SEQ ID NO: 703309 - DNA, 19 bp, Mus musculus
  siRNA target sequence for Odz4 (NM_011858.1,2605-2623).
gggaacggccagtacatga

SEQ ID NO: 703310 - DNA, 19 bp, Mus musculus
  siRNA target sequence for Odz4 (NM_011858.1,2606-2624).
ggaacggccagtacatgaa

SEQ ID NO: 703311 - DNA, 19 bp, Mus musculus
  siRNA target sequence for Odz4 (NM_011858.1,3172-3190).
cctggcttgtgcaatggaa

SEQ ID NO: 703312 - DNA, 19 bp, Mus musculus
  siRNA target sequence for Odz4 (NM_011858.1,3449-3467).
ccttctacgatcgaatcaa

SEQ ID NO: 703313 - DNA, 19 bp, Mus musculus
  siRNA target sequence for Odz4 (NM_011858.1,3575-3593).
cattggttggcgtgaacat

SEQ ID NO: 703314 - DNA, 19 bp, Mus musculus
  siRNA target sequence for Odz4 (NM_011858.1,3580-3598).
gttggcgtgaacatcagtt

SEQ ID NO: 703315 - DNA, 19 bp, Mus musculus
  siRNA target sequence for Odz4 (NM_011858.1,3583-3601).
ggcgtgaacatcagtttca

SEQ ID NO: 703316 - DNA, 19 bp, Mus musculus
  siRNA target sequence for Odz4 (NM_011858.1,3584-3602).
gcgtgaacatcagtttcat

SEQ ID NO: 703317 - DNA, 19 bp, Mus musculus
  siRNA target sequence for Odz4 (NM_011858.1,3586-3604).
gtgaacatcagtttcatca

SEQ ID NO: 703318 - DNA, 19 bp, Mus musculus
  siRNA target sequence for Odz4 (NM_011858.1,3588-3606).
gaacatcagtttcatcaat

SEQ ID NO: 703319 - DNA, 19 bp, Mus musculus
  siRNA target sequence for Odz4 (NM_011858.1,3647-3665).
gctttgacctggtcacaaa

SEQ ID NO: 703320 - DNA, 19 bp, Mus musculus
  siRNA target sequence for Odz4 (NM_011858.1,3678-3696).
catcatcttgagattcgaa

SEQ ID NO: 703321 - DNA, 19 bp, Mus musculus
  siRNA target sequence for Odz4 (NM_011858.1,3694-3712).
gaaagggcacccttcatca

SEQ ID NO: 703322 - DNA, 19 bp, Mus musculus
  siRNA target sequence for Odz4 (NM_011858.1,3740-3758).
gggatcgcttctttgtcat

SEQ ID NO: 703323 - DNA, 19 bp, Mus musculus
  siRNA target sequence for Odz4 (NM_011858.1,3776-3794).
gacacgaggagaatgagat

SEQ ID NO: 703324 - DNA, 19 bp, Mus musculus
  siRNA target sequence for Odz4 (NM_011858.1,3968-3986).
gccgcactcctggctataa

SEQ ID NO: 703325 - DNA, 19 bp, Mus musculus
  siRNA target sequence for Odz4 (NM_011858.1,3970-3988).
cgcactcctggctataagt

SEQ ID NO: 703326 - DNA, 19 bp, Mus musculus
  siRNA target sequence for Odz4 (NM_011858.1,4096-4114).
gctcctgacctgtcctatt

SEQ ID NO: 703327 - DNA, 19 bp, Mus musculus
  siRNA target sequence for Odz4 (NM_011858.1,4099-4117).
cctgacctgtcctattact

SEQ ID NO: 703328 - DNA, 19 bp, Mus musculus
  siRNA target sequence for Odz4 (NM_011858.1,4177-4195).
gtttccgtgggttatgagt

SEQ ID NO: 703329 - DNA, 19 bp, Mus musculus
  siRNA target sequence for Odz4 (NM_011858.1,4181-4199).
ccgtgggttatgagtatga

SEQ ID NO: 703330 - DNA, 19 bp, Mus musculus
  siRNA target sequence for Odz4 (NM_011858.1,4182-4200).
cgtgggttatgagtatgaa

SEQ ID NO: 703331 - DNA, 19 bp, Mus musculus
  siRNA target sequence for Odz4 (NM_011858.1,4183-4201).
gtgggttatgagtatgaat

SEQ ID NO: 703332 - DNA, 19 bp, Mus musculus
  siRNA target sequence for Odz4 (NM_011858.1,4399-4417).
gggcgcaggagaagtatct

SEQ ID NO: 703333 - DNA, 19 bp, Mus musculus
  siRNA target sequence for Odz4 (NM_011858.1,4778-4796).
cagaagccacgctcactaa

SEQ ID NO: 703334 - DNA, 19 bp, Mus musculus
  siRNA target sequence for Odz4 (NM_011858.1,4805-4823).
gaattacagtggacaagtt

SEQ ID NO: 703335 - DNA, 19 bp, Mus musculus
  siRNA target sequence for Odz4 (NM_011858.1,4816-4834).
gacaagtttgggctcattt

SEQ ID NO: 703336 - DNA, 19 bp, Mus musculus
  siRNA target sequence for Odz4 (NM_011858.1,4851-4869).
catgatcagacgtgttgat

SEQ ID NO: 703337 - DNA, 19 bp, Mus musculus
  siRNA target sequence for Odz4 (NM_011858.1,4854-4872).
gatcagacgtgttgatcaa

SEQ ID NO: 703338 - DNA, 19 bp, Mus musculus
  siRNA target sequence for Odz4 (NM_011858.1,4857-4875).
cagacgtgttgatcaaaat

SEQ ID NO: 703339 - DNA, 19 bp, Mus musculus
  siRNA target sequence for Odz4 (NM_011858.1,4861-4879).
cgtgttgatcaaaatggaa

SEQ ID NO: 703340 - DNA, 19 bp, Mus musculus
  siRNA target sequence for Odz4 (NM_011858.1,4938-4956).
ctccgtcatggagatttct

SEQ ID NO: 703341 - DNA, 19 bp, Mus musculus
  siRNA target sequence for Odz4 (NM_011858.1,4940-4958).
ccgtcatggagatttctca

SEQ ID NO: 703342 - DNA, 19 bp, Mus musculus
  siRNA target sequence for Odz4 (NM_011858.1,4989-5007).
catcaacccaatggataat

SEQ ID NO: 703343 - DNA, 19 bp, Mus musculus
  siRNA target sequence for Odz4 (NM_011858.1,4992-5010).
caacccaatggataattct

SEQ ID NO: 703344 - DNA, 19 bp, Mus musculus
  siRNA target sequence for Odz4 (NM_011858.1,5162-5180).
ctgctctggccgtttcaca

SEQ ID NO: 703345 - DNA, 19 bp, Mus musculus
  siRNA target sequence for Odz4 (NM_011858.1,5387-5405).
ctgacggggagctctatgt

SEQ ID NO: 703346 - DNA, 19 bp, Mus musculus
  siRNA target sequence for Odz4 (NM_011858.1,5415-5433).
gggaaacatccgaattcga

SEQ ID NO: 703347 - DNA, 19 bp, Mus musculus
  siRNA target sequence for Odz4 (NM_011858.1,5416-5434).
ggaaacatccgaattcgat

SEQ ID NO: 703348 - DNA, 19 bp, Mus musculus
  siRNA target sequence for Odz4 (NM_011858.1,5417-5435).
gaaacatccgaattcgatt

SEQ ID NO: 703349 - DNA, 19 bp, Mus musculus
  siRNA target sequence for Odz4 (NM_011858.1,5431-5449).
cgatttatccggaagaaca

SEQ ID NO: 703350 - DNA, 19 bp, Mus musculus
  siRNA target sequence for Odz4 (NM_011858.1,5432-5450).
gatttatccggaagaacaa

SEQ ID NO: 703351 - DNA, 19 bp, Mus musculus
  siRNA target sequence for Odz4 (NM_011858.1,5503-5521).
gagctgtacctctttgata

SEQ ID NO: 703352 - DNA, 19 bp, Mus musculus
  siRNA target sequence for Odz4 (NM_011858.1,5558-5576).
caggggactacctgtacaa

SEQ ID NO: 703353 - DNA, 19 bp, Mus musculus
  siRNA target sequence for Odz4 (NM_011858.1,5560-5578).
ggggactacctgtacaact

SEQ ID NO: 703354 - DNA, 19 bp, Mus musculus
  siRNA target sequence for Odz4 (NM_011858.1,5561-5579).
gggactacctgtacaactt

SEQ ID NO: 703355 - DNA, 19 bp, Mus musculus
  siRNA target sequence for Odz4 (NM_011858.1,5571-5589).
gtacaacttcacttacaca

SEQ ID NO: 703356 - DNA, 19 bp, Mus musculus
  siRNA target sequence for Odz4 (NM_011858.1,5683-5701).
ccagatggccaggtatact

SEQ ID NO: 703357 - DNA, 19 bp, Mus musculus
  siRNA target sequence for Odz4 (NM_011858.1,5752-5770).
cacgagctagccatgatga

SEQ ID NO: 703358 - DNA, 19 bp, Mus musculus
  siRNA target sequence for Odz4 (NM_011858.1,5788-5806).
ggcctcttggcaaccaaaa

SEQ ID NO: 703359 - DNA, 19 bp, Mus musculus
  siRNA target sequence for Odz4 (NM_011858.1,5791-5809).
ctcttggcaaccaaaagca

SEQ ID NO: 703360 - DNA, 19 bp, Mus musculus
  siRNA target sequence for Odz4 (NM_011858.1,5846-5864).
gttttggtcgcctgacaaa

SEQ ID NO: 703361 - DNA, 19 bp, Mus musculus
  siRNA target sequence for Odz4 (NM_011858.1,5894-5912).
gtttccgaagcgatacaga

SEQ ID NO: 703362 - DNA, 19 bp, Mus musculus
  siRNA target sequence for Odz4 (NM_011858.1,5950-5968).
gatgacgtcaccataacca

SEQ ID NO: 703363 - DNA, 19 bp, Mus musculus
  siRNA target sequence for Odz4 (NM_011858.1,5990-6008).
ccttctacaccctgttaca

SEQ ID NO: 703364 - DNA, 19 bp, Mus musculus
  siRNA target sequence for Odz4 (NM_011858.1,5991-6009).
cttctacaccctgttacaa

SEQ ID NO: 703365 - DNA, 19 bp, Mus musculus
  siRNA target sequence for Odz4 (NM_011858.1,6016-6034).
gtccggaacagctactaca

SEQ ID NO: 703366 - DNA, 19 bp, Mus musculus
  siRNA target sequence for Odz4 (NM_011858.1,6148-6166).
gtcacactgcccattgata

SEQ ID NO: 703367 - DNA, 19 bp, Mus musculus
  siRNA target sequence for Odz4 (NM_011858.1,6310-6328).
gatgaccatcgcaagttca

SEQ ID NO: 703368 - DNA, 19 bp, Mus musculus
  siRNA target sequence for Odz4 (NM_011858.1,6327-6345).
cacccttcggatcctatat

SEQ ID NO: 703369 - DNA, 19 bp, Mus musculus
  siRNA target sequence for Odz4 (NM_011858.1,6329-6347).
cccttcggatcctatatga

SEQ ID NO: 703370 - DNA, 19 bp, Mus musculus
  siRNA target sequence for Odz4 (NM_011858.1,6383-6401).
gcaggctgaatggtgttaa

SEQ ID NO: 703371 - DNA, 19 bp, Mus musculus
  siRNA target sequence for Odz4 (NM_011858.1,6411-6429).
ctcccctggaggtcacatt

SEQ ID NO: 703372 - DNA, 19 bp, Mus musculus
  siRNA target sequence for Odz4 (NM_011858.1,6453-6471).
gtctgagagaatggaatat

SEQ ID NO: 703373 - DNA, 19 bp, Mus musculus
  siRNA target sequence for Odz4 (NM_011858.1,6486-6504).
catcacatcccggatcttt

SEQ ID NO: 703374 - DNA, 19 bp, Mus musculus
  siRNA target sequence for Odz4 (NM_011858.1,6519-6537).
gtggagctacacgtactta

SEQ ID NO: 703375 - DNA, 19 bp, Mus musculus
  siRNA target sequence for Odz4 (NM_011858.1,6658-6676).
cgctcagtgggctactaca

SEQ ID NO: 703376 - DNA, 19 bp, Mus musculus
  siRNA target sequence for Odz4 (NM_011858.1,6701-6719).
gcaacgcctcagtcattca

SEQ ID NO: 703377 - DNA, 19 bp, Mus musculus
  siRNA target sequence for Odz4 (NM_011858.1,6732-6750).
ggatggacacctgttacat

SEQ ID NO: 703378 - DNA, 19 bp, Mus musculus
  siRNA target sequence for Odz4 (NM_011858.1,6733-6751).
gatggacacctgttacata

SEQ ID NO: 703379 - DNA, 19 bp, Mus musculus
  siRNA target sequence for Odz4 (NM_011858.1,6737-6755).
gacacctgttacatacctt

SEQ ID NO: 703380 - DNA, 19 bp, Mus musculus
  siRNA target sequence for Odz4 (NM_011858.1,6822-6840).
gtatgacaccactaaggta

SEQ ID NO: 703381 - DNA, 19 bp, Mus musculus
  siRNA target sequence for Odz4 (NM_011858.1,6978-6996).
ggtcaatgcccgttttgat

SEQ ID NO: 703382 - DNA, 19 bp, Mus musculus
  siRNA target sequence for Odz4 (NM_011858.1,6979-6997).
gtcaatgcccgttttgatt

SEQ ID NO: 703383 - DNA, 19 bp, Mus musculus
  siRNA target sequence for Odz4 (NM_011858.1,6985-7003).
gcccgttttgattacaact

SEQ ID NO: 703384 - DNA, 19 bp, Mus musculus
  siRNA target sequence for Odz4 (NM_011858.1,6986-7004).
cccgttttgattacaacta

SEQ ID NO: 703385 - DNA, 19 bp, Mus musculus
  siRNA target sequence for Odz4 (NM_011858.1,6987-7005).
ccgttttgattacaactat

SEQ ID NO: 703386 - DNA, 19 bp, Mus musculus
  siRNA target sequence for Odz4 (NM_011858.1,7319-7337).
cccgctactcctatgagta

SEQ ID NO: 703387 - DNA, 19 bp, Mus musculus
  siRNA target sequence for Odz4 (NM_011858.1,7320-7338).
ccgctactcctatgagtat

SEQ ID NO: 703388 - DNA, 19 bp, Mus musculus
  siRNA target sequence for Odz4 (NM_011858.1,7323-7341).
ctactcctatgagtatgat

SEQ ID NO: 703389 - DNA, 19 bp, Mus musculus
  siRNA target sequence for Odz4 (NM_011858.1,7495-7513).
ggtgatgtacagtacaaga

SEQ ID NO: 703390 - DNA, 19 bp, Mus musculus
  siRNA target sequence for Odz4 (NM_011858.1,7496-7514).
gtgatgtacagtacaagat

SEQ ID NO: 703391 - DNA, 19 bp, Mus musculus
  siRNA target sequence for Odz4 (NM_011858.1,7749-7767).
gattacatccctctactat

SEQ ID NO: 703392 - DNA, 19 bp, Mus musculus
  siRNA target sequence for Odz4 (NM_011858.1,7754-7772).
catccctctactatgatct

SEQ ID NO: 703393 - DNA, 19 bp, Mus musculus
  siRNA target sequence for Odz4 (NM_011858.1,7862-7880).
gtggaactggcttgatgat

SEQ ID NO: 703394 - DNA, 19 bp, Mus musculus
  siRNA target sequence for Odz4 (NM_011858.1,7864-7882).
ggaactggcttgatgatta

SEQ ID NO: 703395 - DNA, 19 bp, Mus musculus
  siRNA target sequence for Odz4 (NM_011858.1,7995-8013).
catgggccgacgggattat

SEQ ID NO: 703396 - DNA, 19 bp, Mus musculus
  siRNA target sequence for Odz4 (NM_011858.1,7998-8016).
gggccgacgggattatgat

SEQ ID NO: 703397 - DNA, 19 bp, Mus musculus
  siRNA target sequence for Odz4 (NM_011858.1,8000-8018).
gccgacgggattatgatgt

SEQ ID NO: 703398 - DNA, 19 bp, Mus musculus
  siRNA target sequence for Odz4 (NM_011858.1,8036-8054).
caagcccagaccatgaact

SEQ ID NO: 703399 - DNA, 19 bp, Mus musculus
  siRNA target sequence for Odz4 (NM_011858.1,8092-8110).
catctctacatgtttaaga

SEQ ID NO: 703400 - DNA, 19 bp, Mus musculus
  siRNA target sequence for Odz4 (NM_011858.1,8288-8306).
gggacaacagcaagtctat

SEQ ID NO: 703401 - DNA, 19 bp, Mus musculus
  siRNA target sequence for Odz4 (NM_011858.1,8334-8352).
gcaactcaaggctttcgtt

SEQ ID NO: 703402 - DNA, 19 bp, Mus musculus
  siRNA target sequence for Odz4 (NM_011858.1,8335-8353).
caactcaaggctttcgtta

SEQ ID NO: 703403 - DNA, 19 bp, Mus musculus
  siRNA target sequence for Odz4 (NM_011858.1,8457-8475).
ggtcaagtttgccttgaaa

SEQ ID NO: 703404 - DNA, 19 bp, Mus musculus
  siRNA target sequence for Odz4 (NM_011858.1,8532-8550).
cgcagccatcttgaacaat

SEQ ID NO: 703405 - DNA, 19 bp, Mus musculus
  siRNA target sequence for Osr1 (NM_011859.2,403-421).
ctgcccaacctgtatggtt

SEQ ID NO: 703406 - DNA, 19 bp, Mus musculus
  siRNA target sequence for Osr1 (NM_011859.2,484-502).
cctcgatcctctttttcta

SEQ ID NO: 703407 - DNA, 19 bp, Mus musculus
  siRNA target sequence for Osr1 (NM_011859.2,485-503).
ctcgatcctctttttctaa

SEQ ID NO: 703408 - DNA, 19 bp, Mus musculus
  siRNA target sequence for Osr1 (NM_011859.2,563-581).
ggtttccccacgtcattca

SEQ ID NO: 703409 - DNA, 19 bp, Mus musculus
  siRNA target sequence for Osr1 (NM_011859.2,629-647).
ccaagcctcgctttgattt

SEQ ID NO: 703410 - DNA, 19 bp, Mus musculus
  siRNA target sequence for Osr1 (NM_011859.2,742-760).
ctggacgtgaccaagctat

SEQ ID NO: 703411 - DNA, 19 bp, Mus musculus
  siRNA target sequence for Osr1 (NM_011859.2,801-819).
gaccaagaaggaattcgtt

SEQ ID NO: 703412 - DNA, 19 bp, Mus musculus
  siRNA target sequence for Osr1 (NM_011859.2,838-856).
cacttcactaagtcctata

SEQ ID NO: 703413 - DNA, 19 bp, Mus musculus
  siRNA target sequence for Osr1 (NM_011859.2,843-861).
cactaagtcctataaccta

SEQ ID NO: 703414 - DNA, 19 bp, Mus musculus
  siRNA target sequence for Osr1 (NM_011859.2,947-965).
gggaccacagatatattca

SEQ ID NO: 703415 - DNA, 19 bp, Mus musculus
  siRNA target sequence for Osr1 (NM_011859.2,1043-1061).
cgctacactcacaagtgaa

SEQ ID NO: 703416 - DNA, 19 bp, Mus musculus
  siRNA target sequence for Pcbp1 (NM_011865.2,127-145).
gacgccggtgtgactgaaa

SEQ ID NO: 703417 - DNA, 19 bp, Mus musculus
  siRNA target sequence for Pcbp1 (NM_011865.2,303-321).
gctgactgggcctaccaat

SEQ ID NO: 703418 - DNA, 19 bp, Mus musculus
  siRNA target sequence for Pcbp1 (NM_011865.2,546-564).
gaccgagcgggctatcact

SEQ ID NO: 703419 - DNA, 19 bp, Mus musculus
  siRNA target sequence for Pcbp1 (NM_011865.2,887-905).
cgggattcgccggaattga

SEQ ID NO: 703420 - DNA, 19 bp, Mus musculus
  siRNA target sequence for Pcbp1 (NM_011865.2,889-907).
ggattcgccggaattgact

SEQ ID NO: 703421 - DNA, 19 bp, Mus musculus
  siRNA target sequence for Pcbp1 (NM_011865.2,930-948).
ctattgggcaagtttggat

SEQ ID NO: 703422 - DNA, 19 bp, Mus musculus
  siRNA target sequence for Pcbp1 (NM_011865.2,956-974).
ctcaaaccacccatgaact

SEQ ID NO: 703423 - DNA, 19 bp, Mus musculus
  siRNA target sequence for Ik (NM_011879.1,132-150).
cttccaccaatcaaaactt

SEQ ID NO: 703424 - DNA, 19 bp, Mus musculus
  siRNA target sequence for Ik (NM_011879.1,200-218).
cttctgcgccaccttctaa

SEQ ID NO: 703425 - DNA, 19 bp, Mus musculus
  siRNA target sequence for Ik (NM_011879.1,234-252).
gatgccaagggagtacaat

SEQ ID NO: 703426 - DNA, 19 bp, Mus musculus
  siRNA target sequence for Ik (NM_011879.1,374-392).
ggagagatggtgtgaacaa

SEQ ID NO: 703427 - DNA, 19 bp, Mus musculus
  siRNA target sequence for Ik (NM_011879.1,375-393).
gagagatggtgtgaacaaa

SEQ ID NO: 703428 - DNA, 19 bp, Mus musculus
  siRNA target sequence for Ik (NM_011879.1,402-420).
ggaaactgagctgataagt

SEQ ID NO: 703429 - DNA, 19 bp, Mus musculus
  siRNA target sequence for Ik (NM_011879.1,403-421).
gaaactgagctgataagta

SEQ ID NO: 703430 - DNA, 19 bp, Mus musculus
  siRNA target sequence for Ik (NM_011879.1,556-574).
gattttgcgttgcttcaaa

SEQ ID NO: 703431 - DNA, 19 bp, Mus musculus
  siRNA target sequence for Ik (NM_011879.1,688-706).
cgccttggccggaatgtgt

SEQ ID NO: 703432 - DNA, 19 bp, Mus musculus
  siRNA target sequence for Ik (NM_011879.1,703-721).
gtgtatcggatgcttttca

SEQ ID NO: 703433 - DNA, 19 bp, Mus musculus
  siRNA target sequence for Ik (NM_011879.1,761-779).
gacgtatggcctatgtagt

SEQ ID NO: 703434 - DNA, 19 bp, Mus musculus
  siRNA target sequence for Ik (NM_011879.1,793-811).
gagtacgcagacacagata

SEQ ID NO: 703435 - DNA, 19 bp, Mus musculus
  siRNA target sequence for Ik (NM_011879.1,866-884).
ctacactgactacaaatga

SEQ ID NO: 703436 - DNA, 19 bp, Mus musculus
  siRNA target sequence for Ik (NM_011879.1,896-914).
gcaagctcacccagatttt

SEQ ID NO: 703437 - DNA, 19 bp, Mus musculus
  siRNA target sequence for Ik (NM_011879.1,901-919).
ctcacccagattttgtcat

SEQ ID NO: 703438 - DNA, 19 bp, Mus musculus
  siRNA target sequence for Ik (NM_011879.1,926-944).
ggcaggggacccgaaacaa

SEQ ID NO: 703439 - DNA, 19 bp, Mus musculus
  siRNA target sequence for Ik (NM_011879.1,928-946).
caggggacccgaaacaaga

SEQ ID NO: 703440 - DNA, 19 bp, Mus musculus
  siRNA target sequence for Ik (NM_011879.1,1026-1044).
ggattacgttccttctaca

SEQ ID NO: 703441 - DNA, 19 bp, Mus musculus
  siRNA target sequence for Ik (NM_011879.1,1191-1209).
gaaaaggcacagctacttt

SEQ ID NO: 703442 - DNA, 19 bp, Mus musculus
  siRNA target sequence for Ik (NM_011879.1,1253-1271).
gacctggatctgcaaaaga

SEQ ID NO: 703443 - DNA, 19 bp, Mus musculus
  siRNA target sequence for Ik (NM_011879.1,1255-1273).
cctggatctgcaaaagagt

SEQ ID NO: 703444 - DNA, 19 bp, Mus musculus
  siRNA target sequence for Ik (NM_011879.1,1262-1280).
ctgcaaaagagttgatcaa

SEQ ID NO: 703445 - DNA, 19 bp, Mus musculus
  siRNA target sequence for Ik (NM_011879.1,1272-1290).
gttgatcaagtccatcaat

SEQ ID NO: 703446 - DNA, 19 bp, Mus musculus
  siRNA target sequence for Ik (NM_011879.1,1316-1334).
gggaaggcactgaatcgtt

SEQ ID NO: 703447 - DNA, 19 bp, Mus musculus
  siRNA target sequence for Ik (NM_011879.1,1321-1339).
ggcactgaatcgttgaaga

SEQ ID NO: 703448 - DNA, 19 bp, Mus musculus
  siRNA target sequence for Ik (NM_011879.1,1322-1340).
gcactgaatcgttgaagaa

SEQ ID NO: 703449 - DNA, 19 bp, Mus musculus
  siRNA target sequence for Ik (NM_011879.1,1356-1374).
gcagctgggcgatttcttt

SEQ ID NO: 703450 - DNA, 19 bp, Mus musculus
  siRNA target sequence for Ik (NM_011879.1,1386-1404).
cagttacgcagaatgctat

SEQ ID NO: 703451 - DNA, 19 bp, Mus musculus
  siRNA target sequence for Ik (NM_011879.1,1425-1443).
ggctgtagatagtgatgaa

SEQ ID NO: 703452 - DNA, 19 bp, Mus musculus
  siRNA target sequence for Ik (NM_011879.1,1492-1510).
ggccgctgggacttcgata

SEQ ID NO: 703453 - DNA, 19 bp, Mus musculus
  siRNA target sequence for Ik (NM_011879.1,1496-1514).
gctgggacttcgatactca

SEQ ID NO: 703454 - DNA, 19 bp, Mus musculus
  siRNA target sequence for Ik (NM_011879.1,1507-1525).
gatactcaggaggaataca

SEQ ID NO: 703455 - DNA, 19 bp, Mus musculus
  siRNA target sequence for Ik (NM_011879.1,1570-1588).
cagtatggcatcaagatgt

SEQ ID NO: 703456 - DNA, 19 bp, Mus musculus
  siRNA target sequence for Ik (NM_011879.1,1645-1663).
cgacagtggaagaaaataa

SEQ ID NO: 703457 - DNA, 19 bp, Mus musculus
  siRNA target sequence for Ik (NM_011879.1,1699-1717).
gatggggtcgaagtgaaaa

SEQ ID NO: 703458 - DNA, 19 bp, Mus musculus
  siRNA target sequence for Mrps12 (NM_011885.2,253-271).
gtggtgttgcgcacattca

SEQ ID NO: 703459 - DNA, 19 bp, Mus musculus
  siRNA target sequence for Mrps12 (NM_011885.2,431-449).
gggtcaaactcaaagttgt

SEQ ID NO: 703460 - DNA, 19 bp, Mus musculus
  siRNA target sequence for Mrps12 (NM_011885.2,448-466).
gtgaggggcaagtatgact

SEQ ID NO: 703461 - DNA, 19 bp, Mus musculus
  siRNA target sequence for Mrps12 (NM_011885.2,467-485).
gcggccacgtgcaaaagaa

SEQ ID NO: 703462 - DNA, 19 bp, Mus musculus
  siRNA target sequence for Mrps12 (NM_011885.2,469-487).
ggccacgtgcaaaagaaga

SEQ ID NO: 703463 - DNA, 19 bp, Mus musculus
  siRNA target sequence for Sept3 (NM_011889.1,287-305).
gcattgacaccattatcga

SEQ ID NO: 703464 - DNA, 19 bp, Mus musculus
  siRNA target sequence for Sept3 (NM_011889.1,479-497).
cgattgggcatgtgataga

SEQ ID NO: 703465 - DNA, 19 bp, Mus musculus
  siRNA target sequence for Sept3 (NM_011889.1,572-590).
gctgggagcccattgagaa

SEQ ID NO: 703466 - DNA, 19 bp, Mus musculus
  siRNA target sequence for Sept3 (NM_011889.1,573-591).
ctgggagcccattgagaaa

SEQ ID NO: 703467 - DNA, 19 bp, Mus musculus
  siRNA target sequence for Sept3 (NM_011889.1,575-593).
gggagcccattgagaaata

SEQ ID NO: 703468 - DNA, 19 bp, Mus musculus
  siRNA target sequence for Sept3 (NM_011889.1,580-598).
cccattgagaaatacatca

SEQ ID NO: 703469 - DNA, 19 bp, Mus musculus
  siRNA target sequence for Sept3 (NM_011889.1,804-822).
ggagaagtcggaattccta

SEQ ID NO: 703470 - DNA, 19 bp, Mus musculus
  siRNA target sequence for Sept3 (NM_011889.1,1062-1080).
ggacctcaaagaagtaaca

SEQ ID NO: 703471 - DNA, 19 bp, Mus musculus
  siRNA target sequence for Sept3 (NM_011889.1,1079-1097).
cacacaacatccactatga

SEQ ID NO: 703472 - DNA, 19 bp, Mus musculus
  siRNA target sequence for Sept3 (NM_011889.1,1192-1210).
ctctgtgttatcatacata

SEQ ID NO: 703473 - DNA, 19 bp, Mus musculus
  siRNA target sequence for Sept3 (NM_011889.1,1445-1463).
caggggtgaggtattttca

SEQ ID NO: 703474 - DNA, 19 bp, Mus musculus
  siRNA target sequence for Sept3 (NM_011889.1,1447-1465).
ggggtgaggtattttcatt

SEQ ID NO: 703475 - DNA, 19 bp, Mus musculus
  siRNA target sequence for Sept3 (NM_011889.1,1476-1494).
gaaagtcctttgtaagtct

SEQ ID NO: 703476 - DNA, 19 bp, Mus musculus
  siRNA target sequence for Srp54 (NM_011899.2,290-308).
gctatgctgaaagaagtat

SEQ ID NO: 703477 - DNA, 19 bp, Mus musculus
  siRNA target sequence for Srp54 (NM_011899.2,302-320).
gaagtatgtacagcattat

SEQ ID NO: 703478 - DNA, 19 bp, Mus musculus
  siRNA target sequence for Srp54 (NM_011899.2,489-507).
cgactaagggaaagcaaaa

SEQ ID NO: 703479 - DNA, 19 bp, Mus musculus
  siRNA target sequence for Srp54 (NM_011899.2,502-520).
gcaaaatgtgatcatgttt

SEQ ID NO: 703480 - DNA, 19 bp, Mus musculus
  siRNA target sequence for Srp54 (NM_011899.2,514-532).
catgtttgttggattgcaa

SEQ ID NO: 703481 - DNA, 19 bp, Mus musculus
  siRNA target sequence for Srp54 (NM_011899.2,530-548).
caagggagtggtaaaacga

SEQ ID NO: 703482 - DNA, 19 bp, Mus musculus
  siRNA target sequence for Srp54 (NM_011899.2,539-557).
ggtaaaacgacaacatgtt

SEQ ID NO: 703483 - DNA, 19 bp, Mus musculus
  siRNA target sequence for Srp54 (NM_011899.2,546-564).
cgacaacatgttcaaagtt

SEQ ID NO: 703484 - DNA, 19 bp, Mus musculus
  siRNA target sequence for Srp54 (NM_011899.2,555-573).
gttcaaagttagcatatta

SEQ ID NO: 703485 - DNA, 19 bp, Mus musculus
  siRNA target sequence for Srp54 (NM_011899.2,630-648).
gagcctttgaccagctaaa

SEQ ID NO: 703486 - DNA, 19 bp, Mus musculus
  siRNA target sequence for Srp54 (NM_011899.2,633-651).
cctttgaccagctaaaaca

SEQ ID NO: 703487 - DNA, 19 bp, Mus musculus
  siRNA target sequence for Srp54 (NM_011899.2,674-692).
ccgttctatggcagctata

SEQ ID NO: 703488 - DNA, 19 bp, Mus musculus
  siRNA target sequence for Srp54 (NM_011899.2,774-792).
caagtggtcgtcacaaaca

SEQ ID NO: 703489 - DNA, 19 bp, Mus musculus
  siRNA target sequence for Srp54 (NM_011899.2,777-795).
gtggtcgtcacaaacaaga

SEQ ID NO: 703490 - DNA, 19 bp, Mus musculus
  siRNA target sequence for Srp54 (NM_011899.2,780-798).
gtcgtcacaaacaagaaga

SEQ ID NO: 703491 - DNA, 19 bp, Mus musculus
  siRNA target sequence for Srp54 (NM_011899.2,809-827).
gaagaaatgcttcaagttt

SEQ ID NO: 703492 - DNA, 19 bp, Mus musculus
  siRNA target sequence for Srp54 (NM_011899.2,894-912).
cccaggcgaaggcctttaa

SEQ ID NO: 703493 - DNA, 19 bp, Mus musculus
  siRNA target sequence for Srp54 (NM_011899.2,895-913).
ccaggcgaaggcctttaaa

SEQ ID NO: 703494 - DNA, 19 bp, Mus musculus
  siRNA target sequence for Srp54 (NM_011899.2,899-917).
gcgaaggcctttaaagaca

SEQ ID NO: 703495 - DNA, 19 bp, Mus musculus
  siRNA target sequence for Srp54 (NM_011899.2,904-922).
ggcctttaaagacaaagta

SEQ ID NO: 703496 - DNA, 19 bp, Mus musculus
  siRNA target sequence for Srp54 (NM_011899.2,930-948).
cttcagtaatagtgacaaa

SEQ ID NO: 703497 - DNA, 19 bp, Mus musculus
  siRNA target sequence for Srp54 (NM_011899.2,933-951).
cagtaatagtgacaaaact

SEQ ID NO: 703498 - DNA, 19 bp, Mus musculus
  siRNA target sequence for Srp54 (NM_011899.2,1023-1041).
gtacaggggaacatataga

SEQ ID NO: 703499 - DNA, 19 bp, Mus musculus
  siRNA target sequence for Srp54 (NM_011899.2,1028-1046).
ggggaacatatagatgatt

SEQ ID NO: 703500 - DNA, 19 bp, Mus musculus
  siRNA target sequence for Srp54 (NM_011899.2,1152-1170).
cacttatagagaagttgaa

SEQ ID NO: 703501 - DNA, 19 bp, Mus musculus
  siRNA target sequence for Srp54 (NM_011899.2,1165-1183).
gttgaagcacggtcagttt

SEQ ID NO: 703502 - DNA, 19 bp, Mus musculus
  siRNA target sequence for Srp54 (NM_011899.2,1168-1186).
gaagcacggtcagtttaca

SEQ ID NO: 703503 - DNA, 19 bp, Mus musculus
  siRNA target sequence for Srp54 (NM_011899.2,1185-1203).
cattgcgagacatgtatga

SEQ ID NO: 703504 - DNA, 19 bp, Mus musculus
  siRNA target sequence for Srp54 (NM_011899.2,1198-1216).
gtatgaacagtttcagaat

SEQ ID NO: 703505 - DNA, 19 bp, Mus musculus
  siRNA target sequence for Srp54 (NM_011899.2,1228-1246).
gggcccattcagtcagata

SEQ ID NO: 703506 - DNA, 19 bp, Mus musculus
  siRNA target sequence for Srp54 (NM_011899.2,1290-1308).
ggaatgagcaggagtcaat

SEQ ID NO: 703507 - DNA, 19 bp, Mus musculus
  siRNA target sequence for Srp54 (NM_011899.2,1342-1360).
cagtatgaacgatcaagaa

SEQ ID NO: 703508 - DNA, 19 bp, Mus musculus
  siRNA target sequence for Srp54 (NM_011899.2,1376-1394).
ggtgccaaggttttcagta

SEQ ID NO: 703509 - DNA, 19 bp, Mus musculus
  siRNA target sequence for Srp54 (NM_011899.2,1396-1414).
gcaaccagggagaatccaa

SEQ ID NO: 703510 - DNA, 19 bp, Mus musculus
  siRNA target sequence for Srp54 (NM_011899.2,1427-1445).
ggatcaggtgtgtcaacaa

SEQ ID NO: 703511 - DNA, 19 bp, Mus musculus
  siRNA target sequence for Srp54 (NM_011899.2,1443-1461).
caagagatgttcaagaact

SEQ ID NO: 703512 - DNA, 19 bp, Mus musculus
  siRNA target sequence for Srp54 (NM_011899.2,1457-1475).
gaacttctgacccagtata

SEQ ID NO: 703513 - DNA, 19 bp, Mus musculus
  siRNA target sequence for Srp54 (NM_011899.2,1460-1478).
cttctgacccagtatacca

SEQ ID NO: 703514 - DNA, 19 bp, Mus musculus
  siRNA target sequence for Srp54 (NM_011899.2,1525-1543).
caaaggcggtgatatgtct

SEQ ID NO: 703515 - DNA, 19 bp, Mus musculus
  siRNA target sequence for Srp54 (NM_011899.2,1597-1615).
gatggacccacgagttctt

SEQ ID NO: 703516 - DNA, 19 bp, Mus musculus
  siRNA target sequence for Srp54 (NM_011899.2,1600-1618).
ggacccacgagttcttcat

SEQ ID NO: 703517 - DNA, 19 bp, Mus musculus
  siRNA target sequence for Srp54 (NM_011899.2,1691-1709).
ggcatgatgggattcaata

SEQ ID NO: 703518 - DNA, 19 bp, Mus musculus
  siRNA target sequence for Ubl3 (NM_011908.1,904-922).
ggtcagcagcccaaacatt

SEQ ID NO: 703519 - DNA, 19 bp, Mus musculus
  siRNA target sequence for Ubl3 (NM_011908.1,907-925).
cagcagcccaaacattctt

SEQ ID NO: 703520 - DNA, 19 bp, Mus musculus
  siRNA target sequence for Ubl3 (NM_011908.1,961-979).
cgtcaccctaggagcatta

SEQ ID NO: 703521 - DNA, 19 bp, Mus musculus
  siRNA target sequence for Ubl3 (NM_011908.1,962-980).
gtcaccctaggagcattaa

SEQ ID NO: 703522 - DNA, 19 bp, Mus musculus
  siRNA target sequence for Ubl3 (NM_011908.1,966-984).
ccctaggagcattaaaact

SEQ ID NO: 703523 - DNA, 19 bp, Mus musculus
  siRNA target sequence for Ubl3 (NM_011908.1,967-985).
cctaggagcattaaaactt

SEQ ID NO: 703524 - DNA, 19 bp, Mus musculus
  siRNA target sequence for Ubl3 (NM_011908.1,972-990).
gagcattaaaacttccttt

SEQ ID NO: 703525 - DNA, 19 bp, Mus musculus
  siRNA target sequence for Ubl3 (NM_011908.1,1045-1063).
ctcacaaggtcagagaaat

SEQ ID NO: 703526 - DNA, 19 bp, Mus musculus
  siRNA target sequence for Ubl3 (NM_011908.1,1055-1073).
cagagaaatcgggagaaaa

SEQ ID NO: 703527 - DNA, 19 bp, Mus musculus
  siRNA target sequence for Whsc2 (NM_011914.1,241-259).
gcggctctgatggatatca

SEQ ID NO: 703528 - DNA, 19 bp, Mus musculus
  siRNA target sequence for Whsc2 (NM_011914.1,357-375).
ggaacagaaccccaatgtt

SEQ ID NO: 703529 - DNA, 19 bp, Mus musculus
  siRNA target sequence for Whsc2 (NM_011914.1,368-386).
ccaatgttcaagacatctt

SEQ ID NO: 703530 - DNA, 19 bp, Mus musculus
  siRNA target sequence for Whsc2 (NM_011914.1,447-465).
ccagtacctgaacaagaat

SEQ ID NO: 703531 - DNA, 19 bp, Mus musculus
  siRNA target sequence for Whsc2 (NM_011914.1,494-512).
ccccaccagtcaagcattt

SEQ ID NO: 703532 - DNA, 19 bp, Mus musculus
  siRNA target sequence for Whsc2 (NM_011914.1,495-513).
cccaccagtcaagcatttt

SEQ ID NO: 703533 - DNA, 19 bp, Mus musculus
  siRNA target sequence for Whsc2 (NM_011914.1,732-750).
gaaccggactccaatacca

SEQ ID NO: 703534 - DNA, 19 bp, Mus musculus
  siRNA target sequence for Whsc2 (NM_011914.1,758-776).
ggacgccactgcagaaaga

SEQ ID NO: 703535 - DNA, 19 bp, Mus musculus
  siRNA target sequence for Whsc2 (NM_011914.1,977-995).
cactgccctccacaagtta

SEQ ID NO: 703536 - DNA, 19 bp, Mus musculus
  siRNA target sequence for Whsc2 (NM_011914.1,1118-1136).
cactgccaacacagtttaa

SEQ ID NO: 703537 - DNA, 19 bp, Mus musculus
  siRNA target sequence for Whsc2 (NM_011914.1,1138-1156).
caaagggcacctatgtata

SEQ ID NO: 703538 - DNA, 19 bp, Mus musculus
  siRNA target sequence for Whsc2 (NM_011914.1,1295-1313).
ctgttcagcagcaacctaa

SEQ ID NO: 703539 - DNA, 19 bp, Mus musculus
  siRNA target sequence for Whsc2 (NM_011914.1,1577-1595).
cacgcttcaagaagtacaa

SEQ ID NO: 703540 - DNA, 19 bp, Mus musculus
  siRNA target sequence for Xrn2 (NM_011917.1,82-100).
gaatgcaacggtgtaaaga

SEQ ID NO: 703541 - DNA, 19 bp, Mus musculus
  siRNA target sequence for Xrn2 (NM_011917.1,106-124).
gttgatgccagtaaaccta

SEQ ID NO: 703542 - DNA, 19 bp, Mus musculus
  siRNA target sequence for Xrn2 (NM_011917.1,113-131).
ccagtaaacctaatccaaa

SEQ ID NO: 703543 - DNA, 19 bp, Mus musculus
  siRNA target sequence for Xrn2 (NM_011917.1,128-146).
caaatgatgtggagtttga

SEQ ID NO: 703544 - DNA, 19 bp, Mus musculus
  siRNA target sequence for Xrn2 (NM_011917.1,138-156).
ggagtttgataatctgtat

SEQ ID NO: 703545 - DNA, 19 bp, Mus musculus
  siRNA target sequence for Xrn2 (NM_011917.1,139-157).
gagtttgataatctgtatt

SEQ ID NO: 703546 - DNA, 19 bp, Mus musculus
  siRNA target sequence for Xrn2 (NM_011917.1,185-203).
gcactcatcctgaagacaa

SEQ ID NO: 703547 - DNA, 19 bp, Mus musculus
  siRNA target sequence for Xrn2 (NM_011917.1,186-204).
cactcatcctgaagacaaa

SEQ ID NO: 703548 - DNA, 19 bp, Mus musculus
  siRNA target sequence for Xrn2 (NM_011917.1,226-244).
gaaatgatggttgcaattt

SEQ ID NO: 703549 - DNA, 19 bp, Mus musculus
  siRNA target sequence for Xrn2 (NM_011917.1,312-330).
ggtggcaccacgtgcaaaa

SEQ ID NO: 703550 - DNA, 19 bp, Mus musculus
  siRNA target sequence for Xrn2 (NM_011917.1,313-331).
gtggcaccacgtgcaaaaa

SEQ ID NO: 703551 - DNA, 19 bp, Mus musculus
  siRNA target sequence for Xrn2 (NM_011917.1,512-530).
ctaaatgccttcgctatta

SEQ ID NO: 703552 - DNA, 19 bp, Mus musculus
  siRNA target sequence for Xrn2 (NM_011917.1,531-549).
catagctgatcgtttaaat

SEQ ID NO: 703553 - DNA, 19 bp, Mus musculus
  siRNA target sequence for Xrn2 (NM_011917.1,536-554).
ctgatcgtttaaataatga

SEQ ID NO: 703554 - DNA, 19 bp, Mus musculus
  siRNA target sequence for Xrn2 (NM_011917.1,553-571).
gaccctgggtggaaaaatt

SEQ ID NO: 703555 - DNA, 19 bp, Mus musculus
  siRNA target sequence for Xrn2 (NM_011917.1,616-634).
cacaaaatcatggattaca

SEQ ID NO: 703556 - DNA, 19 bp, Mus musculus
  siRNA target sequence for Xrn2 (NM_011917.1,666-684).
cccaaatactcatcattgt

SEQ ID NO: 703557 - DNA, 19 bp, Mus musculus
  siRNA target sequence for Xrn2 (NM_011917.1,667-685).
ccaaatactcatcattgtt

SEQ ID NO: 703558 - DNA, 19 bp, Mus musculus
  siRNA target sequence for Xrn2 (NM_011917.1,668-686).
caaatactcatcattgttt

SEQ ID NO: 703559 - DNA, 19 bp, Mus musculus
  siRNA target sequence for Xrn2 (NM_011917.1,692-710).
gagctgatgctgatctaat

SEQ ID NO: 703560 - DNA, 19 bp, Mus musculus
  siRNA target sequence for Xrn2 (NM_011917.1,695-713).
ctgatgctgatctaattat

SEQ ID NO: 703561 - DNA, 19 bp, Mus musculus
  siRNA target sequence for Xrn2 (NM_011917.1,714-732).
gcttggtcttgctacacat

SEQ ID NO: 703562 - DNA, 19 bp, Mus musculus
  siRNA target sequence for Xrn2 (NM_011917.1,725-743).
ctacacatgaacctaactt

SEQ ID NO: 703563 - DNA, 19 bp, Mus musculus
  siRNA target sequence for Xrn2 (NM_011917.1,736-754).
cctaacttcaccataatca

SEQ ID NO: 703564 - DNA, 19 bp, Mus musculus
  siRNA target sequence for Xrn2 (NM_011917.1,890-908).
cagaaggggagtttatctt

SEQ ID NO: 703565 - DNA, 19 bp, Mus musculus
  siRNA target sequence for Xrn2 (NM_011917.1,962-980).
gcttaccattcccatttga

SEQ ID NO: 703566 - DNA, 19 bp, Mus musculus
  siRNA target sequence for Xrn2 (NM_011917.1,963-981).
cttaccattcccatttgat

SEQ ID NO: 703567 - DNA, 19 bp, Mus musculus
  siRNA target sequence for Xrn2 (NM_011917.1,1062-1080).
gattagggaaggtgcaatt

SEQ ID NO: 703568 - DNA, 19 bp, Mus musculus
  siRNA target sequence for Xrn2 (NM_011917.1,1075-1093).
gcaattgatcgtttggtta

SEQ ID NO: 703569 - DNA, 19 bp, Mus musculus
  siRNA target sequence for Xrn2 (NM_011917.1,1076-1094).
caattgatcgtttggttaa

SEQ ID NO: 703570 - DNA, 19 bp, Mus musculus
  siRNA target sequence for Xrn2 (NM_011917.1,1081-1099).
gatcgtttggttaacatat

SEQ ID NO: 703571 - DNA, 19 bp, Mus musculus
  siRNA target sequence for Xrn2 (NM_011917.1,1084-1102).
cgtttggttaacatataca

SEQ ID NO: 703572 - DNA, 19 bp, Mus musculus
  siRNA target sequence for Xrn2 (NM_011917.1,1125-1143).
gggttaccttacagaaagt

SEQ ID NO: 703573 - DNA, 19 bp, Mus musculus
  siRNA target sequence for Xrn2 (NM_011917.1,1163-1181).
gagtacagatgatcatgtt

SEQ ID NO: 703574 - DNA, 19 bp, Mus musculus
  siRNA target sequence for Xrn2 (NM_011917.1,1321-1339).
catgccttgggttcaagaa

SEQ ID NO: 703575 - DNA, 19 bp, Mus musculus
  siRNA target sequence for Xrn2 (NM_011917.1,1354-1372).
caagtagccagtaatccaa

SEQ ID NO: 703576 - DNA, 19 bp, Mus musculus
  siRNA target sequence for Xrn2 (NM_011917.1,1426-1444).
cctaatacaagttttgcat

SEQ ID NO: 703577 - DNA, 19 bp, Mus musculus
  siRNA target sequence for Xrn2 (NM_011917.1,1516-1534).
gaggataacgtcaggttat

SEQ ID NO: 703578 - DNA, 19 bp, Mus musculus
  siRNA target sequence for Xrn2 (NM_011917.1,1544-1562).
gttggaagcaacgatacta

SEQ ID NO: 703579 - DNA, 19 bp, Mus musculus
  siRNA target sequence for Xrn2 (NM_011917.1,1547-1565).
ggaagcaacgatactacaa

SEQ ID NO: 703580 - DNA, 19 bp, Mus musculus
  siRNA target sequence for Xrn2 (NM_011917.1,1552-1570).
caacgatactacaagaaca

SEQ ID NO: 703581 - DNA, 19 bp, Mus musculus
  siRNA target sequence for Xrn2 (NM_011917.1,1556-1574).
gatactacaagaacaaatt

SEQ ID NO: 703582 - DNA, 19 bp, Mus musculus
  siRNA target sequence for Xrn2 (NM_011917.1,1643-1661).
gggttcttcgctattatta

SEQ ID NO: 703583 - DNA, 19 bp, Mus musculus
  siRNA target sequence for Xrn2 (NM_011917.1,1715-1733).
cctcagactttgaaggtat

SEQ ID NO: 703584 - DNA, 19 bp, Mus musculus
  siRNA target sequence for Xrn2 (NM_011917.1,1735-1753).
gcagacatgtcctctgaat

SEQ ID NO: 703585 - DNA, 19 bp, Mus musculus
  siRNA target sequence for Xrn2 (NM_011917.1,1869-1887).
cagtataattgacttctat

SEQ ID NO: 703586 - DNA, 19 bp, Mus musculus
  siRNA target sequence for Xrn2 (NM_011917.1,1884-1902).
ctatcctgaagattttgct

SEQ ID NO: 703587 - DNA, 19 bp, Mus musculus
  siRNA target sequence for Xrn2 (NM_011917.1,1889-1907).
ctgaagattttgctattga

SEQ ID NO: 703588 - DNA, 19 bp, Mus musculus
  siRNA target sequence for Xrn2 (NM_011917.1,1891-1909).
gaagattttgctattgatt

SEQ ID NO: 703589 - DNA, 19 bp, Mus musculus
  siRNA target sequence for Xrn2 (NM_011917.1,1931-1949).
ggcaaggtgttgctctatt

SEQ ID NO: 703590 - DNA, 19 bp, Mus musculus
  siRNA target sequence for Xrn2 (NM_011917.1,1971-1989).
gctgcgagcggctctagaa

SEQ ID NO: 703591 - DNA, 19 bp, Mus musculus
  siRNA target sequence for Xrn2 (NM_011917.1,2071-2089).
ccactacgcgacttcattt

SEQ ID NO: 703592 - DNA, 19 bp, Mus musculus
  siRNA target sequence for Xrn2 (NM_011917.1,2072-2090).
cactacgcgacttcatttt

SEQ ID NO: 703593 - DNA, 19 bp, Mus musculus
  siRNA target sequence for Xrn2 (NM_011917.1,2125-2143).
gatgtgccacctgaattgt

SEQ ID NO: 703594 - DNA, 19 bp, Mus musculus
  siRNA target sequence for Xrn2 (NM_011917.1,2191-2209).
ccagaccaaacagtatgtt

SEQ ID NO: 703595 - DNA, 19 bp, Mus musculus
  siRNA target sequence for Xrn2 (NM_011917.1,2249-2267).
cagtcagtattaattttaa

SEQ ID NO: 703596 - DNA, 19 bp, Mus musculus
  siRNA target sequence for Xrn2 (NM_011917.1,2273-2291).
cacagtttgctgaagatta

SEQ ID NO: 703597 - DNA, 19 bp, Mus musculus
  siRNA target sequence for Xrn2 (NM_011917.1,2430-2448).
ggaccaggcagcctttaga

SEQ ID NO: 703598 - DNA, 19 bp, Mus musculus
  siRNA target sequence for Xrn2 (NM_011917.1,2431-2449).
gaccaggcagcctttagaa

SEQ ID NO: 703599 - DNA, 19 bp, Mus musculus
  siRNA target sequence for Xrn2 (NM_011917.1,2433-2451).
ccaggcagcctttagaact

SEQ ID NO: 703600 - DNA, 19 bp, Mus musculus
  siRNA target sequence for Xrn2 (NM_011917.1,2434-2452).
caggcagcctttagaactt

SEQ ID NO: 703601 - DNA, 19 bp, Mus musculus
  siRNA target sequence for Xrn2 (NM_011917.1,2436-2454).
ggcagcctttagaacttta

SEQ ID NO: 703602 - DNA, 19 bp, Mus musculus
  siRNA target sequence for Xrn2 (NM_011917.1,2473-2491).
ggctcggggacgagtgttt

SEQ ID NO: 703603 - DNA, 19 bp, Mus musculus
  siRNA target sequence for Xrn2 (NM_011917.1,2474-2492).
gctcggggacgagtgttta

SEQ ID NO: 703604 - DNA, 19 bp, Mus musculus
  siRNA target sequence for Xrn2 (NM_011917.1,2475-2493).
ctcggggacgagtgtttat

SEQ ID NO: 703605 - DNA, 19 bp, Mus musculus
  siRNA target sequence for Xrn2 (NM_011917.1,2479-2497).
gggacgagtgtttatacga

SEQ ID NO: 703606 - DNA, 19 bp, Mus musculus
  siRNA target sequence for Xrn2 (NM_011917.1,2480-2498).
ggacgagtgtttatacgaa

SEQ ID NO: 703607 - DNA, 19 bp, Mus musculus
  siRNA target sequence for Xrn2 (NM_011917.1,2560-2578).
gctcagatcccaaaactta

SEQ ID NO: 703608 - DNA, 19 bp, Mus musculus
  siRNA target sequence for Xrn2 (NM_011917.1,2568-2586).
cccaaaacttatgtcaaat

SEQ ID NO: 703609 - DNA, 19 bp, Mus musculus
  siRNA target sequence for Xrn2 (NM_011917.1,2569-2587).
ccaaaacttatgtcaaata

SEQ ID NO: 703610 - DNA, 19 bp, Mus musculus
  siRNA target sequence for Xrn2 (NM_011917.1,2705-2723).
cagcctttcagccaaatca

SEQ ID NO: 703611 - DNA, 19 bp, Mus musculus
  siRNA target sequence for Xrn2 (NM_011917.1,2777-2795).
gaggagggagacaggtaat

SEQ ID NO: 703612 - DNA, 19 bp, Mus musculus
  siRNA target sequence for Xrn2 (NM_011917.1,2779-2797).
ggagggagacaggtaataa

SEQ ID NO: 703613 - DNA, 19 bp, Mus musculus
  siRNA target sequence for Xrn2 (NM_011917.1,2782-2800).
gggagacaggtaataagta

SEQ ID NO: 703614 - DNA, 19 bp, Mus musculus
  siRNA target sequence for C80879 (NM_011931.1,682-700).
ctaggaactgatcaagata

SEQ ID NO: 703615 - DNA, 19 bp, Mus musculus
  siRNA target sequence for C80879 (NM_011931.1,781-799).
gctcagctacagatcctta

SEQ ID NO: 703616 - DNA, 19 bp, Mus musculus
  siRNA target sequence for C80879 (NM_011931.1,786-804).
gctacagatccttatggaa

SEQ ID NO: 703617 - DNA, 19 bp, Mus musculus
  siRNA target sequence for C80879 (NM_011931.1,935-953).
gcacagtgcctcaatttga

SEQ ID NO: 703618 - DNA, 19 bp, Mus musculus
  siRNA target sequence for C80879 (NM_011931.1,964-982).
ccatcacacagtagcatta

SEQ ID NO: 703619 - DNA, 19 bp, Mus musculus
  siRNA target sequence for C80879 (NM_011931.1,965-983).
catcacacagtagcattat

SEQ ID NO: 703620 - DNA, 19 bp, Mus musculus
  siRNA target sequence for C80879 (NM_011931.1,972-990).
cagtagcattattgattct

SEQ ID NO: 703621 - DNA, 19 bp, Mus musculus
  siRNA target sequence for C80879 (NM_011931.1,1080-1098).
gcgactcactgctcatttt

SEQ ID NO: 703622 - DNA, 19 bp, Mus musculus
  siRNA target sequence for C80879 (NM_011931.1,1104-1122).
cttagagcagtgttatttt

SEQ ID NO: 703623 - DNA, 19 bp, Mus musculus
  siRNA target sequence for C80879 (NM_011931.1,1110-1128).
gcagtgttatttttctaca

SEQ ID NO: 703624 - DNA, 19 bp, Mus musculus
  siRNA target sequence for C80879 (NM_011931.1,1162-1180).
gcaagccagttagatgaat

SEQ ID NO: 703625 - DNA, 19 bp, Mus musculus
  siRNA target sequence for C80879 (NM_011931.1,1163-1181).
caagccagttagatgaatt

SEQ ID NO: 703626 - DNA, 19 bp, Mus musculus
  siRNA target sequence for C80879 (NM_011931.1,1166-1184).
gccagttagatgaatttca

SEQ ID NO: 703627 - DNA, 19 bp, Mus musculus
  siRNA target sequence for C80879 (NM_011931.1,1196-1214).
ccaagtttactcgatacaa

SEQ ID NO: 703628 - DNA, 19 bp, Mus musculus
  siRNA target sequence for C80879 (NM_011931.1,1225-1243).
ccgttggccacattgtctt

SEQ ID NO: 703629 - DNA, 19 bp, Mus musculus
  siRNA target sequence for C80879 (NM_011931.1,1226-1244).
cgttggccacattgtctta

SEQ ID NO: 703630 - DNA, 19 bp, Mus musculus
  siRNA target sequence for C80879 (NM_011931.1,1227-1245).
gttggccacattgtcttat

SEQ ID NO: 703631 - DNA, 19 bp, Mus musculus
  siRNA target sequence for C80879 (NM_011931.1,1231-1249).
gccacattgtcttatgcta

SEQ ID NO: 703632 - DNA, 19 bp, Mus musculus
  siRNA target sequence for C80879 (NM_011931.1,1241-1259).
cttatgctagtgatctcta

SEQ ID NO: 703633 - DNA, 19 bp, Mus musculus
  siRNA target sequence for C80879 (NM_011931.1,1264-1282).
ggttccagcatagtttcta

SEQ ID NO: 703634 - DNA, 19 bp, Mus musculus
  siRNA target sequence for C80879 (NM_011931.1,1268-1286).
ccagcatagtttctagtat

SEQ ID NO: 703635 - DNA, 19 bp, Mus musculus
  siRNA target sequence for C80879 (NM_011931.1,1271-1289).
gcatagtttctagtattga

SEQ ID NO: 703636 - DNA, 19 bp, Mus musculus
  siRNA target sequence for C80879 (NM_011931.1,1294-1312).
gaccgggattgtgactatt

SEQ ID NO: 703637 - DNA, 19 bp, Mus musculus
  siRNA target sequence for C80879 (NM_011931.1,1296-1314).
ccgggattgtgactatttt

SEQ ID NO: 703638 - DNA, 19 bp, Mus musculus
  siRNA target sequence for C80879 (NM_011931.1,1338-1356).
gattaaagtctatgagtat

SEQ ID NO: 703639 - DNA, 19 bp, Mus musculus
  siRNA target sequence for C80879 (NM_011931.1,1368-1386).
ccaggatgcagtggatatt

SEQ ID NO: 703640 - DNA, 19 bp, Mus musculus
  siRNA target sequence for C80879 (NM_011931.1,1372-1390).
gatgcagtggatattcatt

SEQ ID NO: 703641 - DNA, 19 bp, Mus musculus
  siRNA target sequence for C80879 (NM_011931.1,1430-1448).
gtatcagttggagtagtta

SEQ ID NO: 703642 - DNA, 19 bp, Mus musculus
  siRNA target sequence for C80879 (NM_011931.1,1434-1452).
cagttggagtagttaccat

SEQ ID NO: 703643 - DNA, 19 bp, Mus musculus
  siRNA target sequence for C80879 (NM_011931.1,1436-1454).
gttggagtagttaccataa

SEQ ID NO: 703644 - DNA, 19 bp, Mus musculus
  siRNA target sequence for C80879 (NM_011931.1,1461-1479).
gctagccagcagtgattat

SEQ ID NO: 703645 - DNA, 19 bp, Mus musculus
  siRNA target sequence for C80879 (NM_011931.1,1474-1492).
gattatgaaggcactgtta

SEQ ID NO: 703646 - DNA, 19 bp, Mus musculus
  siRNA target sequence for C80879 (NM_011931.1,1480-1498).
gaaggcactgttatactat

SEQ ID NO: 703647 - DNA, 19 bp, Mus musculus
  siRNA target sequence for C80879 (NM_011931.1,1530-1548).
ctatcaggagcatgaaaaa

SEQ ID NO: 703648 - DNA, 19 bp, Mus musculus
  siRNA target sequence for C80879 (NM_011931.1,1534-1552).
caggagcatgaaaaaaggt

SEQ ID NO: 703649 - DNA, 19 bp, Mus musculus
  siRNA target sequence for C80879 (NM_011931.1,1550-1568).
ggtgttggagtgttgactt

SEQ ID NO: 703650 - DNA, 19 bp, Mus musculus
  siRNA target sequence for C80879 (NM_011931.1,1556-1574).
ggagtgttgactttaatct

SEQ ID NO: 703651 - DNA, 19 bp, Mus musculus
  siRNA target sequence for C80879 (NM_011931.1,1623-1641).
gctgtggtctaccaattta

SEQ ID NO: 703652 - DNA, 19 bp, Mus musculus
  siRNA target sequence for C80879 (NM_011931.1,1628-1646).
ggtctaccaatttagacaa

SEQ ID NO: 703653 - DNA, 19 bp, Mus musculus
  siRNA target sequence for C80879 (NM_011931.1,1629-1647).
gtctaccaatttagacaat

SEQ ID NO: 703654 - DNA, 19 bp, Mus musculus
  siRNA target sequence for C80879 (NM_011931.1,1755-1773).
cgaccttcgtaacactaaa

SEQ ID NO: 703655 - DNA, 19 bp, Mus musculus
  siRNA target sequence for C80879 (NM_011931.1,1774-1792).
cagccaataatggtattca

SEQ ID NO: 703656 - DNA, 19 bp, Mus musculus
  siRNA target sequence for Fto (NM_011936.1,132-150).
cccccaaagatgatgagtt

SEQ ID NO: 703657 - DNA, 19 bp, Mus musculus
  siRNA target sequence for Fto (NM_011936.1,135-153).
ccaaagatgatgagttcta

SEQ ID NO: 703658 - DNA, 19 bp, Mus musculus
  siRNA target sequence for Fto (NM_011936.1,155-173).
cagcagtggcagctgaaat

SEQ ID NO: 703659 - DNA, 19 bp, Mus musculus
  siRNA target sequence for Fto (NM_011936.1,230-248).
gtccccgaggcctttctca

SEQ ID NO: 703660 - DNA, 19 bp, Mus musculus
  siRNA target sequence for Fto (NM_011936.1,288-306).
ggatccaaggcaaagatgt

SEQ ID NO: 703661 - DNA, 19 bp, Mus musculus
  siRNA target sequence for Fto (NM_011936.1,401-419).
ggctgcacggtcaagtaca

SEQ ID NO: 703662 - DNA, 19 bp, Mus musculus
  siRNA target sequence for Fto (NM_011936.1,441-459).
catgtcagaccttcctaaa

SEQ ID NO: 703663 - DNA, 19 bp, Mus musculus
  siRNA target sequence for Fto (NM_011936.1,444-462).
gtcagaccttcctaaagct

SEQ ID NO: 703664 - DNA, 19 bp, Mus musculus
  siRNA target sequence for Fto (NM_011936.1,582-600).
cgtcctgcgatgatgaagt

SEQ ID NO: 703665 - DNA, 19 bp, Mus musculus
  siRNA target sequence for Fto (NM_011936.1,622-640).
ctacaacgtgactttgcta

SEQ ID NO: 703666 - DNA, 19 bp, Mus musculus
  siRNA target sequence for Fto (NM_011936.1,755-773).
gcagtgtacagctatagct

SEQ ID NO: 703667 - DNA, 19 bp, Mus musculus
  siRNA target sequence for Fto (NM_011936.1,837-855).
ggcatgttggttttaagat

SEQ ID NO: 703668 - DNA, 19 bp, Mus musculus
  siRNA target sequence for Fto (NM_011936.1,865-883).
catcgagacaccaggatta

SEQ ID NO: 703669 - DNA, 19 bp, Mus musculus
  siRNA target sequence for Fto (NM_011936.1,1008-1026).
caacaggcaccttggatta

SEQ ID NO: 703670 - DNA, 19 bp, Mus musculus
  siRNA target sequence for Fto (NM_011936.1,1013-1031).
ggcaccttggattatatct

SEQ ID NO: 703671 - DNA, 19 bp, Mus musculus
  siRNA target sequence for Fto (NM_011936.1,1014-1032).
gcaccttggattatatctt

SEQ ID NO: 703672 - DNA, 19 bp, Mus musculus
  siRNA target sequence for Fto (NM_011936.1,1082-1100).
ggcgacgtctcgttgaaat

SEQ ID NO: 703673 - DNA, 19 bp, Mus musculus
  siRNA target sequence for Fto (NM_011936.1,1085-1103).
gacgtctcgttgaaatcct

SEQ ID NO: 703674 - DNA, 19 bp, Mus musculus
  siRNA target sequence for Fto (NM_011936.1,1087-1105).
cgtctcgttgaaatccttt

SEQ ID NO: 703675 - DNA, 19 bp, Mus musculus
  siRNA target sequence for Fto (NM_011936.1,1275-1293).
cggtgctccgtgaagttaa

SEQ ID NO: 703676 - DNA, 19 bp, Mus musculus
  siRNA target sequence for Fto (NM_011936.1,1276-1294).
ggtgctccgtgaagttaaa

SEQ ID NO: 703677 - DNA, 19 bp, Mus musculus
  siRNA target sequence for Fto (NM_011936.1,1279-1297).
gctccgtgaagttaaaaga

SEQ ID NO: 703678 - DNA, 19 bp, Mus musculus
  siRNA target sequence for Fto (NM_011936.1,1301-1319).
gggctcccggtggaacaaa

SEQ ID NO: 703679 - DNA, 19 bp, Mus musculus
  siRNA target sequence for Fto (NM_011936.1,1402-1420).
ccgagtcgtccggacttta

SEQ ID NO: 703680 - DNA, 19 bp, Mus musculus
  siRNA target sequence for Oasis (NM_011957.1,108-126).
gtcggatttcctcaacaat

SEQ ID NO: 703681 - DNA, 19 bp, Mus musculus
  siRNA target sequence for Oasis (NM_011957.1,323-341).
cccttgtgcctgtcaagat

SEQ ID NO: 703682 - DNA, 19 bp, Mus musculus
  siRNA target sequence for Oasis (NM_011957.1,342-360).
ggaggacaccactcaagat

SEQ ID NO: 703683 - DNA, 19 bp, Mus musculus
  siRNA target sequence for Oasis (NM_011957.1,426-444).
cccggagctgcctgtagat

SEQ ID NO: 703684 - DNA, 19 bp, Mus musculus
  siRNA target sequence for Oasis (NM_011957.1,560-578).
ctcagctgccagtgatcaa

SEQ ID NO: 703685 - DNA, 19 bp, Mus musculus
  siRNA target sequence for Oasis (NM_011957.1,765-783).
cctcactgcccctcacaaa

SEQ ID NO: 703686 - DNA, 19 bp, Mus musculus
  siRNA target sequence for Oasis (NM_011957.1,903-921).
gagagtacgcaggaaaatt

SEQ ID NO: 703687 - DNA, 19 bp, Mus musculus
  siRNA target sequence for Oasis (NM_011957.1,907-925).
gtacgcaggaaaattaaga

SEQ ID NO: 703688 - DNA, 19 bp, Mus musculus
  siRNA target sequence for Oasis (NM_011957.1,910-928).
cgcaggaaaattaagaaca

SEQ ID NO: 703689 - DNA, 19 bp, Mus musculus
  siRNA target sequence for Oasis (NM_011957.1,911-929).
gcaggaaaattaagaacaa

SEQ ID NO: 703690 - DNA, 19 bp, Mus musculus
  siRNA target sequence for Oasis (NM_011957.1,966-984).
gtatgtggaatgtctagaa

SEQ ID NO: 703691 - DNA, 19 bp, Mus musculus
  siRNA target sequence for Oasis (NM_011957.1,990-1008).
ggtggagacatatacatca

SEQ ID NO: 703692 - DNA, 19 bp, Mus musculus
  siRNA target sequence for Oasis (NM_011957.1,1224-1242).
cggctcaatgactgtgaaa

SEQ ID NO: 703693 - DNA, 19 bp, Mus musculus
  siRNA target sequence for Oasis (NM_011957.1,1226-1244).
gctcaatgactgtgaaaga

SEQ ID NO: 703694 - DNA, 19 bp, Mus musculus
  siRNA target sequence for Oasis (NM_011957.1,1227-1245).
ctcaatgactgtgaaagaa

SEQ ID NO: 703695 - DNA, 19 bp, Mus musculus
  siRNA target sequence for Oasis (NM_011957.1,1254-1272).
cgcagctgacagtgtctat

SEQ ID NO: 703696 - DNA, 19 bp, Mus musculus
  siRNA target sequence for Oasis (NM_011957.1,1289-1307).
cttcccgaagcctactgtt

SEQ ID NO: 703697 - DNA, 19 bp, Mus musculus
  siRNA target sequence for Oasis (NM_011957.1,1292-1310).
cccgaagcctactgttcta

SEQ ID NO: 703698 - DNA, 19 bp, Mus musculus
  siRNA target sequence for Psg18 (NM_011963.1,296-314).
cagcattggctgtactact

SEQ ID NO: 703699 - DNA, 19 bp, Mus musculus
  siRNA target sequence for Psg18 (NM_011963.1,298-316).
gcattggctgtactactat

SEQ ID NO: 703700 - DNA, 19 bp, Mus musculus
  siRNA target sequence for Psg18 (NM_011963.1,299-317).
cattggctgtactactata

SEQ ID NO: 703701 - DNA, 19 bp, Mus musculus
  siRNA target sequence for Psg18 (NM_011963.1,303-321).
ggctgtactactatagtgt

SEQ ID NO: 703702 - DNA, 19 bp, Mus musculus
  siRNA target sequence for Psg18 (NM_011963.1,304-322).
gctgtactactatagtgta

SEQ ID NO: 703703 - DNA, 19 bp, Mus musculus
  siRNA target sequence for Psg18 (NM_011963.1,305-323).
ctgtactactatagtgtaa

SEQ ID NO: 703704 - DNA, 19 bp, Mus musculus
  siRNA target sequence for Homer3 (NM_011984.1,486-504).
ggtggagaattcactagta

SEQ ID NO: 703705 - DNA, 19 bp, Mus musculus
  siRNA target sequence for Cops3 (NM_011991.1,143-161).
ctccttgcgaagaacttgt

SEQ ID NO: 703706 - DNA, 19 bp, Mus musculus
  siRNA target sequence for Cops3 (NM_011991.1,183-201).
gggctttagatgttcaaga

SEQ ID NO: 703707 - DNA, 19 bp, Mus musculus
  siRNA target sequence for Cops3 (NM_011991.1,184-202).
ggctttagatgttcaagaa

SEQ ID NO: 703708 - DNA, 19 bp, Mus musculus
  siRNA target sequence for Cops3 (NM_011991.1,257-275).
cctgacttcgaaacactat

SEQ ID NO: 703709 - DNA, 19 bp, Mus musculus
  siRNA target sequence for Cops3 (NM_011991.1,258-276).
ctgacttcgaaacactatt

SEQ ID NO: 703710 - DNA, 19 bp, Mus musculus
  siRNA target sequence for Cops3 (NM_011991.1,260-278).
gacttcgaaacactattct

SEQ ID NO: 703711 - DNA, 19 bp, Mus musculus
  siRNA target sequence for Cops3 (NM_011991.1,262-280).
cttcgaaacactattctca

SEQ ID NO: 703712 - DNA, 19 bp, Mus musculus
  siRNA target sequence for Cops3 (NM_011991.1,279-297).
cacaggttcagcttttcat

SEQ ID NO: 703713 - DNA, 19 bp, Mus musculus
  siRNA target sequence for Cops3 (NM_011991.1,289-307).
gcttttcatcagtacatgt

SEQ ID NO: 703714 - DNA, 19 bp, Mus musculus
  siRNA target sequence for Cops3 (NM_011991.1,313-331).
cgagcacattcgatatgca

SEQ ID NO: 703715 - DNA, 19 bp, Mus musculus
  siRNA target sequence for Cops3 (NM_011991.1,314-332).
gagcacattcgatatgcaa

SEQ ID NO: 703716 - DNA, 19 bp, Mus musculus
  siRNA target sequence for Cops3 (NM_011991.1,355-373).
ccatcagctaacaaatgca

SEQ ID NO: 703717 - DNA, 19 bp, Mus musculus
  siRNA target sequence for Cops3 (NM_011991.1,402-420).
gaattggcatccttaagca

SEQ ID NO: 703718 - DNA, 19 bp, Mus musculus
  siRNA target sequence for Cops3 (NM_011991.1,413-431).
cttaagcaagccatagaca

SEQ ID NO: 703719 - DNA, 19 bp, Mus musculus
  siRNA target sequence for Cops3 (NM_011991.1,451-469).
ccaactgacctcagtacat

SEQ ID NO: 703720 - DNA, 19 bp, Mus musculus
  siRNA target sequence for Cops3 (NM_011991.1,513-531).
ctgcccttccatatcttga

SEQ ID NO: 703721 - DNA, 19 bp, Mus musculus
  siRNA target sequence for Cops3 (NM_011991.1,522-540).
catatcttgatgtggatat

SEQ ID NO: 703722 - DNA, 19 bp, Mus musculus
  siRNA target sequence for Cops3 (NM_011991.1,564-582).
gagcctatgatgcaaaaca

SEQ ID NO: 703723 - DNA, 19 bp, Mus musculus
  siRNA target sequence for Cops3 (NM_011991.1,567-585).
cctatgatgcaaaacactt

SEQ ID NO: 703724 - DNA, 19 bp, Mus musculus
  siRNA target sequence for Cops3 (NM_011991.1,583-601).
ctttctgtgctactactat

SEQ ID NO: 703725 - DNA, 19 bp, Mus musculus
  siRNA target sequence for Cops3 (NM_011991.1,686-704).
gccgtcagccatatcatgt

SEQ ID NO: 703726 - DNA, 19 bp, Mus musculus
  siRNA target sequence for Cops3 (NM_011991.1,687-705).
ccgtcagccatatcatgtt

SEQ ID NO: 703727 - DNA, 19 bp, Mus musculus
  siRNA target sequence for Cops3 (NM_011991.1,695-713).
catatcatgttggaatcat

SEQ ID NO: 703728 - DNA, 19 bp, Mus musculus
  siRNA target sequence for Cops3 (NM_011991.1,755-773).
gtacaacagctgcctaaat

SEQ ID NO: 703729 - DNA, 19 bp, Mus musculus
  siRNA target sequence for Cops3 (NM_011991.1,780-798).
ctcaaatagtgggtagatt

SEQ ID NO: 703730 - DNA, 19 bp, Mus musculus
  siRNA target sequence for Cops3 (NM_011991.1,813-831).
gcaatgcttaccatgagtt

SEQ ID NO: 703731 - DNA, 19 bp, Mus musculus
  siRNA target sequence for Cops3 (NM_011991.1,814-832).
caatgcttaccatgagtta

SEQ ID NO: 703732 - DNA, 19 bp, Mus musculus
  siRNA target sequence for Cops3 (NM_011991.1,824-842).
catgagttagcacaagttt

SEQ ID NO: 703733 - DNA, 19 bp, Mus musculus
  siRNA target sequence for Cops3 (NM_011991.1,932-950).
cagtgcctgtcgtctcttt

SEQ ID NO: 703734 - DNA, 19 bp, Mus musculus
  siRNA target sequence for Cops3 (NM_011991.1,934-952).
gtgcctgtcgtctctttat

SEQ ID NO: 703735 - DNA, 19 bp, Mus musculus
  siRNA target sequence for Cops3 (NM_011991.1,936-954).
gcctgtcgtctctttataa

SEQ ID NO: 703736 - DNA, 19 bp, Mus musculus
  siRNA target sequence for Cops3 (NM_011991.1,938-956).
ctgtcgtctctttataaga

SEQ ID NO: 703737 - DNA, 19 bp, Mus musculus
  siRNA target sequence for Cops3 (NM_011991.1,1009-1027).
ggcaagccgtgtacagtta

SEQ ID NO: 703738 - DNA, 19 bp, Mus musculus
  siRNA target sequence for Cops3 (NM_011991.1,1010-1028).
gcaagccgtgtacagttat

SEQ ID NO: 703739 - DNA, 19 bp, Mus musculus
  siRNA target sequence for Cops3 (NM_011991.1,1127-1145).
gataaccctgagaagtata

SEQ ID NO: 703740 - DNA, 19 bp, Mus musculus
  siRNA target sequence for Cops3 (NM_011991.1,1236-1254).
cggtgaacccccagtttgt

SEQ ID NO: 703741 - DNA, 19 bp, Mus musculus
  siRNA target sequence for Cops3 (NM_011991.1,1237-1255).
ggtgaacccccagtttgtt

SEQ ID NO: 703742 - DNA, 19 bp, Mus musculus
  siRNA target sequence for Cops3 (NM_011991.1,1240-1258).
gaacccccagtttgttcaa

SEQ ID NO: 703743 - DNA, 19 bp, Mus musculus
  siRNA target sequence for Cops3 (NM_011991.1,1263-1281).
gcatgggctcacaagaaga

SEQ ID NO: 703744 - DNA, 19 bp, Mus musculus
  siRNA target sequence for Cops3 (NM_011991.1,1264-1282).
catgggctcacaagaagat

SEQ ID NO: 703745 - DNA, 19 bp, Mus musculus
  siRNA target sequence for Casp8ap2 (NM_011997.1,278-296).
gtgatggaacgggtttgtt

SEQ ID NO: 703746 - DNA, 19 bp, Mus musculus
  siRNA target sequence for Casp8ap2 (NM_011997.1,284-302).
gaacgggtttgtttgatgt

SEQ ID NO: 703747 - DNA, 19 bp, Mus musculus
  siRNA target sequence for Casp8ap2 (NM_011997.1,305-323).
gtcctgcctctccacttaa

SEQ ID NO: 703748 - DNA, 19 bp, Mus musculus
  siRNA target sequence for Casp8ap2 (NM_011997.1,307-325).
cctgcctctccacttaaaa

SEQ ID NO: 703749 - DNA, 19 bp, Mus musculus
  siRNA target sequence for Casp8ap2 (NM_011997.1,308-326).
ctgcctctccacttaaaaa

SEQ ID NO: 703750 - DNA, 19 bp, Mus musculus
  siRNA target sequence for Casp8ap2 (NM_011997.1,334-352).
gaaggctcattggacatat

SEQ ID NO: 703751 - DNA, 19 bp, Mus musculus
  siRNA target sequence for Casp8ap2 (NM_011997.1,459-477).
gaaggaggcaacgtacaat

SEQ ID NO: 703752 - DNA, 19 bp, Mus musculus
  siRNA target sequence for Casp8ap2 (NM_011997.1,520-538).
gacctgatgaaaaggttta

SEQ ID NO: 703753 - DNA, 19 bp, Mus musculus
  siRNA target sequence for Casp8ap2 (NM_011997.1,549-567).
gacacagaacttgaactta

SEQ ID NO: 703754 - DNA, 19 bp, Mus musculus
  siRNA target sequence for Casp8ap2 (NM_011997.1,551-569).
cacagaacttgaacttaaa

SEQ ID NO: 703755 - DNA, 19 bp, Mus musculus
  siRNA target sequence for Casp8ap2 (NM_011997.1,600-618).
ctcagcacttatcaaaact

SEQ ID NO: 703756 - DNA, 19 bp, Mus musculus
  siRNA target sequence for Casp8ap2 (NM_011997.1,617-635).
ctgccagagtggagataaa

SEQ ID NO: 703757 - DNA, 19 bp, Mus musculus
  siRNA target sequence for Casp8ap2 (NM_011997.1,627-645).
ggagataaaccgtaaggat

SEQ ID NO: 703758 - DNA, 19 bp, Mus musculus
  siRNA target sequence for Casp8ap2 (NM_011997.1,636-654).
ccgtaaggatgaagagata

SEQ ID NO: 703759 - DNA, 19 bp, Mus musculus
  siRNA target sequence for Casp8ap2 (NM_011997.1,637-655).
cgtaaggatgaagagataa

SEQ ID NO: 703760 - DNA, 19 bp, Mus musculus
  siRNA target sequence for Casp8ap2 (NM_011997.1,666-684).
ccaaagattgtctgagttt

SEQ ID NO: 703761 - DNA, 19 bp, Mus musculus
  siRNA target sequence for Casp8ap2 (NM_011997.1,675-693).
gtctgagtttccacatttt

SEQ ID NO: 703762 - DNA, 19 bp, Mus musculus
  siRNA target sequence for Casp8ap2 (NM_011997.1,894-912).
gaaacattgtgccaataat

SEQ ID NO: 703763 - DNA, 19 bp, Mus musculus
  siRNA target sequence for Casp8ap2 (NM_011997.1,941-959).
gagaaggtaactcaaatga

SEQ ID NO: 703764 - DNA, 19 bp, Mus musculus
  siRNA target sequence for Casp8ap2 (NM_011997.1,1019-1037).
gaacacagaaagacttaca

SEQ ID NO: 703765 - DNA, 19 bp, Mus musculus
  siRNA target sequence for Casp8ap2 (NM_011997.1,1074-1092).
ggctaactccagactacaa

SEQ ID NO: 703766 - DNA, 19 bp, Mus musculus
  siRNA target sequence for Casp8ap2 (NM_011997.1,1136-1154).
gcaaaatttcagagagtaa

SEQ ID NO: 703767 - DNA, 19 bp, Mus musculus
  siRNA target sequence for Casp8ap2 (NM_011997.1,1137-1155).
caaaatttcagagagtaaa

SEQ ID NO: 703768 - DNA, 19 bp, Mus musculus
  siRNA target sequence for Casp8ap2 (NM_011997.1,1166-1184).
gtatgggatataaaagtga

SEQ ID NO: 703769 - DNA, 19 bp, Mus musculus
  siRNA target sequence for Casp8ap2 (NM_011997.1,1233-1251).
cactcgagtggaatctcaa

SEQ ID NO: 703770 - DNA, 19 bp, Mus musculus
  siRNA target sequence for Casp8ap2 (NM_011997.1,1415-1433).
ccaagaatgacgtgaaaca

SEQ ID NO: 703771 - DNA, 19 bp, Mus musculus
  siRNA target sequence for Casp8ap2 (NM_011997.1,1416-1434).
caagaatgacgtgaaacat

SEQ ID NO: 703772 - DNA, 19 bp, Mus musculus
  siRNA target sequence for Casp8ap2 (NM_011997.1,1428-1446).
gaaacattacggcttcaat

SEQ ID NO: 703773 - DNA, 19 bp, Mus musculus
  siRNA target sequence for Casp8ap2 (NM_011997.1,1432-1450).
cattacggcttcaataagt

SEQ ID NO: 703774 - DNA, 19 bp, Mus musculus
  siRNA target sequence for Casp8ap2 (NM_011997.1,1437-1455).
cggcttcaataagtatcat

SEQ ID NO: 703775 - DNA, 19 bp, Mus musculus
  siRNA target sequence for Casp8ap2 (NM_011997.1,1503-1521).
gaacagtcatggctttcaa

SEQ ID NO: 703776 - DNA, 19 bp, Mus musculus
  siRNA target sequence for Casp8ap2 (NM_011997.1,1510-1528).
catggctttcaagatagaa

SEQ ID NO: 703777 - DNA, 19 bp, Mus musculus
  siRNA target sequence for Casp8ap2 (NM_011997.1,1570-1588).
ccgcactccaaggaagtta

SEQ ID NO: 703778 - DNA, 19 bp, Mus musculus
  siRNA target sequence for Casp8ap2 (NM_011997.1,1711-1729).
cctccagaacacttacaaa

SEQ ID NO: 703779 - DNA, 19 bp, Mus musculus
  siRNA target sequence for Casp8ap2 (NM_011997.1,1793-1811).
gtaaaggtgcagtctctaa

SEQ ID NO: 703780 - DNA, 19 bp, Mus musculus
  siRNA target sequence for Casp8ap2 (NM_011997.1,1808-1826).
ctaacagtgagctttctaa

SEQ ID NO: 703781 - DNA, 19 bp, Mus musculus
  siRNA target sequence for Casp8ap2 (NM_011997.1,1823-1841).
ctaaagggacagacagtaa

SEQ ID NO: 703782 - DNA, 19 bp, Mus musculus
  siRNA target sequence for Casp8ap2 (NM_011997.1,1885-1903).
ggcaaggacttaaagttaa

SEQ ID NO: 703783 - DNA, 19 bp, Mus musculus
  siRNA target sequence for Casp8ap2 (NM_011997.1,1911-1929).
ggaaaaactgaacttaact

SEQ ID NO: 703784 - DNA, 19 bp, Mus musculus
  siRNA target sequence for Casp8ap2 (NM_011997.1,1963-1981).
gataacccacatcaaataa

SEQ ID NO: 703785 - DNA, 19 bp, Mus musculus
  siRNA target sequence for Casp8ap2 (NM_011997.1,2053-2071).
ccttctggcagtgaacata

SEQ ID NO: 703786 - DNA, 19 bp, Mus musculus
  siRNA target sequence for Casp8ap2 (NM_011997.1,2079-2097).
ggaaaccaaatcagagtta

SEQ ID NO: 703787 - DNA, 19 bp, Mus musculus
  siRNA target sequence for Casp8ap2 (NM_011997.1,2224-2242).
gcttgtggcacggaaattt

SEQ ID NO: 703788 - DNA, 19 bp, Mus musculus
  siRNA target sequence for Casp8ap2 (NM_011997.1,2247-2265).
cccagcacctgtagaaatt

SEQ ID NO: 703789 - DNA, 19 bp, Mus musculus
  siRNA target sequence for Casp8ap2 (NM_011997.1,2252-2270).
cacctgtagaaattgaaca

SEQ ID NO: 703790 - DNA, 19 bp, Mus musculus
  siRNA target sequence for Casp8ap2 (NM_011997.1,2383-2401).
caagaattggacaccaaaa

SEQ ID NO: 703791 - DNA, 19 bp, Mus musculus
  siRNA target sequence for Casp8ap2 (NM_011997.1,2404-2422).
cacgatggtataaatgctt

SEQ ID NO: 703792 - DNA, 19 bp, Mus musculus
  siRNA target sequence for Casp8ap2 (NM_011997.1,2490-2508).
ccatcttgcacctttggtt

SEQ ID NO: 703793 - DNA, 19 bp, Mus musculus
  siRNA target sequence for Casp8ap2 (NM_011997.1,2505-2523).
ggttgaagaacctagcatt

SEQ ID NO: 703794 - DNA, 19 bp, Mus musculus
  siRNA target sequence for Casp8ap2 (NM_011997.1,2516-2534).
ctagcatttcactagtaaa

SEQ ID NO: 703795 - DNA, 19 bp, Mus musculus
  siRNA target sequence for Casp8ap2 (NM_011997.1,2582-2600).
ggcctatagttgagactaa

SEQ ID NO: 703796 - DNA, 19 bp, Mus musculus
  siRNA target sequence for Casp8ap2 (NM_011997.1,2583-2601).
gcctatagttgagactaaa

SEQ ID NO: 703797 - DNA, 19 bp, Mus musculus
  siRNA target sequence for Casp8ap2 (NM_011997.1,2584-2602).
cctatagttgagactaaat

SEQ ID NO: 703798 - DNA, 19 bp, Mus musculus
  siRNA target sequence for Casp8ap2 (NM_011997.1,2621-2639).
gtttacctaaagagacttt

SEQ ID NO: 703799 - DNA, 19 bp, Mus musculus
  siRNA target sequence for Casp8ap2 (NM_011997.1,2664-2682).
gttgattgaccacaaaata

SEQ ID NO: 703800 - DNA, 19 bp, Mus musculus
  siRNA target sequence for Casp8ap2 (NM_011997.1,2696-2714).
caaactcagtatatcaaga

SEQ ID NO: 703801 - DNA, 19 bp, Mus musculus
  siRNA target sequence for Casp8ap2 (NM_011997.1,2700-2718).
ctcagtatatcaagatgat

SEQ ID NO: 703802 - DNA, 19 bp, Mus musculus
  siRNA target sequence for Casp8ap2 (NM_011997.1,2719-2737).
gataactcagttttgagta

SEQ ID NO: 703803 - DNA, 19 bp, Mus musculus
  siRNA target sequence for Casp8ap2 (NM_011997.1,2772-2790).
catcagccctctgaatagt

SEQ ID NO: 703804 - DNA, 19 bp, Mus musculus
  siRNA target sequence for Casp8ap2 (NM_011997.1,2792-2810).
cagtgagaccggtatgcaa

SEQ ID NO: 703805 - DNA, 19 bp, Mus musculus
  siRNA target sequence for Casp8ap2 (NM_011997.1,2796-2814).
gagaccggtatgcaaagtt

SEQ ID NO: 703806 - DNA, 19 bp, Mus musculus
  siRNA target sequence for Casp8ap2 (NM_011997.1,2798-2816).
gaccggtatgcaaagttgt

SEQ ID NO: 703807 - DNA, 19 bp, Mus musculus
  siRNA target sequence for Casp8ap2 (NM_011997.1,2855-2873).
gcagtcataaagatgagtt

SEQ ID NO: 703808 - DNA, 19 bp, Mus musculus
  siRNA target sequence for Casp8ap2 (NM_011997.1,2866-2884).
gatgagtttccatccaatt

SEQ ID NO: 703809 - DNA, 19 bp, Mus musculus
  siRNA target sequence for Casp8ap2 (NM_011997.1,2875-2893).
ccatccaattcaactcttt

SEQ ID NO: 703810 - DNA, 19 bp, Mus musculus
  siRNA target sequence for Casp8ap2 (NM_011997.1,2901-2919).
caagagtcagtctgatcta

SEQ ID NO: 703811 - DNA, 19 bp, Mus musculus
  siRNA target sequence for Casp8ap2 (NM_011997.1,2904-2922).
gagtcagtctgatctaaat

SEQ ID NO: 703812 - DNA, 19 bp, Mus musculus
  siRNA target sequence for Casp8ap2 (NM_011997.1,2910-2928).
gtctgatctaaataaggaa

SEQ ID NO: 703813 - DNA, 19 bp, Mus musculus
  siRNA target sequence for Casp8ap2 (NM_011997.1,2912-2930).
ctgatctaaataaggaaaa

SEQ ID NO: 703814 - DNA, 19 bp, Mus musculus
  siRNA target sequence for Casp8ap2 (NM_011997.1,2963-2981).
cagaagcagattcttgtaa

SEQ ID NO: 703815 - DNA, 19 bp, Mus musculus
  siRNA target sequence for Casp8ap2 (NM_011997.1,2968-2986).
gcagattcttgtaagcatt

SEQ ID NO: 703816 - DNA, 19 bp, Mus musculus
  siRNA target sequence for Casp8ap2 (NM_011997.1,2969-2987).
cagattcttgtaagcattt

SEQ ID NO: 703817 - DNA, 19 bp, Mus musculus
  siRNA target sequence for Casp8ap2 (NM_011997.1,2982-3000).
gcatttgtctttagatgaa

SEQ ID NO: 703818 - DNA, 19 bp, Mus musculus
  siRNA target sequence for Casp8ap2 (NM_011997.1,3043-3061).
gcacaaaaacgcttggaaa

SEQ ID NO: 703819 - DNA, 19 bp, Mus musculus
  siRNA target sequence for Casp8ap2 (NM_011997.1,3044-3062).
cacaaaaacgcttggaaaa

SEQ ID NO: 703820 - DNA, 19 bp, Mus musculus
  siRNA target sequence for Casp8ap2 (NM_011997.1,3128-3146).
gcactgtgcatgtgcataa

SEQ ID NO: 703821 - DNA, 19 bp, Mus musculus
  siRNA target sequence for Casp8ap2 (NM_011997.1,3153-3171).
cgggaggactgctgtaaaa

SEQ ID NO: 703822 - DNA, 19 bp, Mus musculus
  siRNA target sequence for Casp8ap2 (NM_011997.1,3187-3205).
ctcacatggagcaaaagat

SEQ ID NO: 703823 - DNA, 19 bp, Mus musculus
  siRNA target sequence for Casp8ap2 (NM_011997.1,3222-3240).
ctccaacaccgaaaggaaa

SEQ ID NO: 703824 - DNA, 19 bp, Mus musculus
  siRNA target sequence for Casp8ap2 (NM_011997.1,3304-3322).
ctgtgggaggttatgcata

SEQ ID NO: 703825 - DNA, 19 bp, Mus musculus
  siRNA target sequence for Casp8ap2 (NM_011997.1,3409-3427).
gaatctgcaattttgagtt

SEQ ID NO: 703826 - DNA, 19 bp, Mus musculus
  siRNA target sequence for Casp8ap2 (NM_011997.1,3451-3469).
gatttgtctaagatctgta

SEQ ID NO: 703827 - DNA, 19 bp, Mus musculus
  siRNA target sequence for Casp8ap2 (NM_011997.1,3456-3474).
gtctaagatctgtaagtca

SEQ ID NO: 703828 - DNA, 19 bp, Mus musculus
  siRNA target sequence for Casp8ap2 (NM_011997.1,3467-3485).
gtaagtcagtaagtacttt

SEQ ID NO: 703829 - DNA, 19 bp, Mus musculus
  siRNA target sequence for Casp8ap2 (NM_011997.1,3494-3512).
gtctttgtgaagttataga

SEQ ID NO: 703830 - DNA, 19 bp, Mus musculus
  siRNA target sequence for Casp8ap2 (NM_011997.1,3500-3518).
gtgaagttatagaatctaa

SEQ ID NO: 703831 - DNA, 19 bp, Mus musculus
  siRNA target sequence for Casp8ap2 (NM_011997.1,3505-3523).
gttatagaatctaacctta

SEQ ID NO: 703832 - DNA, 19 bp, Mus musculus
  siRNA target sequence for Casp8ap2 (NM_011997.1,3515-3533).
ctaaccttaaacaagtgaa

SEQ ID NO: 703833 - DNA, 19 bp, Mus musculus
  siRNA target sequence for Casp8ap2 (NM_011997.1,3600-3618).
gtttgtagatgaacaactt

SEQ ID NO: 703834 - DNA, 19 bp, Mus musculus
  siRNA target sequence for Casp8ap2 (NM_011997.1,3610-3628).
gaacaacttgattatttgt

SEQ ID NO: 703835 - DNA, 19 bp, Mus musculus
  siRNA target sequence for Casp8ap2 (NM_011997.1,3728-3746).
cccaacattcaaattgtca

SEQ ID NO: 703836 - DNA, 19 bp, Mus musculus
  siRNA target sequence for Casp8ap2 (NM_011997.1,3881-3899).
gtatagtaaagcatgatgt

SEQ ID NO: 703837 - DNA, 19 bp, Mus musculus
  siRNA target sequence for Casp8ap2 (NM_011997.1,3891-3909).
gcatgatgtaaaaagaact

SEQ ID NO: 703838 - DNA, 19 bp, Mus musculus
  siRNA target sequence for Casp8ap2 (NM_011997.1,3915-3933).
cacttgcagtgataataca

SEQ ID NO: 703839 - DNA, 19 bp, Mus musculus
  siRNA target sequence for Casp8ap2 (NM_011997.1,3917-3935).
cttgcagtgataatacaaa

SEQ ID NO: 703840 - DNA, 19 bp, Mus musculus
  siRNA target sequence for Casp8ap2 (NM_011997.1,4055-4073).
ccgaacggagctttgagat

SEQ ID NO: 703841 - DNA, 19 bp, Mus musculus
  siRNA target sequence for Casp8ap2 (NM_011997.1,4089-4107).
ggcatccagccttactttt

SEQ ID NO: 703842 - DNA, 19 bp, Mus musculus
  siRNA target sequence for Casp8ap2 (NM_011997.1,4090-4108).
gcatccagccttactttta

SEQ ID NO: 703843 - DNA, 19 bp, Mus musculus
  siRNA target sequence for Casp8ap2 (NM_011997.1,4091-4109).
catccagccttacttttaa

SEQ ID NO: 703844 - DNA, 19 bp, Mus musculus
  siRNA target sequence for Casp8ap2 (NM_011997.1,4099-4117).
cttacttttaacttagtga

SEQ ID NO: 703845 - DNA, 19 bp, Mus musculus
  siRNA target sequence for Casp8ap2 (NM_011997.1,4174-4192).
gacacaagtggcactgaaa

SEQ ID NO: 703846 - DNA, 19 bp, Mus musculus
  siRNA target sequence for Casp8ap2 (NM_011997.1,4298-4316).
ctctttgtccaaaagtgat

SEQ ID NO: 703847 - DNA, 19 bp, Mus musculus
  siRNA target sequence for Casp8ap2 (NM_011997.1,4332-4350).
gtctttattatcatctgaa

SEQ ID NO: 703848 - DNA, 19 bp, Mus musculus
  siRNA target sequence for Casp8ap2 (NM_011997.1,4348-4366).
gaaaagggtccatctttat

SEQ ID NO: 703849 - DNA, 19 bp, Mus musculus
  siRNA target sequence for Casp8ap2 (NM_011997.1,4393-4411).
cctgatgtgttagatgaaa

SEQ ID NO: 703850 - DNA, 19 bp, Mus musculus
  siRNA target sequence for Casp8ap2 (NM_011997.1,4399-4417).
gtgttagatgaaaattgta

SEQ ID NO: 703851 - DNA, 19 bp, Mus musculus
  siRNA target sequence for Casp8ap2 (NM_011997.1,4437-4455).
cactgctttaggtaaagat

SEQ ID NO: 703852 - DNA, 19 bp, Mus musculus
  siRNA target sequence for Casp8ap2 (NM_011997.1,4482-4500).
gccctgcatctcttccata

SEQ ID NO: 703853 - DNA, 19 bp, Mus musculus
  siRNA target sequence for Casp8ap2 (NM_011997.1,4487-4505).
gcatctcttccatactctt

SEQ ID NO: 703854 - DNA, 19 bp, Mus musculus
  siRNA target sequence for Casp8ap2 (NM_011997.1,4496-4514).
ccatactcttagaagatct

SEQ ID NO: 703855 - DNA, 19 bp, Mus musculus
  siRNA target sequence for Casp8ap2 (NM_011997.1,4510-4528).
gatcttgcggtctctttaa

SEQ ID NO: 703856 - DNA, 19 bp, Mus musculus
  siRNA target sequence for Casp8ap2 (NM_011997.1,4531-4549).
gtaccgtcacctctgaaat

SEQ ID NO: 703857 - DNA, 19 bp, Mus musculus
  siRNA target sequence for Casp8ap2 (NM_011997.1,4536-4554).
gtcacctctgaaatcagat

SEQ ID NO: 703858 - DNA, 19 bp, Mus musculus
  siRNA target sequence for Casp8ap2 (NM_011997.1,4658-4676).
catctgaacaggacattca

SEQ ID NO: 703859 - DNA, 19 bp, Mus musculus
  siRNA target sequence for Casp8ap2 (NM_011997.1,4678-4696).
ctagctctggagtctgata

SEQ ID NO: 703860 - DNA, 19 bp, Mus musculus
  siRNA target sequence for Casp8ap2 (NM_011997.1,4681-4699).
gctctggagtctgataact

SEQ ID NO: 703861 - DNA, 19 bp, Mus musculus
  siRNA target sequence for Casp8ap2 (NM_011997.1,4684-4702).
ctggagtctgataactcaa

SEQ ID NO: 703862 - DNA, 19 bp, Mus musculus
  siRNA target sequence for Casp8ap2 (NM_011997.1,4693-4711).
gataactcaagcagtaagt

SEQ ID NO: 703863 - DNA, 19 bp, Mus musculus
  siRNA target sequence for Casp8ap2 (NM_011997.1,4774-4792).
cccatgcatgctgtcataa

SEQ ID NO: 703864 - DNA, 19 bp, Mus musculus
  siRNA target sequence for Casp8ap2 (NM_011997.1,4779-4797).
gcatgctgtcataatggaa

SEQ ID NO: 703865 - DNA, 19 bp, Mus musculus
  siRNA target sequence for Casp8ap2 (NM_011997.1,4783-4801).
gctgtcataatggaaaagt

SEQ ID NO: 703866 - DNA, 19 bp, Mus musculus
  siRNA target sequence for Casp8ap2 (NM_011997.1,4800-4818).
gtccaatgatcatttcatt

SEQ ID NO: 703867 - DNA, 19 bp, Mus musculus
  siRNA target sequence for Casp8ap2 (NM_011997.1,4847-4865).
cctcccctggccttaaaca

SEQ ID NO: 703868 - DNA, 19 bp, Mus musculus
  siRNA target sequence for Casp8ap2 (NM_011997.1,4873-4891).
gtagctgaggagtcattga

SEQ ID NO: 703869 - DNA, 19 bp, Mus musculus
  siRNA target sequence for Casp8ap2 (NM_011997.1,4879-4897).
gaggagtcattgacatctt

SEQ ID NO: 703870 - DNA, 19 bp, Mus musculus
  siRNA target sequence for Casp8ap2 (NM_011997.1,4890-4908).
gacatctttgcctagaact

SEQ ID NO: 703871 - DNA, 19 bp, Mus musculus
  siRNA target sequence for Casp8ap2 (NM_011997.1,4922-4940).
gtgtagcaacagagaaaga

SEQ ID NO: 703872 - DNA, 19 bp, Mus musculus
  siRNA target sequence for Casp8ap2 (NM_011997.1,5054-5072).
cacaggttccagatatata

SEQ ID NO: 703873 - DNA, 19 bp, Mus musculus
  siRNA target sequence for Casp8ap2 (NM_011997.1,5113-5131).
gatcaagtggttgatgatt

SEQ ID NO: 703874 - DNA, 19 bp, Mus musculus
  siRNA target sequence for Casp8ap2 (NM_011997.1,5133-5151).
cttcaagttgcatcaagta

SEQ ID NO: 703875 - DNA, 19 bp, Mus musculus
  siRNA target sequence for Casp8ap2 (NM_011997.1,5149-5167).
gtatgggaaccaaaagttt

SEQ ID NO: 703876 - DNA, 19 bp, Mus musculus
  siRNA target sequence for Casp8ap2 (NM_011997.1,5207-5225).
cacactctcttgataatca

SEQ ID NO: 703877 - DNA, 19 bp, Mus musculus
  siRNA target sequence for Casp8ap2 (NM_011997.1,5211-5229).
ctctcttgataatcatctt

SEQ ID NO: 703878 - DNA, 19 bp, Mus musculus
  siRNA target sequence for Casp8ap2 (NM_011997.1,5237-5255).
cacacatagatctaacgaa

SEQ ID NO: 703879 - DNA, 19 bp, Mus musculus
  siRNA target sequence for Casp8ap2 (NM_011997.1,5290-5308).
ctaatggaagtaacagttt

SEQ ID NO: 703880 - DNA, 19 bp, Mus musculus
  siRNA target sequence for Casp8ap2 (NM_011997.1,5320-5338).
cacttggaatgttctcaaa

SEQ ID NO: 703881 - DNA, 19 bp, Mus musculus
  siRNA target sequence for Casp8ap2 (NM_011997.1,5333-5351).
ctcaaaccaacttagatca

SEQ ID NO: 703882 - DNA, 19 bp, Mus musculus
  siRNA target sequence for Casp8ap2 (NM_011997.1,5356-5374).
gcagagataacatgtagtt

SEQ ID NO: 703883 - DNA, 19 bp, Mus musculus
  siRNA target sequence for Casp8ap2 (NM_011997.1,5361-5379).
gataacatgtagttcttta

SEQ ID NO: 703884 - DNA, 19 bp, Mus musculus
  siRNA target sequence for Casp8ap2 (NM_011997.1,5375-5393).
ctttacagcctgatactat

SEQ ID NO: 703885 - DNA, 19 bp, Mus musculus
  siRNA target sequence for Casp8ap2 (NM_011997.1,5384-5402).
ctgatactatagatgcttt

SEQ ID NO: 703886 - DNA, 19 bp, Mus musculus
  siRNA target sequence for Casp8ap2 (NM_011997.1,5395-5413).
gatgcttttattgatttga

SEQ ID NO: 703887 - DNA, 19 bp, Mus musculus
  siRNA target sequence for Casp8ap2 (NM_011997.1,5422-5440).
gcttcaagtgagagtaaaa

SEQ ID NO: 703888 - DNA, 19 bp, Mus musculus
  siRNA target sequence for Casp8ap2 (NM_011997.1,5474-5492).
gtatgggatgccaggtaat

SEQ ID NO: 703889 - DNA, 19 bp, Mus musculus
  siRNA target sequence for Casp8ap2 (NM_011997.1,5478-5496).
gggatgccaggtaatatgt

SEQ ID NO: 703890 - DNA, 19 bp, Mus musculus
  siRNA target sequence for Casp8ap2 (NM_011997.1,5479-5497).
ggatgccaggtaatatgta

SEQ ID NO: 703891 - DNA, 19 bp, Mus musculus
  siRNA target sequence for Casp8ap2 (NM_011997.1,5480-5498).
gatgccaggtaatatgtat

SEQ ID NO: 703892 - DNA, 19 bp, Mus musculus
  siRNA target sequence for Casp8ap2 (NM_011997.1,5483-5501).
gccaggtaatatgtataga

SEQ ID NO: 703893 - DNA, 19 bp, Mus musculus
  siRNA target sequence for Casp8ap2 (NM_011997.1,5484-5502).
ccaggtaatatgtatagat

SEQ ID NO: 703894 - DNA, 19 bp, Mus musculus
  siRNA target sequence for Casp8ap2 (NM_011997.1,5495-5513).
gtatagatgaggataccaa

SEQ ID NO: 703895 - DNA, 19 bp, Mus musculus
  siRNA target sequence for Casp8ap2 (NM_011997.1,5526-5544).
gatgggaagggcaaacagt

SEQ ID NO: 703896 - DNA, 19 bp, Mus musculus
  siRNA target sequence for Casp8ap2 (NM_011997.1,5534-5552).
gggcaaacagtcctttaga

SEQ ID NO: 703897 - DNA, 19 bp, Mus musculus
  siRNA target sequence for Casp8ap2 (NM_011997.1,5535-5553).
ggcaaacagtcctttagaa

SEQ ID NO: 703898 - DNA, 19 bp, Mus musculus
  siRNA target sequence for Casp8ap2 (NM_011997.1,5543-5561).
gtcctttagaaagtattgt

SEQ ID NO: 703899 - DNA, 19 bp, Mus musculus
  siRNA target sequence for Casp8ap2 (NM_011997.1,5566-5584).
gaaacttgtattgatttga

SEQ ID NO: 703900 - DNA, 19 bp, Mus musculus
  siRNA target sequence for Casp8ap2 (NM_011997.1,5606-5624).
gtgaaatcaagagacataa

SEQ ID NO: 703901 - DNA, 19 bp, Mus musculus
  siRNA target sequence for Casp8ap2 (NM_011997.1,5638-5656).
cctccatcaaagttggatt

SEQ ID NO: 703902 - DNA, 19 bp, Mus musculus
  siRNA target sequence for Casp8ap2 (NM_011997.1,5641-5659).
ccatcaaagttggattgtt

SEQ ID NO: 703903 - DNA, 19 bp, Mus musculus
  siRNA target sequence for Casp8ap2 (NM_011997.1,5751-5769).
catagacttaagtagtgaa

SEQ ID NO: 703904 - DNA, 19 bp, Mus musculus
  siRNA target sequence for Casp8ap2 (NM_011997.1,5778-5796).
gagacttagtcccaattct

SEQ ID NO: 703905 - DNA, 19 bp, Mus musculus
  siRNA target sequence for Casp8ap2 (NM_011997.1,5782-5800).
cttagtcccaattctgata

SEQ ID NO: 703906 - DNA, 19 bp, Mus musculus
  siRNA target sequence for Casp8ap2 (NM_011997.1,5786-5804).
gtcccaattctgatagaaa

SEQ ID NO: 703907 - DNA, 19 bp, Mus musculus
  siRNA target sequence for Casp8ap2 (NM_011997.1,5790-5808).
caattctgatagaaatggt

SEQ ID NO: 703908 - DNA, 19 bp, Mus musculus
  siRNA target sequence for Casp8ap2 (NM_011997.1,5842-5860).
gaacctgcagtaaatgaaa

SEQ ID NO: 703909 - DNA, 19 bp, Mus musculus
  siRNA target sequence for Casp8ap2 (NM_011997.1,5895-5913).
gggttcaacagcagtactt

SEQ ID NO: 703910 - DNA, 19 bp, Mus musculus
  siRNA target sequence for Casp8ap2 (NM_011997.1,5932-5950).
ctttctgcaaaaaatgtta

SEQ ID NO: 703911 - DNA, 19 bp, Mus musculus
  siRNA target sequence for Casp8ap2 (NM_011997.1,6031-6049).
ccgtccctgaaaacattta

SEQ ID NO: 703912 - DNA, 19 bp, Mus musculus
  siRNA target sequence for Casp8ap2 (NM_011997.1,6037-6055).
ctgaaaacatttacttatt

SEQ ID NO: 703913 - DNA, 19 bp, Mus musculus
  siRNA target sequence for Cops4 (NM_012001.1,45-63).
ctgccgtgcgacaggattt

SEQ ID NO: 703914 - DNA, 19 bp, Mus musculus
  siRNA target sequence for Cops4 (NM_012001.1,81-99).
caagcggctctcataaaga

SEQ ID NO: 703915 - DNA, 19 bp, Mus musculus
  siRNA target sequence for Cops4 (NM_012001.1,84-102).
gcggctctcataaagatct

SEQ ID NO: 703916 - DNA, 19 bp, Mus musculus
  siRNA target sequence for Cops4 (NM_012001.1,106-124).
gggcaaatatcgtcagatt

SEQ ID NO: 703917 - DNA, 19 bp, Mus musculus
  siRNA target sequence for Cops4 (NM_012001.1,108-126).
gcaaatatcgtcagattct

SEQ ID NO: 703918 - DNA, 19 bp, Mus musculus
  siRNA target sequence for Cops4 (NM_012001.1,142-160).
gttatctgggacagaacaa

SEQ ID NO: 703919 - DNA, 19 bp, Mus musculus
  siRNA target sequence for Cops4 (NM_012001.1,153-171).
cagaacaactagaagcatt

SEQ ID NO: 703920 - DNA, 19 bp, Mus musculus
  siRNA target sequence for Cops4 (NM_012001.1,185-203).
gaagcgatggtgaatgaga

SEQ ID NO: 703921 - DNA, 19 bp, Mus musculus
  siRNA target sequence for Cops4 (NM_012001.1,189-207).
cgatggtgaatgagaatgt

SEQ ID NO: 703922 - DNA, 19 bp, Mus musculus
  siRNA target sequence for Cops4 (NM_012001.1,224-242).
cggcaactgctaacagatt

SEQ ID NO: 703923 - DNA, 19 bp, Mus musculus
  siRNA target sequence for Cops4 (NM_012001.1,227-245).
caactgctaacagatttct

SEQ ID NO: 703924 - DNA, 19 bp, Mus musculus
  siRNA target sequence for Cops4 (NM_012001.1,278-296).
gccaaggaggtctaccatt

SEQ ID NO: 703925 - DNA, 19 bp, Mus musculus
  siRNA target sequence for Cops4 (NM_012001.1,279-297).
ccaaggaggtctaccattt

SEQ ID NO: 703926 - DNA, 19 bp, Mus musculus
  siRNA target sequence for Cops4 (NM_012001.1,338-356).
gagcaggttgcttccataa

SEQ ID NO: 703927 - DNA, 19 bp, Mus musculus
  siRNA target sequence for Cops4 (NM_012001.1,340-358).
gcaggttgcttccataaga

SEQ ID NO: 703928 - DNA, 19 bp, Mus musculus
  siRNA target sequence for Cops4 (NM_012001.1,359-377).
cagcatctggcatctattt

SEQ ID NO: 703929 - DNA, 19 bp, Mus musculus
  siRNA target sequence for Cops4 (NM_012001.1,365-383).
ctggcatctatttatgaga

SEQ ID NO: 703930 - DNA, 19 bp, Mus musculus
  siRNA target sequence for Cops4 (NM_012001.1,449-467).
cagtacaacgtagattata

SEQ ID NO: 703931 - DNA, 19 bp, Mus musculus
  siRNA target sequence for Cops4 (NM_012001.1,472-490).
ggagacttacctgaagatt

SEQ ID NO: 703932 - DNA, 19 bp, Mus musculus
  siRNA target sequence for Cops4 (NM_012001.1,523-541).
ccaggccgaggcttacata

SEQ ID NO: 703933 - DNA, 19 bp, Mus musculus
  siRNA target sequence for Cops4 (NM_012001.1,524-542).
caggccgaggcttacataa

SEQ ID NO: 703934 - DNA, 19 bp, Mus musculus
  siRNA target sequence for Cops4 (NM_012001.1,546-564).
gagcgtccttacttcagaa

SEQ ID NO: 703935 - DNA, 19 bp, Mus musculus
  siRNA target sequence for Cops4 (NM_012001.1,570-588).
ccacaaatgaacagttaca

SEQ ID NO: 703936 - DNA, 19 bp, Mus musculus
  siRNA target sequence for Cops4 (NM_012001.1,573-591).
caaatgaacagttacagat

SEQ ID NO: 703937 - DNA, 19 bp, Mus musculus
  siRNA target sequence for Cops4 (NM_012001.1,611-629).
gcgcgtgtccttgattaca

SEQ ID NO: 703938 - DNA, 19 bp, Mus musculus
  siRNA target sequence for Cops4 (NM_012001.1,613-631).
gcgtgtccttgattacaga

SEQ ID NO: 703939 - DNA, 19 bp, Mus musculus
  siRNA target sequence for Cops4 (NM_012001.1,657-675).
ggtacaatgagctctctta

SEQ ID NO: 703940 - DNA, 19 bp, Mus musculus
  siRNA target sequence for Cops4 (NM_012001.1,667-685).
gctctcttacaagacaata

SEQ ID NO: 703941 - DNA, 19 bp, Mus musculus
  siRNA target sequence for Cops4 (NM_012001.1,681-699).
caatagtccatgaaagtga

SEQ ID NO: 703942 - DNA, 19 bp, Mus musculus
  siRNA target sequence for Cops4 (NM_012001.1,768-786).
ggatgctggctactctttt

SEQ ID NO: 703943 - DNA, 19 bp, Mus musculus
  siRNA target sequence for Cops4 (NM_012001.1,769-787).
gatgctggctactcttttt

SEQ ID NO: 703944 - DNA, 19 bp, Mus musculus
  siRNA target sequence for Cops4 (NM_012001.1,964-982).
gttgtcagcaagcaaatta

SEQ ID NO: 703945 - DNA, 19 bp, Mus musculus
  siRNA target sequence for Cops4 (NM_012001.1,967-985).
gtcagcaagcaaattatat

SEQ ID NO: 703946 - DNA, 19 bp, Mus musculus
  siRNA target sequence for Cops4 (NM_012001.1,1007-1025).
cttggagctcttttagaga

SEQ ID NO: 703947 - DNA, 19 bp, Mus musculus
  siRNA target sequence for Cops4 (NM_012001.1,1077-1095).
gcatgaatgggtttattga

SEQ ID NO: 703948 - DNA, 19 bp, Mus musculus
  siRNA target sequence for Cops4 (NM_012001.1,1096-1114).
ccagatcgatggaatagtt

SEQ ID NO: 703949 - DNA, 19 bp, Mus musculus
  siRNA target sequence for Cops4 (NM_012001.1,1099-1117).
gatcgatggaatagttcat

SEQ ID NO: 703950 - DNA, 19 bp, Mus musculus
  siRNA target sequence for Cops4 (NM_012001.1,1154-1172).
cagatccagtcactttgtt

SEQ ID NO: 703951 - DNA, 19 bp, Mus musculus
  siRNA target sequence for Cops7a (NM_012003.1,296-314).
gctggatatgcctaatgtt

SEQ ID NO: 703952 - DNA, 19 bp, Mus musculus
  siRNA target sequence for Cops7a (NM_012003.1,297-315).
ctggatatgcctaatgtta

SEQ ID NO: 703953 - DNA, 19 bp, Mus musculus
  siRNA target sequence for Cops7a (NM_012003.1,299-317).
ggatatgcctaatgttaga

SEQ ID NO: 703954 - DNA, 19 bp, Mus musculus
  siRNA target sequence for Cops7a (NM_012003.1,376-394).
ggacctatgcggactactt

SEQ ID NO: 703955 - DNA, 19 bp, Mus musculus
  siRNA target sequence for Cops7a (NM_012003.1,377-395).
gacctatgcggactactta

SEQ ID NO: 703956 - DNA, 19 bp, Mus musculus
  siRNA target sequence for Cops7a (NM_012003.1,422-440).
gactgacgcacagaagaat

SEQ ID NO: 703957 - DNA, 19 bp, Mus musculus
  siRNA target sequence for Cops7a (NM_012003.1,471-489).
gctgccaaagtcaagtgta

SEQ ID NO: 703958 - DNA, 19 bp, Mus musculus
  siRNA target sequence for Cops7a (NM_012003.1,606-624).
cagcggctagaggttgatt

SEQ ID NO: 703959 - DNA, 19 bp, Mus musculus
  siRNA target sequence for Cops7a (NM_012003.1,609-627).
cggctagaggttgattaca

SEQ ID NO: 703960 - DNA, 19 bp, Mus musculus
  siRNA target sequence for Cops7a (NM_012003.1,792-810).
gaggttgccaaccttaaga

SEQ ID NO: 703961 - DNA, 19 bp, Mus musculus
  siRNA target sequence for Cops7a (NM_012003.1,794-812).
ggttgccaaccttaagaaa

SEQ ID NO: 703962 - DNA, 19 bp, Mus musculus
  siRNA target sequence for Cops7a (NM_012003.1,795-813).
gttgccaaccttaagaaaa

SEQ ID NO: 703963 - DNA, 19 bp, Mus musculus
  siRNA target sequence for Figla (NM_012013.1,256-274).
gagcgtgaacggataaaaa

SEQ ID NO: 703964 - DNA, 19 bp, Mus musculus
  siRNA target sequence for Figla (NM_012013.1,258-276).
gcgtgaacggataaaaaat

SEQ ID NO: 703965 - DNA, 19 bp, Mus musculus
  siRNA target sequence for Figla (NM_012013.1,260-278).
gtgaacggataaaaaatct

SEQ ID NO: 703966 - DNA, 19 bp, Mus musculus
  siRNA target sequence for Figla (NM_012013.1,303-321).
ggctctggtgccgtttcta

SEQ ID NO: 703967 - DNA, 19 bp, Mus musculus
  siRNA target sequence for Figla (NM_012013.1,330-348).
caggaagcccagtaaagtt

SEQ ID NO: 703968 - DNA, 19 bp, Mus musculus
  siRNA target sequence for Figla (NM_012013.1,333-351).
gaagcccagtaaagttgat

SEQ ID NO: 703969 - DNA, 19 bp, Mus musculus
  siRNA target sequence for Figla (NM_012013.1,338-356).
ccagtaaagttgatatcct

SEQ ID NO: 703970 - DNA, 19 bp, Mus musculus
  siRNA target sequence for Figla (NM_012013.1,362-380).
gtgccacagaatacataca

SEQ ID NO: 703971 - DNA, 19 bp, Mus musculus
  siRNA target sequence for Figla (NM_012013.1,364-382).
gccacagaatacatacaga

SEQ ID NO: 703972 - DNA, 19 bp, Mus musculus
  siRNA target sequence for Figla (NM_012013.1,366-384).
cacagaatacatacagata

SEQ ID NO: 703973 - DNA, 19 bp, Mus musculus
  siRNA target sequence for Figla (NM_012013.1,487-505).
gagctcttgggaaatgcta

SEQ ID NO: 703974 - DNA, 19 bp, Mus musculus
  siRNA target sequence for Figla (NM_012013.1,560-578).
cgtatgctggccatagtga

SEQ ID NO: 703975 - DNA, 19 bp, Mus musculus
  siRNA target sequence for Figla (NM_012013.1,569-587).
gccatagtgagccattgta

SEQ ID NO: 703976 - DNA, 19 bp, Mus musculus
  siRNA target sequence for Gprin1 (NM_012014.1,272-290).
ccagcaaagtggatatagt

SEQ ID NO: 703977 - DNA, 19 bp, Mus musculus
  siRNA target sequence for Gprin1 (NM_012014.1,304-322).
gacaatgctgggtctttaa

SEQ ID NO: 703978 - DNA, 19 bp, Mus musculus
  siRNA target sequence for Gprin1 (NM_012014.1,306-324).
caatgctgggtctttaaga

SEQ ID NO: 703979 - DNA, 19 bp, Mus musculus
  siRNA target sequence for Gprin1 (NM_012014.1,335-353).
ctatatcctcaggcaaaat

SEQ ID NO: 703980 - DNA, 19 bp, Mus musculus
  siRNA target sequence for Gprin1 (NM_012014.1,426-444).
gtctttgagggaaaatgat

SEQ ID NO: 703981 - DNA, 19 bp, Mus musculus
  siRNA target sequence for Gprin1 (NM_012014.1,428-446).
ctttgagggaaaatgatat

SEQ ID NO: 703982 - DNA, 19 bp, Mus musculus
  siRNA target sequence for Gprin1 (NM_012014.1,496-514).
gagttctctggaaagctaa

SEQ ID NO: 703983 - DNA, 19 bp, Mus musculus
  siRNA target sequence for Gprin1 (NM_012014.1,538-556).
gagcttgtatcctcagtaa

SEQ ID NO: 703984 - DNA, 19 bp, Mus musculus
  siRNA target sequence for Gprin1 (NM_012014.1,625-643).
ggcaattcagaaactttgt

SEQ ID NO: 703985 - DNA, 19 bp, Mus musculus
  siRNA target sequence for Gprin1 (NM_012014.1,707-725).
ggtctgtatcggtgagaat

SEQ ID NO: 703986 - DNA, 19 bp, Mus musculus
  siRNA target sequence for Gprin1 (NM_012014.1,743-761).
ccagacagccagaaggtat

SEQ ID NO: 703987 - DNA, 19 bp, Mus musculus
  siRNA target sequence for Gprin1 (NM_012014.1,746-764).
gacagccagaaggtatgtt

SEQ ID NO: 703988 - DNA, 19 bp, Mus musculus
  siRNA target sequence for Gprin1 (NM_012014.1,815-833).
gagcggaccctgtttcctt

SEQ ID NO: 703989 - DNA, 19 bp, Mus musculus
  siRNA target sequence for Gprin1 (NM_012014.1,817-835).
gcggaccctgtttccttaa

SEQ ID NO: 703990 - DNA, 19 bp, Mus musculus
  siRNA target sequence for Gprin1 (NM_012014.1,823-841).
cctgtttccttaagaaatt

SEQ ID NO: 703991 - DNA, 19 bp, Mus musculus
  siRNA target sequence for Gprin1 (NM_012014.1,892-910).
gaacgcgtgtccttggtaa

SEQ ID NO: 703992 - DNA, 19 bp, Mus musculus
  siRNA target sequence for Gprin1 (NM_012014.1,897-915).
cgtgtccttggtaaaaaca

SEQ ID NO: 703993 - DNA, 19 bp, Mus musculus
  siRNA target sequence for Gprin1 (NM_012014.1,937-955).
gaagatccaaggtcttcta

SEQ ID NO: 703994 - DNA, 19 bp, Mus musculus
  siRNA target sequence for Gprin1 (NM_012014.1,1014-1032).
cgagtcttcaggaaagaca

SEQ ID NO: 703995 - DNA, 19 bp, Mus musculus
  siRNA target sequence for Gprin1 (NM_012014.1,1245-1263).
ggacgccatgactttagga

SEQ ID NO: 703996 - DNA, 19 bp, Mus musculus
  siRNA target sequence for Gprin1 (NM_012014.1,1246-1264).
gacgccatgactttaggaa

SEQ ID NO: 703997 - DNA, 19 bp, Mus musculus
  siRNA target sequence for Gprin1 (NM_012014.1,1307-1325).
cagggaaggtggatctcat

SEQ ID NO: 703998 - DNA, 19 bp, Mus musculus
  siRNA target sequence for Gprin1 (NM_012014.1,1419-1437).
gagtactgagcccaaatct

SEQ ID NO: 703999 - DNA, 19 bp, Mus musculus
  siRNA target sequence for Gprin1 (NM_012014.1,1430-1448).
ccaaatctggggtcaaagt

SEQ ID NO: 704000 - DNA, 19 bp, Mus musculus
  siRNA target sequence for Gprin1 (NM_012014.1,1488-1506).
ggaaactccgtctttgcaa

SEQ ID NO: 704001 - DNA, 19 bp, Mus musculus
  siRNA target sequence for Gprin1 (NM_012014.1,1489-1507).
gaaactccgtctttgcaaa

SEQ ID NO: 704002 - DNA, 19 bp, Mus musculus
  siRNA target sequence for Ma2a8 (NM_012018.1,860-878).
gcttgcagagctagaaagt

SEQ ID NO: 704003 - DNA, 19 bp, Mus musculus
  siRNA target sequence for Ma2a8 (NM_012018.1,953-971).
gctagagactcagttaaaa

SEQ ID NO: 704004 - DNA, 19 bp, Mus musculus
  siRNA target sequence for Ma2a8 (NM_012018.1,1019-1037).
cctaaggcgtactcagtta

SEQ ID NO: 704005 - DNA, 19 bp, Mus musculus
  siRNA target sequence for Ma2a8 (NM_012018.1,1038-1056).
gagcaatcggtgcttcaaa

SEQ ID NO: 704006 - DNA, 19 bp, Mus musculus
  siRNA target sequence for Ma2a8 (NM_012018.1,1040-1058).
gcaatcggtgcttcaaaca

SEQ ID NO: 704007 - DNA, 19 bp, Mus musculus
  siRNA target sequence for Ma2a8 (NM_012018.1,1167-1185).
gatgacaacagcctgttaa

SEQ ID NO: 704008 - DNA, 19 bp, Mus musculus
  siRNA target sequence for Ma2a8 (NM_012018.1,1567-1585).
ctgcgaaagagcacttgaa

SEQ ID NO: 704009 - DNA, 19 bp, Mus musculus
  siRNA target sequence for Ma2a8 (NM_012018.1,1621-1639).
caagaatccagcaattaga

SEQ ID NO: 704010 - DNA, 19 bp, Mus musculus
  siRNA target sequence for Ma2a8 (NM_012018.1,1659-1677).
caagagaacctaaaaagta

SEQ ID NO: 704011 - DNA, 19 bp, Mus musculus
  siRNA target sequence for Ma2a8 (NM_012018.1,1845-1863).
gcggtggctgcttctgata

SEQ ID NO: 704012 - DNA, 19 bp, Mus musculus
  siRNA target sequence for Ma2a8 (NM_012018.1,1847-1865).
ggtggctgcttctgataaa

SEQ ID NO: 704013 - DNA, 19 bp, Mus musculus
  siRNA target sequence for Ma2a8 (NM_012018.1,1848-1866).
gtggctgcttctgataaat

SEQ ID NO: 704014 - DNA, 19 bp, Mus musculus
  siRNA target sequence for Ma2a8 (NM_012018.1,1907-1925).
gtccctgcacggaactgtt

SEQ ID NO: 704015 - DNA, 19 bp, Mus musculus
  siRNA target sequence for Ma2a8 (NM_012018.1,1917-1935).
ggaactgttgtgagaatta

SEQ ID NO: 704016 - DNA, 19 bp, Mus musculus
  siRNA target sequence for Ma2a8 (NM_012018.1,2065-2083).
gccagttccgagatgagat

SEQ ID NO: 704017 - DNA, 19 bp, Mus musculus
  siRNA target sequence for Ma2a8 (NM_012018.1,2148-2166).
gaggccatggcgaagcaaa

SEQ ID NO: 704018 - DNA, 19 bp, Mus musculus
  siRNA target sequence for Ma2a8 (NM_012018.1,2227-2245).
gcattgagaacgtgttaga

SEQ ID NO: 704019 - DNA, 19 bp, Mus musculus
  siRNA target sequence for Ma2a8 (NM_012018.1,2275-2293).
ctgctcagaacgagtacat

SEQ ID NO: 704020 - DNA, 19 bp, Mus musculus
  siRNA target sequence for Ma2a8 (NM_012018.1,2349-2367).
gcaccatcctcaaaagttt

SEQ ID NO: 704021 - DNA, 19 bp, Mus musculus
  siRNA target sequence for Ma2a8 (NM_012018.1,2398-2416).
ccggtttgggtctaaagta

SEQ ID NO: 704022 - DNA, 19 bp, Mus musculus
  siRNA target sequence for Ma2a8 (NM_012018.1,2422-2440).
cctcaactcctcttagaaa

SEQ ID NO: 704023 - DNA, 19 bp, Mus musculus
  siRNA target sequence for Ma2a8 (NM_012018.1,2524-2542).
gcacgctgcataagtcatt

SEQ ID NO: 704024 - DNA, 19 bp, Mus musculus
  siRNA target sequence for Ma2a8 (NM_012018.1,2525-2543).
cacgctgcataagtcattt

SEQ ID NO: 704025 - DNA, 19 bp, Mus musculus
  siRNA target sequence for Ma2a8 (NM_012018.1,2528-2546).
gctgcataagtcattttca

SEQ ID NO: 704026 - DNA, 19 bp, Mus musculus
  siRNA target sequence for Ma2a8 (NM_012018.1,2529-2547).
ctgcataagtcattttcaa

SEQ ID NO: 704027 - DNA, 19 bp, Mus musculus
  siRNA target sequence for Ma2a8 (NM_012018.1,2625-2643).
cctccccctgggtacataa

SEQ ID NO: 704028 - DNA, 19 bp, Mus musculus
  siRNA target sequence for Ma2a8 (NM_012018.1,2626-2644).
ctccccctgggtacataat

SEQ ID NO: 704029 - DNA, 19 bp, Mus musculus
  siRNA target sequence for Ma2a8 (NM_012018.1,2629-2647).
cccctgggtacataatgta

SEQ ID NO: 704030 - DNA, 19 bp, Mus musculus
  siRNA target sequence for Ma2a8 (NM_012018.1,2631-2649).
cctgggtacataatgtata

SEQ ID NO: 704031 - DNA, 19 bp, Mus musculus
  siRNA target sequence for Ma2a8 (NM_012018.1,2829-2847).
cgggtgtgcagcattgcaa

SEQ ID NO: 704032 - DNA, 19 bp, Mus musculus
  siRNA target sequence for Ppnr (NM_012022.1,237-255).
cagcaccggctttactaat

SEQ ID NO: 704033 - DNA, 19 bp, Mus musculus
  siRNA target sequence for Ppnr (NM_012022.1,269-287).
gatctgggtttctgaatgt

SEQ ID NO: 704034 - DNA, 19 bp, Mus musculus
  siRNA target sequence for Ppnr (NM_012022.1,319-337).
gcaagaaacctctctaaaa

SEQ ID NO: 704035 - DNA, 19 bp, Mus musculus
  siRNA target sequence for Spag1 (NM_012031.1,261-279).
ggggctttggaacaacaaa

SEQ ID NO: 704036 - DNA, 19 bp, Mus musculus
  siRNA target sequence for Spag1 (NM_012031.1,293-311).
cccatcgaacatttggatt

SEQ ID NO: 704037 - DNA, 19 bp, Mus musculus
  siRNA target sequence for Spag1 (NM_012031.1,395-413).
cctgaactcacggaatttt

SEQ ID NO: 704038 - DNA, 19 bp, Mus musculus
  siRNA target sequence for Spag1 (NM_012031.1,427-445).
caccaacttggctcctaaa

SEQ ID NO: 704039 - DNA, 19 bp, Mus musculus
  siRNA target sequence for Spag1 (NM_012031.1,430-448).
caacttggctcctaaaagt

SEQ ID NO: 704040 - DNA, 19 bp, Mus musculus
  siRNA target sequence for Spag1 (NM_012031.1,478-496).
gacagcatccagcttttca

SEQ ID NO: 704041 - DNA, 19 bp, Mus musculus
  siRNA target sequence for Spag1 (NM_012031.1,517-535).
cgacagtgatctaaagagt

SEQ ID NO: 704042 - DNA, 19 bp, Mus musculus
  siRNA target sequence for Spag1 (NM_012031.1,518-536).
gacagtgatctaaagagtt

SEQ ID NO: 704043 - DNA, 19 bp, Mus musculus
  siRNA target sequence for Spag1 (NM_012031.1,653-671).
ggcaaggaaacatattcta

SEQ ID NO: 704044 - DNA, 19 bp, Mus musculus
  siRNA target sequence for Spag1 (NM_012031.1,694-712).
gattccaagggattatgca

SEQ ID NO: 704045 - DNA, 19 bp, Mus musculus
  siRNA target sequence for Spag1 (NM_012031.1,790-808).
caaggctcatctgtctaaa

SEQ ID NO: 704046 - DNA, 19 bp, Mus musculus
  siRNA target sequence for Spag1 (NM_012031.1,793-811).
ggctcatctgtctaaaatt

SEQ ID NO: 704047 - DNA, 19 bp, Mus musculus
  siRNA target sequence for Spag1 (NM_012031.1,797-815).
catctgtctaaaattgaga

SEQ ID NO: 704048 - DNA, 19 bp, Mus musculus
  siRNA target sequence for Spag1 (NM_012031.1,914-932).
gaagaggccgtgatgtatt

SEQ ID NO: 704049 - DNA, 19 bp, Mus musculus
  siRNA target sequence for Spag1 (NM_012031.1,917-935).
gaggccgtgatgtattaca

SEQ ID NO: 704050 - DNA, 19 bp, Mus musculus
  siRNA target sequence for Spag1 (NM_012031.1,960-978).
ccgccattgcctataacaa

SEQ ID NO: 704051 - DNA, 19 bp, Mus musculus
  siRNA target sequence for Spag1 (NM_012031.1,961-979).
cgccattgcctataacaat

SEQ ID NO: 704052 - DNA, 19 bp, Mus musculus
  siRNA target sequence for Spag1 (NM_012031.1,980-998).
cgagctcaggccgaaatca

SEQ ID NO: 704053 - DNA, 19 bp, Mus musculus
  siRNA target sequence for Spag1 (NM_012031.1,981-999).
gagctcaggccgaaatcaa

SEQ ID NO: 704054 - DNA, 19 bp, Mus musculus
  siRNA target sequence for Spag1 (NM_012031.1,983-1001).
gctcaggccgaaatcaagt

SEQ ID NO: 704055 - DNA, 19 bp, Mus musculus
  siRNA target sequence for Spag1 (NM_012031.1,984-1002).
ctcaggccgaaatcaagtt

SEQ ID NO: 704056 - DNA, 19 bp, Mus musculus
  siRNA target sequence for Spag1 (NM_012031.1,1076-1094).
ctgagacgagccactacat

SEQ ID NO: 704057 - DNA, 19 bp, Mus musculus
  siRNA target sequence for Spag1 (NM_012031.1,1078-1096).
gagacgagccactacatat

SEQ ID NO: 704058 - DNA, 19 bp, Mus musculus
  siRNA target sequence for Spag1 (NM_012031.1,1080-1098).
gacgagccactacatataa

SEQ ID NO: 704059 - DNA, 19 bp, Mus musculus
  siRNA target sequence for Spag1 (NM_012031.1,1083-1101).
gagccactacatataaaca

SEQ ID NO: 704060 - DNA, 19 bp, Mus musculus
  siRNA target sequence for Spag1 (NM_012031.1,1086-1104).
ccactacatataaacatca

SEQ ID NO: 704061 - DNA, 19 bp, Mus musculus
  siRNA target sequence for Spag1 (NM_012031.1,1087-1105).
cactacatataaacatcaa

SEQ ID NO: 704062 - DNA, 19 bp, Mus musculus
  siRNA target sequence for Spag1 (NM_012031.1,1122-1140).
ctgtggacgacctgagaaa

SEQ ID NO: 704063 - DNA, 19 bp, Mus musculus
  siRNA target sequence for Spag1 (NM_012031.1,1249-1267).
gaggatggttattgaagaa

SEQ ID NO: 704064 - DNA, 19 bp, Mus musculus
  siRNA target sequence for Spag1 (NM_012031.1,1694-1712).
gactgcatccaggattgta

SEQ ID NO: 704065 - DNA, 19 bp, Mus musculus
  siRNA target sequence for Spag1 (NM_012031.1,1775-1793).
gagaccttagagcaataca

SEQ ID NO: 704066 - DNA, 19 bp, Mus musculus
  siRNA target sequence for Spag1 (NM_012031.1,1798-1816).
cgcatatgtggactataaa

SEQ ID NO: 704067 - DNA, 19 bp, Mus musculus
  siRNA target sequence for Spag1 (NM_012031.1,1854-1872).
gcgacagtgctaacagaat

SEQ ID NO: 704068 - DNA, 19 bp, Mus musculus
  siRNA target sequence for Spag1 (NM_012031.1,1855-1873).
cgacagtgctaacagaata

SEQ ID NO: 704069 - DNA, 19 bp, Mus musculus
  siRNA target sequence for Spag1 (NM_012031.1,2017-2035).
gccgagcatcacagatgaa

SEQ ID NO: 704070 - DNA, 19 bp, Mus musculus
  siRNA target sequence for Spag1 (NM_012031.1,2018-2036).
ccgagcatcacagatgaaa

SEQ ID NO: 704071 - DNA, 19 bp, Mus musculus
  siRNA target sequence for Spag1 (NM_012031.1,2100-2118).
ccattagtaaatacaatga

SEQ ID NO: 704072 - DNA, 19 bp, Mus musculus
  siRNA target sequence for Spag1 (NM_012031.1,2137-2155).
caaggcatgtgccatctat

SEQ ID NO: 704073 - DNA, 19 bp, Mus musculus
  siRNA target sequence for Spag1 (NM_012031.1,2140-2158).
ggcatgtgccatctataca

SEQ ID NO: 704074 - DNA, 19 bp, Mus musculus
  siRNA target sequence for Spag1 (NM_012031.1,2141-2159).
gcatgtgccatctatacaa

SEQ ID NO: 704075 - DNA, 19 bp, Mus musculus
  siRNA target sequence for Spag1 (NM_012031.1,2157-2175).
caaacagggctctctgtta

SEQ ID NO: 704076 - DNA, 19 bp, Mus musculus
  siRNA target sequence for Spag1 (NM_012031.1,2548-2566).
cgtctccaagcctactaat

SEQ ID NO: 704077 - DNA, 19 bp, Mus musculus
  siRNA target sequence for Spag1 (NM_012031.1,2559-2577).
ctactaatgcctatgagtt

SEQ ID NO: 704078 - DNA, 19 bp, Mus musculus
  siRNA target sequence for Spag1 (NM_012031.1,2657-2675).
gacctgccactgttgctaa

SEQ ID NO: 704079 - DNA, 19 bp, Mus musculus
  siRNA target sequence for Spag1 (NM_012031.1,2660-2678).
ctgccactgttgctaagta

SEQ ID NO: 704080 - DNA, 19 bp, Mus musculus
  siRNA target sequence for Spag1 (NM_012031.1,2663-2681).
ccactgttgctaagtaaca

SEQ ID NO: 704081 - DNA, 19 bp, Mus musculus
  siRNA target sequence for Spag1 (NM_012031.1,2668-2686).
gttgctaagtaacaaactt

SEQ ID NO: 704082 - DNA, 19 bp, Mus musculus
  siRNA target sequence for Spag1 (NM_012031.1,2705-2723).
ctcctcattcagtcactta

SEQ ID NO: 704083 - DNA, 19 bp, Mus musculus
  siRNA target sequence for Spag1 (NM_012031.1,2800-2818).
gacgatgctgacactaatt

SEQ ID NO: 704084 - DNA, 19 bp, Mus musculus
  siRNA target sequence for Spag1 (NM_012031.1,2806-2824).
gctgacactaattaacaaa

SEQ ID NO: 704085 - DNA, 19 bp, Mus musculus
  siRNA target sequence for Spag1 (NM_012031.1,2897-2915).
gatgtacaggccctaagaa

SEQ ID NO: 704086 - DNA, 19 bp, Mus musculus
  siRNA target sequence for Spag1 (NM_012031.1,2907-2925).
ccctaagaaggcagtatga

SEQ ID NO: 704087 - DNA, 19 bp, Mus musculus
  siRNA target sequence for Islr (NM_012043.2,401-419).
gggaagtgcccctattgca

SEQ ID NO: 704088 - DNA, 19 bp, Mus musculus
  siRNA target sequence for Islr (NM_012043.2,601-619).
cctcgggacgcctttagca

SEQ ID NO: 704089 - DNA, 19 bp, Mus musculus
  siRNA target sequence for Islr (NM_012043.2,707-725).
cccacttgcagatcaatga

SEQ ID NO: 704090 - DNA, 19 bp, Mus musculus
  siRNA target sequence for Islr (NM_012043.2,880-898).
gctccctcagtgcaactaa

SEQ ID NO: 704091 - DNA, 19 bp, Mus musculus
  siRNA target sequence for Islr (NM_012043.2,884-902).
cctcagtgcaactaagcta

SEQ ID NO: 704092 - DNA, 19 bp, Mus musculus
  siRNA target sequence for Islr (NM_012043.2,1147-1165).
ctggaggagggcacctata

SEQ ID NO: 704093 - DNA, 19 bp, Mus musculus
  siRNA target sequence for Islr (NM_012043.2,1193-1211).
gtgccgaaagctctgtaaa

SEQ ID NO: 704094 - DNA, 19 bp, Mus musculus
  siRNA target sequence for Islr (NM_012043.2,1292-1310).
gctgctatacggttgacaa

SEQ ID NO: 704095 - DNA, 19 bp, Mus musculus
  siRNA target sequence for Islr (NM_012043.2,1322-1340).
catccggaccggaagacaa

SEQ ID NO: 704096 - DNA, 19 bp, Mus musculus
  siRNA target sequence for Islr (NM_012043.2,1331-1349).
cggaagacaacgtggttat

SEQ ID NO: 704097 - DNA, 19 bp, Mus musculus
  siRNA target sequence for Islr (NM_012043.2,1336-1354).
gacaacgtggttatcattt

SEQ ID NO: 704098 - DNA, 19 bp, Mus musculus
  siRNA target sequence for Islr (NM_012043.2,1374-1392).
cccagaagctgcaatagca

SEQ ID NO: 704099 - DNA, 19 bp, Mus musculus
  siRNA target sequence for Brd7 (NM_012047.1,363-381).
cagaagcgaccatgacaaa

SEQ ID NO: 704100 - DNA, 19 bp, Mus musculus
  siRNA target sequence for Brd7 (NM_012047.1,528-546).
gtgtcatgtccctataaga

SEQ ID NO: 704101 - DNA, 19 bp, Mus musculus
  siRNA target sequence for Brd7 (NM_012047.1,537-555).
ccctataagattagactta

SEQ ID NO: 704102 - DNA, 19 bp, Mus musculus
  siRNA target sequence for Brd7 (NM_012047.1,559-577).
cctgagaagcctcttacaa

SEQ ID NO: 704103 - DNA, 19 bp, Mus musculus
  siRNA target sequence for Brd7 (NM_012047.1,578-596).
gctcgttagccaaacaaga

SEQ ID NO: 704104 - DNA, 19 bp, Mus musculus
  siRNA target sequence for Brd7 (NM_012047.1,579-597).
ctcgttagccaaacaagaa

SEQ ID NO: 704105 - DNA, 19 bp, Mus musculus
  siRNA target sequence for Brd7 (NM_012047.1,581-599).
cgttagccaaacaagaaga

SEQ ID NO: 704106 - DNA, 19 bp, Mus musculus
  siRNA target sequence for Brd7 (NM_012047.1,582-600).
gttagccaaacaagaagaa

SEQ ID NO: 704107 - DNA, 19 bp, Mus musculus
  siRNA target sequence for Brd7 (NM_012047.1,636-654).
gctcatgagacaattgcaa

SEQ ID NO: 704108 - DNA, 19 bp, Mus musculus
  siRNA target sequence for Brd7 (NM_012047.1,642-660).
gagacaattgcaaagaaaa

SEQ ID NO: 704109 - DNA, 19 bp, Mus musculus
  siRNA target sequence for Brd7 (NM_012047.1,706-724).
cctggctactccatgatta

SEQ ID NO: 704110 - DNA, 19 bp, Mus musculus
  siRNA target sequence for Brd7 (NM_012047.1,707-725).
ctggctactccatgattat

SEQ ID NO: 704111 - DNA, 19 bp, Mus musculus
  siRNA target sequence for Brd7 (NM_012047.1,710-728).
gctactccatgattattaa

SEQ ID NO: 704112 - DNA, 19 bp, Mus musculus
  siRNA target sequence for Brd7 (NM_012047.1,711-729).
ctactccatgattattaaa

SEQ ID NO: 704113 - DNA, 19 bp, Mus musculus
  siRNA target sequence for Brd7 (NM_012047.1,730-748).
cacccaatggattttagta

SEQ ID NO: 704114 - DNA, 19 bp, Mus musculus
  siRNA target sequence for Brd7 (NM_012047.1,774-792).
cgactaccagtccatagaa

SEQ ID NO: 704115 - DNA, 19 bp, Mus musculus
  siRNA target sequence for Brd7 (NM_012047.1,777-795).
ctaccagtccatagaagaa

SEQ ID NO: 704116 - DNA, 19 bp, Mus musculus
  siRNA target sequence for Brd7 (NM_012047.1,813-831).
gctaatgtgtactaatgca

SEQ ID NO: 704117 - DNA, 19 bp, Mus musculus
  siRNA target sequence for Brd7 (NM_012047.1,821-839).
gtactaatgcaatgattta

SEQ ID NO: 704118 - DNA, 19 bp, Mus musculus
  siRNA target sequence for Brd7 (NM_012047.1,824-842).
ctaatgcaatgatttacaa

SEQ ID NO: 704119 - DNA, 19 bp, Mus musculus
  siRNA target sequence for Brd7 (NM_012047.1,847-865).
ccagagaccatttattata

SEQ ID NO: 704120 - DNA, 19 bp, Mus musculus
  siRNA target sequence for Brd7 (NM_012047.1,882-900).
gttgcactcagggatgaaa

SEQ ID NO: 704121 - DNA, 19 bp, Mus musculus
  siRNA target sequence for Brd7 (NM_012047.1,926-944).
gcctgaagcagagtataga

SEQ ID NO: 704122 - DNA, 19 bp, Mus musculus
  siRNA target sequence for Brd7 (NM_012047.1,928-946).
ctgaagcagagtatagact

SEQ ID NO: 704123 - DNA, 19 bp, Mus musculus
  siRNA target sequence for Brd7 (NM_012047.1,934-952).
cagagtatagacttcatgt

SEQ ID NO: 704124 - DNA, 19 bp, Mus musculus
  siRNA target sequence for Brd7 (NM_012047.1,1057-1075).
gaaacacaggccttcagaa

SEQ ID NO: 704125 - DNA, 19 bp, Mus musculus
  siRNA target sequence for Brd7 (NM_012047.1,1081-1099).
gctaaggacaataaaagga

SEQ ID NO: 704126 - DNA, 19 bp, Mus musculus
  siRNA target sequence for Brd7 (NM_012047.1,1180-1198).
gagtcaggaggcaagctaa

SEQ ID NO: 704127 - DNA, 19 bp, Mus musculus
  siRNA target sequence for Brd7 (NM_012047.1,1210-1228).
gcaaacagtcagtgtgaat

SEQ ID NO: 704128 - DNA, 19 bp, Mus musculus
  siRNA target sequence for Brd7 (NM_012047.1,1315-1333).
gtgagattggggatgacaa

SEQ ID NO: 704129 - DNA, 19 bp, Mus musculus
  siRNA target sequence for Brd7 (NM_012047.1,1394-1412).
gagtaaccccagtattata

SEQ ID NO: 704130 - DNA, 19 bp, Mus musculus
  siRNA target sequence for Brd7 (NM_012047.1,1396-1414).
gtaaccccagtattatact

SEQ ID NO: 704131 - DNA, 19 bp, Mus musculus
  siRNA target sequence for Brd7 (NM_012047.1,1400-1418).
ccccagtattatacttgaa

SEQ ID NO: 704132 - DNA, 19 bp, Mus musculus
  siRNA target sequence for Brd7 (NM_012047.1,1401-1419).
cccagtattatacttgaat

SEQ ID NO: 704133 - DNA, 19 bp, Mus musculus
  siRNA target sequence for Brd7 (NM_012047.1,1433-1451).
gttcttatgccccacatta

SEQ ID NO: 704134 - DNA, 19 bp, Mus musculus
  siRNA target sequence for Brd7 (NM_012047.1,1436-1454).
cttatgccccacattatga

SEQ ID NO: 704135 - DNA, 19 bp, Mus musculus
  siRNA target sequence for Brd7 (NM_012047.1,1444-1462).
ccacattatgactctacat

SEQ ID NO: 704136 - DNA, 19 bp, Mus musculus
  siRNA target sequence for Brd7 (NM_012047.1,1445-1463).
cacattatgactctacatt

SEQ ID NO: 704137 - DNA, 19 bp, Mus musculus
  siRNA target sequence for Brd7 (NM_012047.1,1476-1494).
caaagatgattctgattta

SEQ ID NO: 704138 - DNA, 19 bp, Mus musculus
  siRNA target sequence for Brd7 (NM_012047.1,1480-1498).
gatgattctgatttaatct

SEQ ID NO: 704139 - DNA, 19 bp, Mus musculus
  siRNA target sequence for Brd7 (NM_012047.1,1483-1501).
gattctgatttaatctact

SEQ ID NO: 704140 - DNA, 19 bp, Mus musculus
  siRNA target sequence for Brd7 (NM_012047.1,1566-1584).
ccaagattacccgtatgtt

SEQ ID NO: 704141 - DNA, 19 bp, Mus musculus
  siRNA target sequence for Brd7 (NM_012047.1,1567-1585).
caagattacccgtatgtta

SEQ ID NO: 704142 - DNA, 19 bp, Mus musculus
  siRNA target sequence for Brd7 (NM_012047.1,1578-1596).
gtatgttatggcagatagt

SEQ ID NO: 704143 - DNA, 19 bp, Mus musculus
  siRNA target sequence for Brd7 (NM_012047.1,1706-1724).
cagagattacacaaataga

SEQ ID NO: 704144 - DNA, 19 bp, Mus musculus
  siRNA target sequence for Brd7 (NM_012047.1,1907-1925).
ctaggcctcctcccaatat

SEQ ID NO: 704145 - DNA, 19 bp, Mus musculus
  siRNA target sequence for Brd7 (NM_012047.1,1910-1928).
ggcctcctcccaatatgat

SEQ ID NO: 704146 - DNA, 19 bp, Mus musculus
  siRNA target sequence for Brd7 (NM_012047.1,1912-1930).
cctcctcccaatatgatct

SEQ ID NO: 704147 - DNA, 19 bp, Mus musculus
  siRNA target sequence for Brd7 (NM_012047.1,1940-1958).
gtccttcttacagagaaat

SEQ ID NO: 704148 - DNA, 19 bp, Mus musculus
  siRNA target sequence for Brd7 (NM_012047.1,1966-1984).
gctgaacaagtgaccaata

SEQ ID NO: 704149 - DNA, 19 bp, Mus musculus
  siRNA target sequence for Brd7 (NM_012047.1,1967-1985).
ctgaacaagtgaccaataa

SEQ ID NO: 704150 - DNA, 19 bp, Mus musculus
  siRNA target sequence for Brd7 (NM_012047.1,1977-1995).
gaccaataacctcaaagaa

SEQ ID NO: 704151 - DNA, 19 bp, Mus musculus
  siRNA target sequence for Brd7 (NM_012047.1,2010-2028).
gactccaggtgatgttgta

SEQ ID NO: 704152 - DNA, 19 bp, Mus musculus
  siRNA target sequence for Brd7 (NM_012047.1,2035-2053).
cacggagtgcgaaaagcaa

SEQ ID NO: 704153 - DNA, 19 bp, Mus musculus
  siRNA target sequence for Brd7 (NM_012047.1,2083-2101).
ggaaacagcttcgtagatt

SEQ ID NO: 704154 - DNA, 19 bp, Mus musculus
  siRNA target sequence for Brd7 (NM_012047.1,2084-2102).
gaaacagcttcgtagattt

SEQ ID NO: 704155 - DNA, 19 bp, Mus musculus
  siRNA target sequence for Sh3d19 (NM_012059.2,1975-1993).
gaattgccaatgaagacat

SEQ ID NO: 704156 - DNA, 19 bp, Mus musculus
  siRNA target sequence for Sh3d19 (NM_012059.2,2008-2026).
ccacggaactctcttgtaa

SEQ ID NO: 704157 - DNA, 19 bp, Mus musculus
  siRNA target sequence for Sh3d19 (NM_012059.2,2113-2131).
catcccagatgaagattgt

SEQ ID NO: 704158 - DNA, 19 bp, Mus musculus
  siRNA target sequence for Sh3d19 (NM_012059.2,2153-2171).
gagaggcagacctaacgat

SEQ ID NO: 704159 - DNA, 19 bp, Mus musculus
  siRNA target sequence for Sh3d19 (NM_012059.2,2213-2231).
cgctgtggctcttcatgat

SEQ ID NO: 704160 - DNA, 19 bp, Mus musculus
  siRNA target sequence for Sh3d19 (NM_012059.2,2272-2290).
gagagattgtttatcttct

SEQ ID NO: 704161 - DNA, 19 bp, Mus musculus
  siRNA target sequence for Sh3d19 (NM_012059.2,2360-2378).
cgtcaaagtcattgttgat

SEQ ID NO: 704162 - DNA, 19 bp, Mus musculus
  siRNA target sequence for Sh3d19 (NM_012059.2,2443-2461).
gtgtcgcacggtttgagta

SEQ ID NO: 704163 - DNA, 19 bp, Mus musculus
  siRNA target sequence for Sh3d19 (NM_012059.2,2445-2463).
gtcgcacggtttgagtata

SEQ ID NO: 704164 - DNA, 19 bp, Mus musculus
  siRNA target sequence for Sh3d19 (NM_012059.2,2477-2495).
ggatgagttaagtttctca

SEQ ID NO: 704165 - DNA, 19 bp, Mus musculus
  siRNA target sequence for Sh3d19 (NM_012059.2,2520-2538).
gagtacgtgaatgaagaat

SEQ ID NO: 704166 - DNA, 19 bp, Mus musculus
  siRNA target sequence for Sh3d19 (NM_012059.2,2568-2586).
gggatcttccccctgaatt

SEQ ID NO: 704167 - DNA, 19 bp, Mus musculus
  siRNA target sequence for Sh3d19 (NM_012059.2,2570-2588).
gatcttccccctgaatttt

SEQ ID NO: 704168 - DNA, 19 bp, Mus musculus
  siRNA target sequence for Sh3d19 (NM_012059.2,2619-2637).
ggtgcaaatattttaagta

SEQ ID NO: 704169 - DNA, 19 bp, Mus musculus
  siRNA target sequence for Sh3d19 (NM_012059.2,2643-2661).
gtgccaccaaagaccaaaa

SEQ ID NO: 704170 - DNA, 19 bp, Mus musculus
  siRNA target sequence for Sh3d19 (NM_012059.2,2747-2765).
cgaggacttacccttcaaa

SEQ ID NO: 704171 - DNA, 19 bp, Mus musculus
  siRNA target sequence for Sh3d19 (NM_012059.2,2783-2801).
gatccttgaacgtctagat

SEQ ID NO: 704172 - DNA, 19 bp, Mus musculus
  siRNA target sequence for Sh3d19 (NM_012059.2,2904-2922).
ccgaaggggaggaaggtta

SEQ ID NO: 704173 - DNA, 19 bp, Mus musculus
  siRNA target sequence for Sh3d19 (NM_012059.2,2905-2923).
cgaaggggaggaaggttaa

SEQ ID NO: 704174 - DNA, 19 bp, Mus musculus
  siRNA target sequence for Sh3d19 (NM_012059.2,2918-2936).
ggttaaagccctgtatgat

SEQ ID NO: 704175 - DNA, 19 bp, Mus musculus
  siRNA target sequence for Sh3d19 (NM_012059.2,2969-2987).
caaggctggagacgtaata

SEQ ID NO: 704176 - DNA, 19 bp, Mus musculus
  siRNA target sequence for Sh3d19 (NM_012059.2,3014-3032).
ctggatgcgtggagaacta

SEQ ID NO: 704177 - DNA, 19 bp, Mus musculus
  siRNA target sequence for Sh3d19 (NM_012059.2,3016-3034).
ggatgcgtggagaactaat

SEQ ID NO: 704178 - DNA, 19 bp, Mus musculus
  siRNA target sequence for Sh3d19 (NM_012059.2,3055-3073).
ccaaaaactacgttcagtt

SEQ ID NO: 704179 - DNA, 19 bp, Mus musculus
  siRNA target sequence for Sh3d19 (NM_012059.2,3056-3074).
caaaaactacgttcagttt

SEQ ID NO: 704180 - DNA, 19 bp, Mus musculus
  siRNA target sequence for Cadps (NM_012061.1,882-900).
ccaaatcgtagctgatgaa

SEQ ID NO: 704181 - DNA, 19 bp, Mus musculus
  siRNA target sequence for Cadps (NM_012061.1,998-1016).
ctcgggaggtcttcaagaa

SEQ ID NO: 704182 - DNA, 19 bp, Mus musculus
  siRNA target sequence for Cadps (NM_012061.1,1203-1221).
gatgtttcagaacattctt

SEQ ID NO: 704183 - DNA, 19 bp, Mus musculus
  siRNA target sequence for Cadps (NM_012061.1,1223-1241).
ggatcaagaagtttgaaca

SEQ ID NO: 704184 - DNA, 19 bp, Mus musculus
  siRNA target sequence for Cadps (NM_012061.1,1321-1339).
ctccaaatggcagatcaaa

SEQ ID NO: 704185 - DNA, 19 bp, Mus musculus
  siRNA target sequence for Cadps (NM_012061.1,1344-1362).
cagggaacgcaaatttcct

SEQ ID NO: 704186 - DNA, 19 bp, Mus musculus
  siRNA target sequence for Cadps (NM_012061.1,1594-1612).
gaagtccaaggccttaagt

SEQ ID NO: 704187 - DNA, 19 bp, Mus musculus
  siRNA target sequence for Cadps (NM_012061.1,1613-1631).
ccttggctccaaatcgaat

SEQ ID NO: 704188 - DNA, 19 bp, Mus musculus
  siRNA target sequence for Cadps (NM_012061.1,1614-1632).
cttggctccaaatcgaatt

SEQ ID NO: 704189 - DNA, 19 bp, Mus musculus
  siRNA target sequence for Cadps (NM_012061.1,1617-1635).
ggctccaaatcgaattgta

SEQ ID NO: 704190 - DNA, 19 bp, Mus musculus
  siRNA target sequence for Cadps (NM_012061.1,1618-1636).
gctccaaatcgaattgtat

SEQ ID NO: 704191 - DNA, 19 bp, Mus musculus
  siRNA target sequence for Cadps (NM_012061.1,1619-1637).
ctccaaatcgaattgtata

SEQ ID NO: 704192 - DNA, 19 bp, Mus musculus
  siRNA target sequence for Cadps (NM_012061.1,1621-1639).
ccaaatcgaattgtatact

SEQ ID NO: 704193 - DNA, 19 bp, Mus musculus
  siRNA target sequence for Cadps (NM_012061.1,1739-1757).
cgctgccagctgttaaagt

SEQ ID NO: 704194 - DNA, 19 bp, Mus musculus
  siRNA target sequence for Cadps (NM_012061.1,1740-1758).
gctgccagctgttaaagta

SEQ ID NO: 704195 - DNA, 19 bp, Mus musculus
  siRNA target sequence for Cadps (NM_012061.1,1741-1759).
ctgccagctgttaaagtaa

SEQ ID NO: 704196 - DNA, 19 bp, Mus musculus
  siRNA target sequence for Cadps (NM_012061.1,1833-1851).
cccaaatagccccaaacaa

SEQ ID NO: 704197 - DNA, 19 bp, Mus musculus
  siRNA target sequence for Cadps (NM_012061.1,1912-1930).
cttgctgtccgaatggata

SEQ ID NO: 704198 - DNA, 19 bp, Mus musculus
  siRNA target sequence for Cadps (NM_012061.1,1922-1940).
gaatggataagcctcaaaa

SEQ ID NO: 704199 - DNA, 19 bp, Mus musculus
  siRNA target sequence for Cadps (NM_012061.1,2151-2169).
cttcttcaatgcagtcaaa

SEQ ID NO: 704200 - DNA, 19 bp, Mus musculus
  siRNA target sequence for Cadps (NM_012061.1,2154-2172).
cttcaatgcagtcaaagaa

SEQ ID NO: 704201 - DNA, 19 bp, Mus musculus
  siRNA target sequence for Cadps (NM_012061.1,2176-2194).
gacacggtgatatttgcaa

SEQ ID NO: 704202 - DNA, 19 bp, Mus musculus
  siRNA target sequence for Cadps (NM_012061.1,2181-2199).
ggtgatatttgcaagtgat

SEQ ID NO: 704203 - DNA, 19 bp, Mus musculus
  siRNA target sequence for Cadps (NM_012061.1,2323-2341).
gatgcccccatctcacaat

SEQ ID NO: 704204 - DNA, 19 bp, Mus musculus
  siRNA target sequence for Cadps (NM_012061.1,2326-2344).
gcccccatctcacaatttt

SEQ ID NO: 704205 - DNA, 19 bp, Mus musculus
  siRNA target sequence for Cadps (NM_012061.1,2364-2382).
gcatggcatggatgaattt

SEQ ID NO: 704206 - DNA, 19 bp, Mus musculus
  siRNA target sequence for Cadps (NM_012061.1,2365-2383).
catggcatggatgaattta

SEQ ID NO: 704207 - DNA, 19 bp, Mus musculus
  siRNA target sequence for Cadps (NM_012061.1,2387-2405).
cttccaacccctgtaactt

SEQ ID NO: 704208 - DNA, 19 bp, Mus musculus
  siRNA target sequence for Cadps (NM_012061.1,2410-2428).
cacgcttccctctttgaga

SEQ ID NO: 704209 - DNA, 19 bp, Mus musculus
  siRNA target sequence for Cadps (NM_012061.1,2520-2538).
gtattgcgccagaaatgga

SEQ ID NO: 704210 - DNA, 19 bp, Mus musculus
  siRNA target sequence for Cadps (NM_012061.1,2648-2666).
cgtcccatgtccatggtaa

SEQ ID NO: 704211 - DNA, 19 bp, Mus musculus
  siRNA target sequence for Cadps (NM_012061.1,2682-2700).
cggaactgtgactgttgaa

SEQ ID NO: 704212 - DNA, 19 bp, Mus musculus
  siRNA target sequence for Cadps (NM_012061.1,2707-2725).
gaacgctttgaagaaatca

SEQ ID NO: 704213 - DNA, 19 bp, Mus musculus
  siRNA target sequence for Cadps (NM_012061.1,2745-2763).
gctggaaaatcaaattaca

SEQ ID NO: 704214 - DNA, 19 bp, Mus musculus
  siRNA target sequence for Cadps (NM_012061.1,2769-2787).
caggtactgctttccattt

SEQ ID NO: 704215 - DNA, 19 bp, Mus musculus
  siRNA target sequence for Cadps (NM_012061.1,2824-2842).
ctcttggaacgggttttga

SEQ ID NO: 704216 - DNA, 19 bp, Mus musculus
  siRNA target sequence for Cadps (NM_012061.1,2829-2847).
ggaacgggttttgatgaaa

SEQ ID NO: 704217 - DNA, 19 bp, Mus musculus
  siRNA target sequence for Cadps (NM_012061.1,2928-2946).
ctcacgcctatctgagtat

SEQ ID NO: 704218 - DNA, 19 bp, Mus musculus
  siRNA target sequence for Cadps (NM_012061.1,3080-3098).
gtcttgctgaactagtcat

SEQ ID NO: 704219 - DNA, 19 bp, Mus musculus
  siRNA target sequence for Cadps (NM_012061.1,3143-3161).
cgtggtggtcagacttaat

SEQ ID NO: 704220 - DNA, 19 bp, Mus musculus
  siRNA target sequence for Cadps (NM_012061.1,3146-3164).
ggtggtcagacttaatggt

SEQ ID NO: 704221 - DNA, 19 bp, Mus musculus
  siRNA target sequence for Cadps (NM_012061.1,3276-3294).
ctttctccgtacagactat

SEQ ID NO: 704222 - DNA, 19 bp, Mus musculus
  siRNA target sequence for Cadps (NM_012061.1,3283-3301).
cgtacagactataatttgt

SEQ ID NO: 704223 - DNA, 19 bp, Mus musculus
  siRNA target sequence for Cadps (NM_012061.1,3302-3320).
gcaatggaaagtttcacaa

SEQ ID NO: 704224 - DNA, 19 bp, Mus musculus
  siRNA target sequence for Cadps (NM_012061.1,3333-3351).
cctgttcgccccacttgtt

SEQ ID NO: 704225 - DNA, 19 bp, Mus musculus
  siRNA target sequence for Cadps (NM_012061.1,3336-3354).
gttcgccccacttgttgtt

SEQ ID NO: 704226 - DNA, 19 bp, Mus musculus
  siRNA target sequence for Cadps (NM_012061.1,3341-3359).
ccccacttgttgttagata

SEQ ID NO: 704227 - DNA, 19 bp, Mus musculus
  siRNA target sequence for Cadps (NM_012061.1,3342-3360).
cccacttgttgttagatat

SEQ ID NO: 704228 - DNA, 19 bp, Mus musculus
  siRNA target sequence for Cadps (NM_012061.1,3375-3393).
gtcctccattgcacaatct

SEQ ID NO: 704229 - DNA, 19 bp, Mus musculus
  siRNA target sequence for Cadps (NM_012061.1,3377-3395).
cctccattgcacaatctat

SEQ ID NO: 704230 - DNA, 19 bp, Mus musculus
  siRNA target sequence for Cadps (NM_012061.1,3422-3440).
gggagccagtcaagagttt

SEQ ID NO: 704231 - DNA, 19 bp, Mus musculus
  siRNA target sequence for Cadps (NM_012061.1,3423-3441).
ggagccagtcaagagttta

SEQ ID NO: 704232 - DNA, 19 bp, Mus musculus
  siRNA target sequence for Cadps (NM_012061.1,3424-3442).
gagccagtcaagagtttaa

SEQ ID NO: 704233 - DNA, 19 bp, Mus musculus
  siRNA target sequence for Cadps (NM_012061.1,3435-3453).
gagtttaaccagtaaccta

SEQ ID NO: 704234 - DNA, 19 bp, Mus musculus
  siRNA target sequence for Cadps (NM_012061.1,3460-3478).
gtgaacctacccaatgtga

SEQ ID NO: 704235 - DNA, 19 bp, Mus musculus
  siRNA target sequence for Cadps (NM_012061.1,3558-3576).
gatggctgctatatatgat

SEQ ID NO: 704236 - DNA, 19 bp, Mus musculus
  siRNA target sequence for Cadps (NM_012061.1,3566-3584).
ctatatatgatgctgataa

SEQ ID NO: 704237 - DNA, 19 bp, Mus musculus
  siRNA target sequence for Cadps (NM_012061.1,3681-3699).
cttagagcagcggctaaaa

SEQ ID NO: 704238 - DNA, 19 bp, Mus musculus
  siRNA target sequence for Cadps (NM_012061.1,3706-3724).
gcaagtgacatgattgagt

SEQ ID NO: 704239 - DNA, 19 bp, Mus musculus
  siRNA target sequence for Cadps (NM_012061.1,3743-3761).
ggattgcatttgaagttaa

SEQ ID NO: 704240 - DNA, 19 bp, Mus musculus
  siRNA target sequence for Cadps (NM_012061.1,3757-3775).
gttaagctgcaaaaaacca

SEQ ID NO: 704241 - DNA, 19 bp, Mus musculus
  siRNA target sequence for Cadps (NM_012061.1,3793-3811).
cgagtcccacagtcaatat

SEQ ID NO: 704242 - DNA, 19 bp, Mus musculus
  siRNA target sequence for Cadps (NM_012061.1,3796-3814).
gtcccacagtcaatatgca

SEQ ID NO: 704243 - DNA, 19 bp, Mus musculus
  siRNA target sequence for Cadps (NM_012061.1,3806-3824).
caatatgcaccatgtttaa

SEQ ID NO: 704244 - DNA, 19 bp, Mus musculus
  siRNA target sequence for Cadps (NM_012061.1,3838-3856).
gccaaagctcaatcaacaa

SEQ ID NO: 704245 - DNA, 19 bp, Mus musculus
  siRNA target sequence for Cadps (NM_012061.1,3899-3917).
caaaaatagatgaactaat

SEQ ID NO: 704246 - DNA, 19 bp, Mus musculus
  siRNA target sequence for Cadps (NM_012061.1,3954-3972).
ggcaaagtttgtaactata

SEQ ID NO: 704247 - DNA, 19 bp, Mus musculus
  siRNA target sequence for Cadps (NM_012061.1,3955-3973).
gcaaagtttgtaactatat

SEQ ID NO: 704248 - DNA, 19 bp, Mus musculus
  siRNA target sequence for Cadps (NM_012061.1,3989-4007).
caaagttatccagatatga

SEQ ID NO: 704249 - DNA, 19 bp, Mus musculus
  siRNA target sequence for Cadps (NM_012061.1,4008-4026).
cgaggggactttgttttct

SEQ ID NO: 704250 - DNA, 19 bp, Mus musculus
  siRNA target sequence for Cadps (NM_012061.1,4047-4065).
gaaggcagcttccaagtat

SEQ ID NO: 704251 - DNA, 19 bp, Mus musculus
  siRNA target sequence for Cadps (NM_012061.1,4097-4115).
ccgacgcctacgtgacttt

SEQ ID NO: 704252 - DNA, 19 bp, Mus musculus
  siRNA target sequence for Cadps (NM_012061.1,4149-4167).
ggtcaatgaggagatgtat

SEQ ID NO: 704253 - DNA, 19 bp, Mus musculus
  siRNA target sequence for Cadps (NM_012061.1,4252-4270).
cacatttaccagctgaaaa

SEQ ID NO: 704254 - DNA, 19 bp, Mus musculus
  siRNA target sequence for Cadps (NM_012061.1,4271-4289).
ccctgatcaggatggtaaa

SEQ ID NO: 704255 - DNA, 19 bp, Mus musculus
  siRNA target sequence for Cadps (NM_012061.1,4284-4302).
ggtaaagaaaacctataga

SEQ ID NO: 704256 - DNA, 19 bp, Mus musculus
  siRNA target sequence for Cadps (NM_012061.1,4321-4339).
gtcctggattccaccttaa

SEQ ID NO: 704257 - DNA, 19 bp, Mus musculus
  siRNA target sequence for Bop1 (NM_013481.1,670-688).
ccagctgtggacttcttca

SEQ ID NO: 704258 - DNA, 19 bp, Mus musculus
  siRNA target sequence for Bop1 (NM_013481.1,725-743).
cagctgacaagcgtagttt

SEQ ID NO: 704259 - DNA, 19 bp, Mus musculus
  siRNA target sequence for Bop1 (NM_013481.1,727-745).
gctgacaagcgtagtttca

SEQ ID NO: 704260 - DNA, 19 bp, Mus musculus
  siRNA target sequence for Bop1 (NM_013481.1,728-746).
ctgacaagcgtagtttcat

SEQ ID NO: 704261 - DNA, 19 bp, Mus musculus
  siRNA target sequence for Bop1 (NM_013481.1,749-767).
catccctagttgaaaagga

SEQ ID NO: 704262 - DNA, 19 bp, Mus musculus
  siRNA target sequence for Bop1 (NM_013481.1,768-786).
gaaggtgtctcgaatggta

SEQ ID NO: 704263 - DNA, 19 bp, Mus musculus
  siRNA target sequence for Bop1 (NM_013481.1,929-947).
ctggccatgccgagtctta

SEQ ID NO: 704264 - DNA, 19 bp, Mus musculus
  siRNA target sequence for Bop1 (NM_013481.1,1101-1119).
gcgctgcctcgatttgtat

SEQ ID NO: 704265 - DNA, 19 bp, Mus musculus
  siRNA target sequence for Bop1 (NM_013481.1,1103-1121).
gctgcctcgatttgtatct

SEQ ID NO: 704266 - DNA, 19 bp, Mus musculus
  siRNA target sequence for Bop1 (NM_013481.1,1333-1351).
gccactgcccgctgtatga

SEQ ID NO: 704267 - DNA, 19 bp, Mus musculus
  siRNA target sequence for Bop1 (NM_013481.1,1334-1352).
ccactgcccgctgtatgaa

SEQ ID NO: 704268 - DNA, 19 bp, Mus musculus
  siRNA target sequence for Bop1 (NM_013481.1,1387-1405).
gcctggaaccccaatccta

SEQ ID NO: 704269 - DNA, 19 bp, Mus musculus
  siRNA target sequence for Bop1 (NM_013481.1,1392-1410).
gaaccccaatcctaccata

SEQ ID NO: 704270 - DNA, 19 bp, Mus musculus
  siRNA target sequence for Bop1 (NM_013481.1,1633-1651).
catgggcgaggggactatt

SEQ ID NO: 704271 - DNA, 19 bp, Mus musculus
  siRNA target sequence for Bop1 (NM_013481.1,1875-1893).
gtccagcatggctgtacat

SEQ ID NO: 704272 - DNA, 19 bp, Mus musculus
  siRNA target sequence for Bop1 (NM_013481.1,2026-2044).
cgatacccactctttgcat

SEQ ID NO: 704273 - DNA, 19 bp, Mus musculus
  siRNA target sequence for Bop1 (NM_013481.1,2076-2094).
ccatggcatggtgtacaat

SEQ ID NO: 704274 - DNA, 19 bp, Mus musculus
  siRNA target sequence for Cd84 (NM_013489.1,124-142).
gcagacccggtggtaatga

SEQ ID NO: 704275 - DNA, 19 bp, Mus musculus
  siRNA target sequence for Cd84 (NM_013489.1,125-143).
cagacccggtggtaatgaa

SEQ ID NO: 704276 - DNA, 19 bp, Mus musculus
  siRNA target sequence for Cd84 (NM_013489.1,167-185).
ctttcctcttaaatattca

SEQ ID NO: 704277 - DNA, 19 bp, Mus musculus
  siRNA target sequence for Cd84 (NM_013489.1,207-225).
cattgcctggacttctcaa

SEQ ID NO: 704278 - DNA, 19 bp, Mus musculus
  siRNA target sequence for Cd84 (NM_013489.1,216-234).
gacttctcaatcatctgtt

SEQ ID NO: 704279 - DNA, 19 bp, Mus musculus
  siRNA target sequence for Cd84 (NM_013489.1,253-271).
gtcaataaagctgaagtta

SEQ ID NO: 704280 - DNA, 19 bp, Mus musculus
  siRNA target sequence for Cd84 (NM_013489.1,273-291).
cataacccagggcacttat

SEQ ID NO: 704281 - DNA, 19 bp, Mus musculus
  siRNA target sequence for Cd84 (NM_013489.1,287-305).
cttataaaggacgaataga

SEQ ID NO: 704282 - DNA, 19 bp, Mus musculus
  siRNA target sequence for Cd84 (NM_013489.1,429-447).
ctaccgtcgacttaaaaca

SEQ ID NO: 704283 - DNA, 19 bp, Mus musculus
  siRNA target sequence for Cd84 (NM_013489.1,468-486).
gatatcatctttgaacaat

SEQ ID NO: 704284 - DNA, 19 bp, Mus musculus
  siRNA target sequence for Cd84 (NM_013489.1,483-501).
caatacctgtaatatcaca

SEQ ID NO: 704285 - DNA, 19 bp, Mus musculus
  siRNA target sequence for Cd84 (NM_013489.1,591-609).
ctcccccatggaccaaaaa

SEQ ID NO: 704286 - DNA, 19 bp, Mus musculus
  siRNA target sequence for Cd84 (NM_013489.1,604-622).
caaaaactgacctacacat

SEQ ID NO: 704287 - DNA, 19 bp, Mus musculus
  siRNA target sequence for Cd84 (NM_013489.1,728-746).
gattggccgtgctctttct

SEQ ID NO: 704288 - DNA, 19 bp, Mus musculus
  siRNA target sequence for Cd84 (NM_013489.1,734-752).
ccgtgctctttctgcttat

SEQ ID NO: 704289 - DNA, 19 bp, Mus musculus
  siRNA target sequence for Cd84 (NM_013489.1,760-778).
ccgatgttggcatttctgt

SEQ ID NO: 704290 - DNA, 19 bp, Mus musculus
  siRNA target sequence for Cd84 (NM_013489.1,777-795).
gttccgtttgtataagaga

SEQ ID NO: 704291 - DNA, 19 bp, Mus musculus
  siRNA target sequence for Cd84 (NM_013489.1,820-838).
gcagatgatgtctcaaaga

SEQ ID NO: 704292 - DNA, 19 bp, Mus musculus
  siRNA target sequence for Cd84 (NM_013489.1,882-900).
gtccagaatctatgatgaa

SEQ ID NO: 704293 - DNA, 19 bp, Mus musculus
  siRNA target sequence for Cd84 (NM_013489.1,934-952).
gatccggtgaccaccattt

SEQ ID NO: 704294 - DNA, 19 bp, Mus musculus
  siRNA target sequence for Cd84 (NM_013489.1,937-955).
ccggtgaccaccatttatt

SEQ ID NO: 704295 - DNA, 19 bp, Mus musculus
  siRNA target sequence for Cd84 (NM_013489.1,940-958).
gtgaccaccatttattcct

SEQ ID NO: 704296 - DNA, 19 bp, Mus musculus
  siRNA target sequence for Cd84 (NM_013489.1,1013-1031).
ctaaggctttgggtaatga

SEQ ID NO: 704297 - DNA, 19 bp, Mus musculus
  siRNA target sequence for Eif4g2 (NM_013507.2,356-374).
gggtgcttctcgtttcagt

SEQ ID NO: 704298 - DNA, 19 bp, Mus musculus
  siRNA target sequence for Eif4g2 (NM_013507.2,465-483).
caaaacgctcagaaatgga

SEQ ID NO: 704299 - DNA, 19 bp, Mus musculus
  siRNA target sequence for Eif4g2 (NM_013507.2,558-576).
gcaatcttcaggaaagtaa

SEQ ID NO: 704300 - DNA, 19 bp, Mus musculus
  siRNA target sequence for Eif4g2 (NM_013507.2,579-597).
ggcatactaaataagctta

SEQ ID NO: 704301 - DNA, 19 bp, Mus musculus
  siRNA target sequence for Eif4g2 (NM_013507.2,642-660).
ggtgtagagtctaaactca

SEQ ID NO: 704302 - DNA, 19 bp, Mus musculus
  siRNA target sequence for Eif4g2 (NM_013507.2,643-661).
gtgtagagtctaaactcat

SEQ ID NO: 704303 - DNA, 19 bp, Mus musculus
  siRNA target sequence for Eif4g2 (NM_013507.2,670-688).
gggtcatactgctgattgt

SEQ ID NO: 704304 - DNA, 19 bp, Mus musculus
  siRNA target sequence for Eif4g2 (NM_013507.2,751-769).
cagaagatgcaccaaactt

SEQ ID NO: 704305 - DNA, 19 bp, Mus musculus
  siRNA target sequence for Eif4g2 (NM_013507.2,817-835).
cattcagacgcctcttgat

SEQ ID NO: 704306 - DNA, 19 bp, Mus musculus
  siRNA target sequence for Eif4g2 (NM_013507.2,838-856).
ccaaattgcaagatgaatt

SEQ ID NO: 704307 - DNA, 19 bp, Mus musculus
  siRNA target sequence for Eif4g2 (NM_013507.2,989-1007).
gcttgatcttattcatgaa

SEQ ID NO: 704308 - DNA, 19 bp, Mus musculus
  siRNA target sequence for Eif4g2 (NM_013507.2,1024-1042).
gcatcaaaacacttttgga

SEQ ID NO: 704309 - DNA, 19 bp, Mus musculus
  siRNA target sequence for Eif4g2 (NM_013507.2,1049-1067).
gaagagagtccaactcaaa

SEQ ID NO: 704310 - DNA, 19 bp, Mus musculus
  siRNA target sequence for Eif4g2 (NM_013507.2,1109-1127).
gacagtgggacctcgatta

SEQ ID NO: 704311 - DNA, 19 bp, Mus musculus
  siRNA target sequence for Eif4g2 (NM_013507.2,1111-1129).
cagtgggacctcgattaga

SEQ ID NO: 704312 - DNA, 19 bp, Mus musculus
  siRNA target sequence for Eif4g2 (NM_013507.2,1148-1166).
cttaatggatcagtacttt

SEQ ID NO: 704313 - DNA, 19 bp, Mus musculus
  siRNA target sequence for Eif4g2 (NM_013507.2,1160-1178).
gtactttgccagaatgtgt

SEQ ID NO: 704314 - DNA, 19 bp, Mus musculus
  siRNA target sequence for Eif4g2 (NM_013507.2,1220-1238).
cctactgcaggatactgta

SEQ ID NO: 704315 - DNA, 19 bp, Mus musculus
  siRNA target sequence for Eif4g2 (NM_013507.2,1264-1282).
ctcgcaaggcttttcttga

SEQ ID NO: 704316 - DNA, 19 bp, Mus musculus
  siRNA target sequence for Eif4g2 (NM_013507.2,1291-1309).
caaagacgatcaatcaaat

SEQ ID NO: 704317 - DNA, 19 bp, Mus musculus
  siRNA target sequence for Eif4g2 (NM_013507.2,1301-1319).
caatcaaatccgtcaagat

SEQ ID NO: 704318 - DNA, 19 bp, Mus musculus
  siRNA target sequence for Eif4g2 (NM_013507.2,1310-1328).
ccgtcaagatgcagtaaaa

SEQ ID NO: 704319 - DNA, 19 bp, Mus musculus
  siRNA target sequence for Eif4g2 (NM_013507.2,1312-1330).
gtcaagatgcagtaaaaga

SEQ ID NO: 704320 - DNA, 19 bp, Mus musculus
  siRNA target sequence for Eif4g2 (NM_013507.2,1397-1415).
catgccgccaaggatgaaa

SEQ ID NO: 704321 - DNA, 19 bp, Mus musculus
  siRNA target sequence for Eif4g2 (NM_013507.2,1435-1453).
ggggacttgctgatatgtt

SEQ ID NO: 704322 - DNA, 19 bp, Mus musculus
  siRNA target sequence for Eif4g2 (NM_013507.2,1436-1454).
gggacttgctgatatgttt

SEQ ID NO: 704323 - DNA, 19 bp, Mus musculus
  siRNA target sequence for Eif4g2 (NM_013507.2,1464-1482).
ccaggtagtggaattggta

SEQ ID NO: 704324 - DNA, 19 bp, Mus musculus
  siRNA target sequence for Eif4g2 (NM_013507.2,1480-1498).
gtactggtccaggagttat

SEQ ID NO: 704325 - DNA, 19 bp, Mus musculus
  siRNA target sequence for Eif4g2 (NM_013507.2,1483-1501).
ctggtccaggagttatcca

SEQ ID NO: 704326 - DNA, 19 bp, Mus musculus
  siRNA target sequence for Eif4g2 (NM_013507.2,1491-1509).
ggagttatccaggatagat

SEQ ID NO: 704327 - DNA, 19 bp, Mus musculus
  siRNA target sequence for Eif4g2 (NM_013507.2,1492-1510).
gagttatccaggatagatt

SEQ ID NO: 704328 - DNA, 19 bp, Mus musculus
  siRNA target sequence for Eif4g2 (NM_013507.2,1523-1541).
gggacgtcatcgttcaaat

SEQ ID NO: 704329 - DNA, 19 bp, Mus musculus
  siRNA target sequence for Eif4g2 (NM_013507.2,1680-1698).
caaggacagtcgaaggata

SEQ ID NO: 704330 - DNA, 19 bp, Mus musculus
  siRNA target sequence for Eif4g2 (NM_013507.2,1714-1732).
ctaagaaaggacagcttaa

SEQ ID NO: 704331 - DNA, 19 bp, Mus musculus
  siRNA target sequence for Eif4g2 (NM_013507.2,1755-1773).
cctgctcagtcgtttctaa

SEQ ID NO: 704332 - DNA, 19 bp, Mus musculus
  siRNA target sequence for Eif4g2 (NM_013507.2,1756-1774).
ctgctcagtcgtttctaat

SEQ ID NO: 704333 - DNA, 19 bp, Mus musculus
  siRNA target sequence for Eif4g2 (NM_013507.2,1761-1779).
cagtcgtttctaatgaata

SEQ ID NO: 704334 - DNA, 19 bp, Mus musculus
  siRNA target sequence for Eif4g2 (NM_013507.2,1802-1820).
gccccagataactatgatt

SEQ ID NO: 704335 - DNA, 19 bp, Mus musculus
  siRNA target sequence for Eif4g2 (NM_013507.2,1872-1890).
cctcaacttggtctcaaaa

SEQ ID NO: 704336 - DNA, 19 bp, Mus musculus
  siRNA target sequence for Eif4g2 (NM_013507.2,1875-1893).
caacttggtctcaaaacta

SEQ ID NO: 704337 - DNA, 19 bp, Mus musculus
  siRNA target sequence for Eif4g2 (NM_013507.2,1891-1909).
ctaatccaccacttatcca

SEQ ID NO: 704338 - DNA, 19 bp, Mus musculus
  siRNA target sequence for Eif4g2 (NM_013507.2,1917-1935).
cctgccaagactagcaaaa

SEQ ID NO: 704339 - DNA, 19 bp, Mus musculus
  siRNA target sequence for Eif4g2 (NM_013507.2,1918-1936).
ctgccaagactagcaaaaa

SEQ ID NO: 704340 - DNA, 19 bp, Mus musculus
  siRNA target sequence for Eif4g2 (NM_013507.2,1978-1996).
ccgttgtgactgactatct

SEQ ID NO: 704341 - DNA, 19 bp, Mus musculus
  siRNA target sequence for Eif4g2 (NM_013507.2,1980-1998).
gttgtgactgactatctga

SEQ ID NO: 704342 - DNA, 19 bp, Mus musculus
  siRNA target sequence for Eif4g2 (NM_013507.2,2022-2040).
gtcagtggtgtgagagaaa

SEQ ID NO: 704343 - DNA, 19 bp, Mus musculus
  siRNA target sequence for Eif4g2 (NM_013507.2,2084-2102).
gatcatcctgtcacttgat

SEQ ID NO: 704344 - DNA, 19 bp, Mus musculus
  siRNA target sequence for Eif4g2 (NM_013507.2,2090-2108).
cctgtcacttgatagaagt

SEQ ID NO: 704345 - DNA, 19 bp, Mus musculus
  siRNA target sequence for Eif4g2 (NM_013507.2,2134-2152).
ctttaatcagtttactcaa

SEQ ID NO: 704346 - DNA, 19 bp, Mus musculus
  siRNA target sequence for Eif4g2 (NM_013507.2,2232-2250).
gacatccccttggtgaaat

SEQ ID NO: 704347 - DNA, 19 bp, Mus musculus
  siRNA target sequence for Eif4g2 (NM_013507.2,2238-2256).
cccttggtgaaatcttact

SEQ ID NO: 704348 - DNA, 19 bp, Mus musculus
  siRNA target sequence for Eif4g2 (NM_013507.2,2239-2257).
ccttggtgaaatcttactt

SEQ ID NO: 704349 - DNA, 19 bp, Mus musculus
  siRNA target sequence for Eif4g2 (NM_013507.2,2264-2282).
gtttgcagctcgtgctata

SEQ ID NO: 704350 - DNA, 19 bp, Mus musculus
  siRNA target sequence for Eif4g2 (NM_013507.2,2382-2400).
caagaccgagagtggttaa

SEQ ID NO: 704351 - DNA, 19 bp, Mus musculus
  siRNA target sequence for Eif4g2 (NM_013507.2,2391-2409).
gagtggttaaccgaacttt

SEQ ID NO: 704352 - DNA, 19 bp, Mus musculus
  siRNA target sequence for Eif4g2 (NM_013507.2,2393-2411).
gtggttaaccgaacttttt

SEQ ID NO: 704353 - DNA, 19 bp, Mus musculus
  siRNA target sequence for Eif4g2 (NM_013507.2,2395-2413).
ggttaaccgaactttttca

SEQ ID NO: 704354 - DNA, 19 bp, Mus musculus
  siRNA target sequence for Eif4g2 (NM_013507.2,2396-2414).
gttaaccgaactttttcaa

SEQ ID NO: 704355 - DNA, 19 bp, Mus musculus
  siRNA target sequence for Eif4g2 (NM_013507.2,2466-2484).
gatcgaatgttggagattt

SEQ ID NO: 704356 - DNA, 19 bp, Mus musculus
  siRNA target sequence for Eif4g2 (NM_013507.2,2558-2576).
ggatccatcccctcaaact

SEQ ID NO: 704357 - DNA, 19 bp, Mus musculus
  siRNA target sequence for Eif4g2 (NM_013507.2,2559-2577).
gatccatcccctcaaacta

SEQ ID NO: 704358 - DNA, 19 bp, Mus musculus
  siRNA target sequence for Eif4g2 (NM_013507.2,2562-2580).
ccatcccctcaaactatat

SEQ ID NO: 704359 - DNA, 19 bp, Mus musculus
  siRNA target sequence for Eif4g2 (NM_013507.2,2563-2581).
catcccctcaaactatata

SEQ ID NO: 704360 - DNA, 19 bp, Mus musculus
  siRNA target sequence for Eif4g2 (NM_013507.2,2603-2621).
ctctcccaaacttcatgta

SEQ ID NO: 704361 - DNA, 19 bp, Mus musculus
  siRNA target sequence for Eif4g2 (NM_013507.2,2607-2625).
cccaaacttcatgtagata

SEQ ID NO: 704362 - DNA, 19 bp, Mus musculus
  siRNA target sequence for Eif4g2 (NM_013507.2,2608-2626).
ccaaacttcatgtagataa

SEQ ID NO: 704363 - DNA, 19 bp, Mus musculus
  siRNA target sequence for Eif4g2 (NM_013507.2,2609-2627).
caaacttcatgtagataaa

SEQ ID NO: 704364 - DNA, 19 bp, Mus musculus
  siRNA target sequence for Eif4g2 (NM_013507.2,2657-2675).
cttacagtacatttctagt

SEQ ID NO: 704365 - DNA, 19 bp, Mus musculus
  siRNA target sequence for Eif4g2 (NM_013507.2,2684-2702).
cccacccagcgatgaaaca

SEQ ID NO: 704366 - DNA, 19 bp, Mus musculus
  siRNA target sequence for Eif4g2 (NM_013507.2,2690-2708).
cagcgatgaaacagattct

SEQ ID NO: 704367 - DNA, 19 bp, Mus musculus
  siRNA target sequence for Eif4g2 (NM_013507.2,2827-2845).
ctttgcaggtgcactgtta

SEQ ID NO: 704368 - DNA, 19 bp, Mus musculus
  siRNA target sequence for Eif4g2 (NM_013507.2,2865-2883).
ggcatgttacttcgatttt

SEQ ID NO: 704369 - DNA, 19 bp, Mus musculus
  siRNA target sequence for Eif4g2 (NM_013507.2,2866-2884).
gcatgttacttcgattttt

SEQ ID NO: 704370 - DNA, 19 bp, Mus musculus
  siRNA target sequence for Eif4g2 (NM_013507.2,2867-2885).
catgttacttcgatttttt

SEQ ID NO: 704371 - DNA, 19 bp, Mus musculus
  siRNA target sequence for Eif4g2 (NM_013507.2,2916-2934).
gaggaagctttcttagctt

SEQ ID NO: 704372 - DNA, 19 bp, Mus musculus
  siRNA target sequence for Eif4g2 (NM_013507.2,2931-2949).
gcttggaaggaagacataa

SEQ ID NO: 704373 - DNA, 19 bp, Mus musculus
  siRNA target sequence for Frg1 (NM_013522.1,120-138).
gccgaatattcctatgtaa

SEQ ID NO: 704374 - DNA, 19 bp, Mus musculus
  siRNA target sequence for Frg1 (NM_013522.1,152-170).
cgtgctcaagggcactaaa

SEQ ID NO: 704375 - DNA, 19 bp, Mus musculus
  siRNA target sequence for Frg1 (NM_013522.1,163-181).
gcactaaagccaagagtaa

SEQ ID NO: 704376 - DNA, 19 bp, Mus musculus
  siRNA target sequence for Frg1 (NM_013522.1,164-182).
cactaaagccaagagtaaa

SEQ ID NO: 704377 - DNA, 19 bp, Mus musculus
  siRNA target sequence for Frg1 (NM_013522.1,224-242).
cgaggagacccaacttgat

SEQ ID NO: 704378 - DNA, 19 bp, Mus musculus
  siRNA target sequence for Frg1 (NM_013522.1,227-245).
ggagacccaacttgatatt

SEQ ID NO: 704379 - DNA, 19 bp, Mus musculus
  siRNA target sequence for Frg1 (NM_013522.1,288-306).
ggaactattgccattgaaa

SEQ ID NO: 704380 - DNA, 19 bp, Mus musculus
  siRNA target sequence for Frg1 (NM_013522.1,289-307).
gaactattgccattgaaat

SEQ ID NO: 704381 - DNA, 19 bp, Mus musculus
  siRNA target sequence for Frg1 (NM_013522.1,446-464).
gtctggctatggaaaatat

SEQ ID NO: 704382 - DNA, 19 bp, Mus musculus
  siRNA target sequence for Frg1 (NM_013522.1,557-575).
ggctttactggcctcaaat

SEQ ID NO: 704383 - DNA, 19 bp, Mus musculus
  siRNA target sequence for Frg1 (NM_013522.1,558-576).
gctttactggcctcaaata

SEQ ID NO: 704384 - DNA, 19 bp, Mus musculus
  siRNA target sequence for Frg1 (NM_013522.1,567-585).
gcctcaaatagctgcttta

SEQ ID NO: 704385 - DNA, 19 bp, Mus musculus
  siRNA target sequence for Frg1 (NM_013522.1,604-622).
gcgatatagaagcaaagaa

SEQ ID NO: 704386 - DNA, 19 bp, Mus musculus
  siRNA target sequence for Frg1 (NM_013522.1,605-623).
cgatatagaagcaaagaat

SEQ ID NO: 704387 - DNA, 19 bp, Mus musculus
  siRNA target sequence for Frg1 (NM_013522.1,664-682).
gtgcggaaagagaaaccaa

SEQ ID NO: 704388 - DNA, 19 bp, Mus musculus
  siRNA target sequence for Frg1 (NM_013522.1,725-743).
gcagtgtgaaatcaactat

SEQ ID NO: 704389 - DNA, 19 bp, Mus musculus
  siRNA target sequence for Frg1 (NM_013522.1,728-746).
gtgtgaaatcaactatgta

SEQ ID NO: 704390 - DNA, 19 bp, Mus musculus
  siRNA target sequence for Frg1 (NM_013522.1,737-755).
caactatgtaaagaaattt

SEQ ID NO: 704391 - DNA, 19 bp, Mus musculus
  siRNA target sequence for Frg1 (NM_013522.1,768-786).
gaccacaaactcaaaataa

SEQ ID NO: 704392 - DNA, 19 bp, Mus musculus
  siRNA target sequence for Frg1 (NM_013522.1,815-833).
ggctcggaaagatggattt

SEQ ID NO: 704393 - DNA, 19 bp, Mus musculus
  siRNA target sequence for Frg1 (NM_013522.1,816-834).
gctcggaaagatggatttt

SEQ ID NO: 704394 - DNA, 19 bp, Mus musculus
  siRNA target sequence for Frg1 (NM_013522.1,817-835).
ctcggaaagatggattttt

SEQ ID NO: 704395 - DNA, 19 bp, Mus musculus
  siRNA target sequence for Frg1 (NM_013522.1,852-870).
gacaggagagccaaattga

SEQ ID NO: 704396 - DNA, 19 bp, Mus musculus
  siRNA target sequence for Fut7 (NM_013524.1,741-759).
ctggaggagcaacattcat

SEQ ID NO: 704397 - DNA, 19 bp, Mus musculus
  siRNA target sequence for Fut7 (NM_013524.1,746-764).
ggagcaacattcatggtaa

SEQ ID NO: 704398 - DNA, 19 bp, Mus musculus
  siRNA target sequence for Fut7 (NM_013524.1,747-765).
gagcaacattcatggtaat

SEQ ID NO: 704399 - DNA, 19 bp, Mus musculus
  siRNA target sequence for Fut7 (NM_013524.1,753-771).
cattcatggtaatttggtt

SEQ ID NO: 704400 - DNA, 19 bp, Mus musculus
  siRNA target sequence for Fut7 (NM_013524.1,1045-1063).
catggaatcgcccagtaat

SEQ ID NO: 704401 - DNA, 19 bp, Mus musculus
  siRNA target sequence for Fut7 (NM_013524.1,1108-1126).
gagctatcggcgtgattca

SEQ ID NO: 704402 - DNA, 19 bp, Mus musculus
  siRNA target sequence for Fut7 (NM_013524.1,1116-1134).
ggcgtgattcagatatctt

SEQ ID NO: 704403 - DNA, 19 bp, Mus musculus
  siRNA target sequence for Fut7 (NM_013524.1,1117-1135).
gcgtgattcagatatcttt

SEQ ID NO: 704404 - DNA, 19 bp, Mus musculus
  siRNA target sequence for Fut7 (NM_013524.1,1119-1137).
gtgattcagatatctttgt

SEQ ID NO: 704405 - DNA, 19 bp, Mus musculus
  siRNA target sequence for Fut7 (NM_013524.1,1178-1196).
ccactaccggccaaaagca

SEQ ID NO: 704406 - DNA, 19 bp, Mus musculus
  siRNA target sequence for Fut7 (NM_013524.1,1311-1329).
ccctatgcgctaattgtct

SEQ ID NO: 704407 - DNA, 19 bp, Mus musculus
  siRNA target sequence for Fut7 (NM_013524.1,1464-1482).
ccacctacgaggcttttgt

SEQ ID NO: 704408 - DNA, 19 bp, Mus musculus
  siRNA target sequence for Fut7 (NM_013524.1,1485-1503).
caccagatgcctttgtaca

SEQ ID NO: 704409 - DNA, 19 bp, Mus musculus
  siRNA target sequence for Fut7 (NM_013524.1,1540-1558).
cttcctcgtcagcatgaat

SEQ ID NO: 704410 - DNA, 19 bp, Mus musculus
  siRNA target sequence for Fut7 (NM_013524.1,1555-1573).
gaatgagagtcgttatcgt

SEQ ID NO: 704411 - DNA, 19 bp, Mus musculus
  siRNA target sequence for Fut7 (NM_013524.1,1647-1665).
gtgcccgctacccttactt

SEQ ID NO: 704412 - DNA, 19 bp, Mus musculus
  siRNA target sequence for Fut7 (NM_013524.1,1669-1687).
ccgcagccaggtctatgaa

SEQ ID NO: 704413 - DNA, 19 bp, Mus musculus
  siRNA target sequence for Gas5 (NM_013525.1,123-141).
gtcaggaagctggataaca

SEQ ID NO: 704414 - DNA, 19 bp, Mus musculus
  siRNA target sequence for Gas5 (NM_013525.1,149-167).
cgcaatgtgctagaataga

SEQ ID NO: 704415 - DNA, 19 bp, Mus musculus
  siRNA target sequence for Gas5 (NM_013525.1,195-213).
gaggctggatagacagttt

SEQ ID NO: 704416 - DNA, 19 bp, Mus musculus
  siRNA target sequence for Gas5 (NM_013525.1,198-216).
gctggatagacagtttgaa

SEQ ID NO: 704417 - DNA, 19 bp, Mus musculus
  siRNA target sequence for Gas5 (NM_013525.1,202-220).
gatagacagtttgaaagtt

SEQ ID NO: 704418 - DNA, 19 bp, Mus musculus
  siRNA target sequence for Gdf7 (NM_013527.1,268-286).
gtgccacaccacttcatga

SEQ ID NO: 704419 - DNA, 19 bp, Mus musculus
  siRNA target sequence for Gdf7 (NM_013527.1,343-361).
gggcgtgtggacacaatca

SEQ ID NO: 704420 - DNA, 19 bp, Mus musculus
  siRNA target sequence for Gdf7 (NM_013527.1,649-667).
cgagcctcccgcaagttct

SEQ ID NO: 704421 - DNA, 19 bp, Mus musculus
  siRNA target sequence for Gdf7 (NM_013527.1,797-815).
cctcccgtacgcaaaggaa

SEQ ID NO: 704422 - DNA, 19 bp, Mus musculus
  siRNA target sequence for Gdf7 (NM_013527.1,798-816).
ctcccgtacgcaaaggaaa

SEQ ID NO: 704423 - DNA, 19 bp, Mus musculus
  siRNA target sequence for Gdf7 (NM_013527.1,802-820).
cgtacgcaaaggaaagaga

SEQ ID NO: 704424 - DNA, 19 bp, Mus musculus
  siRNA target sequence for Gdf7 (NM_013527.1,1088-1106).
cactgcacgtggactttaa

SEQ ID NO: 704425 - DNA, 19 bp, Mus musculus
  siRNA target sequence for Gdf7 (NM_013527.1,1127-1145).
ggatcatcgcgccattaga

SEQ ID NO: 704426 - DNA, 19 bp, Mus musculus
  siRNA target sequence for Grcc10 (NM_013535.1,165-183).
cctggcggaggtgattcaa

SEQ ID NO: 704427 - DNA, 19 bp, Mus musculus
  siRNA target sequence for Grcc10 (NM_013535.1,216-234).
ggacgaggctagagacaat

SEQ ID NO: 704428 - DNA, 19 bp, Mus musculus
  siRNA target sequence for Grcc10 (NM_013535.1,229-247).
gacaatgcgtgcaacgata

SEQ ID NO: 704429 - DNA, 19 bp, Mus musculus
  siRNA target sequence for Grcc10 (NM_013535.1,249-267).
gggcaagatgctgcaattt

SEQ ID NO: 704430 - DNA, 19 bp, Mus musculus
  siRNA target sequence for Grcc10 (NM_013535.1,288-306).
gatccaacaagaggttatt

SEQ ID NO: 704431 - DNA, 19 bp, Mus musculus
  siRNA target sequence for Grcc10 (NM_013535.1,291-309).
ccaacaagaggttattaaa

SEQ ID NO: 704432 - DNA, 19 bp, Mus musculus
  siRNA target sequence for Grcc10 (NM_013535.1,331-349).
ggggaaggtgtccttaagt

SEQ ID NO: 704433 - DNA, 19 bp, Mus musculus
  siRNA target sequence for Grcc10 (NM_013535.1,356-374).
gcctggtcaagtcttatga

SEQ ID NO: 704434 - DNA, 19 bp, Mus musculus
  siRNA target sequence for Cdca3 (NM_013538.3,166-184).
catccagcgcactcctatt

SEQ ID NO: 704435 - DNA, 19 bp, Mus musculus
  siRNA target sequence for Cdca3 (NM_013538.3,285-303).
cacggacacccatgaagat

SEQ ID NO: 704436 - DNA, 19 bp, Mus musculus
  siRNA target sequence for Cdca3 (NM_013538.3,360-378).
cagaagcgtcggaatcgat

SEQ ID NO: 704437 - DNA, 19 bp, Mus musculus
  siRNA target sequence for Cdca3 (NM_013538.3,362-380).
gaagcgtcggaatcgattt

SEQ ID NO: 704438 - DNA, 19 bp, Mus musculus
  siRNA target sequence for Cdca3 (NM_013538.3,365-383).
gcgtcggaatcgatttcct

SEQ ID NO: 704439 - DNA, 19 bp, Mus musculus
  siRNA target sequence for Cdca3 (NM_013538.3,404-422).
cgggaaacgcctttatttt

SEQ ID NO: 704440 - DNA, 19 bp, Mus musculus
  siRNA target sequence for Cdca3 (NM_013538.3,497-515).
gatcccaaacaggtgttta

SEQ ID NO: 704441 - DNA, 19 bp, Mus musculus
  siRNA target sequence for Cdca3 (NM_013538.3,742-760).
cgttaaggacctaaaggaa

SEQ ID NO: 704442 - DNA, 19 bp, Mus musculus
  siRNA target sequence for Cdca3 (NM_013538.3,774-792).
gaactggaagatttctcaa

SEQ ID NO: 704443 - DNA, 19 bp, Mus musculus
  siRNA target sequence for H2-Ke6 (NM_013543.1,266-284).
gaagtgcaggcctgctttt

SEQ ID NO: 704444 - DNA, 19 bp, Mus musculus
  siRNA target sequence for H2-Ke6 (NM_013543.1,318-336).
gcatcacacgcgatgagtt

SEQ ID NO: 704445 - DNA, 19 bp, Mus musculus
  siRNA target sequence for H2-Ke6 (NM_013543.1,319-337).
catcacacgcgatgagttt

SEQ ID NO: 704446 - DNA, 19 bp, Mus musculus
  siRNA target sequence for H2-Ke6 (NM_013543.1,416-434).
gcagcccaggctttagtgt

SEQ ID NO: 704447 - DNA, 19 bp, Mus musculus
  siRNA target sequence for H2-Ke6 (NM_013543.1,444-462).
gtcgtggctccatcatcaa

SEQ ID NO: 704448 - DNA, 19 bp, Mus musculus
  siRNA target sequence for H2-Ke6 (NM_013543.1,489-507).
ggaatatcggacaaacgaa

SEQ ID NO: 704449 - DNA, 19 bp, Mus musculus
  siRNA target sequence for H2-Ke6 (NM_013543.1,490-508).
gaatatcggacaaacgaat

SEQ ID NO: 704450 - DNA, 19 bp, Mus musculus
  siRNA target sequence for H2-Ke6 (NM_013543.1,570-588).
gacatggaatccgatgtaa

SEQ ID NO: 704451 - DNA, 19 bp, Mus musculus
  siRNA target sequence for H2-Ke6 (NM_013543.1,596-614).
ctcccagggttcattgcaa

SEQ ID NO: 704452 - DNA, 19 bp, Mus musculus
  siRNA target sequence for H2-Ke6 (NM_013543.1,615-633).
cgcccatgacccagaaaat

SEQ ID NO: 704453 - DNA, 19 bp, Mus musculus
  siRNA target sequence for H2-Ke6 (NM_013543.1,652-670).
caaggtaactgcaatgatt

SEQ ID NO: 704454 - DNA, 19 bp, Mus musculus
  siRNA target sequence for H2-Ke6 (NM_013543.1,734-752).
gaagacagtggatacatca

SEQ ID NO: 704455 - DNA, 19 bp, Mus musculus
  siRNA target sequence for Ifrd1 (NM_013562.1,439-457).
gacttagagtacaagttga

SEQ ID NO: 704456 - DNA, 19 bp, Mus musculus
  siRNA target sequence for Ifrd1 (NM_013562.1,471-489).
cctaacccttgataagagt

SEQ ID NO: 704457 - DNA, 19 bp, Mus musculus
  siRNA target sequence for Ifrd1 (NM_013562.1,481-499).
gataagagtgcgaagacaa

SEQ ID NO: 704458 - DNA, 19 bp, Mus musculus
  siRNA target sequence for Ifrd1 (NM_013562.1,564-582).
cgagagaagaatgacttta

SEQ ID NO: 704459 - DNA, 19 bp, Mus musculus
  siRNA target sequence for Ifrd1 (NM_013562.1,576-594).
gactttaactgatagcatt

SEQ ID NO: 704460 - DNA, 19 bp, Mus musculus
  siRNA target sequence for Ifrd1 (NM_013562.1,591-609).
cattgagcgctgtctgaaa

SEQ ID NO: 704461 - DNA, 19 bp, Mus musculus
  siRNA target sequence for Ifrd1 (NM_013562.1,597-615).
gcgctgtctgaaaaaagga

SEQ ID NO: 704462 - DNA, 19 bp, Mus musculus
  siRNA target sequence for Ifrd1 (NM_013562.1,646-664).
gtcgcatctgttctttgta

SEQ ID NO: 704463 - DNA, 19 bp, Mus musculus
  siRNA target sequence for Ifrd1 (NM_013562.1,707-725).
ctcttggaccaatcctaaa

SEQ ID NO: 704464 - DNA, 19 bp, Mus musculus
  siRNA target sequence for Ifrd1 (NM_013562.1,713-731).
gaccaatcctaaaaaaaat

SEQ ID NO: 704465 - DNA, 19 bp, Mus musculus
  siRNA target sequence for Ifrd1 (NM_013562.1,836-854).
ctctggaatgcttcgaaaa

SEQ ID NO: 704466 - DNA, 19 bp, Mus musculus
  siRNA target sequence for Ifrd1 (NM_013562.1,838-856).
ctggaatgcttcgaaaata

SEQ ID NO: 704467 - DNA, 19 bp, Mus musculus
  siRNA target sequence for Ifrd1 (NM_013562.1,841-859).
gaatgcttcgaaaatatct

SEQ ID NO: 704468 - DNA, 19 bp, Mus musculus
  siRNA target sequence for Ifrd1 (NM_013562.1,858-876).
cttcaccaagtcctatctt

SEQ ID NO: 704469 - DNA, 19 bp, Mus musculus
  siRNA target sequence for Ifrd1 (NM_013562.1,863-881).
ccaagtcctatcttaaaga

SEQ ID NO: 704470 - DNA, 19 bp, Mus musculus
  siRNA target sequence for Ifrd1 (NM_013562.1,902-920).
gcagcactccaaatacagt

SEQ ID NO: 704471 - DNA, 19 bp, Mus musculus
  siRNA target sequence for Ifrd1 (NM_013562.1,936-954).
gcttctcgcgtggacatta

SEQ ID NO: 704472 - DNA, 19 bp, Mus musculus
  siRNA target sequence for Ifrd1 (NM_013562.1,937-955).
cttctcgcgtggacattat

SEQ ID NO: 704473 - DNA, 19 bp, Mus musculus
  siRNA target sequence for Ifrd1 (NM_013562.1,1036-1054).
gatgatgtaaacatgagaa

SEQ ID NO: 704474 - DNA, 19 bp, Mus musculus
  siRNA target sequence for Ifrd1 (NM_013562.1,1242-1260).
ggaggaacgggattttcca

SEQ ID NO: 704475 - DNA, 19 bp, Mus musculus
  siRNA target sequence for Ifrd1 (NM_013562.1,1243-1261).
gaggaacgggattttccaa

SEQ ID NO: 704476 - DNA, 19 bp, Mus musculus
  siRNA target sequence for Ifrd1 (NM_013562.1,1279-1297).
ggtcctgagcgcatgtata

SEQ ID NO: 704477 - DNA, 19 bp, Mus musculus
  siRNA target sequence for Ifrd1 (NM_013562.1,1280-1298).
gtcctgagcgcatgtatat

SEQ ID NO: 704478 - DNA, 19 bp, Mus musculus
  siRNA target sequence for Ifrd1 (NM_013562.1,1285-1303).
gagcgcatgtatattgata

SEQ ID NO: 704479 - DNA, 19 bp, Mus musculus
  siRNA target sequence for Ifrd1 (NM_013562.1,1318-1336).
catacctatgacacgttta

SEQ ID NO: 704480 - DNA, 19 bp, Mus musculus
  siRNA target sequence for Ifrd1 (NM_013562.1,1322-1340).
cctatgacacgtttaaaga

SEQ ID NO: 704481 - DNA, 19 bp, Mus musculus
  siRNA target sequence for Ifrd1 (NM_013562.1,1365-1383).
ccacttgcagacaaatgaa

SEQ ID NO: 704482 - DNA, 19 bp, Mus musculus
  siRNA target sequence for Ifrd1 (NM_013562.1,1423-1441).
cttgatgctgcaacactta

SEQ ID NO: 704483 - DNA, 19 bp, Mus musculus
  siRNA target sequence for Ifrd1 (NM_013562.1,1429-1447).
gctgcaacacttaaaacca

SEQ ID NO: 704484 - DNA, 19 bp, Mus musculus
  siRNA target sequence for Ifrd1 (NM_013562.1,1436-1454).
cacttaaaaccatgaagat

SEQ ID NO: 704485 - DNA, 19 bp, Mus musculus
  siRNA target sequence for Ifrd1 (NM_013562.1,1490-1508).
ctttcaaagctcgaacaaa

SEQ ID NO: 704486 - DNA, 19 bp, Mus musculus
  siRNA target sequence for Ifrd1 (NM_013562.1,1514-1532).
gaagcaaatgccgagataa

SEQ ID NO: 704487 - DNA, 19 bp, Mus musculus
  siRNA target sequence for Ifrd1 (NM_013562.1,1518-1536).
caaatgccgagataagaga

SEQ ID NO: 704488 - DNA, 19 bp, Mus musculus
  siRNA target sequence for Lhcgr (NM_013582.1,166-184).
gcctcgcccgactatctct

SEQ ID NO: 704489 - DNA, 19 bp, Mus musculus
  siRNA target sequence for Lhcgr (NM_013582.1,185-203).
cacctatctccctgtcaaa

SEQ ID NO: 704490 - DNA, 19 bp, Mus musculus
  siRNA target sequence for Lhcgr (NM_013582.1,187-205).
cctatctccctgtcaaagt

SEQ ID NO: 704491 - DNA, 19 bp, Mus musculus
  siRNA target sequence for Lhcgr (NM_013582.1,200-218).
caaagtaatcccatcacaa

SEQ ID NO: 704492 - DNA, 19 bp, Mus musculus
  siRNA target sequence for Lhcgr (NM_013582.1,220-238).
ctttcaggggacttaatga

SEQ ID NO: 704493 - DNA, 19 bp, Mus musculus
  siRNA target sequence for Lhcgr (NM_013582.1,229-247).
gacttaatgaggtcgtaaa

SEQ ID NO: 704494 - DNA, 19 bp, Mus musculus
  siRNA target sequence for Lhcgr (NM_013582.1,231-249).
cttaatgaggtcgtaaaaa

SEQ ID NO: 704495 - DNA, 19 bp, Mus musculus
  siRNA target sequence for Lhcgr (NM_013582.1,237-255).
gaggtcgtaaaaattgaaa

SEQ ID NO: 704496 - DNA, 19 bp, Mus musculus
  siRNA target sequence for Lhcgr (NM_013582.1,240-258).
gtcgtaaaaattgaaatct

SEQ ID NO: 704497 - DNA, 19 bp, Mus musculus
  siRNA target sequence for Lhcgr (NM_013582.1,242-260).
cgtaaaaattgaaatctct

SEQ ID NO: 704498 - DNA, 19 bp, Mus musculus
  siRNA target sequence for Lhcgr (NM_013582.1,265-283).
gtgattccctggaaaggat

SEQ ID NO: 704499 - DNA, 19 bp, Mus musculus
  siRNA target sequence for Lhcgr (NM_013582.1,275-293).
ggaaaggatagaagctaat

SEQ ID NO: 704500 - DNA, 19 bp, Mus musculus
  siRNA target sequence for Lhcgr (NM_013582.1,306-324).
ctcctcaatctgtctgaaa

SEQ ID NO: 704501 - DNA, 19 bp, Mus musculus
  siRNA target sequence for Lhcgr (NM_013582.1,308-326).
cctcaatctgtctgaaata

SEQ ID NO: 704502 - DNA, 19 bp, Mus musculus
  siRNA target sequence for Lhcgr (NM_013582.1,376-394).
caaacctccctcggttaaa

SEQ ID NO: 704503 - DNA, 19 bp, Mus musculus
  siRNA target sequence for Lhcgr (NM_013582.1,422-440).
ccggaccctcccagatgtt

SEQ ID NO: 704504 - DNA, 19 bp, Mus musculus
  siRNA target sequence for Lhcgr (NM_013582.1,423-441).
cggaccctcccagatgttt

SEQ ID NO: 704505 - DNA, 19 bp, Mus musculus
  siRNA target sequence for Lhcgr (NM_013582.1,427-445).
ccctcccagatgtttcgaa

SEQ ID NO: 704506 - DNA, 19 bp, Mus musculus
  siRNA target sequence for Lhcgr (NM_013582.1,449-467).
ctcttcctctgaatttaat

SEQ ID NO: 704507 - DNA, 19 bp, Mus musculus
  siRNA target sequence for Lhcgr (NM_013582.1,477-495).
gaaatctgtgataacttat

SEQ ID NO: 704508 - DNA, 19 bp, Mus musculus
  siRNA target sequence for Lhcgr (NM_013582.1,486-504).
gataacttatacataacca

SEQ ID NO: 704509 - DNA, 19 bp, Mus musculus
  siRNA target sequence for Lhcgr (NM_013582.1,518-536).
cgctttccaagggatgaat

SEQ ID NO: 704510 - DNA, 19 bp, Mus musculus
  siRNA target sequence for Lhcgr (NM_013582.1,519-537).
gctttccaagggatgaata

SEQ ID NO: 704511 - DNA, 19 bp, Mus musculus
  siRNA target sequence for Lhcgr (NM_013582.1,520-538).
ctttccaagggatgaataa

SEQ ID NO: 704512 - DNA, 19 bp, Mus musculus
  siRNA target sequence for Lhcgr (NM_013582.1,525-543).
caagggatgaataatgagt

SEQ ID NO: 704513 - DNA, 19 bp, Mus musculus
  siRNA target sequence for Lhcgr (NM_013582.1,545-563).
catcacgctgaaactgtat

SEQ ID NO: 704514 - DNA, 19 bp, Mus musculus
  siRNA target sequence for Lhcgr (NM_013582.1,570-588).
gggtttgaagaagtacaaa

SEQ ID NO: 704515 - DNA, 19 bp, Mus musculus
  siRNA target sequence for Lhcgr (NM_013582.1,612-630).
ctaatctcgctggagttaa

SEQ ID NO: 704516 - DNA, 19 bp, Mus musculus
  siRNA target sequence for Lhcgr (NM_013582.1,617-635).
ctcgctggagttaaaagaa

SEQ ID NO: 704517 - DNA, 19 bp, Mus musculus
  siRNA target sequence for Lhcgr (NM_013582.1,738-756).
gggctggagtccattcaga

SEQ ID NO: 704518 - DNA, 19 bp, Mus musculus
  siRNA target sequence for Lhcgr (NM_013582.1,770-788).
gtcatcctactcactgaaa

SEQ ID NO: 704519 - DNA, 19 bp, Mus musculus
  siRNA target sequence for Lhcgr (NM_013582.1,874-892).
cgaagaaagaacagaattt

SEQ ID NO: 704520 - DNA, 19 bp, Mus musculus
  siRNA target sequence for Lhcgr (NM_013582.1,924-942).
caatgtgaaagcacagtta

SEQ ID NO: 704521 - DNA, 19 bp, Mus musculus
  siRNA target sequence for Lhcgr (NM_013582.1,950-968).
gaataacgagacgctttat

SEQ ID NO: 704522 - DNA, 19 bp, Mus musculus
  siRNA target sequence for Lhcgr (NM_013582.1,995-1013).
cagtggctgggattacgat

SEQ ID NO: 704523 - DNA, 19 bp, Mus musculus
  siRNA target sequence for Lhcgr (NM_013582.1,1003-1021).
gggattacgattatgactt

SEQ ID NO: 704524 - DNA, 19 bp, Mus musculus
  siRNA target sequence for Lhcgr (NM_013582.1,1031-1049).
caagacactccaatgtact

SEQ ID NO: 704525 - DNA, 19 bp, Mus musculus
  siRNA target sequence for Lhcgr (NM_013582.1,1107-1125).
gtgttgatttggctaatta

SEQ ID NO: 704526 - DNA, 19 bp, Mus musculus
  siRNA target sequence for Lhcgr (NM_013582.1,1109-1127).
gttgatttggctaattaat

SEQ ID NO: 704527 - DNA, 19 bp, Mus musculus
  siRNA target sequence for Lhcgr (NM_013582.1,1112-1130).
gatttggctaattaatata

SEQ ID NO: 704528 - DNA, 19 bp, Mus musculus
  siRNA target sequence for Lhcgr (NM_013582.1,1167-1185).
ctcctgaccagtcgttata

SEQ ID NO: 704529 - DNA, 19 bp, Mus musculus
  siRNA target sequence for Lhcgr (NM_013582.1,1282-1300).
caaaaggccagtactataa

SEQ ID NO: 704530 - DNA, 19 bp, Mus musculus
  siRNA target sequence for Lhcgr (NM_013582.1,1356-1374).
gtgttcgccagtgaacttt

SEQ ID NO: 704531 - DNA, 19 bp, Mus musculus
  siRNA target sequence for Lhcgr (NM_013582.1,1358-1376).
gttcgccagtgaactttct

SEQ ID NO: 704532 - DNA, 19 bp, Mus musculus
  siRNA target sequence for Lhcgr (NM_013582.1,1364-1382).
cagtgaactttctgtctat

SEQ ID NO: 704533 - DNA, 19 bp, Mus musculus
  siRNA target sequence for Lhcgr (NM_013582.1,1479-1497).
ctcggaggatggatttttt

SEQ ID NO: 704534 - DNA, 19 bp, Mus musculus
  siRNA target sequence for Lhcgr (NM_013582.1,1481-1499).
cggaggatggattttttct

SEQ ID NO: 704535 - DNA, 19 bp, Mus musculus
  siRNA target sequence for Lhcgr (NM_013582.1,1586-1604).
gtcacaagtctacatatta

SEQ ID NO: 704536 - DNA, 19 bp, Mus musculus
  siRNA target sequence for Lhcgr (NM_013582.1,1590-1608).
caagtctacatattatcca

SEQ ID NO: 704537 - DNA, 19 bp, Mus musculus
  siRNA target sequence for Lhcgr (NM_013582.1,1645-1663).
gtgcttgctacgttaggat

SEQ ID NO: 704538 - DNA, 19 bp, Mus musculus
  siRNA target sequence for Lhcgr (NM_013582.1,1651-1669).
gctacgttaggatatactt

SEQ ID NO: 704539 - DNA, 19 bp, Mus musculus
  siRNA target sequence for Lhcgr (NM_013582.1,1667-1685).
ctttgcagttcaaaatcca

SEQ ID NO: 704540 - DNA, 19 bp, Mus musculus
  siRNA target sequence for Lhcgr (NM_013582.1,1696-1714).
ctcctaacaaggacacaaa

SEQ ID NO: 704541 - DNA, 19 bp, Mus musculus
  siRNA target sequence for Lhcgr (NM_013582.1,1763-1781).
ggcacccatctcattcttt

SEQ ID NO: 704542 - DNA, 19 bp, Mus musculus
  siRNA target sequence for Lhcgr (NM_013582.1,1833-1851).
gttctgctggtcctttttt

SEQ ID NO: 704543 - DNA, 19 bp, Mus musculus
  siRNA target sequence for Lhcgr (NM_013582.1,1838-1856).
gctggtccttttttatcct

SEQ ID NO: 704544 - DNA, 19 bp, Mus musculus
  siRNA target sequence for Lhcgr (NM_013582.1,1953-1971).
caccgggctgaactttaca

SEQ ID NO: 704545 - DNA, 19 bp, Mus musculus
  siRNA target sequence for Lhcgr (NM_013582.1,1956-1974).
cgggctgaactttacagaa

SEQ ID NO: 704546 - DNA, 19 bp, Mus musculus
  siRNA target sequence for Lhcgr (NM_013582.1,1993-2011).
gtaccttcaactccaaaaa

SEQ ID NO: 704547 - DNA, 19 bp, Mus musculus
  siRNA target sequence for Lhcgr (NM_013582.1,2040-2058).
caggctgccctgaagttat

SEQ ID NO: 704548 - DNA, 19 bp, Mus musculus
  siRNA target sequence for Lhcgr (NM_013582.1,2060-2078).
catagtgcactgtcaacaa

SEQ ID NO: 704549 - DNA, 19 bp, Mus musculus
  siRNA target sequence for Lhcgr (NM_013582.1,2083-2101).
cacctccaagagtgttaat

SEQ ID NO: 704550 - DNA, 19 bp, Mus musculus
  siRNA target sequence for Lhcgr (NM_013582.1,2088-2106).
ccaagagtgttaattcagt

SEQ ID NO: 704551 - DNA, 19 bp, Mus musculus
  siRNA target sequence for Lrpb7 (NM_013588.1,270-288).
gaagggctctcattactct

SEQ ID NO: 704552 - DNA, 19 bp, Mus musculus
  siRNA target sequence for Lrpb7 (NM_013588.1,303-321).
ggactggctcacgcttata

SEQ ID NO: 704553 - DNA, 19 bp, Mus musculus
  siRNA target sequence for Lrpb7 (NM_013588.1,310-328).
ctcacgcttatattaagct

SEQ ID NO: 704554 - DNA, 19 bp, Mus musculus
  siRNA target sequence for Lrpb7 (NM_013588.1,361-379).
ccttactgcgctcctatat

SEQ ID NO: 704555 - DNA, 19 bp, Mus musculus
  siRNA target sequence for Lrpb7 (NM_013588.1,532-550).
cctacaaccagatcataga

SEQ ID NO: 704556 - DNA, 19 bp, Mus musculus
  siRNA target sequence for Lrpb7 (NM_013588.1,701-719).
ccttcctaagctgaagaat

SEQ ID NO: 704557 - DNA, 19 bp, Mus musculus
  siRNA target sequence for Lrpb7 (NM_013588.1,706-724).
ctaagctgaagaatctcta

SEQ ID NO: 704558 - DNA, 19 bp, Mus musculus
  siRNA target sequence for Lrpb7 (NM_013588.1,794-812).
gcgagacaaccagattgaa

SEQ ID NO: 704559 - DNA, 19 bp, Mus musculus
  siRNA target sequence for Lrpb7 (NM_013588.1,798-816).
gacaaccagattgaaactt

SEQ ID NO: 704560 - DNA, 19 bp, Mus musculus
  siRNA target sequence for Lrpb7 (NM_013588.1,846-864).
ctgcagtacctcaacttga

SEQ ID NO: 704561 - DNA, 19 bp, Mus musculus
  siRNA target sequence for Lrpb7 (NM_013588.1,855-873).
ctcaacttgaggagcaata

SEQ ID NO: 704562 - DNA, 19 bp, Mus musculus
  siRNA target sequence for Lrpb7 (NM_013588.1,865-883).
ggagcaatatgattagtga

SEQ ID NO: 704563 - DNA, 19 bp, Mus musculus
  siRNA target sequence for Lrpb7 (NM_013588.1,866-884).
gagcaatatgattagtgat

SEQ ID NO: 704564 - DNA, 19 bp, Mus musculus
  siRNA target sequence for Lrpb7 (NM_013588.1,1005-1023).
gagcgcctggacaaagaat

SEQ ID NO: 704565 - DNA, 19 bp, Mus musculus
  siRNA target sequence for Odf2 (NM_013615.1,379-397).
cgagtctcacacagaaaaa

SEQ ID NO: 704566 - DNA, 19 bp, Mus musculus
  siRNA target sequence for Odf2 (NM_013615.1,418-436).
gcgcacccagtgtaactgt

SEQ ID NO: 704567 - DNA, 19 bp, Mus musculus
  siRNA target sequence for Odf2 (NM_013615.1,419-437).
cgcacccagtgtaactgtt

SEQ ID NO: 704568 - DNA, 19 bp, Mus musculus
  siRNA target sequence for Odf2 (NM_013615.1,425-443).
cagtgtaactgttacgaaa

SEQ ID NO: 704569 - DNA, 19 bp, Mus musculus
  siRNA target sequence for Odf2 (NM_013615.1,433-451).
ctgttacgaaatctcataa

SEQ ID NO: 704570 - DNA, 19 bp, Mus musculus
  siRNA target sequence for Odf2 (NM_013615.1,445-463).
ctcataagcgcggaatgaa

SEQ ID NO: 704571 - DNA, 19 bp, Mus musculus
  siRNA target sequence for Odf2 (NM_013615.1,486-504).
cggagtgtccgggtgaaaa

SEQ ID NO: 704572 - DNA, 19 bp, Mus musculus
  siRNA target sequence for Odf2 (NM_013615.1,494-512).
ccgggtgaaaaccaagaat

SEQ ID NO: 704573 - DNA, 19 bp, Mus musculus
  siRNA target sequence for Odf2 (NM_013615.1,558-576).
gtctcggtgatgcgattaa

SEQ ID NO: 704574 - DNA, 19 bp, Mus musculus
  siRNA target sequence for Odf2 (NM_013615.1,560-578).
ctcggtgatgcgattaagt

SEQ ID NO: 704575 - DNA, 19 bp, Mus musculus
  siRNA target sequence for Odf2 (NM_013615.1,562-580).
cggtgatgcgattaagtga

SEQ ID NO: 704576 - DNA, 19 bp, Mus musculus
  siRNA target sequence for Odf2 (NM_013615.1,599-617).
cgattcaggtcactgtaaa

SEQ ID NO: 704577 - DNA, 19 bp, Mus musculus
  siRNA target sequence for Odf2 (NM_013615.1,623-641).
ccgttacgataagaagatt

SEQ ID NO: 704578 - DNA, 19 bp, Mus musculus
  siRNA target sequence for Odf2 (NM_013615.1,625-643).
gttacgataagaagattga

SEQ ID NO: 704579 - DNA, 19 bp, Mus musculus
  siRNA target sequence for Odf2 (NM_013615.1,656-674).
cgcggtcggttgtctcaaa

SEQ ID NO: 704580 - DNA, 19 bp, Mus musculus
  siRNA target sequence for Odf2 (NM_013615.1,657-675).
gcggtcggttgtctcaaat

SEQ ID NO: 704581 - DNA, 19 bp, Mus musculus
  siRNA target sequence for Odf2 (NM_013615.1,659-677).
ggtcggttgtctcaaatct

SEQ ID NO: 704582 - DNA, 19 bp, Mus musculus
  siRNA target sequence for Odf2 (NM_013615.1,702-720).
cgccaaatggccaaaaggt

SEQ ID NO: 704583 - DNA, 19 bp, Mus musculus
  siRNA target sequence for Odf2 (NM_013615.1,703-721).
gccaaatggccaaaaggtt

SEQ ID NO: 704584 - DNA, 19 bp, Mus musculus
  siRNA target sequence for Odf2 (NM_013615.1,831-849).
gacttcaccatgcttcaaa

SEQ ID NO: 704585 - DNA, 19 bp, Mus musculus
  siRNA target sequence for Odf2 (NM_013615.1,1101-1119).
gaggattccgagagactaa

SEQ ID NO: 704586 - DNA, 19 bp, Mus musculus
  siRNA target sequence for Odf2 (NM_013615.1,1121-1139).
ggagcaacaaggtacatta

SEQ ID NO: 704587 - DNA, 19 bp, Mus musculus
  siRNA target sequence for Odf2 (NM_013615.1,1125-1143).
caacaaggtacattactga

SEQ ID NO: 704588 - DNA, 19 bp, Mus musculus
  siRNA target sequence for Odf2 (NM_013615.1,1226-1244).
ccaggagatacaatgtgaa

SEQ ID NO: 704589 - DNA, 19 bp, Mus musculus
  siRNA target sequence for Odf2 (NM_013615.1,1261-1279).
cagcgtctgagctttccaa

SEQ ID NO: 704590 - DNA, 19 bp, Mus musculus
  siRNA target sequence for Odf2 (NM_013615.1,1351-1369).
gcatgcagatcaagaactt

SEQ ID NO: 704591 - DNA, 19 bp, Mus musculus
  siRNA target sequence for Odf2 (NM_013615.1,1474-1492).
ccatccgagcccagaaaga

SEQ ID NO: 704592 - DNA, 19 bp, Mus musculus
  siRNA target sequence for Odf2 (NM_013615.1,1541-1559).
ggccgacaaggacctttat

SEQ ID NO: 704593 - DNA, 19 bp, Mus musculus
  siRNA target sequence for Odf2 (NM_013615.1,1560-1578).
gttgctgaagctttatcta

SEQ ID NO: 704594 - DNA, 19 bp, Mus musculus
  siRNA target sequence for Odf2 (NM_013615.1,1600-1618).
gttacaaccaggttgtgaa

SEQ ID NO: 704595 - DNA, 19 bp, Mus musculus
  siRNA target sequence for Odf2 (NM_013615.1,1640-1658).
ggagattatcgtcctaaat

SEQ ID NO: 704596 - DNA, 19 bp, Mus musculus
  siRNA target sequence for Odf2 (NM_013615.1,1661-1679).
ccgggtgacagatcttgta

SEQ ID NO: 704597 - DNA, 19 bp, Mus musculus
  siRNA target sequence for Odf2 (NM_013615.1,1662-1680).
cgggtgacagatcttgtaa

SEQ ID NO: 704598 - DNA, 19 bp, Mus musculus
  siRNA target sequence for Odf2 (NM_013615.1,1663-1681).
gggtgacagatcttgtaaa

SEQ ID NO: 704599 - DNA, 19 bp, Mus musculus
  siRNA target sequence for Odf2 (NM_013615.1,1667-1685).
gacagatcttgtaaaccaa

SEQ ID NO: 704600 - DNA, 19 bp, Mus musculus
  siRNA target sequence for Odf2 (NM_013615.1,1871-1889).
gaactacgaggggatgata

SEQ ID NO: 704601 - DNA, 19 bp, Mus musculus
  siRNA target sequence for Odf2 (NM_013615.1,1921-1939).
gattggaggctgatgaagt

SEQ ID NO: 704602 - DNA, 19 bp, Mus musculus
  siRNA target sequence for Odf2 (NM_013615.1,1953-1971).
gagcgctgcgacaaagaga

SEQ ID NO: 704603 - DNA, 19 bp, Mus musculus
  siRNA target sequence for Odf2 (NM_013615.1,1957-1975).
gctgcgacaaagagaacaa

SEQ ID NO: 704604 - DNA, 19 bp, Mus musculus
  siRNA target sequence for Odf2 (NM_013615.1,2138-2156).
cctcacagccatcatttca

SEQ ID NO: 704605 - DNA, 19 bp, Mus musculus
  siRNA target sequence for Olfr64 (NM_013616.2,900-918).
cttcaatgtggctcaacat

SEQ ID NO: 704606 - DNA, 19 bp, Mus musculus
  siRNA target sequence for Olfr64 (NM_013616.2,1511-1529).
gcaatggtcttgctagatt

SEQ ID NO: 704607 - DNA, 19 bp, Mus musculus
  siRNA target sequence for Olfr64 (NM_013616.2,1523-1541).
ctagatttcctgatcatct

SEQ ID NO: 704608 - DNA, 19 bp, Mus musculus
  siRNA target sequence for Olfr64 (NM_013616.2,1706-1724).
catgtcgtccacatcacaa

SEQ ID NO: 704609 - DNA, 19 bp, Mus musculus
  siRNA target sequence for Olfr65 (NM_013617.2,796-814).
gctcatcactggatctcta

SEQ ID NO: 704610 - DNA, 19 bp, Mus musculus
  siRNA target sequence for Olfr65 (NM_013617.2,931-949).
ggcacagacctcacagtta

SEQ ID NO: 704611 - DNA, 19 bp, Mus musculus
  siRNA target sequence for Olfr65 (NM_013617.2,956-974).
ctacaatgcccactgtaat

SEQ ID NO: 704612 - DNA, 19 bp, Mus musculus
  siRNA target sequence for Olfr65 (NM_013617.2,988-1006).
gtgaatcatagagagataa

SEQ ID NO: 704613 - DNA, 19 bp, Mus musculus
  siRNA target sequence for Olfr65 (NM_013617.2,1023-1041).
cttacaggcctacatcatt

SEQ ID NO: 704614 - DNA, 19 bp, Mus musculus
  siRNA target sequence for Olfr65 (NM_013617.2,1140-1158).
caattccagggttatagct

SEQ ID NO: 704615 - DNA, 19 bp, Mus musculus
  siRNA target sequence for Olfr65 (NM_013617.2,1146-1164).
cagggttatagctatagga

SEQ ID NO: 704616 - DNA, 19 bp, Mus musculus
  siRNA target sequence for Olfr66 (NM_013618.2,3450-3468).
cagtgatgctcctttccta

SEQ ID NO: 704617 - DNA, 19 bp, Mus musculus
  siRNA target sequence for Olfr66 (NM_013618.2,3551-3569).
ggaatggtacccttctctt

SEQ ID NO: 704618 - DNA, 19 bp, Mus musculus
  siRNA target sequence for Olfr66 (NM_013618.2,3637-3655).
gaccttgggatgacactaa

SEQ ID NO: 704619 - DNA, 19 bp, Mus musculus
  siRNA target sequence for Olfr66 (NM_013618.2,3677-3695).
gtgtcctggtgctaaacca

SEQ ID NO: 704620 - DNA, 19 bp, Mus musculus
  siRNA target sequence for Olfr66 (NM_013618.2,3712-3730).
ggggcctgtttcattcagt

SEQ ID NO: 704621 - DNA, 19 bp, Mus musculus
  siRNA target sequence for Olfr66 (NM_013618.2,3744-3762).
ctcactagccattgtagaa

SEQ ID NO: 704622 - DNA, 19 bp, Mus musculus
  siRNA target sequence for Olfr66 (NM_013618.2,3893-3911).
ccatcgtgcccccaatcat

SEQ ID NO: 704623 - DNA, 19 bp, Mus musculus
  siRNA target sequence for Olfr66 (NM_013618.2,4342-4360).
cgtctactgtccaaacaca

SEQ ID NO: 704624 - DNA, 19 bp, Mus musculus
  siRNA target sequence for Olfr67 (NM_013619.2,226-244).
ggtatgttctgattggaat

SEQ ID NO: 704625 - DNA, 19 bp, Mus musculus
  siRNA target sequence for Olfr67 (NM_013619.2,227-245).
gtatgttctgattggaatt

SEQ ID NO: 704626 - DNA, 19 bp, Mus musculus
  siRNA target sequence for Olfr67 (NM_013619.2,296-314).
gtacatcgtggctgtcata

SEQ ID NO: 704627 - DNA, 19 bp, Mus musculus
  siRNA target sequence for Olfr67 (NM_013619.2,456-474).
cattccaggggtatatcct

SEQ ID NO: 704628 - DNA, 19 bp, Mus musculus
  siRNA target sequence for Olfr67 (NM_013619.2,646-664).
gaagctttctcatctgttt

SEQ ID NO: 704629 - DNA, 19 bp, Mus musculus
  siRNA target sequence for Olfr67 (NM_013619.2,671-689).
catcttcctggtatatcga

SEQ ID NO: 704630 - DNA, 19 bp, Mus musculus
  siRNA target sequence for Olfr67 (NM_013619.2,680-698).
ggtatatcgacttctgtat

SEQ ID NO: 704631 - DNA, 19 bp, Mus musculus
  siRNA target sequence for Olfr67 (NM_013619.2,751-769).
gattggcatgcgacaatat

SEQ ID NO: 704632 - DNA, 19 bp, Mus musculus
  siRNA target sequence for Olfr67 (NM_013619.2,755-773).
ggcatgcgacaatatcact

SEQ ID NO: 704633 - DNA, 19 bp, Mus musculus
  siRNA target sequence for Olfr67 (NM_013619.2,809-827).
gtctactgggctagatata

SEQ ID NO: 704634 - DNA, 19 bp, Mus musculus
  siRNA target sequence for Olfr67 (NM_013619.2,811-829).
ctactgggctagatatact

SEQ ID NO: 704635 - DNA, 19 bp, Mus musculus
  siRNA target sequence for Olfr67 (NM_013619.2,814-832).
ctgggctagatatactact

SEQ ID NO: 704636 - DNA, 19 bp, Mus musculus
  siRNA target sequence for Olfr67 (NM_013619.2,817-835).
ggctagatatactactcat

SEQ ID NO: 704637 - DNA, 19 bp, Mus musculus
  siRNA target sequence for Olfr67 (NM_013619.2,822-840).
gatatactactcatcatta

SEQ ID NO: 704638 - DNA, 19 bp, Mus musculus
  siRNA target sequence for Olfr67 (NM_013619.2,858-876).
cttcgcactgtttttcaaa

SEQ ID NO: 704639 - DNA, 19 bp, Mus musculus
  siRNA target sequence for Olfr67 (NM_013619.2,883-901).
cctgggctgccagatacaa

SEQ ID NO: 704640 - DNA, 19 bp, Mus musculus
  siRNA target sequence for Olfr67 (NM_013619.2,1040-1058).
ggtggtgcccccaatgctt

SEQ ID NO: 704641 - DNA, 19 bp, Mus musculus
  siRNA target sequence for Olfr67 (NM_013619.2,1041-1059).
gtggtgcccccaatgctta

SEQ ID NO: 704642 - DNA, 19 bp, Mus musculus
  siRNA target sequence for Olfr67 (NM_013619.2,1098-1116).
gatcgagtggttttccttt

SEQ ID NO: 704643 - DNA, 19 bp, Mus musculus
  siRNA target sequence for Olfr68 (NM_013620.1,30-48).
gccttctgtgttaacacta

SEQ ID NO: 704644 - DNA, 19 bp, Mus musculus
  siRNA target sequence for Olfr68 (NM_013620.1,78-96).
gtgctggattggaattcca

SEQ ID NO: 704645 - DNA, 19 bp, Mus musculus
  siRNA target sequence for Olfr68 (NM_013620.1,80-98).
gctggattggaattccatt

SEQ ID NO: 704646 - DNA, 19 bp, Mus musculus
  siRNA target sequence for Olfr68 (NM_013620.1,108-126).
gtacatcattgctatgatt

SEQ ID NO: 704647 - DNA, 19 bp, Mus musculus
  siRNA target sequence for Olfr68 (NM_013620.1,123-141).
gattgggaactccctaatt

SEQ ID NO: 704648 - DNA, 19 bp, Mus musculus
  siRNA target sequence for Olfr68 (NM_013620.1,129-147).
gaactccctaattttagtt

SEQ ID NO: 704649 - DNA, 19 bp, Mus musculus
  siRNA target sequence for Olfr68 (NM_013620.1,132-150).
ctccctaattttagttata

SEQ ID NO: 704650 - DNA, 19 bp, Mus musculus
  siRNA target sequence for Olfr68 (NM_013620.1,449-467).
cattactcagggctttcat

SEQ ID NO: 704651 - DNA, 19 bp, Mus musculus
  siRNA target sequence for Olfr68 (NM_013620.1,476-494).
ccccatccatactactcat

SEQ ID NO: 704652 - DNA, 19 bp, Mus musculus
  siRNA target sequence for Olfr69 (NM_013621.1,463-481).
ctcattaccacatttccat

SEQ ID NO: 704653 - DNA, 19 bp, Mus musculus
  siRNA target sequence for Olfr69 (NM_013621.1,470-488).
ccacatttccattgatatt

SEQ ID NO: 704654 - DNA, 19 bp, Mus musculus
  siRNA target sequence for Olfr69 (NM_013621.1,473-491).
catttccattgatattgct

SEQ ID NO: 704655 - DNA, 19 bp, Mus musculus
  siRNA target sequence for Smcx (NM_013668.2,298-316).
ggggtccgacgatttccta

SEQ ID NO: 704656 - DNA, 19 bp, Mus musculus
  siRNA target sequence for Smcx (NM_013668.2,376-394).
ctacatcgcgaaaatcaga

SEQ ID NO: 704657 - DNA, 19 bp, Mus musculus
  siRNA target sequence for Smcx (NM_013668.2,459-477).
ccgtggaagtggataactt

SEQ ID NO: 704658 - DNA, 19 bp, Mus musculus
  siRNA target sequence for Smcx (NM_013668.2,490-508).
ccgaatccagaggttgaat

SEQ ID NO: 704659 - DNA, 19 bp, Mus musculus
  siRNA target sequence for Smcx (NM_013668.2,586-604).
cttaaagattcccaatgta

SEQ ID NO: 704660 - DNA, 19 bp, Mus musculus
  siRNA target sequence for Smcx (NM_013668.2,611-629).
cggatcttggacctctata

SEQ ID NO: 704661 - DNA, 19 bp, Mus musculus
  siRNA target sequence for Smcx (NM_013668.2,625-643).
ctatagcctcagcaaaatt

SEQ ID NO: 704662 - DNA, 19 bp, Mus musculus
  siRNA target sequence for Smcx (NM_013668.2,656-674).
ggtggttatgaaactatct

SEQ ID NO: 704663 - DNA, 19 bp, Mus musculus
  siRNA target sequence for Smcx (NM_013668.2,742-760).
cttgctacgctctcactat

SEQ ID NO: 704664 - DNA, 19 bp, Mus musculus
  siRNA target sequence for Smcx (NM_013668.2,745-763).
gctacgctctcactatgaa

SEQ ID NO: 704665 - DNA, 19 bp, Mus musculus
  siRNA target sequence for Smcx (NM_013668.2,757-775).
ctatgaacgcattgtttat

SEQ ID NO: 704666 - DNA, 19 bp, Mus musculus
  siRNA target sequence for Smcx (NM_013668.2,801-819).
ccaaccttgtgcagtgtaa

SEQ ID NO: 704667 - DNA, 19 bp, Mus musculus
  siRNA target sequence for Smcx (NM_013668.2,820-838).
cacacgcccatttgataat

SEQ ID NO: 704668 - DNA, 19 bp, Mus musculus
  siRNA target sequence for Smcx (NM_013668.2,822-840).
cacgcccatttgataatga

SEQ ID NO: 704669 - DNA, 19 bp, Mus musculus
  siRNA target sequence for Smcx (NM_013668.2,890-908).
gtgcagccttccaagttca

SEQ ID NO: 704670 - DNA, 19 bp, Mus musculus
  siRNA target sequence for Smcx (NM_013668.2,901-919).
caagttcaacagttatgga

SEQ ID NO: 704671 - DNA, 19 bp, Mus musculus
  siRNA target sequence for Smcx (NM_013668.2,1033-1051).
gggcctaatggccaaagat

SEQ ID NO: 704672 - DNA, 19 bp, Mus musculus
  siRNA target sequence for Smcx (NM_013668.2,1054-1072).
gactctgcggaaaaaagat

SEQ ID NO: 704673 - DNA, 19 bp, Mus musculus
  siRNA target sequence for Smcx (NM_013668.2,1056-1074).
ctctgcggaaaaaagataa

SEQ ID NO: 704674 - DNA, 19 bp, Mus musculus
  siRNA target sequence for Smcx (NM_013668.2,1105-1123).
ggtaaaggaggaattaggt

SEQ ID NO: 704675 - DNA, 19 bp, Mus musculus
  siRNA target sequence for Smcx (NM_013668.2,1245-1263).
cccagtttattgagtcata

SEQ ID NO: 704676 - DNA, 19 bp, Mus musculus
  siRNA target sequence for Smcx (NM_013668.2,1249-1267).
gtttattgagtcatacgta

SEQ ID NO: 704677 - DNA, 19 bp, Mus musculus
  siRNA target sequence for Smcx (NM_013668.2,1447-1465).
gcaagctacccgggaatat

SEQ ID NO: 704678 - DNA, 19 bp, Mus musculus
  siRNA target sequence for Smcx (NM_013668.2,1566-1584).
ggcggctggtgaatagcat

SEQ ID NO: 704679 - DNA, 19 bp, Mus musculus
  siRNA target sequence for Smcx (NM_013668.2,1687-1705).
ggaggagtatgctacaagt

SEQ ID NO: 704680 - DNA, 19 bp, Mus musculus
  siRNA target sequence for Smcx (NM_013668.2,2189-2207).
cgccgactacgaagatact

SEQ ID NO: 704681 - DNA, 19 bp, Mus musculus
  siRNA target sequence for Smcx (NM_013668.2,2191-2209).
ccgactacgaagatactgt

SEQ ID NO: 704682 - DNA, 19 bp, Mus musculus
  siRNA target sequence for Smcx (NM_013668.2,2272-2290).
cctggcagcagctgtacat

SEQ ID NO: 704683 - DNA, 19 bp, Mus musculus
  siRNA target sequence for Smcx (NM_013668.2,2557-2575).
ccctgccatgctgcataaa

SEQ ID NO: 704684 - DNA, 19 bp, Mus musculus
  siRNA target sequence for Smcx (NM_013668.2,2689-2707).
ggctcgtgagcgaaggttt

SEQ ID NO: 704685 - DNA, 19 bp, Mus musculus
  siRNA target sequence for Smcx (NM_013668.2,2693-2711).
cgtgagcgaaggtttccta

SEQ ID NO: 704686 - DNA, 19 bp, Mus musculus
  siRNA target sequence for Smcx (NM_013668.2,2694-2712).
gtgagcgaaggtttcctaa

SEQ ID NO: 704687 - DNA, 19 bp, Mus musculus
  siRNA target sequence for Smcx (NM_013668.2,2719-2737).
gcttctacagcgactgaaa

SEQ ID NO: 704688 - DNA, 19 bp, Mus musculus
  siRNA target sequence for Smcx (NM_013668.2,2841-2859).
ctgagctacgggattttct

SEQ ID NO: 704689 - DNA, 19 bp, Mus musculus
  siRNA target sequence for Smcx (NM_013668.2,3075-3093).
ggtggctggatgaggtaaa

SEQ ID NO: 704690 - DNA, 19 bp, Mus musculus
  siRNA target sequence for Smcx (NM_013668.2,3291-3309).
cacttgaggccataatcca

SEQ ID NO: 704691 - DNA, 19 bp, Mus musculus
  siRNA target sequence for Smcx (NM_013668.2,3500-3518).
ctagagctacaggtattga

SEQ ID NO: 704692 - DNA, 19 bp, Mus musculus
  siRNA target sequence for Smcx (NM_013668.2,3562-3580).
gaagaactcctgctataca

SEQ ID NO: 704693 - DNA, 19 bp, Mus musculus
  siRNA target sequence for Smcx (NM_013668.2,3565-3583).
gaactcctgctatacatta

SEQ ID NO: 704694 - DNA, 19 bp, Mus musculus
  siRNA target sequence for Smcx (NM_013668.2,3570-3588).
cctgctatacattattgga

SEQ ID NO: 704695 - DNA, 19 bp, Mus musculus
  siRNA target sequence for Smcx (NM_013668.2,3655-3673).
gctggggttgtacaaatct

SEQ ID NO: 704696 - DNA, 19 bp, Mus musculus
  siRNA target sequence for Smcx (NM_013668.2,3831-3849).
cctcctctacagcttctat

SEQ ID NO: 704697 - DNA, 19 bp, Mus musculus
  siRNA target sequence for Smcx (NM_013668.2,4158-4176).
gccgtgccagacaggtttt

SEQ ID NO: 704698 - DNA, 19 bp, Mus musculus
  siRNA target sequence for Smcx (NM_013668.2,4230-4248).
ggctacaggctgaatccaa

SEQ ID NO: 704699 - DNA, 19 bp, Mus musculus
  siRNA target sequence for Smcx (NM_013668.2,4342-4360).
gaccagtcctgaaaaggta

SEQ ID NO: 704700 - DNA, 19 bp, Mus musculus
  siRNA target sequence for Smcx (NM_013668.2,4384-4402).
ggagctgctatcctcaata

SEQ ID NO: 704701 - DNA, 19 bp, Mus musculus
  siRNA target sequence for Smcx (NM_013668.2,4387-4405).
gctgctatcctcaatatta

SEQ ID NO: 704702 - DNA, 19 bp, Mus musculus
  siRNA target sequence for Smcx (NM_013668.2,4390-4408).
gctatcctcaatattacca

SEQ ID NO: 704703 - DNA, 19 bp, Mus musculus
  siRNA target sequence for Smcx (NM_013668.2,4451-4469).
gccccactggaggaactta

SEQ ID NO: 704704 - DNA, 19 bp, Mus musculus
  siRNA target sequence for Smcx (NM_013668.2,4495-4513).
gaccctagatgagaatcat

SEQ ID NO: 704705 - DNA, 19 bp, Mus musculus
  siRNA target sequence for Smcx (NM_013668.2,4539-4557).
ggcagcctccagacttgaa

SEQ ID NO: 704706 - DNA, 19 bp, Mus musculus
  siRNA target sequence for Smcx (NM_013668.2,4836-4854).
gcttagaaccagtgttaga

SEQ ID NO: 704707 - DNA, 19 bp, Mus musculus
  siRNA target sequence for Sp1 (NM_013672.1,183-201).
gcggtgccgccttttctca

SEQ ID NO: 704708 - DNA, 19 bp, Mus musculus
  siRNA target sequence for Sp1 (NM_013672.1,458-476).
gaacagagtggcaacagta

SEQ ID NO: 704709 - DNA, 19 bp, Mus musculus
  siRNA target sequence for Sp1 (NM_013672.1,463-481).
gagtggcaacagtaccaat

SEQ ID NO: 704710 - DNA, 19 bp, Mus musculus
  siRNA target sequence for Sp1 (NM_013672.1,541-559).
ggctgctacccccaactta

SEQ ID NO: 704711 - DNA, 19 bp, Mus musculus
  siRNA target sequence for Sp1 (NM_013672.1,587-605).
cctggagtaatgcctaata

SEQ ID NO: 704712 - DNA, 19 bp, Mus musculus
  siRNA target sequence for Sp1 (NM_013672.1,588-606).
ctggagtaatgcctaatat

SEQ ID NO: 704713 - DNA, 19 bp, Mus musculus
  siRNA target sequence for Sp1 (NM_013672.1,591-609).
gagtaatgcctaatattca

SEQ ID NO: 704714 - DNA, 19 bp, Mus musculus
  siRNA target sequence for Sp1 (NM_013672.1,593-611).
gtaatgcctaatattcagt

SEQ ID NO: 704715 - DNA, 19 bp, Mus musculus
  siRNA target sequence for Sp1 (NM_013672.1,692-710).
ggttctggtcaaatacaga

SEQ ID NO: 704716 - DNA, 19 bp, Mus musculus
  siRNA target sequence for Sp1 (NM_013672.1,693-711).
gttctggtcaaatacagat

SEQ ID NO: 704717 - DNA, 19 bp, Mus musculus
  siRNA target sequence for Sp1 (NM_013672.1,696-714).
ctggtcaaatacagatcat

SEQ ID NO: 704718 - DNA, 19 bp, Mus musculus
  siRNA target sequence for Sp1 (NM_013672.1,712-730).
cataccaggtgcaaaccaa

SEQ ID NO: 704719 - DNA, 19 bp, Mus musculus
  siRNA target sequence for Sp1 (NM_013672.1,720-738).
gtgcaaaccaacagatcat

SEQ ID NO: 704720 - DNA, 19 bp, Mus musculus
  siRNA target sequence for Sp1 (NM_013672.1,750-768).
gaagtgggggcaacattat

SEQ ID NO: 704721 - DNA, 19 bp, Mus musculus
  siRNA target sequence for Sp1 (NM_013672.1,805-823).
ccttcaaggccttgctaat

SEQ ID NO: 704722 - DNA, 19 bp, Mus musculus
  siRNA target sequence for Sp1 (NM_013672.1,1060-1078).
caatgccaatagttattca

SEQ ID NO: 704723 - DNA, 19 bp, Mus musculus
  siRNA target sequence for Sp1 (NM_013672.1,1064-1082).
gccaatagttattcaacaa

SEQ ID NO: 704724 - DNA, 19 bp, Mus musculus
  siRNA target sequence for Sp1 (NM_013672.1,1103-1121).
ggaattatgaactttacca

SEQ ID NO: 704725 - DNA, 19 bp, Mus musculus
  siRNA target sequence for Sp1 (NM_013672.1,1177-1195).
gctacaagggtctgattct

SEQ ID NO: 704726 - DNA, 19 bp, Mus musculus
  siRNA target sequence for Sp1 (NM_013672.1,1366-1384).
cttcacaactcaagctatt

SEQ ID NO: 704727 - DNA, 19 bp, Mus musculus
  siRNA target sequence for Sp1 (NM_013672.1,1412-1430).
cttcaggctgttcaaaact

SEQ ID NO: 704728 - DNA, 19 bp, Mus musculus
  siRNA target sequence for Sp1 (NM_013672.1,1551-1569).
ctatgcagggtgtttcctt

SEQ ID NO: 704729 - DNA, 19 bp, Mus musculus
  siRNA target sequence for Sp1 (NM_013672.1,1573-1591).
gcagactagcagcagtaat

SEQ ID NO: 704730 - DNA, 19 bp, Mus musculus
  siRNA target sequence for Sp1 (NM_013672.1,1574-1592).
cagactagcagcagtaata

SEQ ID NO: 704731 - DNA, 19 bp, Mus musculus
  siRNA target sequence for Sp1 (NM_013672.1,1677-1695).
gcctccagaccattaacct

SEQ ID NO: 704732 - DNA, 19 bp, Mus musculus
  siRNA target sequence for Sp1 (NM_013672.1,1696-1714).
cagtgcattgggtacttca

SEQ ID NO: 704733 - DNA, 19 bp, Mus musculus
  siRNA target sequence for Sp1 (NM_013672.1,1741-1759).
cctgcctttggctatagca

SEQ ID NO: 704734 - DNA, 19 bp, Mus musculus
  siRNA target sequence for Sp1 (NM_013672.1,1742-1760).
ctgcctttggctatagcaa

SEQ ID NO: 704735 - DNA, 19 bp, Mus musculus
  siRNA target sequence for Sp1 (NM_013672.1,1806-1824).
gtggtgatgggatacatga

SEQ ID NO: 704736 - DNA, 19 bp, Mus musculus
  siRNA target sequence for Sp1 (NM_013672.1,1889-1907).
cgtcgggaagcatgtacat

SEQ ID NO: 704737 - DNA, 19 bp, Mus musculus
  siRNA target sequence for Sp1 (NM_013672.1,1982-2000).
caaggatgcggcaaagtat

SEQ ID NO: 704738 - DNA, 19 bp, Mus musculus
  siRNA target sequence for Sp1 (NM_013672.1,2054-2072).
ccattcatgtgtaattggt

SEQ ID NO: 704739 - DNA, 19 bp, Mus musculus
  siRNA target sequence for Sp1 (NM_013672.1,2062-2080).
gtgtaattggtcatattgt

SEQ ID NO: 704740 - DNA, 19 bp, Mus musculus
  siRNA target sequence for Sp1 (NM_013672.1,2104-2122).
cgagcttcagagacataaa

SEQ ID NO: 704741 - DNA, 19 bp, Mus musculus
  siRNA target sequence for Sp1 (NM_013672.1,2186-2204).
gatcacctgtcaaagcata

SEQ ID NO: 704742 - DNA, 19 bp, Mus musculus
  siRNA target sequence for Sp1 (NM_013672.1,2299-2317).
cactccttcagcccttatt

SEQ ID NO: 704743 - DNA, 19 bp, Mus musculus
  siRNA target sequence for Sp1 (NM_013672.1,2303-2321).
ccttcagcccttattacca

SEQ ID NO: 704744 - DNA, 19 bp, Mus musculus
  siRNA target sequence for Sp1 (NM_013672.1,2309-2327).
gcccttattaccaccaata

SEQ ID NO: 704745 - DNA, 19 bp, Mus musculus
  siRNA target sequence for Sp1 (NM_013672.1,2310-2328).
cccttattaccaccaatat

SEQ ID NO: 704746 - DNA, 19 bp, Mus musculus
  siRNA target sequence for Sp1 (NM_013672.1,2410-2428).
gcagtccattaatatcagt

SEQ ID NO: 704747 - DNA, 19 bp, Mus musculus
  siRNA target sequence for Surf2 (NM_013678.1,121-139).
cccgagctccaggaataca

SEQ ID NO: 704748 - DNA, 19 bp, Mus musculus
  siRNA target sequence for Surf2 (NM_013678.1,197-215).
ctttcgagccacacattgt

SEQ ID NO: 704749 - DNA, 19 bp, Mus musculus
  siRNA target sequence for Surf2 (NM_013678.1,255-273).
caccctgaggcacatcaat

SEQ ID NO: 704750 - DNA, 19 bp, Mus musculus
  siRNA target sequence for Surf2 (NM_013678.1,315-333).
gtatcagagagcacttcat

SEQ ID NO: 704751 - DNA, 19 bp, Mus musculus
  siRNA target sequence for Surf2 (NM_013678.1,587-605).
cagaccaacaggatgagaa

SEQ ID NO: 704752 - DNA, 19 bp, Mus musculus
  siRNA target sequence for Surf2 (NM_013678.1,660-678).
ccacaagaggggtcgtaaa

SEQ ID NO: 704753 - DNA, 19 bp, Mus musculus
  siRNA target sequence for Surf2 (NM_013678.1,711-729).
gaagttcaagagctatcat

SEQ ID NO: 704754 - DNA, 19 bp, Mus musculus
  siRNA target sequence for Svs6 (NM_013679.1,101-119).
ggttctcgcaagcaattga

SEQ ID NO: 704755 - DNA, 19 bp, Mus musculus
  siRNA target sequence for Svs6 (NM_013679.1,102-120).
gttctcgcaagcaattgaa

SEQ ID NO: 704756 - DNA, 19 bp, Mus musculus
  siRNA target sequence for Svs6 (NM_013679.1,266-284).
ggtcttacttgcggaaaaa

SEQ ID NO: 704757 - DNA, 19 bp, Mus musculus
  siRNA target sequence for Svs6 (NM_013679.1,269-287).
cttacttgcggaaaaagga

SEQ ID NO: 704758 - DNA, 19 bp, Mus musculus
  siRNA target sequence for T2 (NM_013682.1,371-389).
cccgaagcctgctggatta

SEQ ID NO: 704759 - DNA, 19 bp, Mus musculus
  siRNA target sequence for T2 (NM_013682.1,514-532).
cctgccctccgatttctga

SEQ ID NO: 704760 - DNA, 19 bp, Mus musculus
  siRNA target sequence for T2 (NM_013682.1,740-758).
gtcgatactgggtgaacaa

SEQ ID NO: 704761 - DNA, 19 bp, Mus musculus
  siRNA target sequence for Tcte1 (NM_013688.1,263-281).
cgtacctctccttacagaa

SEQ ID NO: 704762 - DNA, 19 bp, Mus musculus
  siRNA target sequence for Tcte1 (NM_013688.1,407-425).
cttgattgacgatgagaat

SEQ ID NO: 704763 - DNA, 19 bp, Mus musculus
  siRNA target sequence for Tcte1 (NM_013688.1,484-502).
gcagctggaagcgtatgtt

SEQ ID NO: 704764 - DNA, 19 bp, Mus musculus
  siRNA target sequence for Tcte1 (NM_013688.1,487-505).
gctggaagcgtatgttctt

SEQ ID NO: 704765 - DNA, 19 bp, Mus musculus
  siRNA target sequence for Tcte1 (NM_013688.1,774-792).
gtgtacggcgtcaaagact

SEQ ID NO: 704766 - DNA, 19 bp, Mus musculus
  siRNA target sequence for Tcte1 (NM_013688.1,871-889).
gccacaccctcaagatctt

SEQ ID NO: 704767 - DNA, 19 bp, Mus musculus
  siRNA target sequence for Tcte1 (NM_013688.1,904-922).
gtaaggtggacgacgataa

SEQ ID NO: 704768 - DNA, 19 bp, Mus musculus
  siRNA target sequence for Tcte1 (NM_013688.1,1296-1314).
ctcgtcagcctcaacctat

SEQ ID NO: 704769 - DNA, 19 bp, Mus musculus
  siRNA target sequence for Ubp1 (NM_013699.1,157-175).
gtctttccttggaagatga

SEQ ID NO: 704770 - DNA, 19 bp, Mus musculus
  siRNA target sequence for Ubp1 (NM_013699.1,189-207).
cccttccaatatgtaatgt

SEQ ID NO: 704771 - DNA, 19 bp, Mus musculus
  siRNA target sequence for Ubp1 (NM_013699.1,217-235).
cttcgccagccgttaagct

SEQ ID NO: 704772 - DNA, 19 bp, Mus musculus
  siRNA target sequence for Ubp1 (NM_013699.1,234-252).
ctgcacgacgagacactta

SEQ ID NO: 704773 - DNA, 19 bp, Mus musculus
  siRNA target sequence for Ubp1 (NM_013699.1,236-254).
gcacgacgagacacttact

SEQ ID NO: 704774 - DNA, 19 bp, Mus musculus
  siRNA target sequence for Ubp1 (NM_013699.1,237-255).
cacgacgagacacttactt

SEQ ID NO: 704775 - DNA, 19 bp, Mus musculus
  siRNA target sequence for Ubp1 (NM_013699.1,240-258).
gacgagacacttacttact

SEQ ID NO: 704776 - DNA, 19 bp, Mus musculus
  siRNA target sequence for Ubp1 (NM_013699.1,430-448).
gagacaggcttctcgattt

SEQ ID NO: 704777 - DNA, 19 bp, Mus musculus
  siRNA target sequence for Ubp1 (NM_013699.1,434-452).
caggcttctcgatttagat

SEQ ID NO: 704778 - DNA, 19 bp, Mus musculus
  siRNA target sequence for Ubp1 (NM_013699.1,436-454).
ggcttctcgatttagatat

SEQ ID NO: 704779 - DNA, 19 bp, Mus musculus
  siRNA target sequence for Ubp1 (NM_013699.1,477-495).
gacacaaggacaaatccaa

SEQ ID NO: 704780 - DNA, 19 bp, Mus musculus
  siRNA target sequence for Ubp1 (NM_013699.1,497-515).
ccagttaaatgcagttgaa

SEQ ID NO: 704781 - DNA, 19 bp, Mus musculus
  siRNA target sequence for Ubp1 (NM_013699.1,498-516).
cagttaaatgcagttgaat

SEQ ID NO: 704782 - DNA, 19 bp, Mus musculus
  siRNA target sequence for Ubp1 (NM_013699.1,548-566).
cttcattcaggtacattgt

SEQ ID NO: 704783 - DNA, 19 bp, Mus musculus
  siRNA target sequence for Ubp1 (NM_013699.1,656-674).
cggggaatacacagatcat

SEQ ID NO: 704784 - DNA, 19 bp, Mus musculus
  siRNA target sequence for Ubp1 (NM_013699.1,841-859).
cccctacagcctatgtgaa

SEQ ID NO: 704785 - DNA, 19 bp, Mus musculus
  siRNA target sequence for Ubp1 (NM_013699.1,844-862).
ctacagcctatgtgaacaa

SEQ ID NO: 704786 - DNA, 19 bp, Mus musculus
  siRNA target sequence for Ubp1 (NM_013699.1,915-933).
gtcccagacagcaattctt

SEQ ID NO: 704787 - DNA, 19 bp, Mus musculus
  siRNA target sequence for Ubp1 (NM_013699.1,970-988).
cgtctggggaacaaattca

SEQ ID NO: 704788 - DNA, 19 bp, Mus musculus
  siRNA target sequence for Ubp1 (NM_013699.1,1017-1035).
cagtggctgctcaaaaaca

SEQ ID NO: 704789 - DNA, 19 bp, Mus musculus
  siRNA target sequence for Ubp1 (NM_013699.1,1075-1093).
gtgccgacttattaaagct

SEQ ID NO: 704790 - DNA, 19 bp, Mus musculus
  siRNA target sequence for Ubp1 (NM_013699.1,1131-1149).
gatggaattcggctctata

SEQ ID NO: 704791 - DNA, 19 bp, Mus musculus
  siRNA target sequence for Ubp1 (NM_013699.1,1134-1152).
ggaattcggctctataatt

SEQ ID NO: 704792 - DNA, 19 bp, Mus musculus
  siRNA target sequence for Ubp1 (NM_013699.1,1179-1197).
cgcttaaccatctatgtct

SEQ ID NO: 704793 - DNA, 19 bp, Mus musculus
  siRNA target sequence for Ubp1 (NM_013699.1,1274-1292).
gacgccctccgtttatcat

SEQ ID NO: 704794 - DNA, 19 bp, Mus musculus
  siRNA target sequence for Ubp1 (NM_013699.1,1279-1297).
cctccgtttatcatgcaat

SEQ ID NO: 704795 - DNA, 19 bp, Mus musculus
  siRNA target sequence for Ubp1 (NM_013699.1,1282-1300).
ccgtttatcatgcaatcta

SEQ ID NO: 704796 - DNA, 19 bp, Mus musculus
  siRNA target sequence for Ubp1 (NM_013699.1,1293-1311).
gcaatctacttggaagaaa

SEQ ID NO: 704797 - DNA, 19 bp, Mus musculus
  siRNA target sequence for Ubp1 (NM_013699.1,1298-1316).
ctacttggaagaaatggtt

SEQ ID NO: 704798 - DNA, 19 bp, Mus musculus
  siRNA target sequence for Ubp1 (NM_013699.1,1321-1339).
cagaagttgctcgaaaact

SEQ ID NO: 704799 - DNA, 19 bp, Mus musculus
  siRNA target sequence for Ubp1 (NM_013699.1,1439-1457).
ctttcaagatgaaacttgt

SEQ ID NO: 704800 - DNA, 19 bp, Mus musculus
  siRNA target sequence for Ubp1 (NM_013699.1,1491-1509).
gatggtattcacataattt

SEQ ID NO: 704801 - DNA, 19 bp, Mus musculus
  siRNA target sequence for Ubp1 (NM_013699.1,1494-1512).
ggtattcacataattttga

SEQ ID NO: 704802 - DNA, 19 bp, Mus musculus
  siRNA target sequence for Ugt1a1 (NM_013701.1,48-66).
gccccttcgaggaatctca

SEQ ID NO: 704803 - DNA, 19 bp, Mus musculus
  siRNA target sequence for Ugt1a1 (NM_013701.1,318-336).
gaagacctttaaaacacaa

SEQ ID NO: 704804 - DNA, 19 bp, Mus musculus
  siRNA target sequence for Ugt1a1 (NM_013701.1,390-408).
cctctactcaaattcttgt

SEQ ID NO: 704805 - DNA, 19 bp, Mus musculus
  siRNA target sequence for Ugt1a1 (NM_013701.1,391-409).
ctctactcaaattcttgta

SEQ ID NO: 704806 - DNA, 19 bp, Mus musculus
  siRNA target sequence for Ugt1a1 (NM_013701.1,396-414).
ctcaaattcttgtatagct

SEQ ID NO: 704807 - DNA, 19 bp, Mus musculus
  siRNA target sequence for Ugt1a1 (NM_013701.1,404-422).
cttgtatagctttattgca

SEQ ID NO: 704808 - DNA, 19 bp, Mus musculus
  siRNA target sequence for Ugt1a1 (NM_013701.1,413-431).
ctttattgcacaataagat

SEQ ID NO: 704809 - DNA, 19 bp, Mus musculus
  siRNA target sequence for Ugt1a1 (NM_013701.1,432-450).
gctgatccagcaactgaat

SEQ ID NO: 704810 - DNA, 19 bp, Mus musculus
  siRNA target sequence for Ugt1a1 (NM_013701.1,452-470).
ccagtttttttgatgtgat

SEQ ID NO: 704811 - DNA, 19 bp, Mus musculus
  siRNA target sequence for Ugt1a1 (NM_013701.1,507-525).
ggccaagtacctacagatt

SEQ ID NO: 704812 - DNA, 19 bp, Mus musculus
  siRNA target sequence for Ugt1a1 (NM_013701.1,573-591).
ggccacacaatgtccaaat

SEQ ID NO: 704813 - DNA, 19 bp, Mus musculus
  siRNA target sequence for Ugt1a1 (NM_013701.1,687-705).
gtacatttgccgtttatca

SEQ ID NO: 704814 - DNA, 19 bp, Mus musculus
  siRNA target sequence for Ugt1a1 (NM_013701.1,741-759).
gcagagagaagtatcctta

SEQ ID NO: 704815 - DNA, 19 bp, Mus musculus
  siRNA target sequence for Ugt1a1 (NM_013701.1,792-810).
gttccgaggggactttgta

SEQ ID NO: 704816 - DNA, 19 bp, Mus musculus
  siRNA target sequence for Ugt1a1 (NM_013701.1,853-871).
gggggcataaactgtgtta

SEQ ID NO: 704817 - DNA, 19 bp, Mus musculus
  siRNA target sequence for Ugt1a1 (NM_013701.1,857-875).
gcataaactgtgttaccaa

SEQ ID NO: 704818 - DNA, 19 bp, Mus musculus
  siRNA target sequence for Krtap14 (NM_013707.1,100-118).
ctgcagtatccgatctctt

SEQ ID NO: 704819 - DNA, 19 bp, Mus musculus
  siRNA target sequence for Krtap14 (NM_013707.1,385-403).
ccatcccagggctttggat

SEQ ID NO: 704820 - DNA, 19 bp, Mus musculus
  siRNA target sequence for Krtap14 (NM_013707.1,425-443).
gatgtggtacccctacttt

SEQ ID NO: 704821 - DNA, 19 bp, Mus musculus
  siRNA target sequence for Krtap14 (NM_013707.1,475-493).
cgcccaacctgcttctcta

SEQ ID NO: 704822 - DNA, 19 bp, Mus musculus
  siRNA target sequence for Krtap14 (NM_013707.1,501-519).
ctgccagtctgtttcttat

SEQ ID NO: 704823 - DNA, 19 bp, Mus musculus
  siRNA target sequence for Sh3yl1 (NM_013709.2,16-34).
ccgataccttctaatctga

SEQ ID NO: 704824 - DNA, 19 bp, Mus musculus
  siRNA target sequence for Sh3yl1 (NM_013709.2,17-35).
cgataccttctaatctgaa

SEQ ID NO: 704825 - DNA, 19 bp, Mus musculus
  siRNA target sequence for Sh3yl1 (NM_013709.2,51-69).
ggctgccaaaatattaaga

SEQ ID NO: 704826 - DNA, 19 bp, Mus musculus
  siRNA target sequence for Sh3yl1 (NM_013709.2,89-107).
ctagaaatggacctgataa

SEQ ID NO: 704827 - DNA, 19 bp, Mus musculus
  siRNA target sequence for Sh3yl1 (NM_013709.2,92-110).
gaaatggacctgataagat

SEQ ID NO: 704828 - DNA, 19 bp, Mus musculus
  siRNA target sequence for Sh3yl1 (NM_013709.2,116-134).
ctgcccacgtgattgcaaa

SEQ ID NO: 704829 - DNA, 19 bp, Mus musculus
  siRNA target sequence for Sh3yl1 (NM_013709.2,120-138).
ccacgtgattgcaaaagct

SEQ ID NO: 704830 - DNA, 19 bp, Mus musculus
  siRNA target sequence for Sh3yl1 (NM_013709.2,121-139).
cacgtgattgcaaaagcta

SEQ ID NO: 704831 - DNA, 19 bp, Mus musculus
  siRNA target sequence for Sh3yl1 (NM_013709.2,123-141).
cgtgattgcaaaagctaaa

SEQ ID NO: 704832 - DNA, 19 bp, Mus musculus
  siRNA target sequence for Sh3yl1 (NM_013709.2,126-144).
gattgcaaaagctaaaggt

SEQ ID NO: 704833 - DNA, 19 bp, Mus musculus
  siRNA target sequence for Sh3yl1 (NM_013709.2,137-155).
ctaaaggtcttgcagtttt

SEQ ID NO: 704834 - DNA, 19 bp, Mus musculus
  siRNA target sequence for Sh3yl1 (NM_013709.2,149-167).
cagttttgtctgtgattaa

SEQ ID NO: 704835 - DNA, 19 bp, Mus musculus
  siRNA target sequence for Sh3yl1 (NM_013709.2,215-233).
cgcgtcttccggatggaaa

SEQ ID NO: 704836 - DNA, 19 bp, Mus musculus
  siRNA target sequence for Sh3yl1 (NM_013709.2,216-234).
gcgtcttccggatggaaaa

SEQ ID NO: 704837 - DNA, 19 bp, Mus musculus
  siRNA target sequence for Sh3yl1 (NM_013709.2,217-235).
cgtcttccggatggaaaat

SEQ ID NO: 704838 - DNA, 19 bp, Mus musculus
  siRNA target sequence for Sh3yl1 (NM_013709.2,220-238).
cttccggatggaaaatggt

SEQ ID NO: 704839 - DNA, 19 bp, Mus musculus
  siRNA target sequence for Sh3yl1 (NM_013709.2,298-316).
gtatccgatttggtgataa

SEQ ID NO: 704840 - DNA, 19 bp, Mus musculus
  siRNA target sequence for Sh3yl1 (NM_013709.2,302-320).
ccgatttggtgataattct

SEQ ID NO: 704841 - DNA, 19 bp, Mus musculus
  siRNA target sequence for Sh3yl1 (NM_013709.2,309-327).
ggtgataattctgaattat

SEQ ID NO: 704842 - DNA, 19 bp, Mus musculus
  siRNA target sequence for Sh3yl1 (NM_013709.2,366-384).
gacccttggagggaatttt

SEQ ID NO: 704843 - DNA, 19 bp, Mus musculus
  siRNA target sequence for Sh3yl1 (NM_013709.2,443-461).
ccgcagccgtcttcacata

SEQ ID NO: 704844 - DNA, 19 bp, Mus musculus
  siRNA target sequence for Sh3yl1 (NM_013709.2,526-544).
gaaaccaatcggaaatttt

SEQ ID NO: 704845 - DNA, 19 bp, Mus musculus
  siRNA target sequence for Sh3yl1 (NM_013709.2,559-577).
cgagcttacgacattttat

SEQ ID NO: 704846 - DNA, 19 bp, Mus musculus
  siRNA target sequence for Sh3yl1 (NM_013709.2,560-578).
gagcttacgacattttatt

SEQ ID NO: 704847 - DNA, 19 bp, Mus musculus
  siRNA target sequence for Sh3yl1 (NM_013709.2,658-676).
gggcagcgcatcaatttga

SEQ ID NO: 704848 - DNA, 19 bp, Mus musculus
  siRNA target sequence for Sh3yl1 (NM_013709.2,661-679).
cagcgcatcaatttgaaga

SEQ ID NO: 704849 - DNA, 19 bp, Mus musculus
  siRNA target sequence for Sh3yl1 (NM_013709.2,663-681).
gcgcatcaatttgaagaaa

SEQ ID NO: 704850 - DNA, 19 bp, Mus musculus
  siRNA target sequence for Sh3yl1 (NM_013709.2,694-712).
cagaggaaggccaaagaat

SEQ ID NO: 704851 - DNA, 19 bp, Mus musculus
  siRNA target sequence for Sh3yl1 (NM_013709.2,772-790).
ggctcccagggtaatagaa

SEQ ID NO: 704852 - DNA, 19 bp, Mus musculus
  siRNA target sequence for Sh3yl1 (NM_013709.2,773-791).
gctcccagggtaatagaaa

SEQ ID NO: 704853 - DNA, 19 bp, Mus musculus
  siRNA target sequence for Sh3yl1 (NM_013709.2,776-794).
cccagggtaatagaaatga

SEQ ID NO: 704854 - DNA, 19 bp, Mus musculus
  siRNA target sequence for Sh3yl1 (NM_013709.2,778-796).
cagggtaatagaaatgaat

SEQ ID NO: 704855 - DNA, 19 bp, Mus musculus
  siRNA target sequence for Sh3yl1 (NM_013709.2,781-799).
ggtaatagaaatgaatata

SEQ ID NO: 704856 - DNA, 19 bp, Mus musculus
  siRNA target sequence for Sh3yl1 (NM_013709.2,802-820).
ctatatcctgagctttcta

SEQ ID NO: 704857 - DNA, 19 bp, Mus musculus
  siRNA target sequence for Sh3yl1 (NM_013709.2,862-880).
gtgacagcattatactctt

SEQ ID NO: 704858 - DNA, 19 bp, Mus musculus
  siRNA target sequence for Sh3yl1 (NM_013709.2,917-935).
caggagacagaatcatagt

SEQ ID NO: 704859 - DNA, 19 bp, Mus musculus
  siRNA target sequence for Sh3yl1 (NM_013709.2,922-940).
gacagaatcatagttatat

SEQ ID NO: 704860 - DNA, 19 bp, Mus musculus
  siRNA target sequence for Sh3yl1 (NM_013709.2,924-942).
cagaatcatagttatatca

SEQ ID NO: 704861 - DNA, 19 bp, Mus musculus
  siRNA target sequence for Sh3yl1 (NM_013709.2,941-959).
caaagaccgactcaaattt

SEQ ID NO: 704862 - DNA, 19 bp, Mus musculus
  siRNA target sequence for Sh3yl1 (NM_013709.2,945-963).
gaccgactcaaattttgat

SEQ ID NO: 704863 - DNA, 19 bp, Mus musculus
  siRNA target sequence for Sh3yl1 (NM_013709.2,982-1000).
cgaggtcaaactggaattt

SEQ ID NO: 704864 - DNA, 19 bp, Mus musculus
  siRNA target sequence for Sh3yl1 (NM_013709.2,1003-1021).
ccagccaactatgtaacta

SEQ ID NO: 704865 - DNA, 19 bp, Mus musculus
  siRNA target sequence for Sh3yl1 (NM_013709.2,1004-1022).
cagccaactatgtaactat

SEQ ID NO: 704866 - DNA, 19 bp, Mus musculus
  siRNA target sequence for Sh3yl1 (NM_013709.2,1006-1024).
gccaactatgtaactatga

SEQ ID NO: 704867 - DNA, 19 bp, Mus musculus
  siRNA target sequence for Itgb1bp2 (NM_013712.1,13-31).
ctctgctctgctataacaa

SEQ ID NO: 704868 - DNA, 19 bp, Mus musculus
  siRNA target sequence for Itgb1bp2 (NM_013712.1,89-107).
ccctggggtgccaatcttt

SEQ ID NO: 704869 - DNA, 19 bp, Mus musculus
  siRNA target sequence for Itgb1bp2 (NM_013712.1,95-113).
ggtgccaatctttcatgat

SEQ ID NO: 704870 - DNA, 19 bp, Mus musculus
  siRNA target sequence for Itgb1bp2 (NM_013712.1,134-152).
ctgccgaaagcgaactgta

SEQ ID NO: 704871 - DNA, 19 bp, Mus musculus
  siRNA target sequence for Itgb1bp2 (NM_013712.1,160-178).
ctgagttcttaaacatcaa

SEQ ID NO: 704872 - DNA, 19 bp, Mus musculus
  siRNA target sequence for Itgb1bp2 (NM_013712.1,239-257).
gggccctgccacaagttca

SEQ ID NO: 704873 - DNA, 19 bp, Mus musculus
  siRNA target sequence for Itgb1bp2 (NM_013712.1,253-271).
gttcacttcaggagcaaaa

SEQ ID NO: 704874 - DNA, 19 bp, Mus musculus
  siRNA target sequence for Itgb1bp2 (NM_013712.1,311-329).
ccgagaaaggcctaagtct

SEQ ID NO: 704875 - DNA, 19 bp, Mus musculus
  siRNA target sequence for Itgb1bp2 (NM_013712.1,345-363).
ctgctaccacttcttatat

SEQ ID NO: 704876 - DNA, 19 bp, Mus musculus
  siRNA target sequence for Itgb1bp2 (NM_013712.1,347-365).
gctaccacttcttatatct

SEQ ID NO: 704877 - DNA, 19 bp, Mus musculus
  siRNA target sequence for Itgb1bp2 (NM_013712.1,412-430).
cgggagcaggacttgacaa

SEQ ID NO: 704878 - DNA, 19 bp, Mus musculus
  siRNA target sequence for Itgb1bp2 (NM_013712.1,529-547).
gggcacctcggtttcatga

SEQ ID NO: 704879 - DNA, 19 bp, Mus musculus
  siRNA target sequence for Itgb1bp2 (NM_013712.1,574-592).
gtatccagactctggattt

SEQ ID NO: 704880 - DNA, 19 bp, Mus musculus
  siRNA target sequence for Itgb1bp2 (NM_013712.1,723-741).
ccgcttcctgcattcaact

SEQ ID NO: 704881 - DNA, 19 bp, Mus musculus
  siRNA target sequence for Itgb1bp2 (NM_013712.1,754-772).
gtcaaactgagcttcatgt

SEQ ID NO: 704882 - DNA, 19 bp, Mus musculus
  siRNA target sequence for Itgb1bp2 (NM_013712.1,864-882).
ccatcacgggttgaaatct

SEQ ID NO: 704883 - DNA, 19 bp, Mus musculus
  siRNA target sequence for Itgb1bp2 (NM_013712.1,920-938).
ggagcaccctgattcacta

SEQ ID NO: 704884 - DNA, 19 bp, Mus musculus
  siRNA target sequence for Krtap15 (NM_013713.1,49-67).
cttgcaactctggaaacta

SEQ ID NO: 704885 - DNA, 19 bp, Mus musculus
  siRNA target sequence for Krtap15 (NM_013713.1,125-143).
ctaccccaccagcaatgta

SEQ ID NO: 704886 - DNA, 19 bp, Mus musculus
  siRNA target sequence for Krtap15 (NM_013713.1,130-148).
ccaccagcaatgtagtcta

SEQ ID NO: 704887 - DNA, 19 bp, Mus musculus
  siRNA target sequence for Krtap15 (NM_013713.1,131-149).
caccagcaatgtagtctat

SEQ ID NO: 704888 - DNA, 19 bp, Mus musculus
  siRNA target sequence for Krtap15 (NM_013713.1,134-152).
cagcaatgtagtctattct

SEQ ID NO: 704889 - DNA, 19 bp, Mus musculus
  siRNA target sequence for Krtap15 (NM_013713.1,170-188).
gggatcctctttctacaat

SEQ ID NO: 704890 - DNA, 19 bp, Mus musculus
  siRNA target sequence for Krtap15 (NM_013713.1,263-281).
ctgtttccggcctaagcaa

SEQ ID NO: 704891 - DNA, 19 bp, Mus musculus
  siRNA target sequence for Krtap15 (NM_013713.1,265-283).
gtttccggcctaagcaata

SEQ ID NO: 704892 - DNA, 19 bp, Mus musculus
  siRNA target sequence for Krtap15 (NM_013713.1,270-288).
cggcctaagcaatacttct

SEQ ID NO: 704893 - DNA, 19 bp, Mus musculus
  siRNA target sequence for Krtap15 (NM_013713.1,401-419).
ctaccgtccaggatacttt

SEQ ID NO: 704894 - DNA, 19 bp, Mus musculus
  siRNA target sequence for Krtap15 (NM_013713.1,404-422).
ccgtccaggatacttttct

SEQ ID NO: 704895 - DNA, 19 bp, Mus musculus
  siRNA target sequence for Krtap15 (NM_013713.1,405-423).
cgtccaggatacttttctt

SEQ ID NO: 704896 - DNA, 19 bp, Mus musculus
  siRNA target sequence for Krtap15 (NM_013713.1,411-429).
ggatacttttcttctaaga

SEQ ID NO: 704897 - DNA, 19 bp, Mus musculus
  siRNA target sequence for Krtap15 (NM_013713.1,430-448).
gtatccagtcatcttacta

SEQ ID NO: 704898 - DNA, 19 bp, Mus musculus
  siRNA target sequence for Krtap15 (NM_013713.1,468-486).
ggcttttgcgggtcaaatt

SEQ ID NO: 704899 - DNA, 19 bp, Mus musculus
  siRNA target sequence for Krtap15 (NM_013713.1,469-487).
gcttttgcgggtcaaattt

SEQ ID NO: 704900 - DNA, 19 bp, Mus musculus
  siRNA target sequence for Irebf1 (NM_013714.1,562-580).
gaagcagatcgatacaagt

SEQ ID NO: 704901 - DNA, 19 bp, Mus musculus
  siRNA target sequence for Irebf1 (NM_013714.1,571-589).
cgatacaagtgaacgattt

SEQ ID NO: 704902 - DNA, 19 bp, Mus musculus
  siRNA target sequence for Irebf1 (NM_013714.1,572-590).
gatacaagtgaacgatttt

SEQ ID NO: 704903 - DNA, 19 bp, Mus musculus
  siRNA target sequence for Irebf1 (NM_013714.1,579-597).
gtgaacgattttatatgat

SEQ ID NO: 704904 - DNA, 19 bp, Mus musculus
  siRNA target sequence for Irebf1 (NM_013714.1,637-655).
gatgctggaagcgaaagtt

SEQ ID NO: 704905 - DNA, 19 bp, Mus musculus
  siRNA target sequence for Irebf1 (NM_013714.1,643-661).
ggaagcgaaagttgcttat

SEQ ID NO: 704906 - DNA, 19 bp, Mus musculus
  siRNA target sequence for Irebf1 (NM_013714.1,647-665).
gcgaaagttgcttatagta

SEQ ID NO: 704907 - DNA, 19 bp, Mus musculus
  siRNA target sequence for Irebf1 (NM_013714.1,673-691).
ggaccgattcaaactatca

SEQ ID NO: 704908 - DNA, 19 bp, Mus musculus
  siRNA target sequence for Irebf1 (NM_013714.1,674-692).
gaccgattcaaactatcat

SEQ ID NO: 704909 - DNA, 19 bp, Mus musculus
  siRNA target sequence for Irebf1 (NM_013714.1,677-695).
cgattcaaactatcattga

SEQ ID NO: 704910 - DNA, 19 bp, Mus musculus
  siRNA target sequence for Irebf1 (NM_013714.1,686-704).
ctatcattgaagaataact

SEQ ID NO: 704911 - DNA, 19 bp, Mus musculus
  siRNA target sequence for Irebf1 (NM_013714.1,710-728).
gatgctgaaggcaatgttt

SEQ ID NO: 704912 - DNA, 19 bp, Mus musculus
  siRNA target sequence for Irebf1 (NM_013714.1,713-731).
gctgaaggcaatgttttct

SEQ ID NO: 704913 - DNA, 19 bp, Mus musculus
  siRNA target sequence for Irebf1 (NM_013714.1,770-788).
gtgggtgagaaaaaagtta

SEQ ID NO: 704914 - DNA, 19 bp, Mus musculus
  siRNA target sequence for Irebf1 (NM_013714.1,796-814).
caaaaaggaattaacgaaa

SEQ ID NO: 704915 - DNA, 19 bp, Mus musculus
  siRNA target sequence for Irebf1 (NM_013714.1,802-820).
ggaattaacgaaattcgat

SEQ ID NO: 704916 - DNA, 19 bp, Mus musculus
  siRNA target sequence for Irebf1 (NM_013714.1,921-939).
gagacaaggaccatataaa

SEQ ID NO: 704917 - DNA, 19 bp, Mus musculus
  siRNA target sequence for Irebf1 (NM_013714.1,925-943).
caaggaccatataaatcga

SEQ ID NO: 704918 - DNA, 19 bp, Mus musculus
  siRNA target sequence for Irebf1 (NM_013714.1,1015-1033).
gtcaagtgatactgagtat

SEQ ID NO: 704919 - DNA, 19 bp, Mus musculus
  siRNA target sequence for Irebf1 (NM_013714.1,1020-1038).
gtgatactgagtatagtga

SEQ ID NO: 704920 - DNA, 19 bp, Mus musculus
  siRNA target sequence for Irebf1 (NM_013714.1,1022-1040).
gatactgagtatagtgata

SEQ ID NO: 704921 - DNA, 19 bp, Mus musculus
  siRNA target sequence for Irebf1 (NM_013714.1,1035-1053).
gtgatactgaattaagtaa

SEQ ID NO: 704922 - DNA, 19 bp, Mus musculus
  siRNA target sequence for Irebf1 (NM_013714.1,1037-1055).
gatactgaattaagtaata

SEQ ID NO: 704923 - DNA, 19 bp, Mus musculus
  siRNA target sequence for Irebf1 (NM_013714.1,1060-1078).
gactaataatcactttgat

SEQ ID NO: 704924 - DNA, 19 bp, Mus musculus
  siRNA target sequence for Irebf1 (NM_013714.1,1062-1080).
ctaataatcactttgatga

SEQ ID NO: 704925 - DNA, 19 bp, Mus musculus
  siRNA target sequence for Irebf1 (NM_013714.1,1096-1114).
caattcaaagtcgatttca

SEQ ID NO: 704926 - DNA, 19 bp, Mus musculus
  siRNA target sequence for Irebf1 (NM_013714.1,1122-1140).
caatcgaagaggatgtgat

SEQ ID NO: 704927 - DNA, 19 bp, Mus musculus
  siRNA target sequence for Irebf1 (NM_013714.1,1141-1159).
caagtgcggggaactcatt

SEQ ID NO: 704928 - DNA, 19 bp, Mus musculus
  siRNA target sequence for Irebf1 (NM_013714.1,1151-1169).
gaactcattggttcaaaca

SEQ ID NO: 704929 - DNA, 19 bp, Mus musculus
  siRNA target sequence for Irebf1 (NM_013714.1,1160-1178).
ggttcaaacacccaaatta

SEQ ID NO: 704930 - DNA, 19 bp, Mus musculus
  siRNA target sequence for Irebf1 (NM_013714.1,1180-1198).
gggtttggtccaaaaacat

SEQ ID NO: 704931 - DNA, 19 bp, Mus musculus
  siRNA target sequence for Irebf1 (NM_013714.1,1181-1199).
ggtttggtccaaaaacatt

SEQ ID NO: 704932 - DNA, 19 bp, Mus musculus
  siRNA target sequence for Irebf1 (NM_013714.1,1182-1200).
gtttggtccaaaaacattt

SEQ ID NO: 704933 - DNA, 19 bp, Mus musculus
  siRNA target sequence for Irebf1 (NM_013714.1,1186-1204).
ggtccaaaaacattttggt

SEQ ID NO: 704934 - DNA, 19 bp, Mus musculus
  siRNA target sequence for Irebf1 (NM_013714.1,1203-1221).
gtgacatgttagttgaaga

SEQ ID NO: 704935 - DNA, 19 bp, Mus musculus
  siRNA target sequence for Irebf1 (NM_013714.1,1234-1252).
ggtggagataattgaaact

SEQ ID NO: 704936 - DNA, 19 bp, Mus musculus
  siRNA target sequence for Irebf1 (NM_013714.1,1238-1256).
gagataattgaaactttaa

SEQ ID NO: 704937 - DNA, 19 bp, Mus musculus
  siRNA target sequence for Irebf1 (NM_013714.1,1240-1258).
gataattgaaactttaata

SEQ ID NO: 704938 - DNA, 19 bp, Mus musculus
  siRNA target sequence for Irebf1 (NM_013714.1,1261-1279).
gacattcaactcattggaa

SEQ ID NO: 704939 - DNA, 19 bp, Mus musculus
  siRNA target sequence for Irebf1 (NM_013714.1,1295-1313).
ggaaatcagagccttgtta

SEQ ID NO: 704940 - DNA, 19 bp, Mus musculus
  siRNA target sequence for Irebf1 (NM_013714.1,1334-1352).
cgagatgaggctgtacttt

SEQ ID NO: 704941 - DNA, 19 bp, Mus musculus
  siRNA target sequence for Irebf1 (NM_013714.1,1374-1392).
cgaaccaactagagtacat

SEQ ID NO: 704942 - DNA, 19 bp, Mus musculus
  siRNA target sequence for Irebf1 (NM_013714.1,1390-1408).
catgcgtgataatttggta

SEQ ID NO: 704943 - DNA, 19 bp, Mus musculus
  siRNA target sequence for Irebf1 (NM_013714.1,1417-1435).
ccatttcgctgcctatttt

SEQ ID NO: 704944 - DNA, 19 bp, Mus musculus
  siRNA target sequence for Irebf1 (NM_013714.1,1436-1454).
gctaagggtctatcaaata

SEQ ID NO: 704945 - DNA, 19 bp, Mus musculus
  siRNA target sequence for Irebf1 (NM_013714.1,1441-1459).
gggtctatcaaatagagtt

SEQ ID NO: 704946 - DNA, 19 bp, Mus musculus
  siRNA target sequence for Irebf1 (NM_013714.1,1442-1460).
ggtctatcaaatagagtta

SEQ ID NO: 704947 - DNA, 19 bp, Mus musculus
  siRNA target sequence for Cops5 (NM_013715.1,160-178).
ggaagcgcagagtatcgat

SEQ ID NO: 704948 - DNA, 19 bp, Mus musculus
  siRNA target sequence for Cops5 (NM_013715.1,164-182).
gcgcagagtatcgatgaaa

SEQ ID NO: 704949 - DNA, 19 bp, Mus musculus
  siRNA target sequence for Cops5 (NM_013715.1,165-183).
cgcagagtatcgatgaaat

SEQ ID NO: 704950 - DNA, 19 bp, Mus musculus
  siRNA target sequence for Cops5 (NM_013715.1,171-189).
gtatcgatgaaatctacaa

SEQ ID NO: 704951 - DNA, 19 bp, Mus musculus
  siRNA target sequence for Cops5 (NM_013715.1,179-197).
gaaatctacaaatatgaca

SEQ ID NO: 704952 - DNA, 19 bp, Mus musculus
  siRNA target sequence for Cops5 (NM_013715.1,184-202).
ctacaaatatgacaaaaaa

SEQ ID NO: 704953 - DNA, 19 bp, Mus musculus
  siRNA target sequence for Cops5 (NM_013715.1,226-244).
gaaaccctggactaaggat

SEQ ID NO: 704954 - DNA, 19 bp, Mus musculus
  siRNA target sequence for Cops5 (NM_013715.1,237-255).
ctaaggatcaccactactt

SEQ ID NO: 704955 - DNA, 19 bp, Mus musculus
  siRNA target sequence for Cops5 (NM_013715.1,241-259).
ggatcaccactactttaaa

SEQ ID NO: 704956 - DNA, 19 bp, Mus musculus
  siRNA target sequence for Cops5 (NM_013715.1,245-263).
caccactactttaaatact

SEQ ID NO: 704957 - DNA, 19 bp, Mus musculus
  siRNA target sequence for Cops5 (NM_013715.1,356-374).
gacggcgagaccatgatca

SEQ ID NO: 704958 - DNA, 19 bp, Mus musculus
  siRNA target sequence for Cops5 (NM_013715.1,428-446).
caagctgctgcgtatgagt

SEQ ID NO: 704959 - DNA, 19 bp, Mus musculus
  siRNA target sequence for Cops5 (NM_013715.1,431-449).
gctgctgcgtatgagtata

SEQ ID NO: 704960 - DNA, 19 bp, Mus musculus
  siRNA target sequence for Cops5 (NM_013715.1,432-450).
ctgctgcgtatgagtatat

SEQ ID NO: 704961 - DNA, 19 bp, Mus musculus
  siRNA target sequence for Cops5 (NM_013715.1,493-511).
gaatgcaatcggttggtat

SEQ ID NO: 704962 - DNA, 19 bp, Mus musculus
  siRNA target sequence for Cops5 (NM_013715.1,497-515).
gcaatcggttggtatcata

SEQ ID NO: 704963 - DNA, 19 bp, Mus musculus
  siRNA target sequence for Cops5 (NM_013715.1,535-553).
ctggctctccgggattgat

SEQ ID NO: 704964 - DNA, 19 bp, Mus musculus
  siRNA target sequence for Cops5 (NM_013715.1,538-556).
gctctccgggattgatgtt

SEQ ID NO: 704965 - DNA, 19 bp, Mus musculus
  siRNA target sequence for Cops5 (NM_013715.1,541-559).
ctccgggattgatgttagt

SEQ ID NO: 704966 - DNA, 19 bp, Mus musculus
  siRNA target sequence for Cops5 (NM_013715.1,544-562).
cgggattgatgttagtaca

SEQ ID NO: 704967 - DNA, 19 bp, Mus musculus
  siRNA target sequence for Cops5 (NM_013715.1,580-598).
gtttcaagaaccatttgta

SEQ ID NO: 704968 - DNA, 19 bp, Mus musculus
  siRNA target sequence for Cops5 (NM_013715.1,652-670).
cgcctttaggacatatcca

SEQ ID NO: 704969 - DNA, 19 bp, Mus musculus
  siRNA target sequence for Cops5 (NM_013715.1,653-671).
gcctttaggacatatccaa

SEQ ID NO: 704970 - DNA, 19 bp, Mus musculus
  siRNA target sequence for Cops5 (NM_013715.1,654-672).
cctttaggacatatccaaa

SEQ ID NO: 704971 - DNA, 19 bp, Mus musculus
  siRNA target sequence for Cops5 (NM_013715.1,676-694).
ctacaaacctcctgatgaa

SEQ ID NO: 704972 - DNA, 19 bp, Mus musculus
  siRNA target sequence for Cops5 (NM_013715.1,712-730).
gactatcccacttaataaa

SEQ ID NO: 704973 - DNA, 19 bp, Mus musculus
  siRNA target sequence for Cops5 (NM_013715.1,714-732).
ctatcccacttaataaaat

SEQ ID NO: 704974 - DNA, 19 bp, Mus musculus
  siRNA target sequence for Cops5 (NM_013715.1,743-761).
ggcgtgcactgcaaacaat

SEQ ID NO: 704975 - DNA, 19 bp, Mus musculus
  siRNA target sequence for Cops5 (NM_013715.1,744-762).
gcgtgcactgcaaacaata

SEQ ID NO: 704976 - DNA, 19 bp, Mus musculus
  siRNA target sequence for Cops5 (NM_013715.1,745-763).
cgtgcactgcaaacaatat

SEQ ID NO: 704977 - DNA, 19 bp, Mus musculus
  siRNA target sequence for Cops5 (NM_013715.1,748-766).
gcactgcaaacaatattat

SEQ ID NO: 704978 - DNA, 19 bp, Mus musculus
  siRNA target sequence for Cops5 (NM_013715.1,767-785).
gccttagaagtctcatatt

SEQ ID NO: 704979 - DNA, 19 bp, Mus musculus
  siRNA target sequence for Cops5 (NM_013715.1,776-794).
gtctcatatttcaaatcat

SEQ ID NO: 704980 - DNA, 19 bp, Mus musculus
  siRNA target sequence for Cops5 (NM_013715.1,792-810).
catctttggatcgtaaact

SEQ ID NO: 704981 - DNA, 19 bp, Mus musculus
  siRNA target sequence for Cops5 (NM_013715.1,795-813).
ctttggatcgtaaactact

SEQ ID NO: 704982 - DNA, 19 bp, Mus musculus
  siRNA target sequence for Cops5 (NM_013715.1,812-830).
cttgagcttttgtggaata

SEQ ID NO: 704983 - DNA, 19 bp, Mus musculus
  siRNA target sequence for Cops5 (NM_013715.1,855-873).
cctctagcttgcttactaa

SEQ ID NO: 704984 - DNA, 19 bp, Mus musculus
  siRNA target sequence for Cops5 (NM_013715.1,856-874).
ctctagcttgcttactaat

SEQ ID NO: 704985 - DNA, 19 bp, Mus musculus
  siRNA target sequence for Cops5 (NM_013715.1,885-903).
ccacaggccaggtgtttga

SEQ ID NO: 704986 - DNA, 19 bp, Mus musculus
  siRNA target sequence for Cops5 (NM_013715.1,938-956).
ctgggacgtggcagtttca

SEQ ID NO: 704987 - DNA, 19 bp, Mus musculus
  siRNA target sequence for Cops5 (NM_013715.1,941-959).
ggacgtggcagtttcatgt

SEQ ID NO: 704988 - DNA, 19 bp, Mus musculus
  siRNA target sequence for Cops5 (NM_013715.1,979-997).
ccgcaagtcggaagacaaa

SEQ ID NO: 704989 - DNA, 19 bp, Mus musculus
  siRNA target sequence for Cops5 (NM_013715.1,982-1000).
caagtcggaagacaaactt

SEQ ID NO: 704990 - DNA, 19 bp, Mus musculus
  siRNA target sequence for Cops5 (NM_013715.1,992-1010).
gacaaacttgccaaagcta

SEQ ID NO: 704991 - DNA, 19 bp, Mus musculus
  siRNA target sequence for Cops5 (NM_013715.1,1073-1091).
gataaactgtttaatcaga

SEQ ID NO: 704992 - DNA, 19 bp, Mus musculus
  siRNA target sequence for Cops5 (NM_013715.1,1081-1099).
gtttaatcagattaacgtt

SEQ ID NO: 704993 - DNA, 19 bp, Mus musculus
  siRNA target sequence for Eppb9 (NM_013717.1,126-144).
gcaagtactgctttgtgta

SEQ ID NO: 704994 - DNA, 19 bp, Mus musculus
  siRNA target sequence for Eppb9 (NM_013717.1,127-145).
caagtactgctttgtgtat

SEQ ID NO: 704995 - DNA, 19 bp, Mus musculus
  siRNA target sequence for Eppb9 (NM_013717.1,414-432).
ctacatctacactacagaa

SEQ ID NO: 704996 - DNA, 19 bp, Mus musculus
  siRNA target sequence for Eppb9 (NM_013717.1,521-539).
cgctctcagggatttgtta

SEQ ID NO: 704997 - DNA, 19 bp, Mus musculus
  siRNA target sequence for Eppb9 (NM_013717.1,574-592).
gaagctgggctatgatact

SEQ ID NO: 704998 - DNA, 19 bp, Mus musculus
  siRNA target sequence for Phlda3 (NM_013750.1,611-629).
ggcctggtcaagttcaaga

SEQ ID NO: 704999 - DNA, 19 bp, Mus musculus
  siRNA target sequence for Pald (NM_013753.1,170-188).
cgtgccacaagtttacaca

SEQ ID NO: 705000 - DNA, 19 bp, Mus musculus
  siRNA target sequence for Pald (NM_013753.1,230-248).
gttgtgatcacgtacaact

SEQ ID NO: 705001 - DNA, 19 bp, Mus musculus
  siRNA target sequence for Pald (NM_013753.1,338-356).
gtgcagggtcgctatttct

SEQ ID NO: 705002 - DNA, 19 bp, Mus musculus
  siRNA target sequence for Pald (NM_013753.1,516-534).
gactcaaggagtgcattat

SEQ ID NO: 705003 - DNA, 19 bp, Mus musculus
  siRNA target sequence for Pald (NM_013753.1,702-720).
cccaattgagagataatgt

SEQ ID NO: 705004 - DNA, 19 bp, Mus musculus
  siRNA target sequence for Pald (NM_013753.1,800-818).
gtgaccgaggaggtgttta

SEQ ID NO: 705005 - DNA, 19 bp, Mus musculus
  siRNA target sequence for Pald (NM_013753.1,833-851).
ctgcagcccacctacagat

SEQ ID NO: 705006 - DNA, 19 bp, Mus musculus
  siRNA target sequence for Pald (NM_013753.1,1700-1718).
gaggaggttgtgttagagt

SEQ ID NO: 705007 - DNA, 19 bp, Mus musculus
  siRNA target sequence for Pald (NM_013753.1,2237-2255).
gcggcgttggacattgtca

SEQ ID NO: 705008 - DNA, 19 bp, Mus musculus
  siRNA target sequence for Pald (NM_013753.1,2285-2303).
cttcgggagatcatcatat

SEQ ID NO: 705009 - DNA, 19 bp, Mus musculus
  siRNA target sequence for Sepr (NM_013759.1,67-85).
gcgaggttttccagaatca

SEQ ID NO: 705010 - DNA, 19 bp, Mus musculus
  siRNA target sequence for Sepr (NM_013759.1,172-190).
cagcgttcactgaaaccat

SEQ ID NO: 705011 - DNA, 19 bp, Mus musculus
  siRNA target sequence for Sepr (NM_013759.1,277-295).
gccacgagttcctgaatga

SEQ ID NO: 705012 - DNA, 19 bp, Mus musculus
  siRNA target sequence for Sepr (NM_013759.1,300-318).
cccaagcggggacaatcaa

SEQ ID NO: 705013 - DNA, 19 bp, Mus musculus
  siRNA target sequence for Sepr (NM_013759.1,302-320).
caagcggggacaatcaaga

SEQ ID NO: 705014 - DNA, 19 bp, Mus musculus
  siRNA target sequence for Sepr (NM_013759.1,306-324).
cggggacaatcaagattct

SEQ ID NO: 705015 - DNA, 19 bp, Mus musculus
  siRNA target sequence for Sepr (NM_013759.1,308-326).
gggacaatcaagattctga

SEQ ID NO: 705016 - DNA, 19 bp, Mus musculus
  siRNA target sequence for Sepr (NM_013759.1,309-327).
ggacaatcaagattctgaa

SEQ ID NO: 705017 - DNA, 19 bp, Mus musculus
  siRNA target sequence for Sepr (NM_013759.1,310-328).
gacaatcaagattctgaat

SEQ ID NO: 705018 - DNA, 19 bp, Mus musculus
  siRNA target sequence for Sepr (NM_013759.1,350-368).
cgtccctaaaggcaaagaa

SEQ ID NO: 705019 - DNA, 19 bp, Mus musculus
  siRNA target sequence for Tbl2 (NM_013763.2,147-165).
gcccgtctgtcagaaagaa

SEQ ID NO: 705020 - DNA, 19 bp, Mus musculus
  siRNA target sequence for Tbl2 (NM_013763.2,359-377).
gtatctggagcactaaaga

SEQ ID NO: 705021 - DNA, 19 bp, Mus musculus
  siRNA target sequence for Tbl2 (NM_013763.2,488-506).
gggacaccctccgtgtttt

SEQ ID NO: 705022 - DNA, 19 bp, Mus musculus
  siRNA target sequence for Tbl2 (NM_013763.2,489-507).
ggacaccctccgtgttttt

SEQ ID NO: 705023 - DNA, 19 bp, Mus musculus
  siRNA target sequence for Tbl2 (NM_013763.2,490-508).
gacaccctccgtgttttta

SEQ ID NO: 705024 - DNA, 19 bp, Mus musculus
  siRNA target sequence for Tbl2 (NM_013763.2,523-541).
gaagatgggggctttactt

SEQ ID NO: 705025 - DNA, 19 bp, Mus musculus
  siRNA target sequence for Tbl2 (NM_013763.2,526-544).
gatgggggctttactttca

SEQ ID NO: 705026 - DNA, 19 bp, Mus musculus
  siRNA target sequence for Tbl2 (NM_013763.2,605-623).
ctgacacagggaagttcat

SEQ ID NO: 705027 - DNA, 19 bp, Mus musculus
  siRNA target sequence for Tbl2 (NM_013763.2,649-667).
gtcctcatatggaatctga

SEQ ID NO: 705028 - DNA, 19 bp, Mus musculus
  siRNA target sequence for Tbl2 (NM_013763.2,980-998).
ggacaggccgctttgaaga

SEQ ID NO: 705029 - DNA, 19 bp, Mus musculus
  siRNA target sequence for Tbl2 (NM_013763.2,1058-1076).
ccactggcaccaatattca

SEQ ID NO: 705030 - DNA, 19 bp, Mus musculus
  siRNA target sequence for Tbl2 (NM_013763.2,1125-1143).
ccatggggagtgtattgct

SEQ ID NO: 705031 - DNA, 19 bp, Mus musculus
  siRNA target sequence for Tbl2 (NM_013763.2,1264-1282).
cgggcatccagcgaaagta

SEQ ID NO: 705032 - DNA, 19 bp, Mus musculus
  siRNA target sequence for Tcl1b1 (NM_013773.1,200-218).
ggagaacccatgtaactgt

SEQ ID NO: 705033 - DNA, 19 bp, Mus musculus
  siRNA target sequence for Tcl1b1 (NM_013773.1,312-330).
catatactgggcaacagat

SEQ ID NO: 705034 - DNA, 19 bp, Mus musculus
  siRNA target sequence for Tcl1b4 (NM_013774.1,265-283).
cccgactctctcaagactt

SEQ ID NO: 705035 - DNA, 19 bp, Mus musculus
  siRNA target sequence for Tcl1b4 (NM_013774.1,266-284).
ccgactctctcaagacttt

SEQ ID NO: 705036 - DNA, 19 bp, Mus musculus
  siRNA target sequence for Tcl1b4 (NM_013774.1,268-286).
gactctctcaagactttca

SEQ ID NO: 705037 - DNA, 19 bp, Mus musculus
  siRNA target sequence for Tcl1b4 (NM_013774.1,397-415).
gtcctgatgctggattcaa

SEQ ID NO: 705038 - DNA, 19 bp, Mus musculus
  siRNA target sequence for Tcl1b2 (NM_013775.1,113-131).
caggaccgggcttctatga

SEQ ID NO: 705039 - DNA, 19 bp, Mus musculus
  siRNA target sequence for Tcl1b2 (NM_013775.1,252-270).
ggagcctgctccctacaat

SEQ ID NO: 705040 - DNA, 19 bp, Mus musculus
  siRNA target sequence for Tcl1b2 (NM_013775.1,294-312).
catgacgtggagattagca

SEQ ID NO: 705041 - DNA, 19 bp, Mus musculus
  siRNA target sequence for Akr1c12 (NM_013777.1,760-778).
gcgaagccctgccctaatt

SEQ ID NO: 705042 - DNA, 19 bp, Mus musculus
  siRNA target sequence for Magel2 (NM_013779.1,551-569).
gcctcatcagcatgtaagt

SEQ ID NO: 705043 - DNA, 19 bp, Mus musculus
  siRNA target sequence for Magel2 (NM_013779.1,626-644).
gcagaggcctctaagtctt

SEQ ID NO: 705044 - DNA, 19 bp, Mus musculus
  siRNA target sequence for Magel2 (NM_013779.1,688-706).
gcatctggaacccaaagaa

SEQ ID NO: 705045 - DNA, 19 bp, Mus musculus
  siRNA target sequence for Magel2 (NM_013779.1,760-778).
gggcaatcccagtcattct

SEQ ID NO: 705046 - DNA, 19 bp, Mus musculus
  siRNA target sequence for Magel2 (NM_013779.1,762-780).
gcaatcccagtcattctga

SEQ ID NO: 705047 - DNA, 19 bp, Mus musculus
  siRNA target sequence for Magel2 (NM_013779.1,836-854).
ccgcagggcctgaatgact

SEQ ID NO: 705048 - DNA, 19 bp, Mus musculus
  siRNA target sequence for Magel2 (NM_013779.1,857-875).
gggtgccccaacacttcta

SEQ ID NO: 705049 - DNA, 19 bp, Mus musculus
  siRNA target sequence for Magel2 (NM_013779.1,906-924).
cttcacgggaccaggaatt

SEQ ID NO: 705050 - DNA, 19 bp, Mus musculus
  siRNA target sequence for Magel2 (NM_013779.1,1106-1124).
cagctctcggagatggtaa

SEQ ID NO: 705051 - DNA, 19 bp, Mus musculus
  siRNA target sequence for Magel2 (NM_013779.1,1108-1126).
gctctcggagatggtaaat

SEQ ID NO: 705052 - DNA, 19 bp, Mus musculus
  siRNA target sequence for Magel2 (NM_013779.1,1111-1129).
ctcggagatggtaaatgtt

SEQ ID NO: 705053 - DNA, 19 bp, Mus musculus
  siRNA target sequence for Magel2 (NM_013779.1,1113-1131).
cggagatggtaaatgttgt

SEQ ID NO: 705054 - DNA, 19 bp, Mus musculus
  siRNA target sequence for Magel2 (NM_013779.1,1239-1257).
cttacatcatcgtcaacaa

SEQ ID NO: 705055 - DNA, 19 bp, Mus musculus
  siRNA target sequence for Magel2 (NM_013779.1,1261-1279).
ggcgtaccctcagtgtaat

SEQ ID NO: 705056 - DNA, 19 bp, Mus musculus
  siRNA target sequence for Magel2 (NM_013779.1,1262-1280).
gcgtaccctcagtgtaatt

SEQ ID NO: 705057 - DNA, 19 bp, Mus musculus
  siRNA target sequence for Magel2 (NM_013779.1,1263-1281).
cgtaccctcagtgtaattt

SEQ ID NO: 705058 - DNA, 19 bp, Mus musculus
  siRNA target sequence for Magel2 (NM_013779.1,1333-1351).
gagcctcatctttatgaaa

SEQ ID NO: 705059 - DNA, 19 bp, Mus musculus
  siRNA target sequence for Magel2 (NM_013779.1,1419-1437).
caagtggtctcttcagaat

SEQ ID NO: 705060 - DNA, 19 bp, Mus musculus
  siRNA target sequence for Magel2 (NM_013779.1,1424-1442).
ggtctcttcagaattacaa

SEQ ID NO: 705061 - DNA, 19 bp, Mus musculus
  siRNA target sequence for Magel2 (NM_013779.1,1447-1465).
gctcatcaccagtgtgttt

SEQ ID NO: 705062 - DNA, 19 bp, Mus musculus
  siRNA target sequence for Magel2 (NM_013779.1,1470-1488).
gacacaggtacctagagta

SEQ ID NO: 705063 - DNA, 19 bp, Mus musculus
  siRNA target sequence for Magel2 (NM_013779.1,1542-1560).
gggcattcctcgaaaccaa

SEQ ID NO: 705064 - DNA, 19 bp, Mus musculus
  siRNA target sequence for Magel2 (NM_013779.1,1557-1575).
ccaacagggtgcacatctt

SEQ ID NO: 705065 - DNA, 19 bp, Mus musculus
  siRNA target sequence for Magel2 (NM_013779.1,1564-1582).
ggtgcacatcttgagattt

SEQ ID NO: 705066 - DNA, 19 bp, Mus musculus
  siRNA target sequence for Magel2 (NM_013779.1,1565-1583).
gtgcacatcttgagatttt

SEQ ID NO: 705067 - DNA, 19 bp, Mus musculus
  siRNA target sequence for Peg12 (NM_013788.1,915-933).
gcgaccctggcgattgtga

SEQ ID NO: 705068 - DNA, 19 bp, Mus musculus
  siRNA target sequence for Peg12 (NM_013788.1,916-934).
cgaccctggcgattgtgat

SEQ ID NO: 705069 - DNA, 19 bp, Mus musculus
  siRNA target sequence for Mkln1 (NM_013791.1,61-79).
ccctacgcgctgcataagt

SEQ ID NO: 705070 - DNA, 19 bp, Mus musculus
  siRNA target sequence for Mkln1 (NM_013791.1,102-120).
ccttcccgagaacatttta

SEQ ID NO: 705071 - DNA, 19 bp, Mus musculus
  siRNA target sequence for Mkln1 (NM_013791.1,114-132).
cattttagtggataaacca

SEQ ID NO: 705072 - DNA, 19 bp, Mus musculus
  siRNA target sequence for Mkln1 (NM_013791.1,175-193).
ccccaatacttgattctga

SEQ ID NO: 705073 - DNA, 19 bp, Mus musculus
  siRNA target sequence for Mkln1 (NM_013791.1,203-221).
ggcctgctatcgttcagaa

SEQ ID NO: 705074 - DNA, 19 bp, Mus musculus
  siRNA target sequence for Mkln1 (NM_013791.1,204-222).
gcctgctatcgttcagaat

SEQ ID NO: 705075 - DNA, 19 bp, Mus musculus
  siRNA target sequence for Mkln1 (NM_013791.1,205-223).
cctgctatcgttcagaata

SEQ ID NO: 705076 - DNA, 19 bp, Mus musculus
  siRNA target sequence for Mkln1 (NM_013791.1,206-224).
ctgctatcgttcagaatat

SEQ ID NO: 705077 - DNA, 19 bp, Mus musculus
  siRNA target sequence for Mkln1 (NM_013791.1,208-226).
gctatcgttcagaatatta

SEQ ID NO: 705078 - DNA, 19 bp, Mus musculus
  siRNA target sequence for Mkln1 (NM_013791.1,248-266).
ctcatgtctgcaatttgaa

SEQ ID NO: 705079 - DNA, 19 bp, Mus musculus
  siRNA target sequence for Mkln1 (NM_013791.1,323-341).
gtggcctgaagaatgatta

SEQ ID NO: 705080 - DNA, 19 bp, Mus musculus
  siRNA target sequence for Mkln1 (NM_013791.1,325-343).
ggcctgaagaatgattata

SEQ ID NO: 705081 - DNA, 19 bp, Mus musculus
  siRNA target sequence for Mkln1 (NM_013791.1,326-344).
gcctgaagaatgattataa

SEQ ID NO: 705082 - DNA, 19 bp, Mus musculus
  siRNA target sequence for Mkln1 (NM_013791.1,330-348).
gaagaatgattataacaaa

SEQ ID NO: 705083 - DNA, 19 bp, Mus musculus
  siRNA target sequence for Mkln1 (NM_013791.1,351-369).
gacatttaccttgaaacat

SEQ ID NO: 705084 - DNA, 19 bp, Mus musculus
  siRNA target sequence for Mkln1 (NM_013791.1,387-405).
gttcccttgtcgattcatt

SEQ ID NO: 705085 - DNA, 19 bp, Mus musculus
  siRNA target sequence for Mkln1 (NM_013791.1,391-409).
ccttgtcgattcattaaaa

SEQ ID NO: 705086 - DNA, 19 bp, Mus musculus
  siRNA target sequence for Mkln1 (NM_013791.1,392-410).
cttgtcgattcattaaaat

SEQ ID NO: 705087 - DNA, 19 bp, Mus musculus
  siRNA target sequence for Mkln1 (NM_013791.1,395-413).
gtcgattcattaaaattgt

SEQ ID NO: 705088 - DNA, 19 bp, Mus musculus
  siRNA target sequence for Mkln1 (NM_013791.1,453-471).
ctggtatgttgaacttagt

SEQ ID NO: 705089 - DNA, 19 bp, Mus musculus
  siRNA target sequence for Mkln1 (NM_013791.1,540-558).
cattcgcctttgcctaaaa

SEQ ID NO: 705090 - DNA, 19 bp, Mus musculus
  siRNA target sequence for Mkln1 (NM_013791.1,559-577).
cacttcagacaacataact

SEQ ID NO: 705091 - DNA, 19 bp, Mus musculus
  siRNA target sequence for Mkln1 (NM_013791.1,622-640).
ctggaacatccaatgttga

SEQ ID NO: 705092 - DNA, 19 bp, Mus musculus
  siRNA target sequence for Mkln1 (NM_013791.1,628-646).
catccaatgttgacagata

SEQ ID NO: 705093 - DNA, 19 bp, Mus musculus
  siRNA target sequence for Mkln1 (NM_013791.1,632-650).
caatgttgacagatatgca

SEQ ID NO: 705094 - DNA, 19 bp, Mus musculus
  siRNA target sequence for Mkln1 (NM_013791.1,639-657).
gacagatatgcatgacaaa

SEQ ID NO: 705095 - DNA, 19 bp, Mus musculus
  siRNA target sequence for Mkln1 (NM_013791.1,683-701).
cttgcgaggagttgattga

SEQ ID NO: 705096 - DNA, 19 bp, Mus musculus
  siRNA target sequence for Mkln1 (NM_013791.1,686-704).
gcgaggagttgattgaaaa

SEQ ID NO: 705097 - DNA, 19 bp, Mus musculus
  siRNA target sequence for Mkln1 (NM_013791.1,687-705).
cgaggagttgattgaaaaa

SEQ ID NO: 705098 - DNA, 19 bp, Mus musculus
  siRNA target sequence for Mkln1 (NM_013791.1,709-727).
gtaaatgatggcttgttca

SEQ ID NO: 705099 - DNA, 19 bp, Mus musculus
  siRNA target sequence for Mkln1 (NM_013791.1,715-733).
gatggcttgttcaatcagt

SEQ ID NO: 705100 - DNA, 19 bp, Mus musculus
  siRNA target sequence for Mkln1 (NM_013791.1,718-736).
ggcttgttcaatcagtata

SEQ ID NO: 705101 - DNA, 19 bp, Mus musculus
  siRNA target sequence for Mkln1 (NM_013791.1,719-737).
gcttgttcaatcagtatat

SEQ ID NO: 705102 - DNA, 19 bp, Mus musculus
  siRNA target sequence for Mkln1 (NM_013791.1,723-741).
gttcaatcagtatatcagt

SEQ ID NO: 705103 - DNA, 19 bp, Mus musculus
  siRNA target sequence for Mkln1 (NM_013791.1,764-782).
ggagtcagattattcctaa

SEQ ID NO: 705104 - DNA, 19 bp, Mus musculus
  siRNA target sequence for Mkln1 (NM_013791.1,789-807).
caaaggcgatggagaagat

SEQ ID NO: 705105 - DNA, 19 bp, Mus musculus
  siRNA target sequence for Mkln1 (NM_013791.1,852-870).
ccagacagagactgtttat

SEQ ID NO: 705106 - DNA, 19 bp, Mus musculus
  siRNA target sequence for Mkln1 (NM_013791.1,937-955).
cagtggacatgtatttcta

SEQ ID NO: 705107 - DNA, 19 bp, Mus musculus
  siRNA target sequence for Mkln1 (NM_013791.1,986-1004).
ccagatcgtgtcataagat

SEQ ID NO: 705108 - DNA, 19 bp, Mus musculus
  siRNA target sequence for Mkln1 (NM_013791.1,1012-1030).
gacattcagcggagacaaa

SEQ ID NO: 705109 - DNA, 19 bp, Mus musculus
  siRNA target sequence for Mkln1 (NM_013791.1,1018-1036).
cagcggagacaaatctaca

SEQ ID NO: 705110 - DNA, 19 bp, Mus musculus
  siRNA target sequence for Mkln1 (NM_013791.1,1021-1039).
cggagacaaatctacacat

SEQ ID NO: 705111 - DNA, 19 bp, Mus musculus
  siRNA target sequence for Mkln1 (NM_013791.1,1068-1086).
gaacagcaaatctctgaaa

SEQ ID NO: 705112 - DNA, 19 bp, Mus musculus
  siRNA target sequence for Mkln1 (NM_013791.1,1100-1118).
gttacgacattgacactaa

SEQ ID NO: 705113 - DNA, 19 bp, Mus musculus
  siRNA target sequence for Mkln1 (NM_013791.1,1105-1123).
gacattgacactaatacct

SEQ ID NO: 705114 - DNA, 19 bp, Mus musculus
  siRNA target sequence for Mkln1 (NM_013791.1,1113-1131).
cactaatacctggatgtta

SEQ ID NO: 705115 - DNA, 19 bp, Mus musculus
  siRNA target sequence for Mkln1 (NM_013791.1,1115-1133).
ctaatacctggatgttact

SEQ ID NO: 705116 - DNA, 19 bp, Mus musculus
  siRNA target sequence for Mkln1 (NM_013791.1,1121-1139).
cctggatgttactaagtga

SEQ ID NO: 705117 - DNA, 19 bp, Mus musculus
  siRNA target sequence for Mkln1 (NM_013791.1,1122-1140).
ctggatgttactaagtgaa

SEQ ID NO: 705118 - DNA, 19 bp, Mus musculus
  siRNA target sequence for Mkln1 (NM_013791.1,1151-1169).
ccgacggtggaccaaagtt

SEQ ID NO: 705119 - DNA, 19 bp, Mus musculus
  siRNA target sequence for Mkln1 (NM_013791.1,1163-1181).
caaagttggtgtttgatca

SEQ ID NO: 705120 - DNA, 19 bp, Mus musculus
  siRNA target sequence for Mkln1 (NM_013791.1,1190-1208).
gtatggactcagaaaaaca

SEQ ID NO: 705121 - DNA, 19 bp, Mus musculus
  siRNA target sequence for Mkln1 (NM_013791.1,1201-1219).
gaaaaacatatgatctaca

SEQ ID NO: 705122 - DNA, 19 bp, Mus musculus
  siRNA target sequence for Mkln1 (NM_013791.1,1220-1238).
cgtttggtggcaggatttt

SEQ ID NO: 705123 - DNA, 19 bp, Mus musculus
  siRNA target sequence for Mkln1 (NM_013791.1,1230-1248).
caggattttgacgtgtaat

SEQ ID NO: 705124 - DNA, 19 bp, Mus musculus
  siRNA target sequence for Mkln1 (NM_013791.1,1268-1286).
gagccagtgagccacaatt

SEQ ID NO: 705125 - DNA, 19 bp, Mus musculus
  siRNA target sequence for Mkln1 (NM_013791.1,1270-1288).
gccagtgagccacaattca

SEQ ID NO: 705126 - DNA, 19 bp, Mus musculus
  siRNA target sequence for Mkln1 (NM_013791.1,1291-1309).
gggttgtttgcgttcaact

SEQ ID NO: 705127 - DNA, 19 bp, Mus musculus
  siRNA target sequence for Mkln1 (NM_013791.1,1391-1409).
gcatgctgttccactcaaa

SEQ ID NO: 705128 - DNA, 19 bp, Mus musculus
  siRNA target sequence for Mkln1 (NM_013791.1,1392-1410).
catgctgttccactcaaaa

SEQ ID NO: 705129 - DNA, 19 bp, Mus musculus
  siRNA target sequence for Mkln1 (NM_013791.1,1404-1422).
ctcaaaaaaccgttgctta

SEQ ID NO: 705130 - DNA, 19 bp, Mus musculus
  siRNA target sequence for Mkln1 (NM_013791.1,1573-1591).
gatccagaactgaatgaaa

SEQ ID NO: 705131 - DNA, 19 bp, Mus musculus
  siRNA target sequence for Mkln1 (NM_013791.1,1599-1617).
cttatccggacttagcaaa

SEQ ID NO: 705132 - DNA, 19 bp, Mus musculus
  siRNA target sequence for Mkln1 (NM_013791.1,1604-1622).
ccggacttagcaaagacaa

SEQ ID NO: 705133 - DNA, 19 bp, Mus musculus
  siRNA target sequence for Mkln1 (NM_013791.1,1636-1654).
gagaatgtcagaaattcat

SEQ ID NO: 705134 - DNA, 19 bp, Mus musculus
  siRNA target sequence for Mkln1 (NM_013791.1,1666-1684).
gacattgtgaggaatagct

SEQ ID NO: 705135 - DNA, 19 bp, Mus musculus
  siRNA target sequence for Mkln1 (NM_013791.1,1705-1723).
gatcaagctacaaaagata

SEQ ID NO: 705136 - DNA, 19 bp, Mus musculus
  siRNA target sequence for Mkln1 (NM_013791.1,1760-1778).
caaggtttgcccatcaact

SEQ ID NO: 705137 - DNA, 19 bp, Mus musculus
  siRNA target sequence for Mkln1 (NM_013791.1,1769-1787).
cccatcaactcgtttatga

SEQ ID NO: 705138 - DNA, 19 bp, Mus musculus
  siRNA target sequence for Mkln1 (NM_013791.1,1774-1792).
caactcgtttatgatgaat

SEQ ID NO: 705139 - DNA, 19 bp, Mus musculus
  siRNA target sequence for Mkln1 (NM_013791.1,1789-1807).
gaattacacaaggttcatt

SEQ ID NO: 705140 - DNA, 19 bp, Mus musculus
  siRNA target sequence for Mkln1 (NM_013791.1,1883-1901).
gtagaccttcaaaagacta

SEQ ID NO: 705141 - DNA, 19 bp, Mus musculus
  siRNA target sequence for Mkln1 (NM_013791.1,1889-1907).
cttcaaaagactacttact

SEQ ID NO: 705142 - DNA, 19 bp, Mus musculus
  siRNA target sequence for Mkln1 (NM_013791.1,1912-1930).
cattgcaagtacctcataa

SEQ ID NO: 705143 - DNA, 19 bp, Mus musculus
  siRNA target sequence for Mkln1 (NM_013791.1,1973-1991).
gtgctctgaagtatttaca

SEQ ID NO: 705144 - DNA, 19 bp, Mus musculus
  siRNA target sequence for Mkln1 (NM_013791.1,2056-2074).
gcctcagctctgttcaaat

SEQ ID NO: 705145 - DNA, 19 bp, Mus musculus
  siRNA target sequence for Mkln1 (NM_013791.1,2116-2134).
catacctatgctcaaagaa

SEQ ID NO: 705146 - DNA, 19 bp, Mus musculus
  siRNA target sequence for Mkln1 (NM_013791.1,2146-2164).
gacaccttagtaaatttct

SEQ ID NO: 705147 - DNA, 19 bp, Mus musculus
  siRNA target sequence for Mkln1 (NM_013791.1,2148-2166).
caccttagtaaatttcttt

SEQ ID NO: 705148 - DNA, 19 bp, Mus musculus
  siRNA target sequence for Cnk (NM_013807.1,299-317).
cttcgcacgctgctatgaa

SEQ ID NO: 705149 - DNA, 19 bp, Mus musculus
  siRNA target sequence for Cnk (NM_013807.1,342-360).
gcctacgcggtcaaagtca

SEQ ID NO: 705150 - DNA, 19 bp, Mus musculus
  siRNA target sequence for Cnk (NM_013807.1,385-403).
cgcatcagcgcgagaagat

SEQ ID NO: 705151 - DNA, 19 bp, Mus musculus
  siRNA target sequence for Cnk (NM_013807.1,390-408).
cagcgcgagaagatcctaa

SEQ ID NO: 705152 - DNA, 19 bp, Mus musculus
  siRNA target sequence for Cnk (NM_013807.1,392-410).
gcgcgagaagatcctaaat

SEQ ID NO: 705153 - DNA, 19 bp, Mus musculus
  siRNA target sequence for Cnk (NM_013807.1,443-461).
ccatatcgttcgcttttca

SEQ ID NO: 705154 - DNA, 19 bp, Mus musculus
  siRNA target sequence for Cnk (NM_013807.1,449-467).
cgttcgcttttcacatcat

SEQ ID NO: 705155 - DNA, 19 bp, Mus musculus
  siRNA target sequence for Cnk (NM_013807.1,450-468).
gttcgcttttcacatcatt

SEQ ID NO: 705156 - DNA, 19 bp, Mus musculus
  siRNA target sequence for Cnk (NM_013807.1,454-472).
gcttttcacatcatttcga

SEQ ID NO: 705157 - DNA, 19 bp, Mus musculus
  siRNA target sequence for Cnk (NM_013807.1,611-629).
gcaccagaggggtatctta

SEQ ID NO: 705158 - DNA, 19 bp, Mus musculus
  siRNA target sequence for Cnk (NM_013807.1,697-715).
ggctggcagctcgattaga

SEQ ID NO: 705159 - DNA, 19 bp, Mus musculus
  siRNA target sequence for Cnk (NM_013807.1,817-835).
cgcttggttgtgtcatgta

SEQ ID NO: 705160 - DNA, 19 bp, Mus musculus
  siRNA target sequence for Cnk (NM_013807.1,819-837).
cttggttgtgtcatgtaca

SEQ ID NO: 705161 - DNA, 19 bp, Mus musculus
  siRNA target sequence for Cnk (NM_013807.1,1011-1029).
cgccatgacttctttacga

SEQ ID NO: 705162 - DNA, 19 bp, Mus musculus
  siRNA target sequence for Cnk (NM_013807.1,1173-1191).
gaggaccaggataatgtct

SEQ ID NO: 705163 - DNA, 19 bp, Mus musculus
  siRNA target sequence for Cnk (NM_013807.1,1346-1364).
gtttgaagaaggtttgact

SEQ ID NO: 705164 - DNA, 19 bp, Mus musculus
  siRNA target sequence for Ermap (NM_013848.1,205-223).
catgtggtggcgtggaaaa

SEQ ID NO: 705165 - DNA, 19 bp, Mus musculus
  siRNA target sequence for Ermap (NM_013848.1,214-232).
gcgtggaaaatgtgtgtaa

SEQ ID NO: 705166 - DNA, 19 bp, Mus musculus
  siRNA target sequence for Ermap (NM_013848.1,244-262).
cggaagatgtcagttcata

SEQ ID NO: 705167 - DNA, 19 bp, Mus musculus
  siRNA target sequence for Ermap (NM_013848.1,633-651).
ggtctgggtcggaaactca

SEQ ID NO: 705168 - DNA, 19 bp, Mus musculus
  siRNA target sequence for Ermap (NM_013848.1,634-652).
gtctgggtcggaaactcaa

SEQ ID NO: 705169 - DNA, 19 bp, Mus musculus
  siRNA target sequence for Ermap (NM_013848.1,671-689).
ccctgcaggtggcagtttt

SEQ ID NO: 705170 - DNA, 19 bp, Mus musculus
  siRNA target sequence for Ermap (NM_013848.1,675-693).
gcaggtggcagttttaggt

SEQ ID NO: 705171 - DNA, 19 bp, Mus musculus
  siRNA target sequence for Ermap (NM_013848.1,676-694).
caggtggcagttttaggtt

SEQ ID NO: 705172 - DNA, 19 bp, Mus musculus
  siRNA target sequence for Ermap (NM_013848.1,681-699).
ggcagttttaggttctgat

SEQ ID NO: 705173 - DNA, 19 bp, Mus musculus
  siRNA target sequence for Ermap (NM_013848.1,708-726).
ccacgtgaagggctatgat

SEQ ID NO: 705174 - DNA, 19 bp, Mus musculus
  siRNA target sequence for Ermap (NM_013848.1,904-922).
gtgtcttgcactatccata

SEQ ID NO: 705175 - DNA, 19 bp, Mus musculus
  siRNA target sequence for Ermap (NM_013848.1,1048-1066).
ggcatctggctcatttgta

SEQ ID NO: 705176 - DNA, 19 bp, Mus musculus
  siRNA target sequence for Ermap (NM_013848.1,1050-1068).
catctggctcatttgtaaa

SEQ ID NO: 705177 - DNA, 19 bp, Mus musculus
  siRNA target sequence for Ermap (NM_013848.1,1134-1152).
ccacgccaaagaaaaagga

SEQ ID NO: 705178 - DNA, 19 bp, Mus musculus
  siRNA target sequence for Ermap (NM_013848.1,1181-1199).
ggagtgaactgaagttgaa

SEQ ID NO: 705179 - DNA, 19 bp, Mus musculus
  siRNA target sequence for Ermap (NM_013848.1,1182-1200).
gagtgaactgaagttgaaa

SEQ ID NO: 705180 - DNA, 19 bp, Mus musculus
  siRNA target sequence for Ermap (NM_013848.1,1271-1289).
cggcacatcccaaactcat

SEQ ID NO: 705181 - DNA, 19 bp, Mus musculus
  siRNA target sequence for Ermap (NM_013848.1,1384-1402).
ggctccgagtatttcacaa

SEQ ID NO: 705182 - DNA, 19 bp, Mus musculus
  siRNA target sequence for Ermap (NM_013848.1,1432-1450).
ggcgagaagaccaaatgga

SEQ ID NO: 705183 - DNA, 19 bp, Mus musculus
  siRNA target sequence for Ermap (NM_013848.1,1433-1451).
gcgagaagaccaaatggat

SEQ ID NO: 705184 - DNA, 19 bp, Mus musculus
  siRNA target sequence for Ermap (NM_013848.1,1535-1553).
gccgtgggaatgagtatga

SEQ ID NO: 705185 - DNA, 19 bp, Mus musculus
  siRNA target sequence for Ermap (NM_013848.1,1536-1554).
ccgtgggaatgagtatgaa

SEQ ID NO: 705186 - DNA, 19 bp, Mus musculus
  siRNA target sequence for Ermap (NM_013848.1,1658-1676).
ctgataagtcccacatctt

SEQ ID NO: 705187 - DNA, 19 bp, Mus musculus
  siRNA target sequence for Ermap (NM_013848.1,1700-1718).
gcccacttcgccctttctt

SEQ ID NO: 705188 - DNA, 19 bp, Mus musculus
  siRNA target sequence for Ermap (NM_013848.1,1701-1719).
cccacttcgccctttcttt

SEQ ID NO: 705189 - DNA, 19 bp, Mus musculus
  siRNA target sequence for Ermap (NM_013848.1,1755-1773).
ccctctaatcatttgtact

SEQ ID NO: 705190 - DNA, 19 bp, Mus musculus
  siRNA target sequence for Ermap (NM_013848.1,1796-1814).
cgattgtccccaaacaaga

SEQ ID NO: 705191 - DNA, 19 bp, Mus musculus
  siRNA target sequence for Ermap (NM_013848.1,1835-1853).
gagacgtgtccctgaagat

SEQ ID NO: 705192 - DNA, 19 bp, Mus musculus
  siRNA target sequence for Ermap (NM_013848.1,1837-1855).
gacgtgtccctgaagatga

SEQ ID NO: 705193 - DNA, 19 bp, Mus musculus
  siRNA target sequence for Ermap (NM_013848.1,1888-1906).
ctatttctgcttaatgata

SEQ ID NO: 705194 - DNA, 19 bp, Mus musculus
  siRNA target sequence for Ermap (NM_013848.1,1931-1949).
cccttaagggcctcaaagt

SEQ ID NO: 705195 - DNA, 19 bp, Mus musculus
  siRNA target sequence for Ermap (NM_013848.1,1932-1950).
ccttaagggcctcaaagtt

SEQ ID NO: 705196 - DNA, 19 bp, Mus musculus
  siRNA target sequence for Ermap (NM_013848.1,1940-1958).
gcctcaaagttccttcttt

SEQ ID NO: 705197 - DNA, 19 bp, Mus musculus
  siRNA target sequence for Abcf1 (NM_013854.1,140-158).
gaccaaaaagacgttcttt

SEQ ID NO: 705198 - DNA, 19 bp, Mus musculus
  siRNA target sequence for Abcf1 (NM_013854.1,142-160).
ccaaaaagacgttctttga

SEQ ID NO: 705199 - DNA, 19 bp, Mus musculus
  siRNA target sequence for Abcf1 (NM_013854.1,265-283).
ggaaaggccgtcggaaaaa

SEQ ID NO: 705200 - DNA, 19 bp, Mus musculus
  siRNA target sequence for Abcf1 (NM_013854.1,402-420).
gccaagggtggaaatgttt

SEQ ID NO: 705201 - DNA, 19 bp, Mus musculus
  siRNA target sequence for Abcf1 (NM_013854.1,403-421).
ccaagggtggaaatgtttt

SEQ ID NO: 705202 - DNA, 19 bp, Mus musculus
  siRNA target sequence for Abcf1 (NM_013854.1,488-506).
cgccaagccagagaagaat

SEQ ID NO: 705203 - DNA, 19 bp, Mus musculus
  siRNA target sequence for Abcf1 (NM_013854.1,500-518).
gaagaatcgcatcaataaa

SEQ ID NO: 705204 - DNA, 19 bp, Mus musculus
  siRNA target sequence for Abcf1 (NM_013854.1,734-752).
ggacttgaaggcaaacgat

SEQ ID NO: 705205 - DNA, 19 bp, Mus musculus
  siRNA target sequence for Abcf1 (NM_013854.1,750-768).
gatccctatgccaacctta

SEQ ID NO: 705206 - DNA, 19 bp, Mus musculus
  siRNA target sequence for Abcf1 (NM_013854.1,754-772).
cctatgccaaccttagcaa

SEQ ID NO: 705207 - DNA, 19 bp, Mus musculus
  siRNA target sequence for Abcf1 (NM_013854.1,838-856).
ctaatgctgcagaaaacga

SEQ ID NO: 705208 - DNA, 19 bp, Mus musculus
  siRNA target sequence for Abcf1 (NM_013854.1,883-901).
cttcccgccaggcaatgtt

SEQ ID NO: 705209 - DNA, 19 bp, Mus musculus
  siRNA target sequence for Abcf1 (NM_013854.1,886-904).
cccgccaggcaatgttaga

SEQ ID NO: 705210 - DNA, 19 bp, Mus musculus
  siRNA target sequence for Abcf1 (NM_013854.1,888-906).
cgccaggcaatgttagaaa

SEQ ID NO: 705211 - DNA, 19 bp, Mus musculus
  siRNA target sequence for Abcf1 (NM_013854.1,946-964).
cccacggcaaggagctatt

SEQ ID NO: 705212 - DNA, 19 bp, Mus musculus
  siRNA target sequence for Abcf1 (NM_013854.1,968-986).
caatgctgacctgtacata

SEQ ID NO: 705213 - DNA, 19 bp, Mus musculus
  siRNA target sequence for Abcf1 (NM_013854.1,1030-1048).
gcaaaaccacgcttctgaa

SEQ ID NO: 705214 - DNA, 19 bp, Mus musculus
  siRNA target sequence for Abcf1 (NM_013854.1,1347-1365).
cggcccacacagaagttct

SEQ ID NO: 705215 - DNA, 19 bp, Mus musculus
  siRNA target sequence for Abcf1 (NM_013854.1,1464-1482).
gccgtcatctggctcaata

SEQ ID NO: 705216 - DNA, 19 bp, Mus musculus
  siRNA target sequence for Abcf1 (NM_013854.1,1465-1483).
ccgtcatctggctcaataa

SEQ ID NO: 705217 - DNA, 19 bp, Mus musculus
  siRNA target sequence for Abcf1 (NM_013854.1,1542-1560).
gatgacgtttgcactgata

SEQ ID NO: 705218 - DNA, 19 bp, Mus musculus
  siRNA target sequence for Abcf1 (NM_013854.1,1545-1563).
gacgtttgcactgatatca

SEQ ID NO: 705219 - DNA, 19 bp, Mus musculus
  siRNA target sequence for Abcf1 (NM_013854.1,1576-1594).
cccagcggctccattacta

SEQ ID NO: 705220 - DNA, 19 bp, Mus musculus
  siRNA target sequence for Abcf1 (NM_013854.1,1578-1596).
cagcggctccattactaca

SEQ ID NO: 705221 - DNA, 19 bp, Mus musculus
  siRNA target sequence for Abcf1 (NM_013854.1,1913-1931).
ggggcagaagccactcttt

SEQ ID NO: 705222 - DNA, 19 bp, Mus musculus
  siRNA target sequence for Abcf1 (NM_013854.1,1914-1932).
gggcagaagccactcttta

SEQ ID NO: 705223 - DNA, 19 bp, Mus musculus
  siRNA target sequence for Abcf1 (NM_013854.1,1915-1933).
ggcagaagccactctttaa

SEQ ID NO: 705224 - DNA, 19 bp, Mus musculus
  siRNA target sequence for Abcf1 (NM_013854.1,1917-1935).
cagaagccactctttaaga

SEQ ID NO: 705225 - DNA, 19 bp, Mus musculus
  siRNA target sequence for Abcf1 (NM_013854.1,1919-1937).
gaagccactctttaagaat

SEQ ID NO: 705226 - DNA, 19 bp, Mus musculus
  siRNA target sequence for Abcf1 (NM_013854.1,2307-2325).
gatgaaccaaccaataact

SEQ ID NO: 705227 - DNA, 19 bp, Mus musculus
  siRNA target sequence for Abcf1 (NM_013854.1,2465-2483).
gatcgacggcgactttgat

SEQ ID NO: 705228 - DNA, 19 bp, Mus musculus
  siRNA target sequence for Abcf1 (NM_013854.1,2473-2491).
gcgactttgatgactacaa

SEQ ID NO: 705229 - DNA, 19 bp, Mus musculus
  siRNA target sequence for ORF6 (NM_013859.1,147-165).
gcctgcgccgaagactttt

SEQ ID NO: 705230 - DNA, 19 bp, Mus musculus
  siRNA target sequence for ORF6 (NM_013859.1,148-166).
cctgcgccgaagactttta

SEQ ID NO: 705231 - DNA, 19 bp, Mus musculus
  siRNA target sequence for ORF6 (NM_013859.1,318-336).
ggactttgggaacgtttaa

SEQ ID NO: 705232 - DNA, 19 bp, Mus musculus
  siRNA target sequence for ORF6 (NM_013859.1,571-589).
ccgccagaccgctagcatt

SEQ ID NO: 705233 - DNA, 19 bp, Mus musculus
  siRNA target sequence for ORF6 (NM_013859.1,671-689).
gttcgcctacgctcatact

SEQ ID NO: 705234 - DNA, 19 bp, Mus musculus
  siRNA target sequence for ORF6 (NM_013859.1,868-886).
ggggtgctatgcaagaagt

SEQ ID NO: 705235 - DNA, 19 bp, Mus musculus
  siRNA target sequence for ORF6 (NM_013859.1,869-887).
gggtgctatgcaagaagtt

SEQ ID NO: 705236 - DNA, 19 bp, Mus musculus
  siRNA target sequence for ORF6 (NM_013859.1,902-920).
gggcgagggtccagtcaat

SEQ ID NO: 705237 - DNA, 19 bp, Mus musculus
  siRNA target sequence for ORF6 (NM_013859.1,904-922).
gcgagggtccagtcaatca

SEQ ID NO: 705238 - DNA, 19 bp, Mus musculus
  siRNA target sequence for ORF6 (NM_013859.1,1047-1065).
ctggcttggaccaacgaaa

SEQ ID NO: 705239 - DNA, 19 bp, Mus musculus
  siRNA target sequence for ORF6 (NM_013859.1,1193-1211).
cactccaaggactctcatt

SEQ ID NO: 705240 - DNA, 19 bp, Mus musculus
  siRNA target sequence for Limd1 (NM_013860.1,633-651).
gcaacaacccagaatttga

SEQ ID NO: 705241 - DNA, 19 bp, Mus musculus
  siRNA target sequence for Limd1 (NM_013860.1,675-693).
ccaagatggccaaaatcca

SEQ ID NO: 705242 - DNA, 19 bp, Mus musculus
  siRNA target sequence for Limd1 (NM_013860.1,842-860).
gtggcacctggattagcta

SEQ ID NO: 705243 - DNA, 19 bp, Mus musculus
  siRNA target sequence for Limd1 (NM_013860.1,1030-1048).
cctcactcacggagactat

SEQ ID NO: 705244 - DNA, 19 bp, Mus musculus
  siRNA target sequence for Limd1 (NM_013860.1,1031-1049).
ctcactcacggagactatt

SEQ ID NO: 705245 - DNA, 19 bp, Mus musculus
  siRNA target sequence for Limd1 (NM_013860.1,1035-1053).
ctcacggagactattatga

SEQ ID NO: 705246 - DNA, 19 bp, Mus musculus
  siRNA target sequence for Limd1 (NM_013860.1,1039-1057).
cggagactattatgacaat

SEQ ID NO: 705247 - DNA, 19 bp, Mus musculus
  siRNA target sequence for Limd1 (NM_013860.1,1040-1058).
ggagactattatgacaatt

SEQ ID NO: 705248 - DNA, 19 bp, Mus musculus
  siRNA target sequence for Limd1 (NM_013860.1,1043-1061).
gactattatgacaatttct

SEQ ID NO: 705249 - DNA, 19 bp, Mus musculus
  siRNA target sequence for Limd1 (NM_013860.1,1139-1157).
ggttgcccagggaatgact

SEQ ID NO: 705250 - DNA, 19 bp, Mus musculus
  siRNA target sequence for Limd1 (NM_013860.1,1218-1236).
gctctggcaggtcttttga

SEQ ID NO: 705251 - DNA, 19 bp, Mus musculus
  siRNA target sequence for Limd1 (NM_013860.1,1322-1340).
cgagtgaacctcggttttt

SEQ ID NO: 705252 - DNA, 19 bp, Mus musculus
  siRNA target sequence for Limd1 (NM_013860.1,1325-1343).
gtgaacctcggtttttctt

SEQ ID NO: 705253 - DNA, 19 bp, Mus musculus
  siRNA target sequence for Limd1 (NM_013860.1,1430-1448).
gcttgtccgaaaagagatt

SEQ ID NO: 705254 - DNA, 19 bp, Mus musculus
  siRNA target sequence for Limd1 (NM_013860.1,1514-1532).
caggatgggcccaagtctt

SEQ ID NO: 705255 - DNA, 19 bp, Mus musculus
  siRNA target sequence for Limd1 (NM_013860.1,1599-1617).
ccgggctggatcctaagtt

SEQ ID NO: 705256 - DNA, 19 bp, Mus musculus
  siRNA target sequence for Limd1 (NM_013860.1,1600-1618).
cgggctggatcctaagttt

SEQ ID NO: 705257 - DNA, 19 bp, Mus musculus
  siRNA target sequence for Limd1 (NM_013860.1,1604-1622).
ctggatcctaagtttggat

SEQ ID NO: 705258 - DNA, 19 bp, Mus musculus
  siRNA target sequence for Limd1 (NM_013860.1,1684-1702).
cactccatctgagttatct

SEQ ID NO: 705259 - DNA, 19 bp, Mus musculus
  siRNA target sequence for Limd1 (NM_013860.1,1694-1712).
gagttatcttgtaaagaga

SEQ ID NO: 705260 - DNA, 19 bp, Mus musculus
  siRNA target sequence for Limd1 (NM_013860.1,1827-1845).
cctccactgcggaattgaa

SEQ ID NO: 705261 - DNA, 19 bp, Mus musculus
  siRNA target sequence for Limd1 (NM_013860.1,1830-1848).
ccactgcggaattgaagtt

SEQ ID NO: 705262 - DNA, 19 bp, Mus musculus
  siRNA target sequence for Limd1 (NM_013860.1,2032-2050).
ggccttctattttgtcaat

SEQ ID NO: 705263 - DNA, 19 bp, Mus musculus
  siRNA target sequence for Limd1 (NM_013860.1,2045-2063).
gtcaatggcaaagtattct

SEQ ID NO: 705264 - DNA, 19 bp, Mus musculus
  siRNA target sequence for Limd1 (NM_013860.1,2098-2116).
gtctgcggacaggtgtttt

SEQ ID NO: 705265 - DNA, 19 bp, Mus musculus
  siRNA target sequence for Limd1 (NM_013860.1,2187-2205).
gctgcgtcatctgtaatga

SEQ ID NO: 705266 - DNA, 19 bp, Mus musculus
  siRNA target sequence for Limd1 (NM_013860.1,2208-2226).
gtctggatggggttccttt

SEQ ID NO: 705267 - DNA, 19 bp, Mus musculus
  siRNA target sequence for Limd1 (NM_013860.1,2251-2269).
ctactgtgtccgagactat

SEQ ID NO: 705268 - DNA, 19 bp, Mus musculus
  siRNA target sequence for 9630005B12Rik (NM_013862.3,259-277).
gcttcgttccagaaggtta

SEQ ID NO: 705269 - DNA, 19 bp, Mus musculus
  siRNA target sequence for 9630005B12Rik (NM_013862.3,278-296).
gtgggtcatctgattctgt

SEQ ID NO: 705270 - DNA, 19 bp, Mus musculus
  siRNA target sequence for 9630005B12Rik (NM_013862.3,341-359).
cagatgccacttctataaa

SEQ ID NO: 705271 - DNA, 19 bp, Mus musculus
  siRNA target sequence for 9630005B12Rik (NM_013862.3,478-496).
caaggatccagtgagattt

SEQ ID NO: 705272 - DNA, 19 bp, Mus musculus
  siRNA target sequence for 9630005B12Rik (NM_013862.3,482-500).
gatccagtgagatttcaga

SEQ ID NO: 705273 - DNA, 19 bp, Mus musculus
  siRNA target sequence for 9630005B12Rik (NM_013862.3,540-558).
gccgcctctccagttaatt

SEQ ID NO: 705274 - DNA, 19 bp, Mus musculus
  siRNA target sequence for 9630005B12Rik (NM_013862.3,541-559).
ccgcctctccagttaattt

SEQ ID NO: 705275 - DNA, 19 bp, Mus musculus
  siRNA target sequence for 9630005B12Rik (NM_013862.3,542-560).
cgcctctccagttaatttt

SEQ ID NO: 705276 - DNA, 19 bp, Mus musculus
  siRNA target sequence for 9630005B12Rik (NM_013862.3,625-643).
gacagtgttctctttaaca

SEQ ID NO: 705277 - DNA, 19 bp, Mus musculus
  siRNA target sequence for 9630005B12Rik (NM_013862.3,872-890).
cagccgagagcaattgctt

SEQ ID NO: 705278 - DNA, 19 bp, Mus musculus
  siRNA target sequence for 9630005B12Rik (NM_013862.3,877-895).
gagagcaattgctttgcat

SEQ ID NO: 705279 - DNA, 19 bp, Mus musculus
  siRNA target sequence for 9630005B12Rik (NM_013862.3,908-926).
ctcatggctcagaagaatt

SEQ ID NO: 705280 - DNA, 19 bp, Mus musculus
  siRNA target sequence for 9630005B12Rik (NM_013862.3,914-932).
gctcagaagaatttcagat

SEQ ID NO: 705281 - DNA, 19 bp, Mus musculus
  siRNA target sequence for 9630005B12Rik (NM_013862.3,915-933).
ctcagaagaatttcagata

SEQ ID NO: 705282 - DNA, 19 bp, Mus musculus
  siRNA target sequence for 9630005B12Rik (NM_013862.3,983-1001).
gtttctgcactgcattcaa

SEQ ID NO: 705283 - DNA, 19 bp, Mus musculus
  siRNA target sequence for 9630005B12Rik (NM_013862.3,1018-1036).
gtgtctgatgttaaagact

SEQ ID NO: 705284 - DNA, 19 bp, Mus musculus
  siRNA target sequence for 9630005B12Rik (NM_013862.3,1124-1142).
ccgtgcctaaggatagaga

SEQ ID NO: 705285 - DNA, 19 bp, Mus musculus
  siRNA target sequence for 9630005B12Rik (NM_013862.3,1125-1143).
cgtgcctaaggatagagat

SEQ ID NO: 705286 - DNA, 19 bp, Mus musculus
  siRNA target sequence for 9630005B12Rik (NM_013862.3,1126-1144).
gtgcctaaggatagagata

SEQ ID NO: 705287 - DNA, 19 bp, Mus musculus
  siRNA target sequence for 9630005B12Rik (NM_013862.3,1135-1153).
gatagagataaattttatt

SEQ ID NO: 705288 - DNA, 19 bp, Mus musculus
  siRNA target sequence for 9630005B12Rik (NM_013862.3,1176-1194).
gaagaaggttgtgattaca

SEQ ID NO: 705289 - DNA, 19 bp, Mus musculus
  siRNA target sequence for 9630005B12Rik (NM_013862.3,1193-1211).
cagttcagcaactgtctaa

SEQ ID NO: 705290 - DNA, 19 bp, Mus musculus
  siRNA target sequence for 9630005B12Rik (NM_013862.3,1195-1213).
gttcagcaactgtctaaca

SEQ ID NO: 705291 - DNA, 19 bp, Mus musculus
  siRNA target sequence for 9630005B12Rik (NM_013862.3,1201-1219).
caactgtctaacaaagaat

SEQ ID NO: 705292 - DNA, 19 bp, Mus musculus
  siRNA target sequence for 9630005B12Rik (NM_013862.3,1208-1226).
ctaacaaagaattagctat

SEQ ID NO: 705293 - DNA, 19 bp, Mus musculus
  siRNA target sequence for 9630005B12Rik (NM_013862.3,1256-1274).
caggtcgaaacgtgaagaa

SEQ ID NO: 705294 - DNA, 19 bp, Mus musculus
  siRNA target sequence for 9630005B12Rik (NM_013862.3,1258-1276).
ggtcgaaacgtgaagaaca

SEQ ID NO: 705295 - DNA, 19 bp, Mus musculus
  siRNA target sequence for 9630005B12Rik (NM_013862.3,1305-1323).
catgggaaagagctatgat

SEQ ID NO: 705296 - DNA, 19 bp, Mus musculus
  siRNA target sequence for 9630005B12Rik (NM_013862.3,1402-1420).
gataaacgggtgtacatga

SEQ ID NO: 705297 - DNA, 19 bp, Mus musculus
  siRNA target sequence for 9630005B12Rik (NM_013862.3,1741-1759).
ggtgatgtgtcaaaagact

SEQ ID NO: 705298 - DNA, 19 bp, Mus musculus
  siRNA target sequence for 9630005B12Rik (NM_013862.3,1765-1783).
gagaagattctctattctt

SEQ ID NO: 705299 - DNA, 19 bp, Mus musculus
  siRNA target sequence for 9630005B12Rik (NM_013862.3,1815-1833).
ccttggtggccgaccaaaa

SEQ ID NO: 705300 - DNA, 19 bp, Mus musculus
  siRNA target sequence for 9630005B12Rik (NM_013862.3,1823-1841).
gccgaccaaaaggactatt

SEQ ID NO: 705301 - DNA, 19 bp, Mus musculus
  siRNA target sequence for 9630005B12Rik (NM_013862.3,1825-1843).
cgaccaaaaggactattca

SEQ ID NO: 705302 - DNA, 19 bp, Mus musculus
  siRNA target sequence for 9630005B12Rik (NM_013862.3,1837-1855).
ctattcaccttggtaaaga

SEQ ID NO: 705303 - DNA, 19 bp, Mus musculus
  siRNA target sequence for 9630005B12Rik (NM_013862.3,1870-1888).
gcactaagggcagaagtat

SEQ ID NO: 705304 - DNA, 19 bp, Mus musculus
  siRNA target sequence for 9630005B12Rik (NM_013862.3,1880-1898).
cagaagtatggcaactatt

SEQ ID NO: 705305 - DNA, 19 bp, Mus musculus
  siRNA target sequence for 9630005B12Rik (NM_013862.3,1907-1925).
gccatgacaatcaggaaat

SEQ ID NO: 705306 - DNA, 19 bp, Mus musculus
  siRNA target sequence for 9630005B12Rik (NM_013862.3,1929-1947).
ggataaataccgaatcctt

SEQ ID NO: 705307 - DNA, 19 bp, Mus musculus
  siRNA target sequence for 9630005B12Rik (NM_013862.3,1930-1948).
gataaataccgaatcctta

SEQ ID NO: 705308 - DNA, 19 bp, Mus musculus
  siRNA target sequence for 9630005B12Rik (NM_013862.3,1973-1991).
gtgttattactcgagatat

SEQ ID NO: 705309 - DNA, 19 bp, Mus musculus
  siRNA target sequence for 9630005B12Rik (NM_013862.3,1985-2003).
gagatattcatcgtacatt

SEQ ID NO: 705310 - DNA, 19 bp, Mus musculus
  siRNA target sequence for 9630005B12Rik (NM_013862.3,2005-2023).
cctgcacacgattacttca

SEQ ID NO: 705311 - DNA, 19 bp, Mus musculus
  siRNA target sequence for 9630005B12Rik (NM_013862.3,2006-2024).
ctgcacacgattacttcaa

SEQ ID NO: 705312 - DNA, 19 bp, Mus musculus
  siRNA target sequence for 9630005B12Rik (NM_013862.3,2041-2059).
ggtcaagaatccctttaca

SEQ ID NO: 705313 - DNA, 19 bp, Mus musculus
  siRNA target sequence for 9630005B12Rik (NM_013862.3,2047-2065).
gaatccctttacaaaatct

SEQ ID NO: 705314 - DNA, 19 bp, Mus musculus
  siRNA target sequence for 9630005B12Rik (NM_013862.3,2178-2196).
gactattatgtatggttat

SEQ ID NO: 705315 - DNA, 19 bp, Mus musculus
  siRNA target sequence for 9630005B12Rik (NM_013862.3,2240-2258).
gcaaattctatcaacttga

SEQ ID NO: 705316 - DNA, 19 bp, Mus musculus
  siRNA target sequence for 9630005B12Rik (NM_013862.3,2411-2429).
gtgagggtttgaatataat

SEQ ID NO: 705317 - DNA, 19 bp, Mus musculus
  siRNA target sequence for 9630005B12Rik (NM_013862.3,2421-2439).
gaatataatctttcatgta

SEQ ID NO: 705318 - DNA, 19 bp, Mus musculus
  siRNA target sequence for 9630005B12Rik (NM_013862.3,2491-2509).
gaaggtgctttgaagtttt

SEQ ID NO: 705319 - DNA, 19 bp, Mus musculus
  siRNA target sequence for 9630005B12Rik (NM_013862.3,2515-2533).
gttcagcttccaaagagat

SEQ ID NO: 705320 - DNA, 19 bp, Mus musculus
  siRNA target sequence for 9630005B12Rik (NM_013862.3,2536-2554).
cgggcagaggagaatgcaa

SEQ ID NO: 705321 - DNA, 19 bp, Mus musculus
  siRNA target sequence for 9630005B12Rik (NM_013862.3,2565-2583).
ggaacaggcttgcaatatt

SEQ ID NO: 705322 - DNA, 19 bp, Mus musculus
  siRNA target sequence for 9630005B12Rik (NM_013862.3,2566-2584).
gaacaggcttgcaatatta

SEQ ID NO: 705323 - DNA, 19 bp, Mus musculus
  siRNA target sequence for 9630005B12Rik (NM_013862.3,2571-2589).
ggcttgcaatattaaagta

SEQ ID NO: 705324 - DNA, 19 bp, Mus musculus
  siRNA target sequence for 9630005B12Rik (NM_013862.3,2659-2677).
gacccaatggatagataca

SEQ ID NO: 705325 - DNA, 19 bp, Mus musculus
  siRNA target sequence for 9630005B12Rik (NM_013862.3,2662-2680).
ccaatggatagatacaagt

SEQ ID NO: 705326 - DNA, 19 bp, Mus musculus
  siRNA target sequence for Smtn (NM_013870.1,333-351).
gctctggcgtccaaacgtt

SEQ ID NO: 705327 - DNA, 19 bp, Mus musculus
  siRNA target sequence for Smtn (NM_013870.1,334-352).
ctctggcgtccaaacgttt

SEQ ID NO: 705328 - DNA, 19 bp, Mus musculus
  siRNA target sequence for Smtn (NM_013870.1,358-376).
ctgagcggcaagacaacaa

SEQ ID NO: 705329 - DNA, 19 bp, Mus musculus
  siRNA target sequence for Smtn (NM_013870.1,445-463).
gactggagtccatgaatga

SEQ ID NO: 705330 - DNA, 19 bp, Mus musculus
  siRNA target sequence for Smtn (NM_013870.1,490-508).
ggagtgccggtgaatatga

SEQ ID NO: 705331 - DNA, 19 bp, Mus musculus
  siRNA target sequence for Smtn (NM_013870.1,543-561).
gtgcgagctcaggagatta

SEQ ID NO: 705332 - DNA, 19 bp, Mus musculus
  siRNA target sequence for Smtn (NM_013870.1,1030-1048).
gaggcttctccaacactaa

SEQ ID NO: 705333 - DNA, 19 bp, Mus musculus
  siRNA target sequence for Smtn (NM_013870.1,1032-1050).
ggcttctccaacactaaga

SEQ ID NO: 705334 - DNA, 19 bp, Mus musculus
  siRNA target sequence for Smtn (NM_013870.1,1059-1077).
ccgtctgaaacgaaatcct

SEQ ID NO: 705335 - DNA, 19 bp, Mus musculus
  siRNA target sequence for Smtn (NM_013870.1,1076-1094).
ctgccaacgttcactatct

SEQ ID NO: 705336 - DNA, 19 bp, Mus musculus
  siRNA target sequence for Smtn (NM_013870.1,1190-1208).
ccaaaagttcacatctgat

SEQ ID NO: 705337 - DNA, 19 bp, Mus musculus
  siRNA target sequence for Smtn (NM_013870.1,1191-1209).
caaaagttcacatctgatt

SEQ ID NO: 705338 - DNA, 19 bp, Mus musculus
  siRNA target sequence for Smtn (NM_013870.1,1450-1468).
ctctcaggtcccttgaaaa

SEQ ID NO: 705339 - DNA, 19 bp, Mus musculus
  siRNA target sequence for Smtn (NM_013870.1,1542-1560).
ccagggggcagtatgaaga

SEQ ID NO: 705340 - DNA, 19 bp, Mus musculus
  siRNA target sequence for Smtn (NM_013870.1,1550-1568).
cagtatgaagactacgttt

SEQ ID NO: 705341 - DNA, 19 bp, Mus musculus
  siRNA target sequence for Smtn (NM_013870.1,1556-1574).
gaagactacgtttaccatt

SEQ ID NO: 705342 - DNA, 19 bp, Mus musculus
  siRNA target sequence for Smtn (NM_013870.1,1561-1579).
ctacgtttaccattgagat

SEQ ID NO: 705343 - DNA, 19 bp, Mus musculus
  siRNA target sequence for Smtn (NM_013870.1,1796-1814).
ccgaggaggctgcaacttt

SEQ ID NO: 705344 - DNA, 19 bp, Mus musculus
  siRNA target sequence for Smtn (NM_013870.1,1797-1815).
cgaggaggctgcaacttta

SEQ ID NO: 705345 - DNA, 19 bp, Mus musculus
  siRNA target sequence for Smtn (NM_013870.1,1798-1816).
gaggaggctgcaactttaa

SEQ ID NO: 705346 - DNA, 19 bp, Mus musculus
  siRNA target sequence for Smtn (NM_013870.1,1850-1868).
cacagtggaagcagctaat

SEQ ID NO: 705347 - DNA, 19 bp, Mus musculus
  siRNA target sequence for Smtn (NM_013870.1,1973-1991).
ggaccagactacgaacttt

SEQ ID NO: 705348 - DNA, 19 bp, Mus musculus
  siRNA target sequence for Smtn (NM_013870.1,2021-2039).
gcgtgagctccgacaaaga

SEQ ID NO: 705349 - DNA, 19 bp, Mus musculus
  siRNA target sequence for Smtn (NM_013870.1,2170-2188).
ctgtcggcacagttaccaa

SEQ ID NO: 705350 - DNA, 19 bp, Mus musculus
  siRNA target sequence for Smtn (NM_013870.1,2198-2216).
cctcgttcactccaatgat

SEQ ID NO: 705351 - DNA, 19 bp, Mus musculus
  siRNA target sequence for Smtn (NM_013870.1,2302-2320).
ccaccacggtccaaaccaa

SEQ ID NO: 705352 - DNA, 19 bp, Mus musculus
  siRNA target sequence for Smtn (NM_013870.1,2341-2359).
cctcgtcctcgtccaaaaa

SEQ ID NO: 705353 - DNA, 19 bp, Mus musculus
  siRNA target sequence for Smtn (NM_013870.1,2344-2362).
cgtcctcgtccaaaaagat

SEQ ID NO: 705354 - DNA, 19 bp, Mus musculus
  siRNA target sequence for Smtn (NM_013870.1,2497-2515).
cacgcaaggccatgattga

SEQ ID NO: 705355 - DNA, 19 bp, Mus musculus
  siRNA target sequence for Smtn (NM_013870.1,2715-2733).
gccctggtgcacaatttct

SEQ ID NO: 705356 - DNA, 19 bp, Mus musculus
  siRNA target sequence for Smtn (NM_013870.1,2716-2734).
ccctggtgcacaatttctt

SEQ ID NO: 705357 - DNA, 19 bp, Mus musculus
  siRNA target sequence for Smtn (NM_013870.1,2735-2753).
ccctgaggcttttgactat

SEQ ID NO: 705358 - DNA, 19 bp, Mus musculus
  siRNA target sequence for Smtn (NM_013870.1,2930-2948).
ggggctggtaaaaaccaaa

SEQ ID NO: 705359 - DNA, 19 bp, Mus musculus
  siRNA target sequence for Scmh1 (NM_013883.1,424-442).
cctgggacaaatacctaaa

SEQ ID NO: 705360 - DNA, 19 bp, Mus musculus
  siRNA target sequence for Scmh1 (NM_013883.1,425-443).
ctgggacaaatacctaaaa

SEQ ID NO: 705361 - DNA, 19 bp, Mus musculus
  siRNA target sequence for Scmh1 (NM_013883.1,487-505).
cctacacacctccaagtaa

SEQ ID NO: 705362 - DNA, 19 bp, Mus musculus
  siRNA target sequence for Scmh1 (NM_013883.1,488-506).
ctacacacctccaagtaat

SEQ ID NO: 705363 - DNA, 19 bp, Mus musculus
  siRNA target sequence for Scmh1 (NM_013883.1,493-511).
cacctccaagtaatgagtt

SEQ ID NO: 705364 - DNA, 19 bp, Mus musculus
  siRNA target sequence for Scmh1 (NM_013883.1,572-590).
cacggtcgttggattgaca

SEQ ID NO: 705365 - DNA, 19 bp, Mus musculus
  siRNA target sequence for Scmh1 (NM_013883.1,707-725).
gcagccccctctaggattt

SEQ ID NO: 705366 - DNA, 19 bp, Mus musculus
  siRNA target sequence for Scmh1 (NM_013883.1,755-773).
ccttttgaagacactaaat

SEQ ID NO: 705367 - DNA, 19 bp, Mus musculus
  siRNA target sequence for Scmh1 (NM_013883.1,782-800).
gatggctcccatcaagatt

SEQ ID NO: 705368 - DNA, 19 bp, Mus musculus
  siRNA target sequence for Scmh1 (NM_013883.1,789-807).
cccatcaagattttccata

SEQ ID NO: 705369 - DNA, 19 bp, Mus musculus
  siRNA target sequence for Scmh1 (NM_013883.1,817-835).
catcaccttcccacaactt

SEQ ID NO: 705370 - DNA, 19 bp, Mus musculus
  siRNA target sequence for Scmh1 (NM_013883.1,946-964).
ggtggcgaggcgcatttga

SEQ ID NO: 705371 - DNA, 19 bp, Mus musculus
  siRNA target sequence for Scmh1 (NM_013883.1,949-967).
ggcgaggcgcatttgacta

SEQ ID NO: 705372 - DNA, 19 bp, Mus musculus
  siRNA target sequence for Scmh1 (NM_013883.1,1012-1030).
gttctttgactggagataa

SEQ ID NO: 705373 - DNA, 19 bp, Mus musculus
  siRNA target sequence for Scmh1 (NM_013883.1,1015-1033).
ctttgactggagataacct

SEQ ID NO: 705374 - DNA, 19 bp, Mus musculus
  siRNA target sequence for Scmh1 (NM_013883.1,1048-1066).
ccaaagttgtgattccaaa

SEQ ID NO: 705375 - DNA, 19 bp, Mus musculus
  siRNA target sequence for Scmh1 (NM_013883.1,1067-1085).
gaatccgtccccttcatct

SEQ ID NO: 705376 - DNA, 19 bp, Mus musculus
  siRNA target sequence for Scmh1 (NM_013883.1,1225-1243).
ccaagtcagctgaaccttt

SEQ ID NO: 705377 - DNA, 19 bp, Mus musculus
  siRNA target sequence for Scmh1 (NM_013883.1,1352-1370).
cagcactgttcctcaagat

SEQ ID NO: 705378 - DNA, 19 bp, Mus musculus
  siRNA target sequence for Scmh1 (NM_013883.1,1404-1422).
cccacagtttgtatctact

SEQ ID NO: 705379 - DNA, 19 bp, Mus musculus
  siRNA target sequence for Scmh1 (NM_013883.1,1405-1423).
ccacagtttgtatctactt

SEQ ID NO: 705380 - DNA, 19 bp, Mus musculus
  siRNA target sequence for Scmh1 (NM_013883.1,1537-1555).
gcattgactgtgcttatca

SEQ ID NO: 705381 - DNA, 19 bp, Mus musculus
  siRNA target sequence for Scmh1 (NM_013883.1,1549-1567).
cttatcaccagaaaactgt

SEQ ID NO: 705382 - DNA, 19 bp, Mus musculus
  siRNA target sequence for Scmh1 (NM_013883.1,1588-1606).
gccacggcggtgaagtcat

SEQ ID NO: 705383 - DNA, 19 bp, Mus musculus
  siRNA target sequence for Scmh1 (NM_013883.1,1589-1607).
ccacggcggtgaagtcatt

SEQ ID NO: 705384 - DNA, 19 bp, Mus musculus
  siRNA target sequence for Scmh1 (NM_013883.1,1592-1610).
cggcggtgaagtcatttca

SEQ ID NO: 705385 - DNA, 19 bp, Mus musculus
  siRNA target sequence for Scmh1 (NM_013883.1,1700-1718).
caaccttcgaagtgacaat

SEQ ID NO: 705386 - DNA, 19 bp, Mus musculus
  siRNA target sequence for Scmh1 (NM_013883.1,1704-1722).
cttcgaagtgacaatctgt

SEQ ID NO: 705387 - DNA, 19 bp, Mus musculus
  siRNA target sequence for Scmh1 (NM_013883.1,1726-1744).
gcaaccagccctttacaca

SEQ ID NO: 705388 - DNA, 19 bp, Mus musculus
  siRNA target sequence for Scmh1 (NM_013883.1,1760-1778).
cactgccacagagtataat

SEQ ID NO: 705389 - DNA, 19 bp, Mus musculus
  siRNA target sequence for Scmh1 (NM_013883.1,1762-1780).
ctgccacagagtataatca

SEQ ID NO: 705390 - DNA, 19 bp, Mus musculus
  siRNA target sequence for Scmh1 (NM_013883.1,1765-1783).
ccacagagtataatcacaa

SEQ ID NO: 705391 - DNA, 19 bp, Mus musculus
  siRNA target sequence for Scmh1 (NM_013883.1,1851-1869).
cactcagacctgatggatt

SEQ ID NO: 705392 - DNA, 19 bp, Mus musculus
  siRNA target sequence for Scmh1 (NM_013883.1,1988-2006).
ctgctctaagggagtgtta

SEQ ID NO: 705393 - DNA, 19 bp, Mus musculus
  siRNA target sequence for Scmh1 (NM_013883.1,2128-2146).
ggacagtggaggatgtgat

SEQ ID NO: 705394 - DNA, 19 bp, Mus musculus
  siRNA target sequence for Scmh1 (NM_013883.1,2198-2216).
ccgaaaacatgaaatcgat

SEQ ID NO: 705395 - DNA, 19 bp, Mus musculus
  siRNA target sequence for Scmh1 (NM_013883.1,2235-2253).
ctgcgcagtgacatgatga

SEQ ID NO: 705396 - DNA, 19 bp, Mus musculus
  siRNA target sequence for Scmh1 (NM_013883.1,2238-2256).
cgcagtgacatgatgatga

SEQ ID NO: 705397 - DNA, 19 bp, Mus musculus
  siRNA target sequence for Cspg5 (NM_013884.2,304-322).
gagtcgcgtgccaatgaca

SEQ ID NO: 705398 - DNA, 19 bp, Mus musculus
  siRNA target sequence for Cspg5 (NM_013884.2,636-654).
ccatgataagcctagtgta

SEQ ID NO: 705399 - DNA, 19 bp, Mus musculus
  siRNA target sequence for Cspg5 (NM_013884.2,658-676).
cctgaactccctaaagaga

SEQ ID NO: 705400 - DNA, 19 bp, Mus musculus
  siRNA target sequence for Cspg5 (NM_013884.2,753-771).
ccaaccagcctcagatata

SEQ ID NO: 705401 - DNA, 19 bp, Mus musculus
  siRNA target sequence for Cspg5 (NM_013884.2,754-772).
caaccagcctcagatataa

SEQ ID NO: 705402 - DNA, 19 bp, Mus musculus
  siRNA target sequence for Cspg5 (NM_013884.2,760-778).
gcctcagatataattgaca

SEQ ID NO: 705403 - DNA, 19 bp, Mus musculus
  siRNA target sequence for Cspg5 (NM_013884.2,761-779).
cctcagatataattgacat

SEQ ID NO: 705404 - DNA, 19 bp, Mus musculus
  siRNA target sequence for Cspg5 (NM_013884.2,764-782).
cagatataattgacattga

SEQ ID NO: 705405 - DNA, 19 bp, Mus musculus
  siRNA target sequence for Cspg5 (NM_013884.2,890-908).
cctggagcctgcttgattt

SEQ ID NO: 705406 - DNA, 19 bp, Mus musculus
  siRNA target sequence for Cspg5 (NM_013884.2,894-912).
gagcctgcttgatttgtat

SEQ ID NO: 705407 - DNA, 19 bp, Mus musculus
  siRNA target sequence for Cspg5 (NM_013884.2,897-915).
cctgcttgatttgtatgat

SEQ ID NO: 705408 - DNA, 19 bp, Mus musculus
  siRNA target sequence for Cspg5 (NM_013884.2,953-971).
ccacatccttctatgatga

SEQ ID NO: 705409 - DNA, 19 bp, Mus musculus
  siRNA target sequence for Cspg5 (NM_013884.2,1270-1288).
gacctctttccgagttact

SEQ ID NO: 705410 - DNA, 19 bp, Mus musculus
  siRNA target sequence for Cspg5 (NM_013884.2,1308-1326).
ctacctggtggagaacata

SEQ ID NO: 705411 - DNA, 19 bp, Mus musculus
  siRNA target sequence for Cspg5 (NM_013884.2,1343-1361).
gtaacacccaggactacat

SEQ ID NO: 705412 - DNA, 19 bp, Mus musculus
  siRNA target sequence for Cspg5 (NM_013884.2,1586-1604).
ccgagggctctcatccaaa

SEQ ID NO: 705413 - DNA, 19 bp, Mus musculus
  siRNA target sequence for Cspg5 (NM_013884.2,1616-1634).
gcgctccccacaaaatcca

SEQ ID NO: 705414 - DNA, 19 bp, Mus musculus
  siRNA target sequence for Cspg5 (NM_013884.2,1686-1704).
ctccatgtcacccaaactt

SEQ ID NO: 705415 - DNA, 19 bp, Mus musculus
  siRNA target sequence for Hdgfrp3 (NM_013886.2,433-451).
gggagaaggtggaaatact

SEQ ID NO: 705416 - DNA, 19 bp, Mus musculus
  siRNA target sequence for Zfp292 (NM_013889.1,108-126).
gcctacatgcagtattgtt

SEQ ID NO: 705417 - DNA, 19 bp, Mus musculus
  siRNA target sequence for Zfp292 (NM_013889.1,131-149).
ctgtgacaaagaattcctt

SEQ ID NO: 705418 - DNA, 19 bp, Mus musculus
  siRNA target sequence for Zfp292 (NM_013889.1,216-234).
gcaaagaattttaattcta

SEQ ID NO: 705419 - DNA, 19 bp, Mus musculus
  siRNA target sequence for Zfp292 (NM_013889.1,239-257).
ctcgtttgtccctcatgtt

SEQ ID NO: 705420 - DNA, 19 bp, Mus musculus
  siRNA target sequence for Zfp292 (NM_013889.1,264-282).
catgttaaacagtctagta

SEQ ID NO: 705421 - DNA, 19 bp, Mus musculus
  siRNA target sequence for Zfp292 (NM_013889.1,342-360).
gccacccatgaaaatcaaa

SEQ ID NO: 705422 - DNA, 19 bp, Mus musculus
  siRNA target sequence for Zfp292 (NM_013889.1,343-361).
ccacccatgaaaatcaaaa

SEQ ID NO: 705423 - DNA, 19 bp, Mus musculus
  siRNA target sequence for Zfp292 (NM_013889.1,347-365).
ccatgaaaatcaaaagact

SEQ ID NO: 705424 - DNA, 19 bp, Mus musculus
  siRNA target sequence for Zfp292 (NM_013889.1,348-366).
catgaaaatcaaaagacta

SEQ ID NO: 705425 - DNA, 19 bp, Mus musculus
  siRNA target sequence for Zfp292 (NM_013889.1,389-407).
ggaacagcgacccataaaa

SEQ ID NO: 705426 - DNA, 19 bp, Mus musculus
  siRNA target sequence for Zfp292 (NM_013889.1,390-408).
gaacagcgacccataaaaa

SEQ ID NO: 705427 - DNA, 19 bp, Mus musculus
  siRNA target sequence for Zfp292 (NM_013889.1,410-428).
gaatagtctttattcaaca

SEQ ID NO: 705428 - DNA, 19 bp, Mus musculus
  siRNA target sequence for Zfp292 (NM_013889.1,424-442).
caacagatttcatagtgtt

SEQ ID NO: 705429 - DNA, 19 bp, Mus musculus
  siRNA target sequence for Zfp292 (NM_013889.1,427-445).
cagatttcatagtgtttaa

SEQ ID NO: 705430 - DNA, 19 bp, Mus musculus
  siRNA target sequence for Zfp292 (NM_013889.1,474-492).
gacgacaaggacaagtctt

SEQ ID NO: 705431 - DNA, 19 bp, Mus musculus
  siRNA target sequence for Zfp292 (NM_013889.1,476-494).
cgacaaggacaagtcttat

SEQ ID NO: 705432 - DNA, 19 bp, Mus musculus
  siRNA target sequence for Zfp292 (NM_013889.1,518-536).
gaaaccagtacctgttaat

SEQ ID NO: 705433 - DNA, 19 bp, Mus musculus
  siRNA target sequence for Zfp292 (NM_013889.1,522-540).
ccagtacctgttaatgagt

SEQ ID NO: 705434 - DNA, 19 bp, Mus musculus
  siRNA target sequence for Zfp292 (NM_013889.1,523-541).
cagtacctgttaatgagtt

SEQ ID NO: 705435 - DNA, 19 bp, Mus musculus
  siRNA target sequence for Zfp292 (NM_013889.1,562-580).
gtaaaaagggctttaagta

SEQ ID NO: 705436 - DNA, 19 bp, Mus musculus
  siRNA target sequence for Zfp292 (NM_013889.1,603-621).
gtgaaaggccataaggata

SEQ ID NO: 705437 - DNA, 19 bp, Mus musculus
  siRNA target sequence for Zfp292 (NM_013889.1,630-648).
gccaaacgctttcttgaaa

SEQ ID NO: 705438 - DNA, 19 bp, Mus musculus
  siRNA target sequence for Zfp292 (NM_013889.1,631-649).
ccaaacgctttcttgaaat

SEQ ID NO: 705439 - DNA, 19 bp, Mus musculus
  siRNA target sequence for Zfp292 (NM_013889.1,636-654).
cgctttcttgaaatgcaaa

SEQ ID NO: 705440 - DNA, 19 bp, Mus musculus
  siRNA target sequence for Zfp292 (NM_013889.1,650-668).
gcaaagcaagaaagtcatt

SEQ ID NO: 705441 - DNA, 19 bp, Mus musculus
  siRNA target sequence for Zfp292 (NM_013889.1,697-715).
gcgtcactcatctcaatga

SEQ ID NO: 705442 - DNA, 19 bp, Mus musculus
  siRNA target sequence for Zfp292 (NM_013889.1,698-716).
cgtcactcatctcaatgat

SEQ ID NO: 705443 - DNA, 19 bp, Mus musculus
  siRNA target sequence for Zfp292 (NM_013889.1,708-726).
ctcaatgatcacttacaaa

SEQ ID NO: 705444 - DNA, 19 bp, Mus musculus
  siRNA target sequence for Zfp292 (NM_013889.1,735-753).
ggcagtaagccatatatat

SEQ ID NO: 705445 - DNA, 19 bp, Mus musculus
  siRNA target sequence for Zfp292 (NM_013889.1,834-852).
gcaaagtgcttatttccaa

SEQ ID NO: 705446 - DNA, 19 bp, Mus musculus
  siRNA target sequence for Zfp292 (NM_013889.1,872-890).
ccaagcttatttactgtat

SEQ ID NO: 705447 - DNA, 19 bp, Mus musculus
  siRNA target sequence for Zfp292 (NM_013889.1,877-895).
cttatttactgtatgatca

SEQ ID NO: 705448 - DNA, 19 bp, Mus musculus
  siRNA target sequence for Zfp292 (NM_013889.1,894-912).
catgaggcccaacattata

SEQ ID NO: 705449 - DNA, 19 bp, Mus musculus
  siRNA target sequence for Zfp292 (NM_013889.1,897-915).
gaggcccaacattataata

SEQ ID NO: 705450 - DNA, 19 bp, Mus musculus
  siRNA target sequence for Zfp292 (NM_013889.1,989-1007).
ccacagtcatcctgaaaca

SEQ ID NO: 705451 - DNA, 19 bp, Mus musculus
  siRNA target sequence for Zfp292 (NM_013889.1,1109-1127).
gaacctgggttcaaacaga

SEQ ID NO: 705452 - DNA, 19 bp, Mus musculus
  siRNA target sequence for Zfp292 (NM_013889.1,1206-1224).
gctaacataccattgtcaa

SEQ ID NO: 705453 - DNA, 19 bp, Mus musculus
  siRNA target sequence for Zfp292 (NM_013889.1,1211-1229).
cataccattgtcaaatggt

SEQ ID NO: 705454 - DNA, 19 bp, Mus musculus
  siRNA target sequence for Zfp292 (NM_013889.1,1230-1248).
ctggaaacccgtgataata

SEQ ID NO: 705455 - DNA, 19 bp, Mus musculus
  siRNA target sequence for Zfp292 (NM_013889.1,1232-1250).
ggaaacccgtgataatact

SEQ ID NO: 705456 - DNA, 19 bp, Mus musculus
  siRNA target sequence for Zfp292 (NM_013889.1,1233-1251).
gaaacccgtgataatacta

SEQ ID NO: 705457 - DNA, 19 bp, Mus musculus
  siRNA target sequence for Zfp292 (NM_013889.1,1238-1256).
ccgtgataatactactgtt

SEQ ID NO: 705458 - DNA, 19 bp, Mus musculus
  siRNA target sequence for Zfp292 (NM_013889.1,1379-1397).
gcataaaccaggtataggt

SEQ ID NO: 705459 - DNA, 19 bp, Mus musculus
  siRNA target sequence for Zfp292 (NM_013889.1,1399-1417).
ctggggtccagttatgtca

SEQ ID NO: 705460 - DNA, 19 bp, Mus musculus
  siRNA target sequence for Zfp292 (NM_013889.1,1416-1434).
catccaggtttccaagaaa

SEQ ID NO: 705461 - DNA, 19 bp, Mus musculus
  siRNA target sequence for Zfp292 (NM_013889.1,1452-1470).
ctgaacgaagcccagaatt

SEQ ID NO: 705462 - DNA, 19 bp, Mus musculus
  siRNA target sequence for Zfp292 (NM_013889.1,1454-1472).
gaacgaagcccagaattct

SEQ ID NO: 705463 - DNA, 19 bp, Mus musculus
  siRNA target sequence for Zfp292 (NM_013889.1,1457-1475).
cgaagcccagaattcttta

SEQ ID NO: 705464 - DNA, 19 bp, Mus musculus
  siRNA target sequence for Zfp292 (NM_013889.1,1458-1476).
gaagcccagaattctttat

SEQ ID NO: 705465 - DNA, 19 bp, Mus musculus
  siRNA target sequence for Zfp292 (NM_013889.1,1461-1479).
gcccagaattctttatcaa

SEQ ID NO: 705466 - DNA, 19 bp, Mus musculus
  siRNA target sequence for Zfp292 (NM_013889.1,1462-1480).
cccagaattctttatcaaa

SEQ ID NO: 705467 - DNA, 19 bp, Mus musculus
  siRNA target sequence for Zfp292 (NM_013889.1,1511-1529).
cccacaaagcttagaaaga

SEQ ID NO: 705468 - DNA, 19 bp, Mus musculus
  siRNA target sequence for Zfp292 (NM_013889.1,1568-1586).
ggcaggacttgaagacaat

SEQ ID NO: 705469 - DNA, 19 bp, Mus musculus
  siRNA target sequence for Zfp292 (NM_013889.1,1569-1587).
gcaggacttgaagacaatt

SEQ ID NO: 705470 - DNA, 19 bp, Mus musculus
  siRNA target sequence for Zfp292 (NM_013889.1,1578-1596).
gaagacaattcacaaattt

SEQ ID NO: 705471 - DNA, 19 bp, Mus musculus
  siRNA target sequence for Zfp292 (NM_013889.1,1588-1606).
cacaaatttgcaagtttga

SEQ ID NO: 705472 - DNA, 19 bp, Mus musculus
  siRNA target sequence for Zfp292 (NM_013889.1,1611-1629).
ggaggtgatgttaaaacct

SEQ ID NO: 705473 - DNA, 19 bp, Mus musculus
  siRNA target sequence for Zfp292 (NM_013889.1,1650-1668).
cctcttaagacactagaaa

SEQ ID NO: 705474 - DNA, 19 bp, Mus musculus
  siRNA target sequence for Zfp292 (NM_013889.1,1660-1678).
cactagaaagtatcacatt

SEQ ID NO: 705475 - DNA, 19 bp, Mus musculus
  siRNA target sequence for Zfp292 (NM_013889.1,1709-1727).
gttgggatctccatcagta

SEQ ID NO: 705476 - DNA, 19 bp, Mus musculus
  siRNA target sequence for Zfp292 (NM_013889.1,1769-1787).
gggatgcactcgaacatat

SEQ ID NO: 705477 - DNA, 19 bp, Mus musculus
  siRNA target sequence for Zfp292 (NM_013889.1,1770-1788).
ggatgcactcgaacatata

SEQ ID NO: 705478 - DNA, 19 bp, Mus musculus
  siRNA target sequence for Zfp292 (NM_013889.1,1771-1789).
gatgcactcgaacatataa

SEQ ID NO: 705479 - DNA, 19 bp, Mus musculus
  siRNA target sequence for Zfp292 (NM_013889.1,1775-1793).
cactcgaacatataactct

SEQ ID NO: 705480 - DNA, 19 bp, Mus musculus
  siRNA target sequence for Zfp292 (NM_013889.1,1856-1874).
gcagcgcaagacgaaaaaa

SEQ ID NO: 705481 - DNA, 19 bp, Mus musculus
  siRNA target sequence for Zfp292 (NM_013889.1,1859-1877).
gcgcaagacgaaaaaaggt

SEQ ID NO: 705482 - DNA, 19 bp, Mus musculus
  siRNA target sequence for Zfp292 (NM_013889.1,1865-1883).
gacgaaaaaaggtcagaaa

SEQ ID NO: 705483 - DNA, 19 bp, Mus musculus
  siRNA target sequence for Zfp292 (NM_013889.1,1875-1893).
ggtcagaaatctaacaact

SEQ ID NO: 705484 - DNA, 19 bp, Mus musculus
  siRNA target sequence for Zfp292 (NM_013889.1,1876-1894).
gtcagaaatctaacaactt

SEQ ID NO: 705485 - DNA, 19 bp, Mus musculus
  siRNA target sequence for Zfp292 (NM_013889.1,1889-1907).
caacttaaatacaccaaat

SEQ ID NO: 705486 - DNA, 19 bp, Mus musculus
  siRNA target sequence for Zfp292 (NM_013889.1,1892-1910).
cttaaatacaccaaatcat

SEQ ID NO: 705487 - DNA, 19 bp, Mus musculus
  siRNA target sequence for Zfp292 (NM_013889.1,1945-1963).
gcagctctaatcatgcttt

SEQ ID NO: 705488 - DNA, 19 bp, Mus musculus
  siRNA target sequence for Zfp292 (NM_013889.1,1946-1964).
cagctctaatcatgctttt

SEQ ID NO: 705489 - DNA, 19 bp, Mus musculus
  siRNA target sequence for Zfp292 (NM_013889.1,2032-2050).
ccattttcccagctcattt

SEQ ID NO: 705490 - DNA, 19 bp, Mus musculus
  siRNA target sequence for Zfp292 (NM_013889.1,2056-2074).
gtgtatcagctccattgtt

SEQ ID NO: 705491 - DNA, 19 bp, Mus musculus
  siRNA target sequence for Zfp292 (NM_013889.1,2089-2107).
gtgtcctaagtccaaatat

SEQ ID NO: 705492 - DNA, 19 bp, Mus musculus
  siRNA target sequence for Zfp292 (NM_013889.1,2093-2111).
cctaagtccaaatatacct

SEQ ID NO: 705493 - DNA, 19 bp, Mus musculus
  siRNA target sequence for Zfp292 (NM_013889.1,2094-2112).
ctaagtccaaatatacctt

SEQ ID NO: 705494 - DNA, 19 bp, Mus musculus
  siRNA target sequence for Zfp292 (NM_013889.1,2117-2135).
ggataaacatggacaagat

SEQ ID NO: 705495 - DNA, 19 bp, Mus musculus
  siRNA target sequence for Zfp292 (NM_013889.1,2130-2148).
caagatggcatattatgtt

SEQ ID NO: 705496 - DNA, 19 bp, Mus musculus
  siRNA target sequence for Zfp292 (NM_013889.1,2137-2155).
gcatattatgttcacaaat

SEQ ID NO: 705497 - DNA, 19 bp, Mus musculus
  siRNA target sequence for Zfp292 (NM_013889.1,2176-2194).
ccttgccagcacaaatgga

SEQ ID NO: 705498 - DNA, 19 bp, Mus musculus
  siRNA target sequence for Zfp292 (NM_013889.1,2177-2195).
cttgccagcacaaatggaa

SEQ ID NO: 705499 - DNA, 19 bp, Mus musculus
  siRNA target sequence for Zfp292 (NM_013889.1,2253-2271).
cctttacccacagaaaata

SEQ ID NO: 705500 - DNA, 19 bp, Mus musculus
  siRNA target sequence for Zfp292 (NM_013889.1,2297-2315).
cagtgagaataattctgtt

SEQ ID NO: 705501 - DNA, 19 bp, Mus musculus
  siRNA target sequence for Zfp292 (NM_013889.1,2322-2340).
caactggaaaatagtacaa

SEQ ID NO: 705502 - DNA, 19 bp, Mus musculus
  siRNA target sequence for Zfp292 (NM_013889.1,2354-2372).
ccagacggatggaaacata

SEQ ID NO: 705503 - DNA, 19 bp, Mus musculus
  siRNA target sequence for Zfp292 (NM_013889.1,2355-2373).
cagacggatggaaacataa

SEQ ID NO: 705504 - DNA, 19 bp, Mus musculus
  siRNA target sequence for Zfp292 (NM_013889.1,2535-2553).
cacaacaaaagggctaaat

SEQ ID NO: 705505 - DNA, 19 bp, Mus musculus
  siRNA target sequence for Zfp292 (NM_013889.1,2548-2566).
ctaaatggcctgcgattat

SEQ ID NO: 705506 - DNA, 19 bp, Mus musculus
  siRNA target sequence for Zfp292 (NM_013889.1,2721-2739).
ctagctagcatgattctct

SEQ ID NO: 705507 - DNA, 19 bp, Mus musculus
  siRNA target sequence for Zfp292 (NM_013889.1,2743-2761).
caagtgcagtaaatatgca

SEQ ID NO: 705508 - DNA, 19 bp, Mus musculus
  siRNA target sequence for Zfp292 (NM_013889.1,2768-2786).
gcaacagtctaactttaat

SEQ ID NO: 705509 - DNA, 19 bp, Mus musculus
  siRNA target sequence for Zfp292 (NM_013889.1,2797-2815).
gctttaaagacccatcatt

SEQ ID NO: 705510 - DNA, 19 bp, Mus musculus
  siRNA target sequence for Zfp292 (NM_013889.1,2841-2859).
cgtccaacctttttaccaa

SEQ ID NO: 705511 - DNA, 19 bp, Mus musculus
  siRNA target sequence for Zfp292 (NM_013889.1,2869-2887).
caagatgtgacgtgagtaa

SEQ ID NO: 705512 - DNA, 19 bp, Mus musculus
  siRNA target sequence for Zfp292 (NM_013889.1,2875-2893).
gtgacgtgagtaactttaa

SEQ ID NO: 705513 - DNA, 19 bp, Mus musculus
  siRNA target sequence for Zfp292 (NM_013889.1,2909-2927).
ggaaggcagtgaaattatt

SEQ ID NO: 705514 - DNA, 19 bp, Mus musculus
  siRNA target sequence for Zfp292 (NM_013889.1,2914-2932).
gcagtgaaattattaagca

SEQ ID NO: 705515 - DNA, 19 bp, Mus musculus
  siRNA target sequence for Zfp292 (NM_013889.1,2971-2989).
gtgccgaaatgctttctca

SEQ ID NO: 705516 - DNA, 19 bp, Mus musculus
  siRNA target sequence for Zfp292 (NM_013889.1,3099-3117).
ccatcaaaccagaatcaaa

SEQ ID NO: 705517 - DNA, 19 bp, Mus musculus
  siRNA target sequence for Zfp292 (NM_013889.1,3128-3146).
caaaaccctcaaagaatgt

SEQ ID NO: 705518 - DNA, 19 bp, Mus musculus
  siRNA target sequence for Zfp292 (NM_013889.1,3201-3219).
ggcttgtgctccaattcat

SEQ ID NO: 705519 - DNA, 19 bp, Mus musculus
  siRNA target sequence for Zfp292 (NM_013889.1,3206-3224).
gtgctccaattcattcagt

SEQ ID NO: 705520 - DNA, 19 bp, Mus musculus
  siRNA target sequence for Zfp292 (NM_013889.1,3232-3250).
ctgaaccaccacaaaattt

SEQ ID NO: 705521 - DNA, 19 bp, Mus musculus
  siRNA target sequence for Zfp292 (NM_013889.1,3234-3252).
gaaccaccacaaaatttta

SEQ ID NO: 705522 - DNA, 19 bp, Mus musculus
  siRNA target sequence for Zfp292 (NM_013889.1,3240-3258).
ccacaaaattttaccaata

SEQ ID NO: 705523 - DNA, 19 bp, Mus musculus
  siRNA target sequence for Zfp292 (NM_013889.1,3254-3272).
caataatagtgcacatgtt

SEQ ID NO: 705524 - DNA, 19 bp, Mus musculus
  siRNA target sequence for Zfp292 (NM_013889.1,3298-3316).
caagatccagtcatttgaa

SEQ ID NO: 705525 - DNA, 19 bp, Mus musculus
  siRNA target sequence for Zfp292 (NM_013889.1,3324-3342).
ggaaatagtgcatctaaga

SEQ ID NO: 705526 - DNA, 19 bp, Mus musculus
  siRNA target sequence for Zfp292 (NM_013889.1,3357-3375).
gctcctgcagtaagtgtat

SEQ ID NO: 705527 - DNA, 19 bp, Mus musculus
  siRNA target sequence for Zfp292 (NM_013889.1,3366-3384).
gtaagtgtatctaatactt

SEQ ID NO: 705528 - DNA, 19 bp, Mus musculus
  siRNA target sequence for Zfp292 (NM_013889.1,3395-3413).
gctaccaactgatttacca

SEQ ID NO: 705529 - DNA, 19 bp, Mus musculus
  siRNA target sequence for Zfp292 (NM_013889.1,3490-3508).
gggctttggtggaaaatct

SEQ ID NO: 705530 - DNA, 19 bp, Mus musculus
  siRNA target sequence for Zfp292 (NM_013889.1,3501-3519).
gaaaatctcacacagaaat

SEQ ID NO: 705531 - DNA, 19 bp, Mus musculus
  siRNA target sequence for Zfp292 (NM_013889.1,3527-3545).
cattgacaatcatttgttt

SEQ ID NO: 705532 - DNA, 19 bp, Mus musculus
  siRNA target sequence for Zfp292 (NM_013889.1,3531-3549).
gacaatcatttgtttataa

SEQ ID NO: 705533 - DNA, 19 bp, Mus musculus
  siRNA target sequence for Zfp292 (NM_013889.1,3552-3570).
gatgtaaaagagaactgta

SEQ ID NO: 705534 - DNA, 19 bp, Mus musculus
  siRNA target sequence for Zfp292 (NM_013889.1,3577-3595).
gtcttgagccccatacaat

SEQ ID NO: 705535 - DNA, 19 bp, Mus musculus
  siRNA target sequence for Zfp292 (NM_013889.1,3579-3597).
cttgagccccatacaatgt

SEQ ID NO: 705536 - DNA, 19 bp, Mus musculus
  siRNA target sequence for Zfp292 (NM_013889.1,3596-3614).
gttaacccctttaacatta

SEQ ID NO: 705537 - DNA, 19 bp, Mus musculus
  siRNA target sequence for Zfp292 (NM_013889.1,3635-3653).
ccgaatgatgcctttgagt

SEQ ID NO: 705538 - DNA, 19 bp, Mus musculus
  siRNA target sequence for Zfp292 (NM_013889.1,3636-3654).
cgaatgatgcctttgagtt

SEQ ID NO: 705539 - DNA, 19 bp, Mus musculus
  siRNA target sequence for Zfp292 (NM_013889.1,3716-3734).
gaagactcttgaaattatt

SEQ ID NO: 705540 - DNA, 19 bp, Mus musculus
  siRNA target sequence for Zfp292 (NM_013889.1,3828-3846).
caacttccctcagtaaact

SEQ ID NO: 705541 - DNA, 19 bp, Mus musculus
  siRNA target sequence for Zfp292 (NM_013889.1,3831-3849).
cttccctcagtaaactcta

SEQ ID NO: 705542 - DNA, 19 bp, Mus musculus
  siRNA target sequence for Zfp292 (NM_013889.1,3879-3897).
cagtgctcctctttcctaa

SEQ ID NO: 705543 - DNA, 19 bp, Mus musculus
  siRNA target sequence for Zfp292 (NM_013889.1,3916-3934).
ctgaagcattacataagga

SEQ ID NO: 705544 - DNA, 19 bp, Mus musculus
  siRNA target sequence for Zfp292 (NM_013889.1,3950-3968).
cattttagagggtttgcaa

SEQ ID NO: 705545 - DNA, 19 bp, Mus musculus
  siRNA target sequence for Zfp292 (NM_013889.1,3957-3975).
gagggtttgcaaaacttaa

SEQ ID NO: 705546 - DNA, 19 bp, Mus musculus
  siRNA target sequence for Zfp292 (NM_013889.1,4003-4021).
cttcccagagtatgctaat

SEQ ID NO: 705547 - DNA, 19 bp, Mus musculus
  siRNA target sequence for Zfp292 (NM_013889.1,4008-4026).
cagagtatgctaatgaaca

SEQ ID NO: 705548 - DNA, 19 bp, Mus musculus
  siRNA target sequence for Zfp292 (NM_013889.1,4043-4061).
ccctactcctactaaatca

SEQ ID NO: 705549 - DNA, 19 bp, Mus musculus
  siRNA target sequence for Zfp292 (NM_013889.1,4060-4078).
caactccaaatattgtagt

SEQ ID NO: 705550 - DNA, 19 bp, Mus musculus
  siRNA target sequence for Zfp292 (NM_013889.1,4082-4100).
gccagtacccgaagtgata

SEQ ID NO: 705551 - DNA, 19 bp, Mus musculus
  siRNA target sequence for Zfp292 (NM_013889.1,4084-4102).
cagtacccgaagtgataca

SEQ ID NO: 705552 - DNA, 19 bp, Mus musculus
  siRNA target sequence for Zfp292 (NM_013889.1,4090-4108).
ccgaagtgatacatgttca

SEQ ID NO: 705553 - DNA, 19 bp, Mus musculus
  siRNA target sequence for Zfp292 (NM_013889.1,4097-4115).
gatacatgttcagcttaat

SEQ ID NO: 705554 - DNA, 19 bp, Mus musculus
  siRNA target sequence for Zfp292 (NM_013889.1,4107-4125).
cagcttaatgacagagtta

SEQ ID NO: 705555 - DNA, 19 bp, Mus musculus
  siRNA target sequence for Zfp292 (NM_013889.1,4122-4140).
gttaataagccctttgtgt

SEQ ID NO: 705556 - DNA, 19 bp, Mus musculus
  siRNA target sequence for Zfp292 (NM_013889.1,4132-4150).
cctttgtgtgtcaaaacca

SEQ ID NO: 705557 - DNA, 19 bp, Mus musculus
  siRNA target sequence for Zfp292 (NM_013889.1,4179-4197).
gatgccctgtttaaacact

SEQ ID NO: 705558 - DNA, 19 bp, Mus musculus
  siRNA target sequence for Zfp292 (NM_013889.1,4200-4218).
ggtaaaatccatcagtata

SEQ ID NO: 705559 - DNA, 19 bp, Mus musculus
  siRNA target sequence for Zfp292 (NM_013889.1,4214-4232).
gtatactccagagatgatt

SEQ ID NO: 705560 - DNA, 19 bp, Mus musculus
  siRNA target sequence for Zfp292 (NM_013889.1,4219-4237).
ctccagagatgattcttga

SEQ ID NO: 705561 - DNA, 19 bp, Mus musculus
  siRNA target sequence for Zfp292 (NM_013889.1,4284-4302).
ccttcatgtaccaaaacat

SEQ ID NO: 705562 - DNA, 19 bp, Mus musculus
  siRNA target sequence for Zfp292 (NM_013889.1,4335-4353).
cagttggtgcatcatttta

SEQ ID NO: 705563 - DNA, 19 bp, Mus musculus
  siRNA target sequence for Zfp292 (NM_013889.1,4337-4355).
gttggtgcatcattttaca

SEQ ID NO: 705564 - DNA, 19 bp, Mus musculus
  siRNA target sequence for Zfp292 (NM_013889.1,4340-4358).
ggtgcatcattttacaata

SEQ ID NO: 705565 - DNA, 19 bp, Mus musculus
  siRNA target sequence for Zfp292 (NM_013889.1,4343-4361).
gcatcattttacaatagaa

SEQ ID NO: 705566 - DNA, 19 bp, Mus musculus
  siRNA target sequence for Zfp292 (NM_013889.1,4359-4377).
gaagaaatggtaaagctaa

SEQ ID NO: 705567 - DNA, 19 bp, Mus musculus
  siRNA target sequence for Zfp292 (NM_013889.1,4362-4380).
gaaatggtaaagctaaaaa

SEQ ID NO: 705568 - DNA, 19 bp, Mus musculus
  siRNA target sequence for Zfp292 (NM_013889.1,4388-4406).
gccctatggaagaaaatct

SEQ ID NO: 705569 - DNA, 19 bp, Mus musculus
  siRNA target sequence for Zfp292 (NM_013889.1,4524-4542).
gctgcacttgctaatgcaa

SEQ ID NO: 705570 - DNA, 19 bp, Mus musculus
  siRNA target sequence for Zfp292 (NM_013889.1,4530-4548).
cttgctaatgcaacagtaa

SEQ ID NO: 705571 - DNA, 19 bp, Mus musculus
  siRNA target sequence for Zfp292 (NM_013889.1,4540-4558).
caacagtaatcccagaaaa

SEQ ID NO: 705572 - DNA, 19 bp, Mus musculus
  siRNA target sequence for Zfp292 (NM_013889.1,4638-4656).
gcaaatcttgcaaacctaa

SEQ ID NO: 705573 - DNA, 19 bp, Mus musculus
  siRNA target sequence for Zfp292 (NM_013889.1,4639-4657).
caaatcttgcaaacctaaa

SEQ ID NO: 705574 - DNA, 19 bp, Mus musculus
  siRNA target sequence for Zfp292 (NM_013889.1,4836-4854).
caggctgtacataaatcaa

SEQ ID NO: 705575 - DNA, 19 bp, Mus musculus
  siRNA target sequence for Zfp292 (NM_013889.1,4918-4936).
ctgaaccgaaacaatcaat

SEQ ID NO: 705576 - DNA, 19 bp, Mus musculus
  siRNA target sequence for Zfp292 (NM_013889.1,4920-4938).
gaaccgaaacaatcaatga

SEQ ID NO: 705577 - DNA, 19 bp, Mus musculus
  siRNA target sequence for Zfp292 (NM_013889.1,4924-4942).
cgaaacaatcaatgaaaga

SEQ ID NO: 705578 - DNA, 19 bp, Mus musculus
  siRNA target sequence for Zfp292 (NM_013889.1,4953-4971).
caggtgagtgactgttcta

SEQ ID NO: 705579 - DNA, 19 bp, Mus musculus
  siRNA target sequence for Zfp292 (NM_013889.1,4960-4978).
gtgactgttctaggatttt

SEQ ID NO: 705580 - DNA, 19 bp, Mus musculus
  siRNA target sequence for Zfp292 (NM_013889.1,4969-4987).
ctaggattttccaagcaat

SEQ ID NO: 705581 - DNA, 19 bp, Mus musculus
  siRNA target sequence for Zfp292 (NM_013889.1,4984-5002).
caattactggcctaataca

SEQ ID NO: 705582 - DNA, 19 bp, Mus musculus
  siRNA target sequence for Zfp292 (NM_013889.1,4993-5011).
gcctaatacagcactacat

SEQ ID NO: 705583 - DNA, 19 bp, Mus musculus
  siRNA target sequence for Zfp292 (NM_013889.1,4995-5013).
ctaatacagcactacatga

SEQ ID NO: 705584 - DNA, 19 bp, Mus musculus
  siRNA target sequence for Zfp292 (NM_013889.1,5003-5021).
gcactacatgaaacttcat

SEQ ID NO: 705585 - DNA, 19 bp, Mus musculus
  siRNA target sequence for Zfp292 (NM_013889.1,5083-5101).
gtgatcagttggagtgtaa

SEQ ID NO: 705586 - DNA, 19 bp, Mus musculus
  siRNA target sequence for Zfp292 (NM_013889.1,5085-5103).
gatcagttggagtgtaagt

SEQ ID NO: 705587 - DNA, 19 bp, Mus musculus
  siRNA target sequence for Zfp292 (NM_013889.1,5120-5138).
cctgagctatgttgttcat

SEQ ID NO: 705588 - DNA, 19 bp, Mus musculus
  siRNA target sequence for Zfp292 (NM_013889.1,5123-5141).
gagctatgttgttcatctt

SEQ ID NO: 705589 - DNA, 19 bp, Mus musculus
  siRNA target sequence for Zfp292 (NM_013889.1,5125-5143).
gctatgttgttcatcttga

SEQ ID NO: 705590 - DNA, 19 bp, Mus musculus
  siRNA target sequence for Zfp292 (NM_013889.1,5211-5229).
gagggctgtgacaggatat

SEQ ID NO: 705591 - DNA, 19 bp, Mus musculus
  siRNA target sequence for Zfp292 (NM_013889.1,5233-5251).
ccactcggtctaatcttct

SEQ ID NO: 705592 - DNA, 19 bp, Mus musculus
  siRNA target sequence for Zfp292 (NM_013889.1,5247-5265).
cttctccgacacatcttta

SEQ ID NO: 705593 - DNA, 19 bp, Mus musculus
  siRNA target sequence for Zfp292 (NM_013889.1,5250-5268).
ctccgacacatctttaata

SEQ ID NO: 705594 - DNA, 19 bp, Mus musculus
  siRNA target sequence for Zfp292 (NM_013889.1,5252-5270).
ccgacacatctttaataaa

SEQ ID NO: 705595 - DNA, 19 bp, Mus musculus
  siRNA target sequence for Zfp292 (NM_013889.1,5254-5272).
gacacatctttaataaaca

SEQ ID NO: 705596 - DNA, 19 bp, Mus musculus
  siRNA target sequence for Zfp292 (NM_013889.1,5258-5276).
catctttaataaacataat

SEQ ID NO: 705597 - DNA, 19 bp, Mus musculus
  siRNA target sequence for Zfp292 (NM_013889.1,5295-5313).
ctgattcggccaagaaaat

SEQ ID NO: 705598 - DNA, 19 bp, Mus musculus
  siRNA target sequence for Zfp292 (NM_013889.1,5365-5383).
ctaaacatcggacaacaaa

SEQ ID NO: 705599 - DNA, 19 bp, Mus musculus
  siRNA target sequence for Zfp292 (NM_013889.1,5430-5448).
cgaaagaaaaaaagtaatt

SEQ ID NO: 705600 - DNA, 19 bp, Mus musculus
  siRNA target sequence for Zfp292 (NM_013889.1,5472-5490).
gtgcagattgaggaaaata

SEQ ID NO: 705601 - DNA, 19 bp, Mus musculus
  siRNA target sequence for Zfp292 (NM_013889.1,5508-5526).
cgtgggaagcacgtgtatt

SEQ ID NO: 705602 - DNA, 19 bp, Mus musculus
  siRNA target sequence for Zfp292 (NM_013889.1,5511-5529).
gggaagcacgtgtattcca

SEQ ID NO: 705603 - DNA, 19 bp, Mus musculus
  siRNA target sequence for Zfp292 (NM_013889.1,5512-5530).
ggaagcacgtgtattccat

SEQ ID NO: 705604 - DNA, 19 bp, Mus musculus
  siRNA target sequence for Zfp292 (NM_013889.1,5513-5531).
gaagcacgtgtattccata

SEQ ID NO: 705605 - DNA, 19 bp, Mus musculus
  siRNA target sequence for Zfp292 (NM_013889.1,5547-5565).
gccttggcagagtgtacaa

SEQ ID NO: 705606 - DNA, 19 bp, Mus musculus
  siRNA target sequence for Zfp292 (NM_013889.1,5552-5570).
ggcagagtgtacaagcaaa

SEQ ID NO: 705607 - DNA, 19 bp, Mus musculus
  siRNA target sequence for Zfp292 (NM_013889.1,5578-5596).
cacagtatccatgtatgat

SEQ ID NO: 705608 - DNA, 19 bp, Mus musculus
  siRNA target sequence for Zfp292 (NM_013889.1,5594-5612).
gataaaagggtgtacttca

SEQ ID NO: 705609 - DNA, 19 bp, Mus musculus
  siRNA target sequence for Zfp292 (NM_013889.1,5615-5633).
cgttacaagtgaaagcaat

SEQ ID NO: 705610 - DNA, 19 bp, Mus musculus
  siRNA target sequence for Zfp292 (NM_013889.1,5620-5638).
caagtgaaagcaatatcat

SEQ ID NO: 705611 - DNA, 19 bp, Mus musculus
  siRNA target sequence for Zfp292 (NM_013889.1,5629-5647).
gcaatatcatcagacatta

SEQ ID NO: 705612 - DNA, 19 bp, Mus musculus
  siRNA target sequence for Zfp292 (NM_013889.1,5636-5654).
catcagacattataagtgt

SEQ ID NO: 705613 - DNA, 19 bp, Mus musculus
  siRNA target sequence for Zfp292 (NM_013889.1,5641-5659).
gacattataagtgtcataa

SEQ ID NO: 705614 - DNA, 19 bp, Mus musculus
  siRNA target sequence for Zfp292 (NM_013889.1,5660-5678).
gttgtccagggcatttaca

SEQ ID NO: 705615 - DNA, 19 bp, Mus musculus
  siRNA target sequence for Zfp292 (NM_013889.1,5680-5698).
cacaacaccgcaacattct

SEQ ID NO: 705616 - DNA, 19 bp, Mus musculus
  siRNA target sequence for Zfp292 (NM_013889.1,5682-5700).
caacaccgcaacattctta

SEQ ID NO: 705617 - DNA, 19 bp, Mus musculus
  siRNA target sequence for Zfp292 (NM_013889.1,5864-5882).
gatggatgagttaacagaa

SEQ ID NO: 705618 - DNA, 19 bp, Mus musculus
  siRNA target sequence for Zfp292 (NM_013889.1,5867-5885).
ggatgagttaacagaatta

SEQ ID NO: 705619 - DNA, 19 bp, Mus musculus
  siRNA target sequence for Zfp292 (NM_013889.1,5930-5948).
ccaaggcaataccacttta

SEQ ID NO: 705620 - DNA, 19 bp, Mus musculus
  siRNA target sequence for Zfp292 (NM_013889.1,5944-5962).
ctttaaagggaaataacga

SEQ ID NO: 705621 - DNA, 19 bp, Mus musculus
  siRNA target sequence for Zfp292 (NM_013889.1,5961-5979).
gaatttcaggagcatgatt

SEQ ID NO: 705622 - DNA, 19 bp, Mus musculus
  siRNA target sequence for Zfp292 (NM_013889.1,5997-6015).
caaaagcctggtaatttga

SEQ ID NO: 705623 - DNA, 19 bp, Mus musculus
  siRNA target sequence for Zfp292 (NM_013889.1,6038-6056).
cactgtgcagagtaagaaa

SEQ ID NO: 705624 - DNA, 19 bp, Mus musculus
  siRNA target sequence for Zfp292 (NM_013889.1,6047-6065).
gagtaagaaacggaagatt

SEQ ID NO: 705625 - DNA, 19 bp, Mus musculus
  siRNA target sequence for Zfp292 (NM_013889.1,6149-6167).
ggagcatcctgcatccttt

SEQ ID NO: 705626 - DNA, 19 bp, Mus musculus
  siRNA target sequence for Zfp292 (NM_013889.1,6191-6209).
gggatttgaagcatccttt

SEQ ID NO: 705627 - DNA, 19 bp, Mus musculus
  siRNA target sequence for Zfp292 (NM_013889.1,6301-6319).
gctccagaagacatgttga

SEQ ID NO: 705628 - DNA, 19 bp, Mus musculus
  siRNA target sequence for Zfp292 (NM_013889.1,6409-6427).
gcagtgagaatgtaaaaat

SEQ ID NO: 705629 - DNA, 19 bp, Mus musculus
  siRNA target sequence for Zfp292 (NM_013889.1,6429-6447).
gttttagacaagactctta

SEQ ID NO: 705630 - DNA, 19 bp, Mus musculus
  siRNA target sequence for Zfp292 (NM_013889.1,6457-6475).
ctgagcttgtcctaaaaca

SEQ ID NO: 705631 - DNA, 19 bp, Mus musculus
  siRNA target sequence for Zfp292 (NM_013889.1,6492-6510).
cctactgtcagtctaaaaa

SEQ ID NO: 705632 - DNA, 19 bp, Mus musculus
  siRNA target sequence for Zfp292 (NM_013889.1,6493-6511).
ctactgtcagtctaaaaaa

SEQ ID NO: 705633 - DNA, 19 bp, Mus musculus
  siRNA target sequence for Zfp292 (NM_013889.1,6500-6518).
cagtctaaaaaaacttgaa

SEQ ID NO: 705634 - DNA, 19 bp, Mus musculus
  siRNA target sequence for Zfp292 (NM_013889.1,6513-6531).
cttgaagtactatccaata

SEQ ID NO: 705635 - DNA, 19 bp, Mus musculus
  siRNA target sequence for Rnf17 (NM_013894.1,168-186).
cctagtggagagtaagagt

SEQ ID NO: 705636 - DNA, 19 bp, Mus musculus
  siRNA target sequence for Rnf17 (NM_013894.1,257-275).
ccggtgaccaccacaagtt

SEQ ID NO: 705637 - DNA, 19 bp, Mus musculus
  siRNA target sequence for Rnf17 (NM_013894.1,258-276).
cggtgaccaccacaagttt

SEQ ID NO: 705638 - DNA, 19 bp, Mus musculus
  siRNA target sequence for Rnf17 (NM_013894.1,309-327).
gttagcacctcaagaatat

SEQ ID NO: 705639 - DNA, 19 bp, Mus musculus
  siRNA target sequence for Rnf17 (NM_013894.1,313-331).
gcacctcaagaatatacca

SEQ ID NO: 705640 - DNA, 19 bp, Mus musculus
  siRNA target sequence for Rnf17 (NM_013894.1,346-364).
gactgtgaggttcatacaa

SEQ ID NO: 705641 - DNA, 19 bp, Mus musculus
  siRNA target sequence for Rnf17 (NM_013894.1,362-380).
caactgtcagcatgaatca

SEQ ID NO: 705642 - DNA, 19 bp, Mus musculus
  siRNA target sequence for Rnf17 (NM_013894.1,431-449).
ccttgccaccgaaaatggt

SEQ ID NO: 705643 - DNA, 19 bp, Mus musculus
  siRNA target sequence for Rnf17 (NM_013894.1,432-450).
cttgccaccgaaaatggta

SEQ ID NO: 705644 - DNA, 19 bp, Mus musculus
  siRNA target sequence for Rnf17 (NM_013894.1,439-457).
ccgaaaatggtaaataact

SEQ ID NO: 705645 - DNA, 19 bp, Mus musculus
  siRNA target sequence for Rnf17 (NM_013894.1,479-497).
cagtggaccagctaattaa

SEQ ID NO: 705646 - DNA, 19 bp, Mus musculus
  siRNA target sequence for Rnf17 (NM_013894.1,512-530).
catcctccatacataggaa

SEQ ID NO: 705647 - DNA, 19 bp, Mus musculus
  siRNA target sequence for Rnf17 (NM_013894.1,516-534).
ctccatacataggaatgtt

SEQ ID NO: 705648 - DNA, 19 bp, Mus musculus
  siRNA target sequence for Rnf17 (NM_013894.1,519-537).
catacataggaatgtttca

SEQ ID NO: 705649 - DNA, 19 bp, Mus musculus
  siRNA target sequence for Rnf17 (NM_013894.1,607-625).
gaacaattaagtaatgcta

SEQ ID NO: 705650 - DNA, 19 bp, Mus musculus
  siRNA target sequence for Rnf17 (NM_013894.1,617-635).
gtaatgctataaaaatgct

SEQ ID NO: 705651 - DNA, 19 bp, Mus musculus
  siRNA target sequence for Rnf17 (NM_013894.1,633-651).
gcttgatagcacacaagat

SEQ ID NO: 705652 - DNA, 19 bp, Mus musculus
  siRNA target sequence for Rnf17 (NM_013894.1,637-655).
gatagcacacaagatcaaa

SEQ ID NO: 705653 - DNA, 19 bp, Mus musculus
  siRNA target sequence for Rnf17 (NM_013894.1,688-706).
gtggagaaacagtttgata

SEQ ID NO: 705654 - DNA, 19 bp, Mus musculus
  siRNA target sequence for Rnf17 (NM_013894.1,690-708).
ggagaaacagtttgataca

SEQ ID NO: 705655 - DNA, 19 bp, Mus musculus
  siRNA target sequence for Rnf17 (NM_013894.1,761-779).
ggcgtacagatgattattt

SEQ ID NO: 705656 - DNA, 19 bp, Mus musculus
  siRNA target sequence for Rnf17 (NM_013894.1,762-780).
gcgtacagatgattattta

SEQ ID NO: 705657 - DNA, 19 bp, Mus musculus
  siRNA target sequence for Rnf17 (NM_013894.1,763-781).
cgtacagatgattatttat

SEQ ID NO: 705658 - DNA, 19 bp, Mus musculus
  siRNA target sequence for Rnf17 (NM_013894.1,909-927).
ccggactttgaagttaaca

SEQ ID NO: 705659 - DNA, 19 bp, Mus musculus
  siRNA target sequence for Rnf17 (NM_013894.1,937-955).
gaattgtcacaagttagtt

SEQ ID NO: 705660 - DNA, 19 bp, Mus musculus
  siRNA target sequence for Rnf17 (NM_013894.1,949-967).
gttagttccataattccaa

SEQ ID NO: 705661 - DNA, 19 bp, Mus musculus
  siRNA target sequence for Rnf17 (NM_013894.1,965-983).
caaggaacacccctgaatt

SEQ ID NO: 705662 - DNA, 19 bp, Mus musculus
  siRNA target sequence for Rnf17 (NM_013894.1,969-987).
gaacacccctgaattggat

SEQ ID NO: 705663 - DNA, 19 bp, Mus musculus
  siRNA target sequence for Rnf17 (NM_013894.1,976-994).
cctgaattggatataaatt

SEQ ID NO: 705664 - DNA, 19 bp, Mus musculus
  siRNA target sequence for Rnf17 (NM_013894.1,979-997).
gaattggatataaattgca

SEQ ID NO: 705665 - DNA, 19 bp, Mus musculus
  siRNA target sequence for Timm13a (NM_013899.1,204-222).
ctgacatgtacaacagaat

SEQ ID NO: 705666 - DNA, 19 bp, Mus musculus
  siRNA target sequence for Timm13a (NM_013899.1,206-224).
gacatgtacaacagaatga

SEQ ID NO: 705667 - DNA, 19 bp, Mus musculus
  siRNA target sequence for Timm13a (NM_013899.1,246-264).
gcgtgcctccccactacaa

SEQ ID NO: 705668 - DNA, 19 bp, Mus musculus
  siRNA target sequence for Timm13a (NM_013899.1,295-313).
gtgtctggaccgatgtgta

SEQ ID NO: 705669 - DNA, 19 bp, Mus musculus
  siRNA target sequence for Timm13a (NM_013899.1,305-323).
cgatgtgtatccaagtact

SEQ ID NO: 705670 - DNA, 19 bp, Mus musculus
  siRNA target sequence for Fbxw5 (NM_013908.1,214-232).
cgggatgagttcttatgga

SEQ ID NO: 705671 - DNA, 19 bp, Mus musculus
  siRNA target sequence for Fbxw5 (NM_013908.1,215-233).
gggatgagttcttatggaa

SEQ ID NO: 705672 - DNA, 19 bp, Mus musculus
  siRNA target sequence for Fbxw5 (NM_013908.1,647-665).
gaaacaagccctatgatgt

SEQ ID NO: 705673 - DNA, 19 bp, Mus musculus
  siRNA target sequence for Fbxw5 (NM_013908.1,651-669).
caagccctatgatgtgttt

SEQ ID NO: 705674 - DNA, 19 bp, Mus musculus
  siRNA target sequence for Fbxw5 (NM_013908.1,712-730).
caccgcattggagatatca

SEQ ID NO: 705675 - DNA, 19 bp, Mus musculus
  siRNA target sequence for Fbxw5 (NM_013908.1,793-811).
gtggtaaagcggctcttta

SEQ ID NO: 705676 - DNA, 19 bp, Mus musculus
  siRNA target sequence for Fbxw5 (NM_013908.1,796-814).
gtaaagcggctctttaaga

SEQ ID NO: 705677 - DNA, 19 bp, Mus musculus
  siRNA target sequence for Fbxw5 (NM_013908.1,859-877).
gactgtagccgctttgata

SEQ ID NO: 705678 - DNA, 19 bp, Mus musculus
  siRNA target sequence for Fbxw5 (NM_013908.1,915-933).
gctcccctgccgagtcttt

SEQ ID NO: 705679 - DNA, 19 bp, Mus musculus
  siRNA target sequence for Fbxw5 (NM_013908.1,989-1007).
gttctgaccacgtcaagaa

SEQ ID NO: 705680 - DNA, 19 bp, Mus musculus
  siRNA target sequence for Fbxw5 (NM_013908.1,994-1012).
gaccacgtcaagaaaggtt

SEQ ID NO: 705681 - DNA, 19 bp, Mus musculus
  siRNA target sequence for Fbxw5 (NM_013908.1,996-1014).
ccacgtcaagaaaggttta

SEQ ID NO: 705682 - DNA, 19 bp, Mus musculus
  siRNA target sequence for Fbxw5 (NM_013908.1,1010-1028).
gtttacggcgtgtgtttga

SEQ ID NO: 705683 - DNA, 19 bp, Mus musculus
  siRNA target sequence for Fbxw5 (NM_013908.1,1142-1160).
ggaataagtacctcatctt

SEQ ID NO: 705684 - DNA, 19 bp, Mus musculus
  siRNA target sequence for Fbxw5 (NM_013908.1,1178-1196).
cgtactcaccgcatcagat

SEQ ID NO: 705685 - DNA, 19 bp, Mus musculus
  siRNA target sequence for Fbxw5 (NM_013908.1,1284-1302).
cctggaccatgtcattgat

SEQ ID NO: 705686 - DNA, 19 bp, Mus musculus
  siRNA target sequence for Fbxw5 (NM_013908.1,1570-1588).
gatcggcatggctatatct

SEQ ID NO: 705687 - DNA, 19 bp, Mus musculus
  siRNA target sequence for Fbxw5 (NM_013908.1,1589-1607).
gggaccgccactacaacat

SEQ ID NO: 705688 - DNA, 19 bp, Mus musculus
  siRNA target sequence for Fbxw5 (NM_013908.1,1591-1609).
gaccgccactacaacatct

SEQ ID NO: 705689 - DNA, 19 bp, Mus musculus
  siRNA target sequence for Fbxw5 (NM_013908.1,1639-1657).
gtcaactccgtggctttta

SEQ ID NO: 705690 - DNA, 19 bp, Mus musculus
  siRNA target sequence for Fbxw5 (NM_013908.1,1716-1734).
gcgttcaccacgcattgtt

SEQ ID NO: 705691 - DNA, 19 bp, Mus musculus
  siRNA target sequence for Fbxl6 (NM_013909.1,502-520).
gctggcaagggcaacctta

SEQ ID NO: 705692 - DNA, 19 bp, Mus musculus
  siRNA target sequence for Fbxl6 (NM_013909.1,806-824).
ggtcccgaatgcgtaaact

SEQ ID NO: 705693 - DNA, 19 bp, Mus musculus
  siRNA target sequence for Fbxl6 (NM_013909.1,907-925).
gtcagcactggcatgaact

SEQ ID NO: 705694 - DNA, 19 bp, Mus musculus
  siRNA target sequence for Fbxl6 (NM_013909.1,993-1011).
gcggctgctgaatctgatt

SEQ ID NO: 705695 - DNA, 19 bp, Mus musculus
  siRNA target sequence for Fbxl6 (NM_013909.1,1263-1281).
cttgaccctggctaaggat

SEQ ID NO: 705696 - DNA, 19 bp, Mus musculus
  siRNA target sequence for Fbxl6 (NM_013909.1,1461-1479).
ggtcagttctgtgattagt

SEQ ID NO: 705697 - DNA, 19 bp, Mus musculus
  siRNA target sequence for Fbxl6 (NM_013909.1,1490-1508).
ggctgctgtatcttaacct

SEQ ID NO: 705698 - DNA, 19 bp, Mus musculus
  siRNA target sequence for Pttg1 (NM_013917.1,316-334).
ctactcttatctttgttga

SEQ ID NO: 705699 - DNA, 19 bp, Mus musculus
  siRNA target sequence for Pttg1 (NM_013917.1,414-432).
gggaaattgcaggtttcaa

SEQ ID NO: 705700 - DNA, 19 bp, Mus musculus
  siRNA target sequence for Pttg1 (NM_013917.1,435-453).
cctcgagtcggcaaagtgt

SEQ ID NO: 705701 - DNA, 19 bp, Mus musculus
  siRNA target sequence for Pttg1 (NM_013917.1,436-454).
ctcgagtcggcaaagtgtt

SEQ ID NO: 705702 - DNA, 19 bp, Mus musculus
  siRNA target sequence for Pttg1 (NM_013917.1,439-457).
gagtcggcaaagtgttcaa

SEQ ID NO: 705703 - DNA, 19 bp, Mus musculus
  siRNA target sequence for Pttg1 (NM_013917.1,562-580).
ccttgactgggaaaaagat

SEQ ID NO: 705704 - DNA, 19 bp, Mus musculus
  siRNA target sequence for Pttg1 (NM_013917.1,590-608).
gtctactaagacacaaagt

SEQ ID NO: 705705 - DNA, 19 bp, Mus musculus
  siRNA target sequence for Pttg1 (NM_013917.1,658-676).
ctttcaatcctctagactt

SEQ ID NO: 705706 - DNA, 19 bp, Mus musculus
  siRNA target sequence for Pttg1 (NM_013917.1,832-850).
gtaagggagtccgttcaaa

SEQ ID NO: 705707 - DNA, 19 bp, Mus musculus
  siRNA target sequence for Pttg1 (NM_013917.1,853-871).
cgggctgtaagcaacttgt

SEQ ID NO: 705708 - DNA, 19 bp, Mus musculus
  siRNA target sequence for 2010015P21Rik (NM_013921.2,93-111).
caagggcacgtggagatat

SEQ ID NO: 705709 - DNA, 19 bp, Mus musculus
  siRNA target sequence for 2010015P21Rik (NM_013921.2,96-114).
gggcacgtggagatatatt

SEQ ID NO: 705710 - DNA, 19 bp, Mus musculus
  siRNA target sequence for 2010015P21Rik (NM_013921.2,135-153).
cccgagatgctggaaagat

SEQ ID NO: 705711 - DNA, 19 bp, Mus musculus
  siRNA target sequence for 2010015P21Rik (NM_013921.2,731-749).
ggaggaccgctcgtttgtt

SEQ ID NO: 705712 - DNA, 19 bp, Mus musculus
  siRNA target sequence for 2010015P21Rik (NM_013921.2,740-758).
ctcgtttgttccatcaaca

SEQ ID NO: 705713 - DNA, 19 bp, Mus musculus
  siRNA target sequence for 2010015P21Rik (NM_013921.2,743-761).
gtttgttccatcaacagtt

SEQ ID NO: 705714 - DNA, 19 bp, Mus musculus
  siRNA target sequence for 2010015P21Rik (NM_013921.2,915-933).
ctgcagcataccaaatgct

SEQ ID NO: 705715 - DNA, 19 bp, Mus musculus
  siRNA target sequence for Rnf19 (NM_013923.1,251-269).
gaagggctgtgtatgaaca

SEQ ID NO: 705716 - DNA, 19 bp, Mus musculus
  siRNA target sequence for Rnf19 (NM_013923.1,317-335).
cagcaaatgggctcagata

SEQ ID NO: 705717 - DNA, 19 bp, Mus musculus
  siRNA target sequence for Rnf19 (NM_013923.1,615-633).
gccttttacggcattctaa

SEQ ID NO: 705718 - DNA, 19 bp, Mus musculus
  siRNA target sequence for Rnf19 (NM_013923.1,616-634).
ccttttacggcattctaaa

SEQ ID NO: 705719 - DNA, 19 bp, Mus musculus
  siRNA target sequence for Rnf19 (NM_013923.1,1016-1034).
caggaaagagcccaaagtt

SEQ ID NO: 705720 - DNA, 19 bp, Mus musculus
  siRNA target sequence for Rnf19 (NM_013923.1,1037-1055).
cgcttaagaactatacgtt

SEQ ID NO: 705721 - DNA, 19 bp, Mus musculus
  siRNA target sequence for Rnf19 (NM_013923.1,1052-1070).
cgttcttcatctattagtt

SEQ ID NO: 705722 - DNA, 19 bp, Mus musculus
  siRNA target sequence for Rnf19 (NM_013923.1,1053-1071).
gttcttcatctattagtta

SEQ ID NO: 705723 - DNA, 19 bp, Mus musculus
  siRNA target sequence for Rnf19 (NM_013923.1,1197-1215).
gttggctatgtatgaaaga

SEQ ID NO: 705724 - DNA, 19 bp, Mus musculus
  siRNA target sequence for Rnf19 (NM_013923.1,1778-1796).
gatcgaataggcaccatta

SEQ ID NO: 705725 - DNA, 19 bp, Mus musculus
  siRNA target sequence for Rnf19 (NM_013923.1,1888-1906).
caacaggttggaagtacaa

SEQ ID NO: 705726 - DNA, 19 bp, Mus musculus
  siRNA target sequence for Rnf19 (NM_013923.1,1955-1973).
gtgagcttgggaacagtta

SEQ ID NO: 705727 - DNA, 19 bp, Mus musculus
  siRNA target sequence for Rnf19 (NM_013923.1,1960-1978).
cttgggaacagttagtgat

SEQ ID NO: 705728 - DNA, 19 bp, Mus musculus
  siRNA target sequence for Rnf19 (NM_013923.1,2297-2315).
cagttgttagagcaacaaa

SEQ ID NO: 705729 - DNA, 19 bp, Mus musculus
  siRNA target sequence for Rnf19 (NM_013923.1,2309-2327).
caacaaagcacgaactcaa

SEQ ID NO: 705730 - DNA, 19 bp, Mus musculus
  siRNA target sequence for Rnf19 (NM_013923.1,2317-2335).
cacgaactcaagtgagttt

SEQ ID NO: 705731 - DNA, 19 bp, Mus musculus
  siRNA target sequence for Rnf19 (NM_013923.1,2380-2398).
ccactccagtcatttttct

SEQ ID NO: 705732 - DNA, 19 bp, Mus musculus
  siRNA target sequence for Rnf19 (NM_013923.1,2632-2650).
gcctatggtggatttgtgt

SEQ ID NO: 705733 - DNA, 19 bp, Mus musculus
  siRNA target sequence for Schip1 (NM_013928.2,106-124).
ctgcgtcctaggatgtact

SEQ ID NO: 705734 - DNA, 19 bp, Mus musculus
  siRNA target sequence for Schip1 (NM_013928.2,120-138).
gtactgagatggtacatca

SEQ ID NO: 705735 - DNA, 19 bp, Mus musculus
  siRNA target sequence for Schip1 (NM_013928.2,217-235).
cgatggcccaggaatctat

SEQ ID NO: 705736 - DNA, 19 bp, Mus musculus
  siRNA target sequence for Schip1 (NM_013928.2,221-239).
ggcccaggaatctatacca

SEQ ID NO: 705737 - DNA, 19 bp, Mus musculus
  siRNA target sequence for Schip1 (NM_013928.2,296-314).
ctccagatatgctttgtca

SEQ ID NO: 705738 - DNA, 19 bp, Mus musculus
  siRNA target sequence for Schip1 (NM_013928.2,532-550).
ggccaaaatgcaagtagaa

SEQ ID NO: 705739 - DNA, 19 bp, Mus musculus
  siRNA target sequence for Schip1 (NM_013928.2,534-552).
ccaaaatgcaagtagaagt

SEQ ID NO: 705740 - DNA, 19 bp, Mus musculus
  siRNA target sequence for Schip1 (NM_013928.2,574-592).
gtctcccgtcgctgatctt

SEQ ID NO: 705741 - DNA, 19 bp, Mus musculus
  siRNA target sequence for Schip1 (NM_013928.2,576-594).
ctcccgtcgctgatcttct

SEQ ID NO: 705742 - DNA, 19 bp, Mus musculus
  siRNA target sequence for Schip1 (NM_013928.2,606-624).
ctcacataagcgaatgttt

SEQ ID NO: 705743 - DNA, 19 bp, Mus musculus
  siRNA target sequence for Schip1 (NM_013928.2,666-684).
ctatcgggcagctacaagt

SEQ ID NO: 705744 - DNA, 19 bp, Mus musculus
  siRNA target sequence for Schip1 (NM_013928.2,698-716).
ctccactcccagattgaaa

SEQ ID NO: 705745 - DNA, 19 bp, Mus musculus
  siRNA target sequence for Schip1 (NM_013928.2,733-751).
ggtccagctgctccttatt

SEQ ID NO: 705746 - DNA, 19 bp, Mus musculus
  siRNA target sequence for Siva (NM_013929.1,193-211).
cgcgaggtcttcgaaagaa

SEQ ID NO: 705747 - DNA, 19 bp, Mus musculus
  siRNA target sequence for Siva (NM_013929.1,233-251).
gggctcgggcctatagaga

SEQ ID NO: 705748 - DNA, 19 bp, Mus musculus
  siRNA target sequence for Siva (NM_013929.1,234-252).
ggctcgggcctatagagat

SEQ ID NO: 705749 - DNA, 19 bp, Mus musculus
  siRNA target sequence for Siva (NM_013929.1,239-257).
gggcctatagagatcacat

SEQ ID NO: 705750 - DNA, 19 bp, Mus musculus
  siRNA target sequence for Siva (NM_013929.1,240-258).
ggcctatagagatcacata

SEQ ID NO: 705751 - DNA, 19 bp, Mus musculus
  siRNA target sequence for Siva (NM_013929.1,253-271).
cacatatcgagcgaagatt

SEQ ID NO: 705752 - DNA, 19 bp, Mus musculus
  siRNA target sequence for Siva (NM_013929.1,255-273).
catatcgagcgaagattgt

SEQ ID NO: 705753 - DNA, 19 bp, Mus musculus
  siRNA target sequence for Siva (NM_013929.1,329-347).
ctgcgaggggacagatgtt

SEQ ID NO: 705754 - DNA, 19 bp, Mus musculus
  siRNA target sequence for Siva (NM_013929.1,331-349).
gcgaggggacagatgttga

SEQ ID NO: 705755 - DNA, 19 bp, Mus musculus
  siRNA target sequence for Siva (NM_013929.1,332-350).
cgaggggacagatgttgat

SEQ ID NO: 705756 - DNA, 19 bp, Mus musculus
  siRNA target sequence for Siva (NM_013929.1,543-561).
gtgtggccttgcagactat

SEQ ID NO: 705757 - DNA, 19 bp, Mus musculus
  siRNA target sequence for Siva (NM_013929.1,588-606).
caccagctgtgctatgttt

SEQ ID NO: 705758 - DNA, 19 bp, Mus musculus
  siRNA target sequence for Slc33a1 (NM_015728.3,602-620).
gccacgctctggatatgaa

SEQ ID NO: 705759 - DNA, 19 bp, Mus musculus
  siRNA target sequence for Slc33a1 (NM_015728.3,683-701).
gggaccgggaagttcttct

SEQ ID NO: 705760 - DNA, 19 bp, Mus musculus
  siRNA target sequence for Slc33a1 (NM_015728.3,713-731).
gccctggtgacttacctaa

SEQ ID NO: 705761 - DNA, 19 bp, Mus musculus
  siRNA target sequence for Slc33a1 (NM_015728.3,752-770).
ccgaactaagtagcatttt

SEQ ID NO: 705762 - DNA, 19 bp, Mus musculus
  siRNA target sequence for Slc33a1 (NM_015728.3,761-779).
gtagcattttgttactact

SEQ ID NO: 705763 - DNA, 19 bp, Mus musculus
  siRNA target sequence for Slc33a1 (NM_015728.3,824-842).
gcatccccctcattttgca

SEQ ID NO: 705764 - DNA, 19 bp, Mus musculus
  siRNA target sequence for Slc33a1 (NM_015728.3,825-843).
catccccctcattttgcaa

SEQ ID NO: 705765 - DNA, 19 bp, Mus musculus
  siRNA target sequence for Slc33a1 (NM_015728.3,830-848).
ccctcattttgcaaagcaa

SEQ ID NO: 705766 - DNA, 19 bp, Mus musculus
  siRNA target sequence for Slc33a1 (NM_015728.3,831-849).
cctcattttgcaaagcaaa

SEQ ID NO: 705767 - DNA, 19 bp, Mus musculus
  siRNA target sequence for Slc33a1 (NM_015728.3,865-883).
gatcaggctttcttcagtt

SEQ ID NO: 705768 - DNA, 19 bp, Mus musculus
  siRNA target sequence for Slc33a1 (NM_015728.3,927-945).
ggttgatgccgtctacttt

SEQ ID NO: 705769 - DNA, 19 bp, Mus musculus
  siRNA target sequence for Slc33a1 (NM_015728.3,928-946).
gttgatgccgtctacttta

SEQ ID NO: 705770 - DNA, 19 bp, Mus musculus
  siRNA target sequence for Slc33a1 (NM_015728.3,934-952).
gccgtctactttaagaact

SEQ ID NO: 705771 - DNA, 19 bp, Mus musculus
  siRNA target sequence for Slc33a1 (NM_015728.3,935-953).
ccgtctactttaagaactt

SEQ ID NO: 705772 - DNA, 19 bp, Mus musculus
  siRNA target sequence for Slc33a1 (NM_015728.3,936-954).
cgtctactttaagaacttt

SEQ ID NO: 705773 - DNA, 19 bp, Mus musculus
  siRNA target sequence for Slc33a1 (NM_015728.3,972-990).
gcttgtccctactcagtat

SEQ ID NO: 705774 - DNA, 19 bp, Mus musculus
  siRNA target sequence for Slc33a1 (NM_015728.3,973-991).
cttgtccctactcagtata

SEQ ID NO: 705775 - DNA, 19 bp, Mus musculus
  siRNA target sequence for Slc33a1 (NM_015728.3,992-1010).
cactaggaatcttcatgat

SEQ ID NO: 705776 - DNA, 19 bp, Mus musculus
  siRNA target sequence for Slc33a1 (NM_015728.3,994-1012).
ctaggaatcttcatgatat

SEQ ID NO: 705777 - DNA, 19 bp, Mus musculus
  siRNA target sequence for Slc33a1 (NM_015728.3,1030-1048).
gaccgtttgctcggaaata

SEQ ID NO: 705778 - DNA, 19 bp, Mus musculus
  siRNA target sequence for Slc33a1 (NM_015728.3,1032-1050).
ccgtttgctcggaaatatt

SEQ ID NO: 705779 - DNA, 19 bp, Mus musculus
  siRNA target sequence for Slc33a1 (NM_015728.3,1034-1052).
gtttgctcggaaatattga

SEQ ID NO: 705780 - DNA, 19 bp, Mus musculus
  siRNA target sequence for Slc33a1 (NM_015728.3,1055-1073).
gcagaacaccggatgtagt

SEQ ID NO: 705781 - DNA, 19 bp, Mus musculus
  siRNA target sequence for Slc33a1 (NM_015728.3,1056-1074).
cagaacaccggatgtagtt

SEQ ID NO: 705782 - DNA, 19 bp, Mus musculus
  siRNA target sequence for Slc33a1 (NM_015728.3,1132-1150).
gtggatggttgggcattaa

SEQ ID NO: 705783 - DNA, 19 bp, Mus musculus
  siRNA target sequence for Slc33a1 (NM_015728.3,1135-1153).
gatggttgggcattaacta

SEQ ID NO: 705784 - DNA, 19 bp, Mus musculus
  siRNA target sequence for Slc33a1 (NM_015728.3,1138-1156).
ggttgggcattaactatgt

SEQ ID NO: 705785 - DNA, 19 bp, Mus musculus
  siRNA target sequence for Slc33a1 (NM_015728.3,1139-1157).
gttgggcattaactatgtt

SEQ ID NO: 705786 - DNA, 19 bp, Mus musculus
  siRNA target sequence for Slc33a1 (NM_015728.3,1176-1194).
ctatgcttcgacatgcaat

SEQ ID NO: 705787 - DNA, 19 bp, Mus musculus
  siRNA target sequence for Slc33a1 (NM_015728.3,1181-1199).
cttcgacatgcaattctgt

SEQ ID NO: 705788 - DNA, 19 bp, Mus musculus
  siRNA target sequence for Slc33a1 (NM_015728.3,1204-1222).
caaacagctggctactttt

SEQ ID NO: 705789 - DNA, 19 bp, Mus musculus
  siRNA target sequence for Slc33a1 (NM_015728.3,1218-1236).
ctttttgggcaatgtttta

SEQ ID NO: 705790 - DNA, 19 bp, Mus musculus
  siRNA target sequence for Slc33a1 (NM_015728.3,1301-1319).
gaatcgttaccctttcaga

SEQ ID NO: 705791 - DNA, 19 bp, Mus musculus
  siRNA target sequence for Slc33a1 (NM_015728.3,1361-1379).
cattagtagcccttctgaa

SEQ ID NO: 705792 - DNA, 19 bp, Mus musculus
  siRNA target sequence for Slc33a1 (NM_015728.3,1391-1409).
gagaagcgtcaatagtaaa

SEQ ID NO: 705793 - DNA, 19 bp, Mus musculus
  siRNA target sequence for Slc33a1 (NM_015728.3,1492-1510).
ctgattctaacgtcaaaga

SEQ ID NO: 705794 - DNA, 19 bp, Mus musculus
  siRNA target sequence for Slc33a1 (NM_015728.3,1494-1512).
gattctaacgtcaaagatt

SEQ ID NO: 705795 - DNA, 19 bp, Mus musculus
  siRNA target sequence for Slc33a1 (NM_015728.3,1627-1645).
ctcctcatcagcaagtata

SEQ ID NO: 705796 - DNA, 19 bp, Mus musculus
  siRNA target sequence for Slc33a1 (NM_015728.3,1629-1647).
cctcatcagcaagtatact

SEQ ID NO: 705797 - DNA, 19 bp, Mus musculus
  siRNA target sequence for Slc33a1 (NM_015728.3,1654-1672).
ccccagcctctgaacatat

SEQ ID NO: 705798 - DNA, 19 bp, Mus musculus
  siRNA target sequence for Slc33a1 (NM_015728.3,1655-1673).
cccagcctctgaacatatt

SEQ ID NO: 705799 - DNA, 19 bp, Mus musculus
  siRNA target sequence for Slc33a1 (NM_015728.3,1656-1674).
ccagcctctgaacatattt

SEQ ID NO: 705800 - DNA, 19 bp, Mus musculus
  siRNA target sequence for Slc33a1 (NM_015728.3,1686-1704).
gccctacagattattgctt

SEQ ID NO: 705801 - DNA, 19 bp, Mus musculus
  siRNA target sequence for Slc33a1 (NM_015728.3,1692-1710).
cagattattgcttggatta

SEQ ID NO: 705802 - DNA, 19 bp, Mus musculus
  siRNA target sequence for Slc33a1 (NM_015728.3,1694-1712).
gattattgcttggattaga

SEQ ID NO: 705803 - DNA, 19 bp, Mus musculus
  siRNA target sequence for Slc33a1 (NM_015728.3,1730-1748).
ggtggactcctaaagtaga

SEQ ID NO: 705804 - DNA, 19 bp, Mus musculus
  siRNA target sequence for Slc33a1 (NM_015728.3,1756-1774).
ggaggattccctctatatt

SEQ ID NO: 705805 - DNA, 19 bp, Mus musculus
  siRNA target sequence for Slc33a1 (NM_015728.3,1757-1775).
gaggattccctctatatta

SEQ ID NO: 705806 - DNA, 19 bp, Mus musculus
  siRNA target sequence for Slc33a1 (NM_015728.3,1759-1777).
ggattccctctatattact

SEQ ID NO: 705807 - DNA, 19 bp, Mus musculus
  siRNA target sequence for Slc33a1 (NM_015728.3,1760-1778).
gattccctctatattacta

SEQ ID NO: 705808 - DNA, 19 bp, Mus musculus
  siRNA target sequence for Slc33a1 (NM_015728.3,1764-1782).
ccctctatattactatatt

SEQ ID NO: 705809 - DNA, 19 bp, Mus musculus
  siRNA target sequence for Slc33a1 (NM_015728.3,1765-1783).
cctctatattactatatta

SEQ ID NO: 705810 - DNA, 19 bp, Mus musculus
  siRNA target sequence for Slc33a1 (NM_015728.3,1788-1806).
gctgctgagttatgcatta

SEQ ID NO: 705811 - DNA, 19 bp, Mus musculus
  siRNA target sequence for Slc33a1 (NM_015728.3,1836-1854).
gtcgataatggctttcaat

SEQ ID NO: 705812 - DNA, 19 bp, Mus musculus
  siRNA target sequence for Slc33a1 (NM_015728.3,1860-1878).
ggtcagtgatcctcttatt

SEQ ID NO: 705813 - DNA, 19 bp, Mus musculus
  siRNA target sequence for Slc33a1 (NM_015728.3,1871-1889).
ctcttattgggggaacata

SEQ ID NO: 705814 - DNA, 19 bp, Mus musculus
  siRNA target sequence for Slc33a1 (NM_015728.3,1886-1904).
catacatgacccttttaaa

SEQ ID NO: 705815 - DNA, 19 bp, Mus musculus
  siRNA target sequence for Slc33a1 (NM_015728.3,1987-2005).
ggagcttcaaaccagaatt

SEQ ID NO: 705816 - DNA, 19 bp, Mus musculus
  siRNA target sequence for Slc33a1 (NM_015728.3,2006-2024).
gtcggacacctgatgctat

SEQ ID NO: 705817 - DNA, 19 bp, Mus musculus
  siRNA target sequence for Slc33a1 (NM_015728.3,2014-2032).
cctgatgctatcgaacttt

SEQ ID NO: 705818 - DNA, 19 bp, Mus musculus
  siRNA target sequence for Slc33a1 (NM_015728.3,2020-2038).
gctatcgaactttgcaaaa

SEQ ID NO: 705819 - DNA, 19 bp, Mus musculus
  siRNA target sequence for Slc33a1 (NM_015728.3,2021-2039).
ctatcgaactttgcaaaaa

SEQ ID NO: 705820 - DNA, 19 bp, Mus musculus
  siRNA target sequence for Slc33a1 (NM_015728.3,2025-2043).
cgaactttgcaaaaaactt

SEQ ID NO: 705821 - DNA, 19 bp, Mus musculus
  siRNA target sequence for Slc33a1 (NM_015728.3,2041-2059).
cttggaggctcgtgtgtta

SEQ ID NO: 705822 - DNA, 19 bp, Mus musculus
  siRNA target sequence for Slc33a1 (NM_015728.3,2060-2078).
cagctctggatggttacta

SEQ ID NO: 705823 - DNA, 19 bp, Mus musculus
  siRNA target sequence for Slc33a1 (NM_015728.3,2098-2116).
gttctcattggatttggtt

SEQ ID NO: 705824 - DNA, 19 bp, Mus musculus
  siRNA target sequence for Galr3 (NM_015738.1,3-21).
ggctgacatccagaacatt

SEQ ID NO: 705825 - DNA, 19 bp, Mus musculus
  siRNA target sequence for Galr3 (NM_015738.1,194-212).
cggtggccgacctttgctt

SEQ ID NO: 705826 - DNA, 19 bp, Mus musculus
  siRNA target sequence for Galr3 (NM_015738.1,290-308).
cggtacatctgctcatcta

SEQ ID NO: 705827 - DNA, 19 bp, Mus musculus
  siRNA target sequence for Galr3 (NM_015738.1,344-362).
ccgtctcagtggataggta

SEQ ID NO: 705828 - DNA, 19 bp, Mus musculus
  siRNA target sequence for Galr3 (NM_015738.1,856-874).
ctcaacccgctcgtctatt

SEQ ID NO: 705829 - DNA, 19 bp, Mus musculus
  siRNA target sequence for Galr3 (NM_015738.1,1068-1086).
cggtggagagactagacta

SEQ ID NO: 705830 - DNA, 19 bp, Mus musculus
  siRNA target sequence for Galr3 (NM_015738.1,1069-1087).
ggtggagagactagactaa

SEQ ID NO: 705831 - DNA, 19 bp, Mus musculus
  siRNA target sequence for Sufu (NM_015752.1,341-359).
cggaccccttggactatgt

SEQ ID NO: 705832 - DNA, 19 bp, Mus musculus
  siRNA target sequence for Sufu (NM_015752.1,342-360).
ggaccccttggactatgtt

SEQ ID NO: 705833 - DNA, 19 bp, Mus musculus
  siRNA target sequence for Sufu (NM_015752.1,343-361).
gaccccttggactatgtta

SEQ ID NO: 705834 - DNA, 19 bp, Mus musculus
  siRNA target sequence for Sufu (NM_015752.1,352-370).
gactatgttagcatgtaca

SEQ ID NO: 705835 - DNA, 19 bp, Mus musculus
  siRNA target sequence for Sufu (NM_015752.1,574-592).
ggcctagcccgatatgtct

SEQ ID NO: 705836 - DNA, 19 bp, Mus musculus
  siRNA target sequence for Sufu (NM_015752.1,575-593).
gcctagcccgatatgtctt

SEQ ID NO: 705837 - DNA, 19 bp, Mus musculus
  siRNA target sequence for Sufu (NM_015752.1,635-653).
ggcacagccctttggataa

SEQ ID NO: 705838 - DNA, 19 bp, Mus musculus
  siRNA target sequence for Sufu (NM_015752.1,639-657).
cagccctttggataacagt

SEQ ID NO: 705839 - DNA, 19 bp, Mus musculus
  siRNA target sequence for Sufu (NM_015752.1,719-737).
cctttggggtagtgacttt

SEQ ID NO: 705840 - DNA, 19 bp, Mus musculus
  siRNA target sequence for Sufu (NM_015752.1,798-816).
gggcatccaggaactacta

SEQ ID NO: 705841 - DNA, 19 bp, Mus musculus
  siRNA target sequence for Sufu (NM_015752.1,835-853).
ggcggtccctggctgataa

SEQ ID NO: 705842 - DNA, 19 bp, Mus musculus
  siRNA target sequence for Sufu (NM_015752.1,837-855).
cggtccctggctgataact

SEQ ID NO: 705843 - DNA, 19 bp, Mus musculus
  siRNA target sequence for Sufu (NM_015752.1,1117-1135).
gtccttccaccaatcaatt

SEQ ID NO: 705844 - DNA, 19 bp, Mus musculus
  siRNA target sequence for Sufu (NM_015752.1,1172-1190).
cgagccgcaaggacagttt

SEQ ID NO: 705845 - DNA, 19 bp, Mus musculus
  siRNA target sequence for Sufu (NM_015752.1,1249-1267).
gagagcgtgcatctaaaat

SEQ ID NO: 705846 - DNA, 19 bp, Mus musculus
  siRNA target sequence for Sufu (NM_015752.1,1251-1269).
gagcgtgcatctaaaattt

SEQ ID NO: 705847 - DNA, 19 bp, Mus musculus
  siRNA target sequence for Sufu (NM_015752.1,1253-1271).
gcgtgcatctaaaatttaa

SEQ ID NO: 705848 - DNA, 19 bp, Mus musculus
  siRNA target sequence for Sufu (NM_015752.1,1257-1275).
gcatctaaaatttaaccaa

SEQ ID NO: 705849 - DNA, 19 bp, Mus musculus
  siRNA target sequence for Sufu (NM_015752.1,1429-1447).
cacggaccctggttacaaa

SEQ ID NO: 705850 - DNA, 19 bp, Mus musculus
  siRNA target sequence for Sufu (NM_015752.1,1431-1449).
cggaccctggttacaaatt

SEQ ID NO: 705851 - DNA, 19 bp, Mus musculus
  siRNA target sequence for Sufu (NM_015752.1,1482-1500).
ggaggacttagaagatcta

SEQ ID NO: 705852 - DNA, 19 bp, Mus musculus
  siRNA target sequence for Sufu (NM_015752.1,1483-1501).
gaggacttagaagatctaa

SEQ ID NO: 705853 - DNA, 19 bp, Mus musculus
  siRNA target sequence for 5730583K22Rik (NM_015764.1,346-364).
ctccatcgaggcttcctta

SEQ ID NO: 705854 - DNA, 19 bp, Mus musculus
  siRNA target sequence for 5730583K22Rik (NM_015764.1,445-463).
cggcagccgagcagacaat

SEQ ID NO: 705855 - DNA, 19 bp, Mus musculus
  siRNA target sequence for 5730583K22Rik (NM_015764.1,447-465).
gcagccgagcagacaatga

SEQ ID NO: 705856 - DNA, 19 bp, Mus musculus
  siRNA target sequence for 5730583K22Rik (NM_015764.1,702-720).
ggttcttgcccgatgacaa

SEQ ID NO: 705857 - DNA, 19 bp, Mus musculus
  siRNA target sequence for 5730583K22Rik (NM_015764.1,703-721).
gttcttgcccgatgacaat

SEQ ID NO: 705858 - DNA, 19 bp, Mus musculus
  siRNA target sequence for 5730583K22Rik (NM_015764.1,889-907).
gaccaaaggacctttgatt

SEQ ID NO: 705859 - DNA, 19 bp, Mus musculus
  siRNA target sequence for 5730583K22Rik (NM_015764.1,1104-1122).
caggtcctgcagtcttcaa

SEQ ID NO: 705860 - DNA, 19 bp, Mus musculus
  siRNA target sequence for 5730583K22Rik (NM_015764.1,1185-1203).
cctcagccttgggtatctt

SEQ ID NO: 705861 - DNA, 19 bp, Mus musculus
  siRNA target sequence for 5730583K22Rik (NM_015764.1,1239-1257).
ggtggtccccggagtctaa

SEQ ID NO: 705862 - DNA, 19 bp, Mus musculus
  siRNA target sequence for 5730583K22Rik (NM_015764.1,1240-1258).
gtggtccccggagtctaaa

SEQ ID NO: 705863 - DNA, 19 bp, Mus musculus
  siRNA target sequence for 5730583K22Rik (NM_015764.1,1243-1261).
gtccccggagtctaaatca

SEQ ID NO: 705864 - DNA, 19 bp, Mus musculus
  siRNA target sequence for 5730583K22Rik (NM_015764.1,1435-1453).
caagccagtgatatttaaa

SEQ ID NO: 705865 - DNA, 19 bp, Mus musculus
  siRNA target sequence for 5730583K22Rik (NM_015764.1,1479-1497).
gcggaaacctgaatgatgt

SEQ ID NO: 705866 - DNA, 19 bp, Mus musculus
  siRNA target sequence for 5730583K22Rik (NM_015764.1,1901-1919).
ctcatcgaggggaaactct

SEQ ID NO: 705867 - DNA, 19 bp, Mus musculus
  siRNA target sequence for 5730583K22Rik (NM_015764.1,1955-1973).
cggaatgccgccattgact

SEQ ID NO: 705868 - DNA, 19 bp, Mus musculus
  siRNA target sequence for 5730583K22Rik (NM_015764.1,2083-2101).
ggactcgctggggacattt

SEQ ID NO: 705869 - DNA, 19 bp, Mus musculus
  siRNA target sequence for 5730583K22Rik (NM_015764.1,2113-2131).
ctgtccagagggtgacatt

SEQ ID NO: 705870 - DNA, 19 bp, Mus musculus
  siRNA target sequence for 5730583K22Rik (NM_015764.1,2115-2133).
gtccagagggtgacattga

SEQ ID NO: 705871 - DNA, 19 bp, Mus musculus
  siRNA target sequence for 5730583K22Rik (NM_015764.1,2503-2521).
gcaacacgttctgaaacta

SEQ ID NO: 705872 - DNA, 19 bp, Mus musculus
  siRNA target sequence for 5730583K22Rik (NM_015764.1,2528-2546).
gaggcccaggcaagattta

SEQ ID NO: 705873 - DNA, 19 bp, Mus musculus
  siRNA target sequence for 5730583K22Rik (NM_015764.1,2624-2642).
gtgagcagtgctgttcata

SEQ ID NO: 705874 - DNA, 19 bp, Mus musculus
  siRNA target sequence for 5730583K22Rik (NM_015764.1,2631-2649).
gtgctgttcataacatcta

SEQ ID NO: 705875 - DNA, 19 bp, Mus musculus
  siRNA target sequence for 5730583K22Rik (NM_015764.1,2834-2852).
ctgtatcatgagagtaaga

SEQ ID NO: 705876 - DNA, 19 bp, Mus musculus
  siRNA target sequence for 5730583K22Rik (NM_015764.1,2862-2880).
ggctgtctgagtttattga

SEQ ID NO: 705877 - DNA, 19 bp, Mus musculus
  siRNA target sequence for 5730583K22Rik (NM_015764.1,2864-2882).
ctgtctgagtttattgact

SEQ ID NO: 705878 - DNA, 19 bp, Mus musculus
  siRNA target sequence for 5730583K22Rik (NM_015764.1,3039-3057).
gtggcctcccgcagatgaa

SEQ ID NO: 705879 - DNA, 19 bp, Mus musculus
  siRNA target sequence for 5730583K22Rik (NM_015764.1,3253-3271).
ccccagctccggtatcact

SEQ ID NO: 705880 - DNA, 19 bp, Mus musculus
  siRNA target sequence for 5730583K22Rik (NM_015764.1,3333-3351).
ggcctcagacgtacttaga

SEQ ID NO: 705881 - DNA, 19 bp, Mus musculus
  siRNA target sequence for 5730583K22Rik (NM_015764.1,3335-3353).
cctcagacgtacttagagt

SEQ ID NO: 705882 - DNA, 19 bp, Mus musculus
  siRNA target sequence for 5730583K22Rik (NM_015764.1,3430-3448).
ctgtgacctgcgtctaata

SEQ ID NO: 705883 - DNA, 19 bp, Mus musculus
  siRNA target sequence for 5730583K22Rik (NM_015764.1,3432-3450).
gtgacctgcgtctaataaa

SEQ ID NO: 705884 - DNA, 19 bp, Mus musculus
  siRNA target sequence for 5730583K22Rik (NM_015764.1,3434-3452).
gacctgcgtctaataaact

SEQ ID NO: 705885 - DNA, 19 bp, Mus musculus
  siRNA target sequence for 5730583K22Rik (NM_015764.1,4406-4424).
ctgacagaagtggatgttt

SEQ ID NO: 705886 - DNA, 19 bp, Mus musculus
  siRNA target sequence for 5730583K22Rik (NM_015764.1,4410-4428).
cagaagtggatgtttacga

SEQ ID NO: 705887 - DNA, 19 bp, Mus musculus
  siRNA target sequence for 5730583K22Rik (NM_015764.1,4540-4558).
cattcatgacccgaagtat

SEQ ID NO: 705888 - DNA, 19 bp, Mus musculus
  siRNA target sequence for 5730583K22Rik (NM_015764.1,4559-4577).
gaggacgccagtctgattt

SEQ ID NO: 705889 - DNA, 19 bp, Mus musculus
  siRNA target sequence for 5730583K22Rik (NM_015764.1,4583-4601).
caccctcagaccatcaaga

SEQ ID NO: 705890 - DNA, 19 bp, Mus musculus
  siRNA target sequence for 5730583K22Rik (NM_015764.1,4836-4854).
ccaaggagcaccactttgt

SEQ ID NO: 705891 - DNA, 19 bp, Mus musculus
  siRNA target sequence for 5730583K22Rik (NM_015764.1,4963-4981).
cgagcacgggctctttaat

SEQ ID NO: 705892 - DNA, 19 bp, Mus musculus
  siRNA target sequence for 5730583K22Rik (NM_015764.1,4967-4985).
cacgggctctttaatttgt

SEQ ID NO: 705893 - DNA, 19 bp, Mus musculus
  siRNA target sequence for 5730583K22Rik (NM_015764.1,5035-5053).
gtacgaaatggccatttat

SEQ ID NO: 705894 - DNA, 19 bp, Mus musculus
  siRNA target sequence for 5730583K22Rik (NM_015764.1,5087-5105).
ctcccaagcatctttaaca

SEQ ID NO: 705895 - DNA, 19 bp, Mus musculus
  siRNA target sequence for 5730583K22Rik (NM_015764.1,5132-5150).
ctgatcaaagagctttgtt

SEQ ID NO: 705896 - DNA, 19 bp, Mus musculus
  siRNA target sequence for 5730583K22Rik (NM_015764.1,5242-5260).
ctgtgtgatgtggaatgta

SEQ ID NO: 705897 - DNA, 19 bp, Mus musculus
  siRNA target sequence for 5730583K22Rik (NM_015764.1,5285-5303).
cggagcagggagttttcct

SEQ ID NO: 705898 - DNA, 19 bp, Mus musculus
  siRNA target sequence for 5730583K22Rik (NM_015764.1,5476-5494).
ggacttgacccagaatgta

SEQ ID NO: 705899 - DNA, 19 bp, Mus musculus
  siRNA target sequence for 5730583K22Rik (NM_015764.1,5500-5518).
caaccagaaccggtttaca

SEQ ID NO: 705900 - DNA, 19 bp, Mus musculus
  siRNA target sequence for 5730583K22Rik (NM_015764.1,5517-5535).
catgtgacgatgtagactt

SEQ ID NO: 705901 - DNA, 19 bp, Mus musculus
  siRNA target sequence for 5730583K22Rik (NM_015764.1,5520-5538).
gtgacgatgtagacttcaa

SEQ ID NO: 705902 - DNA, 19 bp, Mus musculus
  siRNA target sequence for 5730583K22Rik (NM_015764.1,5672-5690).
gtgccgtcccagtacatct

SEQ ID NO: 705903 - DNA, 19 bp, Mus musculus
  siRNA target sequence for 5730583K22Rik (NM_015764.1,5697-5715).
ccgacagtaagcatacgtt

SEQ ID NO: 705904 - DNA, 19 bp, Mus musculus
  siRNA target sequence for 5730583K22Rik (NM_015764.1,5746-5764).
gaaattcctccaataccat

SEQ ID NO: 705905 - DNA, 19 bp, Mus musculus
  siRNA target sequence for 5730583K22Rik (NM_015764.1,5844-5862).
ctcagatttctgtttgtta

SEQ ID NO: 705906 - DNA, 19 bp, Mus musculus
  siRNA target sequence for 5730583K22Rik (NM_015764.1,5874-5892).
ggccccactccttaaacat

SEQ ID NO: 705907 - DNA, 19 bp, Mus musculus
  siRNA target sequence for 5730583K22Rik (NM_015764.1,5876-5894).
ccccactccttaaacatca

SEQ ID NO: 705908 - DNA, 19 bp, Mus musculus
  siRNA target sequence for 5730583K22Rik (NM_015764.1,5948-5966).
gtgggggctagcttcttga

SEQ ID NO: 705909 - DNA, 19 bp, Mus musculus
  siRNA target sequence for 5730583K22Rik (NM_015764.1,5951-5969).
ggggctagcttcttgaaga

SEQ ID NO: 705910 - DNA, 19 bp, Mus musculus
  siRNA target sequence for 5730583K22Rik (NM_015764.1,6043-6061).
ccgcctggagctagaagat

SEQ ID NO: 705911 - DNA, 19 bp, Mus musculus
  siRNA target sequence for 5730583K22Rik (NM_015764.1,6110-6128).
gaagacaggccgctctttt

SEQ ID NO: 705912 - DNA, 19 bp, Mus musculus
  siRNA target sequence for a (NM_015770.2,373-391).
gatttctcctctgtttcta

SEQ ID NO: 705913 - DNA, 19 bp, Mus musculus
  siRNA target sequence for a (NM_015770.2,389-407).
ctatcgtggcactgaacaa

SEQ ID NO: 705914 - DNA, 19 bp, Mus musculus
  siRNA target sequence for a (NM_015770.2,602-620).
gcacctgtcgagtactcaa

SEQ ID NO: 705915 - DNA, 19 bp, Mus musculus
  siRNA target sequence for Ero1l (NM_015774.2,182-200).
gatgtcgagaccatcgata

SEQ ID NO: 705916 - DNA, 19 bp, Mus musculus
  siRNA target sequence for Ero1l (NM_015774.2,190-208).
gaccatcgataagtttaat

SEQ ID NO: 705917 - DNA, 19 bp, Mus musculus
  siRNA target sequence for Ero1l (NM_015774.2,192-210).
ccatcgataagtttaataa

SEQ ID NO: 705918 - DNA, 19 bp, Mus musculus
  siRNA target sequence for Ero1l (NM_015774.2,197-215).
gataagtttaataactaca

SEQ ID NO: 705919 - DNA, 19 bp, Mus musculus
  siRNA target sequence for Ero1l (NM_015774.2,218-236).
cttttcccaagactacaaa

SEQ ID NO: 705920 - DNA, 19 bp, Mus musculus
  siRNA target sequence for Ero1l (NM_015774.2,228-246).
gactacaaaagcttcttga

SEQ ID NO: 705921 - DNA, 19 bp, Mus musculus
  siRNA target sequence for Ero1l (NM_015774.2,242-260).
cttgaaagtgactacttta

SEQ ID NO: 705922 - DNA, 19 bp, Mus musculus
  siRNA target sequence for Ero1l (NM_015774.2,245-263).
gaaagtgactactttagat

SEQ ID NO: 705923 - DNA, 19 bp, Mus musculus
  siRNA target sequence for Ero1l (NM_015774.2,249-267).
gtgactactttagatatta

SEQ ID NO: 705924 - DNA, 19 bp, Mus musculus
  siRNA target sequence for Ero1l (NM_015774.2,251-269).
gactactttagatattaca

SEQ ID NO: 705925 - DNA, 19 bp, Mus musculus
  siRNA target sequence for Ero1l (NM_015774.2,340-358).
caaaccctgccattctgat

SEQ ID NO: 705926 - DNA, 19 bp, Mus musculus
  siRNA target sequence for Ero1l (NM_015774.2,345-363).
cctgccattctgatgaagt

SEQ ID NO: 705927 - DNA, 19 bp, Mus musculus
  siRNA target sequence for Ero1l (NM_015774.2,407-425).
gccaaccgcattgaagaat

SEQ ID NO: 705928 - DNA, 19 bp, Mus musculus
  siRNA target sequence for Ero1l (NM_015774.2,409-427).
caaccgcattgaagaatgt

SEQ ID NO: 705929 - DNA, 19 bp, Mus musculus
  siRNA target sequence for Ero1l (NM_015774.2,529-547).
ctgcgaaattgacgatata

SEQ ID NO: 705930 - DNA, 19 bp, Mus musculus
  siRNA target sequence for Ero1l (NM_015774.2,531-549).
gcgaaattgacgatataca

SEQ ID NO: 705931 - DNA, 19 bp, Mus musculus
  siRNA target sequence for Ero1l (NM_015774.2,533-551).
gaaattgacgatatacagt

SEQ ID NO: 705932 - DNA, 19 bp, Mus musculus
  siRNA target sequence for Ero1l (NM_015774.2,552-570).
cccccgatgctgagtatgt

SEQ ID NO: 705933 - DNA, 19 bp, Mus musculus
  siRNA target sequence for Ero1l (NM_015774.2,561-579).
ctgagtatgtggacttact

SEQ ID NO: 705934 - DNA, 19 bp, Mus musculus
  siRNA target sequence for Ero1l (NM_015774.2,633-651).
ggagtgtcatctatgaaga

SEQ ID NO: 705935 - DNA, 19 bp, Mus musculus
  siRNA target sequence for Ero1l (NM_015774.2,708-726).
gtaaagagaacacatttta

SEQ ID NO: 705936 - DNA, 19 bp, Mus musculus
  siRNA target sequence for Ero1l (NM_015774.2,759-777).
gagcattctacagacttat

SEQ ID NO: 705937 - DNA, 19 bp, Mus musculus
  siRNA target sequence for Ero1l (NM_015774.2,782-800).
ggcctgcacgcaagcatta

SEQ ID NO: 705938 - DNA, 19 bp, Mus musculus
  siRNA target sequence for Ero1l (NM_015774.2,783-801).
gcctgcacgcaagcattaa

SEQ ID NO: 705939 - DNA, 19 bp, Mus musculus
  siRNA target sequence for Ero1l (NM_015774.2,784-802).
cctgcacgcaagcattaat

SEQ ID NO: 705940 - DNA, 19 bp, Mus musculus
  siRNA target sequence for Ero1l (NM_015774.2,833-851).
gatacttggctggaaaaga

SEQ ID NO: 705941 - DNA, 19 bp, Mus musculus
  siRNA target sequence for Ero1l (NM_015774.2,920-938).
cgaaggctgaggaacttgt

SEQ ID NO: 705942 - DNA, 19 bp, Mus musculus
  siRNA target sequence for Ero1l (NM_015774.2,1009-1027).
gctcttcactgggaataaa

SEQ ID NO: 705943 - DNA, 19 bp, Mus musculus
  siRNA target sequence for Ero1l (NM_015774.2,1051-1069).
gttacttctggagatactt

SEQ ID NO: 705944 - DNA, 19 bp, Mus musculus
  siRNA target sequence for Ero1l (NM_015774.2,1094-1112).
cacttcgatgagaattctt

SEQ ID NO: 705945 - DNA, 19 bp, Mus musculus
  siRNA target sequence for Ero1l (NM_015774.2,1096-1114).
cttcgatgagaattctttt

SEQ ID NO: 705946 - DNA, 19 bp, Mus musculus
  siRNA target sequence for Ero1l (NM_015774.2,1153-1171).
ggacttccggctacacttt

SEQ ID NO: 705947 - DNA, 19 bp, Mus musculus
  siRNA target sequence for Ero1l (NM_015774.2,1154-1172).
gacttccggctacacttta

SEQ ID NO: 705948 - DNA, 19 bp, Mus musculus
  siRNA target sequence for Ero1l (NM_015774.2,1299-1317).
cggaaagcggaccaagtta

SEQ ID NO: 705949 - DNA, 19 bp, Mus musculus
  siRNA target sequence for Ero1l (NM_015774.2,1300-1318).
ggaaagcggaccaagttat

SEQ ID NO: 705950 - DNA, 19 bp, Mus musculus
  siRNA target sequence for Ero1l (NM_015774.2,1305-1323).
gcggaccaagttatgagtt

SEQ ID NO: 705951 - DNA, 19 bp, Mus musculus
  siRNA target sequence for Ero1l (NM_015774.2,1405-1423).
caggcacttgttacagaat

SEQ ID NO: 705952 - DNA, 19 bp, Mus musculus
  siRNA target sequence for Cfhl1 (NM_015780.1,77-95).
cgcctgttgctcttagcta

SEQ ID NO: 705953 - DNA, 19 bp, Mus musculus
  siRNA target sequence for Cfhl1 (NM_015780.1,104-122).
ctaacctcatggttctcta

SEQ ID NO: 705954 - DNA, 19 bp, Mus musculus
  siRNA target sequence for Cfhl1 (NM_015780.1,132-150).
gtgaagtgagcctttgtga

SEQ ID NO: 705955 - DNA, 19 bp, Mus musculus
  siRNA target sequence for Cfhl1 (NM_015780.1,165-183).
gacatggaatactatatga

SEQ ID NO: 705956 - DNA, 19 bp, Mus musculus
  siRNA target sequence for Cfhl1 (NM_015780.1,212-230).
gttcttagtgggaagattt

SEQ ID NO: 705957 - DNA, 19 bp, Mus musculus
  siRNA target sequence for Cfhl1 (NM_015780.1,284-302).
cgcatcacttgcacagaat

SEQ ID NO: 705958 - DNA, 19 bp, Mus musculus
  siRNA target sequence for Cfhl1 (NM_015780.1,483-501).
ccattacccccaaatgcat

SEQ ID NO: 705959 - DNA, 19 bp, Mus musculus
  siRNA target sequence for Cfhl1 (NM_015780.1,484-502).
cattacccccaaatgcatt

SEQ ID NO: 705960 - DNA, 19 bp, Mus musculus
  siRNA target sequence for Cfhl1 (NM_015780.1,680-698).
ccaacctgtatatatccaa

SEQ ID NO: 705961 - DNA, 19 bp, Mus musculus
  siRNA target sequence for Cfhl1 (NM_015780.1,939-957).
gcgaaaaggtttatattca

SEQ ID NO: 705962 - DNA, 19 bp, Mus musculus
  siRNA target sequence for Cfhl1 (NM_015780.1,974-992).
gagtttggatgtaaaccta

SEQ ID NO: 705963 - DNA, 19 bp, Mus musculus
  siRNA target sequence for Cfhl1 (NM_015780.1,980-998).
ggatgtaaacctagatata

SEQ ID NO: 705964 - DNA, 19 bp, Mus musculus
  siRNA target sequence for Cfhl1 (NM_015780.1,1062-1080).
cttgtatgttaaatcacaa

SEQ ID NO: 705965 - DNA, 19 bp, Mus musculus
  siRNA target sequence for Zpbp (NM_015785.1,356-374).
ggctcgactgccaagaagt

SEQ ID NO: 705966 - DNA, 19 bp, Mus musculus
  siRNA target sequence for Zpbp (NM_015785.1,357-375).
gctcgactgccaagaagta

SEQ ID NO: 705967 - DNA, 19 bp, Mus musculus
  siRNA target sequence for Zpbp (NM_015785.1,358-376).
ctcgactgccaagaagtat

SEQ ID NO: 705968 - DNA, 19 bp, Mus musculus
  siRNA target sequence for Zpbp (NM_015785.1,377-395).
ccacttgactcaagattca

SEQ ID NO: 705969 - DNA, 19 bp, Mus musculus
  siRNA target sequence for Zpbp (NM_015785.1,383-401).
gactcaagattcactgaaa

SEQ ID NO: 705970 - DNA, 19 bp, Mus musculus
  siRNA target sequence for Zpbp (NM_015785.1,385-403).
ctcaagattcactgaaaat

SEQ ID NO: 705971 - DNA, 19 bp, Mus musculus
  siRNA target sequence for Zpbp (NM_015785.1,407-425).
gggatcgacacattttcct

SEQ ID NO: 705972 - DNA, 19 bp, Mus musculus
  siRNA target sequence for Zpbp (NM_015785.1,423-441).
cctgtgagcgtatatgtta

SEQ ID NO: 705973 - DNA, 19 bp, Mus musculus
  siRNA target sequence for Zpbp (NM_015785.1,424-442).
ctgtgagcgtatatgttat

SEQ ID NO: 705974 - DNA, 19 bp, Mus musculus
  siRNA target sequence for Zpbp (NM_015785.1,503-521).
ggtagacccatcattccaa

SEQ ID NO: 705975 - DNA, 19 bp, Mus musculus
  siRNA target sequence for Zpbp (NM_015785.1,504-522).
gtagacccatcattccaat

SEQ ID NO: 705976 - DNA, 19 bp, Mus musculus
  siRNA target sequence for Zpbp (NM_015785.1,523-541).
ggcatgggccaaaaggaaa

SEQ ID NO: 705977 - DNA, 19 bp, Mus musculus
  siRNA target sequence for Zpbp (NM_015785.1,524-542).
gcatgggccaaaaggaaaa

SEQ ID NO: 705978 - DNA, 19 bp, Mus musculus
  siRNA target sequence for Zpbp (NM_015785.1,577-595).
ccacaggaagcctcatatt

SEQ ID NO: 705979 - DNA, 19 bp, Mus musculus
  siRNA target sequence for Zpbp (NM_015785.1,580-598).
caggaagcctcatatttca

SEQ ID NO: 705980 - DNA, 19 bp, Mus musculus
  siRNA target sequence for Zpbp (NM_015785.1,582-600).
ggaagcctcatatttcaga

SEQ ID NO: 705981 - DNA, 19 bp, Mus musculus
  siRNA target sequence for Zpbp (NM_015785.1,611-629).
gaccatgagtggggtttat

SEQ ID NO: 705982 - DNA, 19 bp, Mus musculus
  siRNA target sequence for Zpbp (NM_015785.1,614-632).
catgagtggggtttataca

SEQ ID NO: 705983 - DNA, 19 bp, Mus musculus
  siRNA target sequence for Zpbp (NM_015785.1,631-649).
catgtttcctcgagtataa

SEQ ID NO: 705984 - DNA, 19 bp, Mus musculus
  siRNA target sequence for Zpbp (NM_015785.1,641-659).
cgagtataaaccaactgta

SEQ ID NO: 705985 - DNA, 19 bp, Mus musculus
  siRNA target sequence for Zpbp (NM_015785.1,655-673).
ctgtagaggaatctattaa

SEQ ID NO: 705986 - DNA, 19 bp, Mus musculus
  siRNA target sequence for Zpbp (NM_015785.1,657-675).
gtagaggaatctattaaaa

SEQ ID NO: 705987 - DNA, 19 bp, Mus musculus
  siRNA target sequence for Zpbp (NM_015785.1,708-726).
cgtgaacctcggttttatt

SEQ ID NO: 705988 - DNA, 19 bp, Mus musculus
  siRNA target sequence for Zpbp (NM_015785.1,709-727).
gtgaacctcggttttatta

SEQ ID NO: 705989 - DNA, 19 bp, Mus musculus
  siRNA target sequence for Zpbp (NM_015785.1,715-733).
ctcggttttattatcagtt

SEQ ID NO: 705990 - DNA, 19 bp, Mus musculus
  siRNA target sequence for Zpbp (NM_015785.1,731-749).
gttcacagctcgataccat

SEQ ID NO: 705991 - DNA, 19 bp, Mus musculus
  siRNA target sequence for Zpbp (NM_015785.1,753-771).
gctccctgcaacagtatct

SEQ ID NO: 705992 - DNA, 19 bp, Mus musculus
  siRNA target sequence for Zpbp (NM_015785.1,754-772).
ctccctgcaacagtatcta

SEQ ID NO: 705993 - DNA, 19 bp, Mus musculus
  siRNA target sequence for Zpbp (NM_015785.1,756-774).
ccctgcaacagtatctata

SEQ ID NO: 705994 - DNA, 19 bp, Mus musculus
  siRNA target sequence for Zpbp (NM_015785.1,760-778).
gcaacagtatctataacat

SEQ ID NO: 705995 - DNA, 19 bp, Mus musculus
  siRNA target sequence for Zpbp (NM_015785.1,764-782).
cagtatctataacatttct

SEQ ID NO: 705996 - DNA, 19 bp, Mus musculus
  siRNA target sequence for Zpbp (NM_015785.1,833-851).
ctgtgaaatatccttgatt

SEQ ID NO: 705997 - DNA, 19 bp, Mus musculus
  siRNA target sequence for Zpbp (NM_015785.1,856-874).
ctgaatgccatcgtgttaa

SEQ ID NO: 705998 - DNA, 19 bp, Mus musculus
  siRNA target sequence for Zpbp (NM_015785.1,862-880).
gccatcgtgttaaaatgca

SEQ ID NO: 705999 - DNA, 19 bp, Mus musculus
  siRNA target sequence for Zpbp (NM_015785.1,885-903).
gctggtttgcaaaatgaat

SEQ ID NO: 706000 - DNA, 19 bp, Mus musculus
  siRNA target sequence for Zpbp (NM_015785.1,988-1006).
gattatctaaggctaaaaa

SEQ ID NO: 706001 - DNA, 19 bp, Mus musculus
  siRNA target sequence for Zpbp (NM_015785.1,1010-1028).
catagagagattcttcatt

SEQ ID NO: 706002 - DNA, 19 bp, Mus musculus
  siRNA target sequence for Zpbp (NM_015785.1,1062-1080).
ccactgcctgagatatact

SEQ ID NO: 706003 - DNA, 19 bp, Mus musculus
  siRNA target sequence for Zpbp (NM_015785.1,1063-1081).
cactgcctgagatatacta

SEQ ID NO: 706004 - DNA, 19 bp, Mus musculus
  siRNA target sequence for Zpbp (NM_015785.1,1126-1144).
cagggtatggcataaatgt

SEQ ID NO: 706005 - DNA, 19 bp, Mus musculus
  siRNA target sequence for AI414495 (NM_015789.2,243-261).
gcttctccaaagctttagt

SEQ ID NO: 706006 - DNA, 19 bp, Mus musculus
  siRNA target sequence for AI414495 (NM_015789.2,263-281).
gactgttcctaaaaaatga

SEQ ID NO: 706007 - DNA, 19 bp, Mus musculus
  siRNA target sequence for AI414495 (NM_015789.2,290-308).
gagacctggacaacttctt

SEQ ID NO: 706008 - DNA, 19 bp, Mus musculus
  siRNA target sequence for AI414495 (NM_015789.2,501-519).
ctggaaggttcccaaagta

SEQ ID NO: 706009 - DNA, 19 bp, Mus musculus
  siRNA target sequence for AI414495 (NM_015789.2,647-665).
gccgctggctcatagaaaa

SEQ ID NO: 706010 - DNA, 19 bp, Mus musculus
  siRNA target sequence for Fbxo18 (NM_015792.1,126-144).
gtggtcgactgccatcatt

SEQ ID NO: 706011 - DNA, 19 bp, Mus musculus
  siRNA target sequence for Fbxo18 (NM_015792.1,203-221).
ccctaaccatggtctctat

SEQ ID NO: 706012 - DNA, 19 bp, Mus musculus
  siRNA target sequence for Fbxo18 (NM_015792.1,255-273).
cgaggatgtcagagatata

SEQ ID NO: 706013 - DNA, 19 bp, Mus musculus
  siRNA target sequence for Fbxo18 (NM_015792.1,256-274).
gaggatgtcagagatatat

SEQ ID NO: 706014 - DNA, 19 bp, Mus musculus
  siRNA target sequence for Fbxo18 (NM_015792.1,300-318).
cagcactgtaccaatgaca

SEQ ID NO: 706015 - DNA, 19 bp, Mus musculus
  siRNA target sequence for Fbxo18 (NM_015792.1,359-377).
cgctgagggtgacatgatt

SEQ ID NO: 706016 - DNA, 19 bp, Mus musculus
  siRNA target sequence for Fbxo18 (NM_015792.1,360-378).
gctgagggtgacatgattt

SEQ ID NO: 706017 - DNA, 19 bp, Mus musculus
  siRNA target sequence for Fbxo18 (NM_015792.1,404-422).
gcctcaggtggataatgga

SEQ ID NO: 706018 - DNA, 19 bp, Mus musculus
  siRNA target sequence for Fbxo18 (NM_015792.1,504-522).
cagtgggatggcgttacta

SEQ ID NO: 706019 - DNA, 19 bp, Mus musculus
  siRNA target sequence for Fbxo18 (NM_015792.1,508-526).
gggatggcgttactaagaa

SEQ ID NO: 706020 - DNA, 19 bp, Mus musculus
  siRNA target sequence for Fbxo18 (NM_015792.1,510-528).
gatggcgttactaagaaga

SEQ ID NO: 706021 - DNA, 19 bp, Mus musculus
  siRNA target sequence for Fbxo18 (NM_015792.1,660-678).
cccttgcctgactcatact

SEQ ID NO: 706022 - DNA, 19 bp, Mus musculus
  siRNA target sequence for Fbxo18 (NM_015792.1,661-679).
ccttgcctgactcatacta

SEQ ID NO: 706023 - DNA, 19 bp, Mus musculus
  siRNA target sequence for Fbxo18 (NM_015792.1,708-726).
gaagtgcccagccacattt

SEQ ID NO: 706024 - DNA, 19 bp, Mus musculus
  siRNA target sequence for Fbxo18 (NM_015792.1,711-729).
gtgcccagccacatttgca

SEQ ID NO: 706025 - DNA, 19 bp, Mus musculus
  siRNA target sequence for Fbxo18 (NM_015792.1,780-798).
gacctctactggaatctca

SEQ ID NO: 706026 - DNA, 19 bp, Mus musculus
  siRNA target sequence for Fbxo18 (NM_015792.1,834-852).
gacccgctgttcattcctt

SEQ ID NO: 706027 - DNA, 19 bp, Mus musculus
  siRNA target sequence for Fbxo18 (NM_015792.1,861-879).
ctatatcatcgatacttga

SEQ ID NO: 706028 - DNA, 19 bp, Mus musculus
  siRNA target sequence for Fbxo18 (NM_015792.1,871-889).
gatacttgatcaatgaaga

SEQ ID NO: 706029 - DNA, 19 bp, Mus musculus
  siRNA target sequence for Fbxo18 (NM_015792.1,920-938).
ctcgagccatggcatagaa

SEQ ID NO: 706030 - DNA, 19 bp, Mus musculus
  siRNA target sequence for Fbxo18 (NM_015792.1,922-940).
cgagccatggcatagaaaa

SEQ ID NO: 706031 - DNA, 19 bp, Mus musculus
  siRNA target sequence for Fbxo18 (NM_015792.1,925-943).
gccatggcatagaaaagga

SEQ ID NO: 706032 - DNA, 19 bp, Mus musculus
  siRNA target sequence for Fbxo18 (NM_015792.1,957-975).
gtgctgaacctcatacgat

SEQ ID NO: 706033 - DNA, 19 bp, Mus musculus
  siRNA target sequence for Fbxo18 (NM_015792.1,1036-1054).
gggatcatcctctactttt

SEQ ID NO: 706034 - DNA, 19 bp, Mus musculus
  siRNA target sequence for Fbxo18 (NM_015792.1,1066-1084).
cgtgcatgcggcaacaact

SEQ ID NO: 706035 - DNA, 19 bp, Mus musculus
  siRNA target sequence for Fbxo18 (NM_015792.1,1067-1085).
gtgcatgcggcaacaacta

SEQ ID NO: 706036 - DNA, 19 bp, Mus musculus
  siRNA target sequence for Fbxo18 (NM_015792.1,1102-1120).
ctgctgggggcattaacgt

SEQ ID NO: 706037 - DNA, 19 bp, Mus musculus
  siRNA target sequence for Fbxo18 (NM_015792.1,1224-1242).
gatgtcaccgagaccttat

SEQ ID NO: 706038 - DNA, 19 bp, Mus musculus
  siRNA target sequence for Fbxo18 (NM_015792.1,1294-1312).
gcaataggattcactacaa

SEQ ID NO: 706039 - DNA, 19 bp, Mus musculus
  siRNA target sequence for Fbxo18 (NM_015792.1,1300-1318).
ggattcactacaacatttt

SEQ ID NO: 706040 - DNA, 19 bp, Mus musculus
  siRNA target sequence for Fbxo18 (NM_015792.1,1326-1344).
ctatatcttcaggagaatt

SEQ ID NO: 706041 - DNA, 19 bp, Mus musculus
  siRNA target sequence for Fbxo18 (NM_015792.1,1431-1449).
ctgattctgaaccataaga

SEQ ID NO: 706042 - DNA, 19 bp, Mus musculus
  siRNA target sequence for Fbxo18 (NM_015792.1,1456-1474).
ctctccaggtggtaaaaat

SEQ ID NO: 706043 - DNA, 19 bp, Mus musculus
  siRNA target sequence for Fbxo18 (NM_015792.1,1458-1476).
ctccaggtggtaaaaatta

SEQ ID NO: 706044 - DNA, 19 bp, Mus musculus
  siRNA target sequence for Fbxo18 (NM_015792.1,1501-1519).
cttctaccctggtcaagta

SEQ ID NO: 706045 - DNA, 19 bp, Mus musculus
  siRNA target sequence for Fbxo18 (NM_015792.1,1548-1566).
ctgtatgtcacgttcaaca

SEQ ID NO: 706046 - DNA, 19 bp, Mus musculus
  siRNA target sequence for Fbxo18 (NM_015792.1,1691-1709).
gttgacaccctttatggtt

SEQ ID NO: 706047 - DNA, 19 bp, Mus musculus
  siRNA target sequence for Fbxo18 (NM_015792.1,1747-1765).
gggccaagttagtgtgtaa

SEQ ID NO: 706048 - DNA, 19 bp, Mus musculus
  siRNA target sequence for Fbxo18 (NM_015792.1,1751-1769).
caagttagtgtgtaagact

SEQ ID NO: 706049 - DNA, 19 bp, Mus musculus
  siRNA target sequence for Fbxo18 (NM_015792.1,1754-1772).
gttagtgtgtaagacttta

SEQ ID NO: 706050 - DNA, 19 bp, Mus musculus
  siRNA target sequence for Fbxo18 (NM_015792.1,1820-1838).
gcccatttggtgcaagaat

SEQ ID NO: 706051 - DNA, 19 bp, Mus musculus
  siRNA target sequence for Fbxo18 (NM_015792.1,1821-1839).
cccatttggtgcaagaata

SEQ ID NO: 706052 - DNA, 19 bp, Mus musculus
  siRNA target sequence for Fbxo18 (NM_015792.1,1900-1918).
gccgactctgggacaacat

SEQ ID NO: 706053 - DNA, 19 bp, Mus musculus
  siRNA target sequence for Fbxo18 (NM_015792.1,1984-2002).
ggcagctgagcaaaccttt

SEQ ID NO: 706054 - DNA, 19 bp, Mus musculus
  siRNA target sequence for Fbxo18 (NM_015792.1,1999-2017).
ctttgcttgcctcttttga

SEQ ID NO: 706055 - DNA, 19 bp, Mus musculus
  siRNA target sequence for Fbxo18 (NM_015792.1,2047-2065).
gtaccccagctatcatgaa

SEQ ID NO: 706056 - DNA, 19 bp, Mus musculus
  siRNA target sequence for Fbxo18 (NM_015792.1,2050-2068).
ccccagctatcatgaacat

SEQ ID NO: 706057 - DNA, 19 bp, Mus musculus
  siRNA target sequence for Fbxo18 (NM_015792.1,2051-2069).
cccagctatcatgaacata

SEQ ID NO: 706058 - DNA, 19 bp, Mus musculus
  siRNA target sequence for Fbxo18 (NM_015792.1,2108-2126).
cccccaccagcagatctat

SEQ ID NO: 706059 - DNA, 19 bp, Mus musculus
  siRNA target sequence for Fbxo18 (NM_015792.1,2112-2130).
caccagcagatctatacct

SEQ ID NO: 706060 - DNA, 19 bp, Mus musculus
  siRNA target sequence for Fbxo18 (NM_015792.1,2129-2147).
cttccgaggtgcagtgaat

SEQ ID NO: 706061 - DNA, 19 bp, Mus musculus
  siRNA target sequence for Fbxo18 (NM_015792.1,2164-2182).
cccacacccacgtcttcta

SEQ ID NO: 706062 - DNA, 19 bp, Mus musculus
  siRNA target sequence for Fbxo18 (NM_015792.1,2219-2237).
ctatgtgggagctaccatt

SEQ ID NO: 706063 - DNA, 19 bp, Mus musculus
  siRNA target sequence for Fbxo18 (NM_015792.1,2285-2303).
ccatcagagtggcataaga

SEQ ID NO: 706064 - DNA, 19 bp, Mus musculus
  siRNA target sequence for Fbxo18 (NM_015792.1,2296-2314).
gcataagaggtgacataaa

SEQ ID NO: 706065 - DNA, 19 bp, Mus musculus
  siRNA target sequence for Fbxo18 (NM_015792.1,2363-2381).
ggctgtccgggtaacagaa

SEQ ID NO: 706066 - DNA, 19 bp, Mus musculus
  siRNA target sequence for Fbxo18 (NM_015792.1,2415-2433).
gggattaaatcgtttggat

SEQ ID NO: 706067 - DNA, 19 bp, Mus musculus
  siRNA target sequence for Fbxo18 (NM_015792.1,2416-2434).
ggattaaatcgtttggatt

SEQ ID NO: 706068 - DNA, 19 bp, Mus musculus
  siRNA target sequence for Fbxo18 (NM_015792.1,2425-2443).
cgtttggattggacagaat

SEQ ID NO: 706069 - DNA, 19 bp, Mus musculus
  siRNA target sequence for Fbxo18 (NM_015792.1,2485-2503).
ggaaacgagacctcatcat

SEQ ID NO: 706070 - DNA, 19 bp, Mus musculus
  siRNA target sequence for Fbxo18 (NM_015792.1,2486-2504).
gaaacgagacctcatcatt

SEQ ID NO: 706071 - DNA, 19 bp, Mus musculus
  siRNA target sequence for Fbxo18 (NM_015792.1,2596-2614).
cgaagattgcggtagttga

SEQ ID NO: 706072 - DNA, 19 bp, Mus musculus
  siRNA target sequence for Fbxo18 (NM_015792.1,2597-2615).
gaagattgcggtagttgaa

SEQ ID NO: 706073 - DNA, 19 bp, Mus musculus
  siRNA target sequence for Fbxo18 (NM_015792.1,2600-2618).
gattgcggtagttgaaaaa

SEQ ID NO: 706074 - DNA, 19 bp, Mus musculus
  siRNA target sequence for Fbxo18 (NM_015792.1,2604-2622).
gcggtagttgaaaaataca

SEQ ID NO: 706075 - DNA, 19 bp, Mus musculus
  siRNA target sequence for Fbxo18 (NM_015792.1,2605-2623).
cggtagttgaaaaatacaa

SEQ ID NO: 706076 - DNA, 19 bp, Mus musculus
  siRNA target sequence for Fbxo18 (NM_015792.1,2607-2625).
gtagttgaaaaatacaata

SEQ ID NO: 706077 - DNA, 19 bp, Mus musculus
  siRNA target sequence for Fbxo18 (NM_015792.1,2610-2628).
gttgaaaaatacaatatca

SEQ ID NO: 706078 - DNA, 19 bp, Mus musculus
  siRNA target sequence for Fbxo18 (NM_015792.1,2659-2677).
gatgccacatagacgattt

SEQ ID NO: 706079 - DNA, 19 bp, Mus musculus
  siRNA target sequence for Fbxo18 (NM_015792.1,2662-2680).
gccacatagacgatttgga

SEQ ID NO: 706080 - DNA, 19 bp, Mus musculus
  siRNA target sequence for Fbxo18 (NM_015792.1,2678-2696).
ggactttgcagagtacatt

SEQ ID NO: 706081 - DNA, 19 bp, Mus musculus
  siRNA target sequence for Fbxo18 (NM_015792.1,2739-2757).
gtgcacgttttggatgatt

SEQ ID NO: 706082 - DNA, 19 bp, Mus musculus
  siRNA target sequence for Fbxo18 (NM_015792.1,2807-2825).
cagagttgagtcgttttct

SEQ ID NO: 706083 - DNA, 19 bp, Mus musculus
  siRNA target sequence for Fbxo18 (NM_015792.1,2809-2827).
gagttgagtcgttttctga

SEQ ID NO: 706084 - DNA, 19 bp, Mus musculus
  siRNA target sequence for Fbxo18 (NM_015792.1,2866-2884).
ccaagaagcggctcataat

SEQ ID NO: 706085 - DNA, 19 bp, Mus musculus
  siRNA target sequence for Fbxo18 (NM_015792.1,2874-2892).
cggctcataatgaccaaat

SEQ ID NO: 706086 - DNA, 19 bp, Mus musculus
  siRNA target sequence for Fbxo18 (NM_015792.1,2911-2929).
ctctggctggggagtattt

SEQ ID NO: 706087 - DNA, 19 bp, Mus musculus
  siRNA target sequence for Fbxo18 (NM_015792.1,2913-2931).
ctggctggggagtatttct

SEQ ID NO: 706088 - DNA, 19 bp, Mus musculus
  siRNA target sequence for Fbxo18 (NM_015792.1,2934-2952).
caagcagagttgacaagta

SEQ ID NO: 706089 - DNA, 19 bp, Mus musculus
  siRNA target sequence for Fbxo18 (NM_015792.1,2940-2958).
gagttgacaagtaacgttt

SEQ ID NO: 706090 - DNA, 19 bp, Mus musculus
  siRNA target sequence for Fbxo18 (NM_015792.1,2945-2963).
gacaagtaacgttttgaaa

SEQ ID NO: 706091 - DNA, 19 bp, Mus musculus
  siRNA target sequence for Fbxo18 (NM_015792.1,3039-3057).
ctgcctatcacttatagca

SEQ ID NO: 706092 - DNA, 19 bp, Mus musculus
  siRNA target sequence for Fbxo16 (NM_015795.1,126-144).
ggcctttgcacctccaaaa

SEQ ID NO: 706093 - DNA, 19 bp, Mus musculus
  siRNA target sequence for Fbxo16 (NM_015795.1,146-164).
gcatcgatggccccaaaat

SEQ ID NO: 706094 - DNA, 19 bp, Mus musculus
  siRNA target sequence for Fbxo16 (NM_015795.1,239-257).
ctctgctgggaaaatggtt

SEQ ID NO: 706095 - DNA, 19 bp, Mus musculus
  siRNA target sequence for Fbxo16 (NM_015795.1,370-388).
gaggccctggattttacta

SEQ ID NO: 706096 - DNA, 19 bp, Mus musculus
  siRNA target sequence for Fbxo16 (NM_015795.1,523-541).
cgcttcaactggtacatca

SEQ ID NO: 706097 - DNA, 19 bp, Mus musculus
  siRNA target sequence for Fbxo16 (NM_015795.1,624-642).
caagacacctccaaaggat

SEQ ID NO: 706098 - DNA, 19 bp, Mus musculus
  siRNA target sequence for Fbxo16 (NM_015795.1,631-649).
cctccaaaggatgaattca

SEQ ID NO: 706099 - DNA, 19 bp, Mus musculus
  siRNA target sequence for Fbxo16 (NM_015795.1,697-715).
cagtccccttccttagctt

SEQ ID NO: 706100 - DNA, 19 bp, Mus musculus
  siRNA target sequence for Fbxo16 (NM_015795.1,718-736).
cggtcctcctcctccttaa

SEQ ID NO: 706101 - DNA, 19 bp, Mus musculus
  siRNA target sequence for Fbxo16 (NM_015795.1,725-743).
cctcctccttaagaaagaa

SEQ ID NO: 706102 - DNA, 19 bp, Mus musculus
  siRNA target sequence for Fbxo16 (NM_015795.1,772-790).
ccttggcgatcgtcagata

SEQ ID NO: 706103 - DNA, 19 bp, Mus musculus
  siRNA target sequence for Fbxo16 (NM_015795.1,773-791).
cttggcgatcgtcagataa

SEQ ID NO: 706104 - DNA, 19 bp, Mus musculus
  siRNA target sequence for Fbxo16 (NM_015795.1,776-794).
ggcgatcgtcagataagca

SEQ ID NO: 706105 - DNA, 19 bp, Mus musculus
  siRNA target sequence for Fbxo16 (NM_015795.1,777-795).
gcgatcgtcagataagcat

SEQ ID NO: 706106 - DNA, 19 bp, Mus musculus
  siRNA target sequence for Fbxo16 (NM_015795.1,802-820).
gacatcatccgctttaatt

SEQ ID NO: 706107 - DNA, 19 bp, Mus musculus
  siRNA target sequence for Fbxo16 (NM_015795.1,804-822).
catcatccgctttaattat

SEQ ID NO: 706108 - DNA, 19 bp, Mus musculus
  siRNA target sequence for Fbxo16 (NM_015795.1,807-825).
catccgctttaattatcta

SEQ ID NO: 706109 - DNA, 19 bp, Mus musculus
  siRNA target sequence for Fbxo16 (NM_015795.1,895-913).
cgccagctgcgagataaga

SEQ ID NO: 706110 - DNA, 19 bp, Mus musculus
  siRNA target sequence for Fbxo17 (NM_015796.1,466-484).
ccgcctcgcgcgttagtga

SEQ ID NO: 706111 - DNA, 19 bp, Mus musculus
  siRNA target sequence for Fbxo17 (NM_015796.1,522-540).
ggtagatggcccaagtata

SEQ ID NO: 706112 - DNA, 19 bp, Mus musculus
  siRNA target sequence for Fbxo17 (NM_015796.1,523-541).
gtagatggcccaagtatat

SEQ ID NO: 706113 - DNA, 19 bp, Mus musculus
  siRNA target sequence for Fbxo17 (NM_015796.1,762-780).
ggagcacggcggaaatggt

SEQ ID NO: 706114 - DNA, 19 bp, Mus musculus
  siRNA target sequence for Fbxo17 (NM_015796.1,763-781).
gagcacggcggaaatggtt

SEQ ID NO: 706115 - DNA, 19 bp, Mus musculus
  siRNA target sequence for Fbxo17 (NM_015796.1,778-796).
ggttgggccgtggaaaaga

SEQ ID NO: 706116 - DNA, 19 bp, Mus musculus
  siRNA target sequence for Fbxo17 (NM_015796.1,784-802).
gccgtggaaaagaatttga

SEQ ID NO: 706117 - DNA, 19 bp, Mus musculus
  siRNA target sequence for Fbxo6b (NM_015797.1,433-451).
gactggaaggtcttctata

SEQ ID NO: 706118 - DNA, 19 bp, Mus musculus
  siRNA target sequence for Fbxo6b (NM_015797.1,598-616).
gtcaagaagtattttgtca

SEQ ID NO: 706119 - DNA, 19 bp, Mus musculus
  siRNA target sequence for Fbxo6b (NM_015797.1,690-708).
cacctttcggcctgacatt

SEQ ID NO: 706120 - DNA, 19 bp, Mus musculus
  siRNA target sequence for Fbxo6b (NM_015797.1,692-710).
cctttcggcctgacattgt

SEQ ID NO: 706121 - DNA, 19 bp, Mus musculus
  siRNA target sequence for Fbxo6b (NM_015797.1,698-716).
ggcctgacattgtggttaa

SEQ ID NO: 706122 - DNA, 19 bp, Mus musculus
  siRNA target sequence for Fbxo6b (NM_015797.1,701-719).
ctgacattgtggttaagga

SEQ ID NO: 706123 - DNA, 19 bp, Mus musculus
  siRNA target sequence for Fbxo6b (NM_015797.1,743-761).
gtggctgcacctatcaact

SEQ ID NO: 706124 - DNA, 19 bp, Mus musculus
  siRNA target sequence for Fbxo6b (NM_015797.1,779-797).
ctgcggactacattgtctt

SEQ ID NO: 706125 - DNA, 19 bp, Mus musculus
  siRNA target sequence for Fbxo6b (NM_015797.1,863-881).
cccacaccttctctgatta

SEQ ID NO: 706126 - DNA, 19 bp, Mus musculus
  siRNA target sequence for Fbxo6b (NM_015797.1,889-907).
ggtgtccgtcacatccttt

SEQ ID NO: 706127 - DNA, 19 bp, Mus musculus
  siRNA target sequence for Fbxo6b (NM_015797.1,890-908).
gtgtccgtcacatcctttt

SEQ ID NO: 706128 - DNA, 19 bp, Mus musculus
  siRNA target sequence for Fbxo6b (NM_015797.1,1028-1046).
cggaagaaactgtagtaat

SEQ ID NO: 706129 - DNA, 19 bp, Mus musculus
  siRNA target sequence for Ppap2c (NM_015817.1,181-199).
ctggtgaatgcaccatata

SEQ ID NO: 706130 - DNA, 19 bp, Mus musculus
  siRNA target sequence for Ppap2c (NM_015817.1,333-351).
gtacacagaccgtctttat

SEQ ID NO: 706131 - DNA, 19 bp, Mus musculus
  siRNA target sequence for Ppap2c (NM_015817.1,353-371).
cgcgatccaacttcaacaa

SEQ ID NO: 706132 - DNA, 19 bp, Mus musculus
  siRNA target sequence for Ppap2c (NM_015817.1,355-373).
cgatccaacttcaacaact

SEQ ID NO: 706133 - DNA, 19 bp, Mus musculus
  siRNA target sequence for Ppap2c (NM_015817.1,356-374).
gatccaacttcaacaacta

SEQ ID NO: 706134 - DNA, 19 bp, Mus musculus
  siRNA target sequence for Ppap2c (NM_015817.1,360-378).
caacttcaacaactatgta

SEQ ID NO: 706135 - DNA, 19 bp, Mus musculus
  siRNA target sequence for Ppap2c (NM_015817.1,467-485).
gtcttcgacccagtttctt

SEQ ID NO: 706136 - DNA, 19 bp, Mus musculus
  siRNA target sequence for Ppap2c (NM_015817.1,551-569).
ggggcagccctgctaatgt

SEQ ID NO: 706137 - DNA, 19 bp, Mus musculus
  siRNA target sequence for Ppap2c (NM_015817.1,553-571).
ggcagccctgctaatgtca

SEQ ID NO: 706138 - DNA, 19 bp, Mus musculus
  siRNA target sequence for Fbxl8 (NM_015821.1,362-380).
gggagctggtcgacaatct

SEQ ID NO: 706139 - DNA, 19 bp, Mus musculus
  siRNA target sequence for Fbxl8 (NM_015821.1,482-500).
gcaccgtgtggtctgataa

SEQ ID NO: 706140 - DNA, 19 bp, Mus musculus
  siRNA target sequence for Fbxl8 (NM_015821.1,483-501).
caccgtgtggtctgataaa

SEQ ID NO: 706141 - DNA, 19 bp, Mus musculus
  siRNA target sequence for Fbxl8 (NM_015821.1,518-536).
gtgagctggaagacttgtt

SEQ ID NO: 706142 - DNA, 19 bp, Mus musculus
  siRNA target sequence for Fbxl8 (NM_015821.1,573-591).
caacctaaggctggaatat

SEQ ID NO: 706143 - DNA, 19 bp, Mus musculus
  siRNA target sequence for Fbxl8 (NM_015821.1,690-708).
cggagagaaaccgcttttt

SEQ ID NO: 706144 - DNA, 19 bp, Mus musculus
  siRNA target sequence for Fbxl8 (NM_015821.1,841-859).
cccgagctccgcagtcttt

SEQ ID NO: 706145 - DNA, 19 bp, Mus musculus
  siRNA target sequence for Fbxl8 (NM_015821.1,842-860).
ccgagctccgcagtctttt

SEQ ID NO: 706146 - DNA, 19 bp, Mus musculus
  siRNA target sequence for Fbxl8 (NM_015821.1,897-915).
cacttctgtgctcaaacta

SEQ ID NO: 706147 - DNA, 19 bp, Mus musculus
  siRNA target sequence for Fbxl8 (NM_015821.1,899-917).
cttctgtgctcaaactact

SEQ ID NO: 706148 - DNA, 19 bp, Mus musculus
  siRNA target sequence for Fbxl8 (NM_015821.1,947-965).
gactgcaccttgctagtat

SEQ ID NO: 706149 - DNA, 19 bp, Mus musculus
  siRNA target sequence for Fbxl8 (NM_015821.1,1424-1442).
gctatacgctcaagctaaa

SEQ ID NO: 706150 - DNA, 19 bp, Mus musculus
  siRNA target sequence for Fbxl3a (NM_015822.1,485-503).
catcgtcctccatgttttt

SEQ ID NO: 706151 - DNA, 19 bp, Mus musculus
  siRNA target sequence for Fbxl3a (NM_015822.1,489-507).
gtcctccatgtttttaagt

SEQ ID NO: 706152 - DNA, 19 bp, Mus musculus
  siRNA target sequence for Fbxl3a (NM_015822.1,540-558).
caagtgtgccggaattgga

SEQ ID NO: 706153 - DNA, 19 bp, Mus musculus
  siRNA target sequence for Fbxl3a (NM_015822.1,550-568).
ggaattggaatcaggtatt

SEQ ID NO: 706154 - DNA, 19 bp, Mus musculus
  siRNA target sequence for Fbxl3a (NM_015822.1,551-569).
gaattggaatcaggtattt

SEQ ID NO: 706155 - DNA, 19 bp, Mus musculus
  siRNA target sequence for Fbxl3a (NM_015822.1,584-602).
gtggcgatgttttgaattt

SEQ ID NO: 706156 - DNA, 19 bp, Mus musculus
  siRNA target sequence for Fbxl3a (NM_015822.1,615-633).
ccagcgacatcttacttga

SEQ ID NO: 706157 - DNA, 19 bp, Mus musculus
  siRNA target sequence for Fbxl3a (NM_015822.1,648-666).
gagctgatcaaacagatta

SEQ ID NO: 706158 - DNA, 19 bp, Mus musculus
  siRNA target sequence for Fbxl3a (NM_015822.1,651-669).
ctgatcaaacagattatca

SEQ ID NO: 706159 - DNA, 19 bp, Mus musculus
  siRNA target sequence for Fbxl3a (NM_015822.1,653-671).
gatcaaacagattatcaaa

SEQ ID NO: 706160 - DNA, 19 bp, Mus musculus
  siRNA target sequence for Fbxl3a (NM_015822.1,677-695).
ctcaaaccacctacagtat

SEQ ID NO: 706161 - DNA, 19 bp, Mus musculus
  siRNA target sequence for Fbxl3a (NM_015822.1,708-726).
gtggacagcagcaaagaat

SEQ ID NO: 706162 - DNA, 19 bp, Mus musculus
  siRNA target sequence for Fbxl3a (NM_015822.1,735-753).
gctgcttgtgacatactgt

SEQ ID NO: 706163 - DNA, 19 bp, Mus musculus
  siRNA target sequence for Fbxl3a (NM_015822.1,750-768).
ctgtcgcagcttgtgaatt

SEQ ID NO: 706164 - DNA, 19 bp, Mus musculus
  siRNA target sequence for Fbxl3a (NM_015822.1,758-776).
gcttgtgaattgctcttta

SEQ ID NO: 706165 - DNA, 19 bp, Mus musculus
  siRNA target sequence for Fbxl3a (NM_015822.1,811-829).
gctttatggatctaccaaa

SEQ ID NO: 706166 - DNA, 19 bp, Mus musculus
  siRNA target sequence for Fbxl3a (NM_015822.1,822-840).
ctaccaaagtctcacttta

SEQ ID NO: 706167 - DNA, 19 bp, Mus musculus
  siRNA target sequence for Fbxl3a (NM_015822.1,930-948).
gtcctcgtggccaacaaca

SEQ ID NO: 706168 - DNA, 19 bp, Mus musculus
  siRNA target sequence for Fbxl3a (NM_015822.1,1039-1057).
gagaactggccctgaacta

SEQ ID NO: 706169 - DNA, 19 bp, Mus musculus
  siRNA target sequence for Fbxl3a (NM_015822.1,1083-1101).
ctcgcactgtcttctgaaa

SEQ ID NO: 706170 - DNA, 19 bp, Mus musculus
  siRNA target sequence for Fbxl3a (NM_015822.1,1186-1204).
gctgggatgccttcatcaa

SEQ ID NO: 706171 - DNA, 19 bp, Mus musculus
  siRNA target sequence for Fbxl3a (NM_015822.1,1213-1231).
cgaaagtcaacctagtgat

SEQ ID NO: 706172 - DNA, 19 bp, Mus musculus
  siRNA target sequence for Fbxl3a (NM_015822.1,1253-1271).
ggaatttgacccattcttt

SEQ ID NO: 706173 - DNA, 19 bp, Mus musculus
  siRNA target sequence for Fbxl3a (NM_015822.1,1262-1280).
cccattctttcgttatgaa

SEQ ID NO: 706174 - DNA, 19 bp, Mus musculus
  siRNA target sequence for Fbxl3a (NM_015822.1,1263-1281).
ccattctttcgttatgaaa

SEQ ID NO: 706175 - DNA, 19 bp, Mus musculus
  siRNA target sequence for Fbxl3a (NM_015822.1,1264-1282).
cattctttcgttatgaaat

SEQ ID NO: 706176 - DNA, 19 bp, Mus musculus
  siRNA target sequence for Fbxl3a (NM_015822.1,1268-1286).
ctttcgttatgaaatacct

SEQ ID NO: 706177 - DNA, 19 bp, Mus musculus
  siRNA target sequence for Fbxl3a (NM_015822.1,1285-1303).
ctgctacgcatctttactt

SEQ ID NO: 706178 - DNA, 19 bp, Mus musculus
  siRNA target sequence for Fbxl3a (NM_015822.1,1387-1405).
ggttgcggcctcttgatga

SEQ ID NO: 706179 - DNA, 19 bp, Mus musculus
  siRNA target sequence for Fbxl3a (NM_015822.1,1388-1406).
gttgcggcctcttgatgaa

SEQ ID NO: 706180 - DNA, 19 bp, Mus musculus
  siRNA target sequence for Fbxl3a (NM_015822.1,1393-1411).
ggcctcttgatgaagagtt

SEQ ID NO: 706181 - DNA, 19 bp, Mus musculus
  siRNA target sequence for Fbxl3a (NM_015822.1,1394-1412).
gcctcttgatgaagagtta

SEQ ID NO: 706182 - DNA, 19 bp, Mus musculus
  siRNA target sequence for Fbxl3a (NM_015822.1,1418-1436).
cattgcggaacgttgcaaa

SEQ ID NO: 706183 - DNA, 19 bp, Mus musculus
  siRNA target sequence for Fbxl3a (NM_015822.1,1422-1440).
gcggaacgttgcaaaaatt

SEQ ID NO: 706184 - DNA, 19 bp, Mus musculus
  siRNA target sequence for Fbxl3a (NM_015822.1,1423-1441).
cggaacgttgcaaaaattt

SEQ ID NO: 706185 - DNA, 19 bp, Mus musculus
  siRNA target sequence for Fbxl3a (NM_015822.1,1425-1443).
gaacgttgcaaaaatttgt

SEQ ID NO: 706186 - DNA, 19 bp, Mus musculus
  siRNA target sequence for Fbxl3a (NM_015822.1,1474-1492).
catgtagtgcctttgttga

SEQ ID NO: 706187 - DNA, 19 bp, Mus musculus
  siRNA target sequence for Fbxl3a (NM_015822.1,1480-1498).
gtgcctttgttgagtttgt

SEQ ID NO: 706188 - DNA, 19 bp, Mus musculus
  siRNA target sequence for Fbxl3a (NM_015822.1,1482-1500).
gcctttgttgagtttgtga

SEQ ID NO: 706189 - DNA, 19 bp, Mus musculus
  siRNA target sequence for Fbxl3a (NM_015822.1,1516-1534).
gcctgtctcagttatccat

SEQ ID NO: 706190 - DNA, 19 bp, Mus musculus
  siRNA target sequence for Fbxl3a (NM_015822.1,1517-1535).
cctgtctcagttatccatt

SEQ ID NO: 706191 - DNA, 19 bp, Mus musculus
  siRNA target sequence for Fbxl3a (NM_015822.1,1518-1536).
ctgtctcagttatccatta

SEQ ID NO: 706192 - DNA, 19 bp, Mus musculus
  siRNA target sequence for Fbxl3a (NM_015822.1,1554-1572).
cctgaccaaaagtatagtt

SEQ ID NO: 706193 - DNA, 19 bp, Mus musculus
  siRNA target sequence for Fbxl3a (NM_015822.1,1555-1573).
ctgaccaaaagtatagttt

SEQ ID NO: 706194 - DNA, 19 bp, Mus musculus
  siRNA target sequence for Solh (NM_015830.1,87-105).
ccgacataagccagatctt

SEQ ID NO: 706195 - DNA, 19 bp, Mus musculus
  siRNA target sequence for Solh (NM_015830.1,156-174).
ctgtacattccggaacttt

SEQ ID NO: 706196 - DNA, 19 bp, Mus musculus
  siRNA target sequence for Solh (NM_015830.1,230-248).
cccctctgctgcccattat

SEQ ID NO: 706197 - DNA, 19 bp, Mus musculus
  siRNA target sequence for Solh (NM_015830.1,469-487).
cgctgcacactgcataaca

SEQ ID NO: 706198 - DNA, 19 bp, Mus musculus
  siRNA target sequence for Solh (NM_015830.1,517-535).
gggggaccccggaaactgt

SEQ ID NO: 706199 - DNA, 19 bp, Mus musculus
  siRNA target sequence for Solh (NM_015830.1,584-602).
cccctactggctttcatgt

SEQ ID NO: 706200 - DNA, 19 bp, Mus musculus
  siRNA target sequence for Solh (NM_015830.1,728-746).
cacccaccctacagaacaa

SEQ ID NO: 706201 - DNA, 19 bp, Mus musculus
  siRNA target sequence for Solh (NM_015830.1,978-996).
gtcgtgcagtgatgtcatt

SEQ ID NO: 706202 - DNA, 19 bp, Mus musculus
  siRNA target sequence for Solh (NM_015830.1,980-998).
cgtgcagtgatgtcattga

SEQ ID NO: 706203 - DNA, 19 bp, Mus musculus
  siRNA target sequence for Solh (NM_015830.1,1070-1088).
ccaggtgtacacttaggaa

SEQ ID NO: 706204 - DNA, 19 bp, Mus musculus
  siRNA target sequence for Solh (NM_015830.1,1288-1306).
gcctgtactctgatcaaca

SEQ ID NO: 706205 - DNA, 19 bp, Mus musculus
  siRNA target sequence for Solh (NM_015830.1,1386-1404).
gcgcagggagagtatgcat

SEQ ID NO: 706206 - DNA, 19 bp, Mus musculus
  siRNA target sequence for Solh (NM_015830.1,1443-1461).
ggcactctgggagaacata

SEQ ID NO: 706207 - DNA, 19 bp, Mus musculus
  siRNA target sequence for Solh (NM_015830.1,1445-1463).
cactctgggagaacatagt

SEQ ID NO: 706208 - DNA, 19 bp, Mus musculus
  siRNA target sequence for Solh (NM_015830.1,1574-1592).
ggctgaggccccacgaaat

SEQ ID NO: 706209 - DNA, 19 bp, Mus musculus
  siRNA target sequence for Solh (NM_015830.1,1576-1594).
ctgaggccccacgaaatca

SEQ ID NO: 706210 - DNA, 19 bp, Mus musculus
  siRNA target sequence for Solh (NM_015830.1,1873-1891).
gcacagcggaagcagttat

SEQ ID NO: 706211 - DNA, 19 bp, Mus musculus
  siRNA target sequence for Solh (NM_015830.1,1923-1941).
gctgcacggctcctacttt

SEQ ID NO: 706212 - DNA, 19 bp, Mus musculus
  siRNA target sequence for Solh (NM_015830.1,1950-1968).
ggcagggcgtgccattgaa

SEQ ID NO: 706213 - DNA, 19 bp, Mus musculus
  siRNA target sequence for Solh (NM_015830.1,1966-1984).
gaaggtctggccacactaa

SEQ ID NO: 706214 - DNA, 19 bp, Mus musculus
  siRNA target sequence for Solh (NM_015830.1,2352-2370).
gatggagtatagtgacttt

SEQ ID NO: 706215 - DNA, 19 bp, Mus musculus
  siRNA target sequence for Solh (NM_015830.1,2356-2374).
gagtatagtgactttatca

SEQ ID NO: 706216 - DNA, 19 bp, Mus musculus
  siRNA target sequence for Solh (NM_015830.1,3038-3056).
gcaccgacagcttcaatgt

SEQ ID NO: 706217 - DNA, 19 bp, Mus musculus
  siRNA target sequence for Galt (NM_016658.1,151-169).
cgagcgaacaccagcatat

SEQ ID NO: 706218 - DNA, 19 bp, Mus musculus
  siRNA target sequence for Galt (NM_016658.1,189-207).
gacgagtgggtgttagtgt

SEQ ID NO: 706219 - DNA, 19 bp, Mus musculus
  siRNA target sequence for Galt (NM_016658.1,704-722).
cagccagcatggaaaacct

SEQ ID NO: 706220 - DNA, 19 bp, Mus musculus
  siRNA target sequence for Galt (NM_016658.1,920-938).
gaccaagtacgacaatcta

SEQ ID NO: 706221 - DNA, 19 bp, Mus musculus
  siRNA target sequence for Galt (NM_016658.1,922-940).
ccaagtacgacaatctatt

SEQ ID NO: 706222 - DNA, 19 bp, Mus musculus
  siRNA target sequence for Galt (NM_016658.1,923-941).
caagtacgacaatctattt

SEQ ID NO: 706223 - DNA, 19 bp, Mus musculus
  siRNA target sequence for Galt (NM_016658.1,975-993).
ggggctcccacgggattaa

SEQ ID NO: 706224 - DNA, 19 bp, Mus musculus
  siRNA target sequence for Galt (NM_016658.1,976-994).
gggctcccacgggattaaa

SEQ ID NO: 706225 - DNA, 19 bp, Mus musculus
  siRNA target sequence for Galt (NM_016658.1,978-996).
gctcccacgggattaaaga

SEQ ID NO: 706226 - DNA, 19 bp, Mus musculus
  siRNA target sequence for Galt (NM_016658.1,1059-1077).
gcaactgtccggaagttca

SEQ ID NO: 706227 - DNA, 19 bp, Mus musculus
  siRNA target sequence for Galt (NM_016658.1,1060-1078).
caactgtccggaagttcat

SEQ ID NO: 706228 - DNA, 19 bp, Mus musculus
  siRNA target sequence for Galt (NM_016658.1,1130-1148).
cggatccgcaactgtctat

SEQ ID NO: 706229 - DNA, 19 bp, Mus musculus
  siRNA target sequence for Galt (NM_016658.1,1132-1150).
gatccgcaactgtctatga

SEQ ID NO: 706230 - DNA, 19 bp, Mus musculus
  siRNA target sequence for Galt (NM_016658.1,1135-1153).
ccgcaactgtctatgaaat

SEQ ID NO: 706231 - DNA, 19 bp, Mus musculus
  siRNA target sequence for Galt (NM_016658.1,1210-1228).
cgcttcccgaggtacacta

SEQ ID NO: 706232 - DNA, 19 bp, Mus musculus
  siRNA target sequence for Galt (NM_016658.1,1211-1229).
gcttcccgaggtacactat

SEQ ID NO: 706233 - DNA, 19 bp, Mus musculus
  siRNA target sequence for Galt (NM_016658.1,1283-1301).
ccacatcagggccttgaat

SEQ ID NO: 706234 - DNA, 19 bp, Mus musculus
  siRNA target sequence for Mata2 (NM_016664.1,99-117).
cgggataggaattcaacat

SEQ ID NO: 706235 - DNA, 19 bp, Mus musculus
  siRNA target sequence for Mata2 (NM_016664.1,100-118).
gggataggaattcaacatt

SEQ ID NO: 706236 - DNA, 19 bp, Mus musculus
  siRNA target sequence for Mata2 (NM_016664.1,102-120).
gataggaattcaacattca

SEQ ID NO: 706237 - DNA, 19 bp, Mus musculus
  siRNA target sequence for Mata2 (NM_016664.1,201-219).
gtggcgagtgcgtgttact

SEQ ID NO: 706238 - DNA, 19 bp, Mus musculus
  siRNA target sequence for Mata2 (NM_016664.1,203-221).
ggcgagtgcgtgttactct

SEQ ID NO: 706239 - DNA, 19 bp, Mus musculus
  siRNA target sequence for Mata2 (NM_016664.1,331-349).
cctacagaggcaatgatca

SEQ ID NO: 706240 - DNA, 19 bp, Mus musculus
  siRNA target sequence for Mata2 (NM_016664.1,354-372).
gcttctgctggtttcaaga

SEQ ID NO: 706241 - DNA, 19 bp, Mus musculus
  siRNA target sequence for Mata2 (NM_016664.1,411-429).
ggccttccgaacctcttaa

SEQ ID NO: 706242 - DNA, 19 bp, Mus musculus
  siRNA target sequence for Stra13 (NM_016665.1,67-85).
cctgtcgctgcctaccttt

SEQ ID NO: 706243 - DNA, 19 bp, Mus musculus
  siRNA target sequence for Stra13 (NM_016665.1,68-86).
ctgtcgctgcctacctttt

SEQ ID NO: 706244 - DNA, 19 bp, Mus musculus
  siRNA target sequence for Stra13 (NM_016665.1,97-115).
ggtcgttccccattctgtt

SEQ ID NO: 706245 - DNA, 19 bp, Mus musculus
  siRNA target sequence for Stra13 (NM_016665.1,246-264).
caaactaccaccaaccttt

SEQ ID NO: 706246 - DNA, 19 bp, Mus musculus
  siRNA target sequence for Stra13 (NM_016665.1,324-342).
gcagactactccatttgca

SEQ ID NO: 706247 - DNA, 19 bp, Mus musculus
  siRNA target sequence for Crym (NM_016669.1,149-167).
gccgcactggccaacttct

SEQ ID NO: 706248 - DNA, 19 bp, Mus musculus
  siRNA target sequence for Crym (NM_016669.1,276-294).
cgctcaccaccaagttagt

SEQ ID NO: 706249 - DNA, 19 bp, Mus musculus
  siRNA target sequence for Crym (NM_016669.1,278-296).
ctcaccaccaagttagtca

SEQ ID NO: 706250 - DNA, 19 bp, Mus musculus
  siRNA target sequence for Crym (NM_016669.1,286-304).
caagttagtcaccttctat

SEQ ID NO: 706251 - DNA, 19 bp, Mus musculus
  siRNA target sequence for Crym (NM_016669.1,384-402).
cggtcatggatggaaatgt

SEQ ID NO: 706252 - DNA, 19 bp, Mus musculus
  siRNA target sequence for Crym (NM_016669.1,504-522).
cgtacagtcactatgagat

SEQ ID NO: 706253 - DNA, 19 bp, Mus musculus
  siRNA target sequence for Crym (NM_016669.1,540-558).
ccttcaaggaggtgagaat

SEQ ID NO: 706254 - DNA, 19 bp, Mus musculus
  siRNA target sequence for Crym (NM_016669.1,562-580).
gaaccgcaccagggaaaat

SEQ ID NO: 706255 - DNA, 19 bp, Mus musculus
  siRNA target sequence for Crym (NM_016669.1,565-583).
ccgcaccagggaaaatgct

SEQ ID NO: 706256 - DNA, 19 bp, Mus musculus
  siRNA target sequence for Crym (NM_016669.1,611-629).
gatgttcgggtctgttcat

SEQ ID NO: 706257 - DNA, 19 bp, Mus musculus
  siRNA target sequence for Crym (NM_016669.1,850-868).
gtcaggggctgacatcttt

SEQ ID NO: 706258 - DNA, 19 bp, Mus musculus
  siRNA target sequence for Crym (NM_016669.1,870-888).
ctgagcttggagaagtgat

SEQ ID NO: 706259 - DNA, 19 bp, Mus musculus
  siRNA target sequence for Crym (NM_016669.1,961-979).
ggttgcagccaaattagta

SEQ ID NO: 706260 - DNA, 19 bp, Mus musculus
  siRNA target sequence for Crym (NM_016669.1,962-980).
gttgcagccaaattagtat

SEQ ID NO: 706261 - DNA, 19 bp, Mus musculus
  siRNA target sequence for Crym (NM_016669.1,966-984).
cagccaaattagtatatga

SEQ ID NO: 706262 - DNA, 19 bp, Mus musculus
  siRNA target sequence for Crym (NM_016669.1,968-986).
gccaaattagtatatgatt

SEQ ID NO: 706263 - DNA, 19 bp, Mus musculus
  siRNA target sequence for Vezf1 (NM_016686.2,248-266).
gttgcttccaataccaatt

SEQ ID NO: 706264 - DNA, 19 bp, Mus musculus
  siRNA target sequence for Vezf1 (NM_016686.2,302-320).
ggatgccattgggattaaa

SEQ ID NO: 706265 - DNA, 19 bp, Mus musculus
  siRNA target sequence for Vezf1 (NM_016686.2,303-321).
gatgccattgggattaaaa

SEQ ID NO: 706266 - DNA, 19 bp, Mus musculus
  siRNA target sequence for Vezf1 (NM_016686.2,330-348).
cccaaaacttcgtttgtgt

SEQ ID NO: 706267 - DNA, 19 bp, Mus musculus
  siRNA target sequence for Vezf1 (NM_016686.2,352-370).
cttactgcagtaaagcatt

SEQ ID NO: 706268 - DNA, 19 bp, Mus musculus
  siRNA target sequence for Vezf1 (NM_016686.2,425-443).
ggtgtctcgggcaaagaaa

SEQ ID NO: 706269 - DNA, 19 bp, Mus musculus
  siRNA target sequence for Vezf1 (NM_016686.2,426-444).
gtgtctcgggcaaagaaaa

SEQ ID NO: 706270 - DNA, 19 bp, Mus musculus
  siRNA target sequence for Vezf1 (NM_016686.2,495-513).
cgaacttcgttggtttcaa

SEQ ID NO: 706271 - DNA, 19 bp, Mus musculus
  siRNA target sequence for Vezf1 (NM_016686.2,499-517).
cttcgttggtttcaactat

SEQ ID NO: 706272 - DNA, 19 bp, Mus musculus
  siRNA target sequence for Vezf1 (NM_016686.2,530-548).
gtcaacagtcactacatct

SEQ ID NO: 706273 - DNA, 19 bp, Mus musculus
  siRNA target sequence for Vezf1 (NM_016686.2,599-617).
gccccagtctgtcaagaaa

SEQ ID NO: 706274 - DNA, 19 bp, Mus musculus
  siRNA target sequence for Vezf1 (NM_016686.2,622-640).
gtaagcctgtcaagaagaa

SEQ ID NO: 706275 - DNA, 19 bp, Mus musculus
  siRNA target sequence for Vezf1 (NM_016686.2,760-778).
ggaaggaccggatgactta

SEQ ID NO: 706276 - DNA, 19 bp, Mus musculus
  siRNA target sequence for Vezf1 (NM_016686.2,764-782).
ggaccggatgacttaccat

SEQ ID NO: 706277 - DNA, 19 bp, Mus musculus
  siRNA target sequence for Vezf1 (NM_016686.2,803-821).
catcaccaaaccctatact

SEQ ID NO: 706278 - DNA, 19 bp, Mus musculus
  siRNA target sequence for Vezf1 (NM_016686.2,857-875).
ccacctaagctgtcatgta

SEQ ID NO: 706279 - DNA, 19 bp, Mus musculus
  siRNA target sequence for Vezf1 (NM_016686.2,858-876).
cacctaagctgtcatgtaa

SEQ ID NO: 706280 - DNA, 19 bp, Mus musculus
  siRNA target sequence for Vezf1 (NM_016686.2,860-878).
cctaagctgtcatgtaaaa

SEQ ID NO: 706281 - DNA, 19 bp, Mus musculus
  siRNA target sequence for Vezf1 (NM_016686.2,865-883).
gctgtcatgtaaaacatgt

SEQ ID NO: 706282 - DNA, 19 bp, Mus musculus
  siRNA target sequence for Vezf1 (NM_016686.2,966-984).
cgccacgaaggcaaggtat

SEQ ID NO: 706283 - DNA, 19 bp, Mus musculus
  siRNA target sequence for Vezf1 (NM_016686.2,969-987).
cacgaaggcaaggtatcat

SEQ ID NO: 706284 - DNA, 19 bp, Mus musculus
  siRNA target sequence for Vezf1 (NM_016686.2,971-989).
cgaaggcaaggtatcatgt

SEQ ID NO: 706285 - DNA, 19 bp, Mus musculus
  siRNA target sequence for Vezf1 (NM_016686.2,976-994).
gcaaggtatcatgtaacat

SEQ ID NO: 706286 - DNA, 19 bp, Mus musculus
  siRNA target sequence for Vezf1 (NM_016686.2,1004-1022).
gctcttgagtgcagcatat

SEQ ID NO: 706287 - DNA, 19 bp, Mus musculus
  siRNA target sequence for Vezf1 (NM_016686.2,1005-1023).
ctcttgagtgcagcatata

SEQ ID NO: 706288 - DNA, 19 bp, Mus musculus
  siRNA target sequence for Vezf1 (NM_016686.2,1044-1062).
catgggcagagccaaagta

SEQ ID NO: 706289 - DNA, 19 bp, Mus musculus
  siRNA target sequence for Vezf1 (NM_016686.2,1067-1085).
ctgtaacacgtgcaaacaa

SEQ ID NO: 706290 - DNA, 19 bp, Mus musculus
  siRNA target sequence for Vezf1 (NM_016686.2,1083-1101).
caaggcatcagcaaaacgt

SEQ ID NO: 706291 - DNA, 19 bp, Mus musculus
  siRNA target sequence for Vezf1 (NM_016686.2,1300-1318).
ctctcactactccattcaa

SEQ ID NO: 706292 - DNA, 19 bp, Mus musculus
  siRNA target sequence for Vezf1 (NM_016686.2,1332-1350).
gtgtcgtctgggactatgt

SEQ ID NO: 706293 - DNA, 19 bp, Mus musculus
  siRNA target sequence for Vezf1 (NM_016686.2,1336-1354).
cgtctgggactatgtcaaa

SEQ ID NO: 706294 - DNA, 19 bp, Mus musculus
  siRNA target sequence for Vezf1 (NM_016686.2,1401-1419).
gtctcaagtgcagttaata

SEQ ID NO: 706295 - DNA, 19 bp, Mus musculus
  siRNA target sequence for Vezf1 (NM_016686.2,1440-1458).
gggcatcccgtaaccataa

SEQ ID NO: 706296 - DNA, 19 bp, Mus musculus
  siRNA target sequence for Vezf1 (NM_016686.2,1443-1461).
catcccgtaaccataacca

SEQ ID NO: 706297 - DNA, 19 bp, Mus musculus
  siRNA target sequence for Vezf1 (NM_016686.2,1472-1490).
catgacctcacctttaaca

SEQ ID NO: 706298 - DNA, 19 bp, Mus musculus
  siRNA target sequence for Vezf1 (NM_016686.2,1577-1595).
gcccactcctatgacatta

SEQ ID NO: 706299 - DNA, 19 bp, Mus musculus
  siRNA target sequence for Vezf1 (NM_016686.2,1580-1598).
cactcctatgacattagct

SEQ ID NO: 706300 - DNA, 19 bp, Mus musculus
  siRNA target sequence for Vezf1 (NM_016686.2,1599-1617).
gcccctctcaatatagcaa

SEQ ID NO: 706301 - DNA, 19 bp, Mus musculus
  siRNA target sequence for Incenp (NM_016692.1,171-189).
gccttctggatctatgtga

SEQ ID NO: 706302 - DNA, 19 bp, Mus musculus
  siRNA target sequence for Incenp (NM_016692.1,269-287).
cgcatgtttatcagagaat

SEQ ID NO: 706303 - DNA, 19 bp, Mus musculus
  siRNA target sequence for Incenp (NM_016692.1,270-288).
gcatgtttatcagagaatt

SEQ ID NO: 706304 - DNA, 19 bp, Mus musculus
  siRNA target sequence for Incenp (NM_016692.1,346-364).
gaggcgggtgtctaacatt

SEQ ID NO: 706305 - DNA, 19 bp, Mus musculus
  siRNA target sequence for Incenp (NM_016692.1,348-366).
ggcgggtgtctaacattca

SEQ ID NO: 706306 - DNA, 19 bp, Mus musculus
  siRNA target sequence for Incenp (NM_016692.1,383-401).
cccgtgaggaaaaggttat

SEQ ID NO: 706307 - DNA, 19 bp, Mus musculus
  siRNA target sequence for Incenp (NM_016692.1,397-415).
gttatcccgcagaaagtct

SEQ ID NO: 706308 - DNA, 19 bp, Mus musculus
  siRNA target sequence for Incenp (NM_016692.1,446-464).
cgcagcaagcccgttacta

SEQ ID NO: 706309 - DNA, 19 bp, Mus musculus
  siRNA target sequence for Incenp (NM_016692.1,450-468).
gcaagcccgttactattgt

SEQ ID NO: 706310 - DNA, 19 bp, Mus musculus
  siRNA target sequence for Incenp (NM_016692.1,451-469).
caagcccgttactattgtt

SEQ ID NO: 706311 - DNA, 19 bp, Mus musculus
  siRNA target sequence for Incenp (NM_016692.1,613-631).
ggagataagcactagtgaa

SEQ ID NO: 706312 - DNA, 19 bp, Mus musculus
  siRNA target sequence for Incenp (NM_016692.1,718-736).
ggaactaacacccaagaaa

SEQ ID NO: 706313 - DNA, 19 bp, Mus musculus
  siRNA target sequence for Incenp (NM_016692.1,719-737).
gaactaacacccaagaaat

SEQ ID NO: 706314 - DNA, 19 bp, Mus musculus
  siRNA target sequence for Incenp (NM_016692.1,921-939).
ctatcctgctgaataacat

SEQ ID NO: 706315 - DNA, 19 bp, Mus musculus
  siRNA target sequence for Incenp (NM_016692.1,983-1001).
gtgcggcgaagcctgattt

SEQ ID NO: 706316 - DNA, 19 bp, Mus musculus
  siRNA target sequence for Incenp (NM_016692.1,1018-1036).
gccactagcctcgaagtat

SEQ ID NO: 706317 - DNA, 19 bp, Mus musculus
  siRNA target sequence for Incenp (NM_016692.1,1019-1037).
ccactagcctcgaagtata

SEQ ID NO: 706318 - DNA, 19 bp, Mus musculus
  siRNA target sequence for Incenp (NM_016692.1,1020-1038).
cactagcctcgaagtataa

SEQ ID NO: 706319 - DNA, 19 bp, Mus musculus
  siRNA target sequence for Incenp (NM_016692.1,1022-1040).
ctagcctcgaagtataatt

SEQ ID NO: 706320 - DNA, 19 bp, Mus musculus
  siRNA target sequence for Incenp (NM_016692.1,1026-1044).
cctcgaagtataatttggt

SEQ ID NO: 706321 - DNA, 19 bp, Mus musculus
  siRNA target sequence for Incenp (NM_016692.1,1114-1132).
ggcctctgctcgaatcatt

SEQ ID NO: 706322 - DNA, 19 bp, Mus musculus
  siRNA target sequence for Incenp (NM_016692.1,1117-1135).
ctctgctcgaatcatttgt

SEQ ID NO: 706323 - DNA, 19 bp, Mus musculus
  siRNA target sequence for Incenp (NM_016692.1,1119-1137).
ctgctcgaatcatttgtca

SEQ ID NO: 706324 - DNA, 19 bp, Mus musculus
  siRNA target sequence for Incenp (NM_016692.1,1125-1143).
gaatcatttgtcacagtta

SEQ ID NO: 706325 - DNA, 19 bp, Mus musculus
  siRNA target sequence for Incenp (NM_016692.1,1285-1303).
caccaagattgcgattagt

SEQ ID NO: 706326 - DNA, 19 bp, Mus musculus
  siRNA target sequence for Incenp (NM_016692.1,1599-1617).
cccgcagcagtgtcatgaa

SEQ ID NO: 706327 - DNA, 19 bp, Mus musculus
  siRNA target sequence for Incenp (NM_016692.1,1855-1873).
gcagaagtttgctcagatt

SEQ ID NO: 706328 - DNA, 19 bp, Mus musculus
  siRNA target sequence for Incenp (NM_016692.1,2432-2450).
gtttgtacctcatatcaaa

SEQ ID NO: 706329 - DNA, 19 bp, Mus musculus
  siRNA target sequence for Incenp (NM_016692.1,2482-2500).
gatcagcgtagacgattat

SEQ ID NO: 706330 - DNA, 19 bp, Mus musculus
  siRNA target sequence for Incenp (NM_016692.1,2502-2520).
ggatggacctaaatagtga

SEQ ID NO: 706331 - DNA, 19 bp, Mus musculus
  siRNA target sequence for Incenp (NM_016692.1,2611-2629).
ctaccaccctccaaacatt

SEQ ID NO: 706332 - DNA, 19 bp, Mus musculus
  siRNA target sequence for Incenp (NM_016692.1,2614-2632).
ccaccctccaaacattcta

SEQ ID NO: 706333 - DNA, 19 bp, Mus musculus
  siRNA target sequence for Rnf10 (NM_016698.1,719-737).
cagtcccgtcgctccaatt

SEQ ID NO: 706334 - DNA, 19 bp, Mus musculus
  siRNA target sequence for Rnf10 (NM_016698.1,721-739).
gtcccgtcgctccaattca

SEQ ID NO: 706335 - DNA, 19 bp, Mus musculus
  siRNA target sequence for Rnf10 (NM_016698.1,723-741).
cccgtcgctccaattcaca

SEQ ID NO: 706336 - DNA, 19 bp, Mus musculus
  siRNA target sequence for Rnf10 (NM_016698.1,728-746).
cgctccaattcacagaaaa

SEQ ID NO: 706337 - DNA, 19 bp, Mus musculus
  siRNA target sequence for Rnf10 (NM_016698.1,879-897).
ctggccctaagaagatcaa

SEQ ID NO: 706338 - DNA, 19 bp, Mus musculus
  siRNA target sequence for Rnf10 (NM_016698.1,895-913).
caacctgaaccacttgtta

SEQ ID NO: 706339 - DNA, 19 bp, Mus musculus
  siRNA target sequence for Rnf10 (NM_016698.1,898-916).
cctgaaccacttgttaaat

SEQ ID NO: 706340 - DNA, 19 bp, Mus musculus
  siRNA target sequence for Rnf10 (NM_016698.1,899-917).
ctgaaccacttgttaaatt

SEQ ID NO: 706341 - DNA, 19 bp, Mus musculus
  siRNA target sequence for Rnf10 (NM_016698.1,936-954).
gccaggcaggtcactttga

SEQ ID NO: 706342 - DNA, 19 bp, Mus musculus
  siRNA target sequence for Rnf10 (NM_016698.1,1009-1027).
caacaaggagctctttcta

SEQ ID NO: 706343 - DNA, 19 bp, Mus musculus
  siRNA target sequence for Rnf10 (NM_016698.1,1118-1136).
gaacaagtgcgcatctgta

SEQ ID NO: 706344 - DNA, 19 bp, Mus musculus
  siRNA target sequence for Rnf10 (NM_016698.1,1175-1193).
cctactgcggccaagataa

SEQ ID NO: 706345 - DNA, 19 bp, Mus musculus
  siRNA target sequence for Rnf10 (NM_016698.1,1194-1212).
cgcgctgtggacacatttt

SEQ ID NO: 706346 - DNA, 19 bp, Mus musculus
  siRNA target sequence for Rnf10 (NM_016698.1,1321-1339).
cacagagtctcgacagtat

SEQ ID NO: 706347 - DNA, 19 bp, Mus musculus
  siRNA target sequence for Rnf10 (NM_016698.1,1410-1428).
ccaagtgggtgaatgtaga

SEQ ID NO: 706348 - DNA, 19 bp, Mus musculus
  siRNA target sequence for Rnf10 (NM_016698.1,1420-1438).
gaatgtagaccatcctatt

SEQ ID NO: 706349 - DNA, 19 bp, Mus musculus
  siRNA target sequence for Rnf10 (NM_016698.1,1962-1980).
gcagctctccgtgttacta

SEQ ID NO: 706350 - DNA, 19 bp, Mus musculus
  siRNA target sequence for Rnf10 (NM_016698.1,2207-2225).
cctgtggtctctaaggaaa

SEQ ID NO: 706351 - DNA, 19 bp, Mus musculus
  siRNA target sequence for Rnf10 (NM_016698.1,2298-2316).
gccgagagcgcagaattga

SEQ ID NO: 706352 - DNA, 19 bp, Mus musculus
  siRNA target sequence for Rnf10 (NM_016698.1,2300-2318).
cgagagcgcagaattgaga

SEQ ID NO: 706353 - DNA, 19 bp, Mus musculus
  siRNA target sequence for Rnf10 (NM_016698.1,2301-2319).
gagagcgcagaattgagat

SEQ ID NO: 706354 - DNA, 19 bp, Mus musculus
  siRNA target sequence for Rnf10 (NM_016698.1,2380-2398).
gcagtttccggccttcaat

SEQ ID NO: 706355 - DNA, 19 bp, Mus musculus
  siRNA target sequence for Rnf10 (NM_016698.1,2381-2399).
cagtttccggccttcaatt

SEQ ID NO: 706356 - DNA, 19 bp, Mus musculus
  siRNA target sequence for Rnf10 (NM_016698.1,2387-2405).
ccggccttcaattcctata

SEQ ID NO: 706357 - DNA, 19 bp, Mus musculus
  siRNA target sequence for Rnf10 (NM_016698.1,2573-2591).
gacgactctcccttccttt

SEQ ID NO: 706358 - DNA, 19 bp, Mus musculus
  siRNA target sequence for Rnf10 (NM_016698.1,2608-2626).
gagggttggcaaagcaaaa

SEQ ID NO: 706359 - DNA, 19 bp, Mus musculus
  siRNA target sequence for Rnf10 (NM_016698.1,2732-2750).
gtgcccagtttccaaaatt

SEQ ID NO: 706360 - DNA, 19 bp, Mus musculus
  siRNA target sequence for Rnf10 (NM_016698.1,2752-2770).
cttcagccaagctatcgaa

SEQ ID NO: 706361 - DNA, 19 bp, Mus musculus
  siRNA target sequence for Rnf10 (NM_016698.1,2772-2790).
cagccttcatgaaattgga

SEQ ID NO: 706362 - DNA, 19 bp, Mus musculus
  siRNA target sequence for C6 (NM_016704.1,142-160).
ctcaccttgtgtttcattt

SEQ ID NO: 706363 - DNA, 19 bp, Mus musculus
  siRNA target sequence for C6 (NM_016704.1,163-181).
ctggtcatgctgattgaca

SEQ ID NO: 706364 - DNA, 19 bp, Mus musculus
  siRNA target sequence for C6 (NM_016704.1,220-238).
cactggtccagctgttcta

SEQ ID NO: 706365 - DNA, 19 bp, Mus musculus
  siRNA target sequence for C6 (NM_016704.1,274-292).
caagtagtagtgaacgatt

SEQ ID NO: 706366 - DNA, 19 bp, Mus musculus
  siRNA target sequence for C6 (NM_016704.1,277-295).
gtagtagtgaacgattact

SEQ ID NO: 706367 - DNA, 19 bp, Mus musculus
  siRNA target sequence for C6 (NM_016704.1,280-298).
gtagtgaacgattactatt

SEQ ID NO: 706368 - DNA, 19 bp, Mus musculus
  siRNA target sequence for C6 (NM_016704.1,283-301).
gtgaacgattactattgga

SEQ ID NO: 706369 - DNA, 19 bp, Mus musculus
  siRNA target sequence for C6 (NM_016704.1,285-303).
gaacgattactattggaaa

SEQ ID NO: 706370 - DNA, 19 bp, Mus musculus
  siRNA target sequence for C6 (NM_016704.1,311-329).
gcgataagctttgtatcaa

SEQ ID NO: 706371 - DNA, 19 bp, Mus musculus
  siRNA target sequence for C6 (NM_016704.1,372-390).
ctgtgtcctaggagactat

SEQ ID NO: 706372 - DNA, 19 bp, Mus musculus
  siRNA target sequence for C6 (NM_016704.1,421-439).
gaaaaacaggttaaagtta

SEQ ID NO: 706373 - DNA, 19 bp, Mus musculus
  siRNA target sequence for C6 (NM_016704.1,447-465).
cctgcgcccaagtcagttt

SEQ ID NO: 706374 - DNA, 19 bp, Mus musculus
  siRNA target sequence for C6 (NM_016704.1,486-504).
gcccctggtgacctttcaa

SEQ ID NO: 706375 - DNA, 19 bp, Mus musculus
  siRNA target sequence for C6 (NM_016704.1,516-534).
ctccaagctctgcaaaatt

SEQ ID NO: 706376 - DNA, 19 bp, Mus musculus
  siRNA target sequence for C6 (NM_016704.1,527-545).
gcaaaattgaagagactaa

SEQ ID NO: 706377 - DNA, 19 bp, Mus musculus
  siRNA target sequence for C6 (NM_016704.1,538-556).
gagactaactgcaagaata

SEQ ID NO: 706378 - DNA, 19 bp, Mus musculus
  siRNA target sequence for C6 (NM_016704.1,542-560).
ctaactgcaagaataagtt

SEQ ID NO: 706379 - DNA, 19 bp, Mus musculus
  siRNA target sequence for C6 (NM_016704.1,581-599).
gtattcccagcaagttaga

SEQ ID NO: 706380 - DNA, 19 bp, Mus musculus
  siRNA target sequence for C6 (NM_016704.1,587-605).
ccagcaagttagaatgcaa

SEQ ID NO: 706381 - DNA, 19 bp, Mus musculus
  siRNA target sequence for C6 (NM_016704.1,662-680).
cagtgtgcacacggatata

SEQ ID NO: 706382 - DNA, 19 bp, Mus musculus
  siRNA target sequence for C6 (NM_016704.1,666-684).
gtgcacacggatatacact

SEQ ID NO: 706383 - DNA, 19 bp, Mus musculus
  siRNA target sequence for C6 (NM_016704.1,748-766).
gaagttcttgacaactctt

SEQ ID NO: 706384 - DNA, 19 bp, Mus musculus
  siRNA target sequence for C6 (NM_016704.1,776-794).
gaatatgtaaacttgtcaa

SEQ ID NO: 706385 - DNA, 19 bp, Mus musculus
  siRNA target sequence for C6 (NM_016704.1,795-813).
gaccagtcgagccagtaat

SEQ ID NO: 706386 - DNA, 19 bp, Mus musculus
  siRNA target sequence for C6 (NM_016704.1,798-816).
cagtcgagccagtaatcca

SEQ ID NO: 706387 - DNA, 19 bp, Mus musculus
  siRNA target sequence for C6 (NM_016704.1,800-818).
gtcgagccagtaatccata

SEQ ID NO: 706388 - DNA, 19 bp, Mus musculus
  siRNA target sequence for C6 (NM_016704.1,827-845).
cagccaatctggaaaatgt

SEQ ID NO: 706389 - DNA, 19 bp, Mus musculus
  siRNA target sequence for C6 (NM_016704.1,849-867).
ctttgaggtacaaactata

SEQ ID NO: 706390 - DNA, 19 bp, Mus musculus
  siRNA target sequence for C6 (NM_016704.1,1000-1018).
gaacattcccattatagct

SEQ ID NO: 706391 - DNA, 19 bp, Mus musculus
  siRNA target sequence for C6 (NM_016704.1,1021-1039).
gccttcaacaaagtcatta

SEQ ID NO: 706392 - DNA, 19 bp, Mus musculus
  siRNA target sequence for C6 (NM_016704.1,1042-1060).
gcttcccacaagaaggatt

SEQ ID NO: 706393 - DNA, 19 bp, Mus musculus
  siRNA target sequence for C6 (NM_016704.1,1064-1082).
gctttatcaggatccataa

SEQ ID NO: 706394 - DNA, 19 bp, Mus musculus
  siRNA target sequence for C6 (NM_016704.1,1074-1092).
gatccataagctgataaaa

SEQ ID NO: 706395 - DNA, 19 bp, Mus musculus
  siRNA target sequence for C6 (NM_016704.1,1093-1111).
gtcttaaacttcacaatga

SEQ ID NO: 706396 - DNA, 19 bp, Mus musculus
  siRNA target sequence for C6 (NM_016704.1,1156-1174).
gtccacctgcctttagaat

SEQ ID NO: 706397 - DNA, 19 bp, Mus musculus
  siRNA target sequence for C6 (NM_016704.1,1162-1180).
ctgcctttagaatacaact

SEQ ID NO: 706398 - DNA, 19 bp, Mus musculus
  siRNA target sequence for C6 (NM_016704.1,1188-1206).
gtacagccggatatttgat

SEQ ID NO: 706399 - DNA, 19 bp, Mus musculus
  siRNA target sequence for C6 (NM_016704.1,1193-1211).
gccggatatttgatgactt

SEQ ID NO: 706400 - DNA, 19 bp, Mus musculus
  siRNA target sequence for C6 (NM_016704.1,1236-1254).
ctcccttgggggcaagtat

SEQ ID NO: 706401 - DNA, 19 bp, Mus musculus
  siRNA target sequence for C6 (NM_016704.1,1244-1262).
ggggcaagtatgaccttat

SEQ ID NO: 706402 - DNA, 19 bp, Mus musculus
  siRNA target sequence for C6 (NM_016704.1,1255-1273).
gaccttatctaccaattca

SEQ ID NO: 706403 - DNA, 19 bp, Mus musculus
  siRNA target sequence for C6 (NM_016704.1,1284-1302).
gctacagaactcaggttta

SEQ ID NO: 706404 - DNA, 19 bp, Mus musculus
  siRNA target sequence for C6 (NM_016704.1,1566-1584).
ccctgctgtagttgattat

SEQ ID NO: 706405 - DNA, 19 bp, Mus musculus
  siRNA target sequence for C6 (NM_016704.1,1567-1585).
cctgctgtagttgattata

SEQ ID NO: 706406 - DNA, 19 bp, Mus musculus
  siRNA target sequence for C6 (NM_016704.1,1568-1586).
ctgctgtagttgattataa

SEQ ID NO: 706407 - DNA, 19 bp, Mus musculus
  siRNA target sequence for C6 (NM_016704.1,1571-1589).
ctgtagttgattataagct

SEQ ID NO: 706408 - DNA, 19 bp, Mus musculus
  siRNA target sequence for C6 (NM_016704.1,1620-1638).
cccatgtgcagtgacaaaa

SEQ ID NO: 706409 - DNA, 19 bp, Mus musculus
  siRNA target sequence for C6 (NM_016704.1,1653-1671).
gagagcgcttcaagagtat

SEQ ID NO: 706410 - DNA, 19 bp, Mus musculus
  siRNA target sequence for C6 (NM_016704.1,1697-1715).
gtgctccatgtcccaataa

SEQ ID NO: 706411 - DNA, 19 bp, Mus musculus
  siRNA target sequence for C6 (NM_016704.1,1791-1809).
caggtccccaggttacaaa

SEQ ID NO: 706412 - DNA, 19 bp, Mus musculus
  siRNA target sequence for C6 (NM_016704.1,1796-1814).
ccccaggttacaaatctga

SEQ ID NO: 706413 - DNA, 19 bp, Mus musculus
  siRNA target sequence for C6 (NM_016704.1,1797-1815).
cccaggttacaaatctgat

SEQ ID NO: 706414 - DNA, 19 bp, Mus musculus
  siRNA target sequence for C6 (NM_016704.1,1855-1873).
gcgtgcaatgctgcttata

SEQ ID NO: 706415 - DNA, 19 bp, Mus musculus
  siRNA target sequence for C6 (NM_016704.1,1864-1882).
gctgcttataggagatcaa

SEQ ID NO: 706416 - DNA, 19 bp, Mus musculus
  siRNA target sequence for C6 (NM_016704.1,1880-1898).
caagaacccgagagtgtaa

SEQ ID NO: 706417 - DNA, 19 bp, Mus musculus
  siRNA target sequence for C6 (NM_016704.1,1883-1901).
gaacccgagagtgtaataa

SEQ ID NO: 706418 - DNA, 19 bp, Mus musculus
  siRNA target sequence for C6 (NM_016704.1,1968-1986).
ctcaataatggaaaatgtt

SEQ ID NO: 706419 - DNA, 19 bp, Mus musculus
  siRNA target sequence for C6 (NM_016704.1,2074-2092).
ctcccagaaaacgcattta

SEQ ID NO: 706420 - DNA, 19 bp, Mus musculus
  siRNA target sequence for C6 (NM_016704.1,2077-2095).
ccagaaaacgcatttacct

SEQ ID NO: 706421 - DNA, 19 bp, Mus musculus
  siRNA target sequence for C6 (NM_016704.1,2153-2171).
gattcacagctgttggatt

SEQ ID NO: 706422 - DNA, 19 bp, Mus musculus
  siRNA target sequence for C6 (NM_016704.1,2162-2180).
ctgttggattccagtactt

SEQ ID NO: 706423 - DNA, 19 bp, Mus musculus
  siRNA target sequence for C6 (NM_016704.1,2164-2182).
gttggattccagtacttga

SEQ ID NO: 706424 - DNA, 19 bp, Mus musculus
  siRNA target sequence for C6 (NM_016704.1,2167-2185).
ggattccagtacttgagat

SEQ ID NO: 706425 - DNA, 19 bp, Mus musculus
  siRNA target sequence for C6 (NM_016704.1,2175-2193).
gtacttgagatgtttacca

SEQ ID NO: 706426 - DNA, 19 bp, Mus musculus
  siRNA target sequence for C6 (NM_016704.1,2381-2399).
ggacacctcccatttcaaa

SEQ ID NO: 706427 - DNA, 19 bp, Mus musculus
  siRNA target sequence for C6 (NM_016704.1,2382-2400).
gacacctcccatttcaaat

SEQ ID NO: 706428 - DNA, 19 bp, Mus musculus
  siRNA target sequence for C6 (NM_016704.1,2387-2405).
ctcccatttcaaattcatt

SEQ ID NO: 706429 - DNA, 19 bp, Mus musculus
  siRNA target sequence for 6330412F12Rik (NM_016736.1,259-277).
gaaatatcttcaagcaaaa

SEQ ID NO: 706430 - DNA, 19 bp, Mus musculus
  siRNA target sequence for 6330412F12Rik (NM_016736.1,311-329).
ctttggaaacctccatata

SEQ ID NO: 706431 - DNA, 19 bp, Mus musculus
  siRNA target sequence for 6330412F12Rik (NM_016736.1,315-333).
ggaaacctccatatactaa

SEQ ID NO: 706432 - DNA, 19 bp, Mus musculus
  siRNA target sequence for 6330412F12Rik (NM_016736.1,357-375).
ccgtaaaggaccttgctaa

SEQ ID NO: 706433 - DNA, 19 bp, Mus musculus
  siRNA target sequence for 6330412F12Rik (NM_016736.1,431-449).
gaaatccgacgcaaagcaa

SEQ ID NO: 706434 - DNA, 19 bp, Mus musculus
  siRNA target sequence for 6330412F12Rik (NM_016736.1,522-540).
ggctccggaagcacgataa

SEQ ID NO: 706435 - DNA, 19 bp, Mus musculus
  siRNA target sequence for 6330412F12Rik (NM_016736.1,526-544).
ccggaagcacgataagaaa

SEQ ID NO: 706436 - DNA, 19 bp, Mus musculus
  siRNA target sequence for 6330412F12Rik (NM_016736.1,527-545).
cggaagcacgataagaaaa

SEQ ID NO: 706437 - DNA, 19 bp, Mus musculus
  siRNA target sequence for 6330412F12Rik (NM_016736.1,579-597).
gagacctgaggtgtcaaat

SEQ ID NO: 706438 - DNA, 19 bp, Mus musculus
  siRNA target sequence for 6330412F12Rik (NM_016736.1,583-601).
cctgaggtgtcaaatagct

SEQ ID NO: 706439 - DNA, 19 bp, Mus musculus
  siRNA target sequence for 6330412F12Rik (NM_016736.1,589-607).
gtgtcaaatagctgaaact

SEQ ID NO: 706440 - DNA, 19 bp, Mus musculus
  siRNA target sequence for 6330412F12Rik (NM_016736.1,634-652).
gatcgtaataaataagaaa

SEQ ID NO: 706441 - DNA, 19 bp, Mus musculus
  siRNA target sequence for 6330412F12Rik (NM_016736.1,867-885).
cggaaacgatgccttactt

SEQ ID NO: 706442 - DNA, 19 bp, Mus musculus
  siRNA target sequence for 6330412F12Rik (NM_016736.1,868-886).
ggaaacgatgccttactta

SEQ ID NO: 706443 - DNA, 19 bp, Mus musculus
  siRNA target sequence for 6330412F12Rik (NM_016736.1,873-891).
cgatgccttacttagacat

SEQ ID NO: 706444 - DNA, 19 bp, Mus musculus
  siRNA target sequence for 6330412F12Rik (NM_016736.1,1025-1043).
ctggacgctgacagatact

SEQ ID NO: 706445 - DNA, 19 bp, Mus musculus
  siRNA target sequence for 6330412F12Rik (NM_016736.1,1028-1046).
gacgctgacagatacttct

SEQ ID NO: 706446 - DNA, 19 bp, Mus musculus
  siRNA target sequence for 6330412F12Rik (NM_016736.1,1132-1150).
gctggaatgccttgatgat

SEQ ID NO: 706447 - DNA, 19 bp, Mus musculus
  siRNA target sequence for 6330412F12Rik (NM_016736.1,1168-1186).
cttggcccagaaatgcttt

SEQ ID NO: 706448 - DNA, 19 bp, Mus musculus
  siRNA target sequence for 6330412F12Rik (NM_016736.1,1211-1229).
cagagactggtccacataa

SEQ ID NO: 706449 - DNA, 19 bp, Mus musculus
  siRNA target sequence for 6330412F12Rik (NM_016736.1,1213-1231).
gagactggtccacataaaa

SEQ ID NO: 706450 - DNA, 19 bp, Mus musculus
  siRNA target sequence for 6330412F12Rik (NM_016736.1,1217-1235).
ctggtccacataaaaggaa

SEQ ID NO: 706451 - DNA, 19 bp, Mus musculus
  siRNA target sequence for 6330412F12Rik (NM_016736.1,1219-1237).
ggtccacataaaaggaaat

SEQ ID NO: 706452 - DNA, 19 bp, Mus musculus
  siRNA target sequence for 6330412F12Rik (NM_016736.1,1222-1240).
ccacataaaaggaaattgt

SEQ ID NO: 706453 - DNA, 19 bp, Mus musculus
  siRNA target sequence for 6330412F12Rik (NM_016736.1,1283-1301).
ggaatccaaaactatcaca

SEQ ID NO: 706454 - DNA, 19 bp, Mus musculus
  siRNA target sequence for 6330412F12Rik (NM_016736.1,1316-1334).
gaagctcgggaatatctca

SEQ ID NO: 706455 - DNA, 19 bp, Mus musculus
  siRNA target sequence for 6330412F12Rik (NM_016736.1,1320-1338).
ctcgggaatatctcaacaa

SEQ ID NO: 706456 - DNA, 19 bp, Mus musculus
  siRNA target sequence for 6330412F12Rik (NM_016736.1,1341-1359).
cacggcagctctttaagga

SEQ ID NO: 706457 - DNA, 19 bp, Mus musculus
  siRNA target sequence for 6330412F12Rik (NM_016736.1,1349-1367).
ctctttaaggagctttaca

SEQ ID NO: 706458 - DNA, 19 bp, Mus musculus
  siRNA target sequence for 6330412F12Rik (NM_016736.1,1374-1392).
catcaaaagttcacaactt

SEQ ID NO: 706459 - DNA, 19 bp, Mus musculus
  siRNA target sequence for 6330412F12Rik (NM_016736.1,1393-1411).
gttacagttgggattcact

SEQ ID NO: 706460 - DNA, 19 bp, Mus musculus
  siRNA target sequence for 6330412F12Rik (NM_016736.1,1535-1553).
cgccgtctggaaaatgtca

SEQ ID NO: 706461 - DNA, 19 bp, Mus musculus
  siRNA target sequence for 6330412F12Rik (NM_016736.1,1679-1697).
gcagaccctgaaaacaata

SEQ ID NO: 706462 - DNA, 19 bp, Mus musculus
  siRNA target sequence for 6330412F12Rik (NM_016736.1,1950-1968).
cggaggctgtcaacgaaat

SEQ ID NO: 706463 - DNA, 19 bp, Mus musculus
  siRNA target sequence for 6330412F12Rik (NM_016736.1,2047-2065).
cttgtcctacgttgaaagt

SEQ ID NO: 706464 - DNA, 19 bp, Mus musculus
  siRNA target sequence for 6330412F12Rik (NM_016736.1,2050-2068).
gtcctacgttgaaagtata

SEQ ID NO: 706465 - DNA, 19 bp, Mus musculus
  siRNA target sequence for 6330412F12Rik (NM_016736.1,2053-2071).
ctacgttgaaagtataagt

SEQ ID NO: 706466 - DNA, 19 bp, Mus musculus
  siRNA target sequence for 6330412F12Rik (NM_016736.1,2056-2074).
cgttgaaagtataagttct

SEQ ID NO: 706467 - DNA, 19 bp, Mus musculus
  siRNA target sequence for 6330412F12Rik (NM_016736.1,2087-2105).
caactgatcagaaataagt

SEQ ID NO: 706468 - DNA, 19 bp, Mus musculus
  siRNA target sequence for 6330412F12Rik (NM_016736.1,2106-2124).
gctacgtttcggctataaa

SEQ ID NO: 706469 - DNA, 19 bp, Mus musculus
  siRNA target sequence for 6330412F12Rik (NM_016736.1,2170-2188).
gcttttcaacgatttttct

SEQ ID NO: 706470 - DNA, 19 bp, Mus musculus
  siRNA target sequence for Stip1 (NM_016737.1,132-150).
gctactctgaggcaattaa

SEQ ID NO: 706471 - DNA, 19 bp, Mus musculus
  siRNA target sequence for Stip1 (NM_016737.1,138-156).
ctgaggcaattaaactaga

SEQ ID NO: 706472 - DNA, 19 bp, Mus musculus
  siRNA target sequence for Stip1 (NM_016737.1,263-281).
gactggggcaagggttatt

SEQ ID NO: 706473 - DNA, 19 bp, Mus musculus
  siRNA target sequence for Stip1 (NM_016737.1,269-287).
ggcaagggttattcaagaa

SEQ ID NO: 706474 - DNA, 19 bp, Mus musculus
  siRNA target sequence for Stip1 (NM_016737.1,270-288).
gcaagggttattcaagaaa

SEQ ID NO: 706475 - DNA, 19 bp, Mus musculus
  siRNA target sequence for Stip1 (NM_016737.1,271-289).
caagggttattcaagaaaa

SEQ ID NO: 706476 - DNA, 19 bp, Mus musculus
  siRNA target sequence for Stip1 (NM_016737.1,274-292).
gggttattcaagaaaagca

SEQ ID NO: 706477 - DNA, 19 bp, Mus musculus
  siRNA target sequence for Stip1 (NM_016737.1,327-345).
ccaaacgaacctatgaaga

SEQ ID NO: 706478 - DNA, 19 bp, Mus musculus
  siRNA target sequence for Stip1 (NM_016737.1,333-351).
gaacctatgaagaaggttt

SEQ ID NO: 706479 - DNA, 19 bp, Mus musculus
  siRNA target sequence for Stip1 (NM_016737.1,435-453).
cattcaacttgcctaatct

SEQ ID NO: 706480 - DNA, 19 bp, Mus musculus
  siRNA target sequence for Stip1 (NM_016737.1,446-464).
cctaatctataccaaaagt

SEQ ID NO: 706481 - DNA, 19 bp, Mus musculus
  siRNA target sequence for Stip1 (NM_016737.1,447-465).
ctaatctataccaaaagtt

SEQ ID NO: 706482 - DNA, 19 bp, Mus musculus
  siRNA target sequence for Stip1 (NM_016737.1,452-470).
ctataccaaaagttggaaa

SEQ ID NO: 706483 - DNA, 19 bp, Mus musculus
  siRNA target sequence for Stip1 (NM_016737.1,508-526).
ctacagggagctcatagaa

SEQ ID NO: 706484 - DNA, 19 bp, Mus musculus
  siRNA target sequence for Stip1 (NM_016737.1,832-850).
gacctacataactaatcaa

SEQ ID NO: 706485 - DNA, 19 bp, Mus musculus
  siRNA target sequence for Stip1 (NM_016737.1,851-869).
gcagctgtgcactttgaga

SEQ ID NO: 706486 - DNA, 19 bp, Mus musculus
  siRNA target sequence for Stip1 (NM_016737.1,866-884).
gagaagggcgactataaca

SEQ ID NO: 706487 - DNA, 19 bp, Mus musculus
  siRNA target sequence for Stip1 (NM_016737.1,868-886).
gaagggcgactataacaaa

SEQ ID NO: 706488 - DNA, 19 bp, Mus musculus
  siRNA target sequence for Stip1 (NM_016737.1,944-962).
cggcagatcgccaaagctt

SEQ ID NO: 706489 - DNA, 19 bp, Mus musculus
  siRNA target sequence for Stip1 (NM_016737.1,945-963).
ggcagatcgccaaagctta

SEQ ID NO: 706490 - DNA, 19 bp, Mus musculus
  siRNA target sequence for Stip1 (NM_016737.1,946-964).
gcagatcgccaaagcttat

SEQ ID NO: 706491 - DNA, 19 bp, Mus musculus
  siRNA target sequence for Stip1 (NM_016737.1,965-983).
gcccgaattggcaattcct

SEQ ID NO: 706492 - DNA, 19 bp, Mus musculus
  siRNA target sequence for Stip1 (NM_016737.1,966-984).
cccgaattggcaattccta

SEQ ID NO: 706493 - DNA, 19 bp, Mus musculus
  siRNA target sequence for Stip1 (NM_016737.1,967-985).
ccgaattggcaattcctat

SEQ ID NO: 706494 - DNA, 19 bp, Mus musculus
  siRNA target sequence for Stip1 (NM_016737.1,968-986).
cgaattggcaattcctatt

SEQ ID NO: 706495 - DNA, 19 bp, Mus musculus
  siRNA target sequence for Stip1 (NM_016737.1,1000-1018).
gtacaaggatgctatacat

SEQ ID NO: 706496 - DNA, 19 bp, Mus musculus
  siRNA target sequence for Stip1 (NM_016737.1,1007-1025).
gatgctatacatttctaca

SEQ ID NO: 706497 - DNA, 19 bp, Mus musculus
  siRNA target sequence for Stip1 (NM_016737.1,1100-1118).
caggagcgcttggcttata

SEQ ID NO: 706498 - DNA, 19 bp, Mus musculus
  siRNA target sequence for Stip1 (NM_016737.1,1103-1121).
gagcgcttggcttatatca

SEQ ID NO: 706499 - DNA, 19 bp, Mus musculus
  siRNA target sequence for Stip1 (NM_016737.1,1333-1351).
cttcatcaagggttataca

SEQ ID NO: 706500 - DNA, 19 bp, Mus musculus
  siRNA target sequence for Stip1 (NM_016737.1,1454-1472).
ggttaccaacgctgtatga

SEQ ID NO: 706501 - DNA, 19 bp, Mus musculus
  siRNA target sequence for Stip1 (NM_016737.1,1455-1473).
gttaccaacgctgtatgat

SEQ ID NO: 706502 - DNA, 19 bp, Mus musculus
  siRNA target sequence for Stip1 (NM_016737.1,1478-1496).
cagtacaacagacatgata

SEQ ID NO: 706503 - DNA, 19 bp, Mus musculus
  siRNA target sequence for Stip1 (NM_016737.1,1603-1621).
ggctctgagcgaacactta

SEQ ID NO: 706504 - DNA, 19 bp, Mus musculus
  siRNA target sequence for Stip1 (NM_016737.1,1604-1622).
gctctgagcgaacacttaa

SEQ ID NO: 706505 - DNA, 19 bp, Mus musculus
  siRNA target sequence for Stip1 (NM_016737.1,1605-1623).
ctctgagcgaacacttaaa

SEQ ID NO: 706506 - DNA, 19 bp, Mus musculus
  siRNA target sequence for Stip1 (NM_016737.1,1618-1636).
cttaaagaatcctgtaata

SEQ ID NO: 706507 - DNA, 19 bp, Mus musculus
  siRNA target sequence for Stip1 (NM_016737.1,1629-1647).
ctgtaatagcgcagaagat

SEQ ID NO: 706508 - DNA, 19 bp, Mus musculus
  siRNA target sequence for Gpiap1 (NM_016739.1,283-301).
cggcgtaatcgacaagaaa

SEQ ID NO: 706509 - DNA, 19 bp, Mus musculus
  siRNA target sequence for Gpiap1 (NM_016739.1,285-303).
gcgtaatcgacaagaaact

SEQ ID NO: 706510 - DNA, 19 bp, Mus musculus
  siRNA target sequence for Gpiap1 (NM_016739.1,286-304).
cgtaatcgacaagaaactt

SEQ ID NO: 706511 - DNA, 19 bp, Mus musculus
  siRNA target sequence for Gpiap1 (NM_016739.1,363-381).
gggaaaggctcaatcaaga

SEQ ID NO: 706512 - DNA, 19 bp, Mus musculus
  siRNA target sequence for Gpiap1 (NM_016739.1,383-401).
cagctggatgccgtatcta

SEQ ID NO: 706513 - DNA, 19 bp, Mus musculus
  siRNA target sequence for Gpiap1 (NM_016739.1,386-404).
ctggatgccgtatctaagt

SEQ ID NO: 706514 - DNA, 19 bp, Mus musculus
  siRNA target sequence for Gpiap1 (NM_016739.1,403-421).
gtaccaggaagtcacaaat

SEQ ID NO: 706515 - DNA, 19 bp, Mus musculus
  siRNA target sequence for Gpiap1 (NM_016739.1,406-424).
ccaggaagtcacaaataat

SEQ ID NO: 706516 - DNA, 19 bp, Mus musculus
  siRNA target sequence for Gpiap1 (NM_016739.1,457-475).
catggcattaagtcaagat

SEQ ID NO: 706517 - DNA, 19 bp, Mus musculus
  siRNA target sequence for Gpiap1 (NM_016739.1,541-559).
gcgcttaaaaactgtactt

SEQ ID NO: 706518 - DNA, 19 bp, Mus musculus
  siRNA target sequence for Gpiap1 (NM_016739.1,562-580).
gttacagtatgtattggat

SEQ ID NO: 706519 - DNA, 19 bp, Mus musculus
  siRNA target sequence for Gpiap1 (NM_016739.1,577-595).
ggataagctgggagatgat

SEQ ID NO: 706520 - DNA, 19 bp, Mus musculus
  siRNA target sequence for Gpiap1 (NM_016739.1,660-678).
cattgctggatgagttcta

SEQ ID NO: 706521 - DNA, 19 bp, Mus musculus
  siRNA target sequence for Gpiap1 (NM_016739.1,692-710).
cctgagcgtgacatgagtt

SEQ ID NO: 706522 - DNA, 19 bp, Mus musculus
  siRNA target sequence for Gpiap1 (NM_016739.1,698-716).
cgtgacatgagtttaaggt

SEQ ID NO: 706523 - DNA, 19 bp, Mus musculus
  siRNA target sequence for Gpiap1 (NM_016739.1,703-721).
catgagtttaaggttaaat

SEQ ID NO: 706524 - DNA, 19 bp, Mus musculus
  siRNA target sequence for Gpiap1 (NM_016739.1,714-732).
ggttaaatgagcagtatga

SEQ ID NO: 706525 - DNA, 19 bp, Mus musculus
  siRNA target sequence for Gpiap1 (NM_016739.1,715-733).
gttaaatgagcagtatgaa

SEQ ID NO: 706526 - DNA, 19 bp, Mus musculus
  siRNA target sequence for Gpiap1 (NM_016739.1,782-800).
gtgtgtggaacaacctata

SEQ ID NO: 706527 - DNA, 19 bp, Mus musculus
  siRNA target sequence for Gpiap1 (NM_016739.1,784-802).
gtgtggaacaacctataaa

SEQ ID NO: 706528 - DNA, 19 bp, Mus musculus
  siRNA target sequence for Gpiap1 (NM_016739.1,792-810).
caacctataaagctctaaa

SEQ ID NO: 706529 - DNA, 19 bp, Mus musculus
  siRNA target sequence for Gpiap1 (NM_016739.1,824-842).
cgtgttttccagtcaaact

SEQ ID NO: 706530 - DNA, 19 bp, Mus musculus
  siRNA target sequence for Gpiap1 (NM_016739.1,832-850).
ccagtcaaactactttgat

SEQ ID NO: 706531 - DNA, 19 bp, Mus musculus
  siRNA target sequence for Gpiap1 (NM_016739.1,833-851).
cagtcaaactactttgata

SEQ ID NO: 706532 - DNA, 19 bp, Mus musculus
  siRNA target sequence for Gpiap1 (NM_016739.1,844-862).
ctttgatagcactcacaat

SEQ ID NO: 706533 - DNA, 19 bp, Mus musculus
  siRNA target sequence for Gpiap1 (NM_016739.1,852-870).
gcactcacaatcatcaaaa

SEQ ID NO: 706534 - DNA, 19 bp, Mus musculus
  siRNA target sequence for Gpiap1 (NM_016739.1,943-961).
gccagcggaagaatacaca

SEQ ID NO: 706535 - DNA, 19 bp, Mus musculus
  siRNA target sequence for Gpiap1 (NM_016739.1,965-983).
caaagtgaggttgaatcaa

SEQ ID NO: 706536 - DNA, 19 bp, Mus musculus
  siRNA target sequence for Gpiap1 (NM_016739.1,973-991).
ggttgaatcaacagagtat

SEQ ID NO: 706537 - DNA, 19 bp, Mus musculus
  siRNA target sequence for Gpiap1 (NM_016739.1,977-995).
gaatcaacagagtatgtca

SEQ ID NO: 706538 - DNA, 19 bp, Mus musculus
  siRNA target sequence for Gpiap1 (NM_016739.1,1064-1082).
gaaacagttgaggttgtaa

SEQ ID NO: 706539 - DNA, 19 bp, Mus musculus
  siRNA target sequence for Gpiap1 (NM_016739.1,1178-1196).
cagcgtgtacaagatctta

SEQ ID NO: 706540 - DNA, 19 bp, Mus musculus
  siRNA target sequence for Gpiap1 (NM_016739.1,1208-1226).
caagggccctataatttca

SEQ ID NO: 706541 - DNA, 19 bp, Mus musculus
  siRNA target sequence for Gpiap1 (NM_016739.1,1212-1230).
ggccctataatttcataca

SEQ ID NO: 706542 - DNA, 19 bp, Mus musculus
  siRNA target sequence for Gpiap1 (NM_016739.1,1261-1279).
gcttgatcctgccattgta

SEQ ID NO: 706543 - DNA, 19 bp, Mus musculus
  siRNA target sequence for Gpiap1 (NM_016739.1,1262-1280).
cttgatcctgccattgtat

SEQ ID NO: 706544 - DNA, 19 bp, Mus musculus
  siRNA target sequence for Gpiap1 (NM_016739.1,1332-1350).
gccctcaggttcattctga

SEQ ID NO: 706545 - DNA, 19 bp, Mus musculus
  siRNA target sequence for Gpiap1 (NM_016739.1,1333-1351).
ccctcaggttcattctgaa

SEQ ID NO: 706546 - DNA, 19 bp, Mus musculus
  siRNA target sequence for Gpiap1 (NM_016739.1,1334-1352).
cctcaggttcattctgaat

SEQ ID NO: 706547 - DNA, 19 bp, Mus musculus
  siRNA target sequence for Gpiap1 (NM_016739.1,1353-1371).
ctagacttgcccaatctaa

SEQ ID NO: 706548 - DNA, 19 bp, Mus musculus
  siRNA target sequence for Gpiap1 (NM_016739.1,1356-1374).
gacttgcccaatctaatca

SEQ ID NO: 706549 - DNA, 19 bp, Mus musculus
  siRNA target sequence for Gpiap1 (NM_016739.1,1592-1610).
gctgggacaagtaaacctt

SEQ ID NO: 706550 - DNA, 19 bp, Mus musculus
  siRNA target sequence for Gpiap1 (NM_016739.1,1593-1611).
ctgggacaagtaaaccttt

SEQ ID NO: 706551 - DNA, 19 bp, Mus musculus
  siRNA target sequence for Gpiap1 (NM_016739.1,1612-1630).
gcacagcagtggaatcaat

SEQ ID NO: 706552 - DNA, 19 bp, Mus musculus
  siRNA target sequence for Gpiap1 (NM_016739.1,1615-1633).
cagcagtggaatcaatgta

SEQ ID NO: 706553 - DNA, 19 bp, Mus musculus
  siRNA target sequence for Gpiap1 (NM_016739.1,1617-1635).
gcagtggaatcaatgtaaa

SEQ ID NO: 706554 - DNA, 19 bp, Mus musculus
  siRNA target sequence for Gpiap1 (NM_016739.1,1658-1676).
caaacggtgttcaatatga

SEQ ID NO: 706555 - DNA, 19 bp, Mus musculus
  siRNA target sequence for Gpiap1 (NM_016739.1,1727-1745).
cagtaccaggccacttata

SEQ ID NO: 706556 - DNA, 19 bp, Mus musculus
  siRNA target sequence for Gpiap1 (NM_016739.1,1738-1756).
cacttataaccagagtttt

SEQ ID NO: 706557 - DNA, 19 bp, Mus musculus
  siRNA target sequence for Gpiap1 (NM_016739.1,1958-1976).
ggtgccagaggcttgatga

SEQ ID NO: 706558 - DNA, 19 bp, Mus musculus
  siRNA target sequence for Gpiap1 (NM_016739.1,1959-1977).
gtgccagaggcttgatgaa

SEQ ID NO: 706559 - DNA, 19 bp, Mus musculus
  siRNA target sequence for Gpiap1 (NM_016739.1,1965-1983).
gaggcttgatgaatggata

SEQ ID NO: 706560 - DNA, 19 bp, Mus musculus
  siRNA target sequence for Gpiap1 (NM_016739.1,1990-2008).
ccctgccaatggatttaga

SEQ ID NO: 706561 - DNA, 19 bp, Mus musculus
  siRNA target sequence for Gpiap1 (NM_016739.1,2044-2062).
cactccaaacagtggttat

SEQ ID NO: 706562 - DNA, 19 bp, Mus musculus
  siRNA target sequence for Gpiap1 (NM_016739.1,2100-2118).
gttaccagcgggatggata

SEQ ID NO: 706563 - DNA, 19 bp, Mus musculus
  siRNA target sequence for Gpiap1 (NM_016739.1,2114-2132).
ggatatcagcagaatttca

SEQ ID NO: 706564 - DNA, 19 bp, Mus musculus
  siRNA target sequence for Gpiap1 (NM_016739.1,2115-2133).
gatatcagcagaatttcaa

SEQ ID NO: 706565 - DNA, 19 bp, Mus musculus
  siRNA target sequence for Gpiap1 (NM_016739.1,2204-2222).
gggatgccgcaaatgaaca

SEQ ID NO: 706566 - DNA, 19 bp, Mus musculus
  siRNA target sequence for Gpiap1 (NM_016739.1,2218-2236).
gaacactcagcaagtgaat

SEQ ID NO: 706567 - DNA, 19 bp, Mus musculus
  siRNA target sequence for Ugalt2 (NM_016752.1,267-285).
gtgtgatcaatgctatgtt

SEQ ID NO: 706568 - DNA, 19 bp, Mus musculus
  siRNA target sequence for Ugalt2 (NM_016752.1,425-443).
caggttctcggtaaatcct

SEQ ID NO: 706569 - DNA, 19 bp, Mus musculus
  siRNA target sequence for Ugalt2 (NM_016752.1,470-488).
ggagtgacgctcttgaaga

SEQ ID NO: 706570 - DNA, 19 bp, Mus musculus
  siRNA target sequence for Ugalt2 (NM_016752.1,471-489).
gagtgacgctcttgaagaa

SEQ ID NO: 706571 - DNA, 19 bp, Mus musculus
  siRNA target sequence for Ugalt2 (NM_016752.1,504-522).
ccaagtacctgtgtgtatt

SEQ ID NO: 706572 - DNA, 19 bp, Mus musculus
  siRNA target sequence for Ugalt2 (NM_016752.1,648-666).
gtgtttcccaggaccatat

SEQ ID NO: 706573 - DNA, 19 bp, Mus musculus
  siRNA target sequence for Ugalt2 (NM_016752.1,684-702).
caggttccaaccacatgat

SEQ ID NO: 706574 - DNA, 19 bp, Mus musculus
  siRNA target sequence for Ugalt2 (NM_016752.1,687-705).
gttccaaccacatgatgtt

SEQ ID NO: 706575 - DNA, 19 bp, Mus musculus
  siRNA target sequence for Ugalt2 (NM_016752.1,690-708).
ccaaccacatgatgttgaa

SEQ ID NO: 706576 - DNA, 19 bp, Mus musculus
  siRNA target sequence for Ugalt2 (NM_016752.1,792-810).
ggtacccgaccatcatcta

SEQ ID NO: 706577 - DNA, 19 bp, Mus musculus
  siRNA target sequence for Ugalt2 (NM_016752.1,793-811).
gtacccgaccatcatctat

SEQ ID NO: 706578 - DNA, 19 bp, Mus musculus
  siRNA target sequence for Ugalt2 (NM_016752.1,797-815).
ccgaccatcatctataaca

SEQ ID NO: 706579 - DNA, 19 bp, Mus musculus
  siRNA target sequence for Ugalt2 (NM_016752.1,839-857).
gccttgggtcagagcttta

SEQ ID NO: 706580 - DNA, 19 bp, Mus musculus
  siRNA target sequence for Ugalt2 (NM_016752.1,840-858).
ccttgggtcagagctttat

SEQ ID NO: 706581 - DNA, 19 bp, Mus musculus
  siRNA target sequence for Ugalt2 (NM_016752.1,1000-1018).
cctgggtctcggtcttgat

SEQ ID NO: 706582 - DNA, 19 bp, Mus musculus
  siRNA target sequence for Ugalt2 (NM_016752.1,1009-1027).
cggtcttgatgccaagttt

SEQ ID NO: 706583 - DNA, 19 bp, Mus musculus
  siRNA target sequence for Lxn (NM_016753.2,243-261).
gcggagaactgcattaact

SEQ ID NO: 706584 - DNA, 19 bp, Mus musculus
  siRNA target sequence for Lxn (NM_016753.2,244-262).
cggagaactgcattaacta

SEQ ID NO: 706585 - DNA, 19 bp, Mus musculus
  siRNA target sequence for Lxn (NM_016753.2,339-357).
gggcacaagtaccatctta

SEQ ID NO: 706586 - DNA, 19 bp, Mus musculus
  siRNA target sequence for Lxn (NM_016753.2,340-358).
ggcacaagtaccatcttaa

SEQ ID NO: 706587 - DNA, 19 bp, Mus musculus
  siRNA target sequence for Lxn (NM_016753.2,342-360).
cacaagtaccatcttaagt

SEQ ID NO: 706588 - DNA, 19 bp, Mus musculus
  siRNA target sequence for Lxn (NM_016753.2,344-362).
caagtaccatcttaagttt

SEQ ID NO: 706589 - DNA, 19 bp, Mus musculus
  siRNA target sequence for Lxn (NM_016753.2,366-384).
gtggaagaaattatccaaa

SEQ ID NO: 706590 - DNA, 19 bp, Mus musculus
  siRNA target sequence for Lxn (NM_016753.2,398-416).
gaactgcacagctgaagtt

SEQ ID NO: 706591 - DNA, 19 bp, Mus musculus
  siRNA target sequence for Lxn (NM_016753.2,403-421).
gcacagctgaagttcttta

SEQ ID NO: 706592 - DNA, 19 bp, Mus musculus
  siRNA target sequence for Lxn (NM_016753.2,554-572).
ggacatcccagacaatttt

SEQ ID NO: 706593 - DNA, 19 bp, Mus musculus
  siRNA target sequence for Lxn (NM_016753.2,557-575).
catcccagacaattttgga

SEQ ID NO: 706594 - DNA, 19 bp, Mus musculus
  siRNA target sequence for Lxn (NM_016753.2,564-582).
gacaattttggaaatgtgt

SEQ ID NO: 706595 - DNA, 19 bp, Mus musculus
  siRNA target sequence for Lxn (NM_016753.2,616-634).
gggtcgcctgcggttatgt

SEQ ID NO: 706596 - DNA, 19 bp, Mus musculus
  siRNA target sequence for Lxn (NM_016753.2,617-635).
ggtcgcctgcggttatgta

SEQ ID NO: 706597 - DNA, 19 bp, Mus musculus
  siRNA target sequence for Lxn (NM_016753.2,618-636).
gtcgcctgcggttatgtaa

SEQ ID NO: 706598 - DNA, 19 bp, Mus musculus
  siRNA target sequence for Lxn (NM_016753.2,621-639).
gcctgcggttatgtaatgt

SEQ ID NO: 706599 - DNA, 19 bp, Mus musculus
  siRNA target sequence for Lxn (NM_016753.2,633-651).
gtaatgtggcagaattcga

SEQ ID NO: 706600 - DNA, 19 bp, Mus musculus
  siRNA target sequence for Lxn (NM_016753.2,657-675).
gacacatggtataaaatgt

SEQ ID NO: 706601 - DNA, 19 bp, Mus musculus
  siRNA target sequence for Lxn (NM_016753.2,725-743).
gttagattacaccattcta

SEQ ID NO: 706602 - DNA, 19 bp, Mus musculus
  siRNA target sequence for Lxn (NM_016753.2,741-759).
ctactccacgacattgcat

SEQ ID NO: 706603 - DNA, 19 bp, Mus musculus
  siRNA target sequence for Lxn (NM_016753.2,802-820).
cacagtacggcacaaaagt

SEQ ID NO: 706604 - DNA, 19 bp, Mus musculus
  siRNA target sequence for Lxn (NM_016753.2,804-822).
cagtacggcacaaaagtaa

SEQ ID NO: 706605 - DNA, 19 bp, Mus musculus
  siRNA target sequence for Lxn (NM_016753.2,806-824).
gtacggcacaaaagtaaaa

SEQ ID NO: 706606 - DNA, 19 bp, Mus musculus
  siRNA target sequence for Rap2ip (NM_016759.1,36-54).
ggggctgccctccaagaaa

SEQ ID NO: 706607 - DNA, 19 bp, Mus musculus
  siRNA target sequence for Rap2ip (NM_016759.1,161-179).
cttccgaggagtttgttaa

SEQ ID NO: 706608 - DNA, 19 bp, Mus musculus
  siRNA target sequence for Rap2ip (NM_016759.1,164-182).
ccgaggagtttgttaattt

SEQ ID NO: 706609 - DNA, 19 bp, Mus musculus
  siRNA target sequence for Rap2ip (NM_016759.1,272-290).
ggggcttctgggactacat

SEQ ID NO: 706610 - DNA, 19 bp, Mus musculus
  siRNA target sequence for Rap2ip (NM_016759.1,452-470).
ctaccagacggttctatga

SEQ ID NO: 706611 - DNA, 19 bp, Mus musculus
  siRNA target sequence for Rap2ip (NM_016759.1,554-572).
gtctaaagggcgaagttct

SEQ ID NO: 706612 - DNA, 19 bp, Mus musculus
  siRNA target sequence for Rap2ip (NM_016759.1,584-602).
caccggtggtcatcgatta

SEQ ID NO: 706613 - DNA, 19 bp, Mus musculus
  siRNA target sequence for Rap2ip (NM_016759.1,586-604).
ccggtggtcatcgattaca

SEQ ID NO: 706614 - DNA, 19 bp, Mus musculus
  siRNA target sequence for Rap2ip (NM_016759.1,588-606).
ggtggtcatcgattacaca

SEQ ID NO: 706615 - DNA, 19 bp, Mus musculus
  siRNA target sequence for Rap2ip (NM_016759.1,598-616).
gattacacaccctacctaa

SEQ ID NO: 706616 - DNA, 19 bp, Mus musculus
  siRNA target sequence for Rap2ip (NM_016759.1,733-751).
gacagttggtacaacaagt

SEQ ID NO: 706617 - DNA, 19 bp, Mus musculus
  siRNA target sequence for Rap2ip (NM_016759.1,1035-1053).
ctccctgagcacacttcat

SEQ ID NO: 706618 - DNA, 19 bp, Mus musculus
  siRNA target sequence for Rap2ip (NM_016759.1,1067-1085).
ccagcaactccaagctata

SEQ ID NO: 706619 - DNA, 19 bp, Mus musculus
  siRNA target sequence for Rap2ip (NM_016759.1,1263-1281).
gtccctggcaagcttcaaa

SEQ ID NO: 706620 - DNA, 19 bp, Mus musculus
  siRNA target sequence for Kifc1 (NM_016761.1,908-926).
cctctcacgatctgatgat

SEQ ID NO: 706621 - DNA, 19 bp, Mus musculus
  siRNA target sequence for Kifc1 (NM_016761.1,1863-1881).
gctcaggctaataagaagt

SEQ ID NO: 706622 - DNA, 19 bp, Mus musculus
  siRNA target sequence for Matn2 (NM_016762.1,839-857).
ggtcaggtggacctgaata

SEQ ID NO: 706623 - DNA, 19 bp, Mus musculus
  siRNA target sequence for Matn2 (NM_016762.1,844-862).
ggtggacctgaatacacta

SEQ ID NO: 706624 - DNA, 19 bp, Mus musculus
  siRNA target sequence for Matn2 (NM_016762.1,845-863).
gtggacctgaatacactaa

SEQ ID NO: 706625 - DNA, 19 bp, Mus musculus
  siRNA target sequence for Matn2 (NM_016762.1,909-927).
ccaatttcagccagattga

SEQ ID NO: 706626 - DNA, 19 bp, Mus musculus
  siRNA target sequence for Matn2 (NM_016762.1,975-993).
gcagcgtcttggaacacaa

SEQ ID NO: 706627 - DNA, 19 bp, Mus musculus
  siRNA target sequence for Matn2 (NM_016762.1,1039-1057).
gtgcaagcaagggtacatt

SEQ ID NO: 706628 - DNA, 19 bp, Mus musculus
  siRNA target sequence for Matn2 (NM_016762.1,1041-1059).
gcaagcaagggtacattct

SEQ ID NO: 706629 - DNA, 19 bp, Mus musculus
  siRNA target sequence for Matn2 (NM_016762.1,1189-1207).
ggacgggaagcgatgtaca

SEQ ID NO: 706630 - DNA, 19 bp, Mus musculus
  siRNA target sequence for Matn2 (NM_016762.1,1285-1303).
gtgccacgagggatttgct

SEQ ID NO: 706631 - DNA, 19 bp, Mus musculus
  siRNA target sequence for Matn2 (NM_016762.1,1292-1310).
gagggatttgctcttaaca

SEQ ID NO: 706632 - DNA, 19 bp, Mus musculus
  siRNA target sequence for Matn2 (NM_016762.1,1301-1319).
gctcttaacagcgataaga

SEQ ID NO: 706633 - DNA, 19 bp, Mus musculus
  siRNA target sequence for Matn2 (NM_016762.1,1302-1320).
ctcttaacagcgataagaa

SEQ ID NO: 706634 - DNA, 19 bp, Mus musculus
  siRNA target sequence for Matn2 (NM_016762.1,1304-1322).
cttaacagcgataagaaaa

SEQ ID NO: 706635 - DNA, 19 bp, Mus musculus
  siRNA target sequence for Matn2 (NM_016762.1,1323-1341).
catgctcaaagattgacta

SEQ ID NO: 706636 - DNA, 19 bp, Mus musculus
  siRNA target sequence for Matn2 (NM_016762.1,1327-1345).
ctcaaagattgactattgt

SEQ ID NO: 706637 - DNA, 19 bp, Mus musculus
  siRNA target sequence for Matn2 (NM_016762.1,1692-1710).
cctgctccagggcagatta

SEQ ID NO: 706638 - DNA, 19 bp, Mus musculus
  siRNA target sequence for Matn2 (NM_016762.1,1900-1918).
gtgctttgaggggtacatt

SEQ ID NO: 706639 - DNA, 19 bp, Mus musculus
  siRNA target sequence for Matn2 (NM_016762.1,1903-1921).
ctttgaggggtacattctt

SEQ ID NO: 706640 - DNA, 19 bp, Mus musculus
  siRNA target sequence for Matn2 (NM_016762.1,2177-2195).
ggaaagcactgcaagagat

SEQ ID NO: 706641 - DNA, 19 bp, Mus musculus
  siRNA target sequence for Matn2 (NM_016762.1,2208-2226).
caattgacctggtctttgt

SEQ ID NO: 706642 - DNA, 19 bp, Mus musculus
  siRNA target sequence for Matn2 (NM_016762.1,2282-2300).
gtcactggaatcatagatt

SEQ ID NO: 706643 - DNA, 19 bp, Mus musculus
  siRNA target sequence for Matn2 (NM_016762.1,2286-2304).
ctggaatcatagattcctt

SEQ ID NO: 706644 - DNA, 19 bp, Mus musculus
  siRNA target sequence for Matn2 (NM_016762.1,2412-2430).
ccgtgacccacatgaaata

SEQ ID NO: 706645 - DNA, 19 bp, Mus musculus
  siRNA target sequence for Matn2 (NM_016762.1,2414-2432).
gtgacccacatgaaataca

SEQ ID NO: 706646 - DNA, 19 bp, Mus musculus
  siRNA target sequence for Matn2 (NM_016762.1,2434-2452).
gggcaaaggctctatgact

SEQ ID NO: 706647 - DNA, 19 bp, Mus musculus
  siRNA target sequence for Matn2 (NM_016762.1,2453-2471).
gggctggccctgaaacaca

SEQ ID NO: 706648 - DNA, 19 bp, Mus musculus
  siRNA target sequence for Matn2 (NM_016762.1,2468-2486).
cacatgtttgagagaagtt

SEQ ID NO: 706649 - DNA, 19 bp, Mus musculus
  siRNA target sequence for Matn2 (NM_016762.1,2556-2574).
gacgggctcaggatgatgt

SEQ ID NO: 706650 - DNA, 19 bp, Mus musculus
  siRNA target sequence for Matn2 (NM_016762.1,2600-2618).
gccaatggtatcactatgt

SEQ ID NO: 706651 - DNA, 19 bp, Mus musculus
  siRNA target sequence for Matn2 (NM_016762.1,2667-2685).
cctctgagcccattgacaa

SEQ ID NO: 706652 - DNA, 19 bp, Mus musculus
  siRNA target sequence for Matn2 (NM_016762.1,2713-2731).
cacaatgggcgaaataagt

SEQ ID NO: 706653 - DNA, 19 bp, Mus musculus
  siRNA target sequence for Matn2 (NM_016762.1,2715-2733).
caatgggcgaaataagtga

SEQ ID NO: 706654 - DNA, 19 bp, Mus musculus
  siRNA target sequence for Matn2 (NM_016762.1,2835-2853).
ctgagccagtcaccataaa

SEQ ID NO: 706655 - DNA, 19 bp, Mus musculus
  siRNA target sequence for Matn2 (NM_016762.1,2921-2939).
ctttcacggtctacacaaa

SEQ ID NO: 706656 - DNA, 19 bp, Mus musculus
  siRNA target sequence for Matn2 (NM_016762.1,2925-2943).
cacggtctacacaaaaact

SEQ ID NO: 706657 - DNA, 19 bp, Mus musculus
  siRNA target sequence for Matn2 (NM_016762.1,2927-2945).
cggtctacacaaaaacttt

SEQ ID NO: 706658 - DNA, 19 bp, Mus musculus
  siRNA target sequence for Sultn (NM_016771.1,126-144).
gggagttagtggatgttga

SEQ ID NO: 706659 - DNA, 19 bp, Mus musculus
  siRNA target sequence for Sultn (NM_016771.1,143-161).
gaaggtatccctctctttt

SEQ ID NO: 706660 - DNA, 19 bp, Mus musculus
  siRNA target sequence for Sultn (NM_016771.1,207-225).
ggcctgatgacattttgat

SEQ ID NO: 706661 - DNA, 19 bp, Mus musculus
  siRNA target sequence for Sultn (NM_016771.1,209-227).
cctgatgacattttgatct

SEQ ID NO: 706662 - DNA, 19 bp, Mus musculus
  siRNA target sequence for Sultn (NM_016771.1,217-235).
cattttgatctccacatat

SEQ ID NO: 706663 - DNA, 19 bp, Mus musculus
  siRNA target sequence for Sultn (NM_016771.1,249-267).
caacttgggtcagtgaaat

SEQ ID NO: 706664 - DNA, 19 bp, Mus musculus
  siRNA target sequence for Sultn (NM_016771.1,261-279).
gtgaaatactggatttgat

SEQ ID NO: 706665 - DNA, 19 bp, Mus musculus
  siRNA target sequence for Sultn (NM_016771.1,263-281).
gaaatactggatttgatct

SEQ ID NO: 706666 - DNA, 19 bp, Mus musculus
  siRNA target sequence for Sultn (NM_016771.1,271-289).
ggatttgatctacaacaat

SEQ ID NO: 706667 - DNA, 19 bp, Mus musculus
  siRNA target sequence for Sultn (NM_016771.1,290-308).
ggggatgcagagaaatgta

SEQ ID NO: 706668 - DNA, 19 bp, Mus musculus
  siRNA target sequence for Sultn (NM_016771.1,291-309).
gggatgcagagaaatgtaa

SEQ ID NO: 706669 - DNA, 19 bp, Mus musculus
  siRNA target sequence for Sultn (NM_016771.1,306-324).
gtaaaagggatgcaatcta

SEQ ID NO: 706670 - DNA, 19 bp, Mus musculus
  siRNA target sequence for Sultn (NM_016771.1,374-392).
gttgaaatgctgaacaaca

SEQ ID NO: 706671 - DNA, 19 bp, Mus musculus
  siRNA target sequence for Sultn (NM_016771.1,391-409).
catgccgtctcctcgaata

SEQ ID NO: 706672 - DNA, 19 bp, Mus musculus
  siRNA target sequence for Sultn (NM_016771.1,396-414).
cgtctcctcgaatagtgaa

SEQ ID NO: 706673 - DNA, 19 bp, Mus musculus
  siRNA target sequence for Sultn (NM_016771.1,397-415).
gtctcctcgaatagtgaaa

SEQ ID NO: 706674 - DNA, 19 bp, Mus musculus
  siRNA target sequence for Sultn (NM_016771.1,402-420).
ctcgaatagtgaaaacaca

SEQ ID NO: 706675 - DNA, 19 bp, Mus musculus
  siRNA target sequence for Sultn (NM_016771.1,481-499).
ggcacggaatgccaaagat

SEQ ID NO: 706676 - DNA, 19 bp, Mus musculus
  siRNA target sequence for Sultn (NM_016771.1,491-509).
gccaaagatgtggttgttt

SEQ ID NO: 706677 - DNA, 19 bp, Mus musculus
  siRNA target sequence for Sultn (NM_016771.1,656-674).
cggatcctttacctgtttt

SEQ ID NO: 706678 - DNA, 19 bp, Mus musculus
  siRNA target sequence for Sultn (NM_016771.1,737-755).
gacataccagaagaaattt

SEQ ID NO: 706679 - DNA, 19 bp, Mus musculus
  siRNA target sequence for Sultn (NM_016771.1,767-785).
ctctaccatagctctttca

SEQ ID NO: 706680 - DNA, 19 bp, Mus musculus
  siRNA target sequence for Sultn (NM_016771.1,769-787).
ctaccatagctctttcagt

SEQ ID NO: 706681 - DNA, 19 bp, Mus musculus
  siRNA target sequence for Sultn (NM_016771.1,773-791).
catagctctttcagtgtaa

SEQ ID NO: 706682 - DNA, 19 bp, Mus musculus
  siRNA target sequence for Sultn (NM_016771.1,796-814).
ggagaatcctagtgcaaat

SEQ ID NO: 706683 - DNA, 19 bp, Mus musculus
  siRNA target sequence for Sultn (NM_016771.1,797-815).
gagaatcctagtgcaaatt

SEQ ID NO: 706684 - DNA, 19 bp, Mus musculus
  siRNA target sequence for Sultn (NM_016771.1,803-821).
cctagtgcaaattacacta

SEQ ID NO: 706685 - DNA, 19 bp, Mus musculus
  siRNA target sequence for Sultn (NM_016771.1,807-825).
gtgcaaattacactactat

SEQ ID NO: 706686 - DNA, 19 bp, Mus musculus
  siRNA target sequence for Sultn (NM_016771.1,873-891).
gaatttcaggcgattggaa

SEQ ID NO: 706687 - DNA, 19 bp, Mus musculus
  siRNA target sequence for Sultn (NM_016771.1,882-900).
gcgattggaagaatcagtt

SEQ ID NO: 706688 - DNA, 19 bp, Mus musculus
  siRNA target sequence for Sultn (NM_016771.1,905-923).
gtagcccagtatgagaaat

SEQ ID NO: 706689 - DNA, 19 bp, Mus musculus
  siRNA target sequence for Mybbp1a (NM_016776.2,98-116).
gcgagttcttggacttctt

SEQ ID NO: 706690 - DNA, 19 bp, Mus musculus
  siRNA target sequence for Mybbp1a (NM_016776.2,183-201).
gcgcacaaggcccaatgat

SEQ ID NO: 706691 - DNA, 19 bp, Mus musculus
  siRNA target sequence for Mybbp1a (NM_016776.2,184-202).
cgcacaaggcccaatgatt

SEQ ID NO: 706692 - DNA, 19 bp, Mus musculus
  siRNA target sequence for Mybbp1a (NM_016776.2,194-212).
ccaatgattcggagatgaa

SEQ ID NO: 706693 - DNA, 19 bp, Mus musculus
  siRNA target sequence for Mybbp1a (NM_016776.2,219-237).
cctgaagcgcctaatcact

SEQ ID NO: 706694 - DNA, 19 bp, Mus musculus
  siRNA target sequence for Mybbp1a (NM_016776.2,333-351).
cctggatcagatacaagaa

SEQ ID NO: 706695 - DNA, 19 bp, Mus musculus
  siRNA target sequence for Mybbp1a (NM_016776.2,337-355).
gatcagatacaagaaaaat

SEQ ID NO: 706696 - DNA, 19 bp, Mus musculus
  siRNA target sequence for Mybbp1a (NM_016776.2,359-377).
gcctacaagccatgaacaa

SEQ ID NO: 706697 - DNA, 19 bp, Mus musculus
  siRNA target sequence for Mybbp1a (NM_016776.2,368-386).
ccatgaacaaggcaatgat

SEQ ID NO: 706698 - DNA, 19 bp, Mus musculus
  siRNA target sequence for Mybbp1a (NM_016776.2,416-434).
gagtgctagccctctttca

SEQ ID NO: 706699 - DNA, 19 bp, Mus musculus
  siRNA target sequence for Mybbp1a (NM_016776.2,418-436).
gtgctagccctctttcagt

SEQ ID NO: 706700 - DNA, 19 bp, Mus musculus
  siRNA target sequence for Mybbp1a (NM_016776.2,598-616).
gtcctcaagggtaacatga

SEQ ID NO: 706701 - DNA, 19 bp, Mus musculus
  siRNA target sequence for Mybbp1a (NM_016776.2,600-618).
cctcaagggtaacatgaaa

SEQ ID NO: 706702 - DNA, 19 bp, Mus musculus
  siRNA target sequence for Mybbp1a (NM_016776.2,711-729).
cctgttctcagaagacaat

SEQ ID NO: 706703 - DNA, 19 bp, Mus musculus
  siRNA target sequence for Mybbp1a (NM_016776.2,1002-1020).
ggagaacatggttatttct

SEQ ID NO: 706704 - DNA, 19 bp, Mus musculus
  siRNA target sequence for Mybbp1a (NM_016776.2,1003-1021).
gagaacatggttatttcta

SEQ ID NO: 706705 - DNA, 19 bp, Mus musculus
  siRNA target sequence for Mybbp1a (NM_016776.2,1027-1045).
caaaacctatttaagatca

SEQ ID NO: 706706 - DNA, 19 bp, Mus musculus
  siRNA target sequence for Mybbp1a (NM_016776.2,1099-1117).
cctaagcggcagttgacta

SEQ ID NO: 706707 - DNA, 19 bp, Mus musculus
  siRNA target sequence for Mybbp1a (NM_016776.2,1100-1118).
ctaagcggcagttgactat

SEQ ID NO: 706708 - DNA, 19 bp, Mus musculus
  siRNA target sequence for Mybbp1a (NM_016776.2,1175-1193).
ggcgtgtcacgcggttttt

SEQ ID NO: 706709 - DNA, 19 bp, Mus musculus
  siRNA target sequence for Mybbp1a (NM_016776.2,1177-1195).
cgtgtcacgcggtttttga

SEQ ID NO: 706710 - DNA, 19 bp, Mus musculus
  siRNA target sequence for Mybbp1a (NM_016776.2,1178-1196).
gtgtcacgcggtttttgaa

SEQ ID NO: 706711 - DNA, 19 bp, Mus musculus
  siRNA target sequence for Mybbp1a (NM_016776.2,1223-1241).
cctggttgcgggacatgtt

SEQ ID NO: 706712 - DNA, 19 bp, Mus musculus
  siRNA target sequence for Mybbp1a (NM_016776.2,1523-1541).
gcaaccgtggggtctttgt

SEQ ID NO: 706713 - DNA, 19 bp, Mus musculus
  siRNA target sequence for Mybbp1a (NM_016776.2,1625-1643).
cttaccgcctggttcagtt

SEQ ID NO: 706714 - DNA, 19 bp, Mus musculus
  siRNA target sequence for Mybbp1a (NM_016776.2,1659-1677).
gaaccataaccgcaatgta

SEQ ID NO: 706715 - DNA, 19 bp, Mus musculus
  siRNA target sequence for Mybbp1a (NM_016776.2,2002-2020).
caggtggtccggagtgtat

SEQ ID NO: 706716 - DNA, 19 bp, Mus musculus
  siRNA target sequence for Mybbp1a (NM_016776.2,2004-2022).
ggtggtccggagtgtattt

SEQ ID NO: 706717 - DNA, 19 bp, Mus musculus
  siRNA target sequence for Mybbp1a (NM_016776.2,2007-2025).
ggtccggagtgtatttggt

SEQ ID NO: 706718 - DNA, 19 bp, Mus musculus
  siRNA target sequence for Mybbp1a (NM_016776.2,2048-2066).
cacgttgtctgcagctaat

SEQ ID NO: 706719 - DNA, 19 bp, Mus musculus
  siRNA target sequence for Mybbp1a (NM_016776.2,2051-2069).
gttgtctgcagctaatcct

SEQ ID NO: 706720 - DNA, 19 bp, Mus musculus
  siRNA target sequence for Mybbp1a (NM_016776.2,2160-2178).
ggacgaagactcagataat

SEQ ID NO: 706721 - DNA, 19 bp, Mus musculus
  siRNA target sequence for Mybbp1a (NM_016776.2,2171-2189).
cagataatgaggacaataa

SEQ ID NO: 706722 - DNA, 19 bp, Mus musculus
  siRNA target sequence for Mybbp1a (NM_016776.2,2264-2282).
caggcttccgtcaacagtt

SEQ ID NO: 706723 - DNA, 19 bp, Mus musculus
  siRNA target sequence for Mybbp1a (NM_016776.2,2267-2285).
gcttccgtcaacagttgat

SEQ ID NO: 706724 - DNA, 19 bp, Mus musculus
  siRNA target sequence for Mybbp1a (NM_016776.2,2283-2301).
gatggaagtgttaaaagct

SEQ ID NO: 706725 - DNA, 19 bp, Mus musculus
  siRNA target sequence for Mybbp1a (NM_016776.2,2379-2397).
cctggccagcctatttaaa

SEQ ID NO: 706726 - DNA, 19 bp, Mus musculus
  siRNA target sequence for Mybbp1a (NM_016776.2,2464-2482).
cgacgggacttccaaatca

SEQ ID NO: 706727 - DNA, 19 bp, Mus musculus
  siRNA target sequence for Mybbp1a (NM_016776.2,2755-2773).
gcctctgtcgccctatact

SEQ ID NO: 706728 - DNA, 19 bp, Mus musculus
  siRNA target sequence for Mybbp1a (NM_016776.2,2756-2774).
cctctgtcgccctatacta

SEQ ID NO: 706729 - DNA, 19 bp, Mus musculus
  siRNA target sequence for Mybbp1a (NM_016776.2,2757-2775).
ctctgtcgccctatactat

SEQ ID NO: 706730 - DNA, 19 bp, Mus musculus
  siRNA target sequence for Mybbp1a (NM_016776.2,2759-2777).
ctgtcgccctatactattt

SEQ ID NO: 706731 - DNA, 19 bp, Mus musculus
  siRNA target sequence for Mybbp1a (NM_016776.2,2761-2779).
gtcgccctatactatttca

SEQ ID NO: 706732 - DNA, 19 bp, Mus musculus
  siRNA target sequence for Mybbp1a (NM_016776.2,2763-2781).
cgccctatactatttcaat

SEQ ID NO: 706733 - DNA, 19 bp, Mus musculus
  siRNA target sequence for Mybbp1a (NM_016776.2,2806-2824).
ctcaagggcaacaccaata

SEQ ID NO: 706734 - DNA, 19 bp, Mus musculus
  siRNA target sequence for Mybbp1a (NM_016776.2,2884-2902).
gctgctaactgcttagact

SEQ ID NO: 706735 - DNA, 19 bp, Mus musculus
  siRNA target sequence for Mybbp1a (NM_016776.2,2885-2903).
ctgctaactgcttagactt

SEQ ID NO: 706736 - DNA, 19 bp, Mus musculus
  siRNA target sequence for Mybbp1a (NM_016776.2,3002-3020).
gatacccagtgatctgtaa

SEQ ID NO: 706737 - DNA, 19 bp, Mus musculus
  siRNA target sequence for Mybbp1a (NM_016776.2,3119-3137).
gagagctgagagtctgttt

SEQ ID NO: 706738 - DNA, 19 bp, Mus musculus
  siRNA target sequence for Mybbp1a (NM_016776.2,3389-3407).
gctccaatcgcctctatga

SEQ ID NO: 706739 - DNA, 19 bp, Mus musculus
  siRNA target sequence for Mybbp1a (NM_016776.2,3390-3408).
ctccaatcgcctctatgat

SEQ ID NO: 706740 - DNA, 19 bp, Mus musculus
  siRNA target sequence for Mybbp1a (NM_016776.2,3392-3410).
ccaatcgcctctatgatct

SEQ ID NO: 706741 - DNA, 19 bp, Mus musculus
  siRNA target sequence for Mybbp1a (NM_016776.2,3442-3460).
caacgtccaaagtcagaaa

SEQ ID NO: 706742 - DNA, 19 bp, Mus musculus
  siRNA target sequence for Mybbp1a (NM_016776.2,3549-3567).
gcgaaagaaacttaaatct

SEQ ID NO: 706743 - DNA, 19 bp, Mus musculus
  siRNA target sequence for Mybbp1a (NM_016776.2,3708-3726).
ccaggtgaatgggataact

SEQ ID NO: 706744 - DNA, 19 bp, Mus musculus
  siRNA target sequence for Plrg1 (NM_016784.2,168-186).
ggacccatgacatgtttgt

SEQ ID NO: 706745 - DNA, 19 bp, Mus musculus
  siRNA target sequence for Plrg1 (NM_016784.2,358-376).
cgccaaccaaggacaagat

SEQ ID NO: 706746 - DNA, 19 bp, Mus musculus
  siRNA target sequence for Plrg1 (NM_016784.2,360-378).
ccaaccaaggacaagatgt

SEQ ID NO: 706747 - DNA, 19 bp, Mus musculus
  siRNA target sequence for Plrg1 (NM_016784.2,428-446).
gccttgactgctgatacta

SEQ ID NO: 706748 - DNA, 19 bp, Mus musculus
  siRNA target sequence for Plrg1 (NM_016784.2,429-447).
ccttgactgctgatactaa

SEQ ID NO: 706749 - DNA, 19 bp, Mus musculus
  siRNA target sequence for Plrg1 (NM_016784.2,502-520).
gtcccagaccagagttgat

SEQ ID NO: 706750 - DNA, 19 bp, Mus musculus
  siRNA target sequence for Plrg1 (NM_016784.2,508-526).
gaccagagttgatgcaaat

SEQ ID NO: 706751 - DNA, 19 bp, Mus musculus
  siRNA target sequence for Plrg1 (NM_016784.2,511-529).
cagagttgatgcaaatcgt

SEQ ID NO: 706752 - DNA, 19 bp, Mus musculus
  siRNA target sequence for Plrg1 (NM_016784.2,608-626).
gagaccggcaacactaaga

SEQ ID NO: 706753 - DNA, 19 bp, Mus musculus
  siRNA target sequence for Plrg1 (NM_016784.2,736-754).
cgctgtggaacctggaaat

SEQ ID NO: 706754 - DNA, 19 bp, Mus musculus
  siRNA target sequence for Plrg1 (NM_016784.2,749-767).
ggaaatcagtggttcgtta

SEQ ID NO: 706755 - DNA, 19 bp, Mus musculus
  siRNA target sequence for Plrg1 (NM_016784.2,776-794).
gctgacagaaccataaaga

SEQ ID NO: 706756 - DNA, 19 bp, Mus musculus
  siRNA target sequence for Plrg1 (NM_016784.2,802-820).
cttggctagtggcaaatta

SEQ ID NO: 706757 - DNA, 19 bp, Mus musculus
  siRNA target sequence for Plrg1 (NM_016784.2,807-825).
ctagtggcaaattaaagct

SEQ ID NO: 706758 - DNA, 19 bp, Mus musculus
  siRNA target sequence for Plrg1 (NM_016784.2,868-886).
gagcacgaggagtccttat

SEQ ID NO: 706759 - DNA, 19 bp, Mus musculus
  siRNA target sequence for Plrg1 (NM_016784.2,870-888).
gcacgaggagtccttattt

SEQ ID NO: 706760 - DNA, 19 bp, Mus musculus
  siRNA target sequence for Plrg1 (NM_016784.2,873-891).
cgaggagtccttatttgtt

SEQ ID NO: 706761 - DNA, 19 bp, Mus musculus
  siRNA target sequence for Plrg1 (NM_016784.2,924-942).
gggatcttgaatataacaa

SEQ ID NO: 706762 - DNA, 19 bp, Mus musculus
  siRNA target sequence for Plrg1 (NM_016784.2,943-961).
ggtgatacggcactatcat

SEQ ID NO: 706763 - DNA, 19 bp, Mus musculus
  siRNA target sequence for Plrg1 (NM_016784.2,953-971).
cactatcatggccatctaa

SEQ ID NO: 706764 - DNA, 19 bp, Mus musculus
  siRNA target sequence for Plrg1 (NM_016784.2,1069-1087).
cagtgtacacactttgtct

SEQ ID NO: 706765 - DNA, 19 bp, Mus musculus
  siRNA target sequence for Plrg1 (NM_016784.2,1156-1174).
cgataccacaatacgatta

SEQ ID NO: 706766 - DNA, 19 bp, Mus musculus
  siRNA target sequence for Plrg1 (NM_016784.2,1157-1175).
gataccacaatacgattat

SEQ ID NO: 706767 - DNA, 19 bp, Mus musculus
  siRNA target sequence for Plrg1 (NM_016784.2,1206-1224).
cactgacgaaccataagaa

SEQ ID NO: 706768 - DNA, 19 bp, Mus musculus
  siRNA target sequence for Plrg1 (NM_016784.2,1208-1226).
ctgacgaaccataagaaat

SEQ ID NO: 706769 - DNA, 19 bp, Mus musculus
  siRNA target sequence for Plrg1 (NM_016784.2,1269-1287).
cgtctggttctccagataa

SEQ ID NO: 706770 - DNA, 19 bp, Mus musculus
  siRNA target sequence for Plrg1 (NM_016784.2,1278-1296).
ctccagataacataaagca

SEQ ID NO: 706771 - DNA, 19 bp, Mus musculus
  siRNA target sequence for Plrg1 (NM_016784.2,1309-1327).
cgatggaggcttcattcaa

SEQ ID NO: 706772 - DNA, 19 bp, Mus musculus
  siRNA target sequence for Plrg1 (NM_016784.2,1335-1353).
ctggtcacaatgcaatcat

SEQ ID NO: 706773 - DNA, 19 bp, Mus musculus
  siRNA target sequence for Plrg1 (NM_016784.2,1337-1355).
ggtcacaatgcaatcatta

SEQ ID NO: 706774 - DNA, 19 bp, Mus musculus
  siRNA target sequence for Plrg1 (NM_016784.2,1338-1356).
gtcacaatgcaatcattaa

SEQ ID NO: 706775 - DNA, 19 bp, Mus musculus
  siRNA target sequence for Plrg1 (NM_016784.2,1340-1358).
cacaatgcaatcattaaca

SEQ ID NO: 706776 - DNA, 19 bp, Mus musculus
  siRNA target sequence for Plrg1 (NM_016784.2,1429-1447).
gagaactggctataatttt

SEQ ID NO: 706777 - DNA, 19 bp, Mus musculus
  siRNA target sequence for Plrg1 (NM_016784.2,1511-1529).
gctttcgatcggtcagaaa

SEQ ID NO: 706778 - DNA, 19 bp, Mus musculus
  siRNA target sequence for Plrg1 (NM_016784.2,1522-1540).
gtcagaaagtcggttacta

SEQ ID NO: 706779 - DNA, 19 bp, Mus musculus
  siRNA target sequence for Plrg1 (NM_016784.2,1547-1565).
gaagctgataaaaccatta

SEQ ID NO: 706780 - DNA, 19 bp, Mus musculus
  siRNA target sequence for Plrg1 (NM_016784.2,1551-1569).
ctgataaaaccattaaagt

SEQ ID NO: 706781 - DNA, 19 bp, Mus musculus
  siRNA target sequence for Plrg1 (NM_016784.2,1617-1635).
ggaaaccagaaattatcaa

SEQ ID NO: 706782 - DNA, 19 bp, Mus musculus
  siRNA target sequence for Plrg1 (NM_016784.2,1622-1640).
ccagaaattatcaagagaa

SEQ ID NO: 706783 - DNA, 19 bp, Mus musculus
  siRNA target sequence for Vamp8 (NM_016794.2,181-199).
ggagtcaagaatattatga

SEQ ID NO: 706784 - DNA, 19 bp, Mus musculus
  siRNA target sequence for Vamp8 (NM_016794.2,378-396).
cgtcatcctcattatactt

SEQ ID NO: 706785 - DNA, 19 bp, Mus musculus
  siRNA target sequence for Vamp8 (NM_016794.2,379-397).
gtcatcctcattatacttt

SEQ ID NO: 706786 - DNA, 19 bp, Mus musculus
  siRNA target sequence for Htatip2 (NM_016865.2,241-259).
cggggaaactggcaaagta

SEQ ID NO: 706787 - DNA, 19 bp, Mus musculus
  siRNA target sequence for Htatip2 (NM_016865.2,243-261).
gggaaactggcaaagtact

SEQ ID NO: 706788 - DNA, 19 bp, Mus musculus
  siRNA target sequence for Htatip2 (NM_016865.2,245-263).
gaaactggcaaagtacttt

SEQ ID NO: 706789 - DNA, 19 bp, Mus musculus
  siRNA target sequence for Htatip2 (NM_016865.2,279-297).
gacagaacctgttttccaa

SEQ ID NO: 706790 - DNA, 19 bp, Mus musculus
  siRNA target sequence for Htatip2 (NM_016865.2,328-346).
cttcgaggaggaagcttat

SEQ ID NO: 706791 - DNA, 19 bp, Mus musculus
  siRNA target sequence for Htatip2 (NM_016865.2,402-420).
cctttcaaggtcatgatgt

SEQ ID NO: 706792 - DNA, 19 bp, Mus musculus
  siRNA target sequence for Htatip2 (NM_016865.2,477-495).
gtgttgaccgagattatgt

SEQ ID NO: 706793 - DNA, 19 bp, Mus musculus
  siRNA target sequence for Htatip2 (NM_016865.2,524-542).
ggagggtgcaaacatttca

SEQ ID NO: 706794 - DNA, 19 bp, Mus musculus
  siRNA target sequence for Htatip2 (NM_016865.2,525-543).
gagggtgcaaacatttcaa

SEQ ID NO: 706795 - DNA, 19 bp, Mus musculus
  siRNA target sequence for Htatip2 (NM_016865.2,528-546).
ggtgcaaacatttcaactt

SEQ ID NO: 706796 - DNA, 19 bp, Mus musculus
  siRNA target sequence for Htatip2 (NM_016865.2,701-719).
gaatggctggctaggaaat

SEQ ID NO: 706797 - DNA, 19 bp, Mus musculus
  siRNA target sequence for Htatip2 (NM_016865.2,816-834).
gcggacaaatggaacttct

SEQ ID NO: 706798 - DNA, 19 bp, Mus musculus
  siRNA target sequence for Stk39 (NM_016866.2,1629-1647).
gttatagtggctgctaatt

SEQ ID NO: 706799 - DNA, 19 bp, Mus musculus
  siRNA target sequence for Krt2-18 (NM_016879.2,781-799).
cctacttacgtaaatcaga

SEQ ID NO: 706800 - DNA, 19 bp, Mus musculus
  siRNA target sequence for Krt2-18 (NM_016879.2,838-856).
gcttcctgaagcgtcttta

SEQ ID NO: 706801 - DNA, 19 bp, Mus musculus
  siRNA target sequence for Krt2-18 (NM_016879.2,839-857).
cttcctgaagcgtctttat

SEQ ID NO: 706802 - DNA, 19 bp, Mus musculus
  siRNA target sequence for Sart1 (NM_016882.2,165-183).
cacggcatcgcgagcataa

SEQ ID NO: 706803 - DNA, 19 bp, Mus musculus
  siRNA target sequence for Sart1 (NM_016882.2,167-185).
cggcatcgcgagcataaga

SEQ ID NO: 706804 - DNA, 19 bp, Mus musculus
  siRNA target sequence for Sart1 (NM_016882.2,168-186).
ggcatcgcgagcataagaa

SEQ ID NO: 706805 - DNA, 19 bp, Mus musculus
  siRNA target sequence for Sart1 (NM_016882.2,169-187).
gcatcgcgagcataagaaa

SEQ ID NO: 706806 - DNA, 19 bp, Mus musculus
  siRNA target sequence for Sart1 (NM_016882.2,173-191).
cgcgagcataagaaacaca

SEQ ID NO: 706807 - DNA, 19 bp, Mus musculus
  siRNA target sequence for Sart1 (NM_016882.2,432-450).
gcattgaggagaccaataa

SEQ ID NO: 706808 - DNA, 19 bp, Mus musculus
  siRNA target sequence for Sart1 (NM_016882.2,524-542).
cccgtggcagccgatgtta

SEQ ID NO: 706809 - DNA, 19 bp, Mus musculus
  siRNA target sequence for Sart1 (NM_016882.2,525-543).
ccgtggcagccgatgttat

SEQ ID NO: 706810 - DNA, 19 bp, Mus musculus
  siRNA target sequence for Sart1 (NM_016882.2,527-545).
gtggcagccgatgttatca

SEQ ID NO: 706811 - DNA, 19 bp, Mus musculus
  siRNA target sequence for Sart1 (NM_016882.2,608-626).
cgcttgctgaaccaaaaat

SEQ ID NO: 706812 - DNA, 19 bp, Mus musculus
  siRNA target sequence for Sart1 (NM_016882.2,619-637).
ccaaaaattggggaaaata

SEQ ID NO: 706813 - DNA, 19 bp, Mus musculus
  siRNA target sequence for Sart1 (NM_016882.2,658-676).
cccctggctggatgatact

SEQ ID NO: 706814 - DNA, 19 bp, Mus musculus
  siRNA target sequence for Sart1 (NM_016882.2,696-714).
gccggcagctacagaaaga

SEQ ID NO: 706815 - DNA, 19 bp, Mus musculus
  siRNA target sequence for Sart1 (NM_016882.2,1045-1063).
cgatttggcacagcaaaaa

SEQ ID NO: 706816 - DNA, 19 bp, Mus musculus
  siRNA target sequence for Sart1 (NM_016882.2,1104-1122).
gcgagcgaccacattcctt

SEQ ID NO: 706817 - DNA, 19 bp, Mus musculus
  siRNA target sequence for Sart1 (NM_016882.2,1153-1171).
cctgagggaacgagagtta

SEQ ID NO: 706818 - DNA, 19 bp, Mus musculus
  siRNA target sequence for Sart1 (NM_016882.2,1158-1176).
gggaacgagagttagaaga

SEQ ID NO: 706819 - DNA, 19 bp, Mus musculus
  siRNA target sequence for Sart1 (NM_016882.2,1282-1300).
caaacggagagtgaagaaa

SEQ ID NO: 706820 - DNA, 19 bp, Mus musculus
  siRNA target sequence for Sart1 (NM_016882.2,1738-1756).
ggggaccatcgtgttcaat

SEQ ID NO: 706821 - DNA, 19 bp, Mus musculus
  siRNA target sequence for Sart1 (NM_016882.2,1939-1957).
gcagcatcaggatttctct

SEQ ID NO: 706822 - DNA, 19 bp, Mus musculus
  siRNA target sequence for Sart1 (NM_016882.2,2044-2062).
gctggagaccacagtacaa

SEQ ID NO: 706823 - DNA, 19 bp, Mus musculus
  siRNA target sequence for Sart1 (NM_016882.2,2073-2091).
gggtgaaggctcccaataa

SEQ ID NO: 706824 - DNA, 19 bp, Mus musculus
  siRNA target sequence for Sart1 (NM_016882.2,2202-2220).
gctacaagcctgatgttaa

SEQ ID NO: 706825 - DNA, 19 bp, Mus musculus
  siRNA target sequence for Sart1 (NM_016882.2,2237-2255).
gagacgggcaggaaactga

SEQ ID NO: 706826 - DNA, 19 bp, Mus musculus
  siRNA target sequence for 0610012K22Rik (NM_016885.1,176-194).
cagaatgactctattccaa

SEQ ID NO: 706827 - DNA, 19 bp, Mus musculus
  siRNA target sequence for 0610012K22Rik (NM_016885.1,240-258).
gcatcgtgtcagtgacaaa

SEQ ID NO: 706828 - DNA, 19 bp, Mus musculus
  siRNA target sequence for 0610012K22Rik (NM_016885.1,241-259).
catcgtgtcagtgacaaat

SEQ ID NO: 706829 - DNA, 19 bp, Mus musculus
  siRNA target sequence for 0610012K22Rik (NM_016885.1,287-305).
cccgaaggaacgaccaaaa

SEQ ID NO: 706830 - DNA, 19 bp, Mus musculus
  siRNA target sequence for 0610012K22Rik (NM_016885.1,308-326).
gacgtatcccaaacatctt

SEQ ID NO: 706831 - DNA, 19 bp, Mus musculus
  siRNA target sequence for 0610012K22Rik (NM_016885.1,328-346).
ggtgacaacaattaattca

SEQ ID NO: 706832 - DNA, 19 bp, Mus musculus
  siRNA target sequence for 0610012K22Rik (NM_016885.1,351-369).
caacaccaaaacatgaagt

SEQ ID NO: 706833 - DNA, 19 bp, Mus musculus
  siRNA target sequence for 0610012K22Rik (NM_016885.1,362-380).
catgaagtgggaacaacaa

SEQ ID NO: 706834 - DNA, 19 bp, Mus musculus
  siRNA target sequence for 0610012K22Rik (NM_016885.1,500-518).
gatgccttgccgaaaatca

SEQ ID NO: 706835 - DNA, 19 bp, Mus musculus
  siRNA target sequence for 0610012K22Rik (NM_016885.1,614-632).
ccctcctattccagtatca

SEQ ID NO: 706836 - DNA, 19 bp, Mus musculus
  siRNA target sequence for 0610012K22Rik (NM_016885.1,644-662).
gttatcgcgctggttgtta

SEQ ID NO: 706837 - DNA, 19 bp, Mus musculus
  siRNA target sequence for 0610012K22Rik (NM_016885.1,649-667).
cgcgctggttgttataaca

SEQ ID NO: 706838 - DNA, 19 bp, Mus musculus
  siRNA target sequence for 0610012K22Rik (NM_016885.1,651-669).
cgctggttgttataacact

SEQ ID NO: 706839 - DNA, 19 bp, Mus musculus
  siRNA target sequence for 0610012K22Rik (NM_016885.1,659-677).
gttataacactcttggtat

SEQ ID NO: 706840 - DNA, 19 bp, Mus musculus
  siRNA target sequence for 0610012K22Rik (NM_016885.1,683-701).
ctggtgggtttgtatcgaa

SEQ ID NO: 706841 - DNA, 19 bp, Mus musculus
  siRNA target sequence for 0610012K22Rik (NM_016885.1,685-703).
ggtgggtttgtatcgaata

SEQ ID NO: 706842 - DNA, 19 bp, Mus musculus
  siRNA target sequence for 0610012K22Rik (NM_016885.1,686-704).
gtgggtttgtatcgaatat

SEQ ID NO: 706843 - DNA, 19 bp, Mus musculus
  siRNA target sequence for 0610012K22Rik (NM_016885.1,689-707).
ggtttgtatcgaatatgct

SEQ ID NO: 706844 - DNA, 19 bp, Mus musculus
  siRNA target sequence for 0610012K22Rik (NM_016885.1,749-767).
cctcagtccgataaagaga

SEQ ID NO: 706845 - DNA, 19 bp, Mus musculus
  siRNA target sequence for 0610012K22Rik (NM_016885.1,770-788).
gtgaagctgctcactgtta

SEQ ID NO: 706846 - DNA, 19 bp, Mus musculus
  siRNA target sequence for 0610012K22Rik (NM_016885.1,781-799).
cactgttaagacaatctct

SEQ ID NO: 706847 - DNA, 19 bp, Mus musculus
  siRNA target sequence for Ppp2r1a (NM_016891.2,73-91).
cgattcgctctatcctatt

SEQ ID NO: 706848 - DNA, 19 bp, Mus musculus
  siRNA target sequence for Ppp2r1a (NM_016891.2,87-105).
ctattgcggtgctcataga

SEQ ID NO: 706849 - DNA, 19 bp, Mus musculus
  siRNA target sequence for Ppp2r1a (NM_016891.2,93-111).
cggtgctcatagatgaact

SEQ ID NO: 706850 - DNA, 19 bp, Mus musculus
  siRNA target sequence for Ppp2r1a (NM_016891.2,124-142).
cgttcagcttcgtctcaat

SEQ ID NO: 706851 - DNA, 19 bp, Mus musculus
  siRNA target sequence for Ppp2r1a (NM_016891.2,125-143).
gttcagcttcgtctcaata

SEQ ID NO: 706852 - DNA, 19 bp, Mus musculus
  siRNA target sequence for Ppp2r1a (NM_016891.2,131-149).
cttcgtctcaatagtatca

SEQ ID NO: 706853 - DNA, 19 bp, Mus musculus
  siRNA target sequence for Ppp2r1a (NM_016891.2,365-383).
cgagacaaggcggtagaat

SEQ ID NO: 706854 - DNA, 19 bp, Mus musculus
  siRNA target sequence for Ppp2r1a (NM_016891.2,418-436).
cgatctagaggctcacttt

SEQ ID NO: 706855 - DNA, 19 bp, Mus musculus
  siRNA target sequence for Ppp2r1a (NM_016891.2,543-561).
cagaacttcgacagtactt

SEQ ID NO: 706856 - DNA, 19 bp, Mus musculus
  siRNA target sequence for Ppp2r1a (NM_016891.2,725-743).
gtggaggcatgtgtgaata

SEQ ID NO: 706857 - DNA, 19 bp, Mus musculus
  siRNA target sequence for Ppp2r1a (NM_016891.2,998-1016).
gactgccgggagaatgtga

SEQ ID NO: 706858 - DNA, 19 bp, Mus musculus
  siRNA target sequence for Ppp2r1a (NM_016891.2,1004-1022).
cgggagaatgtgatcatga

SEQ ID NO: 706859 - DNA, 19 bp, Mus musculus
  siRNA target sequence for Ppp2r1a (NM_016891.2,1184-1202).
cctgaagtccgactgaata

SEQ ID NO: 706860 - DNA, 19 bp, Mus musculus
  siRNA target sequence for Ppp2r1a (NM_016891.2,1185-1203).
ctgaagtccgactgaatat

SEQ ID NO: 706861 - DNA, 19 bp, Mus musculus
  siRNA target sequence for Ppp2r1a (NM_016891.2,1187-1205).
gaagtccgactgaatatca

SEQ ID NO: 706862 - DNA, 19 bp, Mus musculus
  siRNA target sequence for Ppp2r1a (NM_016891.2,1190-1208).
gtccgactgaatatcatct

SEQ ID NO: 706863 - DNA, 19 bp, Mus musculus
  siRNA target sequence for Ppp2r1a (NM_016891.2,1351-1369).
gcttggtgtggaatttttt

SEQ ID NO: 706864 - DNA, 19 bp, Mus musculus
  siRNA target sequence for Ppp2r1a (NM_016891.2,1436-1454).
gccaccagcaaccttaaga

SEQ ID NO: 706865 - DNA, 19 bp, Mus musculus
  siRNA target sequence for Ppp2r1a (NM_016891.2,1437-1455).
ccaccagcaaccttaagaa

SEQ ID NO: 706866 - DNA, 19 bp, Mus musculus
  siRNA target sequence for Ppp2r1a (NM_016891.2,1482-1500).
gggcccatgccactatcat

SEQ ID NO: 706867 - DNA, 19 bp, Mus musculus
  siRNA target sequence for Cd164 (NM_016898.1,237-255).
gttaatgccacctttacta

SEQ ID NO: 706868 - DNA, 19 bp, Mus musculus
  siRNA target sequence for Cd164 (NM_016898.1,299-317).
gacctattgtgcaaatgaa

SEQ ID NO: 706869 - DNA, 19 bp, Mus musculus
  siRNA target sequence for Cd164 (NM_016898.1,315-333).
gaaccattaagtaattgtt

SEQ ID NO: 706870 - DNA, 19 bp, Mus musculus
  siRNA target sequence for Cd164 (NM_016898.1,377-395).
cactccagtgccaaccaat

SEQ ID NO: 706871 - DNA, 19 bp, Mus musculus
  siRNA target sequence for Cd164 (NM_016898.1,503-521).
gcggaagtcgacctttgat

SEQ ID NO: 706872 - DNA, 19 bp, Mus musculus
  siRNA target sequence for Cd164 (NM_016898.1,538-556).
gagggatcgtccttgtctt

SEQ ID NO: 706873 - DNA, 19 bp, Mus musculus
  siRNA target sequence for Cd164 (NM_016898.1,557-575).
gggtgtgcaggctgtaatt

SEQ ID NO: 706874 - DNA, 19 bp, Mus musculus
  siRNA target sequence for Cd164 (NM_016898.1,558-576).
ggtgtgcaggctgtaattt

SEQ ID NO: 706875 - DNA, 19 bp, Mus musculus
  siRNA target sequence for Cd164 (NM_016898.1,601-619).
ctaaagaacgaaattacca

SEQ ID NO: 706876 - DNA, 19 bp, Mus musculus
  siRNA target sequence for Syt5 (NM_016908.2,283-301).
gtctccagcgcctaagaca

SEQ ID NO: 706877 - DNA, 19 bp, Mus musculus
  siRNA target sequence for Syt5 (NM_016908.2,423-441).
ggagacggatgggcaaaaa

SEQ ID NO: 706878 - DNA, 19 bp, Mus musculus
  siRNA target sequence for Syt5 (NM_016908.2,492-510).
ggagttacatagataaggt

SEQ ID NO: 706879 - DNA, 19 bp, Mus musculus
  siRNA target sequence for Syt5 (NM_016908.2,552-570).
ctggacagcaggtatcaga

SEQ ID NO: 706880 - DNA, 19 bp, Mus musculus
  siRNA target sequence for Syt5 (NM_016908.2,581-599).
ctaggccgactgcagtatt

SEQ ID NO: 706881 - DNA, 19 bp, Mus musculus
  siRNA target sequence for Syt5 (NM_016908.2,693-711).
cctatgttagtgtctatct

SEQ ID NO: 706882 - DNA, 19 bp, Mus musculus
  siRNA target sequence for Syt5 (NM_016908.2,757-775).
gaccctgaatccacacttt

SEQ ID NO: 706883 - DNA, 19 bp, Mus musculus
  siRNA target sequence for Syt5 (NM_016908.2,768-786).
cacactttggagagacatt

SEQ ID NO: 706884 - DNA, 19 bp, Mus musculus
  siRNA target sequence for Syt5 (NM_016908.2,884-902).
gtgcgggtgcctatgagtt

SEQ ID NO: 706885 - DNA, 19 bp, Mus musculus
  siRNA target sequence for Syt5 (NM_016908.2,987-1005).
gcttctctctccgttatgt

SEQ ID NO: 706886 - DNA, 19 bp, Mus musculus
  siRNA target sequence for Syt5 (NM_016908.2,1017-1035).
ggaagctcaccgtcattgt

SEQ ID NO: 706887 - DNA, 19 bp, Mus musculus
  siRNA target sequence for Syt5 (NM_016908.2,1108-1126).
ccagggaggtaaaaaggtt

SEQ ID NO: 706888 - DNA, 19 bp, Mus musculus
  siRNA target sequence for Syt5 (NM_016908.2,1320-1338).
ggcactgggctgacatgtt

SEQ ID NO: 706889 - DNA, 19 bp, Mus musculus
  siRNA target sequence for Srpx (NM_016911.2,246-264).
cgatggagtctggtattca

SEQ ID NO: 706890 - DNA, 19 bp, Mus musculus
  siRNA target sequence for Srpx (NM_016911.2,257-275).
ggtattcacactctctata

SEQ ID NO: 706891 - DNA, 19 bp, Mus musculus
  siRNA target sequence for Srpx (NM_016911.2,258-276).
gtattcacactctctatat

SEQ ID NO: 706892 - DNA, 19 bp, Mus musculus
  siRNA target sequence for Srpx (NM_016911.2,296-314).
ctcccatcaaggtgaagta

SEQ ID NO: 706893 - DNA, 19 bp, Mus musculus
  siRNA target sequence for Srpx (NM_016911.2,479-497).
gatgtcctacccttaccat

SEQ ID NO: 706894 - DNA, 19 bp, Mus musculus
  siRNA target sequence for Srpx (NM_016911.2,500-518).
cggcaaatggagggtttaa

SEQ ID NO: 706895 - DNA, 19 bp, Mus musculus
  siRNA target sequence for Srpx (NM_016911.2,523-541).
gtcgatggtgcctacttta

SEQ ID NO: 706896 - DNA, 19 bp, Mus musculus
  siRNA target sequence for Srpx (NM_016911.2,547-565).
cggtgtgagtactattgtt

SEQ ID NO: 706897 - DNA, 19 bp, Mus musculus
  siRNA target sequence for Srpx (NM_016911.2,549-567).
gtgtgagtactattgttca

SEQ ID NO: 706898 - DNA, 19 bp, Mus musculus
  siRNA target sequence for Srpx (NM_016911.2,652-670).
ctggaacctcctagaatca

SEQ ID NO: 706899 - DNA, 19 bp, Mus musculus
  siRNA target sequence for Srpx (NM_016911.2,669-687).
caagtgcccaagtgtgaaa

SEQ ID NO: 706900 - DNA, 19 bp, Mus musculus
  siRNA target sequence for Srpx (NM_016911.2,692-710).
gtatagctgagcccaataa

SEQ ID NO: 706901 - DNA, 19 bp, Mus musculus
  siRNA target sequence for Srpx (NM_016911.2,759-777).
ggatgggattcttactgat

SEQ ID NO: 706902 - DNA, 19 bp, Mus musculus
  siRNA target sequence for Srpx (NM_016911.2,792-810).
ccttcctccgggctcaaat

SEQ ID NO: 706903 - DNA, 19 bp, Mus musculus
  siRNA target sequence for Srpx (NM_016911.2,793-811).
cttcctccgggctcaaatt

SEQ ID NO: 706904 - DNA, 19 bp, Mus musculus
  siRNA target sequence for Srpx (NM_016911.2,831-849).
gattgagtacacagtctat

SEQ ID NO: 706905 - DNA, 19 bp, Mus musculus
  siRNA target sequence for Srpx (NM_016911.2,835-853).
gagtacacagtctatgaca

SEQ ID NO: 706906 - DNA, 19 bp, Mus musculus
  siRNA target sequence for Srpx (NM_016911.2,872-890).
cttgcaagtttcgagttaa

SEQ ID NO: 706907 - DNA, 19 bp, Mus musculus
  siRNA target sequence for Srpx (NM_016911.2,875-893).
gcaagtttcgagttaaagt

SEQ ID NO: 706908 - DNA, 19 bp, Mus musculus
  siRNA target sequence for Srpx (NM_016911.2,876-894).
caagtttcgagttaaagta

SEQ ID NO: 706909 - DNA, 19 bp, Mus musculus
  siRNA target sequence for Srpx (NM_016911.2,879-897).
gtttcgagttaaagtaaga

SEQ ID NO: 706910 - DNA, 19 bp, Mus musculus
  siRNA target sequence for Srpx (NM_016911.2,918-936).
caatgccccagaaaatggt

SEQ ID NO: 706911 - DNA, 19 bp, Mus musculus
  siRNA target sequence for Srpx (NM_016911.2,950-968).
ccagcgatggtgacaatta

SEQ ID NO: 706912 - DNA, 19 bp, Mus musculus
  siRNA target sequence for Srpx (NM_016911.2,978-996).
ctgtgaattctcctgtatt

SEQ ID NO: 706913 - DNA, 19 bp, Mus musculus
  siRNA target sequence for Srpx (NM_016911.2,1025-1043).
cccgagtatgccaatccaa

SEQ ID NO: 706914 - DNA, 19 bp, Mus musculus
  siRNA target sequence for Srpx (NM_016911.2,1026-1044).
ccgagtatgccaatccaat

SEQ ID NO: 706915 - DNA, 19 bp, Mus musculus
  siRNA target sequence for Srpx (NM_016911.2,1073-1091).
gtgcagcgatgaatgtcaa

SEQ ID NO: 706916 - DNA, 19 bp, Mus musculus
  siRNA target sequence for Srpx (NM_016911.2,1112-1130).
ctgcacttctggatcagtt

SEQ ID NO: 706917 - DNA, 19 bp, Mus musculus
  siRNA target sequence for Srpx (NM_016911.2,1114-1132).
gcacttctggatcagtttt

SEQ ID NO: 706918 - DNA, 19 bp, Mus musculus
  siRNA target sequence for Srpx (NM_016911.2,1115-1133).
cacttctggatcagtttta

SEQ ID NO: 706919 - DNA, 19 bp, Mus musculus
  siRNA target sequence for Srpx (NM_016911.2,1289-1307).
ggatcagagcaaagattat

SEQ ID NO: 706920 - DNA, 19 bp, Mus musculus
  siRNA target sequence for Srpx (NM_016911.2,1332-1350).
caggctgttgcttcgaatt

SEQ ID NO: 706921 - DNA, 19 bp, Mus musculus
  siRNA target sequence for Srpx (NM_016911.2,1335-1353).
gctgttgcttcgaattcct

SEQ ID NO: 706922 - DNA, 19 bp, Mus musculus
  siRNA target sequence for Srpx (NM_016911.2,1371-1389).
ggtggtagtggataagcat

SEQ ID NO: 706923 - DNA, 19 bp, Mus musculus
  siRNA target sequence for Srpx (NM_016911.2,1391-1409).
gcatggataaagaacgtta

SEQ ID NO: 706924 - DNA, 19 bp, Mus musculus
  siRNA target sequence for Srpx (NM_016911.2,1392-1410).
catggataaagaacgttat

SEQ ID NO: 706925 - DNA, 19 bp, Mus musculus
  siRNA target sequence for Blcap (NM_016916.2,427-445).
ctcctggaacggaaacctt

SEQ ID NO: 706926 - DNA, 19 bp, Mus musculus
  siRNA target sequence for Blcap (NM_016916.2,436-454).
cggaaaccttgcacaatat

SEQ ID NO: 706927 - DNA, 19 bp, Mus musculus
  siRNA target sequence for Blcap (NM_016916.2,438-456).
gaaaccttgcacaatatgt

SEQ ID NO: 706928 - DNA, 19 bp, Mus musculus
  siRNA target sequence for Fanca (NM_016925.1,106-124).
gggcagagtcaaaaagcaa

SEQ ID NO: 706929 - DNA, 19 bp, Mus musculus
  siRNA target sequence for Fanca (NM_016925.1,173-191).
ctcctgagataccatcaaa

SEQ ID NO: 706930 - DNA, 19 bp, Mus musculus
  siRNA target sequence for Fanca (NM_016925.1,175-193).
cctgagataccatcaaaat

SEQ ID NO: 706931 - DNA, 19 bp, Mus musculus
  siRNA target sequence for Fanca (NM_016925.1,176-194).
ctgagataccatcaaaata

SEQ ID NO: 706932 - DNA, 19 bp, Mus musculus
  siRNA target sequence for Fanca (NM_016925.1,180-198).
gataccatcaaaatatgca

SEQ ID NO: 706933 - DNA, 19 bp, Mus musculus
  siRNA target sequence for Fanca (NM_016925.1,424-442).
gctcagcccggaacaaagt

SEQ ID NO: 706934 - DNA, 19 bp, Mus musculus
  siRNA target sequence for Fanca (NM_016925.1,425-443).
ctcagcccggaacaaagta

SEQ ID NO: 706935 - DNA, 19 bp, Mus musculus
  siRNA target sequence for Fanca (NM_016925.1,429-447).
gcccggaacaaagtaagaa

SEQ ID NO: 706936 - DNA, 19 bp, Mus musculus
  siRNA target sequence for Fanca (NM_016925.1,445-463).
gaagctgtcttccttacta

SEQ ID NO: 706937 - DNA, 19 bp, Mus musculus
  siRNA target sequence for Fanca (NM_016925.1,474-492).
ggcatttgttggcacaaaa

SEQ ID NO: 706938 - DNA, 19 bp, Mus musculus
  siRNA target sequence for Fanca (NM_016925.1,475-493).
gcatttgttggcacaaaat

SEQ ID NO: 706939 - DNA, 19 bp, Mus musculus
  siRNA target sequence for Fanca (NM_016925.1,514-532).
ctgtcaggaattatggaaa

SEQ ID NO: 706940 - DNA, 19 bp, Mus musculus
  siRNA target sequence for Fanca (NM_016925.1,726-744).
gtcttgtgcaactgttaat

SEQ ID NO: 706941 - DNA, 19 bp, Mus musculus
  siRNA target sequence for Fanca (NM_016925.1,731-749).
gtgcaactgttaatttcaa

SEQ ID NO: 706942 - DNA, 19 bp, Mus musculus
  siRNA target sequence for Fanca (NM_016925.1,805-823).
ccaggttgccactgatgta

SEQ ID NO: 706943 - DNA, 19 bp, Mus musculus
  siRNA target sequence for Fanca (NM_016925.1,831-849).
ggatgctggctttttcact

SEQ ID NO: 706944 - DNA, 19 bp, Mus musculus
  siRNA target sequence for Fanca (NM_016925.1,869-887).
ccacagacgactttggatt

SEQ ID NO: 706945 - DNA, 19 bp, Mus musculus
  siRNA target sequence for Fanca (NM_016925.1,900-918).
gtggctggattcctatcta

SEQ ID NO: 706946 - DNA, 19 bp, Mus musculus
  siRNA target sequence for Fanca (NM_016925.1,1151-1169).
gagatgcaggaggttaact

SEQ ID NO: 706947 - DNA, 19 bp, Mus musculus
  siRNA target sequence for Fanca (NM_016925.1,1238-1256).
ggttgggtagcctctttga

SEQ ID NO: 706948 - DNA, 19 bp, Mus musculus
  siRNA target sequence for Fanca (NM_016925.1,1239-1257).
gttgggtagcctctttgat

SEQ ID NO: 706949 - DNA, 19 bp, Mus musculus
  siRNA target sequence for Fanca (NM_016925.1,1339-1357).
ctatgtattcccatcctat

SEQ ID NO: 706950 - DNA, 19 bp, Mus musculus
  siRNA target sequence for Fanca (NM_016925.1,1404-1422).
gctgcagcaagaaaacact

SEQ ID NO: 706951 - DNA, 19 bp, Mus musculus
  siRNA target sequence for Fanca (NM_016925.1,1529-1547).
ctccttacagactacatct

SEQ ID NO: 706952 - DNA, 19 bp, Mus musculus
  siRNA target sequence for Fanca (NM_016925.1,1598-1616).
gggctctacgaggatttgt

SEQ ID NO: 706953 - DNA, 19 bp, Mus musculus
  siRNA target sequence for Fanca (NM_016925.1,1600-1618).
gctctacgaggatttgtca

SEQ ID NO: 706954 - DNA, 19 bp, Mus musculus
  siRNA target sequence for Fanca (NM_016925.1,1601-1619).
ctctacgaggatttgtcat

SEQ ID NO: 706955 - DNA, 19 bp, Mus musculus
  siRNA target sequence for Fanca (NM_016925.1,1649-1667).
caagcggtgcaggatgtta

SEQ ID NO: 706956 - DNA, 19 bp, Mus musculus
  siRNA target sequence for Fanca (NM_016925.1,1652-1670).
gcggtgcaggatgttaaga

SEQ ID NO: 706957 - DNA, 19 bp, Mus musculus
  siRNA target sequence for Fanca (NM_016925.1,1653-1671).
cggtgcaggatgttaagaa

SEQ ID NO: 706958 - DNA, 19 bp, Mus musculus
  siRNA target sequence for Fanca (NM_016925.1,1675-1693).
catcatggtgtttgaacaa

SEQ ID NO: 706959 - DNA, 19 bp, Mus musculus
  siRNA target sequence for Fanca (NM_016925.1,2015-2033).
ccgacccaatacagtgtta

SEQ ID NO: 706960 - DNA, 19 bp, Mus musculus
  siRNA target sequence for Fanca (NM_016925.1,2016-2034).
cgacccaatacagtgttat

SEQ ID NO: 706961 - DNA, 19 bp, Mus musculus
  siRNA target sequence for Fanca (NM_016925.1,2047-2065).
ggccgtggtttctgaaaaa

SEQ ID NO: 706962 - DNA, 19 bp, Mus musculus
  siRNA target sequence for Fanca (NM_016925.1,2049-2067).
ccgtggtttctgaaaaact

SEQ ID NO: 706963 - DNA, 19 bp, Mus musculus
  siRNA target sequence for Fanca (NM_016925.1,2050-2068).
cgtggtttctgaaaaacta

SEQ ID NO: 706964 - DNA, 19 bp, Mus musculus
  siRNA target sequence for Fanca (NM_016925.1,2189-2207).
gccttctgtcagaacctaa

SEQ ID NO: 706965 - DNA, 19 bp, Mus musculus
  siRNA target sequence for Fanca (NM_016925.1,2190-2208).
ccttctgtcagaacctaat

SEQ ID NO: 706966 - DNA, 19 bp, Mus musculus
  siRNA target sequence for Fanca (NM_016925.1,2540-2558).
gcggtttcttactgtttgt

SEQ ID NO: 706967 - DNA, 19 bp, Mus musculus
  siRNA target sequence for Fanca (NM_016925.1,2570-2588).
gccctgcgcaactgtttgt

SEQ ID NO: 706968 - DNA, 19 bp, Mus musculus
  siRNA target sequence for Fanca (NM_016925.1,2587-2605).
gtctccaggtctgatcaaa

SEQ ID NO: 706969 - DNA, 19 bp, Mus musculus
  siRNA target sequence for Fanca (NM_016925.1,2591-2609).
ccaggtctgatcaaaaagt

SEQ ID NO: 706970 - DNA, 19 bp, Mus musculus
  siRNA target sequence for Fanca (NM_016925.1,2595-2613).
gtctgatcaaaaagtttca

SEQ ID NO: 706971 - DNA, 19 bp, Mus musculus
  siRNA target sequence for Fanca (NM_016925.1,2612-2630).
cagttcgttgtgttaagat

SEQ ID NO: 706972 - DNA, 19 bp, Mus musculus
  siRNA target sequence for Fanca (NM_016925.1,2988-3006).
gttcgaggagttacaatca

SEQ ID NO: 706973 - DNA, 19 bp, Mus musculus
  siRNA target sequence for Fanca (NM_016925.1,3038-3056).
cgcacaggaaacaaggata

SEQ ID NO: 706974 - DNA, 19 bp, Mus musculus
  siRNA target sequence for Fanca (NM_016925.1,3132-3150).
cgccgcagagtcactttct

SEQ ID NO: 706975 - DNA, 19 bp, Mus musculus
  siRNA target sequence for Fanca (NM_016925.1,3134-3152).
ccgcagagtcactttctgt

SEQ ID NO: 706976 - DNA, 19 bp, Mus musculus
  siRNA target sequence for Fanca (NM_016925.1,3288-3306).
cccaggccggacaacctat

SEQ ID NO: 706977 - DNA, 19 bp, Mus musculus
  siRNA target sequence for Fanca (NM_016925.1,3377-3395).
gtcctgacctctgacatta

SEQ ID NO: 706978 - DNA, 19 bp, Mus musculus
  siRNA target sequence for Fanca (NM_016925.1,3486-3504).
ctaagtgtcccgtgattct

SEQ ID NO: 706979 - DNA, 19 bp, Mus musculus
  siRNA target sequence for Fanca (NM_016925.1,3551-3569).
ggtcggtggatgagatgtt

SEQ ID NO: 706980 - DNA, 19 bp, Mus musculus
  siRNA target sequence for Fanca (NM_016925.1,3552-3570).
gtcggtggatgagatgtta

SEQ ID NO: 706981 - DNA, 19 bp, Mus musculus
  siRNA target sequence for Fanca (NM_016925.1,3555-3573).
ggtggatgagatgttatca

SEQ ID NO: 706982 - DNA, 19 bp, Mus musculus
  siRNA target sequence for Fanca (NM_016925.1,3614-3632).
cgggaatttgctagcaatt

SEQ ID NO: 706983 - DNA, 19 bp, Mus musculus
  siRNA target sequence for Fanca (NM_016925.1,3872-3890).
gtcctcacgtgcttggaaa

SEQ ID NO: 706984 - DNA, 19 bp, Mus musculus
  siRNA target sequence for Fanca (NM_016925.1,3989-4007).
ctaccacttgctttctaca

SEQ ID NO: 706985 - DNA, 19 bp, Mus musculus
  siRNA target sequence for Fanca (NM_016925.1,4150-4168).
ccctgtacaactgataaca

SEQ ID NO: 706986 - DNA, 19 bp, Mus musculus
  siRNA target sequence for Fanca (NM_016925.1,4151-4169).
cctgtacaactgataacaa

SEQ ID NO: 706987 - DNA, 19 bp, Mus musculus
  siRNA target sequence for Fanca (NM_016925.1,4214-4232).
cagtgcttctccaacatga

SEQ ID NO: 706988 - DNA, 19 bp, Mus musculus
  siRNA target sequence for Ear4 (NM_017389.1,68-86).
cctcatgccaggcacaaat

SEQ ID NO: 706989 - DNA, 19 bp, Mus musculus
  siRNA target sequence for Ear4 (NM_017389.1,126-144).
cacctacccccgatgtgat

SEQ ID NO: 706990 - DNA, 19 bp, Mus musculus
  siRNA target sequence for Ear4 (NM_017389.1,145-163).
gctgtaatgagggttgtta

SEQ ID NO: 706991 - DNA, 19 bp, Mus musculus
  siRNA target sequence for Ear4 (NM_017389.1,146-164).
ctgtaatgagggttgttaa

SEQ ID NO: 706992 - DNA, 19 bp, Mus musculus
  siRNA target sequence for Ear4 (NM_017389.1,148-166).
gtaatgagggttgttaaca

SEQ ID NO: 706993 - DNA, 19 bp, Mus musculus
  siRNA target sequence for Ear4 (NM_017389.1,156-174).
ggttgttaacaggtataga

SEQ ID NO: 706994 - DNA, 19 bp, Mus musculus
  siRNA target sequence for Ear4 (NM_017389.1,230-248).
ctgtgtgtggccatccaaa

SEQ ID NO: 706995 - DNA, 19 bp, Mus musculus
  siRNA target sequence for Svs2 (NM_017390.2,127-145).
cctcagagggatttatgct

SEQ ID NO: 706996 - DNA, 19 bp, Mus musculus
  siRNA target sequence for Svs2 (NM_017390.2,128-146).
ctcagagggatttatgctt

SEQ ID NO: 706997 - DNA, 19 bp, Mus musculus
  siRNA target sequence for Svs2 (NM_017390.2,199-217).
ctgaagaaagccttttcat

SEQ ID NO: 706998 - DNA, 19 bp, Mus musculus
  siRNA target sequence for Svs2 (NM_017390.2,263-281).
ccagacacgtgtttcacaa

SEQ ID NO: 706999 - DNA, 19 bp, Mus musculus
  siRNA target sequence for Svs2 (NM_017390.2,305-323).
cgcactttgtcgtaatgga

SEQ ID NO: 707000 - DNA, 19 bp, Mus musculus
  siRNA target sequence for Svs2 (NM_017390.2,470-488).
cggtggtcagttgaaatct

SEQ ID NO: 707001 - DNA, 19 bp, Mus musculus
  siRNA target sequence for Svs2 (NM_017390.2,645-663).
ggtggatcccaagtaaaat

SEQ ID NO: 707002 - DNA, 19 bp, Mus musculus
  siRNA target sequence for Svs2 (NM_017390.2,693-711).
gaaggtcaactgaactctt

SEQ ID NO: 707003 - DNA, 19 bp, Mus musculus
  siRNA target sequence for Svs2 (NM_017390.2,696-714).
ggtcaactgaactctttca

SEQ ID NO: 707004 - DNA, 19 bp, Mus musculus
  siRNA target sequence for Svs2 (NM_017390.2,728-746).
ccaaggtgcccaactaaaa

SEQ ID NO: 707005 - DNA, 19 bp, Mus musculus
  siRNA target sequence for Svs2 (NM_017390.2,729-747).
caaggtgcccaactaaaat

SEQ ID NO: 707006 - DNA, 19 bp, Mus musculus
  siRNA target sequence for Svs2 (NM_017390.2,732-750).
ggtgcccaactaaaatcct

SEQ ID NO: 707007 - DNA, 19 bp, Mus musculus
  siRNA target sequence for Svs2 (NM_017390.2,778-796).
cctcctttagccaagtaaa

SEQ ID NO: 707008 - DNA, 19 bp, Mus musculus
  siRNA target sequence for Svs2 (NM_017390.2,801-819).
caaagttcccaactaaagt

SEQ ID NO: 707009 - DNA, 19 bp, Mus musculus
  siRNA target sequence for Svs2 (NM_017390.2,853-871).
ctcaacaaactcagcataa

SEQ ID NO: 707010 - DNA, 19 bp, Mus musculus
  siRNA target sequence for Svs2 (NM_017390.2,896-914).
gtcacaagtgcggaaacaa

SEQ ID NO: 707011 - DNA, 19 bp, Mus musculus
  siRNA target sequence for Svs2 (NM_017390.2,898-916).
cacaagtgcggaaacaatt

SEQ ID NO: 707012 - DNA, 19 bp, Mus musculus
  siRNA target sequence for Svs2 (NM_017390.2,900-918).
caagtgcggaaacaattta

SEQ ID NO: 707013 - DNA, 19 bp, Mus musculus
  siRNA target sequence for Svs2 (NM_017390.2,989-1007).
cggacaacagcggcaatat

SEQ ID NO: 707014 - DNA, 19 bp, Mus musculus
  siRNA target sequence for Svs2 (NM_017390.2,1014-1032).
gagcgctcacaatcctata

SEQ ID NO: 707015 - DNA, 19 bp, Mus musculus
  siRNA target sequence for Svs2 (NM_017390.2,1016-1034).
gcgctcacaatcctataaa

SEQ ID NO: 707016 - DNA, 19 bp, Mus musculus
  siRNA target sequence for Svs2 (NM_017390.2,1027-1045).
cctataaaggatatcttga

SEQ ID NO: 707017 - DNA, 19 bp, Mus musculus
  siRNA target sequence for Svs2 (NM_017390.2,1035-1053).
ggatatcttgagcaataca

SEQ ID NO: 707018 - DNA, 19 bp, Mus musculus
  siRNA target sequence for Slc5a3 (NM_017391.1,31-49).
gccgtagtggccctgtatt

SEQ ID NO: 707019 - DNA, 19 bp, Mus musculus
  siRNA target sequence for Slc5a3 (NM_017391.1,34-52).
gtagtggccctgtatttta

SEQ ID NO: 707020 - DNA, 19 bp, Mus musculus
  siRNA target sequence for Slc5a3 (NM_017391.1,235-253).
gtgggcgcatgggaattca

SEQ ID NO: 707021 - DNA, 19 bp, Mus musculus
  siRNA target sequence for Slc5a3 (NM_017391.1,237-255).
gggcgcatgggaattcaat

SEQ ID NO: 707022 - DNA, 19 bp, Mus musculus
  siRNA target sequence for Slc5a3 (NM_017391.1,303-321).
catccggtcaggggtatat

SEQ ID NO: 707023 - DNA, 19 bp, Mus musculus
  siRNA target sequence for Slc5a3 (NM_017391.1,307-325).
cggtcaggggtatatacca

SEQ ID NO: 707024 - DNA, 19 bp, Mus musculus
  siRNA target sequence for Slc5a3 (NM_017391.1,308-326).
ggtcaggggtatataccat

SEQ ID NO: 707025 - DNA, 19 bp, Mus musculus
  siRNA target sequence for Slc5a3 (NM_017391.1,347-365).
ggttcggtggccataggat

SEQ ID NO: 707026 - DNA, 19 bp, Mus musculus
  siRNA target sequence for Slc5a3 (NM_017391.1,348-366).
gttcggtggccataggatt

SEQ ID NO: 707027 - DNA, 19 bp, Mus musculus
  siRNA target sequence for Slc5a3 (NM_017391.1,358-376).
cataggattcaggtctatt

SEQ ID NO: 707028 - DNA, 19 bp, Mus musculus
  siRNA target sequence for Slc5a3 (NM_017391.1,389-407).
ctctgcttctctatatctt

SEQ ID NO: 707029 - DNA, 19 bp, Mus musculus
  siRNA target sequence for Slc5a3 (NM_017391.1,458-476).
ccttgggttggaaccttta

SEQ ID NO: 707030 - DNA, 19 bp, Mus musculus
  siRNA target sequence for Slc5a3 (NM_017391.1,463-481).
ggttggaacctttatgtgt

SEQ ID NO: 707031 - DNA, 19 bp, Mus musculus
  siRNA target sequence for Slc5a3 (NM_017391.1,530-548).
gccttgttgcagtgatcta

SEQ ID NO: 707032 - DNA, 19 bp, Mus musculus
  siRNA target sequence for Slc5a3 (NM_017391.1,586-604).
gcgctcacacttatggtta

SEQ ID NO: 707033 - DNA, 19 bp, Mus musculus
  siRNA target sequence for Slc5a3 (NM_017391.1,593-611).
cacttatggttattagcat

SEQ ID NO: 707034 - DNA, 19 bp, Mus musculus
  siRNA target sequence for Slc5a3 (NM_017391.1,637-655).
gttaagagaaggtacatgt

SEQ ID NO: 707035 - DNA, 19 bp, Mus musculus
  siRNA target sequence for Slc5a3 (NM_017391.1,654-672).
gttggcctcacctgatgtt

SEQ ID NO: 707036 - DNA, 19 bp, Mus musculus
  siRNA target sequence for Slc5a3 (NM_017391.1,664-682).
cctgatgttgcttccattt

SEQ ID NO: 707037 - DNA, 19 bp, Mus musculus
  siRNA target sequence for Slc5a3 (NM_017391.1,667-685).
gatgttgcttccattttgt

SEQ ID NO: 707038 - DNA, 19 bp, Mus musculus
  siRNA target sequence for Slc5a3 (NM_017391.1,670-688).
gttgcttccattttgttga

SEQ ID NO: 707039 - DNA, 19 bp, Mus musculus
  siRNA target sequence for Slc5a3 (NM_017391.1,713-731).
cttgtatggtccatcctaa

SEQ ID NO: 707040 - DNA, 19 bp, Mus musculus
  siRNA target sequence for Slc5a3 (NM_017391.1,733-751).
gcgaatgccctaaaaatgt

SEQ ID NO: 707041 - DNA, 19 bp, Mus musculus
  siRNA target sequence for Slc5a3 (NM_017391.1,734-752).
cgaatgccctaaaaatgtt

SEQ ID NO: 707042 - DNA, 19 bp, Mus musculus
  siRNA target sequence for Slc5a3 (NM_017391.1,827-845).
ggtgtgctgaccaagtcat

SEQ ID NO: 707043 - DNA, 19 bp, Mus musculus
  siRNA target sequence for Slc5a3 (NM_017391.1,854-872).
gggttctagcagccaaaaa

SEQ ID NO: 707044 - DNA, 19 bp, Mus musculus
  siRNA target sequence for Slc5a3 (NM_017391.1,856-874).
gttctagcagccaaaaaca

SEQ ID NO: 707045 - DNA, 19 bp, Mus musculus
  siRNA target sequence for Slc5a3 (NM_017391.1,883-901).
gccaaaggctccactctaa

SEQ ID NO: 707046 - DNA, 19 bp, Mus musculus
  siRNA target sequence for Slc5a3 (NM_017391.1,915-933).
gaagcttctaccaatgttt

SEQ ID NO: 707047 - DNA, 19 bp, Mus musculus
  siRNA target sequence for Slc5a3 (NM_017391.1,943-961).
gtaccaggaatgatttcca

SEQ ID NO: 707048 - DNA, 19 bp, Mus musculus
  siRNA target sequence for Slc5a3 (NM_017391.1,1172-1190).
ccctcgatgtgtacaaact

SEQ ID NO: 707049 - DNA, 19 bp, Mus musculus
  siRNA target sequence for Slc5a3 (NM_017391.1,1173-1191).
cctcgatgtgtacaaactt

SEQ ID NO: 707050 - DNA, 19 bp, Mus musculus
  siRNA target sequence for Slc5a3 (NM_017391.1,1174-1192).
ctcgatgtgtacaaactta

SEQ ID NO: 707051 - DNA, 19 bp, Mus musculus
  siRNA target sequence for Slc5a3 (NM_017391.1,1204-1222).
gcaagctcccgggaactaa

SEQ ID NO: 707052 - DNA, 19 bp, Mus musculus
  siRNA target sequence for Slc5a3 (NM_017391.1,1205-1223).
caagctcccgggaactaat

SEQ ID NO: 707053 - DNA, 19 bp, Mus musculus
  siRNA target sequence for Slc5a3 (NM_017391.1,1208-1226).
gctcccgggaactaatgat

SEQ ID NO: 707054 - DNA, 19 bp, Mus musculus
  siRNA target sequence for Slc5a3 (NM_017391.1,1209-1227).
ctcccgggaactaatgatt

SEQ ID NO: 707055 - DNA, 19 bp, Mus musculus
  siRNA target sequence for Slc5a3 (NM_017391.1,1211-1229).
cccgggaactaatgattgt

SEQ ID NO: 707056 - DNA, 19 bp, Mus musculus
  siRNA target sequence for Slc5a3 (NM_017391.1,1255-1273).
gttgtcatcagcatagcat

SEQ ID NO: 707057 - DNA, 19 bp, Mus musculus
  siRNA target sequence for Slc5a3 (NM_017391.1,1300-1318).
ggaggccaaatgtaccttt

SEQ ID NO: 707058 - DNA, 19 bp, Mus musculus
  siRNA target sequence for Slc5a3 (NM_017391.1,1301-1319).
gaggccaaatgtaccttta

SEQ ID NO: 707059 - DNA, 19 bp, Mus musculus
  siRNA target sequence for Slc5a3 (NM_017391.1,1303-1321).
ggccaaatgtacctttaca

SEQ ID NO: 707060 - DNA, 19 bp, Mus musculus
  siRNA target sequence for Slc5a3 (NM_017391.1,1539-1557).
cgtggctacggcattattt

SEQ ID NO: 707061 - DNA, 19 bp, Mus musculus
  siRNA target sequence for Slc5a3 (NM_017391.1,1540-1558).
gtggctacggcattatttt

SEQ ID NO: 707062 - DNA, 19 bp, Mus musculus
  siRNA target sequence for Slc5a3 (NM_017391.1,1544-1562).
ctacggcattattttggat

SEQ ID NO: 707063 - DNA, 19 bp, Mus musculus
  siRNA target sequence for Slc5a3 (NM_017391.1,1620-1638).
gattcgtaccactaccttt

SEQ ID NO: 707064 - DNA, 19 bp, Mus musculus
  siRNA target sequence for Slc5a3 (NM_017391.1,1624-1642).
cgtaccactaccttttggt

SEQ ID NO: 707065 - DNA, 19 bp, Mus musculus
  siRNA target sequence for Slc5a3 (NM_017391.1,1676-1694).
ctcagaaagacgaaccata

SEQ ID NO: 707066 - DNA, 19 bp, Mus musculus
  siRNA target sequence for Slc5a3 (NM_017391.1,1680-1698).
gaaagacgaaccatacaaa

SEQ ID NO: 707067 - DNA, 19 bp, Mus musculus
  siRNA target sequence for Slc5a3 (NM_017391.1,1738-1756).
gaagtcatcagccatacta

SEQ ID NO: 707068 - DNA, 19 bp, Mus musculus
  siRNA target sequence for Slc5a3 (NM_017391.1,1794-1812).
gcaacctgaagacgttaat

SEQ ID NO: 707069 - DNA, 19 bp, Mus musculus
  siRNA target sequence for Slc5a3 (NM_017391.1,1879-1897).
ccagtagatgcttattcca

SEQ ID NO: 707070 - DNA, 19 bp, Mus musculus
  siRNA target sequence for Slc5a3 (NM_017391.1,1880-1898).
cagtagatgcttattccaa

SEQ ID NO: 707071 - DNA, 19 bp, Mus musculus
  siRNA target sequence for Slc5a3 (NM_017391.1,2040-2058).
ggaggctgtgtgtttacaa

SEQ ID NO: 707072 - DNA, 19 bp, Mus musculus
  siRNA target sequence for Slc5a3 (NM_017391.1,2080-2098).
gttaaagtgatcctaaaca

SEQ ID NO: 707073 - DNA, 19 bp, Mus musculus
  siRNA target sequence for Slc5a3 (NM_017391.1,2091-2109).
cctaaacattggacttttt

SEQ ID NO: 707074 - DNA, 19 bp, Mus musculus
  siRNA target sequence for Slc5a3 (NM_017391.1,2117-2135).
gttcacttggaattttcat

SEQ ID NO: 707075 - DNA, 19 bp, Mus musculus
  siRNA target sequence for Arhgef7 (NM_017402.2,420-438).
gtagtacgagccaagttta

SEQ ID NO: 707076 - DNA, 19 bp, Mus musculus
  siRNA target sequence for Arhgef7 (NM_017402.2,423-441).
gtacgagccaagtttaact

SEQ ID NO: 707077 - DNA, 19 bp, Mus musculus
  siRNA target sequence for Arhgef7 (NM_017402.2,596-614).
gcccgtgtcacccaaatca

SEQ ID NO: 707078 - DNA, 19 bp, Mus musculus
  siRNA target sequence for Arhgef7 (NM_017402.2,630-648).
cctcccaaagggttcgata

SEQ ID NO: 707079 - DNA, 19 bp, Mus musculus
  siRNA target sequence for Arhgef7 (NM_017402.2,645-663).
gatacgactgccatcaaca

SEQ ID NO: 707080 - DNA, 19 bp, Mus musculus
  siRNA target sequence for Arhgef7 (NM_017402.2,654-672).
gccatcaacaagagctatt

SEQ ID NO: 707081 - DNA, 19 bp, Mus musculus
  siRNA target sequence for Arhgef7 (NM_017402.2,655-673).
ccatcaacaagagctatta

SEQ ID NO: 707082 - DNA, 19 bp, Mus musculus
  siRNA target sequence for Arhgef7 (NM_017402.2,786-804).
gcaaacacttcatatttaa

SEQ ID NO: 707083 - DNA, 19 bp, Mus musculus
  siRNA target sequence for Arhgef7 (NM_017402.2,787-805).
caaacacttcatatttaat

SEQ ID NO: 707084 - DNA, 19 bp, Mus musculus
  siRNA target sequence for Arhgef7 (NM_017402.2,807-825).
ggaaatctagaggaaatat

SEQ ID NO: 707085 - DNA, 19 bp, Mus musculus
  siRNA target sequence for Arhgef7 (NM_017402.2,846-864).
gtacagtccctagaagaat

SEQ ID NO: 707086 - DNA, 19 bp, Mus musculus
  siRNA target sequence for Arhgef7 (NM_017402.2,935-953).
cctgtacctcgcttactgt

SEQ ID NO: 707087 - DNA, 19 bp, Mus musculus
  siRNA target sequence for Arhgef7 (NM_017402.2,1002-1020).
ctaggagagttcatggaaa

SEQ ID NO: 707088 - DNA, 19 bp, Mus musculus
  siRNA target sequence for Arhgef7 (NM_017402.2,1133-1151).
ggattatcatcctgataga

SEQ ID NO: 707089 - DNA, 19 bp, Mus musculus
  siRNA target sequence for Arhgef7 (NM_017402.2,1140-1158).
catcctgatagacaagata

SEQ ID NO: 707090 - DNA, 19 bp, Mus musculus
  siRNA target sequence for Arhgef7 (NM_017402.2,1264-1282).
gggagggggatgacataaa

SEQ ID NO: 707091 - DNA, 19 bp, Mus musculus
  siRNA target sequence for Arhgef7 (NM_017402.2,1330-1348).
cgggaagcgaggagaagaa

SEQ ID NO: 707092 - DNA, 19 bp, Mus musculus
  siRNA target sequence for Arhgef7 (NM_017402.2,1331-1349).
gggaagcgaggagaagaat

SEQ ID NO: 707093 - DNA, 19 bp, Mus musculus
  siRNA target sequence for Arhgef7 (NM_017402.2,1467-1485).
gaggacagtgaaaaccata

SEQ ID NO: 707094 - DNA, 19 bp, Mus musculus
  siRNA target sequence for Arhgef7 (NM_017402.2,1482-1500).
cataggaatgcatttgaga

SEQ ID NO: 707095 - DNA, 19 bp, Mus musculus
  siRNA target sequence for Arhgef7 (NM_017402.2,1487-1505).
gaatgcatttgagatatca

SEQ ID NO: 707096 - DNA, 19 bp, Mus musculus
  siRNA target sequence for Arhgef7 (NM_017402.2,1888-1906).
ccaagaccatgaaaaagct

SEQ ID NO: 707097 - DNA, 19 bp, Mus musculus
  siRNA target sequence for Arhgef7 (NM_017402.2,1994-2012).
gatcctgaaggttatcgaa

SEQ ID NO: 707098 - DNA, 19 bp, Mus musculus
  siRNA target sequence for Arhgef7 (NM_017402.2,2037-2055).
cgccagaccctgaactcaa

SEQ ID NO: 707099 - DNA, 19 bp, Mus musculus
  siRNA target sequence for Arhgef7 (NM_017402.2,2040-2058).
cagaccctgaactcaagtt

SEQ ID NO: 707100 - DNA, 19 bp, Mus musculus
  siRNA target sequence for Arhgef7 (NM_017402.2,2170-2188).
cggtgtatgcgttaaagga

SEQ ID NO: 707101 - DNA, 19 bp, Mus musculus
  siRNA target sequence for Arhgef7 (NM_017402.2,2171-2189).
ggtgtatgcgttaaaggat

SEQ ID NO: 707102 - DNA, 19 bp, Mus musculus
  siRNA target sequence for Arhgef7 (NM_017402.2,2199-2217).
gagttaagacaggataaca

SEQ ID NO: 707103 - DNA, 19 bp, Mus musculus
  siRNA target sequence for Arhgef7 (NM_017402.2,2206-2224).
gacaggataacaagaagat

SEQ ID NO: 707104 - DNA, 19 bp, Mus musculus
  siRNA target sequence for Arhgef7 (NM_017402.2,2274-2292).
ctggtgaggaaggttctaa

SEQ ID NO: 707105 - DNA, 19 bp, Mus musculus
  siRNA target sequence for Arhgef7 (NM_017402.2,2277-2295).
gtgaggaaggttctaaaga

SEQ ID NO: 707106 - DNA, 19 bp, Mus musculus
  siRNA target sequence for Arhgef7 (NM_017402.2,2281-2299).
ggaaggttctaaagaatat

SEQ ID NO: 707107 - DNA, 19 bp, Mus musculus
  siRNA target sequence for Arhgef7 (NM_017402.2,2312-2330).
ctgggatgagaccaatcta

SEQ ID NO: 707108 - DNA, 19 bp, Mus musculus
  siRNA target sequence for Copg (NM_017477.1,186-204).
gctcgggtctttaacgaaa

SEQ ID NO: 707109 - DNA, 19 bp, Mus musculus
  siRNA target sequence for Copg (NM_017477.1,209-227).
catcaatccccggaaatgt

SEQ ID NO: 707110 - DNA, 19 bp, Mus musculus
  siRNA target sequence for Copg (NM_017477.1,241-259).
ccaagatcctttatctcat

SEQ ID NO: 707111 - DNA, 19 bp, Mus musculus
  siRNA target sequence for Copg (NM_017477.1,242-260).
caagatcctttatctcata

SEQ ID NO: 707112 - DNA, 19 bp, Mus musculus
  siRNA target sequence for Copg (NM_017477.1,415-433).
gcagcctgacaaaagacat

SEQ ID NO: 707113 - DNA, 19 bp, Mus musculus
  siRNA target sequence for Copg (NM_017477.1,520-538).
gctacatgaaacaagcaat

SEQ ID NO: 707114 - DNA, 19 bp, Mus musculus
  siRNA target sequence for Copg (NM_017477.1,521-539).
ctacatgaaacaagcaatt

SEQ ID NO: 707115 - DNA, 19 bp, Mus musculus
  siRNA target sequence for Copg (NM_017477.1,585-603).
ctgcacctgctgaaatgca

SEQ ID NO: 707116 - DNA, 19 bp, Mus musculus
  siRNA target sequence for Copg (NM_017477.1,648-666).
gcgtccagtgacaacatca

SEQ ID NO: 707117 - DNA, 19 bp, Mus musculus
  siRNA target sequence for Copg (NM_017477.1,695-713).
gtaccatgtgcggaagaat

SEQ ID NO: 707118 - DNA, 19 bp, Mus musculus
  siRNA target sequence for Copg (NM_017477.1,717-735).
cgactggccgtgagtaaga

SEQ ID NO: 707119 - DNA, 19 bp, Mus musculus
  siRNA target sequence for Copg (NM_017477.1,718-736).
gactggccgtgagtaagat

SEQ ID NO: 707120 - DNA, 19 bp, Mus musculus
  siRNA target sequence for Copg (NM_017477.1,720-738).
ctggccgtgagtaagatga

SEQ ID NO: 707121 - DNA, 19 bp, Mus musculus
  siRNA target sequence for Copg (NM_017477.1,723-741).
gccgtgagtaagatgatca

SEQ ID NO: 707122 - DNA, 19 bp, Mus musculus
  siRNA target sequence for Copg (NM_017477.1,837-855).
gacagcccgctgtttgact

SEQ ID NO: 707123 - DNA, 19 bp, Mus musculus
  siRNA target sequence for Copg (NM_017477.1,903-921).
gctgcctcagccattgtca

SEQ ID NO: 707124 - DNA, 19 bp, Mus musculus
  siRNA target sequence for Copg (NM_017477.1,904-922).
ctgcctcagccattgtcaa

SEQ ID NO: 707125 - DNA, 19 bp, Mus musculus
  siRNA target sequence for Copg (NM_017477.1,1015-1033).
ctgtgcgcaccctcaataa

SEQ ID NO: 707126 - DNA, 19 bp, Mus musculus
  siRNA target sequence for Copg (NM_017477.1,1058-1076).
ggtgactgcctgcaatcta

SEQ ID NO: 707127 - DNA, 19 bp, Mus musculus
  siRNA target sequence for Copg (NM_017477.1,1061-1079).
gactgcctgcaatctagat

SEQ ID NO: 707128 - DNA, 19 bp, Mus musculus
  siRNA target sequence for Copg (NM_017477.1,1162-1180).
gcattgaccgccttatgaa

SEQ ID NO: 707129 - DNA, 19 bp, Mus musculus
  siRNA target sequence for Copg (NM_017477.1,1170-1188).
cgccttatgaagcagattt

SEQ ID NO: 707130 - DNA, 19 bp, Mus musculus
  siRNA target sequence for Copg (NM_017477.1,1182-1200).
cagatttcctccttcatgt

SEQ ID NO: 707131 - DNA, 19 bp, Mus musculus
  siRNA target sequence for Copg (NM_017477.1,1246-1264).
gtgccctgtgccagaagta

SEQ ID NO: 707132 - DNA, 19 bp, Mus musculus
  siRNA target sequence for Copg (NM_017477.1,1259-1277).
gaagtatcctcgaaagcat

SEQ ID NO: 707133 - DNA, 19 bp, Mus musculus
  siRNA target sequence for Copg (NM_017477.1,1405-1423).
cacacctgtgcgagttcat

SEQ ID NO: 707134 - DNA, 19 bp, Mus musculus
  siRNA target sequence for Copg (NM_017477.1,1496-1514).
caacccttccaagtacatt

SEQ ID NO: 707135 - DNA, 19 bp, Mus musculus
  siRNA target sequence for Copg (NM_017477.1,1605-1623).
gagatgttgcctagtatct

SEQ ID NO: 707136 - DNA, 19 bp, Mus musculus
  siRNA target sequence for Copg (NM_017477.1,1717-1735).
ctctcaacgcaggttacat

SEQ ID NO: 707137 - DNA, 19 bp, Mus musculus
  siRNA target sequence for Copg (NM_017477.1,1724-1742).
cgcaggttacatcctaaat

SEQ ID NO: 707138 - DNA, 19 bp, Mus musculus
  siRNA target sequence for Copg (NM_017477.1,1879-1897).
ccaccgcagcagtcaaaca

SEQ ID NO: 707139 - DNA, 19 bp, Mus musculus
  siRNA target sequence for Copg (NM_017477.1,1914-1932).
gccacacggcaggagattt

SEQ ID NO: 707140 - DNA, 19 bp, Mus musculus
  siRNA target sequence for Copg (NM_017477.1,1969-1987).
gactagggcctctcttcaa

SEQ ID NO: 707141 - DNA, 19 bp, Mus musculus
  siRNA target sequence for Copg (NM_017477.1,2020-2038).
ccgagaccgagtatgtcat

SEQ ID NO: 707142 - DNA, 19 bp, Mus musculus
  siRNA target sequence for Copg (NM_017477.1,2141-2159).
gcccactgaggcatacgaa

SEQ ID NO: 707143 - DNA, 19 bp, Mus musculus
  siRNA target sequence for Copg (NM_017477.1,2377-2395).
ctgatcacatccaaaaagt

SEQ ID NO: 707144 - DNA, 19 bp, Mus musculus
  siRNA target sequence for Copg (NM_017477.1,2458-2476).
cgttcaccctgtctactat

SEQ ID NO: 707145 - DNA, 19 bp, Mus musculus
  siRNA target sequence for Rai12 (NM_018740.1,332-350).
ggctcttatcaagaaatct

SEQ ID NO: 707146 - DNA, 19 bp, Mus musculus
  siRNA target sequence for Rai12 (NM_018740.1,385-403).
gtgaagtgagcgaagaaga

SEQ ID NO: 707147 - DNA, 19 bp, Mus musculus
  siRNA target sequence for Rai12 (NM_018740.1,415-433).
gtttcgactctgatgtcaa

SEQ ID NO: 707148 - DNA, 19 bp, Mus musculus
  siRNA target sequence for Rai12 (NM_018740.1,820-838).
cccaacaacgtgcaactta

SEQ ID NO: 707149 - DNA, 19 bp, Mus musculus
  siRNA target sequence for Rai12 (NM_018740.1,942-960).
gatcccactgctcatttga

SEQ ID NO: 707150 - DNA, 19 bp, Mus musculus
  siRNA target sequence for Rai12 (NM_018740.1,949-967).
ctgctcatttgacctttaa

SEQ ID NO: 707151 - DNA, 19 bp, Mus musculus
  siRNA target sequence for Rai12 (NM_018740.1,959-977).
gacctttaaccttcactta

SEQ ID NO: 707152 - DNA, 19 bp, Mus musculus
  siRNA target sequence for Rai12 (NM_018740.1,1091-1109).
ctatgagccagatgctttt

SEQ ID NO: 707153 - DNA, 19 bp, Mus musculus
  siRNA target sequence for Rai12 (NM_018740.1,1131-1149).
ccagatgatgacctagata

SEQ ID NO: 707154 - DNA, 19 bp, Mus musculus
  siRNA target sequence for Itih4 (NM_018746.1,91-109).
cactactgccgagaagaat

SEQ ID NO: 707155 - DNA, 19 bp, Mus musculus
  siRNA target sequence for Itih4 (NM_018746.1,418-436).
ggcccctggttccaagatt

SEQ ID NO: 707156 - DNA, 19 bp, Mus musculus
  siRNA target sequence for Itih4 (NM_018746.1,419-437).
gcccctggttccaagatta

SEQ ID NO: 707157 - DNA, 19 bp, Mus musculus
  siRNA target sequence for Itih4 (NM_018746.1,433-451).
gattaccttcgaactcata

SEQ ID NO: 707158 - DNA, 19 bp, Mus musculus
  siRNA target sequence for Itih4 (NM_018746.1,438-456).
ccttcgaactcatatacca

SEQ ID NO: 707159 - DNA, 19 bp, Mus musculus
  siRNA target sequence for Itih4 (NM_018746.1,471-489).
ggcgactgggaatgtatga

SEQ ID NO: 707160 - DNA, 19 bp, Mus musculus
  siRNA target sequence for Itih4 (NM_018746.1,488-506).
gagctactcctcaaagtga

SEQ ID NO: 707161 - DNA, 19 bp, Mus musculus
  siRNA target sequence for Itih4 (NM_018746.1,854-872).
gataaaagcggatctatgt

SEQ ID NO: 707162 - DNA, 19 bp, Mus musculus
  siRNA target sequence for Itih4 (NM_018746.1,894-912).
cccgagaagccctagtcaa

SEQ ID NO: 707163 - DNA, 19 bp, Mus musculus
  siRNA target sequence for Itih4 (NM_018746.1,897-915).
gagaagccctagtcaagat

SEQ ID NO: 707164 - DNA, 19 bp, Mus musculus
  siRNA target sequence for Itih4 (NM_018746.1,904-922).
cctagtcaagatcttgaaa

SEQ ID NO: 707165 - DNA, 19 bp, Mus musculus
  siRNA target sequence for Itih4 (NM_018746.1,997-1015).
gcaagcgacagaagagaat

SEQ ID NO: 707166 - DNA, 19 bp, Mus musculus
  siRNA target sequence for Itih4 (NM_018746.1,998-1016).
caagcgacagaagagaatt

SEQ ID NO: 707167 - DNA, 19 bp, Mus musculus
  siRNA target sequence for Itih4 (NM_018746.1,1018-1036).
gaacaaggctgtaaactat

SEQ ID NO: 707168 - DNA, 19 bp, Mus musculus
  siRNA target sequence for Itih4 (NM_018746.1,1055-1073).
cacggagggaccaacatca

SEQ ID NO: 707169 - DNA, 19 bp, Mus musculus
  siRNA target sequence for Itih4 (NM_018746.1,1057-1075).
cggagggaccaacatcaat

SEQ ID NO: 707170 - DNA, 19 bp, Mus musculus
  siRNA target sequence for Itih4 (NM_018746.1,1058-1076).
ggagggaccaacatcaata

SEQ ID NO: 707171 - DNA, 19 bp, Mus musculus
  siRNA target sequence for Itih4 (NM_018746.1,1059-1077).
gagggaccaacatcaataa

SEQ ID NO: 707172 - DNA, 19 bp, Mus musculus
  siRNA target sequence for Itih4 (NM_018746.1,1063-1081).
gaccaacatcaataatgca

SEQ ID NO: 707173 - DNA, 19 bp, Mus musculus
  siRNA target sequence for Itih4 (NM_018746.1,1194-1212).
ccaaccccacgattatcca

SEQ ID NO: 707174 - DNA, 19 bp, Mus musculus
  siRNA target sequence for Itih4 (NM_018746.1,1321-1339).
cctggccaggcgcatctat

SEQ ID NO: 707175 - DNA, 19 bp, Mus musculus
  siRNA target sequence for Itih4 (NM_018746.1,1404-1422).
catcagtggccttcgaata

SEQ ID NO: 707176 - DNA, 19 bp, Mus musculus
  siRNA target sequence for Itih4 (NM_018746.1,1442-1460).
gaagtcactcggtacaagt

SEQ ID NO: 707177 - DNA, 19 bp, Mus musculus
  siRNA target sequence for Itih4 (NM_018746.1,1526-1544).
gtcctcttagccaaagtca

SEQ ID NO: 707178 - DNA, 19 bp, Mus musculus
  siRNA target sequence for Itih4 (NM_018746.1,1587-1605).
ccagcgtagcccaacaaga

SEQ ID NO: 707179 - DNA, 19 bp, Mus musculus
  siRNA target sequence for Itih4 (NM_018746.1,1590-1608).
gcgtagcccaacaagagaa

SEQ ID NO: 707180 - DNA, 19 bp, Mus musculus
  siRNA target sequence for Itih4 (NM_018746.1,1618-1636).
gagccccaagtacatcttt

SEQ ID NO: 707181 - DNA, 19 bp, Mus musculus
  siRNA target sequence for Itih4 (NM_018746.1,1620-1638).
gccccaagtacatctttca

SEQ ID NO: 707182 - DNA, 19 bp, Mus musculus
  siRNA target sequence for Itih4 (NM_018746.1,1622-1640).
cccaagtacatctttcaca

SEQ ID NO: 707183 - DNA, 19 bp, Mus musculus
  siRNA target sequence for Itih4 (NM_018746.1,1623-1641).
ccaagtacatctttcacaa

SEQ ID NO: 707184 - DNA, 19 bp, Mus musculus
  siRNA target sequence for Itih4 (NM_018746.1,1704-1722).
cgtcaggtgccgaattaga

SEQ ID NO: 707185 - DNA, 19 bp, Mus musculus
  siRNA target sequence for Itih4 (NM_018746.1,1902-1920).
ctcctgtcagaggatctaa

SEQ ID NO: 707186 - DNA, 19 bp, Mus musculus
  siRNA target sequence for Itih4 (NM_018746.1,1907-1925).
gtcagaggatctaaactga

SEQ ID NO: 707187 - DNA, 19 bp, Mus musculus
  siRNA target sequence for Itih4 (NM_018746.1,1980-1998).
gggcatctaggcaatacat

SEQ ID NO: 707188 - DNA, 19 bp, Mus musculus
  siRNA target sequence for Itih4 (NM_018746.1,2145-2163).
cctccgttgcagcacaata

SEQ ID NO: 707189 - DNA, 19 bp, Mus musculus
  siRNA target sequence for Itih4 (NM_018746.1,2146-2164).
ctccgttgcagcacaatat

SEQ ID NO: 707190 - DNA, 19 bp, Mus musculus
  siRNA target sequence for Itih4 (NM_018746.1,2149-2167).
cgttgcagcacaatatcct

SEQ ID NO: 707191 - DNA, 19 bp, Mus musculus
  siRNA target sequence for Itih4 (NM_018746.1,2182-2200).
ggttgtgacggaaaaaagt

SEQ ID NO: 707192 - DNA, 19 bp, Mus musculus
  siRNA target sequence for Itih4 (NM_018746.1,2183-2201).
gttgtgacggaaaaaagta

SEQ ID NO: 707193 - DNA, 19 bp, Mus musculus
  siRNA target sequence for Itih4 (NM_018746.1,2243-2261).
ccccaggttcctactatta

SEQ ID NO: 707194 - DNA, 19 bp, Mus musculus
  siRNA target sequence for Itih4 (NM_018746.1,2246-2264).
caggttcctactattacct

SEQ ID NO: 707195 - DNA, 19 bp, Mus musculus
  siRNA target sequence for Itih4 (NM_018746.1,2293-2311).
gctctgtgtggatatctta

SEQ ID NO: 707196 - DNA, 19 bp, Mus musculus
  siRNA target sequence for Itih4 (NM_018746.1,2363-2381).
gtgactggtaagtatgaga

SEQ ID NO: 707197 - DNA, 19 bp, Mus musculus
  siRNA target sequence for Itih4 (NM_018746.1,2365-2383).
gactggtaagtatgagaat

SEQ ID NO: 707198 - DNA, 19 bp, Mus musculus
  siRNA target sequence for Itih4 (NM_018746.1,2458-2476).
ggtgacacgaggcagaaaa

SEQ ID NO: 707199 - DNA, 19 bp, Mus musculus
  siRNA target sequence for Itih4 (NM_018746.1,2513-2531).
gtgttacctggcttgaaga

SEQ ID NO: 707200 - DNA, 19 bp, Mus musculus
  siRNA target sequence for Itih4 (NM_018746.1,2560-2578).
gctcagtggcccagacaaa

SEQ ID NO: 707201 - DNA, 19 bp, Mus musculus
  siRNA target sequence for Itih4 (NM_018746.1,2618-2636).
ggactaatgctgcttttga

SEQ ID NO: 707202 - DNA, 19 bp, Mus musculus
  siRNA target sequence for Itih4 (NM_018746.1,2619-2637).
gactaatgctgcttttgaa

SEQ ID NO: 707203 - DNA, 19 bp, Mus musculus
  siRNA target sequence for Itih4 (NM_018746.1,2648-2666).
cacttctccaacaacgtta

SEQ ID NO: 707204 - DNA, 19 bp, Mus musculus
  siRNA target sequence for Itih4 (NM_018746.1,2650-2668).
cttctccaacaacgttaaa

SEQ ID NO: 707205 - DNA, 19 bp, Mus musculus
  siRNA target sequence for Itih4 (NM_018746.1,2711-2729).
cccgtcgagccagataata

SEQ ID NO: 707206 - DNA, 19 bp, Mus musculus
  siRNA target sequence for Itih4 (NM_018746.1,2713-2731).
cgtcgagccagataataca

SEQ ID NO: 707207 - DNA, 19 bp, Mus musculus
  siRNA target sequence for Itih4 (NM_018746.1,2714-2732).
gtcgagccagataatacaa

SEQ ID NO: 707208 - DNA, 19 bp, Mus musculus
  siRNA target sequence for Itih4 (NM_018746.1,2716-2734).
cgagccagataatacaaaa

SEQ ID NO: 707209 - DNA, 19 bp, Mus musculus
  siRNA target sequence for Itih4 (NM_018746.1,2779-2797).
gctcaagttgagttaccaa

SEQ ID NO: 707210 - DNA, 19 bp, Mus musculus
  siRNA target sequence for Zfp326 (NM_018759.1,121-139).
ggtgcttaccaggacttta

SEQ ID NO: 707211 - DNA, 19 bp, Mus musculus
  siRNA target sequence for Zfp326 (NM_018759.1,122-140).
gtgcttaccaggactttaa

SEQ ID NO: 707212 - DNA, 19 bp, Mus musculus
  siRNA target sequence for Zfp326 (NM_018759.1,132-150).
ggactttaacggaatggat

SEQ ID NO: 707213 - DNA, 19 bp, Mus musculus
  siRNA target sequence for Zfp326 (NM_018759.1,141-159).
cggaatggatcgtgattat

SEQ ID NO: 707214 - DNA, 19 bp, Mus musculus
  siRNA target sequence for Zfp326 (NM_018759.1,192-210).
ctatggccatggatcctat

SEQ ID NO: 707215 - DNA, 19 bp, Mus musculus
  siRNA target sequence for Zfp326 (NM_018759.1,214-232).
ggtcagagatccatggatt

SEQ ID NO: 707216 - DNA, 19 bp, Mus musculus
  siRNA target sequence for Zfp326 (NM_018759.1,224-242).
ccatggattcctacctaaa

SEQ ID NO: 707217 - DNA, 19 bp, Mus musculus
  siRNA target sequence for Zfp326 (NM_018759.1,248-266).
cctatggcatggacaatca

SEQ ID NO: 707218 - DNA, 19 bp, Mus musculus
  siRNA target sequence for Zfp326 (NM_018759.1,350-368).
gatctggctatggttttaa

SEQ ID NO: 707219 - DNA, 19 bp, Mus musculus
  siRNA target sequence for Zfp326 (NM_018759.1,383-401).
cccgcttcggaggtagtta

SEQ ID NO: 707220 - DNA, 19 bp, Mus musculus
  siRNA target sequence for Zfp326 (NM_018759.1,384-402).
ccgcttcggaggtagttat

SEQ ID NO: 707221 - DNA, 19 bp, Mus musculus
  siRNA target sequence for Zfp326 (NM_018759.1,387-405).
cttcggaggtagttatggt

SEQ ID NO: 707222 - DNA, 19 bp, Mus musculus
  siRNA target sequence for Zfp326 (NM_018759.1,428-446).
ggaatagccttgactcttt

SEQ ID NO: 707223 - DNA, 19 bp, Mus musculus
  siRNA target sequence for Zfp326 (NM_018759.1,482-500).
caccttactcccgttcaaa

SEQ ID NO: 707224 - DNA, 19 bp, Mus musculus
  siRNA target sequence for Zfp326 (NM_018759.1,622-640).
cctgaaagtacgtttggaa

SEQ ID NO: 707225 - DNA, 19 bp, Mus musculus
  siRNA target sequence for Zfp326 (NM_018759.1,641-659).
gcagaagctatgatgcttt

SEQ ID NO: 707226 - DNA, 19 bp, Mus musculus
  siRNA target sequence for Zfp326 (NM_018759.1,683-701).
gccgaggccgaggacatat

SEQ ID NO: 707227 - DNA, 19 bp, Mus musculus
  siRNA target sequence for Zfp326 (NM_018759.1,760-778).
gccaatgtgacgattgcta

SEQ ID NO: 707228 - DNA, 19 bp, Mus musculus
  siRNA target sequence for Zfp326 (NM_018759.1,775-793).
gctactgcaagaggaataa

SEQ ID NO: 707229 - DNA, 19 bp, Mus musculus
  siRNA target sequence for Zfp326 (NM_018759.1,827-845).
ggggagcctttatcaagaa

SEQ ID NO: 707230 - DNA, 19 bp, Mus musculus
  siRNA target sequence for Zfp326 (NM_018759.1,847-865).
cctaagctagcgaaaccta

SEQ ID NO: 707231 - DNA, 19 bp, Mus musculus
  siRNA target sequence for Zfp326 (NM_018759.1,848-866).
ctaagctagcgaaacctat

SEQ ID NO: 707232 - DNA, 19 bp, Mus musculus
  siRNA target sequence for Zfp326 (NM_018759.1,852-870).
gctagcgaaacctatggat

SEQ ID NO: 707233 - DNA, 19 bp, Mus musculus
  siRNA target sequence for Zfp326 (NM_018759.1,853-871).
ctagcgaaacctatggata

SEQ ID NO: 707234 - DNA, 19 bp, Mus musculus
  siRNA target sequence for Zfp326 (NM_018759.1,856-874).
gcgaaacctatggataaga

SEQ ID NO: 707235 - DNA, 19 bp, Mus musculus
  siRNA target sequence for Zfp326 (NM_018759.1,857-875).
cgaaacctatggataagat

SEQ ID NO: 707236 - DNA, 19 bp, Mus musculus
  siRNA target sequence for Zfp326 (NM_018759.1,893-911).
ctacaaaaactgatcctaa

SEQ ID NO: 707237 - DNA, 19 bp, Mus musculus
  siRNA target sequence for Zfp326 (NM_018759.1,943-961).
gctcggcgagagaagcaaa

SEQ ID NO: 707238 - DNA, 19 bp, Mus musculus
  siRNA target sequence for Zfp326 (NM_018759.1,962-980).
gacgtagacgagaaaaaaa

SEQ ID NO: 707239 - DNA, 19 bp, Mus musculus
  siRNA target sequence for Zfp326 (NM_018759.1,964-982).
cgtagacgagaaaaaaaca

SEQ ID NO: 707240 - DNA, 19 bp, Mus musculus
  siRNA target sequence for Zfp326 (NM_018759.1,1085-1103).
ctcaccaggaaacattaga

SEQ ID NO: 707241 - DNA, 19 bp, Mus musculus
  siRNA target sequence for Zfp326 (NM_018759.1,1089-1107).
ccaggaaacattagatcat

SEQ ID NO: 707242 - DNA, 19 bp, Mus musculus
  siRNA target sequence for Zfp326 (NM_018759.1,1121-1139).
ccaaatttgataaagtagt

SEQ ID NO: 707243 - DNA, 19 bp, Mus musculus
  siRNA target sequence for Zfp326 (NM_018759.1,1160-1178).
gtatggtgaataaatttaa

SEQ ID NO: 707244 - DNA, 19 bp, Mus musculus
  siRNA target sequence for Zfp326 (NM_018759.1,1192-1210).
cgtaagcaacagacactta

SEQ ID NO: 707245 - DNA, 19 bp, Mus musculus
  siRNA target sequence for Zfp326 (NM_018759.1,1215-1233).
cccagaagcttacaaaata

SEQ ID NO: 707246 - DNA, 19 bp, Mus musculus
  siRNA target sequence for Zfp326 (NM_018759.1,1216-1234).
ccagaagcttacaaaataa

SEQ ID NO: 707247 - DNA, 19 bp, Mus musculus
  siRNA target sequence for Zfp326 (NM_018759.1,1217-1235).
cagaagcttacaaaataat

SEQ ID NO: 707248 - DNA, 19 bp, Mus musculus
  siRNA target sequence for Zfp326 (NM_018759.1,1222-1240).
gcttacaaaataattgaaa

SEQ ID NO: 707249 - DNA, 19 bp, Mus musculus
  siRNA target sequence for Zfp326 (NM_018759.1,1262-1280).
ctgcagatgatcacatgat

SEQ ID NO: 707250 - DNA, 19 bp, Mus musculus
  siRNA target sequence for Zfp326 (NM_018759.1,1304-1322).
gtgcttgtagcgtgtacat

SEQ ID NO: 707251 - DNA, 19 bp, Mus musculus
  siRNA target sequence for Zfp326 (NM_018759.1,1340-1358).
cagttcagctgcacctaaa

SEQ ID NO: 707252 - DNA, 19 bp, Mus musculus
  siRNA target sequence for Zfp326 (NM_018759.1,1422-1440).
gactgccacaagcatctta

SEQ ID NO: 707253 - DNA, 19 bp, Mus musculus
  siRNA target sequence for Zfp326 (NM_018759.1,1424-1442).
ctgccacaagcatcttaaa

SEQ ID NO: 707254 - DNA, 19 bp, Mus musculus
  siRNA target sequence for Zfp326 (NM_018759.1,1426-1444).
gccacaagcatcttaaaca

SEQ ID NO: 707255 - DNA, 19 bp, Mus musculus
  siRNA target sequence for Zfp326 (NM_018759.1,1462-1480).
cggtatgagcgctttgtta

SEQ ID NO: 707256 - DNA, 19 bp, Mus musculus
  siRNA target sequence for Zfp326 (NM_018759.1,1463-1481).
ggtatgagcgctttgttaa

SEQ ID NO: 707257 - DNA, 19 bp, Mus musculus
  siRNA target sequence for Zfp326 (NM_018759.1,1477-1495).
gttaagggagagaatcctt

SEQ ID NO: 707258 - DNA, 19 bp, Mus musculus
  siRNA target sequence for Catnal1 (NM_018761.2,210-228).
cagatcaccacacttataa

SEQ ID NO: 707259 - DNA, 19 bp, Mus musculus
  siRNA target sequence for Catnal1 (NM_018761.2,215-233).
caccacacttataaaccat

SEQ ID NO: 707260 - DNA, 19 bp, Mus musculus
  siRNA target sequence for Catnal1 (NM_018761.2,217-235).
ccacacttataaaccataa

SEQ ID NO: 707261 - DNA, 19 bp, Mus musculus
  siRNA target sequence for Catnal1 (NM_018761.2,220-238).
cacttataaaccataaaga

SEQ ID NO: 707262 - DNA, 19 bp, Mus musculus
  siRNA target sequence for Catnal1 (NM_018761.2,230-248).
ccataaagataataccaaa

SEQ ID NO: 707263 - DNA, 19 bp, Mus musculus
  siRNA target sequence for Catnal1 (NM_018761.2,303-321).
gcagttggaagatttgtta

SEQ ID NO: 707264 - DNA, 19 bp, Mus musculus
  siRNA target sequence for Catnal1 (NM_018761.2,333-351).
gctatagccaacgaaaact

SEQ ID NO: 707265 - DNA, 19 bp, Mus musculus
  siRNA target sequence for Catnal1 (NM_018761.2,433-451).
ctaaacggagccatttgga

SEQ ID NO: 707266 - DNA, 19 bp, Mus musculus
  siRNA target sequence for Catnal1 (NM_018761.2,440-458).
gagccatttggaatcagat

SEQ ID NO: 707267 - DNA, 19 bp, Mus musculus
  siRNA target sequence for Catnal1 (NM_018761.2,547-565).
cagatcgtgtagtcatcaa

SEQ ID NO: 707268 - DNA, 19 bp, Mus musculus
  siRNA target sequence for Catnal1 (NM_018761.2,558-576).
gtcatcaagcagatagtga

SEQ ID NO: 707269 - DNA, 19 bp, Mus musculus
  siRNA target sequence for Catnal1 (NM_018761.2,575-593).
gacatcgagaaacaagatt

SEQ ID NO: 707270 - DNA, 19 bp, Mus musculus
  siRNA target sequence for Catnal1 (NM_018761.2,577-595).
catcgagaaacaagattct

SEQ ID NO: 707271 - DNA, 19 bp, Mus musculus
  siRNA target sequence for Catnal1 (NM_018761.2,694-712).
cgggagaccgacaaaatga

SEQ ID NO: 707272 - DNA, 19 bp, Mus musculus
  siRNA target sequence for Catnal1 (NM_018761.2,695-713).
gggagaccgacaaaatgat

SEQ ID NO: 707273 - DNA, 19 bp, Mus musculus
  siRNA target sequence for Catnal1 (NM_018761.2,697-715).
gagaccgacaaaatgattt

SEQ ID NO: 707274 - DNA, 19 bp, Mus musculus
  siRNA target sequence for Catnal1 (NM_018761.2,699-717).
gaccgacaaaatgatttga

SEQ ID NO: 707275 - DNA, 19 bp, Mus musculus
  siRNA target sequence for Catnal1 (NM_018761.2,701-719).
ccgacaaaatgatttgaaa

SEQ ID NO: 707276 - DNA, 19 bp, Mus musculus
  siRNA target sequence for Catnal1 (NM_018761.2,750-768).
gcgagggctgtgcttgaaa

SEQ ID NO: 707277 - DNA, 19 bp, Mus musculus
  siRNA target sequence for Catnal1 (NM_018761.2,965-983).
gttgaaggtgaatattgaa

SEQ ID NO: 707278 - DNA, 19 bp, Mus musculus
  siRNA target sequence for Catnal1 (NM_018761.2,984-1002).
gctcttcgggagaatgttt

SEQ ID NO: 707279 - DNA, 19 bp, Mus musculus
  siRNA target sequence for Catnal1 (NM_018761.2,1253-1271).
gagagaactccattgtaca

SEQ ID NO: 707280 - DNA, 19 bp, Mus musculus
  siRNA target sequence for Catnal1 (NM_018761.2,1281-1299).
ctggcagccgacctgttaa

SEQ ID NO: 707281 - DNA, 19 bp, Mus musculus
  siRNA target sequence for Catnal1 (NM_018761.2,1283-1301).
ggcagccgacctgttaaaa

SEQ ID NO: 707282 - DNA, 19 bp, Mus musculus
  siRNA target sequence for Catnal1 (NM_018761.2,1284-1302).
gcagccgacctgttaaaat

SEQ ID NO: 707283 - DNA, 19 bp, Mus musculus
  siRNA target sequence for Catnal1 (NM_018761.2,1285-1303).
cagccgacctgttaaaatt

SEQ ID NO: 707284 - DNA, 19 bp, Mus musculus
  siRNA target sequence for Catnal1 (NM_018761.2,1370-1388).
ggctgagtatgcctgtaaa

SEQ ID NO: 707285 - DNA, 19 bp, Mus musculus
  siRNA target sequence for Catnal1 (NM_018761.2,1425-1443).
cgattgttgcggcatatat

SEQ ID NO: 707286 - DNA, 19 bp, Mus musculus
  siRNA target sequence for Catnal1 (NM_018761.2,1499-1517).
gactggccaacagatcatt

SEQ ID NO: 707287 - DNA, 19 bp, Mus musculus
  siRNA target sequence for Catnal1 (NM_018761.2,1538-1556).
gttgcatccgtctagcaaa

SEQ ID NO: 707288 - DNA, 19 bp, Mus musculus
  siRNA target sequence for Catnal1 (NM_018761.2,1552-1570).
gcaaaatcgctaaggaaaa

SEQ ID NO: 707289 - DNA, 19 bp, Mus musculus
  siRNA target sequence for Catnal1 (NM_018761.2,1630-1648).
gggaaatcagtgatgtgtt

SEQ ID NO: 707290 - DNA, 19 bp, Mus musculus
  siRNA target sequence for Catnal1 (NM_018761.2,1631-1649).
ggaaatcagtgatgtgttt

SEQ ID NO: 707291 - DNA, 19 bp, Mus musculus
  siRNA target sequence for Catnal1 (NM_018761.2,1665-1683).
gagaggtgcgaccatcttt

SEQ ID NO: 707292 - DNA, 19 bp, Mus musculus
  siRNA target sequence for Catnal1 (NM_018761.2,1669-1687).
ggtgcgaccatctttcact

SEQ ID NO: 707293 - DNA, 19 bp, Mus musculus
  siRNA target sequence for Catnal1 (NM_018761.2,1670-1688).
gtgcgaccatctttcactt

SEQ ID NO: 707294 - DNA, 19 bp, Mus musculus
  siRNA target sequence for Catnal1 (NM_018761.2,1689-1707).
ccaaagcccacgaagaata

SEQ ID NO: 707295 - DNA, 19 bp, Mus musculus
  siRNA target sequence for Catnal1 (NM_018761.2,1710-1728).
gcaaacctgaagtcactaa

SEQ ID NO: 707296 - DNA, 19 bp, Mus musculus
  siRNA target sequence for Catnal1 (NM_018761.2,1820-1838).
cgagaaatgggaagatgaa

SEQ ID NO: 707297 - DNA, 19 bp, Mus musculus
  siRNA target sequence for Catnal1 (NM_018761.2,1854-1872).
cggcatggacgcaatatgt

SEQ ID NO: 707298 - DNA, 19 bp, Mus musculus
  siRNA target sequence for Catnal1 (NM_018761.2,1871-1889).
gtccaggatggcctattct

SEQ ID NO: 707299 - DNA, 19 bp, Mus musculus
  siRNA target sequence for Catnal1 (NM_018761.2,1911-1929).
gaggggccactgaaaactt

SEQ ID NO: 707300 - DNA, 19 bp, Mus musculus
  siRNA target sequence for Catnal1 (NM_018761.2,1965-1983).
gcagagggattaaagctta

SEQ ID NO: 707301 - DNA, 19 bp, Mus musculus
  siRNA target sequence for Catnal1 (NM_018761.2,1968-1986).
gagggattaaagcttactt

SEQ ID NO: 707302 - DNA, 19 bp, Mus musculus
  siRNA target sequence for Catnal1 (NM_018761.2,1970-1988).
gggattaaagcttacttca

SEQ ID NO: 707303 - DNA, 19 bp, Mus musculus
  siRNA target sequence for Catnal1 (NM_018761.2,1971-1989).
ggattaaagcttacttcaa

SEQ ID NO: 707304 - DNA, 19 bp, Mus musculus
  siRNA target sequence for Catnal1 (NM_018761.2,2082-2100).
cagacaataactaagacat

SEQ ID NO: 707305 - DNA, 19 bp, Mus musculus
  siRNA target sequence for Catnal1 (NM_018761.2,2086-2104).
caataactaagacatcttt

SEQ ID NO: 707306 - DNA, 19 bp, Mus musculus
  siRNA target sequence for Catnal1 (NM_018761.2,2110-2128).
gtaaagtctttctaaaggt

SEQ ID NO: 707307 - DNA, 19 bp, Mus musculus
  siRNA target sequence for Catnal1 (NM_018761.2,2121-2139).
ctaaaggttgacaagtgta

SEQ ID NO: 707308 - DNA, 19 bp, Mus musculus
  siRNA target sequence for Catnal1 (NM_018761.2,2126-2144).
ggttgacaagtgtattaca

SEQ ID NO: 707309 - DNA, 19 bp, Mus musculus
  siRNA target sequence for Catnal1 (NM_018761.2,2183-2201).
ctcactttgctataaacta

SEQ ID NO: 707310 - DNA, 19 bp, Mus musculus
  siRNA target sequence for Catnal1 (NM_018761.2,2228-2246).
gggctctgcgacgaacaaa

SEQ ID NO: 707311 - DNA, 19 bp, Mus musculus
  siRNA target sequence for Catnal1 (NM_018761.2,2230-2248).
gctctgcgacgaacaaaga

SEQ ID NO: 707312 - DNA, 19 bp, Mus musculus
  siRNA target sequence for Catnal1 (NM_018761.2,2231-2249).
ctctgcgacgaacaaagat

SEQ ID NO: 707313 - DNA, 19 bp, Mus musculus
  siRNA target sequence for Gp9 (NM_018762.1,86-104).
gcctgcgaccacagatact

SEQ ID NO: 707314 - DNA, 19 bp, Mus musculus
  siRNA target sequence for Gp9 (NM_018762.1,425-443).
gggccagctgacaggttat

SEQ ID NO: 707315 - DNA, 19 bp, Mus musculus
  siRNA target sequence for Gp9 (NM_018762.1,543-561).
ctgctggctggtctattga

SEQ ID NO: 707316 - DNA, 19 bp, Mus musculus
  siRNA target sequence for Gp9 (NM_018762.1,549-567).
gctggtctattgaacacat

SEQ ID NO: 707317 - DNA, 19 bp, Mus musculus
  siRNA target sequence for Gp9 (NM_018762.1,552-570).
ggtctattgaacacattta

SEQ ID NO: 707318 - DNA, 19 bp, Mus musculus
  siRNA target sequence for Stx8 (NM_018768.1,57-75).
cgattctacgtgtcagata

SEQ ID NO: 707319 - DNA, 19 bp, Mus musculus
  siRNA target sequence for Stx8 (NM_018768.1,103-121).
gaacgaaatcagtgtgaaa

SEQ ID NO: 707320 - DNA, 19 bp, Mus musculus
  siRNA target sequence for Stx8 (NM_018768.1,130-148).
gaaaagacaccgaagctta

SEQ ID NO: 707321 - DNA, 19 bp, Mus musculus
  siRNA target sequence for Stx8 (NM_018768.1,140-158).
cgaagcttaccttgacaat

SEQ ID NO: 707322 - DNA, 19 bp, Mus musculus
  siRNA target sequence for Stx8 (NM_018768.1,144-162).
gcttaccttgacaatcaga

SEQ ID NO: 707323 - DNA, 19 bp, Mus musculus
  siRNA target sequence for Stx8 (NM_018768.1,145-163).
cttaccttgacaatcagaa

SEQ ID NO: 707324 - DNA, 19 bp, Mus musculus
  siRNA target sequence for Stx8 (NM_018768.1,155-173).
caatcagaacgttgttgaa

SEQ ID NO: 707325 - DNA, 19 bp, Mus musculus
  siRNA target sequence for Stx8 (NM_018768.1,184-202).
gtaaagatcgaccttttga

SEQ ID NO: 707326 - DNA, 19 bp, Mus musculus
  siRNA target sequence for Stx8 (NM_018768.1,223-241).
gtgtcgacacgccagataa

SEQ ID NO: 707327 - DNA, 19 bp, Mus musculus
  siRNA target sequence for Stx8 (NM_018768.1,225-243).
gtcgacacgccagataaca

SEQ ID NO: 707328 - DNA, 19 bp, Mus musculus
  siRNA target sequence for Stx8 (NM_018768.1,227-245).
cgacacgccagataacaca

SEQ ID NO: 707329 - DNA, 19 bp, Mus musculus
  siRNA target sequence for Stx8 (NM_018768.1,304-322).
ctcctggcatcgtttaaga

SEQ ID NO: 707330 - DNA, 19 bp, Mus musculus
  siRNA target sequence for Stx8 (NM_018768.1,510-528).
cataagtcgccaaaaacaa

SEQ ID NO: 707331 - DNA, 19 bp, Mus musculus
  siRNA target sequence for Stx8 (NM_018768.1,662-680).
cttcctgtgggatgatcat

SEQ ID NO: 707332 - DNA, 19 bp, Mus musculus
  siRNA target sequence for Dfna5h (NM_018769.1,78-96).
caactcgaaattttcttaa

SEQ ID NO: 707333 - DNA, 19 bp, Mus musculus
  siRNA target sequence for Dfna5h (NM_018769.1,147-165).
ctgacaagctgcaacttct

SEQ ID NO: 707334 - DNA, 19 bp, Mus musculus
  siRNA target sequence for Dfna5h (NM_018769.1,151-169).
caagctgcaacttctaagt

SEQ ID NO: 707335 - DNA, 19 bp, Mus musculus
  siRNA target sequence for Dfna5h (NM_018769.1,288-306).
cagacttcgtgaaatacga

SEQ ID NO: 707336 - DNA, 19 bp, Mus musculus
  siRNA target sequence for Dfna5h (NM_018769.1,452-470).
caggatgccgtcaagagaa

SEQ ID NO: 707337 - DNA, 19 bp, Mus musculus
  siRNA target sequence for Dfna5h (NM_018769.1,460-478).
cgtcaagagaacagttaat

SEQ ID NO: 707338 - DNA, 19 bp, Mus musculus
  siRNA target sequence for Dfna5h (NM_018769.1,461-479).
gtcaagagaacagttaata

SEQ ID NO: 707339 - DNA, 19 bp, Mus musculus
  siRNA target sequence for Dfna5h (NM_018769.1,531-549).
gtgtgctgacgcagaagat

SEQ ID NO: 707340 - DNA, 19 bp, Mus musculus
  siRNA target sequence for Dfna5h (NM_018769.1,733-751).
gctgtttgtgaaacaagat

SEQ ID NO: 707341 - DNA, 19 bp, Mus musculus
  siRNA target sequence for Dfna5h (NM_018769.1,796-814).
cgagcatgagaggaaacta

SEQ ID NO: 707342 - DNA, 19 bp, Mus musculus
  siRNA target sequence for Dfna5h (NM_018769.1,875-893).
gggggtcaagggatctctt

SEQ ID NO: 707343 - DNA, 19 bp, Mus musculus
  siRNA target sequence for Dfna5h (NM_018769.1,906-924).
ccctacgagttgtaaaaca

SEQ ID NO: 707344 - DNA, 19 bp, Mus musculus
  siRNA target sequence for Dfna5h (NM_018769.1,1156-1174).
ggtgggatacaggatacaa

SEQ ID NO: 707345 - DNA, 19 bp, Mus musculus
  siRNA target sequence for Dfna5h (NM_018769.1,1262-1280).
cctgataatgccacagttt

SEQ ID NO: 707346 - DNA, 19 bp, Mus musculus
  siRNA target sequence for Dfna5h (NM_018769.1,1263-1281).
ctgataatgccacagtttt

SEQ ID NO: 707347 - DNA, 19 bp, Mus musculus
  siRNA target sequence for Dfna5h (NM_018769.1,1297-1315).
caaactccatgttatttct

SEQ ID NO: 707348 - DNA, 19 bp, Mus musculus
  siRNA target sequence for Dfna5h (NM_018769.1,1346-1364).
gatgacagcgtgtgtgatt

SEQ ID NO: 707349 - DNA, 19 bp, Mus musculus
  siRNA target sequence for Dfna5h (NM_018769.1,1410-1428).
gcatcgtgcagcgattgtt

SEQ ID NO: 707350 - DNA, 19 bp, Mus musculus
  siRNA target sequence for Dfna5h (NM_018769.1,1411-1429).
catcgtgcagcgattgttt

SEQ ID NO: 707351 - DNA, 19 bp, Mus musculus
  siRNA target sequence for Dfna5h (NM_018769.1,1497-1515).
gcatcttcccgctaattct

SEQ ID NO: 707352 - DNA, 19 bp, Mus musculus
  siRNA target sequence for Dfna5h (NM_018769.1,1498-1516).
catcttcccgctaattctt

SEQ ID NO: 707353 - DNA, 19 bp, Mus musculus
  siRNA target sequence for Dfna5h (NM_018769.1,1533-1551).
ggctcagcactctaagcaa

SEQ ID NO: 707354 - DNA, 19 bp, Mus musculus
  siRNA target sequence for Dfna5h (NM_018769.1,1534-1552).
gctcagcactctaagcaaa

SEQ ID NO: 707355 - DNA, 19 bp, Mus musculus
  siRNA target sequence for Tbc1d8 (NM_018775.1,209-227).
cctagccagatcacaaaga

SEQ ID NO: 707356 - DNA, 19 bp, Mus musculus
  siRNA target sequence for Tbc1d8 (NM_018775.1,400-418).
ggatggctgctgtaatgtt

SEQ ID NO: 707357 - DNA, 19 bp, Mus musculus
  siRNA target sequence for Tbc1d8 (NM_018775.1,610-628).
gacctcgccaagtgatgat

SEQ ID NO: 707358 - DNA, 19 bp, Mus musculus
  siRNA target sequence for Tbc1d8 (NM_018775.1,612-630).
cctcgccaagtgatgatga

SEQ ID NO: 707359 - DNA, 19 bp, Mus musculus
  siRNA target sequence for Tbc1d8 (NM_018775.1,805-823).
gtcccgggaacagataaaa

SEQ ID NO: 707360 - DNA, 19 bp, Mus musculus
  siRNA target sequence for Tbc1d8 (NM_018775.1,832-850).
gtggaacgaccactttgta

SEQ ID NO: 707361 - DNA, 19 bp, Mus musculus
  siRNA target sequence for Tbc1d8 (NM_018775.1,834-852).
ggaacgaccactttgtaga

SEQ ID NO: 707362 - DNA, 19 bp, Mus musculus
  siRNA target sequence for Tbc1d8 (NM_018775.1,1141-1159).
ccaccggaaccccaagatt

SEQ ID NO: 707363 - DNA, 19 bp, Mus musculus
  siRNA target sequence for Tbc1d8 (NM_018775.1,1145-1163).
cggaaccccaagattggat

SEQ ID NO: 707364 - DNA, 19 bp, Mus musculus
  siRNA target sequence for Tbc1d8 (NM_018775.1,1253-1271).
cggatgctgcctgattact

SEQ ID NO: 707365 - DNA, 19 bp, Mus musculus
  siRNA target sequence for Tbc1d8 (NM_018775.1,1254-1272).
ggatgctgcctgattactt

SEQ ID NO: 707366 - DNA, 19 bp, Mus musculus
  siRNA target sequence for Tbc1d8 (NM_018775.1,1572-1590).
gcaggtttctagatcacat

SEQ ID NO: 707367 - DNA, 19 bp, Mus musculus
  siRNA target sequence for Tbc1d8 (NM_018775.1,1573-1591).
caggtttctagatcacatt

SEQ ID NO: 707368 - DNA, 19 bp, Mus musculus
  siRNA target sequence for Tbc1d8 (NM_018775.1,1575-1593).
ggtttctagatcacattaa

SEQ ID NO: 707369 - DNA, 19 bp, Mus musculus
  siRNA target sequence for Tbc1d8 (NM_018775.1,1880-1898).
cacatgatgagctgttact

SEQ ID NO: 707370 - DNA, 19 bp, Mus musculus
  siRNA target sequence for Tbc1d8 (NM_018775.1,1974-1992).
ggcagtttgcacacctatt

SEQ ID NO: 707371 - DNA, 19 bp, Mus musculus
  siRNA target sequence for Tbc1d8 (NM_018775.1,2013-2031).
cctgtggggtccatacaga

SEQ ID NO: 707372 - DNA, 19 bp, Mus musculus
  siRNA target sequence for Tbc1d8 (NM_018775.1,2103-2121).
caagctgtctagacatcat

SEQ ID NO: 707373 - DNA, 19 bp, Mus musculus
  siRNA target sequence for Tbc1d8 (NM_018775.1,2106-2124).
gctgtctagacatcatgta

SEQ ID NO: 707374 - DNA, 19 bp, Mus musculus
  siRNA target sequence for Tbc1d8 (NM_018775.1,2109-2127).
gtctagacatcatgtacaa

SEQ ID NO: 707375 - DNA, 19 bp, Mus musculus
  siRNA target sequence for Tbc1d8 (NM_018775.1,2153-2171).
ctgctgtacaggcttcata

SEQ ID NO: 707376 - DNA, 19 bp, Mus musculus
  siRNA target sequence for Tbc1d8 (NM_018775.1,2176-2194).
cccagcactcactgaaaat

SEQ ID NO: 707377 - DNA, 19 bp, Mus musculus
  siRNA target sequence for Tbc1d8 (NM_018775.1,2178-2196).
cagcactcactgaaaatga

SEQ ID NO: 707378 - DNA, 19 bp, Mus musculus
  siRNA target sequence for Tbc1d8 (NM_018775.1,2205-2223).
gccagtcaccattgaagaa

SEQ ID NO: 707379 - DNA, 19 bp, Mus musculus
  siRNA target sequence for Tbc1d8 (NM_018775.1,2265-2283).
ccaatggtgacacaattga

SEQ ID NO: 707380 - DNA, 19 bp, Mus musculus
  siRNA target sequence for Tbc1d8 (NM_018775.1,2273-2291).
gacacaattgactatcaga

SEQ ID NO: 707381 - DNA, 19 bp, Mus musculus
  siRNA target sequence for Tbc1d8 (NM_018775.1,2275-2293).
cacaattgactatcagaaa

SEQ ID NO: 707382 - DNA, 19 bp, Mus musculus
  siRNA target sequence for Tbc1d8 (NM_018775.1,2277-2295).
caattgactatcagaaaca

SEQ ID NO: 707383 - DNA, 19 bp, Mus musculus
  siRNA target sequence for Tbc1d8 (NM_018775.1,2372-2390).
gaatttatccagttctgta

SEQ ID NO: 707384 - DNA, 19 bp, Mus musculus
  siRNA target sequence for Tbc1d8 (NM_018775.1,2556-2574).
ccgaacaggactcagtttt

SEQ ID NO: 707385 - DNA, 19 bp, Mus musculus
  siRNA target sequence for Tbc1d8 (NM_018775.1,2625-2643).
ggactgtgtcccttgaaca

SEQ ID NO: 707386 - DNA, 19 bp, Mus musculus
  siRNA target sequence for Tbc1d8 (NM_018775.1,2666-2684).
gagcagtcactggtgaatt

SEQ ID NO: 707387 - DNA, 19 bp, Mus musculus
  siRNA target sequence for Tbc1d8 (NM_018775.1,2668-2686).
gcagtcactggtgaatttt

SEQ ID NO: 707388 - DNA, 19 bp, Mus musculus
  siRNA target sequence for Tbc1d8 (NM_018775.1,2673-2691).
cactggtgaatttttttga

SEQ ID NO: 707389 - DNA, 19 bp, Mus musculus
  siRNA target sequence for Tbc1d8 (NM_018775.1,2690-2708).
gaaaagccactcaacatta

SEQ ID NO: 707390 - DNA, 19 bp, Mus musculus
  siRNA target sequence for Tbc1d8 (NM_018775.1,2738-2756).
cagtacagtctcaaagttt

SEQ ID NO: 707391 - DNA, 19 bp, Mus musculus
  siRNA target sequence for Tbc1d8 (NM_018775.1,2745-2763).
gtctcaaagttttggaaat

SEQ ID NO: 707392 - DNA, 19 bp, Mus musculus
  siRNA target sequence for Tbc1d8 (NM_018775.1,2747-2765).
ctcaaagttttggaaatga

SEQ ID NO: 707393 - DNA, 19 bp, Mus musculus
  siRNA target sequence for Tbc1d8 (NM_018775.1,2772-2790).
caccacaggcagaactgaa

SEQ ID NO: 707394 - DNA, 19 bp, Mus musculus
  siRNA target sequence for 2610317D23Rik (NM_018786.1,194-212).
catactgcccccaatgctt

SEQ ID NO: 707395 - DNA, 19 bp, Mus musculus
  siRNA target sequence for 2610317D23Rik (NM_018786.1,224-242).
ggcaccgccaccacttaca

SEQ ID NO: 707396 - DNA, 19 bp, Mus musculus
  siRNA target sequence for 2610317D23Rik (NM_018786.1,230-248).
gccaccacttacacagata

SEQ ID NO: 707397 - DNA, 19 bp, Mus musculus
  siRNA target sequence for 2610317D23Rik (NM_018786.1,253-271).
gaatggtccctccaatgat

SEQ ID NO: 707398 - DNA, 19 bp, Mus musculus
  siRNA target sequence for 2610317D23Rik (NM_018786.1,401-419).
gcgcatctactactacaat

SEQ ID NO: 707399 - DNA, 19 bp, Mus musculus
  siRNA target sequence for 2610317D23Rik (NM_018786.1,416-434).
caatgctgatgataagcaa

SEQ ID NO: 707400 - DNA, 19 bp, Mus musculus
  siRNA target sequence for 2610317D23Rik (NM_018786.1,450-468).
cccagcgtactcaagtcta

SEQ ID NO: 707401 - DNA, 19 bp, Mus musculus
  siRNA target sequence for 2610317D23Rik (NM_018786.1,451-469).
ccagcgtactcaagtctaa

SEQ ID NO: 707402 - DNA, 19 bp, Mus musculus
  siRNA target sequence for 2610317D23Rik (NM_018786.1,491-509).
gtgtccctggaaagagtat

SEQ ID NO: 707403 - DNA, 19 bp, Mus musculus
  siRNA target sequence for 2610317D23Rik (NM_018786.1,593-611).
ggaagccctcgtcaaacaa

SEQ ID NO: 707404 - DNA, 19 bp, Mus musculus
  siRNA target sequence for 2610317D23Rik (NM_018786.1,677-695).
gcctgaccctccacctata

SEQ ID NO: 707405 - DNA, 19 bp, Mus musculus
  siRNA target sequence for 2610317D23Rik (NM_018786.1,1241-1259).
gagaaaggaagtttatgat

SEQ ID NO: 707406 - DNA, 19 bp, Mus musculus
  siRNA target sequence for 2610317D23Rik (NM_018786.1,1351-1369).
ggatgagcagtgtcaactt

SEQ ID NO: 707407 - DNA, 19 bp, Mus musculus
  siRNA target sequence for 2610317D23Rik (NM_018786.1,1544-1562).
gcgacagcagcggaagaat

SEQ ID NO: 707408 - DNA, 19 bp, Mus musculus
  siRNA target sequence for 2610317D23Rik (NM_018786.1,1701-1719).
cctttggacttgttcaagt

SEQ ID NO: 707409 - DNA, 19 bp, Mus musculus
  siRNA target sequence for 2610317D23Rik (NM_018786.1,1706-1724).
ggacttgttcaagttctat

SEQ ID NO: 707410 - DNA, 19 bp, Mus musculus
  siRNA target sequence for 2610317D23Rik (NM_018786.1,1741-1759).
ctcgattccacgatgagaa

SEQ ID NO: 707411 - DNA, 19 bp, Mus musculus
  siRNA target sequence for 2610317D23Rik (NM_018786.1,1744-1762).
gattccacgatgagaagaa

SEQ ID NO: 707412 - DNA, 19 bp, Mus musculus
  siRNA target sequence for 2610317D23Rik (NM_018786.1,1749-1767).
cacgatgagaagaagatca

SEQ ID NO: 707413 - DNA, 19 bp, Mus musculus
  siRNA target sequence for 2610317D23Rik (NM_018786.1,1824-1842).
gacttcgcccacgtcataa

SEQ ID NO: 707414 - DNA, 19 bp, Mus musculus
  siRNA target sequence for 2610317D23Rik (NM_018786.1,1829-1847).
cgcccacgtcataagcttt

SEQ ID NO: 707415 - DNA, 19 bp, Mus musculus
  siRNA target sequence for 2610317D23Rik (NM_018786.1,1833-1851).
cacgtcataagctttgaca

SEQ ID NO: 707416 - DNA, 19 bp, Mus musculus
  siRNA target sequence for 2610317D23Rik (NM_018786.1,1866-1884).
ctggacgcaggcaacatca

SEQ ID NO: 707417 - DNA, 19 bp, Mus musculus
  siRNA target sequence for 2610317D23Rik (NM_018786.1,1895-1913).
caatagtctgctggaaaaa

SEQ ID NO: 707418 - DNA, 19 bp, Mus musculus
  siRNA target sequence for 2610317D23Rik (NM_018786.1,2040-2058).
gtccgtgagcgctttgtgt

SEQ ID NO: 707419 - DNA, 19 bp, Mus musculus
  siRNA target sequence for 2610317D23Rik (NM_018786.1,2156-2174).
caccaaaggccgaaagcat

SEQ ID NO: 707420 - DNA, 19 bp, Mus musculus
  siRNA target sequence for 2610317D23Rik (NM_018786.1,2297-2315).
gcggaacccctcagaatct

SEQ ID NO: 707421 - DNA, 19 bp, Mus musculus
  siRNA target sequence for 2610317D23Rik (NM_018786.1,2333-2351).
ctcacttgattcagttgaa

SEQ ID NO: 707422 - DNA, 19 bp, Mus musculus
  siRNA target sequence for 2610317D23Rik (NM_018786.1,2415-2433).
catggtcttcggaaaacca

SEQ ID NO: 707423 - DNA, 19 bp, Mus musculus
  siRNA target sequence for 2610317D23Rik (NM_018786.1,2584-2602).
ccccaggcttcggaatcaa

SEQ ID NO: 707424 - DNA, 19 bp, Mus musculus
  siRNA target sequence for Ubqln2 (NM_018798.2,304-322).
gccgagcccaaaatcatca

SEQ ID NO: 707425 - DNA, 19 bp, Mus musculus
  siRNA target sequence for Ubqln2 (NM_018798.2,430-448).
gatcagctcgtgctgattt

SEQ ID NO: 707426 - DNA, 19 bp, Mus musculus
  siRNA target sequence for Ubqln2 (NM_018798.2,667-685).
cctaccaccacgaatagca

SEQ ID NO: 707427 - DNA, 19 bp, Mus musculus
  siRNA target sequence for Ubqln2 (NM_018798.2,704-722).
gcctttccagccttagtaa

SEQ ID NO: 707428 - DNA, 19 bp, Mus musculus
  siRNA target sequence for Ubqln2 (NM_018798.2,1062-1080).
gcgcatgtacactgacatt

SEQ ID NO: 707429 - DNA, 19 bp, Mus musculus
  siRNA target sequence for Ubqln2 (NM_018798.2,1195-1213).
gatccgctgcccaatcctt

SEQ ID NO: 707430 - DNA, 19 bp, Mus musculus
  siRNA target sequence for Ubqln2 (NM_018798.2,1503-1521).
cccgctgttcacttcgaat

SEQ ID NO: 707431 - DNA, 19 bp, Mus musculus
  siRNA target sequence for Ubqln2 (NM_018798.2,1544-1562).
gtccacagctcccgaattt

SEQ ID NO: 707432 - DNA, 19 bp, Mus musculus
  siRNA target sequence for Ubqln2 (NM_018798.2,1616-1634).
cgatgcaagcgctaatgca

SEQ ID NO: 707433 - DNA, 19 bp, Mus musculus
  siRNA target sequence for Ubqln2 (NM_018798.2,1760-1778).
ggcccatcggccctatagt

SEQ ID NO: 707434 - DNA, 19 bp, Mus musculus
  siRNA target sequence for Ubqln2 (NM_018798.2,1761-1779).
gcccatcggccctatagtt

SEQ ID NO: 707435 - DNA, 19 bp, Mus musculus
  siRNA target sequence for Ubqln2 (NM_018798.2,1797-1815).
ccccatcgggcctatagga

SEQ ID NO: 707436 - DNA, 19 bp, Mus musculus
  siRNA target sequence for Ubqln2 (NM_018798.2,1888-1906).
gcacctactgaaaccataa

SEQ ID NO: 707437 - DNA, 19 bp, Mus musculus
  siRNA target sequence for Ubqln2 (NM_018798.2,1925-1943).
gacccaaccagcagttcat

SEQ ID NO: 707438 - DNA, 19 bp, Mus musculus
  siRNA target sequence for Ubqln2 (NM_018798.2,2031-2049).
caacgccatggggttctta

SEQ ID NO: 707439 - DNA, 19 bp, Mus musculus
  siRNA target sequence for Syt11 (NM_018804.2,368-386).
cgccatacaagttcattca

SEQ ID NO: 707440 - DNA, 19 bp, Mus musculus
  siRNA target sequence for Syt11 (NM_018804.2,369-387).
gccatacaagttcattcat

SEQ ID NO: 707441 - DNA, 19 bp, Mus musculus
  siRNA target sequence for Syt11 (NM_018804.2,370-388).
ccatacaagttcattcata

SEQ ID NO: 707442 - DNA, 19 bp, Mus musculus
  siRNA target sequence for Syt11 (NM_018804.2,484-502).
ggacgagggaacctgttaa

SEQ ID NO: 707443 - DNA, 19 bp, Mus musculus
  siRNA target sequence for Syt11 (NM_018804.2,485-503).
gacgagggaacctgttaat

SEQ ID NO: 707444 - DNA, 19 bp, Mus musculus
  siRNA target sequence for Syt11 (NM_018804.2,487-505).
cgagggaacctgttaataa

SEQ ID NO: 707445 - DNA, 19 bp, Mus musculus
  siRNA target sequence for Syt11 (NM_018804.2,551-569).
ctagccctgcatcttgtat

SEQ ID NO: 707446 - DNA, 19 bp, Mus musculus
  siRNA target sequence for Syt11 (NM_018804.2,571-589).
gaccagttacccatcaaaa

SEQ ID NO: 707447 - DNA, 19 bp, Mus musculus
  siRNA target sequence for Syt11 (NM_018804.2,573-591).
ccagttacccatcaaaaga

SEQ ID NO: 707448 - DNA, 19 bp, Mus musculus
  siRNA target sequence for Syt11 (NM_018804.2,679-697).
gtgatgttaggctctctta

SEQ ID NO: 707449 - DNA, 19 bp, Mus musculus
  siRNA target sequence for Syt11 (NM_018804.2,954-972).
cagctttgatcgattctct

SEQ ID NO: 707450 - DNA, 19 bp, Mus musculus
  siRNA target sequence for Syt11 (NM_018804.2,1120-1138).
cccgtcgcacagagaatga

SEQ ID NO: 707451 - DNA, 19 bp, Mus musculus
  siRNA target sequence for Syt11 (NM_018804.2,1122-1140).
cgtcgcacagagaatgaca

SEQ ID NO: 707452 - DNA, 19 bp, Mus musculus
  siRNA target sequence for Syt11 (NM_018804.2,1162-1180).
cacttgccgaagatggata

SEQ ID NO: 707453 - DNA, 19 bp, Mus musculus
  siRNA target sequence for Syt11 (NM_018804.2,1182-1200).
caccggtctctcaggtaat

SEQ ID NO: 707454 - DNA, 19 bp, Mus musculus
  siRNA target sequence for Syt11 (NM_018804.2,1185-1203).
cggtctctcaggtaatcct

SEQ ID NO: 707455 - DNA, 19 bp, Mus musculus
  siRNA target sequence for Syt11 (NM_018804.2,1193-1211).
caggtaatccttatgtcaa

SEQ ID NO: 707456 - DNA, 19 bp, Mus musculus
  siRNA target sequence for Syt11 (NM_018804.2,1218-1236).
cgtctactacggcagaaaa

SEQ ID NO: 707457 - DNA, 19 bp, Mus musculus
  siRNA target sequence for Syt11 (NM_018804.2,1294-1312).
gagtcgttcatctatgaca

SEQ ID NO: 707458 - DNA, 19 bp, Mus musculus
  siRNA target sequence for Syt11 (NM_018804.2,1340-1358).
gcatcgagttccttgtcat

SEQ ID NO: 707459 - DNA, 19 bp, Mus musculus
  siRNA target sequence for Syt11 (NM_018804.2,1360-1378).
gacttcgatcgcactacta

SEQ ID NO: 707460 - DNA, 19 bp, Mus musculus
  siRNA target sequence for Syt11 (NM_018804.2,1365-1383).
cgatcgcactactaagaat

SEQ ID NO: 707461 - DNA, 19 bp, Mus musculus
  siRNA target sequence for Plagl2 (NM_018807.3,21-39).
cgtccctccctggattcaa

SEQ ID NO: 707462 - DNA, 19 bp, Mus musculus
  siRNA target sequence for Plagl2 (NM_018807.3,112-130).
gtgaagtgccaatgtgaaa

SEQ ID NO: 707463 - DNA, 19 bp, Mus musculus
  siRNA target sequence for Plagl2 (NM_018807.3,132-150).
ctcggggacaccattttca

SEQ ID NO: 707464 - DNA, 19 bp, Mus musculus
  siRNA target sequence for Plagl2 (NM_018807.3,187-205).
ccggagcagagaccatata

SEQ ID NO: 707465 - DNA, 19 bp, Mus musculus
  siRNA target sequence for Plagl2 (NM_018807.3,190-208).
gagcagagaccatatagct

SEQ ID NO: 707466 - DNA, 19 bp, Mus musculus
  siRNA target sequence for Plagl2 (NM_018807.3,387-405).
ctctgagtgtggtaagaat

SEQ ID NO: 707467 - DNA, 19 bp, Mus musculus
  siRNA target sequence for Plagl2 (NM_018807.3,391-409).
gagtgtggtaagaattata

SEQ ID NO: 707468 - DNA, 19 bp, Mus musculus
  siRNA target sequence for Plagl2 (NM_018807.3,397-415).
ggtaagaattataatacaa

SEQ ID NO: 707469 - DNA, 19 bp, Mus musculus
  siRNA target sequence for Plagl2 (NM_018807.3,398-416).
gtaagaattataatacaaa

SEQ ID NO: 707470 - DNA, 19 bp, Mus musculus
  siRNA target sequence for Plagl2 (NM_018807.3,955-973).
ctgcccatgggtatgagtt

SEQ ID NO: 707471 - DNA, 19 bp, Mus musculus
  siRNA target sequence for Plagl2 (NM_018807.3,1030-1048).
cttggatctacctcatact

SEQ ID NO: 707472 - DNA, 19 bp, Mus musculus
  siRNA target sequence for Plagl2 (NM_018807.3,1043-1061).
catacttgcccgacaaact

SEQ ID NO: 707473 - DNA, 19 bp, Mus musculus
  siRNA target sequence for Plagl2 (NM_018807.3,1215-1233).
ggccctctgcgctgctaat

SEQ ID NO: 707474 - DNA, 19 bp, Mus musculus
  siRNA target sequence for Plagl2 (NM_018807.3,1217-1235).
ccctctgcgctgctaatgt

SEQ ID NO: 707475 - DNA, 19 bp, Mus musculus
  siRNA target sequence for Plagl2 (NM_018807.3,1388-1406).
ctgggggacccctgaactt

SEQ ID NO: 707476 - DNA, 19 bp, Mus musculus
  siRNA target sequence for Plagl2 (NM_018807.3,1466-1484).
ctcgtttccaccaagcatt

SEQ ID NO: 707477 - DNA, 19 bp, Mus musculus
  siRNA target sequence for Pcnx (NM_018814.1,894-912).
gcaagaagagcgtccaata

SEQ ID NO: 707478 - DNA, 19 bp, Mus musculus
  siRNA target sequence for Pcnx (NM_018814.1,895-913).
caagaagagcgtccaatat

SEQ ID NO: 707479 - DNA, 19 bp, Mus musculus
  siRNA target sequence for Pcnx (NM_018814.1,914-932).
ctgtgacacggattctcat

SEQ ID NO: 707480 - DNA, 19 bp, Mus musculus
  siRNA target sequence for Pcnx (NM_018814.1,918-936).
gacacggattctcatgtat

SEQ ID NO: 707481 - DNA, 19 bp, Mus musculus
  siRNA target sequence for Pcnx (NM_018814.1,920-938).
cacggattctcatgtatca

SEQ ID NO: 707482 - DNA, 19 bp, Mus musculus
  siRNA target sequence for Pcnx (NM_018814.1,924-942).
gattctcatgtatcaagtt

SEQ ID NO: 707483 - DNA, 19 bp, Mus musculus
  siRNA target sequence for Pcnx (NM_018814.1,943-961).
ctacctcagttcgatttta

SEQ ID NO: 707484 - DNA, 19 bp, Mus musculus
  siRNA target sequence for Pcnx (NM_018814.1,954-972).
cgattttatccacatgata

SEQ ID NO: 707485 - DNA, 19 bp, Mus musculus
  siRNA target sequence for Pcnx (NM_018814.1,969-987).
gatatgattcggttgaata

SEQ ID NO: 707486 - DNA, 19 bp, Mus musculus
  siRNA target sequence for Pcnx (NM_018814.1,1080-1098).
gcccaaaaagttaaacact

SEQ ID NO: 707487 - DNA, 19 bp, Mus musculus
  siRNA target sequence for Pcnx (NM_018814.1,1081-1099).
cccaaaaagttaaacacta

SEQ ID NO: 707488 - DNA, 19 bp, Mus musculus
  siRNA target sequence for Pcnx (NM_018814.1,1082-1100).
ccaaaaagttaaacactat

SEQ ID NO: 707489 - DNA, 19 bp, Mus musculus
  siRNA target sequence for Pcnx (NM_018814.1,1156-1174).
ctctgttggcactgtttga

SEQ ID NO: 707490 - DNA, 19 bp, Mus musculus
  siRNA target sequence for Pcnx (NM_018814.1,1160-1178).
gttggcactgtttgataga

SEQ ID NO: 707491 - DNA, 19 bp, Mus musculus
  siRNA target sequence for Pcnx (NM_018814.1,1183-1201).
gtgagatcctggagaatat

SEQ ID NO: 707492 - DNA, 19 bp, Mus musculus
  siRNA target sequence for Pcnx (NM_018814.1,1185-1203).
gagatcctggagaatatat

SEQ ID NO: 707493 - DNA, 19 bp, Mus musculus
  siRNA target sequence for Pcnx (NM_018814.1,1190-1208).
cctggagaatatattagct

SEQ ID NO: 707494 - DNA, 19 bp, Mus musculus
  siRNA target sequence for Pcnx (NM_018814.1,1360-1378).
gacatggtcataatcgtat

SEQ ID NO: 707495 - DNA, 19 bp, Mus musculus
  siRNA target sequence for Pcnx (NM_018814.1,1362-1380).
catggtcataatcgtatta

SEQ ID NO: 707496 - DNA, 19 bp, Mus musculus
  siRNA target sequence for Pcnx (NM_018814.1,1384-1402).
cctacagtagaccagttta

SEQ ID NO: 707497 - DNA, 19 bp, Mus musculus
  siRNA target sequence for Pcnx (NM_018814.1,1422-1440).
ctcatttggctcttggatt

SEQ ID NO: 707498 - DNA, 19 bp, Mus musculus
  siRNA target sequence for Pcnx (NM_018814.1,1424-1442).
catttggctcttggattat

SEQ ID NO: 707499 - DNA, 19 bp, Mus musculus
  siRNA target sequence for Pcnx (NM_018814.1,1462-1480).
caagcaagttcaagttata

SEQ ID NO: 707500 - DNA, 19 bp, Mus musculus
  siRNA target sequence for Pcnx (NM_018814.1,1466-1484).
caagttcaagttatatgga

SEQ ID NO: 707501 - DNA, 19 bp, Mus musculus
  siRNA target sequence for Pcnx (NM_018814.1,1516-1534).
cggccagggacttggttat

SEQ ID NO: 707502 - DNA, 19 bp, Mus musculus
  siRNA target sequence for Pcnx (NM_018814.1,1519-1537).
ccagggacttggttatagt

SEQ ID NO: 707503 - DNA, 19 bp, Mus musculus
  siRNA target sequence for Pcnx (NM_018814.1,1584-1602).
caggtgaacacgtttgtaa

SEQ ID NO: 707504 - DNA, 19 bp, Mus musculus
  siRNA target sequence for Pcnx (NM_018814.1,1587-1605).
gtgaacacgtttgtaatgt

SEQ ID NO: 707505 - DNA, 19 bp, Mus musculus
  siRNA target sequence for Pcnx (NM_018814.1,1612-1630).
gtgaacaattggatatcca

SEQ ID NO: 707506 - DNA, 19 bp, Mus musculus
  siRNA target sequence for Pcnx (NM_018814.1,1614-1632).
gaacaattggatatccata

SEQ ID NO: 707507 - DNA, 19 bp, Mus musculus
  siRNA target sequence for Pcnx (NM_018814.1,1718-1736).
gttgtgctacggagcatta

SEQ ID NO: 707508 - DNA, 19 bp, Mus musculus
  siRNA target sequence for Pcnx (NM_018814.1,1953-1971).
gttagtgagcgcttacagt

SEQ ID NO: 707509 - DNA, 19 bp, Mus musculus
  siRNA target sequence for Pcnx (NM_018814.1,2003-2021).
gctgtatttcgctattcat

SEQ ID NO: 707510 - DNA, 19 bp, Mus musculus
  siRNA target sequence for Pcnx (NM_018814.1,2082-2100).
ggtgttgtggggcttgtaa

SEQ ID NO: 707511 - DNA, 19 bp, Mus musculus
  siRNA target sequence for Pcnx (NM_018814.1,2090-2108).
ggggcttgtaacccattat

SEQ ID NO: 707512 - DNA, 19 bp, Mus musculus
  siRNA target sequence for Pcnx (NM_018814.1,2186-2204).
gtatgaagtccgaaatgca

SEQ ID NO: 707513 - DNA, 19 bp, Mus musculus
  siRNA target sequence for Pcnx (NM_018814.1,2196-2214).
cgaaatgcagccactatga

SEQ ID NO: 707514 - DNA, 19 bp, Mus musculus
  siRNA target sequence for Pcnx (NM_018814.1,2216-2234).
gtggttcgaaaaacttcat

SEQ ID NO: 707515 - DNA, 19 bp, Mus musculus
  siRNA target sequence for Pcnx (NM_018814.1,2218-2236).
ggttcgaaaaacttcatgt

SEQ ID NO: 707516 - DNA, 19 bp, Mus musculus
  siRNA target sequence for Pcnx (NM_018814.1,2403-2421).
cccacgtaccagtacatca

SEQ ID NO: 707517 - DNA, 19 bp, Mus musculus
  siRNA target sequence for Pcnx (NM_018814.1,2441-2459).
ctttttcaagtttgactat

SEQ ID NO: 707518 - DNA, 19 bp, Mus musculus
  siRNA target sequence for Pcnx (NM_018814.1,2484-2502).
ctggacctcttcttcatgt

SEQ ID NO: 707519 - DNA, 19 bp, Mus musculus
  siRNA target sequence for Pcnx (NM_018814.1,2587-2605).
gctctgcgttccatgcttt

SEQ ID NO: 707520 - DNA, 19 bp, Mus musculus
  siRNA target sequence for Pcnx (NM_018814.1,2724-2742).
gttaggcctgtcaagttct

SEQ ID NO: 707521 - DNA, 19 bp, Mus musculus
  siRNA target sequence for Pcnx (NM_018814.1,2766-2784).
cgtgtagaccattcaaata

SEQ ID NO: 707522 - DNA, 19 bp, Mus musculus
  siRNA target sequence for Pcnx (NM_018814.1,2769-2787).
gtagaccattcaaatacca

SEQ ID NO: 707523 - DNA, 19 bp, Mus musculus
  siRNA target sequence for Pcnx (NM_018814.1,2815-2833).
cagggtcggatgacaacaa

SEQ ID NO: 707524 - DNA, 19 bp, Mus musculus
  siRNA target sequence for Pcnx (NM_018814.1,2817-2835).
gggtcggatgacaacaatt

SEQ ID NO: 707525 - DNA, 19 bp, Mus musculus
  siRNA target sequence for Pcnx (NM_018814.1,2907-2925).
cggtggggaaactatagta

SEQ ID NO: 707526 - DNA, 19 bp, Mus musculus
  siRNA target sequence for Pcnx (NM_018814.1,2909-2927).
gtggggaaactatagtact

SEQ ID NO: 707527 - DNA, 19 bp, Mus musculus
  siRNA target sequence for Pcnx (NM_018814.1,2943-2961).
cttgcctccgactatctca

SEQ ID NO: 707528 - DNA, 19 bp, Mus musculus
  siRNA target sequence for Pcnx (NM_018814.1,2965-2983).
ccttagtacacctcataga

SEQ ID NO: 707529 - DNA, 19 bp, Mus musculus
  siRNA target sequence for Pcnx (NM_018814.1,3012-3030).
ctgcggggacttgaattca

SEQ ID NO: 707530 - DNA, 19 bp, Mus musculus
  siRNA target sequence for Pcnx (NM_018814.1,3123-3141).
ccgcacgtgctgtccttta

SEQ ID NO: 707531 - DNA, 19 bp, Mus musculus
  siRNA target sequence for Pcnx (NM_018814.1,3124-3142).
cgcacgtgctgtcctttaa

SEQ ID NO: 707532 - DNA, 19 bp, Mus musculus
  siRNA target sequence for Pcnx (NM_018814.1,3174-3192).
gaagtggttgtcactaagt

SEQ ID NO: 707533 - DNA, 19 bp, Mus musculus
  siRNA target sequence for Pcnx (NM_018814.1,3235-3253).
ccatgctccaagtctttga

SEQ ID NO: 707534 - DNA, 19 bp, Mus musculus
  siRNA target sequence for Pcnx (NM_018814.1,3282-3300).
gtcaagggtatcatttact

SEQ ID NO: 707535 - DNA, 19 bp, Mus musculus
  siRNA target sequence for Pcnx (NM_018814.1,3284-3302).
caagggtatcatttactat

SEQ ID NO: 707536 - DNA, 19 bp, Mus musculus
  siRNA target sequence for Pcnx (NM_018814.1,3331-3349).
ggctggcgaatgagacaat

SEQ ID NO: 707537 - DNA, 19 bp, Mus musculus
  siRNA target sequence for Pcnx (NM_018814.1,3390-3408).
gacgtggacccaactttta

SEQ ID NO: 707538 - DNA, 19 bp, Mus musculus
  siRNA target sequence for Pcnx (NM_018814.1,3522-3540).
cttgatgtagataaagatt

SEQ ID NO: 707539 - DNA, 19 bp, Mus musculus
  siRNA target sequence for Pcnx (NM_018814.1,3544-3562).
ctctggtgactctttgtta

SEQ ID NO: 707540 - DNA, 19 bp, Mus musculus
  siRNA target sequence for Pcnx (NM_018814.1,3548-3566).
ggtgactctttgttatgga

SEQ ID NO: 707541 - DNA, 19 bp, Mus musculus
  siRNA target sequence for Pcnx (NM_018814.1,3627-3645).
gagtccttcctctatggat

SEQ ID NO: 707542 - DNA, 19 bp, Mus musculus
  siRNA target sequence for Pcnx (NM_018814.1,3642-3660).
ggattgcatgccctgttta

SEQ ID NO: 707543 - DNA, 19 bp, Mus musculus
  siRNA target sequence for Pcnx (NM_018814.1,3643-3661).
gattgcatgccctgtttaa

SEQ ID NO: 707544 - DNA, 19 bp, Mus musculus
  siRNA target sequence for Pcnx (NM_018814.1,3663-3681).
ggggacttccggatttctt

SEQ ID NO: 707545 - DNA, 19 bp, Mus musculus
  siRNA target sequence for Pcnx (NM_018814.1,3665-3683).
ggacttccggatttcttca

SEQ ID NO: 707546 - DNA, 19 bp, Mus musculus
  siRNA target sequence for Pcnx (NM_018814.1,3741-3759).
ggaatccgtatgtccatta

SEQ ID NO: 707547 - DNA, 19 bp, Mus musculus
  siRNA target sequence for Pcnx (NM_018814.1,3742-3760).
gaatccgtatgtccattaa

SEQ ID NO: 707548 - DNA, 19 bp, Mus musculus
  siRNA target sequence for Pcnx (NM_018814.1,3836-3854).
cgagaagaaccttgtgata

SEQ ID NO: 707549 - DNA, 19 bp, Mus musculus
  siRNA target sequence for Pcnx (NM_018814.1,4040-4058).
gcaacaggagctcgttttt

SEQ ID NO: 707550 - DNA, 19 bp, Mus musculus
  siRNA target sequence for Pcnx (NM_018814.1,4106-4124).
ggcactgcgaaacatgata

SEQ ID NO: 707551 - DNA, 19 bp, Mus musculus
  siRNA target sequence for Pcnx (NM_018814.1,4108-4126).
cactgcgaaacatgataaa

SEQ ID NO: 707552 - DNA, 19 bp, Mus musculus
  siRNA target sequence for Pcnx (NM_018814.1,4110-4128).
ctgcgaaacatgataaact

SEQ ID NO: 707553 - DNA, 19 bp, Mus musculus
  siRNA target sequence for Pcnx (NM_018814.1,4121-4139).
gataaactcgtcttgtgat

SEQ ID NO: 707554 - DNA, 19 bp, Mus musculus
  siRNA target sequence for Pcnx (NM_018814.1,4170-4188).
cccctcacaacgtcttact

SEQ ID NO: 707555 - DNA, 19 bp, Mus musculus
  siRNA target sequence for Pcnx (NM_018814.1,4202-4220).
ccaactcaaagaaattctt

SEQ ID NO: 707556 - DNA, 19 bp, Mus musculus
  siRNA target sequence for Pcnx (NM_018814.1,4228-4246).
caatcagcttgggaaacat

SEQ ID NO: 707557 - DNA, 19 bp, Mus musculus
  siRNA target sequence for Pcnx (NM_018814.1,4267-4285).
cctggcacaggctaaggaa

SEQ ID NO: 707558 - DNA, 19 bp, Mus musculus
  siRNA target sequence for Pcnx (NM_018814.1,4303-4321).
gtaacagtggtggcaatat

SEQ ID NO: 707559 - DNA, 19 bp, Mus musculus
  siRNA target sequence for Pcnx (NM_018814.1,4634-4652).
ctccaccagccagatatct

SEQ ID NO: 707560 - DNA, 19 bp, Mus musculus
  siRNA target sequence for Pcnx (NM_018814.1,4637-4655).
caccagccagatatctctt

SEQ ID NO: 707561 - DNA, 19 bp, Mus musculus
  siRNA target sequence for Pcnx (NM_018814.1,4939-4957).
gtcagattctggaaggaat

SEQ ID NO: 707562 - DNA, 19 bp, Mus musculus
  siRNA target sequence for Pcnx (NM_018814.1,4979-4997).
gctgcactggcctgatgaa

SEQ ID NO: 707563 - DNA, 19 bp, Mus musculus
  siRNA target sequence for Pcnx (NM_018814.1,5136-5154).
ctcgttcagatcgatgata

SEQ ID NO: 707564 - DNA, 19 bp, Mus musculus
  siRNA target sequence for Nup210 (NM_018815.1,128-146).
gccacgcgcgtgaacttca

SEQ ID NO: 707565 - DNA, 19 bp, Mus musculus
  siRNA target sequence for Nup210 (NM_018815.1,281-299).
cgcctgaccagcatcatct

SEQ ID NO: 707566 - DNA, 19 bp, Mus musculus
  siRNA target sequence for Nup210 (NM_018815.1,282-300).
gcctgaccagcatcatctt

SEQ ID NO: 707567 - DNA, 19 bp, Mus musculus
  siRNA target sequence for Nup210 (NM_018815.1,336-354).
gtgacgccatcgttgatct

SEQ ID NO: 707568 - DNA, 19 bp, Mus musculus
  siRNA target sequence for Nup210 (NM_018815.1,381-399).
ccacccgtgagctctatct

SEQ ID NO: 707569 - DNA, 19 bp, Mus musculus
  siRNA target sequence for Nup210 (NM_018815.1,382-400).
cacccgtgagctctatctt

SEQ ID NO: 707570 - DNA, 19 bp, Mus musculus
  siRNA target sequence for Nup210 (NM_018815.1,437-455).
gactcagaagggaatacct

SEQ ID NO: 707571 - DNA, 19 bp, Mus musculus
  siRNA target sequence for Nup210 (NM_018815.1,475-493).
ggtcttcgactggacaatt

SEQ ID NO: 707572 - DNA, 19 bp, Mus musculus
  siRNA target sequence for Nup210 (NM_018815.1,500-518).
gatacagaggccaatggat

SEQ ID NO: 707573 - DNA, 19 bp, Mus musculus
  siRNA target sequence for Nup210 (NM_018815.1,548-566).
ctcaccttcttggaatcta

SEQ ID NO: 707574 - DNA, 19 bp, Mus musculus
  siRNA target sequence for Nup210 (NM_018815.1,553-571).
cttcttggaatctacgtat

SEQ ID NO: 707575 - DNA, 19 bp, Mus musculus
  siRNA target sequence for Nup210 (NM_018815.1,629-647).
ctagtgtctgggatgaaga

SEQ ID NO: 707576 - DNA, 19 bp, Mus musculus
  siRNA target sequence for Nup210 (NM_018815.1,677-695).
caggaggctgtctataaga

SEQ ID NO: 707577 - DNA, 19 bp, Mus musculus
  siRNA target sequence for Nup210 (NM_018815.1,679-697).
ggaggctgtctataagaat

SEQ ID NO: 707578 - DNA, 19 bp, Mus musculus
  siRNA target sequence for Nup210 (NM_018815.1,682-700).
ggctgtctataagaatgtt

SEQ ID NO: 707579 - DNA, 19 bp, Mus musculus
  siRNA target sequence for Nup210 (NM_018815.1,773-791).
gtgggaacctccattcact

SEQ ID NO: 707580 - DNA, 19 bp, Mus musculus
  siRNA target sequence for Nup210 (NM_018815.1,777-795).
gaacctccattcactacaa

SEQ ID NO: 707581 - DNA, 19 bp, Mus musculus
  siRNA target sequence for Nup210 (NM_018815.1,808-826).
caggcagggcaagattaca

SEQ ID NO: 707582 - DNA, 19 bp, Mus musculus
  siRNA target sequence for Nup210 (NM_018815.1,810-828).
ggcagggcaagattacaga

SEQ ID NO: 707583 - DNA, 19 bp, Mus musculus
  siRNA target sequence for Nup210 (NM_018815.1,811-829).
gcagggcaagattacagaa

SEQ ID NO: 707584 - DNA, 19 bp, Mus musculus
  siRNA target sequence for Nup210 (NM_018815.1,832-850).
ctcaatgccttctgatcaa

SEQ ID NO: 707585 - DNA, 19 bp, Mus musculus
  siRNA target sequence for Nup210 (NM_018815.1,834-852).
caatgccttctgatcaata

SEQ ID NO: 707586 - DNA, 19 bp, Mus musculus
  siRNA target sequence for Nup210 (NM_018815.1,982-1000).
caggagtatccgtatgcaa

SEQ ID NO: 707587 - DNA, 19 bp, Mus musculus
  siRNA target sequence for Nup210 (NM_018815.1,1045-1063).
cggatacctaggtttcaca

SEQ ID NO: 707588 - DNA, 19 bp, Mus musculus
  siRNA target sequence for Nup210 (NM_018815.1,1097-1115).
ggacatctgtatgcaatta

SEQ ID NO: 707589 - DNA, 19 bp, Mus musculus
  siRNA target sequence for Nup210 (NM_018815.1,1109-1127).
gcaattaccatcgaagtat

SEQ ID NO: 707590 - DNA, 19 bp, Mus musculus
  siRNA target sequence for Nup210 (NM_018815.1,1414-1432).
gacaggcgcctatcagtat

SEQ ID NO: 707591 - DNA, 19 bp, Mus musculus
  siRNA target sequence for Nup210 (NM_018815.1,1418-1436).
ggcgcctatcagtatacca

SEQ ID NO: 707592 - DNA, 19 bp, Mus musculus
  siRNA target sequence for Nup210 (NM_018815.1,1419-1437).
gcgcctatcagtataccat

SEQ ID NO: 707593 - DNA, 19 bp, Mus musculus
  siRNA target sequence for Nup210 (NM_018815.1,1420-1438).
cgcctatcagtataccata

SEQ ID NO: 707594 - DNA, 19 bp, Mus musculus
  siRNA target sequence for Nup210 (NM_018815.1,1421-1439).
gcctatcagtataccataa

SEQ ID NO: 707595 - DNA, 19 bp, Mus musculus
  siRNA target sequence for Nup210 (NM_018815.1,1422-1440).
cctatcagtataccataaa

SEQ ID NO: 707596 - DNA, 19 bp, Mus musculus
  siRNA target sequence for Nup210 (NM_018815.1,1672-1690).
gctgcccctgacaatcagt

SEQ ID NO: 707597 - DNA, 19 bp, Mus musculus
  siRNA target sequence for Nup210 (NM_018815.1,1731-1749).
gcgactgctcccatttcga

SEQ ID NO: 707598 - DNA, 19 bp, Mus musculus
  siRNA target sequence for Nup210 (NM_018815.1,1824-1842).
gcagtggggtcaaagtgaa

SEQ ID NO: 707599 - DNA, 19 bp, Mus musculus
  siRNA target sequence for Nup210 (NM_018815.1,1975-1993).
cctaggctcctcaaaggaa

SEQ ID NO: 707600 - DNA, 19 bp, Mus musculus
  siRNA target sequence for Nup210 (NM_018815.1,2103-2121).
cagcctcccggaattacca

SEQ ID NO: 707601 - DNA, 19 bp, Mus musculus
  siRNA target sequence for Nup210 (NM_018815.1,2157-2175).
gtgagcaggtcattgcttt

SEQ ID NO: 707602 - DNA, 19 bp, Mus musculus
  siRNA target sequence for Nup210 (NM_018815.1,2659-2677).
gtcagcctccattgaactt

SEQ ID NO: 707603 - DNA, 19 bp, Mus musculus
  siRNA target sequence for Nup210 (NM_018815.1,2736-2754).
gtgtccaggtggaactcta

SEQ ID NO: 707604 - DNA, 19 bp, Mus musculus
  siRNA target sequence for Nup210 (NM_018815.1,2790-2808).
caagcacccaggacatcat

SEQ ID NO: 707605 - DNA, 19 bp, Mus musculus
  siRNA target sequence for Nup210 (NM_018815.1,2857-2875).
gctcccaggctcatcaact

SEQ ID NO: 707606 - DNA, 19 bp, Mus musculus
  siRNA target sequence for Nup210 (NM_018815.1,2913-2931).
ccgcaaaggccatcattca

SEQ ID NO: 707607 - DNA, 19 bp, Mus musculus
  siRNA target sequence for Nup210 (NM_018815.1,2980-2998).
gatcgggaaggctgtcaaa

SEQ ID NO: 707608 - DNA, 19 bp, Mus musculus
  siRNA target sequence for Nup210 (NM_018815.1,3008-3026).
cgtgtgttggacttctaca

SEQ ID NO: 707609 - DNA, 19 bp, Mus musculus
  siRNA target sequence for Nup210 (NM_018815.1,3011-3029).
gtgttggacttctacaaga

SEQ ID NO: 707610 - DNA, 19 bp, Mus musculus
  siRNA target sequence for Nup210 (NM_018815.1,3182-3200).
gcaagcgtgacggacaaat

SEQ ID NO: 707611 - DNA, 19 bp, Mus musculus
  siRNA target sequence for Nup210 (NM_018815.1,3239-3257).
gtcttccccccattcagat

SEQ ID NO: 707612 - DNA, 19 bp, Mus musculus
  siRNA target sequence for Nup210 (NM_018815.1,3244-3262).
ccccccattcagattgata

SEQ ID NO: 707613 - DNA, 19 bp, Mus musculus
  siRNA target sequence for Nup210 (NM_018815.1,3523-3541).
gatccgtgccccaatcaca

SEQ ID NO: 707614 - DNA, 19 bp, Mus musculus
  siRNA target sequence for Nup210 (NM_018815.1,3684-3702).
ggcaccatgaggtatctat

SEQ ID NO: 707615 - DNA, 19 bp, Mus musculus
  siRNA target sequence for Nup210 (NM_018815.1,3703-3721).
ccggctcccgcctcagtat

SEQ ID NO: 707616 - DNA, 19 bp, Mus musculus
  siRNA target sequence for Nup210 (NM_018815.1,3704-3722).
cggctcccgcctcagtata

SEQ ID NO: 707617 - DNA, 19 bp, Mus musculus
  siRNA target sequence for Nup210 (NM_018815.1,3705-3723).
ggctcccgcctcagtataa

SEQ ID NO: 707618 - DNA, 19 bp, Mus musculus
  siRNA target sequence for Nup210 (NM_018815.1,3706-3724).
gctcccgcctcagtataat

SEQ ID NO: 707619 - DNA, 19 bp, Mus musculus
  siRNA target sequence for Nup210 (NM_018815.1,3709-3727).
cccgcctcagtataatttt

SEQ ID NO: 707620 - DNA, 19 bp, Mus musculus
  siRNA target sequence for Nup210 (NM_018815.1,3871-3889).
gctgctgaaccctgaaata

SEQ ID NO: 707621 - DNA, 19 bp, Mus musculus
  siRNA target sequence for Nup210 (NM_018815.1,3874-3892).
gctgaaccctgaaatagaa

SEQ ID NO: 707622 - DNA, 19 bp, Mus musculus
  siRNA target sequence for Nup210 (NM_018815.1,3893-3911).
gcagaacaaatactaatgt

SEQ ID NO: 707623 - DNA, 19 bp, Mus musculus
  siRNA target sequence for Nup210 (NM_018815.1,3905-3923).
ctaatgtcacccaactcat

SEQ ID NO: 707624 - DNA, 19 bp, Mus musculus
  siRNA target sequence for Nup210 (NM_018815.1,4033-4051).
gtcgggctctggaattgga

SEQ ID NO: 707625 - DNA, 19 bp, Mus musculus
  siRNA target sequence for Nup210 (NM_018815.1,4054-4072).
gtccaccctcgaagtgatt

SEQ ID NO: 707626 - DNA, 19 bp, Mus musculus
  siRNA target sequence for Nup210 (NM_018815.1,4090-4108).
caccaaccagactatcctt

SEQ ID NO: 707627 - DNA, 19 bp, Mus musculus
  siRNA target sequence for Nup210 (NM_018815.1,4101-4119).
ctatccttgtcgctgtaaa

SEQ ID NO: 707628 - DNA, 19 bp, Mus musculus
  siRNA target sequence for Nup210 (NM_018815.1,4207-4225).
gatgaccgtgaccttcatt

SEQ ID NO: 707629 - DNA, 19 bp, Mus musculus
  siRNA target sequence for Nup210 (NM_018815.1,4265-4283).
cataattcagtcctcaatt

SEQ ID NO: 707630 - DNA, 19 bp, Mus musculus
  siRNA target sequence for Nup210 (NM_018815.1,4277-4295).
ctcaattttgccactaaca

SEQ ID NO: 707631 - DNA, 19 bp, Mus musculus
  siRNA target sequence for Nup210 (NM_018815.1,4490-4508).
ctggctagtgttcttacta

SEQ ID NO: 707632 - DNA, 19 bp, Mus musculus
  siRNA target sequence for Nup210 (NM_018815.1,4558-4576).
ctacgttgaccctaagaca

SEQ ID NO: 707633 - DNA, 19 bp, Mus musculus
  siRNA target sequence for Nup210 (NM_018815.1,4598-4616).
gcagggtctgtgactgttt

SEQ ID NO: 707634 - DNA, 19 bp, Mus musculus
  siRNA target sequence for Nup210 (NM_018815.1,4601-4619).
gggtctgtgactgtttact

SEQ ID NO: 707635 - DNA, 19 bp, Mus musculus
  siRNA target sequence for Nup210 (NM_018815.1,4602-4620).
ggtctgtgactgtttacta

SEQ ID NO: 707636 - DNA, 19 bp, Mus musculus
  siRNA target sequence for Nup210 (NM_018815.1,4663-4681).
cggcacccctcagaagatt

SEQ ID NO: 707637 - DNA, 19 bp, Mus musculus
  siRNA target sequence for Nup210 (NM_018815.1,4894-4912).
caccgtggaaccaggattt

SEQ ID NO: 707638 - DNA, 19 bp, Mus musculus
  siRNA target sequence for Nup210 (NM_018815.1,5105-5123).
cttttgagcaaccactata

SEQ ID NO: 707639 - DNA, 19 bp, Mus musculus
  siRNA target sequence for Nup210 (NM_018815.1,5127-5145).
gctccgaggtcaaagtctt

SEQ ID NO: 707640 - DNA, 19 bp, Mus musculus
  siRNA target sequence for Nup210 (NM_018815.1,5128-5146).
ctccgaggtcaaagtcttt

SEQ ID NO: 707641 - DNA, 19 bp, Mus musculus
  siRNA target sequence for Nup210 (NM_018815.1,5165-5183).
gaaaacttggaggtgaaat

SEQ ID NO: 707642 - DNA, 19 bp, Mus musculus
  siRNA target sequence for Nup210 (NM_018815.1,5201-5219).
ctagccttcgtgaaagaga

SEQ ID NO: 707643 - DNA, 19 bp, Mus musculus
  siRNA target sequence for Nup210 (NM_018815.1,5437-5455).
catgttcttcacctttttt

SEQ ID NO: 707644 - DNA, 19 bp, Mus musculus
  siRNA target sequence for Chm (NM_018818.1,48-66).
gactttgatgtgatcgtaa

SEQ ID NO: 707645 - DNA, 19 bp, Mus musculus
  siRNA target sequence for Chm (NM_018818.1,50-68).
ctttgatgtgatcgtaata

SEQ ID NO: 707646 - DNA, 19 bp, Mus musculus
  siRNA target sequence for Chm (NM_018818.1,228-246).
gttgtgactgaaaattcaa

SEQ ID NO: 707647 - DNA, 19 bp, Mus musculus
  siRNA target sequence for Chm (NM_018818.1,250-268).
ggcaagaacagatacttga

SEQ ID NO: 707648 - DNA, 19 bp, Mus musculus
  siRNA target sequence for Chm (NM_018818.1,295-313).
gcaaggacaaaacaattca

SEQ ID NO: 707649 - DNA, 19 bp, Mus musculus
  siRNA target sequence for Chm (NM_018818.1,340-358).
gtcaggatttgcacaaaga

SEQ ID NO: 707650 - DNA, 19 bp, Mus musculus
  siRNA target sequence for Chm (NM_018818.1,572-590).
gagttcaccacaagtaaat

SEQ ID NO: 707651 - DNA, 19 bp, Mus musculus
  siRNA target sequence for Chm (NM_018818.1,640-658).
cagaacaatcaagtgaaat

SEQ ID NO: 707652 - DNA, 19 bp, Mus musculus
  siRNA target sequence for Chm (NM_018818.1,642-660).
gaacaatcaagtgaaattt

SEQ ID NO: 707653 - DNA, 19 bp, Mus musculus
  siRNA target sequence for Chm (NM_018818.1,686-704).
gacaccaaagagaaatgta

SEQ ID NO: 707654 - DNA, 19 bp, Mus musculus
  siRNA target sequence for Chm (NM_018818.1,734-752).
ccgaagatttaacattgat

SEQ ID NO: 707655 - DNA, 19 bp, Mus musculus
  siRNA target sequence for Chm (NM_018818.1,735-753).
cgaagatttaacattgatt

SEQ ID NO: 707656 - DNA, 19 bp, Mus musculus
  siRNA target sequence for Chm (NM_018818.1,770-788).
ctattctcggggattacta

SEQ ID NO: 707657 - DNA, 19 bp, Mus musculus
  siRNA target sequence for Chm (NM_018818.1,775-793).
ctcggggattactaattga

SEQ ID NO: 707658 - DNA, 19 bp, Mus musculus
  siRNA target sequence for Chm (NM_018818.1,779-797).
gggattactaattgatctt

SEQ ID NO: 707659 - DNA, 19 bp, Mus musculus
  siRNA target sequence for Chm (NM_018818.1,845-863).
gaggattcttgcatttcga

SEQ ID NO: 707660 - DNA, 19 bp, Mus musculus
  siRNA target sequence for Chm (NM_018818.1,905-923).
cttcaatagcaaacaactt

SEQ ID NO: 707661 - DNA, 19 bp, Mus musculus
  siRNA target sequence for Chm (NM_018818.1,929-947).
ggtagaaaagcgaatgctt

SEQ ID NO: 707662 - DNA, 19 bp, Mus musculus
  siRNA target sequence for Chm (NM_018818.1,930-948).
gtagaaaagcgaatgctta

SEQ ID NO: 707663 - DNA, 19 bp, Mus musculus
  siRNA target sequence for Chm (NM_018818.1,938-956).
gcgaatgcttatgaaattt

SEQ ID NO: 707664 - DNA, 19 bp, Mus musculus
  siRNA target sequence for Chm (NM_018818.1,983-1001).
ccatcccgatgagtacaaa

SEQ ID NO: 707665 - DNA, 19 bp, Mus musculus
  siRNA target sequence for Chm (NM_018818.1,987-1005).
cccgatgagtacaaagcat

SEQ ID NO: 707666 - DNA, 19 bp, Mus musculus
  siRNA target sequence for Chm (NM_018818.1,1002-1020).
gcatacgaggaaactacat

SEQ ID NO: 707667 - DNA, 19 bp, Mus musculus
  siRNA target sequence for Chm (NM_018818.1,1003-1021).
catacgaggaaactacatt

SEQ ID NO: 707668 - DNA, 19 bp, Mus musculus
  siRNA target sequence for Chm (NM_018818.1,1116-1134).
gtagatggtctcaaagcta

SEQ ID NO: 707669 - DNA, 19 bp, Mus musculus
  siRNA target sequence for Chm (NM_018818.1,1163-1181).
gtatggcaacactccattt

SEQ ID NO: 707670 - DNA, 19 bp, Mus musculus
  siRNA target sequence for Chm (NM_018818.1,1168-1186).
gcaacactccatttctgtt

SEQ ID NO: 707671 - DNA, 19 bp, Mus musculus
  siRNA target sequence for Chm (NM_018818.1,1332-1350).
ggtcaaaggataatctcta

SEQ ID NO: 707672 - DNA, 19 bp, Mus musculus
  siRNA target sequence for Chm (NM_018818.1,1333-1351).
gtcaaaggataatctctaa

SEQ ID NO: 707673 - DNA, 19 bp, Mus musculus
  siRNA target sequence for Chm (NM_018818.1,1339-1357).
ggataatctctaaacattt

SEQ ID NO: 707674 - DNA, 19 bp, Mus musculus
  siRNA target sequence for Chm (NM_018818.1,1348-1366).
ctaaacatttcgttattga

SEQ ID NO: 707675 - DNA, 19 bp, Mus musculus
  siRNA target sequence for Chm (NM_018818.1,1390-1408).
catgttccggtgtacagta

SEQ ID NO: 707676 - DNA, 19 bp, Mus musculus
  siRNA target sequence for Chm (NM_018818.1,1401-1419).
gtacagtacaggcaaattt

SEQ ID NO: 707677 - DNA, 19 bp, Mus musculus
  siRNA target sequence for Chm (NM_018818.1,1433-1451).
gattacagatggatcagta

SEQ ID NO: 707678 - DNA, 19 bp, Mus musculus
  siRNA target sequence for Chm (NM_018818.1,1498-1516).
cagaagagtcaggaagttt

SEQ ID NO: 707679 - DNA, 19 bp, Mus musculus
  siRNA target sequence for Chm (NM_018818.1,1518-1536).
gctgttcgagtcattgagt

SEQ ID NO: 707680 - DNA, 19 bp, Mus musculus
  siRNA target sequence for Chm (NM_018818.1,1519-1537).
ctgttcgagtcattgagtt

SEQ ID NO: 707681 - DNA, 19 bp, Mus musculus
  siRNA target sequence for Chm (NM_018818.1,1521-1539).
gttcgagtcattgagttat

SEQ ID NO: 707682 - DNA, 19 bp, Mus musculus
  siRNA target sequence for Chm (NM_018818.1,1524-1542).
cgagtcattgagttatgct

SEQ ID NO: 707683 - DNA, 19 bp, Mus musculus
  siRNA target sequence for Chm (NM_018818.1,1558-1576).
gcatgaaaggcacatactt

SEQ ID NO: 707684 - DNA, 19 bp, Mus musculus
  siRNA target sequence for Chm (NM_018818.1,1566-1584).
ggcacatacttggtacatt

SEQ ID NO: 707685 - DNA, 19 bp, Mus musculus
  siRNA target sequence for Chm (NM_018818.1,1623-1641).
gaacgagtagtccagaaat

SEQ ID NO: 707686 - DNA, 19 bp, Mus musculus
  siRNA target sequence for Chm (NM_018818.1,1626-1644).
cgagtagtccagaaattgt

SEQ ID NO: 707687 - DNA, 19 bp, Mus musculus
  siRNA target sequence for Chm (NM_018818.1,1627-1645).
gagtagtccagaaattgtt

SEQ ID NO: 707688 - DNA, 19 bp, Mus musculus
  siRNA target sequence for Chm (NM_018818.1,1629-1647).
gtagtccagaaattgttta

SEQ ID NO: 707689 - DNA, 19 bp, Mus musculus
  siRNA target sequence for Chm (NM_018818.1,1682-1700).
ggttgaaaagccaagaatt

SEQ ID NO: 707690 - DNA, 19 bp, Mus musculus
  siRNA target sequence for Chm (NM_018818.1,1701-1719).
ctatgggcactctacttca

SEQ ID NO: 707691 - DNA, 19 bp, Mus musculus
  siRNA target sequence for Chm (NM_018818.1,1707-1725).
gcactctacttcaatatga

SEQ ID NO: 707692 - DNA, 19 bp, Mus musculus
  siRNA target sequence for Chm (NM_018818.1,1736-1754).
ggatatcagcagagattgt

SEQ ID NO: 707693 - DNA, 19 bp, Mus musculus
  siRNA target sequence for Chm (NM_018818.1,1742-1760).
cagcagagattgttataat

SEQ ID NO: 707694 - DNA, 19 bp, Mus musculus
  siRNA target sequence for Chm (NM_018818.1,1744-1762).
gcagagattgttataatga

SEQ ID NO: 707695 - DNA, 19 bp, Mus musculus
  siRNA target sequence for Chm (NM_018818.1,1745-1763).
cagagattgttataatgat

SEQ ID NO: 707696 - DNA, 19 bp, Mus musculus
  siRNA target sequence for Chm (NM_018818.1,1761-1779).
gatttaccgtccaatgtct

SEQ ID NO: 707697 - DNA, 19 bp, Mus musculus
  siRNA target sequence for Chm (NM_018818.1,1786-1804).
gctctggccctgactgtaa

SEQ ID NO: 707698 - DNA, 19 bp, Mus musculus
  siRNA target sequence for Chm (NM_018818.1,1787-1805).
ctctggccctgactgtaat

SEQ ID NO: 707699 - DNA, 19 bp, Mus musculus
  siRNA target sequence for Chm (NM_018818.1,1795-1813).
ctgactgtaatctaggaaa

SEQ ID NO: 707700 - DNA, 19 bp, Mus musculus
  siRNA target sequence for Chm (NM_018818.1,1799-1817).
ctgtaatctaggaaatgat

SEQ ID NO: 707701 - DNA, 19 bp, Mus musculus
  siRNA target sequence for Chm (NM_018818.1,1915-1933).
gagacagctcacaacaaga

SEQ ID NO: 707702 - DNA, 19 bp, Mus musculus
  siRNA target sequence for Chm (NM_018818.1,1922-1940).
ctcacaacaagaagtttca

SEQ ID NO: 707703 - DNA, 19 bp, Mus musculus
  siRNA target sequence for Msln (NM_018857.1,264-282).
gaacggtgccgctgacttt

SEQ ID NO: 707704 - DNA, 19 bp, Mus musculus
  siRNA target sequence for Msln (NM_018857.1,317-335).
catgtgaggaggtatctga

SEQ ID NO: 707705 - DNA, 19 bp, Mus musculus
  siRNA target sequence for Msln (NM_018857.1,370-388).
gctgtaagacagaagaaca

SEQ ID NO: 707706 - DNA, 19 bp, Mus musculus
  siRNA target sequence for Msln (NM_018857.1,620-638).
gccagggcgtgtatggatt

SEQ ID NO: 707707 - DNA, 19 bp, Mus musculus
  siRNA target sequence for Msln (NM_018857.1,624-642).
gggcgtgtatggatttcaa

SEQ ID NO: 707708 - DNA, 19 bp, Mus musculus
  siRNA target sequence for Msln (NM_018857.1,707-725).
ccagatcttccgaagttct

SEQ ID NO: 707709 - DNA, 19 bp, Mus musculus
  siRNA target sequence for Msln (NM_018857.1,798-816).
gagtggaagaacccaatat

SEQ ID NO: 707710 - DNA, 19 bp, Mus musculus
  siRNA target sequence for Msln (NM_018857.1,995-1013).
gacgggatgcagaacagaa

SEQ ID NO: 707711 - DNA, 19 bp, Mus musculus
  siRNA target sequence for Msln (NM_018857.1,1353-1371).
cttggtcgcctgctatctt

SEQ ID NO: 707712 - DNA, 19 bp, Mus musculus
  siRNA target sequence for Msln (NM_018857.1,1382-1400).
gccagctggacgaggatat

SEQ ID NO: 707713 - DNA, 19 bp, Mus musculus
  siRNA target sequence for Msln (NM_018857.1,1387-1405).
ctggacgaggatatggtaa

SEQ ID NO: 707714 - DNA, 19 bp, Mus musculus
  siRNA target sequence for Msln (NM_018857.1,1389-1407).
ggacgaggatatggtaaaa

SEQ ID NO: 707715 - DNA, 19 bp, Mus musculus
  siRNA target sequence for Msln (NM_018857.1,1414-1432).
ggcgacatcccgttaagct

SEQ ID NO: 707716 - DNA, 19 bp, Mus musculus
  siRNA target sequence for Msln (NM_018857.1,1415-1433).
gcgacatcccgttaagcta

SEQ ID NO: 707717 - DNA, 19 bp, Mus musculus
  siRNA target sequence for Msln (NM_018857.1,1416-1434).
cgacatcccgttaagctat

SEQ ID NO: 707718 - DNA, 19 bp, Mus musculus
  siRNA target sequence for Msln (NM_018857.1,1419-1437).
catcccgttaagctatcta

SEQ ID NO: 707719 - DNA, 19 bp, Mus musculus
  siRNA target sequence for Msln (NM_018857.1,1422-1440).
cccgttaagctatctatgt

SEQ ID NO: 707720 - DNA, 19 bp, Mus musculus
  siRNA target sequence for Msln (NM_018857.1,1424-1442).
cgttaagctatctatgtga

SEQ ID NO: 707721 - DNA, 19 bp, Mus musculus
  siRNA target sequence for Msln (NM_018857.1,1573-1591).
gtgagcggcctagaatact

SEQ ID NO: 707722 - DNA, 19 bp, Mus musculus
  siRNA target sequence for Msln (NM_018857.1,1575-1593).
gagcggcctagaatacttt

SEQ ID NO: 707723 - DNA, 19 bp, Mus musculus
  siRNA target sequence for Msln (NM_018857.1,1577-1595).
gcggcctagaatactttga

SEQ ID NO: 707724 - DNA, 19 bp, Mus musculus
  siRNA target sequence for Msln (NM_018857.1,1645-1663).
ctcagccagcacaatgtga

SEQ ID NO: 707725 - DNA, 19 bp, Mus musculus
  siRNA target sequence for Msln (NM_018857.1,1669-1687).
gacatagccactttcaaga

SEQ ID NO: 707726 - DNA, 19 bp, Mus musculus
  siRNA target sequence for Msln (NM_018857.1,1803-1821).
gttccggcagcatcagaaa

SEQ ID NO: 707727 - DNA, 19 bp, Mus musculus
  siRNA target sequence for Msln (NM_018857.1,1924-1942).
cttgggccaggatttgtat

SEQ ID NO: 707728 - DNA, 19 bp, Mus musculus
  siRNA target sequence for Msln (NM_018857.1,1927-1945).
gggccaggatttgtattaa

SEQ ID NO: 707729 - DNA, 19 bp, Mus musculus
  siRNA target sequence for Msln (NM_018857.1,1928-1946).
ggccaggatttgtattaat

SEQ ID NO: 707730 - DNA, 19 bp, Mus musculus
  siRNA target sequence for Msln (NM_018857.1,1929-1947).
gccaggatttgtattaata

SEQ ID NO: 707731 - DNA, 19 bp, Mus musculus
  siRNA target sequence for Msln (NM_018857.1,1933-1951).
ggatttgtattaatatgga

SEQ ID NO: 707732 - DNA, 19 bp, Mus musculus
  siRNA target sequence for D1Bwg0491e (NM_018872.1,78-96).
cggagagcataatagaagt

SEQ ID NO: 707733 - DNA, 19 bp, Mus musculus
  siRNA target sequence for D1Bwg0491e (NM_018872.1,144-162).
gcctcggttcatatcaaca

SEQ ID NO: 707734 - DNA, 19 bp, Mus musculus
  siRNA target sequence for D1Bwg0491e (NM_018872.1,193-211).
caggcccatacgattcgaa

SEQ ID NO: 707735 - DNA, 19 bp, Mus musculus
  siRNA target sequence for D1Bwg0491e (NM_018872.1,239-257).
ccagttggaatgccaaaaa

SEQ ID NO: 707736 - DNA, 19 bp, Mus musculus
  siRNA target sequence for D1Bwg0491e (NM_018872.1,259-277).
ggaaaaagtctacttacat

SEQ ID NO: 707737 - DNA, 19 bp, Mus musculus
  siRNA target sequence for D1Bwg0491e (NM_018872.1,293-311).
gaaacgattactttagtat

SEQ ID NO: 707738 - DNA, 19 bp, Mus musculus
  siRNA target sequence for D1Bwg0491e (NM_018872.1,297-315).
cgattactttagtatcaat

SEQ ID NO: 707739 - DNA, 19 bp, Mus musculus
  siRNA target sequence for D1Bwg0491e (NM_018872.1,371-389).
ccaggaggaaacacatcat

SEQ ID NO: 707740 - DNA, 19 bp, Mus musculus
  siRNA target sequence for D1Bwg0491e (NM_018872.1,378-396).
gaaacacatcatttgatgt

SEQ ID NO: 707741 - DNA, 19 bp, Mus musculus
  siRNA target sequence for D1Bwg0491e (NM_018872.1,382-400).
cacatcatttgatgtagtt

SEQ ID NO: 707742 - DNA, 19 bp, Mus musculus
  siRNA target sequence for D1Bwg0491e (NM_018872.1,469-487).
cacttaccaggtatttggt

SEQ ID NO: 707743 - DNA, 19 bp, Mus musculus
  siRNA target sequence for D1Bwg0491e (NM_018872.1,494-512).
gttccaaatccgtatcgat

SEQ ID NO: 707744 - DNA, 19 bp, Mus musculus
  siRNA target sequence for D1Bwg0491e (NM_018872.1,497-515).
ccaaatccgtatcgattaa

SEQ ID NO: 707745 - DNA, 19 bp, Mus musculus
  siRNA target sequence for D1Bwg0491e (NM_018872.1,549-567).
gcagcttttcacccataat

SEQ ID NO: 707746 - DNA, 19 bp, Mus musculus
  siRNA target sequence for D1Bwg0491e (NM_018872.1,550-568).
cagcttttcacccataata

SEQ ID NO: 707747 - DNA, 19 bp, Mus musculus
  siRNA target sequence for D1Bwg0491e (NM_018872.1,552-570).
gcttttcacccataataaa

SEQ ID NO: 707748 - DNA, 19 bp, Mus musculus
  siRNA target sequence for D1Bwg0491e (NM_018872.1,561-579).
ccataataaacatacacaa

SEQ ID NO: 707749 - DNA, 19 bp, Mus musculus
  siRNA target sequence for D1Bwg0491e (NM_018872.1,582-600).
ctcacagtgagcctttaca

SEQ ID NO: 707750 - DNA, 19 bp, Mus musculus
  siRNA target sequence for D1Bwg0491e (NM_018872.1,594-612).
ctttacaggtcgtagagat

SEQ ID NO: 707751 - DNA, 19 bp, Mus musculus
  siRNA target sequence for D1Bwg0491e (NM_018872.1,599-617).
caggtcgtagagatgtact

SEQ ID NO: 707752 - DNA, 19 bp, Mus musculus
  siRNA target sequence for D1Bwg0491e (NM_018872.1,783-801).
cagacagcaccgagttcat

SEQ ID NO: 707753 - DNA, 19 bp, Mus musculus
  siRNA target sequence for D1Bwg0491e (NM_018872.1,808-826).
cccggttgaggttgaagtt

SEQ ID NO: 707754 - DNA, 19 bp, Mus musculus
  siRNA target sequence for D1Bwg0491e (NM_018872.1,809-827).
ccggttgaggttgaagtta

SEQ ID NO: 707755 - DNA, 19 bp, Mus musculus
  siRNA target sequence for D1Bwg0491e (NM_018872.1,882-900).
gaacacaagatctaccaaa

SEQ ID NO: 707756 - DNA, 19 bp, Mus musculus
  siRNA target sequence for D1Bwg0491e (NM_018872.1,887-905).
caagatctaccaaaggttt

SEQ ID NO: 707757 - DNA, 19 bp, Mus musculus
  siRNA target sequence for D1Bwg0491e (NM_018872.1,890-908).
gatctaccaaaggttttaa

SEQ ID NO: 707758 - DNA, 19 bp, Mus musculus
  siRNA target sequence for D1Bwg0491e (NM_018872.1,897-915).
caaaggttttaaatcttca

SEQ ID NO: 707759 - DNA, 19 bp, Mus musculus
  siRNA target sequence for D1Bwg0491e (NM_018872.1,937-955).
ggatgtaccaataacaagt

SEQ ID NO: 707760 - DNA, 19 bp, Mus musculus
  siRNA target sequence for D1Bwg0491e (NM_018872.1,977-995).
gacgctatcacggtacatt

SEQ ID NO: 707761 - DNA, 19 bp, Mus musculus
  siRNA target sequence for D1Bwg0491e (NM_018872.1,979-997).
cgctatcacggtacatttt

SEQ ID NO: 707762 - DNA, 19 bp, Mus musculus
  siRNA target sequence for D1Bwg0491e (NM_018872.1,980-998).
gctatcacggtacatttta

SEQ ID NO: 707763 - DNA, 19 bp, Mus musculus
  siRNA target sequence for D1Bwg0491e (NM_018872.1,981-999).
ctatcacggtacattttaa

SEQ ID NO: 707764 - DNA, 19 bp, Mus musculus
  siRNA target sequence for D1Bwg0491e (NM_018872.1,1001-1019).
ccagttacgttaaaagctt

SEQ ID NO: 707765 - DNA, 19 bp, Mus musculus
  siRNA target sequence for D1Bwg0491e (NM_018872.1,1020-1038).
ctgaaagtaaatataccaa

SEQ ID NO: 707766 - DNA, 19 bp, Mus musculus
  siRNA target sequence for D1Bwg0491e (NM_018872.1,1092-1110).
ctgggaaaataactgttaa

SEQ ID NO: 707767 - DNA, 19 bp, Mus musculus
  siRNA target sequence for D1Bwg0491e (NM_018872.1,1112-1130).
gcaaaggaaaagagttatt

SEQ ID NO: 707768 - DNA, 19 bp, Mus musculus
  siRNA target sequence for D1Bwg0491e (NM_018872.1,1155-1173).
cagaagttctagatggtta

SEQ ID NO: 707769 - DNA, 19 bp, Mus musculus
  siRNA target sequence for D1Bwg0491e (NM_018872.1,1170-1188).
gttatttggggtttgatca

SEQ ID NO: 707770 - DNA, 19 bp, Mus musculus
  siRNA target sequence for D1Bwg0491e (NM_018872.1,1266-1284).
gttttgcgatcctcattca

SEQ ID NO: 707771 - DNA, 19 bp, Mus musculus
  siRNA target sequence for D1Bwg0491e (NM_018872.1,1349-1367).
ctcattcttcctaatgagt

SEQ ID NO: 707772 - DNA, 19 bp, Mus musculus
  siRNA target sequence for D1Bwg0491e (NM_018872.1,1359-1377).
ctaatgagtcgggatacat

SEQ ID NO: 707773 - DNA, 19 bp, Mus musculus
  siRNA target sequence for D1Bwg0491e (NM_018872.1,1404-1422).
cctcatccatgcacataga

SEQ ID NO: 707774 - DNA, 19 bp, Mus musculus
  siRNA target sequence for D1Bwg0491e (NM_018872.1,1414-1432).
gcacatagacaacaacatt

SEQ ID NO: 707775 - DNA, 19 bp, Mus musculus
  siRNA target sequence for D1Bwg0491e (NM_018872.1,1429-1447).
cattttacttgttaccaat

SEQ ID NO: 707776 - DNA, 19 bp, Mus musculus
  siRNA target sequence for D1Bwg0491e (NM_018872.1,1439-1457).
gttaccaatgcttctaagt

SEQ ID NO: 707777 - DNA, 19 bp, Mus musculus
  siRNA target sequence for D1Bwg0491e (NM_018872.1,1473-1491).
gggtatacacaggcttttt

SEQ ID NO: 707778 - DNA, 19 bp, Mus musculus
  siRNA target sequence for D1Bwg0491e (NM_018872.1,1520-1538).
gaagaacgcttcatagatt

SEQ ID NO: 707779 - DNA, 19 bp, Mus musculus
  siRNA target sequence for D1Bwg0491e (NM_018872.1,1553-1571).
gctacagaagcaagtagta

SEQ ID NO: 707780 - DNA, 19 bp, Mus musculus
  siRNA target sequence for D1Bwg0491e (NM_018872.1,1554-1572).
ctacagaagcaagtagtat

SEQ ID NO: 707781 - DNA, 19 bp, Mus musculus
  siRNA target sequence for D1Bwg0491e (NM_018872.1,1559-1577).
gaagcaagtagtattttat

SEQ ID NO: 707782 - DNA, 19 bp, Mus musculus
  siRNA target sequence for D1Bwg0491e (NM_018872.1,1598-1616).
ccaattgagctggcaataa

SEQ ID NO: 707783 - DNA, 19 bp, Mus musculus
  siRNA target sequence for D1Bwg0491e (NM_018872.1,1599-1617).
caattgagctggcaataaa

SEQ ID NO: 707784 - DNA, 19 bp, Mus musculus
  siRNA target sequence for D1Bwg0491e (NM_018872.1,1604-1622).
gagctggcaataaaaagtt

SEQ ID NO: 707785 - DNA, 19 bp, Mus musculus
  siRNA target sequence for D1Bwg0491e (NM_018872.1,1730-1748).
gaccagtccccggtaacat

SEQ ID NO: 707786 - DNA, 19 bp, Mus musculus
  siRNA target sequence for D1Bwg0491e (NM_018872.1,1732-1750).
ccagtccccggtaacatta

SEQ ID NO: 707787 - DNA, 19 bp, Mus musculus
  siRNA target sequence for D1Bwg0491e (NM_018872.1,1735-1753).
gtccccggtaacattagct

SEQ ID NO: 707788 - DNA, 19 bp, Mus musculus
  siRNA target sequence for D1Bwg0491e (NM_018872.1,1771-1789).
gttcagagtcaaacttact

SEQ ID NO: 707789 - DNA, 19 bp, Mus musculus
  siRNA target sequence for D1Bwg0491e (NM_018872.1,1817-1835).
ggggccatacagatcacaa

SEQ ID NO: 707790 - DNA, 19 bp, Mus musculus
  siRNA target sequence for D1Bwg0491e (NM_018872.1,1946-1964).
catcagagcttaaatatta

SEQ ID NO: 707791 - DNA, 19 bp, Mus musculus
  siRNA target sequence for D1Bwg0491e (NM_018872.1,1975-1993).
ctcacagaaggtgaagata

SEQ ID NO: 707792 - DNA, 19 bp, Mus musculus
  siRNA target sequence for D1Bwg0491e (NM_018872.1,1977-1995).
cacagaaggtgaagataca

SEQ ID NO: 707793 - DNA, 19 bp, Mus musculus
  siRNA target sequence for D1Bwg0491e (NM_018872.1,1985-2003).
gtgaagatacagcaaataa

SEQ ID NO: 707794 - DNA, 19 bp, Mus musculus
  siRNA target sequence for D1Bwg0491e (NM_018872.1,1994-2012).
cagcaaataaggtctttgt

SEQ ID NO: 707795 - DNA, 19 bp, Mus musculus
  siRNA target sequence for D1Bwg0491e (NM_018872.1,2013-2031).
cagaagacgtacgattcta

SEQ ID NO: 707796 - DNA, 19 bp, Mus musculus
  siRNA target sequence for D1Bwg0491e (NM_018872.1,2015-2033).
gaagacgtacgattctact

SEQ ID NO: 707797 - DNA, 19 bp, Mus musculus
  siRNA target sequence for D1Bwg0491e (NM_018872.1,2018-2036).
gacgtacgattctactaca

SEQ ID NO: 707798 - DNA, 19 bp, Mus musculus
  siRNA target sequence for D1Bwg0491e (NM_018872.1,2020-2038).
cgtacgattctactacaaa

SEQ ID NO: 707799 - DNA, 19 bp, Mus musculus
  siRNA target sequence for D1Bwg0491e (NM_018872.1,2024-2042).
cgattctactacaaacgat

SEQ ID NO: 707800 - DNA, 19 bp, Mus musculus
  siRNA target sequence for D1Bwg0491e (NM_018872.1,2066-2084).
gagccagggaagaagtcta

SEQ ID NO: 707801 - DNA, 19 bp, Mus musculus
  siRNA target sequence for D1Bwg0491e (NM_018872.1,2080-2098).
gtctaagattgcaaacatt

SEQ ID NO: 707802 - DNA, 19 bp, Mus musculus
  siRNA target sequence for D1Bwg0491e (NM_018872.1,2148-2166).
ctttcctatccaaatctga

SEQ ID NO: 707803 - DNA, 19 bp, Mus musculus
  siRNA target sequence for D1Bwg0491e (NM_018872.1,2158-2176).
caaatctgaacccaaagta

SEQ ID NO: 707804 - DNA, 19 bp, Mus musculus
  siRNA target sequence for D1Bwg0491e (NM_018872.1,2226-2244).
cacatcagagcttgttcaa

SEQ ID NO: 707805 - DNA, 19 bp, Mus musculus
  siRNA target sequence for D1Bwg0491e (NM_018872.1,2269-2287).
cgcaggacataggttgaat

SEQ ID NO: 707806 - DNA, 19 bp, Mus musculus
  siRNA target sequence for D1Bwg0491e (NM_018872.1,2273-2291).
ggacataggttgaatgcta

SEQ ID NO: 707807 - DNA, 19 bp, Mus musculus
  siRNA target sequence for D1Bwg0491e (NM_018872.1,2281-2299).
gttgaatgctatgtttgaa

SEQ ID NO: 707808 - DNA, 19 bp, Mus musculus
  siRNA target sequence for D1Bwg0491e (NM_018872.1,2284-2302).
gaatgctatgtttgaagta

SEQ ID NO: 707809 - DNA, 19 bp, Mus musculus
  siRNA target sequence for D1Bwg0491e (NM_018872.1,2315-2333).
cagaaaaatatcgtatcaa

SEQ ID NO: 707810 - DNA, 19 bp, Mus musculus
  siRNA target sequence for D1Bwg0491e (NM_018872.1,2317-2335).
gaaaaatatcgtatcaaaa

SEQ ID NO: 707811 - DNA, 19 bp, Mus musculus
  siRNA target sequence for D1Bwg0491e (NM_018872.1,2473-2491).
catcccactggctttgtat

SEQ ID NO: 707812 - DNA, 19 bp, Mus musculus
  siRNA target sequence for D1Bwg0491e (NM_018872.1,2477-2495).
ccactggctttgtattcca

SEQ ID NO: 707813 - DNA, 19 bp, Mus musculus
  siRNA target sequence for D1Bwg0491e (NM_018872.1,2478-2496).
cactggctttgtattccaa

SEQ ID NO: 707814 - DNA, 19 bp, Mus musculus
  siRNA target sequence for D1Bwg0491e (NM_018872.1,2499-2517).
cctccgtctttgcagataa

SEQ ID NO: 707815 - DNA, 19 bp, Mus musculus
  siRNA target sequence for D1Bwg0491e (NM_018872.1,2526-2544).
caaggtttaacttgagtaa

SEQ ID NO: 707816 - DNA, 19 bp, Mus musculus
  siRNA target sequence for D1Bwg0491e (NM_018872.1,2558-2576).
gatttgagaacacttgaat

SEQ ID NO: 707817 - DNA, 19 bp, Mus musculus
  siRNA target sequence for D1Bwg0491e (NM_018872.1,2563-2581).
gagaacacttgaattccaa

SEQ ID NO: 707818 - DNA, 19 bp, Mus musculus
  siRNA target sequence for D1Bwg0491e (NM_018872.1,2633-2651).
ggtctctctcggcatttca

SEQ ID NO: 707819 - DNA, 19 bp, Mus musculus
  siRNA target sequence for D1Bwg0491e (NM_018872.1,2841-2859).
gctccttacgcttcaaaat

SEQ ID NO: 707820 - DNA, 19 bp, Mus musculus
  siRNA target sequence for D1Bwg0491e (NM_018872.1,2845-2863).
cttacgcttcaaaatcaca

SEQ ID NO: 707821 - DNA, 19 bp, Mus musculus
  siRNA target sequence for D1Bwg0491e (NM_018872.1,2883-2901).
gcatagaccgtttgaaact

SEQ ID NO: 707822 - DNA, 19 bp, Mus musculus
  siRNA target sequence for D1Bwg0491e (NM_018872.1,2884-2902).
catagaccgtttgaaacta

SEQ ID NO: 707823 - DNA, 19 bp, Mus musculus
  siRNA target sequence for D1Bwg0491e (NM_018872.1,2944-2962).
gaatacgggacaacttgaa

SEQ ID NO: 707824 - DNA, 19 bp, Mus musculus
  siRNA target sequence for D1Bwg0491e (NM_018872.1,2977-2995).
cattgagatcagtggatat

SEQ ID NO: 707825 - DNA, 19 bp, Mus musculus
  siRNA target sequence for D1Bwg0491e (NM_018872.1,2996-3014).
gcgtgtgagggatatggtt

SEQ ID NO: 707826 - DNA, 19 bp, Mus musculus
  siRNA target sequence for D1Bwg0491e (NM_018872.1,2997-3015).
cgtgtgagggatatggttt

SEQ ID NO: 707827 - DNA, 19 bp, Mus musculus
  siRNA target sequence for D1Bwg0491e (NM_018872.1,2998-3016).
gtgtgagggatatggtttt

SEQ ID NO: 707828 - DNA, 19 bp, Mus musculus
  siRNA target sequence for D1Bwg0491e (NM_018872.1,3058-3076).
ctccagagacatagtcata

SEQ ID NO: 707829 - DNA, 19 bp, Mus musculus
  siRNA target sequence for D1Bwg0491e (NM_018872.1,3079-3097).
gtttactccagatttcaca

SEQ ID NO: 707830 - DNA, 19 bp, Mus musculus
  siRNA target sequence for D1Bwg0491e (NM_018872.1,3109-3127).
cattcgggagctgaagttt

SEQ ID NO: 707831 - DNA, 19 bp, Mus musculus
  siRNA target sequence for D1Bwg0491e (NM_018872.1,3135-3153).
gcagtggctccgagtttgt

SEQ ID NO: 707832 - DNA, 19 bp, Mus musculus
  siRNA target sequence for D1Bwg0491e (NM_018872.1,3227-3245).
gagctcgcgctctacatca

SEQ ID NO: 707833 - DNA, 19 bp, Mus musculus
  siRNA target sequence for D1Bwg0491e (NM_018872.1,3394-3412).
gagaatcgttggtatttca

SEQ ID NO: 707834 - DNA, 19 bp, Mus musculus
  siRNA target sequence for D1Bwg0491e (NM_018872.1,3400-3418).
cgttggtatttcatctgaa

SEQ ID NO: 707835 - DNA, 19 bp, Mus musculus
  siRNA target sequence for D1Bwg0491e (NM_018872.1,3452-3470).
catggtaggggtttctata

SEQ ID NO: 707836 - DNA, 19 bp, Mus musculus
  siRNA target sequence for D1Bwg0491e (NM_018872.1,3455-3473).
ggtaggggtttctatagta

SEQ ID NO: 707837 - DNA, 19 bp, Mus musculus
  siRNA target sequence for D1Bwg0491e (NM_018872.1,3574-3592).
cgtcagaaccagaaacagt

SEQ ID NO: 707838 - DNA, 19 bp, Mus musculus
  siRNA target sequence for D1Bwg0491e (NM_018872.1,3626-3644).
gctgcctcacagtctacaa

SEQ ID NO: 707839 - DNA, 19 bp, Mus musculus
  siRNA target sequence for D1Bwg0491e (NM_018872.1,3631-3649).
ctcacagtctacaagcaaa

SEQ ID NO: 707840 - DNA, 19 bp, Mus musculus
  siRNA target sequence for D1Bwg0491e (NM_018872.1,3907-3925).
cgacatcaccagtctcata

SEQ ID NO: 707841 - DNA, 19 bp, Mus musculus
  siRNA target sequence for D1Bwg0491e (NM_018872.1,3966-3984).
ccctagacgtgtttacaga

SEQ ID NO: 707842 - DNA, 19 bp, Mus musculus
  siRNA target sequence for D1Bwg0491e (NM_018872.1,3992-4010).
ccgtcaccgatgtcaaaaa

SEQ ID NO: 707843 - DNA, 19 bp, Mus musculus
  siRNA target sequence for D1Bwg0491e (NM_018872.1,3996-4014).
caccgatgtcaaaaagcaa

SEQ ID NO: 707844 - DNA, 19 bp, Mus musculus
  siRNA target sequence for D1Bwg0491e (NM_018872.1,4218-4236).
gaccagccgtgcctgaaaa

SEQ ID NO: 707845 - DNA, 19 bp, Mus musculus
  siRNA target sequence for D1Bwg0491e (NM_018872.1,4279-4297).
gctcttaaacgctaagaaa

SEQ ID NO: 707846 - DNA, 19 bp, Mus musculus
  siRNA target sequence for D1Bwg0491e (NM_018872.1,4433-4451).
cccccgaaaacaaaaggta

SEQ ID NO: 707847 - DNA, 19 bp, Mus musculus
  siRNA target sequence for D1Bwg0491e (NM_018872.1,4473-4491).
ggccagttgccctctcaaa

SEQ ID NO: 707848 - DNA, 19 bp, Mus musculus
  siRNA target sequence for D1Bwg0491e (NM_018872.1,4475-4493).
ccagttgccctctcaaagt

SEQ ID NO: 707849 - DNA, 19 bp, Mus musculus
  siRNA target sequence for D1Bwg0491e (NM_018872.1,4504-4522).
cagtcaagaactaggtaat

SEQ ID NO: 707850 - DNA, 19 bp, Mus musculus
  siRNA target sequence for D1Bwg0491e (NM_018872.1,4508-4526).
caagaactaggtaatacca

SEQ ID NO: 707851 - DNA, 19 bp, Mus musculus
  siRNA target sequence for D1Bwg0491e (NM_018872.1,4632-4650).
ccctcaatgcagacatttt

SEQ ID NO: 707852 - DNA, 19 bp, Mus musculus
  siRNA target sequence for D1Bwg0491e (NM_018872.1,4703-4721).
gctccctgcccgttcacat

SEQ ID NO: 707853 - DNA, 19 bp, Mus musculus
  siRNA target sequence for D1Bwg0491e (NM_018872.1,4752-4770).
gctccggcagtgacacaaa

SEQ ID NO: 707854 - DNA, 19 bp, Mus musculus
  siRNA target sequence for D1Bwg0491e (NM_018872.1,4888-4906).
gaatggatttgctaaaatt

SEQ ID NO: 707855 - DNA, 19 bp, Mus musculus
  siRNA target sequence for D1Bwg0491e (NM_018872.1,4936-4954).
ccttggcatttcacacatt

SEQ ID NO: 707856 - DNA, 19 bp, Mus musculus
  siRNA target sequence for D1Bwg0491e (NM_018872.1,5021-5039).
gacttcacccccctcaatt

SEQ ID NO: 707857 - DNA, 19 bp, Mus musculus
  siRNA target sequence for D1Bwg0491e (NM_018872.1,5069-5087).
ctaacaggtgcagttttca

SEQ ID NO: 707858 - DNA, 19 bp, Mus musculus
  siRNA target sequence for D1Bwg0491e (NM_018872.1,5111-5129).
cagtcgtcccagagaagtt

SEQ ID NO: 707859 - DNA, 19 bp, Mus musculus
  siRNA target sequence for D1Bwg0491e (NM_018872.1,5357-5375).
ctcatgggcacggaaaact

SEQ ID NO: 707860 - DNA, 19 bp, Mus musculus
  siRNA target sequence for D1Bwg0491e (NM_018872.1,5496-5514).
cgcacttccctcatgaaaa

SEQ ID NO: 707861 - DNA, 19 bp, Mus musculus
  siRNA target sequence for P140 (NM_018873.1,558-576).
ctgcccagcaaccaaacta

SEQ ID NO: 707862 - DNA, 19 bp, Mus musculus
  siRNA target sequence for P140 (NM_018873.1,594-612).
gcagctcgcgccatactca

SEQ ID NO: 707863 - DNA, 19 bp, Mus musculus
  siRNA target sequence for P140 (NM_018873.1,666-684).
ctgagtcgctggagacaat

SEQ ID NO: 707864 - DNA, 19 bp, Mus musculus
  siRNA target sequence for P140 (NM_018873.1,944-962).
gacgaggctcgcaatgtct

SEQ ID NO: 707865 - DNA, 19 bp, Mus musculus
  siRNA target sequence for P140 (NM_018873.1,991-1009).
ccaagaccgaagtatcatt

SEQ ID NO: 707866 - DNA, 19 bp, Mus musculus
  siRNA target sequence for P140 (NM_018873.1,992-1010).
caagaccgaagtatcatta

SEQ ID NO: 707867 - DNA, 19 bp, Mus musculus
  siRNA target sequence for P140 (NM_018873.1,995-1013).
gaccgaagtatcattaaga

SEQ ID NO: 707868 - DNA, 19 bp, Mus musculus
  siRNA target sequence for P140 (NM_018873.1,998-1016).
cgaagtatcattaagatct

SEQ ID NO: 707869 - DNA, 19 bp, Mus musculus
  siRNA target sequence for P140 (NM_018873.1,999-1017).
gaagtatcattaagatcta

SEQ ID NO: 707870 - DNA, 19 bp, Mus musculus
  siRNA target sequence for P140 (NM_018873.1,1027-1045).
gccgttgtatgctgctttt

SEQ ID NO: 707871 - DNA, 19 bp, Mus musculus
  siRNA target sequence for P140 (NM_018873.1,1757-1775).
cagtccttccgcaaagatt

SEQ ID NO: 707872 - DNA, 19 bp, Mus musculus
  siRNA target sequence for P140 (NM_018873.1,1974-1992).
gcctcactggcctagtaca

SEQ ID NO: 707873 - DNA, 19 bp, Mus musculus
  siRNA target sequence for P140 (NM_018873.1,2084-2102).
gggtcaggcagtaagagta

SEQ ID NO: 707874 - DNA, 19 bp, Mus musculus
  siRNA target sequence for P140 (NM_018873.1,2413-2431).
cgacgaggagctcattact

SEQ ID NO: 707875 - DNA, 19 bp, Mus musculus
  siRNA target sequence for P140 (NM_018873.1,2475-2493).
gagacgtggcccataacca

SEQ ID NO: 707876 - DNA, 19 bp, Mus musculus
  siRNA target sequence for P140 (NM_018873.1,3322-3340).
ggtggtcaccagtaagaaa

SEQ ID NO: 707877 - DNA, 19 bp, Mus musculus
  siRNA target sequence for P140 (NM_018873.1,3620-3638).
caacgaacggaatacatga

SEQ ID NO: 707878 - DNA, 19 bp, Mus musculus
  siRNA target sequence for P140 (NM_018873.1,3658-3676).
ggccactaaaccatctaaa

SEQ ID NO: 707879 - DNA, 19 bp, Mus musculus
  siRNA target sequence for P140 (NM_018873.1,3660-3678).
ccactaaaccatctaaaga

SEQ ID NO: 707880 - DNA, 19 bp, Mus musculus
  siRNA target sequence for P140 (NM_018873.1,3680-3698).
gtgagcggtccgaatgaga

SEQ ID NO: 707881 - DNA, 19 bp, Mus musculus
  siRNA target sequence for P140 (NM_018873.1,3735-3753).
gaacctccatccctgtatt

SEQ ID NO: 707882 - DNA, 19 bp, Mus musculus
  siRNA target sequence for 2810446G01Rik (NM_018879.1,177-195).
gctgccgcatcgaatgtat

SEQ ID NO: 707883 - DNA, 19 bp, Mus musculus
  siRNA target sequence for 2810446G01Rik (NM_018879.1,178-196).
ctgccgcatcgaatgtata

SEQ ID NO: 707884 - DNA, 19 bp, Mus musculus
  siRNA target sequence for 2810446G01Rik (NM_018879.1,180-198).
gccgcatcgaatgtatatt

SEQ ID NO: 707885 - DNA, 19 bp, Mus musculus
  siRNA target sequence for 2810446G01Rik (NM_018879.1,182-200).
cgcatcgaatgtatattct

SEQ ID NO: 707886 - DNA, 19 bp, Mus musculus
  siRNA target sequence for 2810446G01Rik (NM_018879.1,216-234).
caacgctgggacccaaaat

SEQ ID NO: 707887 - DNA, 19 bp, Mus musculus
  siRNA target sequence for 2810446G01Rik (NM_018879.1,259-277).
catctcgcgagaactgttt

SEQ ID NO: 707888 - DNA, 19 bp, Mus musculus
  siRNA target sequence for 2810446G01Rik (NM_018879.1,284-302).
gtccaggtgtacatcatca

SEQ ID NO: 707889 - DNA, 19 bp, Mus musculus
  siRNA target sequence for 2810446G01Rik (NM_018879.1,303-321).
ccaagcccgagttacagaa

SEQ ID NO: 707890 - DNA, 19 bp, Mus musculus
  siRNA target sequence for 2810446G01Rik (NM_018879.1,399-417).
gcaatgctctcctcttcaa

SEQ ID NO: 707891 - DNA, 19 bp, Mus musculus
  siRNA target sequence for 2810446G01Rik (NM_018879.1,434-452).
gacgctcaggctaagactt

SEQ ID NO: 707892 - DNA, 19 bp, Mus musculus
  siRNA target sequence for 2810446G01Rik (NM_018879.1,458-476).
ctggaacccatcgttaaaa

SEQ ID NO: 707893 - DNA, 19 bp, Mus musculus
  siRNA target sequence for 2810446G01Rik (NM_018879.1,621-639).
ccaacaccatccacttgaa

SEQ ID NO: 707894 - DNA, 19 bp, Mus musculus
  siRNA target sequence for 2810446G01Rik (NM_018879.1,666-684).
ctgttgcgcaggagtatga

SEQ ID NO: 707895 - DNA, 19 bp, Mus musculus
  siRNA target sequence for 2810446G01Rik (NM_018879.1,683-701).
gatgtgcccgtctttacaa

SEQ ID NO: 707896 - DNA, 19 bp, Mus musculus
  siRNA target sequence for 2810446G01Rik (NM_018879.1,704-722).
gacaaggaggatttcttca

SEQ ID NO: 707897 - DNA, 19 bp, Mus musculus
  siRNA target sequence for 2810446G01Rik (NM_018879.1,776-794).
cgccatgtccagaagatct

SEQ ID NO: 707898 - DNA, 19 bp, Mus musculus
  siRNA target sequence for 2810446G01Rik (NM_018879.1,883-901).
ccagtactccaatgtgtat

SEQ ID NO: 707899 - DNA, 19 bp, Mus musculus
  siRNA target sequence for 2810446G01Rik (NM_018879.1,884-902).
cagtactccaatgtgtatt

SEQ ID NO: 707900 - DNA, 19 bp, Mus musculus
  siRNA target sequence for 2810446G01Rik (NM_018879.1,1002-1020).
gagatgtgttccagctata

SEQ ID NO: 707901 - DNA, 19 bp, Mus musculus
  siRNA target sequence for 2810446G01Rik (NM_018879.1,1078-1096).
gttacaacacgttgatgaa

SEQ ID NO: 707902 - DNA, 19 bp, Mus musculus
  siRNA target sequence for 2810446G01Rik (NM_018879.1,1115-1133).
gggctgatgaagaacctta

SEQ ID NO: 707903 - DNA, 19 bp, Mus musculus
  siRNA target sequence for 2810446G01Rik (NM_018879.1,1209-1227).
gtcacagctatgatgagat

SEQ ID NO: 707904 - DNA, 19 bp, Mus musculus
  siRNA target sequence for 2810446G01Rik (NM_018879.1,1258-1276).
gctggacgagcgactagaa

SEQ ID NO: 707905 - DNA, 19 bp, Mus musculus
  siRNA target sequence for 2810446G01Rik (NM_018879.1,1261-1279).
ggacgagcgactagaaaat

SEQ ID NO: 707906 - DNA, 19 bp, Mus musculus
  siRNA target sequence for Ear5 (NM_019398.1,109-127).
cagcatatctataagaaat

SEQ ID NO: 707907 - DNA, 19 bp, Mus musculus
  siRNA target sequence for Ear5 (NM_019398.1,129-147).
ctctcccaaatgtgatgat

SEQ ID NO: 707908 - DNA, 19 bp, Mus musculus
  siRNA target sequence for Ear5 (NM_019398.1,153-171).
gcgggtcgttaacaagtat

SEQ ID NO: 707909 - DNA, 19 bp, Mus musculus
  siRNA target sequence for Ear5 (NM_019398.1,154-172).
cgggtcgttaacaagtata

SEQ ID NO: 707910 - DNA, 19 bp, Mus musculus
  siRNA target sequence for Ear5 (NM_019398.1,156-174).
ggtcgttaacaagtataca

SEQ ID NO: 707911 - DNA, 19 bp, Mus musculus
  siRNA target sequence for Ear5 (NM_019398.1,238-256).
cacaatccacccaagactt

SEQ ID NO: 707912 - DNA, 19 bp, Mus musculus
  siRNA target sequence for Ear5 (NM_019398.1,264-282).
cgggacaagtccaaattgt

SEQ ID NO: 707913 - DNA, 19 bp, Mus musculus
  siRNA target sequence for Ear5 (NM_019398.1,290-308).
gttcatctaaggtatctgt

SEQ ID NO: 707914 - DNA, 19 bp, Mus musculus
  siRNA target sequence for Ear5 (NM_019398.1,300-318).
ggtatctgtaactatctgt

SEQ ID NO: 707915 - DNA, 19 bp, Mus musculus
  siRNA target sequence for Ear5 (NM_019398.1,324-342).
cacaaaacgggcaaggaat

SEQ ID NO: 707916 - DNA, 19 bp, Mus musculus
  siRNA target sequence for Ear5 (NM_019398.1,326-344).
caaaacgggcaaggaatta

SEQ ID NO: 707917 - DNA, 19 bp, Mus musculus
  siRNA target sequence for Nmi (NM_019401.1,156-174).
gctgataaagacaacataa

SEQ ID NO: 707918 - DNA, 19 bp, Mus musculus
  siRNA target sequence for Nmi (NM_019401.1,230-248).
catgggattggttcatgaa

SEQ ID NO: 707919 - DNA, 19 bp, Mus musculus
  siRNA target sequence for Nmi (NM_019401.1,233-251).
gggattggttcatgaaatt

SEQ ID NO: 707920 - DNA, 19 bp, Mus musculus
  siRNA target sequence for Nmi (NM_019401.1,239-257).
ggttcatgaaattatgagt

SEQ ID NO: 707921 - DNA, 19 bp, Mus musculus
  siRNA target sequence for Nmi (NM_019401.1,310-328).
cggatgccagagaattcca

SEQ ID NO: 707922 - DNA, 19 bp, Mus musculus
  siRNA target sequence for Nmi (NM_019401.1,311-329).
ggatgccagagaattccaa

SEQ ID NO: 707923 - DNA, 19 bp, Mus musculus
  siRNA target sequence for Nmi (NM_019401.1,409-427).
gctcctgttcctttcaagt

SEQ ID NO: 707924 - DNA, 19 bp, Mus musculus
  siRNA target sequence for Nmi (NM_019401.1,465-483).
gcgctcatcacctttgaga

SEQ ID NO: 707925 - DNA, 19 bp, Mus musculus
  siRNA target sequence for Nmi (NM_019401.1,485-503).
ggaagaagtcgcacaaaat

SEQ ID NO: 707926 - DNA, 19 bp, Mus musculus
  siRNA target sequence for Nmi (NM_019401.1,492-510).
gtcgcacaaaatgtgatat

SEQ ID NO: 707927 - DNA, 19 bp, Mus musculus
  siRNA target sequence for Nmi (NM_019401.1,495-513).
gcacaaaatgtgatatcga

SEQ ID NO: 707928 - DNA, 19 bp, Mus musculus
  siRNA target sequence for Nmi (NM_019401.1,496-514).
cacaaaatgtgatatcgat

SEQ ID NO: 707929 - DNA, 19 bp, Mus musculus
  siRNA target sequence for Nmi (NM_019401.1,506-524).
gatatcgatggggaatcat

SEQ ID NO: 707930 - DNA, 19 bp, Mus musculus
  siRNA target sequence for Nmi (NM_019401.1,566-584).
cccagtcccactaaacaca

SEQ ID NO: 707931 - DNA, 19 bp, Mus musculus
  siRNA target sequence for Nmi (NM_019401.1,597-615).
caggttcatgtggacattt

SEQ ID NO: 707932 - DNA, 19 bp, Mus musculus
  siRNA target sequence for Nmi (NM_019401.1,606-624).
gtggacatttctaaaatga

SEQ ID NO: 707933 - DNA, 19 bp, Mus musculus
  siRNA target sequence for Nmi (NM_019401.1,616-634).
ctaaaatgaagatcaatgt

SEQ ID NO: 707934 - DNA, 19 bp, Mus musculus
  siRNA target sequence for Nmi (NM_019401.1,757-775).
gcgctgtcatcacttttgt

SEQ ID NO: 707935 - DNA, 19 bp, Mus musculus
  siRNA target sequence for Nmi (NM_019401.1,783-801).
ggcgttgttgacaagattt

SEQ ID NO: 707936 - DNA, 19 bp, Mus musculus
  siRNA target sequence for Nmi (NM_019401.1,784-802).
gcgttgttgacaagatttt

SEQ ID NO: 707937 - DNA, 19 bp, Mus musculus
  siRNA target sequence for Nmi (NM_019401.1,786-804).
gttgttgacaagattttga

SEQ ID NO: 707938 - DNA, 19 bp, Mus musculus
  siRNA target sequence for Nmi (NM_019401.1,819-837).
cctctctacatgaatcaga

SEQ ID NO: 707939 - DNA, 19 bp, Mus musculus
  siRNA target sequence for Nmi (NM_019401.1,870-888).
gaacgatgcttagaaaagt

SEQ ID NO: 707940 - DNA, 19 bp, Mus musculus
  siRNA target sequence for Nmi (NM_019401.1,923-941).
gcttctgaccggattagaa

SEQ ID NO: 707941 - DNA, 19 bp, Mus musculus
  siRNA target sequence for Nmi (NM_019401.1,964-982).
ctggggaggacttactcaa

SEQ ID NO: 707942 - DNA, 19 bp, Mus musculus
  siRNA target sequence for Nmi (NM_019401.1,967-985).
gggaggacttactcaacat

SEQ ID NO: 707943 - DNA, 19 bp, Mus musculus
  siRNA target sequence for Nmi (NM_019401.1,1049-1067).
gtccttcgcagcgtatttt

SEQ ID NO: 707944 - DNA, 19 bp, Mus musculus
  siRNA target sequence for Nmi (NM_019401.1,1051-1069).
ccttcgcagcgtattttaa

SEQ ID NO: 707945 - DNA, 19 bp, Mus musculus
  siRNA target sequence for Nmi (NM_019401.1,1052-1070).
cttcgcagcgtattttaaa

SEQ ID NO: 707946 - DNA, 19 bp, Mus musculus
  siRNA target sequence for Nmi (NM_019401.1,1055-1073).
cgcagcgtattttaaagaa

SEQ ID NO: 707947 - DNA, 19 bp, Mus musculus
  siRNA target sequence for Rnf5 (NM_019403.2,153-171).
gcgcgaccttcgaatgtaa

SEQ ID NO: 707948 - DNA, 19 bp, Mus musculus
  siRNA target sequence for Rnf5 (NM_019403.2,154-172).
cgcgaccttcgaatgtaat

SEQ ID NO: 707949 - DNA, 19 bp, Mus musculus
  siRNA target sequence for Rnf5 (NM_019403.2,155-173).
gcgaccttcgaatgtaata

SEQ ID NO: 707950 - DNA, 19 bp, Mus musculus
  siRNA target sequence for Rnf5 (NM_019403.2,156-174).
cgaccttcgaatgtaatat

SEQ ID NO: 707951 - DNA, 19 bp, Mus musculus
  siRNA target sequence for Rnf5 (NM_019403.2,157-175).
gaccttcgaatgtaatata

SEQ ID NO: 707952 - DNA, 19 bp, Mus musculus
  siRNA target sequence for Rnf5 (NM_019403.2,209-227).
gtgtgtggccacctgtatt

SEQ ID NO: 707953 - DNA, 19 bp, Mus musculus
  siRNA target sequence for Rnf5 (NM_019403.2,211-229).
gtgtggccacctgtattgt

SEQ ID NO: 707954 - DNA, 19 bp, Mus musculus
  siRNA target sequence for Rnf5 (NM_019403.2,352-370).
ggatcccagattgaaaact

SEQ ID NO: 707955 - DNA, 19 bp, Mus musculus
  siRNA target sequence for Rnf5 (NM_019403.2,570-588).
ggcaagattccctattcct

SEQ ID NO: 707956 - DNA, 19 bp, Mus musculus
  siRNA target sequence for Robo1 (NM_019413.1,336-354).
caccccgcattgttgaaca

SEQ ID NO: 707957 - DNA, 19 bp, Mus musculus
  siRNA target sequence for Robo1 (NM_019413.1,499-517).
gctgccaagcgggtcttta

SEQ ID NO: 707958 - DNA, 19 bp, Mus musculus
  siRNA target sequence for Robo1 (NM_019413.1,504-522).
caagcgggtctttattttt

SEQ ID NO: 707959 - DNA, 19 bp, Mus musculus
  siRNA target sequence for Robo1 (NM_019413.1,533-551).
gtccatggacggaagagta

SEQ ID NO: 707960 - DNA, 19 bp, Mus musculus
  siRNA target sequence for Robo1 (NM_019413.1,555-573).
ccgacgaaggggtctacat

SEQ ID NO: 707961 - DNA, 19 bp, Mus musculus
  siRNA target sequence for Robo1 (NM_019413.1,557-575).
gacgaaggggtctacatct

SEQ ID NO: 707962 - DNA, 19 bp, Mus musculus
  siRNA target sequence for Robo1 (NM_019413.1,576-594).
gtgtggctaggaattacct

SEQ ID NO: 707963 - DNA, 19 bp, Mus musculus
  siRNA target sequence for Robo1 (NM_019413.1,618-636).
catcgctggaggtagctat

SEQ ID NO: 707964 - DNA, 19 bp, Mus musculus
  siRNA target sequence for Robo1 (NM_019413.1,621-639).
cgctggaggtagctatact

SEQ ID NO: 707965 - DNA, 19 bp, Mus musculus
  siRNA target sequence for Robo1 (NM_019413.1,633-651).
ctatactacgggatgactt

SEQ ID NO: 707966 - DNA, 19 bp, Mus musculus
  siRNA target sequence for Robo1 (NM_019413.1,652-670).
cagacaaaacccttcagat

SEQ ID NO: 707967 - DNA, 19 bp, Mus musculus
  siRNA target sequence for Robo1 (NM_019413.1,758-776).
ggctcacccctggatgata

SEQ ID NO: 707968 - DNA, 19 bp, Mus musculus
  siRNA target sequence for Robo1 (NM_019413.1,790-808).
cactatacgaggaggaaaa

SEQ ID NO: 707969 - DNA, 19 bp, Mus musculus
  siRNA target sequence for Robo1 (NM_019413.1,792-810).
ctatacgaggaggaaaact

SEQ ID NO: 707970 - DNA, 19 bp, Mus musculus
  siRNA target sequence for Robo1 (NM_019413.1,798-816).
gaggaggaaaactcatgat

SEQ ID NO: 707971 - DNA, 19 bp, Mus musculus
  siRNA target sequence for Robo1 (NM_019413.1,803-821).
ggaaaactcatgatcactt

SEQ ID NO: 707972 - DNA, 19 bp, Mus musculus
  siRNA target sequence for Robo1 (NM_019413.1,804-822).
gaaaactcatgatcactta

SEQ ID NO: 707973 - DNA, 19 bp, Mus musculus
  siRNA target sequence for Robo1 (NM_019413.1,834-852).
gcgatgctggcaagtatgt

SEQ ID NO: 707974 - DNA, 19 bp, Mus musculus
  siRNA target sequence for Robo1 (NM_019413.1,895-913).
cgcagagctaaccgtttta

SEQ ID NO: 707975 - DNA, 19 bp, Mus musculus
  siRNA target sequence for Robo1 (NM_019413.1,897-915).
cagagctaaccgttttaga

SEQ ID NO: 707976 - DNA, 19 bp, Mus musculus
  siRNA target sequence for Robo1 (NM_019413.1,899-917).
gagctaaccgttttagaga

SEQ ID NO: 707977 - DNA, 19 bp, Mus musculus
  siRNA target sequence for Robo1 (NM_019413.1,914-932).
gagagaccatcgtttgtga

SEQ ID NO: 707978 - DNA, 19 bp, Mus musculus
  siRNA target sequence for Robo1 (NM_019413.1,965-983).
gacagtgcagaatttaaat

SEQ ID NO: 707979 - DNA, 19 bp, Mus musculus
  siRNA target sequence for Robo1 (NM_019413.1,1039-1057).
gctgcccaaatccagatat

SEQ ID NO: 707980 - DNA, 19 bp, Mus musculus
  siRNA target sequence for Robo1 (NM_019413.1,1058-1076).
gaaatccgagatgatcata

SEQ ID NO: 707981 - DNA, 19 bp, Mus musculus
  siRNA target sequence for Robo1 (NM_019413.1,1101-1119).
ctggcgacatgggatcata

SEQ ID NO: 707982 - DNA, 19 bp, Mus musculus
  siRNA target sequence for Robo1 (NM_019413.1,1105-1123).
cgacatgggatcatacact

SEQ ID NO: 707983 - DNA, 19 bp, Mus musculus
  siRNA target sequence for Robo1 (NM_019413.1,1106-1124).
gacatgggatcatacactt

SEQ ID NO: 707984 - DNA, 19 bp, Mus musculus
  siRNA target sequence for Robo1 (NM_019413.1,1125-1143).
gtgtggcagaaaatatggt

SEQ ID NO: 707985 - DNA, 19 bp, Mus musculus
  siRNA target sequence for Robo1 (NM_019413.1,1152-1170).
ctgaagcttccgctacttt

SEQ ID NO: 707986 - DNA, 19 bp, Mus musculus
  siRNA target sequence for Robo1 (NM_019413.1,1154-1172).
gaagcttccgctactttga

SEQ ID NO: 707987 - DNA, 19 bp, Mus musculus
  siRNA target sequence for Robo1 (NM_019413.1,1162-1180).
cgctactttgacagttcaa

SEQ ID NO: 707988 - DNA, 19 bp, Mus musculus
  siRNA target sequence for Robo1 (NM_019413.1,1219-1237).
ggttgccttgggaagaact

SEQ ID NO: 707989 - DNA, 19 bp, Mus musculus
  siRNA target sequence for Robo1 (NM_019413.1,1252-1270).
cgaagcaactggaaatcct

SEQ ID NO: 707990 - DNA, 19 bp, Mus musculus
  siRNA target sequence for Robo1 (NM_019413.1,1271-1289).
caaccagctatcttttgga

SEQ ID NO: 707991 - DNA, 19 bp, Mus musculus
  siRNA target sequence for Robo1 (NM_019413.1,1297-1315).
ggggagtcagaatctactt

SEQ ID NO: 707992 - DNA, 19 bp, Mus musculus
  siRNA target sequence for Robo1 (NM_019413.1,1299-1317).
ggagtcagaatctactttt

SEQ ID NO: 707993 - DNA, 19 bp, Mus musculus
  siRNA target sequence for Robo1 (NM_019413.1,1334-1352).
cagtcctctagccgatttt

SEQ ID NO: 707994 - DNA, 19 bp, Mus musculus
  siRNA target sequence for Robo1 (NM_019413.1,1336-1354).
gtcctctagccgattttca

SEQ ID NO: 707995 - DNA, 19 bp, Mus musculus
  siRNA target sequence for Robo1 (NM_019413.1,1338-1356).
cctctagccgattttcagt

SEQ ID NO: 707996 - DNA, 19 bp, Mus musculus
  siRNA target sequence for Robo1 (NM_019413.1,1339-1357).
ctctagccgattttcagtt

SEQ ID NO: 707997 - DNA, 19 bp, Mus musculus
  siRNA target sequence for Robo1 (NM_019413.1,1367-1385).
ggagacctcaccattacga

SEQ ID NO: 707998 - DNA, 19 bp, Mus musculus
  siRNA target sequence for Robo1 (NM_019413.1,1368-1386).
gagacctcaccattacgaa

SEQ ID NO: 707999 - DNA, 19 bp, Mus musculus
  siRNA target sequence for Robo1 (NM_019413.1,1398-1416).
ctgatgtcggctactacat

SEQ ID NO: 708000 - DNA, 19 bp, Mus musculus
  siRNA target sequence for Robo1 (NM_019413.1,1414-1432).
catctgtcagactttaaat

SEQ ID NO: 708001 - DNA, 19 bp, Mus musculus
  siRNA target sequence for Robo1 (NM_019413.1,1437-1455).
ctggaagtatcatcacaaa

SEQ ID NO: 708002 - DNA, 19 bp, Mus musculus
  siRNA target sequence for Robo1 (NM_019413.1,1489-1507).
ccggcctcccccagtcatt

SEQ ID NO: 708003 - DNA, 19 bp, Mus musculus
  siRNA target sequence for Robo1 (NM_019413.1,1509-1527).
ggcaaggtcctgtgaatca

SEQ ID NO: 708004 - DNA, 19 bp, Mus musculus
  siRNA target sequence for Robo1 (NM_019413.1,1535-1553).
gcagtggatggcactttaa

SEQ ID NO: 708005 - DNA, 19 bp, Mus musculus
  siRNA target sequence for Robo1 (NM_019413.1,1536-1554).
cagtggatggcactttaat

SEQ ID NO: 708006 - DNA, 19 bp, Mus musculus
  siRNA target sequence for Robo1 (NM_019413.1,1616-1634).
cttgtttcaacccaagatt

SEQ ID NO: 708007 - DNA, 19 bp, Mus musculus
  siRNA target sequence for Robo1 (NM_019413.1,1627-1645).
ccaagattctcggatcaaa

SEQ ID NO: 708008 - DNA, 19 bp, Mus musculus
  siRNA target sequence for Robo1 (NM_019413.1,1737-1755).
ccacgtggagcgcttacat

SEQ ID NO: 708009 - DNA, 19 bp, Mus musculus
  siRNA target sequence for Robo1 (NM_019413.1,1796-1814).
cccaccgaccccaacttaa

SEQ ID NO: 708010 - DNA, 19 bp, Mus musculus
  siRNA target sequence for Robo1 (NM_019413.1,1797-1815).
ccaccgaccccaacttaat

SEQ ID NO: 708011 - DNA, 19 bp, Mus musculus
  siRNA target sequence for Robo1 (NM_019413.1,1826-1844).
ccctcaaagcccgaagtta

SEQ ID NO: 708012 - DNA, 19 bp, Mus musculus
  siRNA target sequence for Robo1 (NM_019413.1,1841-1859).
gttacagatgtcagcaaaa

SEQ ID NO: 708013 - DNA, 19 bp, Mus musculus
  siRNA target sequence for Robo1 (NM_019413.1,1854-1872).
gcaaaaacacggtcacttt

SEQ ID NO: 708014 - DNA, 19 bp, Mus musculus
  siRNA target sequence for Robo1 (NM_019413.1,1855-1873).
caaaaacacggtcacttta

SEQ ID NO: 708015 - DNA, 19 bp, Mus musculus
  siRNA target sequence for Robo1 (NM_019413.1,2045-2063).
gcaaatgcctatggaatta

SEQ ID NO: 708016 - DNA, 19 bp, Mus musculus
  siRNA target sequence for Robo1 (NM_019413.1,2155-2173).
ggggaatgttgtcttacat

SEQ ID NO: 708017 - DNA, 19 bp, Mus musculus
  siRNA target sequence for Robo1 (NM_019413.1,2221-2239).
gacggtggaccaacaatct

SEQ ID NO: 708018 - DNA, 19 bp, Mus musculus
  siRNA target sequence for Robo1 (NM_019413.1,2223-2241).
cggtggaccaacaatctca

SEQ ID NO: 708019 - DNA, 19 bp, Mus musculus
  siRNA target sequence for Robo1 (NM_019413.1,2227-2245).
ggaccaacaatctcaatat

SEQ ID NO: 708020 - DNA, 19 bp, Mus musculus
  siRNA target sequence for Robo1 (NM_019413.1,2294-2312).
gaatcggagtggttagttt

SEQ ID NO: 708021 - DNA, 19 bp, Mus musculus
  siRNA target sequence for Robo1 (NM_019413.1,2298-2316).
cggagtggttagtttttga

SEQ ID NO: 708022 - DNA, 19 bp, Mus musculus
  siRNA target sequence for Robo1 (NM_019413.1,2347-2365).
gatccccgatctcagaaaa

SEQ ID NO: 708023 - DNA, 19 bp, Mus musculus
  siRNA target sequence for Robo1 (NM_019413.1,2366-2384).
ggcgtcaactacgagatta

SEQ ID NO: 708024 - DNA, 19 bp, Mus musculus
  siRNA target sequence for Robo1 (NM_019413.1,2367-2385).
gcgtcaactacgagattaa

SEQ ID NO: 708025 - DNA, 19 bp, Mus musculus
  siRNA target sequence for Robo1 (NM_019413.1,2386-2404).
ggctcgcccattttttaat

SEQ ID NO: 708026 - DNA, 19 bp, Mus musculus
  siRNA target sequence for Robo1 (NM_019413.1,2388-2406).
ctcgcccattttttaatga

SEQ ID NO: 708027 - DNA, 19 bp, Mus musculus
  siRNA target sequence for Robo1 (NM_019413.1,2390-2408).
cgcccattttttaatgagt

SEQ ID NO: 708028 - DNA, 19 bp, Mus musculus
  siRNA target sequence for Robo1 (NM_019413.1,2415-2433).
gagcagacagtgaaatcaa

SEQ ID NO: 708029 - DNA, 19 bp, Mus musculus
  siRNA target sequence for Robo1 (NM_019413.1,2465-2483).
gcccctccccgaagtgtaa

SEQ ID NO: 708030 - DNA, 19 bp, Mus musculus
  siRNA target sequence for Robo1 (NM_019413.1,2467-2485).
ccctccccgaagtgtaact

SEQ ID NO: 708031 - DNA, 19 bp, Mus musculus
  siRNA target sequence for Robo1 (NM_019413.1,2469-2487).
ctccccgaagtgtaactgt

SEQ ID NO: 708032 - DNA, 19 bp, Mus musculus
  siRNA target sequence for Robo1 (NM_019413.1,2471-2489).
ccccgaagtgtaactgtat

SEQ ID NO: 708033 - DNA, 19 bp, Mus musculus
  siRNA target sequence for Robo1 (NM_019413.1,2558-2576).
ggaatggtccaagaatata

SEQ ID NO: 708034 - DNA, 19 bp, Mus musculus
  siRNA target sequence for Robo1 (NM_019413.1,2586-2604).
gtctcggtaatgaaacgaa

SEQ ID NO: 708035 - DNA, 19 bp, Mus musculus
  siRNA target sequence for Robo1 (NM_019413.1,2590-2608).
cggtaatgaaacgaagtat

SEQ ID NO: 708036 - DNA, 19 bp, Mus musculus
  siRNA target sequence for Robo1 (NM_019413.1,2592-2610).
gtaatgaaacgaagtatca

SEQ ID NO: 708037 - DNA, 19 bp, Mus musculus
  siRNA target sequence for Robo1 (NM_019413.1,2733-2751).
ctcagttcatccagttaga

SEQ ID NO: 708038 - DNA, 19 bp, Mus musculus
  siRNA target sequence for Robo1 (NM_019413.1,2735-2753).
cagttcatccagttagatt

SEQ ID NO: 708039 - DNA, 19 bp, Mus musculus
  siRNA target sequence for Robo1 (NM_019413.1,2846-2864).
ggggcagcctgttggatta

SEQ ID NO: 708040 - DNA, 19 bp, Mus musculus
  siRNA target sequence for Robo1 (NM_019413.1,2942-2960).
cggaaagtcccgtccttta

SEQ ID NO: 708041 - DNA, 19 bp, Mus musculus
  siRNA target sequence for Robo1 (NM_019413.1,2962-2980).
cttcacgccaacagtaact

SEQ ID NO: 708042 - DNA, 19 bp, Mus musculus
  siRNA target sequence for Robo1 (NM_019413.1,2967-2985).
cgccaacagtaacttatca

SEQ ID NO: 708043 - DNA, 19 bp, Mus musculus
  siRNA target sequence for Robo1 (NM_019413.1,3022-3040).
gggactcctcaacattagt

SEQ ID NO: 708044 - DNA, 19 bp, Mus musculus
  siRNA target sequence for Robo1 (NM_019413.1,3024-3042).
gactcctcaacattagtga

SEQ ID NO: 708045 - DNA, 19 bp, Mus musculus
  siRNA target sequence for Robo1 (NM_019413.1,3165-3183).
gtcgcccagctgattgtat

SEQ ID NO: 708046 - DNA, 19 bp, Mus musculus
  siRNA target sequence for Robo1 (NM_019413.1,3174-3192).
ctgattgtatagccaatta

SEQ ID NO: 708047 - DNA, 19 bp, Mus musculus
  siRNA target sequence for Robo1 (NM_019413.1,3180-3198).
gtatagccaattataacaa

SEQ ID NO: 708048 - DNA, 19 bp, Mus musculus
  siRNA target sequence for Robo1 (NM_019413.1,3196-3214).
caaccaactggataacaaa

SEQ ID NO: 708049 - DNA, 19 bp, Mus musculus
  siRNA target sequence for Robo1 (NM_019413.1,3232-3250).
ccctgagtcaactgtttat

SEQ ID NO: 708050 - DNA, 19 bp, Mus musculus
  siRNA target sequence for Robo1 (NM_019413.1,3251-3269).
ggtgatgtggaccttagta

SEQ ID NO: 708051 - DNA, 19 bp, Mus musculus
  siRNA target sequence for Robo1 (NM_019413.1,3252-3270).
gtgatgtggaccttagtaa

SEQ ID NO: 708052 - DNA, 19 bp, Mus musculus
  siRNA target sequence for Robo1 (NM_019413.1,3257-3275).
gtggaccttagtaacaaaa

SEQ ID NO: 708053 - DNA, 19 bp, Mus musculus
  siRNA target sequence for Robo1 (NM_019413.1,3281-3299).
gagatgaaaaccttcaata

SEQ ID NO: 708054 - DNA, 19 bp, Mus musculus
  siRNA target sequence for Robo1 (NM_019413.1,3291-3309).
ccttcaatagcccaaatct

SEQ ID NO: 708055 - DNA, 19 bp, Mus musculus
  siRNA target sequence for Robo1 (NM_019413.1,3313-3331).
ggacgggcgttttgtcaat

SEQ ID NO: 708056 - DNA, 19 bp, Mus musculus
  siRNA target sequence for Robo1 (NM_019413.1,3317-3335).
gggcgttttgtcaatccat

SEQ ID NO: 708057 - DNA, 19 bp, Mus musculus
  siRNA target sequence for Robo1 (NM_019413.1,3376-3394).
ggcgaacctcagcaacaat

SEQ ID NO: 708058 - DNA, 19 bp, Mus musculus
  siRNA target sequence for Robo1 (NM_019413.1,3377-3395).
gcgaacctcagcaacaata

SEQ ID NO: 708059 - DNA, 19 bp, Mus musculus
  siRNA target sequence for Robo1 (NM_019413.1,3382-3400).
cctcagcaacaatatgaat

SEQ ID NO: 708060 - DNA, 19 bp, Mus musculus
  siRNA target sequence for Robo1 (NM_019413.1,3456-3474).
cggaagtggcaccaattca

SEQ ID NO: 708061 - DNA, 19 bp, Mus musculus
  siRNA target sequence for Robo1 (NM_019413.1,3458-3476).
gaagtggcaccaattcagt

SEQ ID NO: 708062 - DNA, 19 bp, Mus musculus
  siRNA target sequence for Robo1 (NM_019413.1,3461-3479).
gtggcaccaattcagtata

SEQ ID NO: 708063 - DNA, 19 bp, Mus musculus
  siRNA target sequence for Robo1 (NM_019413.1,3464-3482).
gcaccaattcagtataaca

SEQ ID NO: 708064 - DNA, 19 bp, Mus musculus
  siRNA target sequence for Robo1 (NM_019413.1,3509-3527).
gattatcgggcaaatgaca

SEQ ID NO: 708065 - DNA, 19 bp, Mus musculus
  siRNA target sequence for Robo1 (NM_019413.1,3568-3586).
gaacacaggagggtcttat

SEQ ID NO: 708066 - DNA, 19 bp, Mus musculus
  siRNA target sequence for Robo1 (NM_019413.1,3596-3614).
gatcggggcagtagtacat

SEQ ID NO: 708067 - DNA, 19 bp, Mus musculus
  siRNA target sequence for Robo1 (NM_019413.1,3742-3760).
caacatgtccgtagatgaa

SEQ ID NO: 708068 - DNA, 19 bp, Mus musculus
  siRNA target sequence for Robo1 (NM_019413.1,3748-3766).
gtccgtagatgaaagctat

SEQ ID NO: 708069 - DNA, 19 bp, Mus musculus
  siRNA target sequence for Robo1 (NM_019413.1,3751-3769).
cgtagatgaaagctatgat

SEQ ID NO: 708070 - DNA, 19 bp, Mus musculus
  siRNA target sequence for Robo1 (NM_019413.1,4061-4079).
catacttacggctacattt

SEQ ID NO: 708071 - DNA, 19 bp, Mus musculus
  siRNA target sequence for Robo1 (NM_019413.1,4082-4100).
ggaccccttgtctcagata

SEQ ID NO: 708072 - DNA, 19 bp, Mus musculus
  siRNA target sequence for Robo1 (NM_019413.1,4083-4101).
gaccccttgtctcagatat

SEQ ID NO: 708073 - DNA, 19 bp, Mus musculus
  siRNA target sequence for Robo1 (NM_019413.1,4088-4106).
cttgtctcagatatggata

SEQ ID NO: 708074 - DNA, 19 bp, Mus musculus
  siRNA target sequence for Robo1 (NM_019413.1,4234-4252).
cactgggtccatgatcaat

SEQ ID NO: 708075 - DNA, 19 bp, Mus musculus
  siRNA target sequence for Robo1 (NM_019413.1,4266-4284).
cctcggaagaggacaacat

SEQ ID NO: 708076 - DNA, 19 bp, Mus musculus
  siRNA target sequence for Robo1 (NM_019413.1,4271-4289).
gaagaggacaacatttcca

SEQ ID NO: 708077 - DNA, 19 bp, Mus musculus
  siRNA target sequence for Robo1 (NM_019413.1,4315-4333).
cgatggctcctttttcact

SEQ ID NO: 708078 - DNA, 19 bp, Mus musculus
  siRNA target sequence for Robo1 (NM_019413.1,4555-4573).
ggaagcctacgcagatgat

SEQ ID NO: 708079 - DNA, 19 bp, Mus musculus
  siRNA target sequence for Robo1 (NM_019413.1,4660-4678).
gccaaaactcgcgtctata

SEQ ID NO: 708080 - DNA, 19 bp, Mus musculus
  siRNA target sequence for Robo1 (NM_019413.1,4662-4680).
caaaactcgcgtctataga

SEQ ID NO: 708081 - DNA, 19 bp, Mus musculus
  siRNA target sequence for Robo1 (NM_019413.1,4870-4888).
cctcggccaagaggatatt

SEQ ID NO: 708082 - DNA, 19 bp, Mus musculus
  siRNA target sequence for Robo1 (NM_019413.1,4873-4891).
cggccaagaggatattctt

SEQ ID NO: 708083 - DNA, 19 bp, Mus musculus
  siRNA target sequence for Robo1 (NM_019413.1,4883-4901).
gatattcttccgtactgta

SEQ ID NO: 708084 - DNA, 19 bp, Mus musculus
  siRNA target sequence for Robo1 (NM_019413.1,4893-4911).
cgtactgtagacctacttt

SEQ ID NO: 708085 - DNA, 19 bp, Mus musculus
  siRNA target sequence for Robo1 (NM_019413.1,4971-4989).
cagggagccgacaaagaga

SEQ ID NO: 708086 - DNA, 19 bp, Mus musculus
  siRNA target sequence for 425O18-1 (NM_019421.2,380-398).
cttgctcctgtgacaacat

SEQ ID NO: 708087 - DNA, 19 bp, Mus musculus
  siRNA target sequence for 425O18-1 (NM_019421.2,459-477).
gagtgagctgcattgcata

SEQ ID NO: 708088 - DNA, 19 bp, Mus musculus
  siRNA target sequence for 425O18-1 (NM_019421.2,563-581).
ctgacacagaaattgataa

SEQ ID NO: 708089 - DNA, 19 bp, Mus musculus
  siRNA target sequence for 425O18-1 (NM_019421.2,592-610).
gaggagaatgccacaacta

SEQ ID NO: 708090 - DNA, 19 bp, Mus musculus
  siRNA target sequence for 425O18-1 (NM_019421.2,594-612).
ggagaatgccacaactaca

SEQ ID NO: 708091 - DNA, 19 bp, Mus musculus
  siRNA target sequence for 425O18-1 (NM_019421.2,595-613).
gagaatgccacaactacaa

SEQ ID NO: 708092 - DNA, 19 bp, Mus musculus
  siRNA target sequence for 425O18-1 (NM_019421.2,603-621).
cacaactacaaggatttct

SEQ ID NO: 708093 - DNA, 19 bp, Mus musculus
  siRNA target sequence for 425O18-1 (NM_019421.2,620-638).
ctacgaccatggagaatga

SEQ ID NO: 708094 - DNA, 19 bp, Mus musculus
  siRNA target sequence for 425O18-1 (NM_019421.2,639-657).
gacctctttcaggaatgta

SEQ ID NO: 708095 - DNA, 19 bp, Mus musculus
  siRNA target sequence for 425O18-1 (NM_019421.2,642-660).
ctctttcaggaatgtaaca

SEQ ID NO: 708096 - DNA, 19 bp, Mus musculus
  siRNA target sequence for 425O18-1 (NM_019421.2,746-764).
cggccacccttctcatatt

SEQ ID NO: 708097 - DNA, 19 bp, Mus musculus
  siRNA target sequence for Sit (NM_019436.1,293-311).
gaaggtccgcggaagaagt

SEQ ID NO: 708098 - DNA, 19 bp, Mus musculus
  siRNA target sequence for Sit (NM_019436.1,541-559).
ggccctgagccggaacttt

SEQ ID NO: 708099 - DNA, 19 bp, Mus musculus
  siRNA target sequence for Sit (NM_019436.1,542-560).
gccctgagccggaacttta

SEQ ID NO: 708100 - DNA, 19 bp, Mus musculus
  siRNA target sequence for Sit (NM_019436.1,543-561).
ccctgagccggaactttat

SEQ ID NO: 708101 - DNA, 19 bp, Mus musculus
  siRNA target sequence for AI481100 (NM_019440.2,224-242).
ctccgacgctgtattcatt

SEQ ID NO: 708102 - DNA, 19 bp, Mus musculus
  siRNA target sequence for AI481100 (NM_019440.2,243-261).
cccaaagacggcaatactt

SEQ ID NO: 708103 - DNA, 19 bp, Mus musculus
  siRNA target sequence for AI481100 (NM_019440.2,245-263).
caaagacggcaatacttta

SEQ ID NO: 708104 - DNA, 19 bp, Mus musculus
  siRNA target sequence for AI481100 (NM_019440.2,251-269).
cggcaatactttatctgta

SEQ ID NO: 708105 - DNA, 19 bp, Mus musculus
  siRNA target sequence for AI481100 (NM_019440.2,339-357).
gagatcatacagaacgttt

SEQ ID NO: 708106 - DNA, 19 bp, Mus musculus
  siRNA target sequence for AI481100 (NM_019440.2,437-455).
cggacacgaagagaaagat

SEQ ID NO: 708107 - DNA, 19 bp, Mus musculus
  siRNA target sequence for AI481100 (NM_019440.2,776-794).
gaatatccgggatagtctt

SEQ ID NO: 708108 - DNA, 19 bp, Mus musculus
  siRNA target sequence for AI481100 (NM_019440.2,869-887).
gcttagggagacactacaa

SEQ ID NO: 708109 - DNA, 19 bp, Mus musculus
  siRNA target sequence for AI481100 (NM_019440.2,920-938).
cgtcgaaaccctttaccaa

SEQ ID NO: 708110 - DNA, 19 bp, Mus musculus
  siRNA target sequence for AI481100 (NM_019440.2,943-961).
gtgagaaaactgttaatga

SEQ ID NO: 708111 - DNA, 19 bp, Mus musculus
  siRNA target sequence for AI481100 (NM_019440.2,985-1003).
gtatagatgaagataacct

SEQ ID NO: 708112 - DNA, 19 bp, Mus musculus
  siRNA target sequence for AI481100 (NM_019440.2,1029-1047).
ccgggtaacgcgatagaga

SEQ ID NO: 708113 - DNA, 19 bp, Mus musculus
  siRNA target sequence for AI481100 (NM_019440.2,1030-1048).
cgggtaacgcgatagagat

SEQ ID NO: 708114 - DNA, 19 bp, Mus musculus
  siRNA target sequence for AI481100 (NM_019440.2,1031-1049).
gggtaacgcgatagagatt

SEQ ID NO: 708115 - DNA, 19 bp, Mus musculus
  siRNA target sequence for AI481100 (NM_019440.2,1157-1175).
ccagaggtaccaacaagat

SEQ ID NO: 708116 - DNA, 19 bp, Mus musculus
  siRNA target sequence for AI481100 (NM_019440.2,1211-1229).
ccgggttggctctataggt

SEQ ID NO: 708117 - DNA, 19 bp, Mus musculus
  siRNA target sequence for AI481100 (NM_019440.2,1212-1230).
cgggttggctctataggtt

SEQ ID NO: 708118 - DNA, 19 bp, Mus musculus
  siRNA target sequence for AI481100 (NM_019440.2,1213-1231).
gggttggctctataggttt

SEQ ID NO: 708119 - DNA, 19 bp, Mus musculus
  siRNA target sequence for AI481100 (NM_019440.2,1214-1232).
ggttggctctataggtttt

SEQ ID NO: 708120 - DNA, 19 bp, Mus musculus
  siRNA target sequence for AI481100 (NM_019440.2,1222-1240).
ctataggttttgactacat

SEQ ID NO: 708121 - DNA, 19 bp, Mus musculus
  siRNA target sequence for Unc93b (NM_019449.1,150-168).
ggtgcgtaccccaactaca

SEQ ID NO: 708122 - DNA, 19 bp, Mus musculus
  siRNA target sequence for Unc93b (NM_019449.1,151-169).
gtgcgtaccccaactacaa

SEQ ID NO: 708123 - DNA, 19 bp, Mus musculus
  siRNA target sequence for Unc93b (NM_019449.1,154-172).
cgtaccccaactacaatga

SEQ ID NO: 708124 - DNA, 19 bp, Mus musculus
  siRNA target sequence for Unc93b (NM_019449.1,208-226).
gcctcggagtggtcaagaa

SEQ ID NO: 708125 - DNA, 19 bp, Mus musculus
  siRNA target sequence for Unc93b (NM_019449.1,244-262).
cgggtgtcacccttactta

SEQ ID NO: 708126 - DNA, 19 bp, Mus musculus
  siRNA target sequence for Unc93b (NM_019449.1,316-334).
cctacagagaggtgaagta

SEQ ID NO: 708127 - DNA, 19 bp, Mus musculus
  siRNA target sequence for Unc93b (NM_019449.1,345-363).
gggctgccggacatcgata

SEQ ID NO: 708128 - DNA, 19 bp, Mus musculus
  siRNA target sequence for Unc93b (NM_019449.1,417-435).
cctgtgctcatcaggtttt

SEQ ID NO: 708129 - DNA, 19 bp, Mus musculus
  siRNA target sequence for Unc93b (NM_019449.1,423-441).
ctcatcaggttttttggta

SEQ ID NO: 708130 - DNA, 19 bp, Mus musculus
  siRNA target sequence for Unc93b (NM_019449.1,438-456).
ggtaccaagtggatgatgt

SEQ ID NO: 708131 - DNA, 19 bp, Mus musculus
  siRNA target sequence for Unc93b (NM_019449.1,439-457).
gtaccaagtggatgatgtt

SEQ ID NO: 708132 - DNA, 19 bp, Mus musculus
  siRNA target sequence for Unc93b (NM_019449.1,592-610).
ggatgtcccagaagtacta

SEQ ID NO: 708133 - DNA, 19 bp, Mus musculus
  siRNA target sequence for Unc93b (NM_019449.1,593-611).
gatgtcccagaagtactat

SEQ ID NO: 708134 - DNA, 19 bp, Mus musculus
  siRNA target sequence for Unc93b (NM_019449.1,596-614).
gtcccagaagtactatgaa

SEQ ID NO: 708135 - DNA, 19 bp, Mus musculus
  siRNA target sequence for Unc93b (NM_019449.1,810-828).
cagagctgcggtactaaga

SEQ ID NO: 708136 - DNA, 19 bp, Mus musculus
  siRNA target sequence for Unc93b (NM_019449.1,880-898).
gcagcaaaaaccttattgt

SEQ ID NO: 708137 - DNA, 19 bp, Mus musculus
  siRNA target sequence for Unc93b (NM_019449.1,883-901).
gcaaaaaccttattgttgt

SEQ ID NO: 708138 - DNA, 19 bp, Mus musculus
  siRNA target sequence for Unc93b (NM_019449.1,1019-1037).
cttccagctgcccttcaaa

SEQ ID NO: 708139 - DNA, 19 bp, Mus musculus
  siRNA target sequence for Unc93b (NM_019449.1,1068-1086).
gtgcccttctttatctaca

SEQ ID NO: 708140 - DNA, 19 bp, Mus musculus
  siRNA target sequence for Unc93b (NM_019449.1,1164-1182).
gcatacctgctcatagctt

SEQ ID NO: 708141 - DNA, 19 bp, Mus musculus
  siRNA target sequence for Unc93b (NM_019449.1,1165-1183).
catacctgctcatagctta

SEQ ID NO: 708142 - DNA, 19 bp, Mus musculus
  siRNA target sequence for Unc93b (NM_019449.1,1329-1347).
cacagttggatcttttact

SEQ ID NO: 708143 - DNA, 19 bp, Mus musculus
  siRNA target sequence for Unc93b (NM_019449.1,1411-1429).
gcatcctatatgaagacaa

SEQ ID NO: 708144 - DNA, 19 bp, Mus musculus
  siRNA target sequence for Unc93b (NM_019449.1,1472-1490).
ggccgtggccatctttgtt

SEQ ID NO: 708145 - DNA, 19 bp, Mus musculus
  siRNA target sequence for Unc93b (NM_019449.1,1474-1492).
ccgtggccatctttgttgt

SEQ ID NO: 708146 - DNA, 19 bp, Mus musculus
  siRNA target sequence for Lrrc6 (NM_019457.1,83-101).
cacagaagatcttattaga

SEQ ID NO: 708147 - DNA, 19 bp, Mus musculus
  siRNA target sequence for Lrrc6 (NM_019457.1,103-121).
ggaatgctgagcacaatga

SEQ ID NO: 708148 - DNA, 19 bp, Mus musculus
  siRNA target sequence for Lrrc6 (NM_019457.1,177-195).
ctagaacatattgacaaat

SEQ ID NO: 708149 - DNA, 19 bp, Mus musculus
  siRNA target sequence for Lrrc6 (NM_019457.1,196-214).
ggtgccgggacttaaaaat

SEQ ID NO: 708150 - DNA, 19 bp, Mus musculus
  siRNA target sequence for Lrrc6 (NM_019457.1,199-217).
gccgggacttaaaaattct

SEQ ID NO: 708151 - DNA, 19 bp, Mus musculus
  siRNA target sequence for Lrrc6 (NM_019457.1,201-219).
cgggacttaaaaattctct

SEQ ID NO: 708152 - DNA, 19 bp, Mus musculus
  siRNA target sequence for Lrrc6 (NM_019457.1,202-220).
gggacttaaaaattctcta

SEQ ID NO: 708153 - DNA, 19 bp, Mus musculus
  siRNA target sequence for Lrrc6 (NM_019457.1,225-243).
caaaataacctcattggaa

SEQ ID NO: 708154 - DNA, 19 bp, Mus musculus
  siRNA target sequence for Lrrc6 (NM_019457.1,276-294).
gaatatttgaacttagcat

SEQ ID NO: 708155 - DNA, 19 bp, Mus musculus
  siRNA target sequence for Lrrc6 (NM_019457.1,287-305).
cttagcattgaacaacatt

SEQ ID NO: 708156 - DNA, 19 bp, Mus musculus
  siRNA target sequence for Lrrc6 (NM_019457.1,331-349).
gtgagtggctgacaaaact

SEQ ID NO: 708157 - DNA, 19 bp, Mus musculus
  siRNA target sequence for Lrrc6 (NM_019457.1,337-355).
ggctgacaaaacttgactt

SEQ ID NO: 708158 - DNA, 19 bp, Mus musculus
  siRNA target sequence for Lrrc6 (NM_019457.1,375-393).
gaactgagcagcgttaaaa

SEQ ID NO: 708159 - DNA, 19 bp, Mus musculus
  siRNA target sequence for Lrrc6 (NM_019457.1,400-418).
cacacaatattcatctgaa

SEQ ID NO: 708160 - DNA, 19 bp, Mus musculus
  siRNA target sequence for Lrrc6 (NM_019457.1,479-497).
ggtgaccttacaacagtta

SEQ ID NO: 708161 - DNA, 19 bp, Mus musculus
  siRNA target sequence for Lrrc6 (NM_019457.1,480-498).
gtgaccttacaacagttaa

SEQ ID NO: 708162 - DNA, 19 bp, Mus musculus
  siRNA target sequence for Lrrc6 (NM_019457.1,543-561).
gcattgcagaactacacat

SEQ ID NO: 708163 - DNA, 19 bp, Mus musculus
  siRNA target sequence for Lrrc6 (NM_019457.1,548-566).
gcagaactacacatcagtt

SEQ ID NO: 708164 - DNA, 19 bp, Mus musculus
  siRNA target sequence for Lrrc6 (NM_019457.1,638-656).
gaaactcgaggaagaaaat

SEQ ID NO: 708165 - DNA, 19 bp, Mus musculus
  siRNA target sequence for Lrrc6 (NM_019457.1,688-706).
gctttgatgggcattggta

SEQ ID NO: 708166 - DNA, 19 bp, Mus musculus
  siRNA target sequence for Lrrc6 (NM_019457.1,761-779).
ggtaccagaaactcaagaa

SEQ ID NO: 708167 - DNA, 19 bp, Mus musculus
  siRNA target sequence for Lrrc6 (NM_019457.1,797-815).
ggaatcagatgacattgaa

SEQ ID NO: 708168 - DNA, 19 bp, Mus musculus
  siRNA target sequence for Lrrc6 (NM_019457.1,832-850).
ggaacaaaccgtctttgtt

SEQ ID NO: 708169 - DNA, 19 bp, Mus musculus
  siRNA target sequence for Lrrc6 (NM_019457.1,848-866).
gttcacccctgaatctaga

SEQ ID NO: 708170 - DNA, 19 bp, Mus musculus
  siRNA target sequence for Lrrc6 (NM_019457.1,894-912).
cagcgaaaagcccaagata

SEQ ID NO: 708171 - DNA, 19 bp, Mus musculus
  siRNA target sequence for Lrrc6 (NM_019457.1,897-915).
cgaaaagcccaagataagt

SEQ ID NO: 708172 - DNA, 19 bp, Mus musculus
  siRNA target sequence for Lrrc6 (NM_019457.1,942-960).
ccaccccgcactttgatta

SEQ ID NO: 708173 - DNA, 19 bp, Mus musculus
  siRNA target sequence for Lrrc6 (NM_019457.1,946-964).
cccgcactttgattacaga

SEQ ID NO: 708174 - DNA, 19 bp, Mus musculus
  siRNA target sequence for Lrrc6 (NM_019457.1,947-965).
ccgcactttgattacagaa

SEQ ID NO: 708175 - DNA, 19 bp, Mus musculus
  siRNA target sequence for Lrrc6 (NM_019457.1,986-1004).
caacgaagccaaacttgat

SEQ ID NO: 708176 - DNA, 19 bp, Mus musculus
  siRNA target sequence for Lrrc6 (NM_019457.1,1056-1074).
gtctataggtacatggata

SEQ ID NO: 708177 - DNA, 19 bp, Mus musculus
  siRNA target sequence for Lrrc6 (NM_019457.1,1067-1085).
catggatacctctttgatt

SEQ ID NO: 708178 - DNA, 19 bp, Mus musculus
  siRNA target sequence for Lrrc6 (NM_019457.1,1078-1096).
ctttgattgaggttgatgt

SEQ ID NO: 708179 - DNA, 19 bp, Mus musculus
  siRNA target sequence for Lrrc6 (NM_019457.1,1102-1120).
caacttacgttcgagtaat

SEQ ID NO: 708180 - DNA, 19 bp, Mus musculus
  siRNA target sequence for Lrrc6 (NM_019457.1,1105-1123).
cttacgttcgagtaatggt

SEQ ID NO: 708181 - DNA, 19 bp, Mus musculus
  siRNA target sequence for Lrrc6 (NM_019457.1,1113-1131).
cgagtaatggtcaaaggaa

SEQ ID NO: 708182 - DNA, 19 bp, Mus musculus
  siRNA target sequence for Lrrc6 (NM_019457.1,1114-1132).
gagtaatggtcaaaggaaa

SEQ ID NO: 708183 - DNA, 19 bp, Mus musculus
  siRNA target sequence for Lrrc6 (NM_019457.1,1170-1188).
gaccgcagctctgctaaaa

SEQ ID NO: 708184 - DNA, 19 bp, Mus musculus
  siRNA target sequence for Lrrc6 (NM_019457.1,1173-1191).
cgcagctctgctaaaaggt

SEQ ID NO: 708185 - DNA, 19 bp, Mus musculus
  siRNA target sequence for Lrrc6 (NM_019457.1,1224-1242).
cccaaggtaggagaaatga

SEQ ID NO: 708186 - DNA, 19 bp, Mus musculus
  siRNA target sequence for Lrrc6 (NM_019457.1,1263-1281).
cccacgtctgtgaaaacca

SEQ ID NO: 708187 - DNA, 19 bp, Mus musculus
  siRNA target sequence for Lrrc6 (NM_019457.1,1341-1359).
gttgaccccagcaagcatt

SEQ ID NO: 708188 - DNA, 19 bp, Mus musculus
  siRNA target sequence for Lrrc6 (NM_019457.1,1375-1393).
ctaccatagtacaagagaa

SEQ ID NO: 708189 - DNA, 19 bp, Mus musculus
  siRNA target sequence for 5730511K23Rik (NM_019458.2,300-318).
gtctgccgagtcaagtact

SEQ ID NO: 708190 - DNA, 19 bp, Mus musculus
  siRNA target sequence for 5730511K23Rik (NM_019458.2,306-324).
cgagtcaagtactgcaata

SEQ ID NO: 708191 - DNA, 19 bp, Mus musculus
  siRNA target sequence for 5730511K23Rik (NM_019458.2,488-506).
ccgcattgatcccaatgtt

SEQ ID NO: 708192 - DNA, 19 bp, Mus musculus
  siRNA target sequence for 5730511K23Rik (NM_019458.2,490-508).
gcattgatcccaatgttct

SEQ ID NO: 708193 - DNA, 19 bp, Mus musculus
  siRNA target sequence for 5730511K23Rik (NM_019458.2,491-509).
cattgatcccaatgttctt

SEQ ID NO: 708194 - DNA, 19 bp, Mus musculus
  siRNA target sequence for 5730511K23Rik (NM_019458.2,520-538).
ctgatgagaagcttctaga

SEQ ID NO: 708195 - DNA, 19 bp, Mus musculus
  siRNA target sequence for 5730511K23Rik (NM_019458.2,552-570).
gctcccaccagctctaaga

SEQ ID NO: 708196 - DNA, 19 bp, Mus musculus
  siRNA target sequence for 5730511K23Rik (NM_019458.2,602-620).
gatgcgtaagacagagtat

SEQ ID NO: 708197 - DNA, 19 bp, Mus musculus
  siRNA target sequence for 5730511K23Rik (NM_019458.2,606-624).
cgtaagacagagtatatct

SEQ ID NO: 708198 - DNA, 19 bp, Mus musculus
  siRNA target sequence for 5730511K23Rik (NM_019458.2,625-643).
ccactgagttcaacagata

SEQ ID NO: 708199 - DNA, 19 bp, Mus musculus
  siRNA target sequence for 5730511K23Rik (NM_019458.2,626-644).
cactgagttcaacagatat

SEQ ID NO: 708200 - DNA, 19 bp, Mus musculus
  siRNA target sequence for 5730511K23Rik (NM_019458.2,762-780).
gaagatgcccagaaatcga

SEQ ID NO: 708201 - DNA, 19 bp, Mus musculus
  siRNA target sequence for 5730511K23Rik (NM_019458.2,865-883).
gtgctcaggtcatttttga

SEQ ID NO: 708202 - DNA, 19 bp, Mus musculus
  siRNA target sequence for 5730511K23Rik (NM_019458.2,910-928).
gtggtgcagctgcattaga

SEQ ID NO: 708203 - DNA, 19 bp, Mus musculus
  siRNA target sequence for 5730511K23Rik (NM_019458.2,918-936).
gctgcattagagatgatgt

SEQ ID NO: 708204 - DNA, 19 bp, Mus musculus
  siRNA target sequence for 5730511K23Rik (NM_019458.2,1128-1146).
ggctatgaggagaactatt

SEQ ID NO: 708205 - DNA, 19 bp, Mus musculus
  siRNA target sequence for 5730511K23Rik (NM_019458.2,1161-1179).
gagggtgacggagtttact

SEQ ID NO: 708206 - DNA, 19 bp, Mus musculus
  siRNA target sequence for 5730511K23Rik (NM_019458.2,1164-1182).
ggtgacggagtttactaca

SEQ ID NO: 708207 - DNA, 19 bp, Mus musculus
  siRNA target sequence for 5730511K23Rik (NM_019458.2,1165-1183).
gtgacggagtttactacaa

SEQ ID NO: 708208 - DNA, 19 bp, Mus musculus
  siRNA target sequence for 5730511K23Rik (NM_019458.2,1195-1213).
ccagggtccgtctaagtaa

SEQ ID NO: 708209 - DNA, 19 bp, Mus musculus
  siRNA target sequence for 5730511K23Rik (NM_019458.2,1232-1250).
ggttcagtcaggtaccaat

SEQ ID NO: 708210 - DNA, 19 bp, Mus musculus
  siRNA target sequence for 5730511K23Rik (NM_019458.2,1252-1270).
ccttgcttgtcgtcaaaca

SEQ ID NO: 708211 - DNA, 19 bp, Mus musculus
  siRNA target sequence for 5730511K23Rik (NM_019458.2,1555-1573).
gggacaaagaggagatttt

SEQ ID NO: 708212 - DNA, 19 bp, Mus musculus
  siRNA target sequence for 5730511K23Rik (NM_019458.2,1565-1583).
ggagatttttggtagtgat

SEQ ID NO: 708213 - DNA, 19 bp, Mus musculus
  siRNA target sequence for Sfmbt1 (NM_019460.1,109-127).
ggtctggtgtagaagtaga

SEQ ID NO: 708214 - DNA, 19 bp, Mus musculus
  siRNA target sequence for Sfmbt1 (NM_019460.1,110-128).
gtctggtgtagaagtagaa

SEQ ID NO: 708215 - DNA, 19 bp, Mus musculus
  siRNA target sequence for Sfmbt1 (NM_019460.1,114-132).
ggtgtagaagtagaagaat

SEQ ID NO: 708216 - DNA, 19 bp, Mus musculus
  siRNA target sequence for Sfmbt1 (NM_019460.1,115-133).
gtgtagaagtagaagaatt

SEQ ID NO: 708217 - DNA, 19 bp, Mus musculus
  siRNA target sequence for Sfmbt1 (NM_019460.1,134-152).
cagctgggaagattatcta

SEQ ID NO: 708218 - DNA, 19 bp, Mus musculus
  siRNA target sequence for Sfmbt1 (NM_019460.1,174-192).
gttccctacgcatcgttta

SEQ ID NO: 708219 - DNA, 19 bp, Mus musculus
  siRNA target sequence for Sfmbt1 (NM_019460.1,178-196).
cctacgcatcgtttaaaca

SEQ ID NO: 708220 - DNA, 19 bp, Mus musculus
  siRNA target sequence for Sfmbt1 (NM_019460.1,179-197).
ctacgcatcgtttaaacat

SEQ ID NO: 708221 - DNA, 19 bp, Mus musculus
  siRNA target sequence for Sfmbt1 (NM_019460.1,198-216).
gtggatatacgtttgcaaa

SEQ ID NO: 708222 - DNA, 19 bp, Mus musculus
  siRNA target sequence for Sfmbt1 (NM_019460.1,242-260).
ggaggtagctctgaaaaat

SEQ ID NO: 708223 - DNA, 19 bp, Mus musculus
  siRNA target sequence for Sfmbt1 (NM_019460.1,311-329).
gctcctgcttcgttatgaa

SEQ ID NO: 708224 - DNA, 19 bp, Mus musculus
  siRNA target sequence for Sfmbt1 (NM_019460.1,433-451).
cagaaggcatcagagataa

SEQ ID NO: 708225 - DNA, 19 bp, Mus musculus
  siRNA target sequence for Sfmbt1 (NM_019460.1,522-540).
gagggcctccgtaatggaa

SEQ ID NO: 708226 - DNA, 19 bp, Mus musculus
  siRNA target sequence for Sfmbt1 (NM_019460.1,531-549).
cgtaatggaaggaatcctt

SEQ ID NO: 708227 - DNA, 19 bp, Mus musculus
  siRNA target sequence for Sfmbt1 (NM_019460.1,541-559).
ggaatcctttagatctcat

SEQ ID NO: 708228 - DNA, 19 bp, Mus musculus
  siRNA target sequence for Sfmbt1 (NM_019460.1,587-605).
ggattttcgggactcttta

SEQ ID NO: 708229 - DNA, 19 bp, Mus musculus
  siRNA target sequence for Sfmbt1 (NM_019460.1,588-606).
gattttcgggactctttaa

SEQ ID NO: 708230 - DNA, 19 bp, Mus musculus
  siRNA target sequence for Sfmbt1 (NM_019460.1,647-665).
gttgaagctgcggtatgaa

SEQ ID NO: 708231 - DNA, 19 bp, Mus musculus
  siRNA target sequence for Sfmbt1 (NM_019460.1,674-692).
gagccgtgacggttttgaa

SEQ ID NO: 708232 - DNA, 19 bp, Mus musculus
  siRNA target sequence for Sfmbt1 (NM_019460.1,676-694).
gccgtgacggttttgaaca

SEQ ID NO: 708233 - DNA, 19 bp, Mus musculus
  siRNA target sequence for Sfmbt1 (NM_019460.1,764-782).
gcccccattagccatcaaa

SEQ ID NO: 708234 - DNA, 19 bp, Mus musculus
  siRNA target sequence for Sfmbt1 (NM_019460.1,766-784).
ccccattagccatcaaaca

SEQ ID NO: 708235 - DNA, 19 bp, Mus musculus
  siRNA target sequence for Sfmbt1 (NM_019460.1,767-785).
cccattagccatcaaacat

SEQ ID NO: 708236 - DNA, 19 bp, Mus musculus
  siRNA target sequence for Sfmbt1 (NM_019460.1,769-787).
cattagccatcaaacatct

SEQ ID NO: 708237 - DNA, 19 bp, Mus musculus
  siRNA target sequence for Sfmbt1 (NM_019460.1,837-855).
gagccattaccctcttact

SEQ ID NO: 708238 - DNA, 19 bp, Mus musculus
  siRNA target sequence for Sfmbt1 (NM_019460.1,839-857).
gccattaccctcttactta

SEQ ID NO: 708239 - DNA, 19 bp, Mus musculus
  siRNA target sequence for Sfmbt1 (NM_019460.1,841-859).
cattaccctcttacttatt

SEQ ID NO: 708240 - DNA, 19 bp, Mus musculus
  siRNA target sequence for Sfmbt1 (NM_019460.1,847-865).
cctcttacttatttaagga

SEQ ID NO: 708241 - DNA, 19 bp, Mus musculus
  siRNA target sequence for Sfmbt1 (NM_019460.1,848-866).
ctcttacttatttaaggat

SEQ ID NO: 708242 - DNA, 19 bp, Mus musculus
  siRNA target sequence for Sfmbt1 (NM_019460.1,854-872).
cttatttaaggataagcaa

SEQ ID NO: 708243 - DNA, 19 bp, Mus musculus
  siRNA target sequence for Sfmbt1 (NM_019460.1,879-897).
ggaacccatgaattttcta

SEQ ID NO: 708244 - DNA, 19 bp, Mus musculus
  siRNA target sequence for Sfmbt1 (NM_019460.1,880-898).
gaacccatgaattttctat

SEQ ID NO: 708245 - DNA, 19 bp, Mus musculus
  siRNA target sequence for Sfmbt1 (NM_019460.1,883-901).
cccatgaattttctataaa

SEQ ID NO: 708246 - DNA, 19 bp, Mus musculus
  siRNA target sequence for Sfmbt1 (NM_019460.1,920-938).
ggacccgtggtctcctttt

SEQ ID NO: 708247 - DNA, 19 bp, Mus musculus
  siRNA target sequence for Sfmbt1 (NM_019460.1,955-973).
cgattgctaaggtgtttga

SEQ ID NO: 708248 - DNA, 19 bp, Mus musculus
  siRNA target sequence for Sfmbt1 (NM_019460.1,956-974).
gattgctaaggtgtttgat

SEQ ID NO: 708249 - DNA, 19 bp, Mus musculus
  siRNA target sequence for Sfmbt1 (NM_019460.1,960-978).
gctaaggtgtttgatgata

SEQ ID NO: 708250 - DNA, 19 bp, Mus musculus
  siRNA target sequence for Sfmbt1 (NM_019460.1,961-979).
ctaaggtgtttgatgataa

SEQ ID NO: 708251 - DNA, 19 bp, Mus musculus
  siRNA target sequence for Sfmbt1 (NM_019460.1,966-984).
gtgtttgatgataagtact

SEQ ID NO: 708252 - DNA, 19 bp, Mus musculus
  siRNA target sequence for Sfmbt1 (NM_019460.1,983-1001).
ctttctagtggaaatggat

SEQ ID NO: 708253 - DNA, 19 bp, Mus musculus
  siRNA target sequence for Sfmbt1 (NM_019460.1,1033-1051).
catttgtgtgccatgctaa

SEQ ID NO: 708254 - DNA, 19 bp, Mus musculus
  siRNA target sequence for Sfmbt1 (NM_019460.1,1068-1086).
cctgtgcagtggagtctaa

SEQ ID NO: 708255 - DNA, 19 bp, Mus musculus
  siRNA target sequence for Sfmbt1 (NM_019460.1,1071-1089).
gtgcagtggagtctaaaga

SEQ ID NO: 708256 - DNA, 19 bp, Mus musculus
  siRNA target sequence for Sfmbt1 (NM_019460.1,1078-1096).
ggagtctaaagaatggttt

SEQ ID NO: 708257 - DNA, 19 bp, Mus musculus
  siRNA target sequence for Sfmbt1 (NM_019460.1,1079-1097).
gagtctaaagaatggttta

SEQ ID NO: 708258 - DNA, 19 bp, Mus musculus
  siRNA target sequence for Sfmbt1 (NM_019460.1,1088-1106).
gaatggtttacatatcaat

SEQ ID NO: 708259 - DNA, 19 bp, Mus musculus
  siRNA target sequence for Sfmbt1 (NM_019460.1,1187-1205).
gtgcttcccgcagtcaatt

SEQ ID NO: 708260 - DNA, 19 bp, Mus musculus
  siRNA target sequence for Sfmbt1 (NM_019460.1,1190-1208).
cttcccgcagtcaatttct

SEQ ID NO: 708261 - DNA, 19 bp, Mus musculus
  siRNA target sequence for Sfmbt1 (NM_019460.1,1207-1225).
ctgagcaccagtttaagga

SEQ ID NO: 708262 - DNA, 19 bp, Mus musculus
  siRNA target sequence for Sfmbt1 (NM_019460.1,1217-1235).
gtttaaggagaacatgaaa

SEQ ID NO: 708263 - DNA, 19 bp, Mus musculus
  siRNA target sequence for Sfmbt1 (NM_019460.1,1317-1335).
cagctagaaggttctaaga

SEQ ID NO: 708264 - DNA, 19 bp, Mus musculus
  siRNA target sequence for Sfmbt1 (NM_019460.1,1334-1352).
gaagcctgtacccgaattt

SEQ ID NO: 708265 - DNA, 19 bp, Mus musculus
  siRNA target sequence for Sfmbt1 (NM_019460.1,1337-1355).
gcctgtacccgaatttatt

SEQ ID NO: 708266 - DNA, 19 bp, Mus musculus
  siRNA target sequence for Sfmbt1 (NM_019460.1,1339-1357).
ctgtacccgaatttattgt

SEQ ID NO: 708267 - DNA, 19 bp, Mus musculus
  siRNA target sequence for Sfmbt1 (NM_019460.1,1341-1359).
gtacccgaatttattgtaa

SEQ ID NO: 708268 - DNA, 19 bp, Mus musculus
  siRNA target sequence for Sfmbt1 (NM_019460.1,1360-1378).
gtgcagagtcgatgaatat

SEQ ID NO: 708269 - DNA, 19 bp, Mus musculus
  siRNA target sequence for Sfmbt1 (NM_019460.1,1367-1385).
gtcgatgaatatatttcct

SEQ ID NO: 708270 - DNA, 19 bp, Mus musculus
  siRNA target sequence for Sfmbt1 (NM_019460.1,1432-1450).
gggcacgagggcataaact

SEQ ID NO: 708271 - DNA, 19 bp, Mus musculus
  siRNA target sequence for Sfmbt1 (NM_019460.1,1434-1452).
gcacgagggcataaactga

SEQ ID NO: 708272 - DNA, 19 bp, Mus musculus
  siRNA target sequence for Sfmbt1 (NM_019460.1,1440-1458).
gggcataaactgaggaaaa

SEQ ID NO: 708273 - DNA, 19 bp, Mus musculus
  siRNA target sequence for Sfmbt1 (NM_019460.1,1441-1459).
ggcataaactgaggaaaat

SEQ ID NO: 708274 - DNA, 19 bp, Mus musculus
  siRNA target sequence for Sfmbt1 (NM_019460.1,1537-1555).
cccactcagtgatgatcaa

SEQ ID NO: 708275 - DNA, 19 bp, Mus musculus
  siRNA target sequence for Sfmbt1 (NM_019460.1,1538-1556).
ccactcagtgatgatcaat

SEQ ID NO: 708276 - DNA, 19 bp, Mus musculus
  siRNA target sequence for Sfmbt1 (NM_019460.1,1597-1615).
gcttctcagggccatatct

SEQ ID NO: 708277 - DNA, 19 bp, Mus musculus
  siRNA target sequence for Sfmbt1 (NM_019460.1,1601-1619).
ctcagggccatatcttaat

SEQ ID NO: 708278 - DNA, 19 bp, Mus musculus
  siRNA target sequence for Sfmbt1 (NM_019460.1,1603-1621).
cagggccatatcttaataa

SEQ ID NO: 708279 - DNA, 19 bp, Mus musculus
  siRNA target sequence for Sfmbt1 (NM_019460.1,1607-1625).
gccatatcttaataaagga

SEQ ID NO: 708280 - DNA, 19 bp, Mus musculus
  siRNA target sequence for Sfmbt1 (NM_019460.1,1633-1651).
ctgagctgcctcaatgtgt

SEQ ID NO: 708281 - DNA, 19 bp, Mus musculus
  siRNA target sequence for Sfmbt1 (NM_019460.1,1666-1684).
gcgttctggtacttagaga

SEQ ID NO: 708282 - DNA, 19 bp, Mus musculus
  siRNA target sequence for Sfmbt1 (NM_019460.1,1674-1692).
gtacttagagaggttctta

SEQ ID NO: 708283 - DNA, 19 bp, Mus musculus
  siRNA target sequence for Sfmbt1 (NM_019460.1,1677-1695).
cttagagaggttcttactt

SEQ ID NO: 708284 - DNA, 19 bp, Mus musculus
  siRNA target sequence for Sfmbt1 (NM_019460.1,1683-1701).
gaggttcttactttgctta

SEQ ID NO: 708285 - DNA, 19 bp, Mus musculus
  siRNA target sequence for Sfmbt1 (NM_019460.1,1686-1704).
gttcttactttgcttatca

SEQ ID NO: 708286 - DNA, 19 bp, Mus musculus
  siRNA target sequence for Sfmbt1 (NM_019460.1,1782-1800).
gtcctaaaggccaaatata

SEQ ID NO: 708287 - DNA, 19 bp, Mus musculus
  siRNA target sequence for Sfmbt1 (NM_019460.1,1808-1826).
gagttaccgagctactgtt

SEQ ID NO: 708288 - DNA, 19 bp, Mus musculus
  siRNA target sequence for Sfmbt1 (NM_019460.1,1814-1832).
ccgagctactgttgagata

SEQ ID NO: 708289 - DNA, 19 bp, Mus musculus
  siRNA target sequence for Sfmbt1 (NM_019460.1,1818-1836).
gctactgttgagatagtga

SEQ ID NO: 708290 - DNA, 19 bp, Mus musculus
  siRNA target sequence for Sfmbt1 (NM_019460.1,1842-1860).
gcagaccgagtgactgaat

SEQ ID NO: 708291 - DNA, 19 bp, Mus musculus
  siRNA target sequence for Sfmbt1 (NM_019460.1,1843-1861).
cagaccgagtgactgaatt

SEQ ID NO: 708292 - DNA, 19 bp, Mus musculus
  siRNA target sequence for Sfmbt1 (NM_019460.1,1857-1875).
gaattctgccggcaaacat

SEQ ID NO: 708293 - DNA, 19 bp, Mus musculus
  siRNA target sequence for Sfmbt1 (NM_019460.1,1916-1934).
catggttctggatacatgt

SEQ ID NO: 708294 - DNA, 19 bp, Mus musculus
  siRNA target sequence for Sfmbt1 (NM_019460.1,1963-1981).
ccaaatacacgcactatta

SEQ ID NO: 708295 - DNA, 19 bp, Mus musculus
  siRNA target sequence for Sfmbt1 (NM_019460.1,1964-1982).
caaatacacgcactattat

SEQ ID NO: 708296 - DNA, 19 bp, Mus musculus
  siRNA target sequence for Sfmbt1 (NM_019460.1,1972-1990).
cgcactattatggaaagaa

SEQ ID NO: 708297 - DNA, 19 bp, Mus musculus
  siRNA target sequence for Sfmbt1 (NM_019460.1,2014-2032).
cacccggtgggcatagtaa

SEQ ID NO: 708298 - DNA, 19 bp, Mus musculus
  siRNA target sequence for Sfmbt1 (NM_019460.1,2016-2034).
cccggtgggcatagtaatt

SEQ ID NO: 708299 - DNA, 19 bp, Mus musculus
  siRNA target sequence for Sfmbt1 (NM_019460.1,2017-2035).
ccggtgggcatagtaattt

SEQ ID NO: 708300 - DNA, 19 bp, Mus musculus
  siRNA target sequence for Sfmbt1 (NM_019460.1,2066-2084).
gagaaaaaggcggaagaat

SEQ ID NO: 708301 - DNA, 19 bp, Mus musculus
  siRNA target sequence for Sfmbt1 (NM_019460.1,2105-2123).
gcgttcttctgcatctgtt

SEQ ID NO: 708302 - DNA, 19 bp, Mus musculus
  siRNA target sequence for Sfmbt1 (NM_019460.1,2396-2414).
ggaaataaggattgaagtt

SEQ ID NO: 708303 - DNA, 19 bp, Mus musculus
  siRNA target sequence for Sfmbt1 (NM_019460.1,2463-2481).
gatgtcgtgcggttcatca

SEQ ID NO: 708304 - DNA, 19 bp, Mus musculus
  siRNA target sequence for Sfmbt1 (NM_019460.1,2494-2512).
gtgctccgttggcaagaat

SEQ ID NO: 708305 - DNA, 19 bp, Mus musculus
  siRNA target sequence for Sfmbt1 (NM_019460.1,2496-2514).
gctccgttggcaagaatat

SEQ ID NO: 708306 - DNA, 19 bp, Mus musculus
  siRNA target sequence for Sfmbt1 (NM_019460.1,2497-2515).
ctccgttggcaagaatatt

SEQ ID NO: 708307 - DNA, 19 bp, Mus musculus
  siRNA target sequence for Sfmbt1 (NM_019460.1,2500-2518).
cgttggcaagaatattcct

SEQ ID NO: 708308 - DNA, 19 bp, Mus musculus
  siRNA target sequence for Sfmbt1 (NM_019460.1,2501-2519).
gttggcaagaatattcctt

SEQ ID NO: 708309 - DNA, 19 bp, Mus musculus
  siRNA target sequence for Sfmbt1 (NM_019460.1,2574-2592).
gagtgcatggacttaaagt

SEQ ID NO: 708310 - DNA, 19 bp, Mus musculus
  siRNA target sequence for Sfmbt1 (NM_019460.1,2606-2624).
caagctttgccatcacata

SEQ ID NO: 708311 - DNA, 19 bp, Mus musculus
  siRNA target sequence for Sfmbt1 (NM_019460.1,2610-2628).
ctttgccatcacatagaga

SEQ ID NO: 708312 - DNA, 19 bp, Mus musculus
  siRNA target sequence for Sfmbt1 (NM_019460.1,2614-2632).
gccatcacatagagagaat

SEQ ID NO: 708313 - DNA, 19 bp, Mus musculus
  siRNA target sequence for Sh3glb1 (NM_019464.1,415-433).
gctgaatgtaccaaaatat

SEQ ID NO: 708314 - DNA, 19 bp, Mus musculus
  siRNA target sequence for Sh3glb1 (NM_019464.1,418-436).
gaatgtaccaaaatatgga

SEQ ID NO: 708315 - DNA, 19 bp, Mus musculus
  siRNA target sequence for Sh3glb1 (NM_019464.1,466-484).
ctgttgcagccaaatccaa

SEQ ID NO: 708316 - DNA, 19 bp, Mus musculus
  siRNA target sequence for Sh3glb1 (NM_019464.1,482-500).
caaatgccaggatagaaga

SEQ ID NO: 708317 - DNA, 19 bp, Mus musculus
  siRNA target sequence for Sh3glb1 (NM_019464.1,489-507).
caggatagaagaatttgtt

SEQ ID NO: 708318 - DNA, 19 bp, Mus musculus
  siRNA target sequence for Sh3glb1 (NM_019464.1,529-547).
gcaccaagtcgtataaaca

SEQ ID NO: 708319 - DNA, 19 bp, Mus musculus
  siRNA target sequence for Sh3glb1 (NM_019464.1,551-569).
cggaacttttgggacaata

SEQ ID NO: 708320 - DNA, 19 bp, Mus musculus
  siRNA target sequence for Sh3glb1 (NM_019464.1,599-617).
cagggacagcttatggaaa

SEQ ID NO: 708321 - DNA, 19 bp, Mus musculus
  siRNA target sequence for Sh3glb1 (NM_019464.1,662-680).
ctgaccgagagctgattca

SEQ ID NO: 708322 - DNA, 19 bp, Mus musculus
  siRNA target sequence for Sh3glb1 (NM_019464.1,666-684).
ccgagagctgattcaaaca

SEQ ID NO: 708323 - DNA, 19 bp, Mus musculus
  siRNA target sequence for Sh3glb1 (NM_019464.1,667-685).
cgagagctgattcaaacat

SEQ ID NO: 708324 - DNA, 19 bp, Mus musculus
  siRNA target sequence for Sh3glb1 (NM_019464.1,679-697).
caaacatcagccttaaatt

SEQ ID NO: 708325 - DNA, 19 bp, Mus musculus
  siRNA target sequence for Sh3glb1 (NM_019464.1,700-718).
ctcactcctttaagaaact

SEQ ID NO: 708326 - DNA, 19 bp, Mus musculus
  siRNA target sequence for Sh3glb1 (NM_019464.1,849-867).
ggaattgagaataactcaa

SEQ ID NO: 708327 - DNA, 19 bp, Mus musculus
  siRNA target sequence for Sh3glb1 (NM_019464.1,940-958).
ctccgctgtctgaatgact

SEQ ID NO: 708328 - DNA, 19 bp, Mus musculus
  siRNA target sequence for Sh3glb1 (NM_019464.1,985-1003).
gcacagtgttaccagtata

SEQ ID NO: 708329 - DNA, 19 bp, Mus musculus
  siRNA target sequence for Sh3glb1 (NM_019464.1,990-1008).
gtgttaccagtatatgcta

SEQ ID NO: 708330 - DNA, 19 bp, Mus musculus
  siRNA target sequence for Sh3glb1 (NM_019464.1,1031-1049).
gttttccatccaattatct

SEQ ID NO: 708331 - DNA, 19 bp, Mus musculus
  siRNA target sequence for Sh3glb1 (NM_019464.1,1074-1092).
gacaccagtgccatatgct

SEQ ID NO: 708332 - DNA, 19 bp, Mus musculus
  siRNA target sequence for Sh3glb1 (NM_019464.1,1127-1145).
caacgggtagccttgtaat

SEQ ID NO: 708333 - DNA, 19 bp, Mus musculus
  siRNA target sequence for Sh3glb1 (NM_019464.1,1151-1169).
gtccttctaacctcaatga

SEQ ID NO: 708334 - DNA, 19 bp, Mus musculus
  siRNA target sequence for Sh3glb1 (NM_019464.1,1162-1180).
ctcaatgaccttaaagaat

SEQ ID NO: 708335 - DNA, 19 bp, Mus musculus
  siRNA target sequence for Sh3glb1 (NM_019464.1,1198-1216).
gctagggtcctctatgatt

SEQ ID NO: 708336 - DNA, 19 bp, Mus musculus
  siRNA target sequence for Sh3glb1 (NM_019464.1,1199-1217).
ctagggtcctctatgatta

SEQ ID NO: 708337 - DNA, 19 bp, Mus musculus
  siRNA target sequence for Sh3glb1 (NM_019464.1,1203-1221).
ggtcctctatgattatgat

SEQ ID NO: 708338 - DNA, 19 bp, Mus musculus
  siRNA target sequence for Sh3glb1 (NM_019464.1,1251-1269).
ggccgatgaggtaatcact

SEQ ID NO: 708339 - DNA, 19 bp, Mus musculus
  siRNA target sequence for Sh3glb1 (NM_019464.1,1331-1349).
gcaaggtgccaattaccta

SEQ ID NO: 708340 - DNA, 19 bp, Mus musculus
  siRNA target sequence for Sh3glb1 (NM_019464.1,1338-1356).
gccaattacctacttagaa

SEQ ID NO: 708341 - DNA, 19 bp, Mus musculus
  siRNA target sequence for Sh3glb1 (NM_019464.1,1347-1365).
ctacttagaacttctcaat

SEQ ID NO: 708342 - DNA, 19 bp, Mus musculus
  siRNA target sequence for Crtam (NM_019465.1,96-114).
cactctaacgtgtgttact

SEQ ID NO: 708343 - DNA, 19 bp, Mus musculus
  siRNA target sequence for Crtam (NM_019465.1,151-169).
ccctctgggttcaccattt

SEQ ID NO: 708344 - DNA, 19 bp, Mus musculus
  siRNA target sequence for Crtam (NM_019465.1,152-170).
cctctgggttcaccatttt

SEQ ID NO: 708345 - DNA, 19 bp, Mus musculus
  siRNA target sequence for Crtam (NM_019465.1,153-171).
ctctgggttcaccattttt

SEQ ID NO: 708346 - DNA, 19 bp, Mus musculus
  siRNA target sequence for Crtam (NM_019465.1,226-244).
gctacacaactctccatta

SEQ ID NO: 708347 - DNA, 19 bp, Mus musculus
  siRNA target sequence for Crtam (NM_019465.1,230-248).
cacaactctccattagtgt

SEQ ID NO: 708348 - DNA, 19 bp, Mus musculus
  siRNA target sequence for Crtam (NM_019465.1,240-258).
cattagtgtgtccaatgta

SEQ ID NO: 708349 - DNA, 19 bp, Mus musculus
  siRNA target sequence for Crtam (NM_019465.1,465-483).
ggaaggtctggagatctat

SEQ ID NO: 708350 - DNA, 19 bp, Mus musculus
  siRNA target sequence for Crtam (NM_019465.1,572-590).
ccgtgcactgcattatcca

SEQ ID NO: 708351 - DNA, 19 bp, Mus musculus
  siRNA target sequence for Crtam (NM_019465.1,738-756).
ggaaaattccagtatacca

SEQ ID NO: 708352 - DNA, 19 bp, Mus musculus
  siRNA target sequence for Crtam (NM_019465.1,918-936).
catgaagctgcgtaaagca

SEQ ID NO: 708353 - DNA, 19 bp, Mus musculus
  siRNA target sequence for Crtam (NM_019465.1,973-991).
caagctctagaaagttaca

SEQ ID NO: 708354 - DNA, 19 bp, Mus musculus
  siRNA target sequence for Crtam (NM_019465.1,1088-1106).
cgggagccaaaacaaagaa

SEQ ID NO: 708355 - DNA, 19 bp, Mus musculus
  siRNA target sequence for Crtam (NM_019465.1,1143-1161).
ccgtgtcccggagagtatt

SEQ ID NO: 708356 - DNA, 19 bp, Mus musculus
  siRNA target sequence for Crtam (NM_019465.1,1147-1165).
gtcccggagagtattgtgt

SEQ ID NO: 708357 - DNA, 19 bp, Mus musculus
  siRNA target sequence for Olfr156 (NM_019474.1,102-120).
cggtagctgaatttgtctt

SEQ ID NO: 708358 - DNA, 19 bp, Mus musculus
  siRNA target sequence for Olfr156 (NM_019474.1,887-905).
gcagacaaacaggatgttt

SEQ ID NO: 708359 - DNA, 19 bp, Mus musculus
  siRNA target sequence for Olfr156 (NM_019474.1,910-928).
caagctcatctccttattt

SEQ ID NO: 708360 - DNA, 19 bp, Mus musculus
  siRNA target sequence for Olfr156 (NM_019474.1,913-931).
gctcatctccttattttat

SEQ ID NO: 708361 - DNA, 19 bp, Mus musculus
  siRNA target sequence for Pqbp1 (NM_019478.2,118-136).
gaggggcatcctcaaacat

SEQ ID NO: 708362 - DNA, 19 bp, Mus musculus
  siRNA target sequence for Pqbp1 (NM_019478.2,120-138).
ggggcatcctcaaacatct

SEQ ID NO: 708363 - DNA, 19 bp, Mus musculus
  siRNA target sequence for Pqbp1 (NM_019478.2,231-249).
gctggtacaaggtgtttga

SEQ ID NO: 708364 - DNA, 19 bp, Mus musculus
  siRNA target sequence for Pqbp1 (NM_019478.2,255-273).
cttgcggactcccttacta

SEQ ID NO: 708365 - DNA, 19 bp, Mus musculus
  siRNA target sequence for Pqbp1 (NM_019478.2,260-278).
ggactcccttactattgga

SEQ ID NO: 708366 - DNA, 19 bp, Mus musculus
  siRNA target sequence for Pqbp1 (NM_019478.2,301-319).
gtggctctcaccacatgat

SEQ ID NO: 708367 - DNA, 19 bp, Mus musculus
  siRNA target sequence for Pqbp1 (NM_019478.2,309-327).
caccacatgatcctaactt

SEQ ID NO: 708368 - DNA, 19 bp, Mus musculus
  siRNA target sequence for Pqbp1 (NM_019478.2,312-330).
cacatgatcctaactttgt

SEQ ID NO: 708369 - DNA, 19 bp, Mus musculus
  siRNA target sequence for Pqbp1 (NM_019478.2,321-339).
ctaactttgtcgttaccaa

SEQ ID NO: 708370 - DNA, 19 bp, Mus musculus
  siRNA target sequence for Pqbp1 (NM_019478.2,336-354).
ccaaatccgccaagaaagt

SEQ ID NO: 708371 - DNA, 19 bp, Mus musculus
  siRNA target sequence for Pqbp1 (NM_019478.2,382-400).
caagtcggaccggaatctt

SEQ ID NO: 708372 - DNA, 19 bp, Mus musculus
  siRNA target sequence for Pqbp1 (NM_019478.2,385-403).
gtcggaccggaatcttgaa

SEQ ID NO: 708373 - DNA, 19 bp, Mus musculus
  siRNA target sequence for Pqbp1 (NM_019478.2,387-405).
cggaccggaatcttgaaaa

SEQ ID NO: 708374 - DNA, 19 bp, Mus musculus
  siRNA target sequence for Pqbp1 (NM_019478.2,429-447).
cagatcgtagtcatgagaa

SEQ ID NO: 708375 - DNA, 19 bp, Mus musculus
  siRNA target sequence for Pqbp1 (NM_019478.2,555-573).
gagagcgggcatttgacaa

SEQ ID NO: 708376 - DNA, 19 bp, Mus musculus
  siRNA target sequence for Pqbp1 (NM_019478.2,626-644).
gctccttaccccaagaaca

SEQ ID NO: 708377 - DNA, 19 bp, Mus musculus
  siRNA target sequence for Pqbp1 (NM_019478.2,629-647).
ccttaccccaagaacaaga

SEQ ID NO: 708378 - DNA, 19 bp, Mus musculus
  siRNA target sequence for Pqbp1 (NM_019478.2,651-669).
cgacgagccgcaaagatga

SEQ ID NO: 708379 - DNA, 19 bp, Mus musculus
  siRNA target sequence for Pqbp1 (NM_019478.2,655-673).
gagccgcaaagatgaagaa

SEQ ID NO: 708380 - DNA, 19 bp, Mus musculus
  siRNA target sequence for Pqbp1 (NM_019478.2,658-676).
ccgcaaagatgaagaatta

SEQ ID NO: 708381 - DNA, 19 bp, Mus musculus
  siRNA target sequence for Btg4 (NM_019493.2,256-274).
gtcacaagattggtgaaaa

SEQ ID NO: 708382 - DNA, 19 bp, Mus musculus
  siRNA target sequence for Btg4 (NM_019493.2,260-278).
caagattggtgaaaaagca

SEQ ID NO: 708383 - DNA, 19 bp, Mus musculus
  siRNA target sequence for Btg4 (NM_019493.2,288-306).
gagtactcaacagatagaa

SEQ ID NO: 708384 - DNA, 19 bp, Mus musculus
  siRNA target sequence for Btg4 (NM_019493.2,385-403).
caggcttttaggtgtatca

SEQ ID NO: 708385 - DNA, 19 bp, Mus musculus
  siRNA target sequence for Btg4 (NM_019493.2,398-416).
gtatcaggataaacaacaa

SEQ ID NO: 708386 - DNA, 19 bp, Mus musculus
  siRNA target sequence for Btg4 (NM_019493.2,404-422).
ggataaacaacaatgagaa

SEQ ID NO: 708387 - DNA, 19 bp, Mus musculus
  siRNA target sequence for Btg4 (NM_019493.2,405-423).
gataaacaacaatgagaat

SEQ ID NO: 708388 - DNA, 19 bp, Mus musculus
  siRNA target sequence for Btg4 (NM_019493.2,420-438).
gaataaagaccctgtttta

SEQ ID NO: 708389 - DNA, 19 bp, Mus musculus
  siRNA target sequence for Btg4 (NM_019493.2,444-462).
ggcttgtgctgagagtaat

SEQ ID NO: 708390 - DNA, 19 bp, Mus musculus
  siRNA target sequence for Btg4 (NM_019493.2,446-464).
cttgtgctgagagtaatgt

SEQ ID NO: 708391 - DNA, 19 bp, Mus musculus
  siRNA target sequence for Btg4 (NM_019493.2,534-552).
gtatggtgagaaaaagcat

SEQ ID NO: 708392 - DNA, 19 bp, Mus musculus
  siRNA target sequence for Btg4 (NM_019493.2,549-567).
gcatccctttacaattgct

SEQ ID NO: 708393 - DNA, 19 bp, Mus musculus
  siRNA target sequence for Btg4 (NM_019493.2,550-568).
catccctttacaattgctt

SEQ ID NO: 708394 - DNA, 19 bp, Mus musculus
  siRNA target sequence for Btg4 (NM_019493.2,554-572).
cctttacaattgcttcttt

SEQ ID NO: 708395 - DNA, 19 bp, Mus musculus
  siRNA target sequence for Btg4 (NM_019493.2,610-628).
gtcagctgtgcagttaaca

SEQ ID NO: 708396 - DNA, 19 bp, Mus musculus
  siRNA target sequence for Btg4 (NM_019493.2,723-741).
cgtctaccaggttgaaaat

SEQ ID NO: 708397 - DNA, 19 bp, Mus musculus
  siRNA target sequence for Btg4 (NM_019493.2,724-742).
gtctaccaggttgaaaatt

SEQ ID NO: 708398 - DNA, 19 bp, Mus musculus
  siRNA target sequence for Btg4 (NM_019493.2,733-751).
gttgaaaatttcaaacagt

SEQ ID NO: 708399 - DNA, 19 bp, Mus musculus
  siRNA target sequence for Btg4 (NM_019493.2,771-789).
cctcccccgtagaaagcat

SEQ ID NO: 708400 - DNA, 19 bp, Mus musculus
  siRNA target sequence for Btg4 (NM_019493.2,772-790).
ctcccccgtagaaagcatt

SEQ ID NO: 708401 - DNA, 19 bp, Mus musculus
  siRNA target sequence for Btg4 (NM_019493.2,870-888).
gcgcagggtggacagatat

SEQ ID NO: 708402 - DNA, 19 bp, Mus musculus
  siRNA target sequence for Btg4 (NM_019493.2,872-890).
gcagggtggacagatatca

SEQ ID NO: 708403 - DNA, 19 bp, Mus musculus
  siRNA target sequence for Btg4 (NM_019493.2,893-911).
gggtcaacgcacaactgtt

SEQ ID NO: 708404 - DNA, 19 bp, Mus musculus
  siRNA target sequence for Btg4 (NM_019493.2,950-968).
ccttgtcttccctaaagca

SEQ ID NO: 708405 - DNA, 19 bp, Mus musculus
  siRNA target sequence for Btg4 (NM_019493.2,951-969).
cttgtcttccctaaagcaa

SEQ ID NO: 708406 - DNA, 19 bp, Mus musculus
  siRNA target sequence for Ammecr1 (NM_019496.2,339-357).
gggaaccctactttctact

SEQ ID NO: 708407 - DNA, 19 bp, Mus musculus
  siRNA target sequence for Ammecr1 (NM_019496.2,513-531).
cgagccctacccactgttt

SEQ ID NO: 708408 - DNA, 19 bp, Mus musculus
  siRNA target sequence for Ammecr1 (NM_019496.2,516-534).
gccctacccactgtttgta

SEQ ID NO: 708409 - DNA, 19 bp, Mus musculus
  siRNA target sequence for Ammecr1 (NM_019496.2,519-537).
ctacccactgtttgtaaca

SEQ ID NO: 708410 - DNA, 19 bp, Mus musculus
  siRNA target sequence for Ammecr1 (NM_019496.2,528-546).
gtttgtaacatggaagatt

SEQ ID NO: 708411 - DNA, 19 bp, Mus musculus
  siRNA target sequence for Ammecr1 (NM_019496.2,540-558).
gaagattggtcgagacaaa

SEQ ID NO: 708412 - DNA, 19 bp, Mus musculus
  siRNA target sequence for Ammecr1 (NM_019496.2,562-580).
ctgcgtggatgcataggta

SEQ ID NO: 708413 - DNA, 19 bp, Mus musculus
  siRNA target sequence for Ammecr1 (NM_019496.2,568-586).
ggatgcataggtacctttt

SEQ ID NO: 708414 - DNA, 19 bp, Mus musculus
  siRNA target sequence for Ammecr1 (NM_019496.2,648-666).
ccgttttccaccaatgaca

SEQ ID NO: 708415 - DNA, 19 bp, Mus musculus
  siRNA target sequence for Ammecr1 (NM_019496.2,673-691).
gagctgccaaggcttttct

SEQ ID NO: 708416 - DNA, 19 bp, Mus musculus
  siRNA target sequence for Ammecr1 (NM_019496.2,695-713).
cggtgtctctgctcactaa

SEQ ID NO: 708417 - DNA, 19 bp, Mus musculus
  siRNA target sequence for Ammecr1 (NM_019496.2,701-719).
ctctgctcactaactttga

SEQ ID NO: 708418 - DNA, 19 bp, Mus musculus
  siRNA target sequence for Ammecr1 (NM_019496.2,718-736).
gaagatgtttgcgactatt

SEQ ID NO: 708419 - DNA, 19 bp, Mus musculus
  siRNA target sequence for Ammecr1 (NM_019496.2,750-768).
gggtgtgcatggcattaga

SEQ ID NO: 708420 - DNA, 19 bp, Mus musculus
  siRNA target sequence for Ammecr1 (NM_019496.2,751-769).
ggtgtgcatggcattagaa

SEQ ID NO: 708421 - DNA, 19 bp, Mus musculus
  siRNA target sequence for Ammecr1 (NM_019496.2,752-770).
gtgtgcatggcattagaat

SEQ ID NO: 708422 - DNA, 19 bp, Mus musculus
  siRNA target sequence for Ammecr1 (NM_019496.2,760-778).
ggcattagaatagaattca

SEQ ID NO: 708423 - DNA, 19 bp, Mus musculus
  siRNA target sequence for Ammecr1 (NM_019496.2,761-779).
gcattagaatagaattcat

SEQ ID NO: 708424 - DNA, 19 bp, Mus musculus
  siRNA target sequence for Ammecr1 (NM_019496.2,838-856).
ggatgggaccatattcaga

SEQ ID NO: 708425 - DNA, 19 bp, Mus musculus
  siRNA target sequence for Ammecr1 (NM_019496.2,930-948).
gaccaggtaccgtagtgaa

SEQ ID NO: 708426 - DNA, 19 bp, Mus musculus
  siRNA target sequence for Ammecr1 (NM_019496.2,935-953).
ggtaccgtagtgaaaagat

SEQ ID NO: 708427 - DNA, 19 bp, Mus musculus
  siRNA target sequence for Ammecr1 (NM_019496.2,960-978).
gagttatgctgaatacctt

SEQ ID NO: 708428 - DNA, 19 bp, Mus musculus
  siRNA target sequence for Ammecr1 (NM_019496.2,990-1008).
gcatcatcatttccaaaat

SEQ ID NO: 708429 - DNA, 19 bp, Mus musculus
  siRNA target sequence for Ammecr1 (NM_019496.2,1024-1042).
cttccgccatacaaccatt

SEQ ID NO: 708430 - DNA, 19 bp, Mus musculus
  siRNA target sequence for Ammecr1 (NM_019496.2,1027-1045).
ccgccatacaaccattatt

SEQ ID NO: 708431 - DNA, 19 bp, Mus musculus
  siRNA target sequence for 2700031G06Rik (NM_019501.2,269-287).
cagtgatccttttaaactt

SEQ ID NO: 708432 - DNA, 19 bp, Mus musculus
  siRNA target sequence for 2700031G06Rik (NM_019501.2,306-324).
ggtctgtatgaagacatta

SEQ ID NO: 708433 - DNA, 19 bp, Mus musculus
  siRNA target sequence for 2700031G06Rik (NM_019501.2,360-378).
gacatgtccgaatactact

SEQ ID NO: 708434 - DNA, 19 bp, Mus musculus
  siRNA target sequence for 2700031G06Rik (NM_019501.2,397-415).
cctttagaccgattattgt

SEQ ID NO: 708435 - DNA, 19 bp, Mus musculus
  siRNA target sequence for 2700031G06Rik (NM_019501.2,425-443).
ggcccgagcgtgtaatatt

SEQ ID NO: 708436 - DNA, 19 bp, Mus musculus
  siRNA target sequence for 2700031G06Rik (NM_019501.2,427-445).
cccgagcgtgtaatattca

SEQ ID NO: 708437 - DNA, 19 bp, Mus musculus
  siRNA target sequence for 2700031G06Rik (NM_019501.2,428-446).
ccgagcgtgtaatattcat

SEQ ID NO: 708438 - DNA, 19 bp, Mus musculus
  siRNA target sequence for 2700031G06Rik (NM_019501.2,430-448).
gagcgtgtaatattcatca

SEQ ID NO: 708439 - DNA, 19 bp, Mus musculus
  siRNA target sequence for 2700031G06Rik (NM_019501.2,434-452).
gtgtaatattcatcataat

SEQ ID NO: 708440 - DNA, 19 bp, Mus musculus
  siRNA target sequence for 2700031G06Rik (NM_019501.2,514-532).
ctgctactctggttcatga

SEQ ID NO: 708441 - DNA, 19 bp, Mus musculus
  siRNA target sequence for 2700031G06Rik (NM_019501.2,517-535).
ctactctggttcatgatga

SEQ ID NO: 708442 - DNA, 19 bp, Mus musculus
  siRNA target sequence for 2700031G06Rik (NM_019501.2,645-663).
gctctggcacggattggaa

SEQ ID NO: 708443 - DNA, 19 bp, Mus musculus
  siRNA target sequence for 2700031G06Rik (NM_019501.2,646-664).
ctctggcacggattggaaa

SEQ ID NO: 708444 - DNA, 19 bp, Mus musculus
  siRNA target sequence for 2700031G06Rik (NM_019501.2,650-668).
ggcacggattggaaacaca

SEQ ID NO: 708445 - DNA, 19 bp, Mus musculus
  siRNA target sequence for 2700031G06Rik (NM_019501.2,679-697).
ctatgttagcccaagttat

SEQ ID NO: 708446 - DNA, 19 bp, Mus musculus
  siRNA target sequence for 2700031G06Rik (NM_019501.2,683-701).
gttagcccaagttattgaa

SEQ ID NO: 708447 - DNA, 19 bp, Mus musculus
  siRNA target sequence for 2700031G06Rik (NM_019501.2,728-746).
gctagggtcaaaagaaaat

SEQ ID NO: 708448 - DNA, 19 bp, Mus musculus
  siRNA target sequence for 2700031G06Rik (NM_019501.2,801-819).
ctgatagccaacagttgta

SEQ ID NO: 708449 - DNA, 19 bp, Mus musculus
  siRNA target sequence for 2700031G06Rik (NM_019501.2,848-866).
cccagtggtgcatgagata

SEQ ID NO: 708450 - DNA, 19 bp, Mus musculus
  siRNA target sequence for 2700031G06Rik (NM_019501.2,881-899).
gaaaaatgttggaatagct

SEQ ID NO: 708451 - DNA, 19 bp, Mus musculus
  siRNA target sequence for 2700031G06Rik (NM_019501.2,898-916).
cttttcagctcatagatga

SEQ ID NO: 708452 - DNA, 19 bp, Mus musculus
  siRNA target sequence for 2700031G06Rik (NM_019501.2,1026-1044).
gaaatgaatgctatgataa

SEQ ID NO: 708453 - DNA, 19 bp, Mus musculus
  siRNA target sequence for 2700031G06Rik (NM_019501.2,1031-1049).
gaatgctatgataatgaga

SEQ ID NO: 708454 - DNA, 19 bp, Mus musculus
  siRNA target sequence for 2700031G06Rik (NM_019501.2,1076-1094).
cagagcacgacagtatgta

SEQ ID NO: 708455 - DNA, 19 bp, Mus musculus
  siRNA target sequence for 2700031G06Rik (NM_019501.2,1078-1096).
gagcacgacagtatgtatt

SEQ ID NO: 708456 - DNA, 19 bp, Mus musculus
  siRNA target sequence for 2700031G06Rik (NM_019501.2,1081-1099).
cacgacagtatgtattaca

SEQ ID NO: 708457 - DNA, 19 bp, Mus musculus
  siRNA target sequence for 2700031G06Rik (NM_019501.2,1104-1122).
gatggcgtgcagcaaacaa

SEQ ID NO: 708458 - DNA, 19 bp, Mus musculus
  siRNA target sequence for 2700031G06Rik (NM_019501.2,1169-1187).
gaagcttagaccatctaca

SEQ ID NO: 708459 - DNA, 19 bp, Mus musculus
  siRNA target sequence for 2700031G06Rik (NM_019501.2,1172-1190).
gcttagaccatctacagaa

SEQ ID NO: 708460 - DNA, 19 bp, Mus musculus
  siRNA target sequence for 2700031G06Rik (NM_019501.2,1173-1191).
cttagaccatctacagaaa

SEQ ID NO: 708461 - DNA, 19 bp, Mus musculus
  siRNA target sequence for 2700031G06Rik (NM_019501.2,1198-1216).
ccctcattcagctttcaga

SEQ ID NO: 708462 - DNA, 19 bp, Mus musculus
  siRNA target sequence for 2700031G06Rik (NM_019501.2,1199-1217).
cctcattcagctttcagaa

SEQ ID NO: 708463 - DNA, 19 bp, Mus musculus
  siRNA target sequence for 2700031G06Rik (NM_019501.2,1200-1218).
ctcattcagctttcagaaa

SEQ ID NO: 708464 - DNA, 19 bp, Mus musculus
  siRNA target sequence for Ap4b1 (NM_019504.1,79-97).
ctgcgctaccggaatgtca

SEQ ID NO: 708465 - DNA, 19 bp, Mus musculus
  siRNA target sequence for Ap4b1 (NM_019504.1,504-522).
gcgtgaccaggatccaatt

SEQ ID NO: 708466 - DNA, 19 bp, Mus musculus
  siRNA target sequence for Ap4b1 (NM_019504.1,571-589).
ggaggtgttgtcattaata

SEQ ID NO: 708467 - DNA, 19 bp, Mus musculus
  siRNA target sequence for Ap4b1 (NM_019504.1,572-590).
gaggtgttgtcattaataa

SEQ ID NO: 708468 - DNA, 19 bp, Mus musculus
  siRNA target sequence for Ap4b1 (NM_019504.1,609-627).
cttaaatagaatgtcaaaa

SEQ ID NO: 708469 - DNA, 19 bp, Mus musculus
  siRNA target sequence for Ap4b1 (NM_019504.1,636-654).
gtggggccaggctgaagta

SEQ ID NO: 708470 - DNA, 19 bp, Mus musculus
  siRNA target sequence for Ap4b1 (NM_019504.1,935-953).
gcagtcactacaaaaagtt

SEQ ID NO: 708471 - DNA, 19 bp, Mus musculus
  siRNA target sequence for Ap4b1 (NM_019504.1,1141-1159).
caatgtgtgcagattctaa

SEQ ID NO: 708472 - DNA, 19 bp, Mus musculus
  siRNA target sequence for Ap4b1 (NM_019504.1,1145-1163).
gtgtgcagattctaacaga

SEQ ID NO: 708473 - DNA, 19 bp, Mus musculus
  siRNA target sequence for Ap4b1 (NM_019504.1,1172-1190).
gacttcgacaagaacatat

SEQ ID NO: 708474 - DNA, 19 bp, Mus musculus
  siRNA target sequence for Ap4b1 (NM_019504.1,1174-1192).
cttcgacaagaacatatca

SEQ ID NO: 708475 - DNA, 19 bp, Mus musculus
  siRNA target sequence for Ap4b1 (NM_019504.1,1331-1349).
gggtccacggggaaaaaat

SEQ ID NO: 708476 - DNA, 19 bp, Mus musculus
  siRNA target sequence for Ap4b1 (NM_019504.1,1351-1369).
cccaatgctccttatgtgt

SEQ ID NO: 708477 - DNA, 19 bp, Mus musculus
  siRNA target sequence for Ap4b1 (NM_019504.1,1352-1370).
ccaatgctccttatgtgtt

SEQ ID NO: 708478 - DNA, 19 bp, Mus musculus
  siRNA target sequence for Ap4b1 (NM_019504.1,1664-1682).
gctgggcttcagacttcaa

SEQ ID NO: 708479 - DNA, 19 bp, Mus musculus
  siRNA target sequence for Ap4b1 (NM_019504.1,1759-1777).
gagcttccccacaatgcat

SEQ ID NO: 708480 - DNA, 19 bp, Mus musculus
  siRNA target sequence for Tcerg1 (NM_019512.1,202-220).
ctttggacggcctcctttt

SEQ ID NO: 708481 - DNA, 19 bp, Mus musculus
  siRNA target sequence for Tcerg1 (NM_019512.1,213-231).
ctccttttgatcctaatat

SEQ ID NO: 708482 - DNA, 19 bp, Mus musculus
  siRNA target sequence for Tcerg1 (NM_019512.1,330-348).
ctcctccgggtatgatgtt

SEQ ID NO: 708483 - DNA, 19 bp, Mus musculus
  siRNA target sequence for Tcerg1 (NM_019512.1,429-447).
ctccagatgggaaggttta

SEQ ID NO: 708484 - DNA, 19 bp, Mus musculus
  siRNA target sequence for Tcerg1 (NM_019512.1,432-450).
cagatgggaaggtttatta

SEQ ID NO: 708485 - DNA, 19 bp, Mus musculus
  siRNA target sequence for Tcerg1 (NM_019512.1,434-452).
gatgggaaggtttattact

SEQ ID NO: 708486 - DNA, 19 bp, Mus musculus
  siRNA target sequence for Tcerg1 (NM_019512.1,437-455).
gggaaggtttattactaca

SEQ ID NO: 708487 - DNA, 19 bp, Mus musculus
  siRNA target sequence for Tcerg1 (NM_019512.1,438-456).
ggaaggtttattactacaa

SEQ ID NO: 708488 - DNA, 19 bp, Mus musculus
  siRNA target sequence for Tcerg1 (NM_019512.1,483-501).
ccaagccagatggagttaa

SEQ ID NO: 708489 - DNA, 19 bp, Mus musculus
  siRNA target sequence for Tcerg1 (NM_019512.1,487-505).
gccagatggagttaaggtt

SEQ ID NO: 708490 - DNA, 19 bp, Mus musculus
  siRNA target sequence for Tcerg1 (NM_019512.1,865-883).
cacgacaactgctacttca

SEQ ID NO: 708491 - DNA, 19 bp, Mus musculus
  siRNA target sequence for Tcerg1 (NM_019512.1,868-886).
gacaactgctacttcagtt

SEQ ID NO: 708492 - DNA, 19 bp, Mus musculus
  siRNA target sequence for Tcerg1 (NM_019512.1,1080-1098).
ctttcccaccagtaatggt

SEQ ID NO: 708493 - DNA, 19 bp, Mus musculus
  siRNA target sequence for Tcerg1 (NM_019512.1,1145-1163).
ggtgtagcaatgatgcaaa

SEQ ID NO: 708494 - DNA, 19 bp, Mus musculus
  siRNA target sequence for Tcerg1 (NM_019512.1,1151-1169).
gcaatgatgcaaatagtca

SEQ ID NO: 708495 - DNA, 19 bp, Mus musculus
  siRNA target sequence for Tcerg1 (NM_019512.1,1166-1184).
gtcagctgcccgtatgtaa

SEQ ID NO: 708496 - DNA, 19 bp, Mus musculus
  siRNA target sequence for Tcerg1 (NM_019512.1,1171-1189).
ctgcccgtatgtaaagaca

SEQ ID NO: 708497 - DNA, 19 bp, Mus musculus
  siRNA target sequence for Tcerg1 (NM_019512.1,1221-1239).
gaatggcccctcctatagt

SEQ ID NO: 708498 - DNA, 19 bp, Mus musculus
  siRNA target sequence for Tcerg1 (NM_019512.1,1337-1355).
gggaagacgtactattata

SEQ ID NO: 708499 - DNA, 19 bp, Mus musculus
  siRNA target sequence for Tcerg1 (NM_019512.1,1338-1356).
ggaagacgtactattataa

SEQ ID NO: 708500 - DNA, 19 bp, Mus musculus
  siRNA target sequence for Tcerg1 (NM_019512.1,1339-1357).
gaagacgtactattataat

SEQ ID NO: 708501 - DNA, 19 bp, Mus musculus
  siRNA target sequence for Tcerg1 (NM_019512.1,1342-1360).
gacgtactattataataat

SEQ ID NO: 708502 - DNA, 19 bp, Mus musculus
  siRNA target sequence for Tcerg1 (NM_019512.1,1345-1363).
gtactattataataataga

SEQ ID NO: 708503 - DNA, 19 bp, Mus musculus
  siRNA target sequence for Tcerg1 (NM_019512.1,1480-1498).
ggaggaagatcctaaggaa

SEQ ID NO: 708504 - DNA, 19 bp, Mus musculus
  siRNA target sequence for Tcerg1 (NM_019512.1,1634-1652).
gagagggtcttcttttaca

SEQ ID NO: 708505 - DNA, 19 bp, Mus musculus
  siRNA target sequence for Tcerg1 (NM_019512.1,1655-1673).
cccaccacccgcctttcta

SEQ ID NO: 708506 - DNA, 19 bp, Mus musculus
  siRNA target sequence for Tcerg1 (NM_019512.1,1656-1674).
ccaccacccgcctttctat

SEQ ID NO: 708507 - DNA, 19 bp, Mus musculus
  siRNA target sequence for Tcerg1 (NM_019512.1,1679-1697).
gaccggcctgatgatttga

SEQ ID NO: 708508 - DNA, 19 bp, Mus musculus
  siRNA target sequence for Tcerg1 (NM_019512.1,1681-1699).
ccggcctgatgatttgatt

SEQ ID NO: 708509 - DNA, 19 bp, Mus musculus
  siRNA target sequence for Tcerg1 (NM_019512.1,1701-1719).
gaagggcggatgttgacaa

SEQ ID NO: 708510 - DNA, 19 bp, Mus musculus
  siRNA target sequence for Tcerg1 (NM_019512.1,1818-1836).
caatgagcgcaattaaaga

SEQ ID NO: 708511 - DNA, 19 bp, Mus musculus
  siRNA target sequence for Tcerg1 (NM_019512.1,1868-1886).
gatgagcctattaaagcaa

SEQ ID NO: 708512 - DNA, 19 bp, Mus musculus
  siRNA target sequence for Tcerg1 (NM_019512.1,1891-1909).
gcggaagagagatgataat

SEQ ID NO: 708513 - DNA, 19 bp, Mus musculus
  siRNA target sequence for Tcerg1 (NM_019512.1,1892-1910).
cggaagagagatgataata

SEQ ID NO: 708514 - DNA, 19 bp, Mus musculus
  siRNA target sequence for Tcerg1 (NM_019512.1,2060-2078).
gagttgcacaagatagtat

SEQ ID NO: 708515 - DNA, 19 bp, Mus musculus
  siRNA target sequence for Tcerg1 (NM_019512.1,2085-2103).
ctcggtacttgcttctcaa

SEQ ID NO: 708516 - DNA, 19 bp, Mus musculus
  siRNA target sequence for Tcerg1 (NM_019512.1,2092-2110).
cttgcttctcaatcctaaa

SEQ ID NO: 708517 - DNA, 19 bp, Mus musculus
  siRNA target sequence for Tcerg1 (NM_019512.1,2241-2259).
gagctacttttagtgaatt

SEQ ID NO: 708518 - DNA, 19 bp, Mus musculus
  siRNA target sequence for Tcerg1 (NM_019512.1,2264-2282).
gccaaacatgctaaagatt

SEQ ID NO: 708519 - DNA, 19 bp, Mus musculus
  siRNA target sequence for Tcerg1 (NM_019512.1,2266-2284).
caaacatgctaaagattca

SEQ ID NO: 708520 - DNA, 19 bp, Mus musculus
  siRNA target sequence for Tcerg1 (NM_019512.1,2386-2404).
ggagaagattaaatcagat

SEQ ID NO: 708521 - DNA, 19 bp, Mus musculus
  siRNA target sequence for Tcerg1 (NM_019512.1,2474-2492).
gaaagtgacccccgatata

SEQ ID NO: 708522 - DNA, 19 bp, Mus musculus
  siRNA target sequence for Tcerg1 (NM_019512.1,2496-2514).
cggtggatagttcatcaat

SEQ ID NO: 708523 - DNA, 19 bp, Mus musculus
  siRNA target sequence for Tcerg1 (NM_019512.1,2498-2516).
gtggatagttcatcaatga

SEQ ID NO: 708524 - DNA, 19 bp, Mus musculus
  siRNA target sequence for Tcerg1 (NM_019512.1,2500-2518).
ggatagttcatcaatgaga

SEQ ID NO: 708525 - DNA, 19 bp, Mus musculus
  siRNA target sequence for Tcerg1 (NM_019512.1,2511-2529).
caatgagagaagacctttt

SEQ ID NO: 708526 - DNA, 19 bp, Mus musculus
  siRNA target sequence for Tcerg1 (NM_019512.1,2542-2560).
cgagaaaatagccaagaat

SEQ ID NO: 708527 - DNA, 19 bp, Mus musculus
  siRNA target sequence for Tcerg1 (NM_019512.1,2737-2755).
catggtacgttcttcagat

SEQ ID NO: 708528 - DNA, 19 bp, Mus musculus
  siRNA target sequence for Tcerg1 (NM_019512.1,2811-2829).
ggtccttattggaaagaga

SEQ ID NO: 708529 - DNA, 19 bp, Mus musculus
  siRNA target sequence for Tcerg1 (NM_019512.1,2861-2879).
gaagcgcttaccaaaaaga

SEQ ID NO: 708530 - DNA, 19 bp, Mus musculus
  siRNA target sequence for Tcerg1 (NM_019512.1,2909-2927).
gaaacctctgcgattacct

SEQ ID NO: 708531 - DNA, 19 bp, Mus musculus
  siRNA target sequence for Tcerg1 (NM_019512.1,2914-2932).
ctctgcgattaccttaaca

SEQ ID NO: 708532 - DNA, 19 bp, Mus musculus
  siRNA target sequence for Tcerg1 (NM_019512.1,2931-2949).
catccacgtggaaagaagt

SEQ ID NO: 708533 - DNA, 19 bp, Mus musculus
  siRNA target sequence for Tcerg1 (NM_019512.1,2934-2952).
ccacgtggaaagaagtgaa

SEQ ID NO: 708534 - DNA, 19 bp, Mus musculus
  siRNA target sequence for Tcerg1 (NM_019512.1,2966-2984).
gaagatcctcggtgcatta

SEQ ID NO: 708535 - DNA, 19 bp, Mus musculus
  siRNA target sequence for Tcerg1 (NM_019512.1,2969-2987).
gatcctcggtgcattaagt

SEQ ID NO: 708536 - DNA, 19 bp, Mus musculus
  siRNA target sequence for Tcerg1 (NM_019512.1,2972-2990).
cctcggtgcattaagttct

SEQ ID NO: 708537 - DNA, 19 bp, Mus musculus
  siRNA target sequence for Tcerg1 (NM_019512.1,3083-3101).
gagaccaaattcattacat

SEQ ID NO: 708538 - DNA, 19 bp, Mus musculus
  siRNA target sequence for Astn2 (NM_019514.1,667-685).
ctctgtattaccagatcaa

SEQ ID NO: 708539 - DNA, 19 bp, Mus musculus
  siRNA target sequence for Astn2 (NM_019514.1,772-790).
gcagttgtcatgaaggtta

SEQ ID NO: 708540 - DNA, 19 bp, Mus musculus
  siRNA target sequence for Astn2 (NM_019514.1,801-819).
ccagtccacagacatctat

SEQ ID NO: 708541 - DNA, 19 bp, Mus musculus
  siRNA target sequence for Astn2 (NM_019514.1,900-918).
gagcaagcccctgaaaaga

SEQ ID NO: 708542 - DNA, 19 bp, Mus musculus
  siRNA target sequence for Astn2 (NM_019514.1,906-924).
gcccctgaaaagattctca

SEQ ID NO: 708543 - DNA, 19 bp, Mus musculus
  siRNA target sequence for Astn2 (NM_019514.1,1081-1099).
ccacgtactttgaaaccat

SEQ ID NO: 708544 - DNA, 19 bp, Mus musculus
  siRNA target sequence for Astn2 (NM_019514.1,1313-1331).
gctttgcctacaacaaaca

SEQ ID NO: 708545 - DNA, 19 bp, Mus musculus
  siRNA target sequence for Astn2 (NM_019514.1,1357-1375).
ccagcaccatcttcatgtt

SEQ ID NO: 708546 - DNA, 19 bp, Mus musculus
  siRNA target sequence for Astn2 (NM_019514.1,1517-1535).
caacaaccggacacaacat

SEQ ID NO: 708547 - DNA, 19 bp, Mus musculus
  siRNA target sequence for Astn2 (NM_019514.1,1520-1538).
caaccggacacaacatgta

SEQ ID NO: 708548 - DNA, 19 bp, Mus musculus
  siRNA target sequence for Astn2 (NM_019514.1,1526-1544).
gacacaacatgtaaaccaa

SEQ ID NO: 708549 - DNA, 19 bp, Mus musculus
  siRNA target sequence for Astn2 (NM_019514.1,1548-1566).
caagtcttccaaatgacat

SEQ ID NO: 708550 - DNA, 19 bp, Mus musculus
  siRNA target sequence for Astn2 (NM_019514.1,1746-1764).
cgtgtccggagcaatctct

SEQ ID NO: 708551 - DNA, 19 bp, Mus musculus
  siRNA target sequence for Astn2 (NM_019514.1,1747-1765).
gtgtccggagcaatctcta

SEQ ID NO: 708552 - DNA, 19 bp, Mus musculus
  siRNA target sequence for Astn2 (NM_019514.1,1767-1785).
cgtgtgaagctgagtacta

SEQ ID NO: 708553 - DNA, 19 bp, Mus musculus
  siRNA target sequence for Astn2 (NM_019514.1,1963-1981).
ggctccaatatcagaaaga

SEQ ID NO: 708554 - DNA, 19 bp, Mus musculus
  siRNA target sequence for Astn2 (NM_019514.1,2198-2216).
ccgtgtggttccactttat

SEQ ID NO: 708555 - DNA, 19 bp, Mus musculus
  siRNA target sequence for Astn2 (NM_019514.1,2199-2217).
cgtgtggttccactttata

SEQ ID NO: 708556 - DNA, 19 bp, Mus musculus
  siRNA target sequence for Astn2 (NM_019514.1,2276-2294).
ctggtgttctggtaaagga

SEQ ID NO: 708557 - DNA, 19 bp, Mus musculus
  siRNA target sequence for Astn2 (NM_019514.1,2342-2360).
cagtgggcttccaaattgt

SEQ ID NO: 708558 - DNA, 19 bp, Mus musculus
  siRNA target sequence for Astn2 (NM_019514.1,2540-2558).
gagttttgccgatgactta

SEQ ID NO: 708559 - DNA, 19 bp, Mus musculus
  siRNA target sequence for Astn2 (NM_019514.1,2542-2560).
gttttgccgatgacttact

SEQ ID NO: 708560 - DNA, 19 bp, Mus musculus
  siRNA target sequence for Astn2 (NM_019514.1,2623-2641).
gtatctactcggtgatctt

SEQ ID NO: 708561 - DNA, 19 bp, Mus musculus
  siRNA target sequence for Astn2 (NM_019514.1,2658-2676).
gatggtctttacaagttca

SEQ ID NO: 708562 - DNA, 19 bp, Mus musculus
  siRNA target sequence for Astn2 (NM_019514.1,2740-2758).
cttgtccactggtagatga

SEQ ID NO: 708563 - DNA, 19 bp, Mus musculus
  siRNA target sequence for Astn2 (NM_019514.1,2772-2790).
gagatagcggacaagattt

SEQ ID NO: 708564 - DNA, 19 bp, Mus musculus
  siRNA target sequence for Astn2 (NM_019514.1,2796-2814).
ctatacaatggttacacaa

SEQ ID NO: 708565 - DNA, 19 bp, Mus musculus
  siRNA target sequence for Astn2 (NM_019514.1,2880-2898).
gtccagcaccactacaact

SEQ ID NO: 708566 - DNA, 19 bp, Mus musculus
  siRNA target sequence for Astn2 (NM_019514.1,2891-2909).
ctacaactctcactatgaa

SEQ ID NO: 708567 - DNA, 19 bp, Mus musculus
  siRNA target sequence for Astn2 (NM_019514.1,2897-2915).
ctctcactatgaaaagttt

SEQ ID NO: 708568 - DNA, 19 bp, Mus musculus
  siRNA target sequence for Astn2 (NM_019514.1,2956-2974).
ggaaggctcatctgattct

SEQ ID NO: 708569 - DNA, 19 bp, Mus musculus
  siRNA target sequence for Astn2 (NM_019514.1,2991-3009).
gtcagcagccactgttcta

SEQ ID NO: 708570 - DNA, 19 bp, Mus musculus
  siRNA target sequence for Astn2 (NM_019514.1,3103-3121).
ggtacagcatcctcaaaga

SEQ ID NO: 708571 - DNA, 19 bp, Mus musculus
  siRNA target sequence for Lgals12 (NM_019516.1,203-221).
ccacccggtgattccttat

SEQ ID NO: 708572 - DNA, 19 bp, Mus musculus
  siRNA target sequence for Lgals12 (NM_019516.1,216-234).
ccttatggcacaacaattt

SEQ ID NO: 708573 - DNA, 19 bp, Mus musculus
  siRNA target sequence for Lgals12 (NM_019516.1,358-376).
gcttcagccctcgattcta

SEQ ID NO: 708574 - DNA, 19 bp, Mus musculus
  siRNA target sequence for Lgals12 (NM_019516.1,417-435).
ggactctggcaaaaagaga

SEQ ID NO: 708575 - DNA, 19 bp, Mus musculus
  siRNA target sequence for Lgals12 (NM_019516.1,504-522).
gaggtgaaggtgagtgtaa

SEQ ID NO: 708576 - DNA, 19 bp, Mus musculus
  siRNA target sequence for Lgals12 (NM_019516.1,558-576).
ccactgtcacgggtagata

SEQ ID NO: 708577 - DNA, 19 bp, Mus musculus
  siRNA target sequence for Lgals12 (NM_019516.1,568-586).
gggtagatacccttgacat

SEQ ID NO: 708578 - DNA, 19 bp, Mus musculus
  siRNA target sequence for Lgals12 (NM_019516.1,569-587).
ggtagatacccttgacata

SEQ ID NO: 708579 - DNA, 19 bp, Mus musculus
  siRNA target sequence for Lgals12 (NM_019516.1,570-588).
gtagatacccttgacatat

SEQ ID NO: 708580 - DNA, 19 bp, Mus musculus
  siRNA target sequence for Lgals12 (NM_019516.1,589-607).
ctggtgacatcttggtaaa

SEQ ID NO: 708581 - DNA, 19 bp, Mus musculus
  siRNA target sequence for Lgals12 (NM_019516.1,736-754).
ggcctgggcaagtcattgt

SEQ ID NO: 708582 - DNA, 19 bp, Mus musculus
  siRNA target sequence for Lgals12 (NM_019516.1,739-757).
ctgggcaagtcattgtagt

SEQ ID NO: 708583 - DNA, 19 bp, Mus musculus
  siRNA target sequence for Lgals12 (NM_019516.1,760-778).
gaggactggtcttgaaaga

SEQ ID NO: 708584 - DNA, 19 bp, Mus musculus
  siRNA target sequence for Dscr2 (NM_019537.1,169-187).
cgaagacagacagaaacat

SEQ ID NO: 708585 - DNA, 19 bp, Mus musculus
  siRNA target sequence for Dscr2 (NM_019537.1,214-232).
cacccttgctccaagttta

SEQ ID NO: 708586 - DNA, 19 bp, Mus musculus
  siRNA target sequence for Dscr2 (NM_019537.1,217-235).
ccttgctccaagtttataa

SEQ ID NO: 708587 - DNA, 19 bp, Mus musculus
  siRNA target sequence for Dscr2 (NM_019537.1,287-305).
cgggagtctgggaagaagt

SEQ ID NO: 708588 - DNA, 19 bp, Mus musculus
  siRNA target sequence for Dscr2 (NM_019537.1,354-372).
ccgtctgtcccctacagat

SEQ ID NO: 708589 - DNA, 19 bp, Mus musculus
  siRNA target sequence for Dscr2 (NM_019537.1,407-425).
cctcggtttttctatgtca

SEQ ID NO: 708590 - DNA, 19 bp, Mus musculus
  siRNA target sequence for Dscr2 (NM_019537.1,481-499).
ggcttccaacccagaaaga

SEQ ID NO: 708591 - DNA, 19 bp, Mus musculus
  siRNA target sequence for Dscr2 (NM_019537.1,582-600).
cctgagagccctaaaaact

SEQ ID NO: 708592 - DNA, 19 bp, Mus musculus
  siRNA target sequence for Dscr2 (NM_019537.1,592-610).
ctaaaaactcagacattca

SEQ ID NO: 708593 - DNA, 19 bp, Mus musculus
  siRNA target sequence for Dscr2 (NM_019537.1,681-699).
ctactgtcaagtatggaaa

SEQ ID NO: 708594 - DNA, 19 bp, Mus musculus
  siRNA target sequence for Dscr2 (NM_019537.1,703-721).
cctgcggttctgtatctgt

SEQ ID NO: 708595 - DNA, 19 bp, Mus musculus
  siRNA target sequence for Dscr2 (NM_019537.1,751-769).
gtcacggttgaagctttta

SEQ ID NO: 708596 - DNA, 19 bp, Mus musculus
  siRNA target sequence for Dscr2 (NM_019537.1,846-864).
gatgaccacaaatgagatt

SEQ ID NO: 708597 - DNA, 19 bp, Mus musculus
  siRNA target sequence for Plac1 (NM_019538.3,732-750).
caccttatgtctacaatca

SEQ ID NO: 708598 - DNA, 19 bp, Mus musculus
  siRNA target sequence for Pfpl (NM_019540.1,203-221).
gaccacagtggcatatgct

SEQ ID NO: 708599 - DNA, 19 bp, Mus musculus
  siRNA target sequence for Pfpl (NM_019540.1,243-261).
gagatccatgagtatggtt

SEQ ID NO: 708600 - DNA, 19 bp, Mus musculus
  siRNA target sequence for Pfpl (NM_019540.1,269-287).
gtgccagaatgctctgaat

SEQ ID NO: 708601 - DNA, 19 bp, Mus musculus
  siRNA target sequence for Pfpl (NM_019540.1,471-489).
ctggattcctgggagaatt

SEQ ID NO: 708602 - DNA, 19 bp, Mus musculus
  siRNA target sequence for Pfpl (NM_019540.1,491-509).
ccgaagcactacttccttt

SEQ ID NO: 708603 - DNA, 19 bp, Mus musculus
  siRNA target sequence for Pfpl (NM_019540.1,496-514).
gcactacttccttttccat

SEQ ID NO: 708604 - DNA, 19 bp, Mus musculus
  siRNA target sequence for Pfpl (NM_019540.1,497-515).
cactacttccttttccatt

SEQ ID NO: 708605 - DNA, 19 bp, Mus musculus
  siRNA target sequence for Pfpl (NM_019540.1,518-536).
cttgaatctcgattatcgt

SEQ ID NO: 708606 - DNA, 19 bp, Mus musculus
  siRNA target sequence for Pfpl (NM_019540.1,613-631).
cacgagctcaggtgagaaa

SEQ ID NO: 708607 - DNA, 19 bp, Mus musculus
  siRNA target sequence for Pfpl (NM_019540.1,647-665).
gaaagccaacccaaatgca

SEQ ID NO: 708608 - DNA, 19 bp, Mus musculus
  siRNA target sequence for Pfpl (NM_019540.1,689-707).
ggagctcatggaaatctgt

SEQ ID NO: 708609 - DNA, 19 bp, Mus musculus
  siRNA target sequence for Pfpl (NM_019540.1,838-856).
cctcctatcttaagaacaa

SEQ ID NO: 708610 - DNA, 19 bp, Mus musculus
  siRNA target sequence for Pfpl (NM_019540.1,898-916).
ctttcgcaaaggttgtgaa

SEQ ID NO: 708611 - DNA, 19 bp, Mus musculus
  siRNA target sequence for Pfpl (NM_019540.1,985-1003).
gttctagggttcagagtat

SEQ ID NO: 708612 - DNA, 19 bp, Mus musculus
  siRNA target sequence for Pfpl (NM_019540.1,1179-1197).
gctgcggaaagctattaca

SEQ ID NO: 708613 - DNA, 19 bp, Mus musculus
  siRNA target sequence for Pfpl (NM_019540.1,1180-1198).
ctgcggaaagctattacaa

SEQ ID NO: 708614 - DNA, 19 bp, Mus musculus
  siRNA target sequence for Pfpl (NM_019540.1,1182-1200).
gcggaaagctattacaact

SEQ ID NO: 708615 - DNA, 19 bp, Mus musculus
  siRNA target sequence for Pfpl (NM_019540.1,1183-1201).
cggaaagctattacaactt

SEQ ID NO: 708616 - DNA, 19 bp, Mus musculus
  siRNA target sequence for Pfpl (NM_019540.1,1185-1203).
gaaagctattacaacttta

SEQ ID NO: 708617 - DNA, 19 bp, Mus musculus
  siRNA target sequence for Pfpl (NM_019540.1,1212-1230).
ccaggctgcacaaatatca

SEQ ID NO: 708618 - DNA, 19 bp, Mus musculus
  siRNA target sequence for Pfpl (NM_019540.1,1215-1233).
ggctgcacaaatatcaact

SEQ ID NO: 708619 - DNA, 19 bp, Mus musculus
  siRNA target sequence for Pfpl (NM_019540.1,1229-1247).
caactcccccaactttgat

SEQ ID NO: 708620 - DNA, 19 bp, Mus musculus
  siRNA target sequence for Pfpl (NM_019540.1,1270-1288).
gctcttgtgatggtaaact

SEQ ID NO: 708621 - DNA, 19 bp, Mus musculus
  siRNA target sequence for Pfpl (NM_019540.1,1317-1335).
cagttgtgccgtcaattat

SEQ ID NO: 708622 - DNA, 19 bp, Mus musculus
  siRNA target sequence for Pfpl (NM_019540.1,1319-1337).
gttgtgccgtcaattatca

SEQ ID NO: 708623 - DNA, 19 bp, Mus musculus
  siRNA target sequence for Pfpl (NM_019540.1,1339-1357).
ggcatgattacgatgacat

SEQ ID NO: 708624 - DNA, 19 bp, Mus musculus
  siRNA target sequence for Pfpl (NM_019540.1,1350-1368).
gatgacatgtgcctagatt

SEQ ID NO: 708625 - DNA, 19 bp, Mus musculus
  siRNA target sequence for Pfpl (NM_019540.1,1355-1373).
catgtgcctagatttccat

SEQ ID NO: 708626 - DNA, 19 bp, Mus musculus
  siRNA target sequence for Pfpl (NM_019540.1,1445-1463).
ccatgagaagggttatact

SEQ ID NO: 708627 - DNA, 19 bp, Mus musculus
  siRNA target sequence for Pfpl (NM_019540.1,1454-1472).
gggttatactggaatggaa

SEQ ID NO: 708628 - DNA, 19 bp, Mus musculus
  siRNA target sequence for Pfpl (NM_019540.1,1455-1473).
ggttatactggaatggaat

SEQ ID NO: 708629 - DNA, 19 bp, Mus musculus
  siRNA target sequence for Pfpl (NM_019540.1,1464-1482).
ggaatggaatgtagagata

SEQ ID NO: 708630 - DNA, 19 bp, Mus musculus
  siRNA target sequence for Pfpl (NM_019540.1,1465-1483).
gaatggaatgtagagataa

SEQ ID NO: 708631 - DNA, 19 bp, Mus musculus
  siRNA target sequence for Pfpl (NM_019540.1,1502-1520).
ctgtcgtacatcgtgtaaa

SEQ ID NO: 708632 - DNA, 19 bp, Mus musculus
  siRNA target sequence for Pfpl (NM_019540.1,1504-1522).
gtcgtacatcgtgtaaaga

SEQ ID NO: 708633 - DNA, 19 bp, Mus musculus
  siRNA target sequence for Pfpl (NM_019540.1,1507-1525).
gtacatcgtgtaaagatga

SEQ ID NO: 708634 - DNA, 19 bp, Mus musculus
  siRNA target sequence for Pfpl (NM_019540.1,1541-1559).
ggctgaagttagctcttat

SEQ ID NO: 708635 - DNA, 19 bp, Mus musculus
  siRNA target sequence for Pfpl (NM_019540.1,1545-1563).
gaagttagctcttattggt

SEQ ID NO: 708636 - DNA, 19 bp, Mus musculus
  siRNA target sequence for Pfpl (NM_019540.1,1708-1726).
gtgtttctctggatcatga

SEQ ID NO: 708637 - DNA, 19 bp, Mus musculus
  siRNA target sequence for Pfpl (NM_019540.1,1862-1880).
gctcgctgcgatcattgat

SEQ ID NO: 708638 - DNA, 19 bp, Mus musculus
  siRNA target sequence for Pfpl (NM_019540.1,1954-1972).
cttacactcagctacctat

SEQ ID NO: 708639 - DNA, 19 bp, Mus musculus
  siRNA target sequence for Pfpl (NM_019540.1,1958-1976).
cactcagctacctatgagt

SEQ ID NO: 708640 - DNA, 19 bp, Mus musculus
  siRNA target sequence for Pfpl (NM_019540.1,2007-2025).
ggggagagtcccatatcct

SEQ ID NO: 708641 - DNA, 19 bp, Mus musculus
  siRNA target sequence for Pfpl (NM_019540.1,2057-2075).
cctagaggagtcatcaaaa

SEQ ID NO: 708642 - DNA, 19 bp, Mus musculus
  siRNA target sequence for Pfpl (NM_019540.1,2058-2076).
ctagaggagtcatcaaaaa

SEQ ID NO: 708643 - DNA, 19 bp, Mus musculus
  siRNA target sequence for Pfpl (NM_019540.1,2101-2119).
ctgctgcaatcacaattgt

SEQ ID NO: 708644 - DNA, 19 bp, Mus musculus
  siRNA target sequence for Pfpl (NM_019540.1,2120-2138).
ggttatcctagcattagga

SEQ ID NO: 708645 - DNA, 19 bp, Mus musculus
  siRNA target sequence for Pfpl (NM_019540.1,2212-2230).
ggcattgcttccttttcca

SEQ ID NO: 708646 - DNA, 19 bp, Mus musculus
  siRNA target sequence for Pfpl (NM_019540.1,2223-2241).
cttttccaagagttagagt

SEQ ID NO: 708647 - DNA, 19 bp, Mus musculus
  siRNA target sequence for Pfpl (NM_019540.1,2384-2402).
cgcaaccgaaagaaggttt

SEQ ID NO: 708648 - DNA, 19 bp, Mus musculus
  siRNA target sequence for Pfpl (NM_019540.1,2385-2403).
gcaaccgaaagaaggtttt

SEQ ID NO: 708649 - DNA, 19 bp, Mus musculus
  siRNA target sequence for Pfpl (NM_019540.1,2395-2413).
gaaggttttttataacttt

SEQ ID NO: 708650 - DNA, 19 bp, Mus musculus
  siRNA target sequence for Dscr5 (NM_019543.2,326-344).
gtcgccattgccagaaaga

SEQ ID NO: 708651 - DNA, 19 bp, Mus musculus
  siRNA target sequence for Dscr5 (NM_019543.2,335-353).
gccagaaagagcgatttat

SEQ ID NO: 708652 - DNA, 19 bp, Mus musculus
  siRNA target sequence for Dscr5 (NM_019543.2,363-381).
cttttcctaagctcacaat

SEQ ID NO: 708653 - DNA, 19 bp, Mus musculus
  siRNA target sequence for Dscr5 (NM_019543.2,408-426).
gctttcgttcccgaatctt

SEQ ID NO: 708654 - DNA, 19 bp, Mus musculus
  siRNA target sequence for Dscr5 (NM_019543.2,413-431).
cgttcccgaatcttggtta

SEQ ID NO: 708655 - DNA, 19 bp, Mus musculus
  siRNA target sequence for Dscr5 (NM_019543.2,414-432).
gttcccgaatcttggttaa

SEQ ID NO: 708656 - DNA, 19 bp, Mus musculus
  siRNA target sequence for Dscr5 (NM_019543.2,417-435).
cccgaatcttggttaaact

SEQ ID NO: 708657 - DNA, 19 bp, Mus musculus
  siRNA target sequence for Dscr5 (NM_019543.2,448-466).
cttactggcctcaaaaata

SEQ ID NO: 708658 - DNA, 19 bp, Mus musculus
  siRNA target sequence for Dscr5 (NM_019543.2,485-503).
cgtctacctccttatcaca

SEQ ID NO: 708659 - DNA, 19 bp, Mus musculus
  siRNA target sequence for Dscr5 (NM_019543.2,491-509).
cctccttatcacagttgta

SEQ ID NO: 708660 - DNA, 19 bp, Mus musculus
  siRNA target sequence for Dscr5 (NM_019543.2,492-510).
ctccttatcacagttgtaa

SEQ ID NO: 708661 - DNA, 19 bp, Mus musculus
  siRNA target sequence for Dscr5 (NM_019543.2,500-518).
cacagttgtaattggttat

SEQ ID NO: 708662 - DNA, 19 bp, Mus musculus
  siRNA target sequence for Dscr5 (NM_019543.2,531-549).
ggaatcaacatgatgagta

SEQ ID NO: 708663 - DNA, 19 bp, Mus musculus
  siRNA target sequence for Dscr5 (NM_019543.2,578-596).
cacagataactatgctaaa

SEQ ID NO: 708664 - DNA, 19 bp, Mus musculus
  siRNA target sequence for Dscr5 (NM_019543.2,580-598).
cagataactatgctaaaaa

SEQ ID NO: 708665 - DNA, 19 bp, Mus musculus
  siRNA target sequence for Dscr5 (NM_019543.2,641-659).
gagagatgtccccattagt

SEQ ID NO: 708666 - DNA, 19 bp, Mus musculus
  siRNA target sequence for Dscr5 (NM_019543.2,643-661).
gagatgtccccattagtga

SEQ ID NO: 708667 - DNA, 19 bp, Mus musculus
  siRNA target sequence for Dscr5 (NM_019543.2,648-666).
gtccccattagtgaagtaa

SEQ ID NO: 708668 - DNA, 19 bp, Mus musculus
  siRNA target sequence for Dscr5 (NM_019543.2,652-670).
ccattagtgaagtaaacaa

SEQ ID NO: 708669 - DNA, 19 bp, Mus musculus
  siRNA target sequence for Dscr5 (NM_019543.2,684-702).
ggagccaaagaactcaata

SEQ ID NO: 708670 - DNA, 19 bp, Mus musculus
  siRNA target sequence for Dscr5 (NM_019543.2,687-705).
gccaaagaactcaatacct

SEQ ID NO: 708671 - DNA, 19 bp, Mus musculus
  siRNA target sequence for Hdac7a (NM_019572.2,559-577).
cttcggcaacttctcaata

SEQ ID NO: 708672 - DNA, 19 bp, Mus musculus
  siRNA target sequence for Hdac7a (NM_019572.2,837-855).
cctgaagttgcgctacaaa

SEQ ID NO: 708673 - DNA, 19 bp, Mus musculus
  siRNA target sequence for Hdac7a (NM_019572.2,847-865).
cgctacaaacccaagaaat

SEQ ID NO: 708674 - DNA, 19 bp, Mus musculus
  siRNA target sequence for Hdac7a (NM_019572.2,986-1004).
ggtgcagctcccctaatga

SEQ ID NO: 708675 - DNA, 19 bp, Mus musculus
  siRNA target sequence for Hdac7a (NM_019572.2,1053-1071).
ccgcaggacccattcaact

SEQ ID NO: 708676 - DNA, 19 bp, Mus musculus
  siRNA target sequence for Hdac7a (NM_019572.2,1054-1072).
cgcaggacccattcaactt

SEQ ID NO: 708677 - DNA, 19 bp, Mus musculus
  siRNA target sequence for Hdac7a (NM_019572.2,1056-1074).
caggacccattcaacttta

SEQ ID NO: 708678 - DNA, 19 bp, Mus musculus
  siRNA target sequence for Hdac7a (NM_019572.2,1295-1313).
gcctccatcgaccacttaa

SEQ ID NO: 708679 - DNA, 19 bp, Mus musculus
  siRNA target sequence for Hdac7a (NM_019572.2,1464-1482).
gccccgactgcgacagata

SEQ ID NO: 708680 - DNA, 19 bp, Mus musculus
  siRNA target sequence for Hdac7a (NM_019572.2,1521-1539).
gggacctatggcgaatgat

SEQ ID NO: 708681 - DNA, 19 bp, Mus musculus
  siRNA target sequence for Hdac7a (NM_019572.2,1576-1594).
gagggcagaggctccattt

SEQ ID NO: 708682 - DNA, 19 bp, Mus musculus
  siRNA target sequence for Hdac7a (NM_019572.2,1578-1596).
gggcagaggctccatttct

SEQ ID NO: 708683 - DNA, 19 bp, Mus musculus
  siRNA target sequence for Hdac7a (NM_019572.2,1811-1829).
ctacagggctggtctatga

SEQ ID NO: 708684 - DNA, 19 bp, Mus musculus
  siRNA target sequence for Hdac7a (NM_019572.2,2033-2051).
cactcagccgcctcaaact

SEQ ID NO: 708685 - DNA, 19 bp, Mus musculus
  siRNA target sequence for Hdac7a (NM_019572.2,2039-2057).
gccgcctcaaactggataa

SEQ ID NO: 708686 - DNA, 19 bp, Mus musculus
  siRNA target sequence for Hdac7a (NM_019572.2,2080-2098).
gcacagcggacgtttgtga

SEQ ID NO: 708687 - DNA, 19 bp, Mus musculus
  siRNA target sequence for Hdac7a (NM_019572.2,2081-2099).
cacagcggacgtttgtgat

SEQ ID NO: 708688 - DNA, 19 bp, Mus musculus
  siRNA target sequence for Hdac7a (NM_019572.2,2193-2211).
cgaccttgccttcaaagta

SEQ ID NO: 708689 - DNA, 19 bp, Mus musculus
  siRNA target sequence for Hdac7a (NM_019572.2,2262-2280).
ccatgcagatcattctaca

SEQ ID NO: 708690 - DNA, 19 bp, Mus musculus
  siRNA target sequence for Hdac7a (NM_019572.2,2419-2437).
cccagtgtgctctacattt

SEQ ID NO: 708691 - DNA, 19 bp, Mus musculus
  siRNA target sequence for Hdac7a (NM_019572.2,2449-2467).
catgacgacggcaacttct

SEQ ID NO: 708692 - DNA, 19 bp, Mus musculus
  siRNA target sequence for Hdac7a (NM_019572.2,2507-2525).
gtggcgagggcttcaatgt

SEQ ID NO: 708693 - DNA, 19 bp, Mus musculus
  siRNA target sequence for Hdac7a (NM_019572.2,2604-2622).
gcccattgcccgagagttt

SEQ ID NO: 708694 - DNA, 19 bp, Mus musculus
  siRNA target sequence for Hdac7a (NM_019572.2,2726-2744).
cgcagcagttgatgaactt

SEQ ID NO: 708695 - DNA, 19 bp, Mus musculus
  siRNA target sequence for Hdac7a (NM_019572.2,2844-2862).
ggtggaccccctttcagaa

SEQ ID NO: 708696 - DNA, 19 bp, Mus musculus
  siRNA target sequence for Hdac7a (NM_019572.2,2917-2935).
gtcagggtgcacaggaaat

SEQ ID NO: 708697 - DNA, 19 bp, Mus musculus
  siRNA target sequence for Hdac7a (NM_019572.2,3026-3044).
cgctggcatccctttctgt

SEQ ID NO: 708698 - DNA, 19 bp, Mus musculus
  siRNA target sequence for Scamp4 (NM_019575.3,198-216).
ctaccggctgtggatgttt

SEQ ID NO: 708699 - DNA, 19 bp, Mus musculus
  siRNA target sequence for Scamp4 (NM_019575.3,202-220).
cggctgtggatgttttact

SEQ ID NO: 708700 - DNA, 19 bp, Mus musculus
  siRNA target sequence for Scamp4 (NM_019575.3,272-290).
gcggagctggtgccaattt

SEQ ID NO: 708701 - DNA, 19 bp, Mus musculus
  siRNA target sequence for Scamp4 (NM_019575.3,344-362).
ggttccggcctgcatacaa

SEQ ID NO: 708702 - DNA, 19 bp, Mus musculus
  siRNA target sequence for Scamp4 (NM_019575.3,370-388).
cgagccgacagctccttta

SEQ ID NO: 708703 - DNA, 19 bp, Mus musculus
  siRNA target sequence for Scamp4 (NM_019575.3,371-389).
gagccgacagctcctttaa

SEQ ID NO: 708704 - DNA, 19 bp, Mus musculus
  siRNA target sequence for Scamp4 (NM_019575.3,373-391).
gccgacagctcctttaact

SEQ ID NO: 708705 - DNA, 19 bp, Mus musculus
  siRNA target sequence for Scamp4 (NM_019575.3,374-392).
ccgacagctcctttaactt

SEQ ID NO: 708706 - DNA, 19 bp, Mus musculus
  siRNA target sequence for Scamp4 (NM_019575.3,383-401).
cctttaacttcatgacatt

SEQ ID NO: 708707 - DNA, 19 bp, Mus musculus
  siRNA target sequence for Scamp4 (NM_019575.3,677-695).
cgagggaggcccagtttaa

SEQ ID NO: 708708 - DNA, 19 bp, Mus musculus
  siRNA target sequence for Scamp4 (NM_019575.3,681-699).
ggaggcccagtttaacagt

SEQ ID NO: 708709 - DNA, 19 bp, Mus musculus
  siRNA target sequence for Scamp4 (NM_019575.3,682-700).
gaggcccagtttaacagtt

SEQ ID NO: 708710 - DNA, 19 bp, Mus musculus
  siRNA target sequence for Scamp4 (NM_019575.3,685-703).
gcccagtttaacagtttct

SEQ ID NO: 708711 - DNA, 19 bp, Mus musculus
  siRNA target sequence for Thsd1 (NM_019576.1,248-266).
cggactcttaccactaagt

SEQ ID NO: 708712 - DNA, 19 bp, Mus musculus
  siRNA target sequence for Thsd1 (NM_019576.1,249-267).
ggactcttaccactaagta

SEQ ID NO: 708713 - DNA, 19 bp, Mus musculus
  siRNA target sequence for Thsd1 (NM_019576.1,329-347).
ggtgactactggtttgtaa

SEQ ID NO: 708714 - DNA, 19 bp, Mus musculus
  siRNA target sequence for Thsd1 (NM_019576.1,330-348).
gtgactactggtttgtaat

SEQ ID NO: 708715 - DNA, 19 bp, Mus musculus
  siRNA target sequence for Thsd1 (NM_019576.1,352-370).
cccggaagtgacagacaat

SEQ ID NO: 708716 - DNA, 19 bp, Mus musculus
  siRNA target sequence for Thsd1 (NM_019576.1,412-430).
ggtagaatggcctgtcttt

SEQ ID NO: 708717 - DNA, 19 bp, Mus musculus
  siRNA target sequence for Thsd1 (NM_019576.1,421-439).
gcctgtctttcacattgat

SEQ ID NO: 708718 - DNA, 19 bp, Mus musculus
  siRNA target sequence for Thsd1 (NM_019576.1,422-440).
cctgtctttcacattgatt

SEQ ID NO: 708719 - DNA, 19 bp, Mus musculus
  siRNA target sequence for Thsd1 (NM_019576.1,462-480).
cagaaggcacctttcaagt

SEQ ID NO: 708720 - DNA, 19 bp, Mus musculus
  siRNA target sequence for Thsd1 (NM_019576.1,476-494).
caagtgggtgtttttacca

SEQ ID NO: 708721 - DNA, 19 bp, Mus musculus
  siRNA target sequence for Thsd1 (NM_019576.1,530-548).
gacatgctggtggatgtta

SEQ ID NO: 708722 - DNA, 19 bp, Mus musculus
  siRNA target sequence for Thsd1 (NM_019576.1,668-686).
ggggtggaagcctacgtta

SEQ ID NO: 708723 - DNA, 19 bp, Mus musculus
  siRNA target sequence for Thsd1 (NM_019576.1,706-724).
gggtcaagactcagtcatt

SEQ ID NO: 708724 - DNA, 19 bp, Mus musculus
  siRNA target sequence for Thsd1 (NM_019576.1,726-744).
cttctacgggacctattga

SEQ ID NO: 708725 - DNA, 19 bp, Mus musculus
  siRNA target sequence for Thsd1 (NM_019576.1,738-756).
ctattgacctggctcaaaa

SEQ ID NO: 708726 - DNA, 19 bp, Mus musculus
  siRNA target sequence for Thsd1 (NM_019576.1,943-961).
ggtgttcaactgcacttta

SEQ ID NO: 708727 - DNA, 19 bp, Mus musculus
  siRNA target sequence for Thsd1 (NM_019576.1,971-989).
gggaagaacaaatactgtt

SEQ ID NO: 708728 - DNA, 19 bp, Mus musculus
  siRNA target sequence for Thsd1 (NM_019576.1,1385-1403).
cgccacaactccatccatt

SEQ ID NO: 708729 - DNA, 19 bp, Mus musculus
  siRNA target sequence for Thsd1 (NM_019576.1,1510-1528).
cacgggcatcccattgact

SEQ ID NO: 708730 - DNA, 19 bp, Mus musculus
  siRNA target sequence for Thsd1 (NM_019576.1,1512-1530).
cgggcatcccattgactta

SEQ ID NO: 708731 - DNA, 19 bp, Mus musculus
  siRNA target sequence for Thsd1 (NM_019576.1,1792-1810).
ccgaatcaaatctccattt

SEQ ID NO: 708732 - DNA, 19 bp, Mus musculus
  siRNA target sequence for Thsd1 (NM_019576.1,1903-1921).
gaccctgatccgaaagtca

SEQ ID NO: 708733 - DNA, 19 bp, Mus musculus
  siRNA target sequence for Thsd1 (NM_019576.1,1909-1927).
gatccgaaagtcacagata

SEQ ID NO: 708734 - DNA, 19 bp, Mus musculus
  siRNA target sequence for Thsd1 (NM_019576.1,1913-1931).
cgaaagtcacagataaggt

SEQ ID NO: 708735 - DNA, 19 bp, Mus musculus
  siRNA target sequence for Thsd1 (NM_019576.1,2102-2120).
gaccagatggaggatagat

SEQ ID NO: 708736 - DNA, 19 bp, Mus musculus
  siRNA target sequence for Thsd1 (NM_019576.1,2104-2122).
ccagatggaggatagatgt

SEQ ID NO: 708737 - DNA, 19 bp, Mus musculus
  siRNA target sequence for Thsd1 (NM_019576.1,2204-2222).
ggtccactctccaaatcct

SEQ ID NO: 708738 - DNA, 19 bp, Mus musculus
  siRNA target sequence for Thsd1 (NM_019576.1,2205-2223).
gtccactctccaaatccta

SEQ ID NO: 708739 - DNA, 19 bp, Mus musculus
  siRNA target sequence for Thsd1 (NM_019576.1,2364-2382).
cccccattttcctcaaaga

SEQ ID NO: 708740 - DNA, 19 bp, Mus musculus
  siRNA target sequence for Thsd1 (NM_019576.1,2381-2399).
gatagctaccagaaagtca

SEQ ID NO: 708741 - DNA, 19 bp, Mus musculus
  siRNA target sequence for Thsd1 (NM_019576.1,2457-2475).
ccgagttcgccttctatga

SEQ ID NO: 708742 - DNA, 19 bp, Mus musculus
  siRNA target sequence for Thsd1 (NM_019576.1,2459-2477).
gagttcgccttctatgaca

SEQ ID NO: 708743 - DNA, 19 bp, Mus musculus
  siRNA target sequence for Thsd1 (NM_019576.1,2461-2479).
gttcgccttctatgacaat

SEQ ID NO: 708744 - DNA, 19 bp, Mus musculus
  siRNA target sequence for Thsd1 (NM_019576.1,2465-2483).
gccttctatgacaatacct

SEQ ID NO: 708745 - DNA, 19 bp, Mus musculus
  siRNA target sequence for Thsd1 (NM_019576.1,2551-2569).
ggacgaaaccacaagtaca

SEQ ID NO: 708746 - DNA, 19 bp, Mus musculus
  siRNA target sequence for Thsd1 (NM_019576.1,2568-2586).
cactcagtgtggagaagtt

SEQ ID NO: 708747 - DNA, 19 bp, Mus musculus
  siRNA target sequence for 1200003M13Rik (NM_019580.3,383-401).
ggacatcgagtttacttct

SEQ ID NO: 708748 - DNA, 19 bp, Mus musculus
  siRNA target sequence for 1200003M13Rik (NM_019580.3,386-404).
catcgagtttacttctgat

SEQ ID NO: 708749 - DNA, 19 bp, Mus musculus
  siRNA target sequence for 1200003M13Rik (NM_019580.3,414-432).
gtcttgatgcacgataaca

SEQ ID NO: 708750 - DNA, 19 bp, Mus musculus
  siRNA target sequence for 1200003M13Rik (NM_019580.3,422-440).
gcacgataacacagtagat

SEQ ID NO: 708751 - DNA, 19 bp, Mus musculus
  siRNA target sequence for 1200003M13Rik (NM_019580.3,423-441).
cacgataacacagtagata

SEQ ID NO: 708752 - DNA, 19 bp, Mus musculus
  siRNA target sequence for 1200003M13Rik (NM_019580.3,452-470).
cgggtctggccgactatgt

SEQ ID NO: 708753 - DNA, 19 bp, Mus musculus
  siRNA target sequence for 1200003M13Rik (NM_019580.3,463-481).
gactatgtgatctgacatt

SEQ ID NO: 708754 - DNA, 19 bp, Mus musculus
  siRNA target sequence for 1200003M13Rik (NM_019580.3,469-487).
gtgatctgacatttgaaca

SEQ ID NO: 708755 - DNA, 19 bp, Mus musculus
  siRNA target sequence for 1200003M13Rik (NM_019580.3,483-501).
gaacaagttaggaaactta

SEQ ID NO: 708756 - DNA, 19 bp, Mus musculus
  siRNA target sequence for 1200003M13Rik (NM_019580.3,633-651).
gcttctgctgctctaaaga

SEQ ID NO: 708757 - DNA, 19 bp, Mus musculus
  siRNA target sequence for 1200003M13Rik (NM_019580.3,637-655).
ctgctgctctaaagaatat

SEQ ID NO: 708758 - DNA, 19 bp, Mus musculus
  siRNA target sequence for 1200003M13Rik (NM_019580.3,640-658).
ctgctctaaagaatatata

SEQ ID NO: 708759 - DNA, 19 bp, Mus musculus
  siRNA target sequence for 1200003M13Rik (NM_019580.3,704-722).
cttgccggaagtcatctat

SEQ ID NO: 708760 - DNA, 19 bp, Mus musculus
  siRNA target sequence for 1200003M13Rik (NM_019580.3,707-725).
gccggaagtcatctataaa

SEQ ID NO: 708761 - DNA, 19 bp, Mus musculus
  siRNA target sequence for 1200003M13Rik (NM_019580.3,804-822).
cctcgctacagcgtctttt

SEQ ID NO: 708762 - DNA, 19 bp, Mus musculus
  siRNA target sequence for 1200003M13Rik (NM_019580.3,807-825).
cgctacagcgtcttttgga

SEQ ID NO: 708763 - DNA, 19 bp, Mus musculus
  siRNA target sequence for 1200003M13Rik (NM_019580.3,808-826).
gctacagcgtcttttggaa

SEQ ID NO: 708764 - DNA, 19 bp, Mus musculus
  siRNA target sequence for 1200003M13Rik (NM_019580.3,930-948).
gtctccccggactatttga

SEQ ID NO: 708765 - DNA, 19 bp, Mus musculus
  siRNA target sequence for 1200003M13Rik (NM_019580.3,936-954).
ccggactatttgaagaagt

SEQ ID NO: 708766 - DNA, 19 bp, Mus musculus
  siRNA target sequence for 1200003M13Rik (NM_019580.3,978-996).
gtgagttggactgtcaata

SEQ ID NO: 708767 - DNA, 19 bp, Mus musculus
  siRNA target sequence for 1200003M13Rik (NM_019580.3,1029-1047).
cttgggtccagctacatca

SEQ ID NO: 708768 - DNA, 19 bp, Mus musculus
  siRNA target sequence for 1200003M13Rik (NM_019580.3,1048-1066).
ctgacagcatgctagaaga

SEQ ID NO: 708769 - DNA, 19 bp, Mus musculus
  siRNA target sequence for Prpmp5 (NM_019628.1,73-91).
gatgaaggcattagttata

SEQ ID NO: 708770 - DNA, 19 bp, Mus musculus
  siRNA target sequence for Prpmp5 (NM_019628.1,93-111).
gggtgataatagttctaga

SEQ ID NO: 708771 - DNA, 19 bp, Mus musculus
  siRNA target sequence for Prpmp5 (NM_019628.1,154-172).
cagcctagacctaagcata

SEQ ID NO: 708772 - DNA, 19 bp, Mus musculus
  siRNA target sequence for Prp15 (NM_019629.1,81-99).
ggaagcaggtgatgaactt

SEQ ID NO: 708773 - DNA, 19 bp, Mus musculus
  siRNA target sequence for LOC56304 (NM_019633.1,20-38).
cggcagccgctggattgtt

SEQ ID NO: 708774 - DNA, 19 bp, Mus musculus
  siRNA target sequence for LOC56304 (NM_019633.1,22-40).
gcagccgctggattgttat

SEQ ID NO: 708775 - DNA, 19 bp, Mus musculus
  siRNA target sequence for LOC56304 (NM_019633.1,23-41).
cagccgctggattgttatt

SEQ ID NO: 708776 - DNA, 19 bp, Mus musculus
  siRNA target sequence for LOC56304 (NM_019633.1,26-44).
ccgctggattgttattact

SEQ ID NO: 708777 - DNA, 19 bp, Mus musculus
  siRNA target sequence for LOC56304 (NM_019633.1,162-180).
caacatgtactgggtaaaa

SEQ ID NO: 708778 - DNA, 19 bp, Mus musculus
  siRNA target sequence for LOC56304 (NM_019633.1,207-225).
gattggaattttttatcca

SEQ ID NO: 708779 - DNA, 19 bp, Mus musculus
  siRNA target sequence for LOC56304 (NM_019633.1,777-795).
gaccaagctcgagataaga

SEQ ID NO: 708780 - DNA, 19 bp, Mus musculus
  siRNA target sequence for LOC56304 (NM_019633.1,779-797).
ccaagctcgagataagaga

SEQ ID NO: 708781 - DNA, 19 bp, Mus musculus
  siRNA target sequence for LOC56304 (NM_019633.1,801-819).
caaagacgatgacgataaa

SEQ ID NO: 708782 - DNA, 19 bp, Mus musculus
  siRNA target sequence for Tbc1d1 (NM_019636.1,587-605).
ctcagcgtgtgcacaaact

SEQ ID NO: 708783 - DNA, 19 bp, Mus musculus
  siRNA target sequence for Tbc1d1 (NM_019636.1,589-607).
cagcgtgtgcacaaactga

SEQ ID NO: 708784 - DNA, 19 bp, Mus musculus
  siRNA target sequence for Tbc1d1 (NM_019636.1,593-611).
gtgtgcacaaactgattca

SEQ ID NO: 708785 - DNA, 19 bp, Mus musculus
  siRNA target sequence for Tbc1d1 (NM_019636.1,695-713).
cagacgatcaaacaaaagt

SEQ ID NO: 708786 - DNA, 19 bp, Mus musculus
  siRNA target sequence for Tbc1d1 (NM_019636.1,782-800).
ccgagttcgacgatacctt

SEQ ID NO: 708787 - DNA, 19 bp, Mus musculus
  siRNA target sequence for Tbc1d1 (NM_019636.1,793-811).
gataccttcgccaaaaagt

SEQ ID NO: 708788 - DNA, 19 bp, Mus musculus
  siRNA target sequence for Tbc1d1 (NM_019636.1,855-873).
ggccccacccgcactgatt

SEQ ID NO: 708789 - DNA, 19 bp, Mus musculus
  siRNA target sequence for Tbc1d1 (NM_019636.1,857-875).
ccccacccgcactgattga

SEQ ID NO: 708790 - DNA, 19 bp, Mus musculus
  siRNA target sequence for Tbc1d1 (NM_019636.1,866-884).
cactgattgacgagtgtat

SEQ ID NO: 708791 - DNA, 19 bp, Mus musculus
  siRNA target sequence for Tbc1d1 (NM_019636.1,965-983).
ggcccatgcgcaaatcctt

SEQ ID NO: 708792 - DNA, 19 bp, Mus musculus
  siRNA target sequence for Tbc1d1 (NM_019636.1,1042-1060).
cgcagtagcacctttagct

SEQ ID NO: 708793 - DNA, 19 bp, Mus musculus
  siRNA target sequence for Tbc1d1 (NM_019636.1,1061-1079).
cctttgacaatgacataga

SEQ ID NO: 708794 - DNA, 19 bp, Mus musculus
  siRNA target sequence for Tbc1d1 (NM_019636.1,1181-1199).
gtcctgacaccaaaaagat

SEQ ID NO: 708795 - DNA, 19 bp, Mus musculus
  siRNA target sequence for Tbc1d1 (NM_019636.1,1252-1270).
catgtggaccactttggat

SEQ ID NO: 708796 - DNA, 19 bp, Mus musculus
  siRNA target sequence for Tbc1d1 (NM_019636.1,1297-1315).
ggcagtggcggctttcatt

SEQ ID NO: 708797 - DNA, 19 bp, Mus musculus
  siRNA target sequence for Tbc1d1 (NM_019636.1,1299-1317).
cagtggcggctttcatttt

SEQ ID NO: 708798 - DNA, 19 bp, Mus musculus
  siRNA target sequence for Tbc1d1 (NM_019636.1,1303-1321).
ggcggctttcattttgtct

SEQ ID NO: 708799 - DNA, 19 bp, Mus musculus
  siRNA target sequence for Tbc1d1 (NM_019636.1,1483-1501).
gagggaatgaattcatcta

SEQ ID NO: 708800 - DNA, 19 bp, Mus musculus
  siRNA target sequence for Tbc1d1 (NM_019636.1,1546-1564).
caggagcaggccaccatat

SEQ ID NO: 708801 - DNA, 19 bp, Mus musculus
  siRNA target sequence for Tbc1d1 (NM_019636.1,1599-1617).
gcagcgagagaatgaatta

SEQ ID NO: 708802 - DNA, 19 bp, Mus musculus
  siRNA target sequence for Tbc1d1 (NM_019636.1,1751-1769).
ggttagattcgctgaagaa

SEQ ID NO: 708803 - DNA, 19 bp, Mus musculus
  siRNA target sequence for Tbc1d1 (NM_019636.1,1775-1793).
caaagaggtccttaacaga

SEQ ID NO: 708804 - DNA, 19 bp, Mus musculus
  siRNA target sequence for Tbc1d1 (NM_019636.1,1866-1884).
ggacagctccacttctagt

SEQ ID NO: 708805 - DNA, 19 bp, Mus musculus
  siRNA target sequence for Tbc1d1 (NM_019636.1,1869-1887).
cagctccacttctagtact

SEQ ID NO: 708806 - DNA, 19 bp, Mus musculus
  siRNA target sequence for Tbc1d1 (NM_019636.1,1872-1890).
ctccacttctagtactcta

SEQ ID NO: 708807 - DNA, 19 bp, Mus musculus
  siRNA target sequence for Tbc1d1 (NM_019636.1,1875-1893).
cacttctagtactctaagt

SEQ ID NO: 708808 - DNA, 19 bp, Mus musculus
  siRNA target sequence for Tbc1d1 (NM_019636.1,1877-1895).
cttctagtactctaagtaa

SEQ ID NO: 708809 - DNA, 19 bp, Mus musculus
  siRNA target sequence for Tbc1d1 (NM_019636.1,2056-2074).
gccaacaccctgagtcatt

SEQ ID NO: 708810 - DNA, 19 bp, Mus musculus
  siRNA target sequence for Tbc1d1 (NM_019636.1,2179-2197).
gaacgcaaggactttgaat

SEQ ID NO: 708811 - DNA, 19 bp, Mus musculus
  siRNA target sequence for Tbc1d1 (NM_019636.1,2188-2206).
gactttgaatccaaagcaa

SEQ ID NO: 708812 - DNA, 19 bp, Mus musculus
  siRNA target sequence for Tbc1d1 (NM_019636.1,2307-2325).
ctccccgagcagatatgaa

SEQ ID NO: 708813 - DNA, 19 bp, Mus musculus
  siRNA target sequence for Tbc1d1 (NM_019636.1,2312-2330).
cgagcagatatgaagatta

SEQ ID NO: 708814 - DNA, 19 bp, Mus musculus
  siRNA target sequence for Tbc1d1 (NM_019636.1,2313-2331).
gagcagatatgaagattat

SEQ ID NO: 708815 - DNA, 19 bp, Mus musculus
  siRNA target sequence for Tbc1d1 (NM_019636.1,2509-2527).
caagcctctgaaaacgatt

SEQ ID NO: 708816 - DNA, 19 bp, Mus musculus
  siRNA target sequence for Tbc1d1 (NM_019636.1,2513-2531).
cctctgaaaacgatttgct

SEQ ID NO: 708817 - DNA, 19 bp, Mus musculus
  siRNA target sequence for Tbc1d1 (NM_019636.1,2540-2558).
gcctcaagcttgactatga

SEQ ID NO: 708818 - DNA, 19 bp, Mus musculus
  siRNA target sequence for Tbc1d1 (NM_019636.1,2565-2583).
cactccgtgtcttaaagaa

SEQ ID NO: 708819 - DNA, 19 bp, Mus musculus
  siRNA target sequence for Tbc1d1 (NM_019636.1,2624-2642).
gatccaaaattaagtttga

SEQ ID NO: 708820 - DNA, 19 bp, Mus musculus
  siRNA target sequence for Tbc1d1 (NM_019636.1,2692-2710).
cgaggtgagatctggaaat

SEQ ID NO: 708821 - DNA, 19 bp, Mus musculus
  siRNA target sequence for Tbc1d1 (NM_019636.1,2826-2844).
cgacctcgggcgaaccttt

SEQ ID NO: 708822 - DNA, 19 bp, Mus musculus
  siRNA target sequence for Tbc1d1 (NM_019636.1,2830-2848).
ctcgggcgaacctttccaa

SEQ ID NO: 708823 - DNA, 19 bp, Mus musculus
  siRNA target sequence for Tbc1d1 (NM_019636.1,2878-2896).
gcaggtcagctgtcacttt

SEQ ID NO: 708824 - DNA, 19 bp, Mus musculus
  siRNA target sequence for Tbc1d1 (NM_019636.1,3051-3069).
gtatcggccagacatgatt

SEQ ID NO: 708825 - DNA, 19 bp, Mus musculus
  siRNA target sequence for Tbc1d1 (NM_019636.1,3055-3073).
cggccagacatgattattt

SEQ ID NO: 708826 - DNA, 19 bp, Mus musculus
  siRNA target sequence for Tbc1d1 (NM_019636.1,3056-3074).
ggccagacatgattatttt

SEQ ID NO: 708827 - DNA, 19 bp, Mus musculus
  siRNA target sequence for Tbc1d1 (NM_019636.1,3098-3116).
cacggctcctccacgatta

SEQ ID NO: 708828 - DNA, 19 bp, Mus musculus
  siRNA target sequence for Tbc1d1 (NM_019636.1,3226-3244).
gccagagtctttgatatga

SEQ ID NO: 708829 - DNA, 19 bp, Mus musculus
  siRNA target sequence for Tbc1d1 (NM_019636.1,3230-3248).
gagtctttgatatgatctt

SEQ ID NO: 708830 - DNA, 19 bp, Mus musculus
  siRNA target sequence for Tbc1d1 (NM_019636.1,3255-3273).
gggatcagaggtcatattt

SEQ ID NO: 708831 - DNA, 19 bp, Mus musculus
  siRNA target sequence for Tbc1d1 (NM_019636.1,3256-3274).
ggatcagaggtcatattta

SEQ ID NO: 708832 - DNA, 19 bp, Mus musculus
  siRNA target sequence for Tbc1d1 (NM_019636.1,3257-3275).
gatcagaggtcatatttaa

SEQ ID NO: 708833 - DNA, 19 bp, Mus musculus
  siRNA target sequence for Tbc1d1 (NM_019636.1,3267-3285).
catatttaaagtagcttta

SEQ ID NO: 708834 - DNA, 19 bp, Mus musculus
  siRNA target sequence for Tbc1d1 (NM_019636.1,3297-3315).
gagccataagcccttgatt

SEQ ID NO: 708835 - DNA, 19 bp, Mus musculus
  siRNA target sequence for Tbc1d1 (NM_019636.1,3300-3318).
ccataagcccttgattcta

SEQ ID NO: 708836 - DNA, 19 bp, Mus musculus
  siRNA target sequence for Tbc1d1 (NM_019636.1,3614-3632).
ccacggtagagaaacttct

SEQ ID NO: 708837 - DNA, 19 bp, Mus musculus
  siRNA target sequence for Tbc1d1 (NM_019636.1,3615-3633).
cacggtagagaaacttctt

SEQ ID NO: 708838 - DNA, 19 bp, Mus musculus
  siRNA target sequence for Rpn2 (NM_019642.3,257-275).
ctgttggccctgacaatca

SEQ ID NO: 708839 - DNA, 19 bp, Mus musculus
  siRNA target sequence for Rpn2 (NM_019642.3,437-455).
gcgtgtaccttcatcaagt

SEQ ID NO: 708840 - DNA, 19 bp, Mus musculus
  siRNA target sequence for Rpn2 (NM_019642.3,468-486).
ccagcaacgtggattctct

SEQ ID NO: 708841 - DNA, 19 bp, Mus musculus
  siRNA target sequence for Rpn2 (NM_019642.3,515-533).
ctctcaggctgtgagatat

SEQ ID NO: 708842 - DNA, 19 bp, Mus musculus
  siRNA target sequence for Rpn2 (NM_019642.3,517-535).
ctcaggctgtgagatatct

SEQ ID NO: 708843 - DNA, 19 bp, Mus musculus
  siRNA target sequence for Rpn2 (NM_019642.3,521-539).
ggctgtgagatatctgttt

SEQ ID NO: 708844 - DNA, 19 bp, Mus musculus
  siRNA target sequence for Rpn2 (NM_019642.3,844-862).
gctcacggcgctgtttgtt

SEQ ID NO: 708845 - DNA, 19 bp, Mus musculus
  siRNA target sequence for Rpn2 (NM_019642.3,942-960).
caatcttcagcaagaagaa

SEQ ID NO: 708846 - DNA, 19 bp, Mus musculus
  siRNA target sequence for Rpn2 (NM_019642.3,1048-1066).
gcccgagggctctacttct

SEQ ID NO: 708847 - DNA, 19 bp, Mus musculus
  siRNA target sequence for Rpn2 (NM_019642.3,1097-1115).
caggtcagcaatgttttgt

SEQ ID NO: 708848 - DNA, 19 bp, Mus musculus
  siRNA target sequence for Rpn2 (NM_019642.3,1203-1221).
cgcttgtggggaatgtttt

SEQ ID NO: 708849 - DNA, 19 bp, Mus musculus
  siRNA target sequence for Rpn2 (NM_019642.3,1217-1235).
gtttttgagctaaacttca

SEQ ID NO: 708850 - DNA, 19 bp, Mus musculus
  siRNA target sequence for Rpn2 (NM_019642.3,1225-1243).
gctaaacttcaagaatgtt

SEQ ID NO: 708851 - DNA, 19 bp, Mus musculus
  siRNA target sequence for Rpn2 (NM_019642.3,1226-1244).
ctaaacttcaagaatgtta

SEQ ID NO: 708852 - DNA, 19 bp, Mus musculus
  siRNA target sequence for Rpn2 (NM_019642.3,1289-1307).
gacagccgttacattgcaa

SEQ ID NO: 708853 - DNA, 19 bp, Mus musculus
  siRNA target sequence for Rpn2 (NM_019642.3,1294-1312).
ccgttacattgcaaacact

SEQ ID NO: 708854 - DNA, 19 bp, Mus musculus
  siRNA target sequence for Rpn2 (NM_019642.3,1316-1334).
gagcttcgagtcaagatct

SEQ ID NO: 708855 - DNA, 19 bp, Mus musculus
  siRNA target sequence for Rpn2 (NM_019642.3,1525-1543).
gacgtttgttcgacttcat

SEQ ID NO: 708856 - DNA, 19 bp, Mus musculus
  siRNA target sequence for Rpn2 (NM_019642.3,1527-1545).
cgtttgttcgacttcataa

SEQ ID NO: 708857 - DNA, 19 bp, Mus musculus
  siRNA target sequence for Rpn2 (NM_019642.3,1582-1600).
gccagataacaagaatgta

SEQ ID NO: 708858 - DNA, 19 bp, Mus musculus
  siRNA target sequence for Rpn2 (NM_019642.3,1584-1602).
cagataacaagaatgtata

SEQ ID NO: 708859 - DNA, 19 bp, Mus musculus
  siRNA target sequence for Rpn2 (NM_019642.3,1718-1736).
gtggctgacgtggttatca

SEQ ID NO: 708860 - DNA, 19 bp, Mus musculus
  siRNA target sequence for Rpn2 (NM_019642.3,1721-1739).
gctgacgtggttatcaagt

SEQ ID NO: 708861 - DNA, 19 bp, Mus musculus
  siRNA target sequence for Rpn2 (NM_019642.3,1722-1740).
ctgacgtggttatcaagtt

SEQ ID NO: 708862 - DNA, 19 bp, Mus musculus
  siRNA target sequence for Rpn2 (NM_019642.3,1779-1797).
gcctgtttaccccaaaaca

SEQ ID NO: 708863 - DNA, 19 bp, Mus musculus
  siRNA target sequence for Rpn2 (NM_019642.3,1842-1860).
cagtggtgtccaatacatt

SEQ ID NO: 708864 - DNA, 19 bp, Mus musculus
  siRNA target sequence for Rpn2 (NM_019642.3,1844-1862).
gtggtgtccaatacattca

SEQ ID NO: 708865 - DNA, 19 bp, Mus musculus
  siRNA target sequence for Rpn2 (NM_019642.3,1910-1928).
cggattggagccaatgtct

SEQ ID NO: 708866 - DNA, 19 bp, Mus musculus
  siRNA target sequence for Rpn2 (NM_019642.3,1943-1961).
gctcctagcacagttatct

SEQ ID NO: 708867 - DNA, 19 bp, Mus musculus
  siRNA target sequence for Rpn2 (NM_019642.3,1944-1962).
ctcctagcacagttatctt

SEQ ID NO: 708868 - DNA, 19 bp, Mus musculus
  siRNA target sequence for Rpn2 (NM_019642.3,1980-1998).
cgatgctgggcctcatgta

SEQ ID NO: 708869 - DNA, 19 bp, Mus musculus
  siRNA target sequence for Rpn2 (NM_019642.3,2007-2025).
ggactcagctcaacatgtt

SEQ ID NO: 708870 - DNA, 19 bp, Mus musculus
  siRNA target sequence for Eif3s8 (NM_019646.1,840-858).
cctttcacctgcacatcaa

SEQ ID NO: 708871 - DNA, 19 bp, Mus musculus
  siRNA target sequence for Shoc2 (NM_019658.2,576-594).
ccaccatcagtcaaagagt

SEQ ID NO: 708872 - DNA, 19 bp, Mus musculus
  siRNA target sequence for Shoc2 (NM_019658.2,577-595).
caccatcagtcaaagagtt

SEQ ID NO: 708873 - DNA, 19 bp, Mus musculus
  siRNA target sequence for Shoc2 (NM_019658.2,598-616).
ctcaactcacagaacttta

SEQ ID NO: 708874 - DNA, 19 bp, Mus musculus
  siRNA target sequence for Shoc2 (NM_019658.2,600-618).
caactcacagaactttatt

SEQ ID NO: 708875 - DNA, 19 bp, Mus musculus
  siRNA target sequence for Shoc2 (NM_019658.2,653-671).
ggtgggctgtctagtcaat

SEQ ID NO: 708876 - DNA, 19 bp, Mus musculus
  siRNA target sequence for Shoc2 (NM_019658.2,657-675).
ggctgtctagtcaatctca

SEQ ID NO: 708877 - DNA, 19 bp, Mus musculus
  siRNA target sequence for Shoc2 (NM_019658.2,717-735).
gactctcttgataacttga

SEQ ID NO: 708878 - DNA, 19 bp, Mus musculus
  siRNA target sequence for Shoc2 (NM_019658.2,740-758).
gctgcggatgcttgattta

SEQ ID NO: 708879 - DNA, 19 bp, Mus musculus
  siRNA target sequence for Shoc2 (NM_019658.2,749-767).
gcttgatttacggcataat

SEQ ID NO: 708880 - DNA, 19 bp, Mus musculus
  siRNA target sequence for Shoc2 (NM_019658.2,750-768).
cttgatttacggcataata

SEQ ID NO: 708881 - DNA, 19 bp, Mus musculus
  siRNA target sequence for Shoc2 (NM_019658.2,817-835).
ctctctatcttcgctttaa

SEQ ID NO: 708882 - DNA, 19 bp, Mus musculus
  siRNA target sequence for Shoc2 (NM_019658.2,828-846).
cgctttaatcgcataacta

SEQ ID NO: 708883 - DNA, 19 bp, Mus musculus
  siRNA target sequence for Shoc2 (NM_019658.2,922-940).
ctgctgaaattggtgaatt

SEQ ID NO: 708884 - DNA, 19 bp, Mus musculus
  siRNA target sequence for Shoc2 (NM_019658.2,956-974).
cctggatgtagctcacaat

SEQ ID NO: 708885 - DNA, 19 bp, Mus musculus
  siRNA target sequence for Shoc2 (NM_019658.2,959-977).
ggatgtagctcacaatcaa

SEQ ID NO: 708886 - DNA, 19 bp, Mus musculus
  siRNA target sequence for Shoc2 (NM_019658.2,1002-1020).
ggaaactgcacacagataa

SEQ ID NO: 708887 - DNA, 19 bp, Mus musculus
  siRNA target sequence for Shoc2 (NM_019658.2,1050-1068).
ctggacctcccagatacaa

SEQ ID NO: 708888 - DNA, 19 bp, Mus musculus
  siRNA target sequence for Shoc2 (NM_019658.2,1052-1070).
ggacctcccagatacaata

SEQ ID NO: 708889 - DNA, 19 bp, Mus musculus
  siRNA target sequence for Shoc2 (NM_019658.2,1055-1073).
cctcccagatacaatagga

SEQ ID NO: 708890 - DNA, 19 bp, Mus musculus
  siRNA target sequence for Shoc2 (NM_019658.2,1056-1074).
ctcccagatacaataggaa

SEQ ID NO: 708891 - DNA, 19 bp, Mus musculus
  siRNA target sequence for Shoc2 (NM_019658.2,1095-1113).
cttggcctgagatacaata

SEQ ID NO: 708892 - DNA, 19 bp, Mus musculus
  siRNA target sequence for Shoc2 (NM_019658.2,1098-1116).
ggcctgagatacaatagat

SEQ ID NO: 708893 - DNA, 19 bp, Mus musculus
  siRNA target sequence for Shoc2 (NM_019658.2,1101-1119).
ctgagatacaatagattgt

SEQ ID NO: 708894 - DNA, 19 bp, Mus musculus
  siRNA target sequence for Shoc2 (NM_019658.2,1103-1121).
gagatacaatagattgtca

SEQ ID NO: 708895 - DNA, 19 bp, Mus musculus
  siRNA target sequence for Shoc2 (NM_019658.2,1109-1127).
caatagattgtcagcaata

SEQ ID NO: 708896 - DNA, 19 bp, Mus musculus
  siRNA target sequence for Shoc2 (NM_019658.2,1178-1196).
caataacatttctactcta

SEQ ID NO: 708897 - DNA, 19 bp, Mus musculus
  siRNA target sequence for Shoc2 (NM_019658.2,1192-1210).
ctctaccagagagtctttt

SEQ ID NO: 708898 - DNA, 19 bp, Mus musculus
  siRNA target sequence for Shoc2 (NM_019658.2,1197-1215).
ccagagagtcttttatcca

SEQ ID NO: 708899 - DNA, 19 bp, Mus musculus
  siRNA target sequence for Shoc2 (NM_019658.2,1214-1232).
cagtcttgtaaaattgaat

SEQ ID NO: 708900 - DNA, 19 bp, Mus musculus
  siRNA target sequence for Shoc2 (NM_019658.2,1218-1236).
cttgtaaaattgaatagct

SEQ ID NO: 708901 - DNA, 19 bp, Mus musculus
  siRNA target sequence for Shoc2 (NM_019658.2,1234-1252).
gcttgaccttagctagaaa

SEQ ID NO: 708902 - DNA, 19 bp, Mus musculus
  siRNA target sequence for Shoc2 (NM_019658.2,1240-1258).
ccttagctagaaattgctt

SEQ ID NO: 708903 - DNA, 19 bp, Mus musculus
  siRNA target sequence for Shoc2 (NM_019658.2,1249-1267).
gaaattgcttccagttata

SEQ ID NO: 708904 - DNA, 19 bp, Mus musculus
  siRNA target sequence for Shoc2 (NM_019658.2,1278-1296).
ggtccatctcagttttcca

SEQ ID NO: 708905 - DNA, 19 bp, Mus musculus
  siRNA target sequence for Shoc2 (NM_019658.2,1287-1305).
cagttttccaccatttatt

SEQ ID NO: 708906 - DNA, 19 bp, Mus musculus
  siRNA target sequence for Shoc2 (NM_019658.2,1320-1338).
cacaatcgaatcaacaaaa

SEQ ID NO: 708907 - DNA, 19 bp, Mus musculus
  siRNA target sequence for Shoc2 (NM_019658.2,1360-1378).
gagctaaagtgttaagtaa

SEQ ID NO: 708908 - DNA, 19 bp, Mus musculus
  siRNA target sequence for Shoc2 (NM_019658.2,1368-1386).
gtgttaagtaagctgaata

SEQ ID NO: 708909 - DNA, 19 bp, Mus musculus
  siRNA target sequence for Shoc2 (NM_019658.2,1432-1450).
ggaccagtatggtagaatt

SEQ ID NO: 708910 - DNA, 19 bp, Mus musculus
  siRNA target sequence for Shoc2 (NM_019658.2,1459-1477).
cgactaatcagctcacaaa

SEQ ID NO: 708911 - DNA, 19 bp, Mus musculus
  siRNA target sequence for Shoc2 (NM_019658.2,1512-1530).
gaggttctgatcttatcga

SEQ ID NO: 708912 - DNA, 19 bp, Mus musculus
  siRNA target sequence for Shoc2 (NM_019658.2,1528-1546).
cgaacaaccttctaaagaa

SEQ ID NO: 708913 - DNA, 19 bp, Mus musculus
  siRNA target sequence for Shoc2 (NM_019658.2,1638-1656).
ctcaaggatctgcagaaat

SEQ ID NO: 708914 - DNA, 19 bp, Mus musculus
  siRNA target sequence for Shoc2 (NM_019658.2,1650-1668).
cagaaattagtcttgacaa

SEQ ID NO: 708915 - DNA, 19 bp, Mus musculus
  siRNA target sequence for Shoc2 (NM_019658.2,1696-1714).
gcatcggtcaccttaccaa

SEQ ID NO: 708916 - DNA, 19 bp, Mus musculus
  siRNA target sequence for Shoc2 (NM_019658.2,1917-1935).
ggagggccttcgttcatta

SEQ ID NO: 708917 - DNA, 19 bp, Mus musculus
  siRNA target sequence for Shoc2 (NM_019658.2,1949-1967).
gatgcagggtccatatcgt

SEQ ID NO: 708918 - DNA, 19 bp, Mus musculus
  siRNA target sequence for 0610042I15Rik (NM_019661.2,138-156).
cgacgtgtcttcctttagt

SEQ ID NO: 708919 - DNA, 19 bp, Mus musculus
  siRNA target sequence for 0610042I15Rik (NM_019661.2,139-157).
gacgtgtcttcctttagtt

SEQ ID NO: 708920 - DNA, 19 bp, Mus musculus
  siRNA target sequence for 0610042I15Rik (NM_019661.2,186-204).
catgacctttacaagtcaa

SEQ ID NO: 708921 - DNA, 19 bp, Mus musculus
  siRNA target sequence for 0610042I15Rik (NM_019661.2,191-209).
cctttacaagtcaactgat

SEQ ID NO: 708922 - DNA, 19 bp, Mus musculus
  siRNA target sequence for 0610042I15Rik (NM_019661.2,375-393).
caagcaggtggatagaata

SEQ ID NO: 708923 - DNA, 19 bp, Mus musculus
  siRNA target sequence for 0610042I15Rik (NM_019661.2,379-397).
caggtggatagaatagact

SEQ ID NO: 708924 - DNA, 19 bp, Mus musculus
  siRNA target sequence for 0610042I15Rik (NM_019661.2,436-454).
ctggacgatcaccttagta

SEQ ID NO: 708925 - DNA, 19 bp, Mus musculus
  siRNA target sequence for 0610042I15Rik (NM_019661.2,438-456).
ggacgatcaccttagtaaa

SEQ ID NO: 708926 - DNA, 19 bp, Mus musculus
  siRNA target sequence for 0610042I15Rik (NM_019661.2,439-457).
gacgatcaccttagtaaat

SEQ ID NO: 708927 - DNA, 19 bp, Mus musculus
  siRNA target sequence for 0610042I15Rik (NM_019661.2,507-525).
ggacgagaccaaaatcatt

SEQ ID NO: 708928 - DNA, 19 bp, Mus musculus
  siRNA target sequence for 0610042I15Rik (NM_019661.2,557-575).
gaggcgagaagcttgatga

SEQ ID NO: 708929 - DNA, 19 bp, Mus musculus
  siRNA target sequence for 0610042I15Rik (NM_019661.2,607-625).
cagtcgaaagccttctata

SEQ ID NO: 708930 - DNA, 19 bp, Mus musculus
  siRNA target sequence for 0610042I15Rik (NM_019661.2,609-627).
gtcgaaagccttctataaa

SEQ ID NO: 708931 - DNA, 19 bp, Mus musculus
  siRNA target sequence for Arl6 (NM_019665.2,283-301).
gtttgcttggcctgaagaa

SEQ ID NO: 708932 - DNA, 19 bp, Mus musculus
  siRNA target sequence for Arl6 (NM_019665.2,333-351).
gataacagtgggaaaacca

SEQ ID NO: 708933 - DNA, 19 bp, Mus musculus
  siRNA target sequence for Arl6 (NM_019665.2,377-395).
caacgctcaatctcaagat

SEQ ID NO: 708934 - DNA, 19 bp, Mus musculus
  siRNA target sequence for Arl6 (NM_019665.2,380-398).
cgctcaatctcaagatata

SEQ ID NO: 708935 - DNA, 19 bp, Mus musculus
  siRNA target sequence for Arl6 (NM_019665.2,399-417).
gttccaaccataggattta

SEQ ID NO: 708936 - DNA, 19 bp, Mus musculus
  siRNA target sequence for Arl6 (NM_019665.2,411-429).
ggatttagcatagagaaat

SEQ ID NO: 708937 - DNA, 19 bp, Mus musculus
  siRNA target sequence for Arl6 (NM_019665.2,487-505).
ggaatctctgggaacacta

SEQ ID NO: 708938 - DNA, 19 bp, Mus musculus
  siRNA target sequence for Arl6 (NM_019665.2,496-514).
gggaacactattataaaga

SEQ ID NO: 708939 - DNA, 19 bp, Mus musculus
  siRNA target sequence for Arl6 (NM_019665.2,497-515).
ggaacactattataaagat

SEQ ID NO: 708940 - DNA, 19 bp, Mus musculus
  siRNA target sequence for Arl6 (NM_019665.2,513-531).
gatggacaagccattattt

SEQ ID NO: 708941 - DNA, 19 bp, Mus musculus
  siRNA target sequence for Arl6 (NM_019665.2,517-535).
gacaagccattatttttgt

SEQ ID NO: 708942 - DNA, 19 bp, Mus musculus
  siRNA target sequence for Arl6 (NM_019665.2,519-537).
caagccattatttttgtca

SEQ ID NO: 708943 - DNA, 19 bp, Mus musculus
  siRNA target sequence for Arl6 (NM_019665.2,618-636).
cgtcgaattccaatcttgt

SEQ ID NO: 708944 - DNA, 19 bp, Mus musculus
  siRNA target sequence for Arl6 (NM_019665.2,619-637).
gtcgaattccaatcttgtt

SEQ ID NO: 708945 - DNA, 19 bp, Mus musculus
  siRNA target sequence for Arl6 (NM_019665.2,621-639).
cgaattccaatcttgttct

SEQ ID NO: 708946 - DNA, 19 bp, Mus musculus
  siRNA target sequence for Arl6 (NM_019665.2,627-645).
ccaatcttgttctttgcaa

SEQ ID NO: 708947 - DNA, 19 bp, Mus musculus
  siRNA target sequence for Arl6 (NM_019665.2,628-646).
caatcttgttctttgcaaa

SEQ ID NO: 708948 - DNA, 19 bp, Mus musculus
  siRNA target sequence for Arl6 (NM_019665.2,717-735).
gacaagccgtggcatattt

SEQ ID NO: 708949 - DNA, 19 bp, Mus musculus
  siRNA target sequence for Arl6 (NM_019665.2,719-737).
caagccgtggcatatttgt

SEQ ID NO: 708950 - DNA, 19 bp, Mus musculus
  siRNA target sequence for Net1 (NM_019671.1,196-214).
ggcagctccttcacatttt

SEQ ID NO: 708951 - DNA, 19 bp, Mus musculus
  siRNA target sequence for Net1 (NM_019671.1,226-244).
ccacactgggacttcactt

SEQ ID NO: 708952 - DNA, 19 bp, Mus musculus
  siRNA target sequence for Net1 (NM_019671.1,227-245).
cacactgggacttcacttt

SEQ ID NO: 708953 - DNA, 19 bp, Mus musculus
  siRNA target sequence for Net1 (NM_019671.1,240-258).
cactttgaaaagaaaacga

SEQ ID NO: 708954 - DNA, 19 bp, Mus musculus
  siRNA target sequence for Net1 (NM_019671.1,1490-1508).
cactgcaagccaatgatgt

SEQ ID NO: 708955 - DNA, 19 bp, Mus musculus
  siRNA target sequence for Net1 (NM_019671.1,1498-1516).
gccaatgatgtgttccata

SEQ ID NO: 708956 - DNA, 19 bp, Mus musculus
  siRNA target sequence for Net1 (NM_019671.1,1499-1517).
ccaatgatgtgttccataa

SEQ ID NO: 708957 - DNA, 19 bp, Mus musculus
  siRNA target sequence for Net1 (NM_019671.1,1768-1786).
cctcagcctggcttacgaa

SEQ ID NO: 708958 - DNA, 19 bp, Mus musculus
  siRNA target sequence for Tfg (NM_019678.1,247-265).
gattatcaaagctcaactt

SEQ ID NO: 708959 - DNA, 19 bp, Mus musculus
  siRNA target sequence for Tfg (NM_019678.1,257-275).
gctcaacttggggaagata

SEQ ID NO: 708960 - DNA, 19 bp, Mus musculus
  siRNA target sequence for Tfg (NM_019678.1,268-286).
ggaagatatccgacgaatt

SEQ ID NO: 708961 - DNA, 19 bp, Mus musculus
  siRNA target sequence for Tfg (NM_019678.1,277-295).
ccgacgaattcccattcat

SEQ ID NO: 708962 - DNA, 19 bp, Mus musculus
  siRNA target sequence for Tfg (NM_019678.1,278-296).
cgacgaattcccattcata

SEQ ID NO: 708963 - DNA, 19 bp, Mus musculus
  siRNA target sequence for Tfg (NM_019678.1,279-297).
gacgaattcccattcataa

SEQ ID NO: 708964 - DNA, 19 bp, Mus musculus
  siRNA target sequence for Tfg (NM_019678.1,302-320).
gacattacttacgatgaat

SEQ ID NO: 708965 - DNA, 19 bp, Mus musculus
  siRNA target sequence for Tfg (NM_019678.1,304-322).
cattacttacgatgaatta

SEQ ID NO: 708966 - DNA, 19 bp, Mus musculus
  siRNA target sequence for Tfg (NM_019678.1,314-332).
gatgaattagtgctaatga

SEQ ID NO: 708967 - DNA, 19 bp, Mus musculus
  siRNA target sequence for Tfg (NM_019678.1,331-349).
gatgcagcgagtattcaga

SEQ ID NO: 708968 - DNA, 19 bp, Mus musculus
  siRNA target sequence for Tfg (NM_019678.1,368-386).
gatgaagttacaataaagt

SEQ ID NO: 708969 - DNA, 19 bp, Mus musculus
  siRNA target sequence for Tfg (NM_019678.1,434-452).
ctttcctttgcaattcagt

SEQ ID NO: 708970 - DNA, 19 bp, Mus musculus
  siRNA target sequence for Tfg (NM_019678.1,443-461).
gcaattcagtgtagtagaa

SEQ ID NO: 708971 - DNA, 19 bp, Mus musculus
  siRNA target sequence for Tfg (NM_019678.1,449-467).
cagtgtagtagaatactga

SEQ ID NO: 708972 - DNA, 19 bp, Mus musculus
  siRNA target sequence for Tfg (NM_019678.1,451-469).
gtgtagtagaatactgaaa

SEQ ID NO: 708973 - DNA, 19 bp, Mus musculus
  siRNA target sequence for Tfg (NM_019678.1,459-477).
gaatactgaaactgacatt

SEQ ID NO: 708974 - DNA, 19 bp, Mus musculus
  siRNA target sequence for Tfg (NM_019678.1,491-509).
cagccaagaccccttgaat

SEQ ID NO: 708975 - DNA, 19 bp, Mus musculus
  siRNA target sequence for Tfg (NM_019678.1,506-524).
gaatcaagtcaggtgaaat

SEQ ID NO: 708976 - DNA, 19 bp, Mus musculus
  siRNA target sequence for Tfg (NM_019678.1,510-528).
caagtcaggtgaaatatct

SEQ ID NO: 708977 - DNA, 19 bp, Mus musculus
  siRNA target sequence for Tfg (NM_019678.1,539-557).
ctggtagaacttcgaaata

SEQ ID NO: 708978 - DNA, 19 bp, Mus musculus
  siRNA target sequence for Tfg (NM_019678.1,541-559).
ggtagaacttcgaaataaa

SEQ ID NO: 708979 - DNA, 19 bp, Mus musculus
  siRNA target sequence for Tfg (NM_019678.1,545-563).
gaacttcgaaataaagtga

SEQ ID NO: 708980 - DNA, 19 bp, Mus musculus
  siRNA target sequence for Tfg (NM_019678.1,560-578).
gtgaatcgcttattggata

SEQ ID NO: 708981 - DNA, 19 bp, Mus musculus
  siRNA target sequence for Tfg (NM_019678.1,568-586).
cttattggatagcttagaa

SEQ ID NO: 708982 - DNA, 19 bp, Mus musculus
  siRNA target sequence for Tfg (NM_019678.1,609-627).
ccaccagtattcctgaaaa

SEQ ID NO: 708983 - DNA, 19 bp, Mus musculus
  siRNA target sequence for Tfg (NM_019678.1,610-628).
caccagtattcctgaaaat

SEQ ID NO: 708984 - DNA, 19 bp, Mus musculus
  siRNA target sequence for Tfg (NM_019678.1,668-686).
gactcttctgggaaacagt

SEQ ID NO: 708985 - DNA, 19 bp, Mus musculus
  siRNA target sequence for Tfg (NM_019678.1,695-713).
gttatggcagcaagtatgt

SEQ ID NO: 708986 - DNA, 19 bp, Mus musculus
  siRNA target sequence for Tfg (NM_019678.1,913-931).
gacacaagcaggtcagatt

SEQ ID NO: 708987 - DNA, 19 bp, Mus musculus
  siRNA target sequence for Tfg (NM_019678.1,915-933).
cacaagcaggtcagattga

SEQ ID NO: 708988 - DNA, 19 bp, Mus musculus
  siRNA target sequence for Tfg (NM_019678.1,1016-1034).
cagtactcagctagttaca

SEQ ID NO: 708989 - DNA, 19 bp, Mus musculus
  siRNA target sequence for Tfg (NM_019678.1,1173-1191).
cttaccctccacaaacgta

SEQ ID NO: 708990 - DNA, 19 bp, Mus musculus
  siRNA target sequence for Tfg (NM_019678.1,1177-1195).
ccctccacaaacgtatact

SEQ ID NO: 708991 - DNA, 19 bp, Mus musculus
  siRNA target sequence for Tfg (NM_019678.1,1178-1196).
cctccacaaacgtatacta

SEQ ID NO: 708992 - DNA, 19 bp, Mus musculus
  siRNA target sequence for Tfg (NM_019678.1,1277-1295).
caaccaagaccaggtttta

SEQ ID NO: 708993 - DNA, 19 bp, Mus musculus
  siRNA target sequence for Tfg (NM_019678.1,1388-1406).
cctggacctggttatcgat

SEQ ID NO: 708994 - DNA, 19 bp, Mus musculus
  siRNA target sequence for Freq (NM_019681.1,162-180).
gcagttcttcccatttgga

SEQ ID NO: 708995 - DNA, 19 bp, Mus musculus
  siRNA target sequence for Freq (NM_019681.1,189-207).
caagttcgccacgtttgtt

SEQ ID NO: 708996 - DNA, 19 bp, Mus musculus
  siRNA target sequence for Freq (NM_019681.1,287-305).
ggaccctggatgaaaagct

SEQ ID NO: 708997 - DNA, 19 bp, Mus musculus
  siRNA target sequence for Freq (NM_019681.1,334-352).
gataacgatggctacatca

SEQ ID NO: 708998 - DNA, 19 bp, Mus musculus
  siRNA target sequence for Freq (NM_019681.1,444-462).
gagggtggaccggatcttt

SEQ ID NO: 708999 - DNA, 19 bp, Mus musculus
  siRNA target sequence for Gbif (NM_019683.2,161-179).
cagtttaaccagcttgaat

SEQ ID NO: 709000 - DNA, 19 bp, Mus musculus
  siRNA target sequence for Gbif (NM_019683.2,169-187).
ccagcttgaattgttgaaa

SEQ ID NO: 709001 - DNA, 19 bp, Mus musculus
  siRNA target sequence for Gbif (NM_019683.2,226-244).
ctgggtaggcaattctgat

SEQ ID NO: 709002 - DNA, 19 bp, Mus musculus
  siRNA target sequence for Gbif (NM_019683.2,304-322).
ggaaaaagatccaagcaaa

SEQ ID NO: 709003 - DNA, 19 bp, Mus musculus
  siRNA target sequence for Gbif (NM_019683.2,305-323).
gaaaaagatccaagcaaat

SEQ ID NO: 709004 - DNA, 19 bp, Mus musculus
  siRNA target sequence for Gbif (NM_019683.2,329-347).
ctttgggctgctgaaaaaa

SEQ ID NO: 709005 - DNA, 19 bp, Mus musculus
  siRNA target sequence for Gbif (NM_019683.2,386-404).
gccgctgaagtgaacacta

SEQ ID NO: 709006 - DNA, 19 bp, Mus musculus
  siRNA target sequence for Gbif (NM_019683.2,402-420).
ctagggatgaagatgagta

SEQ ID NO: 709007 - DNA, 19 bp, Mus musculus
  siRNA target sequence for Gbif (NM_019683.2,445-463).
cagtgggcatatagatgtt

SEQ ID NO: 709008 - DNA, 19 bp, Mus musculus
  siRNA target sequence for Gbif (NM_019683.2,447-465).
gtgggcatatagatgttgt

SEQ ID NO: 709009 - DNA, 19 bp, Mus musculus
  siRNA target sequence for Gbif (NM_019683.2,480-498).
ctaagggggcagatgttca

SEQ ID NO: 709010 - DNA, 19 bp, Mus musculus
  siRNA target sequence for Gbif (NM_019683.2,527-545).
ctgcatagtgcttgtaagt

SEQ ID NO: 709011 - DNA, 19 bp, Mus musculus
  siRNA target sequence for Gbif (NM_019683.2,556-574).
caaggtggcctctttctta

SEQ ID NO: 709012 - DNA, 19 bp, Mus musculus
  siRNA target sequence for Gbif (NM_019683.2,592-610).
catcaacgcccaaacgaaa

SEQ ID NO: 709013 - DNA, 19 bp, Mus musculus
  siRNA target sequence for Gbif (NM_019683.2,671-689).
ctcctcctgatgaatcgtt

SEQ ID NO: 709014 - DNA, 19 bp, Mus musculus
  siRNA target sequence for Gbif (NM_019683.2,747-765).
ggacaagcatctatcacta

SEQ ID NO: 709015 - DNA, 19 bp, Mus musculus
  siRNA target sequence for Gbif (NM_019683.2,779-797).
gcggaaggctgtacaaact

SEQ ID NO: 709016 - DNA, 19 bp, Mus musculus
  siRNA target sequence for Gbif (NM_019683.2,782-800).
gaaggctgtacaaactctt

SEQ ID NO: 709017 - DNA, 19 bp, Mus musculus
  siRNA target sequence for Dri2 (NM_019689.1,420-438).
caggctgcttccaaatatt

SEQ ID NO: 709018 - DNA, 19 bp, Mus musculus
  siRNA target sequence for Dri2 (NM_019689.1,532-550).
ctaaagaagaccataccaa

SEQ ID NO: 709019 - DNA, 19 bp, Mus musculus
  siRNA target sequence for Dri2 (NM_019689.1,694-712).
ccaagctgtatgaactaga

SEQ ID NO: 709020 - DNA, 19 bp, Mus musculus
  siRNA target sequence for Dri2 (NM_019689.1,816-834).
gacctgtacatgctgtata

SEQ ID NO: 709021 - DNA, 19 bp, Mus musculus
  siRNA target sequence for Dri2 (NM_019689.1,1001-1019).
gagctccccagctgaacta

SEQ ID NO: 709022 - DNA, 19 bp, Mus musculus
  siRNA target sequence for Dri2 (NM_019689.1,1003-1021).
gctccccagctgaactaca

SEQ ID NO: 709023 - DNA, 19 bp, Mus musculus
  siRNA target sequence for Dri2 (NM_019689.1,1553-1571).
cctgaccacaagcaacatt

SEQ ID NO: 709024 - DNA, 19 bp, Mus musculus
  siRNA target sequence for Dri2 (NM_019689.1,1565-1583).
caacattgggagcatcaat

SEQ ID NO: 709025 - DNA, 19 bp, Mus musculus
  siRNA target sequence for Clcnk1l (NM_019701.1,873-891).
gacttaccagagatcttct

SEQ ID NO: 709026 - DNA, 19 bp, Mus musculus
  siRNA target sequence for Clcnk1l (NM_019701.1,924-942).
ctgagctgcgggtacaact

SEQ ID NO: 709027 - DNA, 19 bp, Mus musculus
  siRNA target sequence for Clcnk1l (NM_019701.1,944-962).
cagccagcggactttctta

SEQ ID NO: 709028 - DNA, 19 bp, Mus musculus
  siRNA target sequence for Clcnk1l (NM_019701.1,1141-1159).
gggcactgatgactaagaa

SEQ ID NO: 709029 - DNA, 19 bp, Mus musculus
  siRNA target sequence for Clcnk1l (NM_019701.1,1358-1376).
ctttggggaggttctatct

SEQ ID NO: 709030 - DNA, 19 bp, Mus musculus
  siRNA target sequence for Clcnk1l (NM_019701.1,1678-1696).
ctgtgggtcacttcatgaa

SEQ ID NO: 709031 - DNA, 19 bp, Mus musculus
  siRNA target sequence for Clcnk1l (NM_019701.1,1807-1825).
ccctggtgggcgttgtaaa

SEQ ID NO: 709032 - DNA, 19 bp, Mus musculus
  siRNA target sequence for Clcnk1l (NM_019701.1,1808-1826).
cctggtgggcgttgtaaaa

SEQ ID NO: 709033 - DNA, 19 bp, Mus musculus
  siRNA target sequence for Clcnk1l (NM_019701.1,1812-1830).
gtgggcgttgtaaaaagga

SEQ ID NO: 709034 - DNA, 19 bp, Mus musculus
  siRNA target sequence for Clcnk1l (NM_019701.1,1965-1983).
catgagacacacaaccttt

SEQ ID NO: 709035 - DNA, 19 bp, Mus musculus
  siRNA target sequence for Rnf138 (NM_019706.1,329-347).
cgtcctacacggaagatga

SEQ ID NO: 709036 - DNA, 19 bp, Mus musculus
  siRNA target sequence for Rnf138 (NM_019706.1,330-348).
gtcctacacggaagatgat

SEQ ID NO: 709037 - DNA, 19 bp, Mus musculus
  siRNA target sequence for Rnf138 (NM_019706.1,435-453).
gactgcaatgagagaaagt

SEQ ID NO: 709038 - DNA, 19 bp, Mus musculus
  siRNA target sequence for Rnf138 (NM_019706.1,509-527).
cggaacgggccttagatct

SEQ ID NO: 709039 - DNA, 19 bp, Mus musculus
  siRNA target sequence for Rnf138 (NM_019706.1,510-528).
ggaacgggccttagatctt

SEQ ID NO: 709040 - DNA, 19 bp, Mus musculus
  siRNA target sequence for Rnf138 (NM_019706.1,514-532).
cgggccttagatcttgaaa

SEQ ID NO: 709041 - DNA, 19 bp, Mus musculus
  siRNA target sequence for Rnf138 (NM_019706.1,515-533).
gggccttagatcttgaaaa

SEQ ID NO: 709042 - DNA, 19 bp, Mus musculus
  siRNA target sequence for Rnf138 (NM_019706.1,516-534).
ggccttagatcttgaaaat

SEQ ID NO: 709043 - DNA, 19 bp, Mus musculus
  siRNA target sequence for Rnf138 (NM_019706.1,517-535).
gccttagatcttgaaaata

SEQ ID NO: 709044 - DNA, 19 bp, Mus musculus
  siRNA target sequence for Rnf138 (NM_019706.1,523-541).
gatcttgaaaatatcatga

SEQ ID NO: 709045 - DNA, 19 bp, Mus musculus
  siRNA target sequence for Kcmf1 (NM_019715.1,637-655).
ctacacggaaacatctctt

SEQ ID NO: 709046 - DNA, 19 bp, Mus musculus
  siRNA target sequence for Kcmf1 (NM_019715.1,640-658).
cacggaaacatctcttcaa

SEQ ID NO: 709047 - DNA, 19 bp, Mus musculus
  siRNA target sequence for Kcmf1 (NM_019715.1,642-660).
cggaaacatctcttcaaga

SEQ ID NO: 709048 - DNA, 19 bp, Mus musculus
  siRNA target sequence for Kcmf1 (NM_019715.1,784-802).
cagagcccctagagattta

SEQ ID NO: 709049 - DNA, 19 bp, Mus musculus
  siRNA target sequence for Kcmf1 (NM_019715.1,786-804).
gagcccctagagatttaga

SEQ ID NO: 709050 - DNA, 19 bp, Mus musculus
  siRNA target sequence for Kcmf1 (NM_019715.1,789-807).
cccctagagatttagatga

SEQ ID NO: 709051 - DNA, 19 bp, Mus musculus
  siRNA target sequence for Kcmf1 (NM_019715.1,790-808).
ccctagagatttagatgaa

SEQ ID NO: 709052 - DNA, 19 bp, Mus musculus
  siRNA target sequence for Kcmf1 (NM_019715.1,791-809).
cctagagatttagatgaat

SEQ ID NO: 709053 - DNA, 19 bp, Mus musculus
  siRNA target sequence for Kcmf1 (NM_019715.1,811-829).
gagtggtgttcgacatgta

SEQ ID NO: 709054 - DNA, 19 bp, Mus musculus
  siRNA target sequence for Kcmf1 (NM_019715.1,821-839).
cgacatgtacgtagaatgt

SEQ ID NO: 709055 - DNA, 19 bp, Mus musculus
  siRNA target sequence for Kcmf1 (NM_019715.1,822-840).
gacatgtacgtagaatgtt

SEQ ID NO: 709056 - DNA, 19 bp, Mus musculus
  siRNA target sequence for Kcmf1 (NM_019715.1,866-884).
cctcgtgctcggagatcaa

SEQ ID NO: 709057 - DNA, 19 bp, Mus musculus
  siRNA target sequence for Kcmf1 (NM_019715.1,867-885).
ctcgtgctcggagatcaaa

SEQ ID NO: 709058 - DNA, 19 bp, Mus musculus
  siRNA target sequence for Kcmf1 (NM_019715.1,968-986).
cctatagctgagctgttat

SEQ ID NO: 709059 - DNA, 19 bp, Mus musculus
  siRNA target sequence for Kcmf1 (NM_019715.1,1011-1029).
ctgcagggggacagcttaa

SEQ ID NO: 709060 - DNA, 19 bp, Mus musculus
  siRNA target sequence for Kcmf1 (NM_019715.1,1016-1034).
gggggacagcttaactctt

SEQ ID NO: 709061 - DNA, 19 bp, Mus musculus
  siRNA target sequence for Kcmf1 (NM_019715.1,1136-1154).
gcaagtcggcgcactaaca

SEQ ID NO: 709062 - DNA, 19 bp, Mus musculus
  siRNA target sequence for Kcmf1 (NM_019715.1,1249-1267).
cctgttaacaaggttgaat

SEQ ID NO: 709063 - DNA, 19 bp, Mus musculus
  siRNA target sequence for Kcmf1 (NM_019715.1,1252-1270).
gttaacaaggttgaatgat

SEQ ID NO: 709064 - DNA, 19 bp, Mus musculus
  siRNA target sequence for Kcmf1 (NM_019715.1,1260-1278).
ggttgaatgatcccaaaat

SEQ ID NO: 709065 - DNA, 19 bp, Mus musculus
  siRNA target sequence for Kcmf1 (NM_019715.1,1317-1335).
cggaccgcagcctgtttgt

SEQ ID NO: 709066 - DNA, 19 bp, Mus musculus
  siRNA target sequence for Kcmf1 (NM_019715.1,1422-1440).
ctatgggctgtgtagatat

SEQ ID NO: 709067 - DNA, 19 bp, Mus musculus
  siRNA target sequence for Stub1 (NM_019719.2,681-699).
cacttgtggcagtgtacta

SEQ ID NO: 709068 - DNA, 19 bp, Mus musculus
  siRNA target sequence for Stub1 (NM_019719.2,686-704).
gtggcagtgtactacacta

SEQ ID NO: 709069 - DNA, 19 bp, Mus musculus
  siRNA target sequence for Stub1 (NM_019719.2,711-729).
ccctgtgctatctgaagat

SEQ ID NO: 709070 - DNA, 19 bp, Mus musculus
  siRNA target sequence for Stub1 (NM_019719.2,826-844).
ggagatggagagttatgat

SEQ ID NO: 709071 - DNA, 19 bp, Mus musculus
  siRNA target sequence for Stub1 (NM_019719.2,901-919).
ctttggggatgatattcct

SEQ ID NO: 709072 - DNA, 19 bp, Mus musculus
  siRNA target sequence for Stub1 (NM_019719.2,921-939).
gtgcccttcgcattgctaa

SEQ ID NO: 709073 - DNA, 19 bp, Mus musculus
  siRNA target sequence for Stub1 (NM_019719.2,924-942).
cccttcgcattgctaagaa

SEQ ID NO: 709074 - DNA, 19 bp, Mus musculus
  siRNA target sequence for Stub1 (NM_019719.2,987-1005).
gtgagctgcattcatatct

SEQ ID NO: 709075 - DNA, 19 bp, Mus musculus
  siRNA target sequence for Stub1 (NM_019719.2,1057-1075).
gaaccacgagggtcatgaa

SEQ ID NO: 709076 - DNA, 19 bp, Mus musculus
  siRNA target sequence for Stub1 (NM_019719.2,1112-1130).
gaggccaagcacgataaat

SEQ ID NO: 709077 - DNA, 19 bp, Mus musculus
  siRNA target sequence for Stub1 (NM_019719.2,1185-1203).
gagatatccctgactactt

SEQ ID NO: 709078 - DNA, 19 bp, Mus musculus
  siRNA target sequence for Stub1 (NM_019719.2,1187-1205).
gatatccctgactacttgt

SEQ ID NO: 709079 - DNA, 19 bp, Mus musculus
  siRNA target sequence for Stub1 (NM_019719.2,1204-1222).
gtgtggcaagattagcttt

SEQ ID NO: 709080 - DNA, 19 bp, Mus musculus
  siRNA target sequence for Stub1 (NM_019719.2,1231-1249).
gcgggaaccctgcattaca

SEQ ID NO: 709081 - DNA, 19 bp, Mus musculus
  siRNA target sequence for Gps2 (NM_019726.2,500-518).
cagagcctgacggttcata

SEQ ID NO: 709082 - DNA, 19 bp, Mus musculus
  siRNA target sequence for Gps2 (NM_019726.2,502-520).
gagcctgacggttcataca

SEQ ID NO: 709083 - DNA, 19 bp, Mus musculus
  siRNA target sequence for Gps2 (NM_019726.2,547-565).
gagccctggaggacacaat

SEQ ID NO: 709084 - DNA, 19 bp, Mus musculus
  siRNA target sequence for Gps2 (NM_019726.2,669-687).
ccccagaacatggacaatt

SEQ ID NO: 709085 - DNA, 19 bp, Mus musculus
  siRNA target sequence for Gps2 (NM_019726.2,694-712).
cagtccagggggtgcttat

SEQ ID NO: 709086 - DNA, 19 bp, Mus musculus
  siRNA target sequence for Mmrp19 (NM_019735.2,192-210).
gatcccagaactttgcaaa

SEQ ID NO: 709087 - DNA, 19 bp, Mus musculus
  siRNA target sequence for Mmrp19 (NM_019735.2,258-276).
cttgaagcatggcaatgaa

SEQ ID NO: 709088 - DNA, 19 bp, Mus musculus
  siRNA target sequence for Mmrp19 (NM_019735.2,265-283).
catggcaatgaaatctaca

SEQ ID NO: 709089 - DNA, 19 bp, Mus musculus
  siRNA target sequence for Mmrp19 (NM_019735.2,401-419).
gcactcctcttttcatgaa

SEQ ID NO: 709090 - DNA, 19 bp, Mus musculus
  siRNA target sequence for Mmrp19 (NM_019735.2,402-420).
cactcctcttttcatgaat

SEQ ID NO: 709091 - DNA, 19 bp, Mus musculus
  siRNA target sequence for Mmrp19 (NM_019735.2,437-455).
gagctggcgcagtgattca

SEQ ID NO: 709092 - DNA, 19 bp, Mus musculus
  siRNA target sequence for Mmrp19 (NM_019735.2,439-457).
gctggcgcagtgattcata

SEQ ID NO: 709093 - DNA, 19 bp, Mus musculus
  siRNA target sequence for Mmrp19 (NM_019735.2,450-468).
gattcatacccactctaaa

SEQ ID NO: 709094 - DNA, 19 bp, Mus musculus
  siRNA target sequence for Mmrp19 (NM_019735.2,497-515).
caggacaggagtttaaaat

SEQ ID NO: 709095 - DNA, 19 bp, Mus musculus
  siRNA target sequence for Mmrp19 (NM_019735.2,557-575).
caggaggctattacagata

SEQ ID NO: 709096 - DNA, 19 bp, Mus musculus
  siRNA target sequence for Mmrp19 (NM_019735.2,572-590).
gatacgatgatatgttagt

SEQ ID NO: 709097 - DNA, 19 bp, Mus musculus
  siRNA target sequence for Mmrp19 (NM_019735.2,589-607).
gtggtacctattattgaga

SEQ ID NO: 709098 - DNA, 19 bp, Mus musculus
  siRNA target sequence for Mmrp19 (NM_019735.2,702-720).
gtacgtgtggggagaaaca

SEQ ID NO: 709099 - DNA, 19 bp, Mus musculus
  siRNA target sequence for Mmrp19 (NM_019735.2,749-767).
gttatgactacctgtttga

SEQ ID NO: 709100 - DNA, 19 bp, Mus musculus
  siRNA target sequence for Mmrp19 (NM_019735.2,810-828).
gctcccagttggagaaaat

SEQ ID NO: 709101 - DNA, 19 bp, Mus musculus
  siRNA target sequence for Nupr1 (NM_019738.1,68-86).
cccagcaacctctaaacct

SEQ ID NO: 709102 - DNA, 19 bp, Mus musculus
  siRNA target sequence for Nupr1 (NM_019738.1,69-87).
ccagcaacctctaaaccta

SEQ ID NO: 709103 - DNA, 19 bp, Mus musculus
  siRNA target sequence for Nupr1 (NM_019738.1,101-119).
gaatcctggatgaatatga

SEQ ID NO: 709104 - DNA, 19 bp, Mus musculus
  siRNA target sequence for Pdap2 (NM_019742.2,248-266).
gcagtgcctcccttcgtat

SEQ ID NO: 709105 - DNA, 19 bp, Mus musculus
  siRNA target sequence for Pdap2 (NM_019742.2,249-267).
cagtgcctcccttcgtatt

SEQ ID NO: 709106 - DNA, 19 bp, Mus musculus
  siRNA target sequence for Pdap2 (NM_019742.2,368-386).
ctgaggcgggtacataaga

SEQ ID NO: 709107 - DNA, 19 bp, Mus musculus
  siRNA target sequence for Pdap2 (NM_019742.2,370-388).
gaggcgggtacataagaat

SEQ ID NO: 709108 - DNA, 19 bp, Mus musculus
  siRNA target sequence for Pdap2 (NM_019742.2,372-390).
ggcgggtacataagaatct

SEQ ID NO: 709109 - DNA, 19 bp, Mus musculus
  siRNA target sequence for Pdap2 (NM_019742.2,375-393).
gggtacataagaatctgat

SEQ ID NO: 709110 - DNA, 19 bp, Mus musculus
  siRNA target sequence for Pdap2 (NM_019742.2,376-394).
ggtacataagaatctgatt

SEQ ID NO: 709111 - DNA, 19 bp, Mus musculus
  siRNA target sequence for Pdap2 (NM_019742.2,423-441).
cccgaatccacgtggattt

SEQ ID NO: 709112 - DNA, 19 bp, Mus musculus
  siRNA target sequence for Pdap2 (NM_019742.2,442-460).
ccccgtgatcctctatgaa

SEQ ID NO: 709113 - DNA, 19 bp, Mus musculus
  siRNA target sequence for Pdap2 (NM_019742.2,444-462).
ccgtgatcctctatgaagt

SEQ ID NO: 709114 - DNA, 19 bp, Mus musculus
  siRNA target sequence for Pdap2 (NM_019742.2,445-463).
cgtgatcctctatgaagta

SEQ ID NO: 709115 - DNA, 19 bp, Mus musculus
  siRNA target sequence for Pdap2 (NM_019742.2,446-464).
gtgatcctctatgaagtat

SEQ ID NO: 709116 - DNA, 19 bp, Mus musculus
  siRNA target sequence for Ncoa4 (NM_019744.1,123-141).
gctggagcttgctattggt

SEQ ID NO: 709117 - DNA, 19 bp, Mus musculus
  siRNA target sequence for Ncoa4 (NM_019744.1,151-169).
cgggctgaacagcaaatta

SEQ ID NO: 709118 - DNA, 19 bp, Mus musculus
  siRNA target sequence for Ncoa4 (NM_019744.1,152-170).
gggctgaacagcaaattaa

SEQ ID NO: 709119 - DNA, 19 bp, Mus musculus
  siRNA target sequence for Ncoa4 (NM_019744.1,157-175).
gaacagcaaattaaagata

SEQ ID NO: 709120 - DNA, 19 bp, Mus musculus
  siRNA target sequence for Ncoa4 (NM_019744.1,326-344).
ggctaatgggccaattcaa

SEQ ID NO: 709121 - DNA, 19 bp, Mus musculus
  siRNA target sequence for Ncoa4 (NM_019744.1,327-345).
gctaatgggccaattcaat

SEQ ID NO: 709122 - DNA, 19 bp, Mus musculus
  siRNA target sequence for Ncoa4 (NM_019744.1,334-352).
ggccaattcaattgtctta

SEQ ID NO: 709123 - DNA, 19 bp, Mus musculus
  siRNA target sequence for Ncoa4 (NM_019744.1,363-381).
ggagtatactcagaacaaa

SEQ ID NO: 709124 - DNA, 19 bp, Mus musculus
  siRNA target sequence for Ncoa4 (NM_019744.1,366-384).
gtatactcagaacaaagat

SEQ ID NO: 709125 - DNA, 19 bp, Mus musculus
  siRNA target sequence for Ncoa4 (NM_019744.1,378-396).
caaagatcttgccaatcaa

SEQ ID NO: 709126 - DNA, 19 bp, Mus musculus
  siRNA target sequence for Ncoa4 (NM_019744.1,512-530).
cccttaagaccattcaaat

SEQ ID NO: 709127 - DNA, 19 bp, Mus musculus
  siRNA target sequence for Ncoa4 (NM_019744.1,552-570).
cgcgagctcctcaagtatt

SEQ ID NO: 709128 - DNA, 19 bp, Mus musculus
  siRNA target sequence for Ncoa4 (NM_019744.1,571-589).
gggcctttcctagagaaaa

SEQ ID NO: 709129 - DNA, 19 bp, Mus musculus
  siRNA target sequence for Ncoa4 (NM_019744.1,573-591).
gcctttcctagagaaaaga

SEQ ID NO: 709130 - DNA, 19 bp, Mus musculus
  siRNA target sequence for Ncoa4 (NM_019744.1,654-672).
gtggcttcttgtaagcaaa

SEQ ID NO: 709131 - DNA, 19 bp, Mus musculus
  siRNA target sequence for Ncoa4 (NM_019744.1,790-808).
gatgcctggggcaatctga

SEQ ID NO: 709132 - DNA, 19 bp, Mus musculus
  siRNA target sequence for Ncoa4 (NM_019744.1,801-819).
caatctgaagggcttagaa

SEQ ID NO: 709133 - DNA, 19 bp, Mus musculus
  siRNA target sequence for Ncoa4 (NM_019744.1,817-835).
gaaaattggctccttaaca

SEQ ID NO: 709134 - DNA, 19 bp, Mus musculus
  siRNA target sequence for Ncoa4 (NM_019744.1,834-852).
cagtcatcaacaagaaatt

SEQ ID NO: 709135 - DNA, 19 bp, Mus musculus
  siRNA target sequence for Ncoa4 (NM_019744.1,1029-1047).
ggaaaccagcgagaagttt

SEQ ID NO: 709136 - DNA, 19 bp, Mus musculus
  siRNA target sequence for Ncoa4 (NM_019744.1,1030-1048).
gaaaccagcgagaagttta

SEQ ID NO: 709137 - DNA, 19 bp, Mus musculus
  siRNA target sequence for Ncoa4 (NM_019744.1,1065-1083).
gttcagagagccctacaat

SEQ ID NO: 709138 - DNA, 19 bp, Mus musculus
  siRNA target sequence for Ncoa4 (NM_019744.1,1139-1157).
ctagaggtgtggagattga

SEQ ID NO: 709139 - DNA, 19 bp, Mus musculus
  siRNA target sequence for Ncoa4 (NM_019744.1,1158-1176).
gaacctgggcaatctgaaa

SEQ ID NO: 709140 - DNA, 19 bp, Mus musculus
  siRNA target sequence for Ncoa4 (NM_019744.1,1400-1418).
gaatgcctatggaacctaa

SEQ ID NO: 709141 - DNA, 19 bp, Mus musculus
  siRNA target sequence for Ncoa4 (NM_019744.1,1404-1422).
gcctatggaacctaaatct

SEQ ID NO: 709142 - DNA, 19 bp, Mus musculus
  siRNA target sequence for Ncoa4 (NM_019744.1,1469-1487).
ccagaaatgagctaacaga

SEQ ID NO: 709143 - DNA, 19 bp, Mus musculus
  siRNA target sequence for Ncoa4 (NM_019744.1,1531-1549).
gattccttccacgtcataa

SEQ ID NO: 709144 - DNA, 19 bp, Mus musculus
  siRNA target sequence for Ncoa4 (NM_019744.1,1535-1553).
ccttccacgtcataaagaa

SEQ ID NO: 709145 - DNA, 19 bp, Mus musculus
  siRNA target sequence for Ncoa4 (NM_019744.1,1536-1554).
cttccacgtcataaagaat

SEQ ID NO: 709146 - DNA, 19 bp, Mus musculus
  siRNA target sequence for Ncoa4 (NM_019744.1,1539-1557).
ccacgtcataaagaatagt

SEQ ID NO: 709147 - DNA, 19 bp, Mus musculus
  siRNA target sequence for Ncoa4 (NM_019744.1,1540-1558).
cacgtcataaagaatagtt

SEQ ID NO: 709148 - DNA, 19 bp, Mus musculus
  siRNA target sequence for Ncoa4 (NM_019744.1,1600-1618).
cctaaggacgtgcctaata

SEQ ID NO: 709149 - DNA, 19 bp, Mus musculus
  siRNA target sequence for Ncoa4 (NM_019744.1,1668-1686).
ctggtgtccctttaacact

SEQ ID NO: 709150 - DNA, 19 bp, Mus musculus
  siRNA target sequence for Ncoa4 (NM_019744.1,1683-1701).
cactgccgactgggtttta

SEQ ID NO: 709151 - DNA, 19 bp, Mus musculus
  siRNA target sequence for Ncoa4 (NM_019744.1,1796-1814).
ccctacaagaagaacgtaa

SEQ ID NO: 709152 - DNA, 19 bp, Mus musculus
  siRNA target sequence for Ncoa4 (NM_019744.1,1835-1853).
gcctcccagcagtttgtga

SEQ ID NO: 709153 - DNA, 19 bp, Mus musculus
  siRNA target sequence for Ncoa4 (NM_019744.1,1841-1859).
cagcagtttgtgatctctt

SEQ ID NO: 709154 - DNA, 19 bp, Mus musculus
  siRNA target sequence for Ncoa4 (NM_019744.1,1862-1880).
cctgtatgcagcttaaggt

SEQ ID NO: 709155 - DNA, 19 bp, Mus musculus
  siRNA target sequence for Ncoa4 (NM_019744.1,1863-1881).
ctgtatgcagcttaaggtt

SEQ ID NO: 709156 - DNA, 19 bp, Mus musculus
  siRNA target sequence for Ncoa4 (NM_019744.1,1869-1887).
gcagcttaaggttgataaa

SEQ ID NO: 709157 - DNA, 19 bp, Mus musculus
  siRNA target sequence for Ncoa4 (NM_019744.1,1872-1890).
gcttaaggttgataaagaa

SEQ ID NO: 709158 - DNA, 19 bp, Mus musculus
  siRNA target sequence for Pdcd10 (NM_019745.2,704-722).
gtaaaatactccaaaagtt

SEQ ID NO: 709159 - DNA, 19 bp, Mus musculus
  siRNA target sequence for Pdcd10 (NM_019745.2,726-744).
gtgacactctgaagactta

SEQ ID NO: 709160 - DNA, 19 bp, Mus musculus
  siRNA target sequence for Pdcd10 (NM_019745.2,728-746).
gacactctgaagacttatt

SEQ ID NO: 709161 - DNA, 19 bp, Mus musculus
  siRNA target sequence for Pdcd10 (NM_019745.2,761-779).
gcaataaatgtgttcataa

SEQ ID NO: 709162 - DNA, 19 bp, Mus musculus
  siRNA target sequence for Pdcd10 (NM_019745.2,780-798).
gtgccaaccggctaattca

SEQ ID NO: 709163 - DNA, 19 bp, Mus musculus
  siRNA target sequence for Pdcd10 (NM_019745.2,783-801).
ccaaccggctaattcatca

SEQ ID NO: 709164 - DNA, 19 bp, Mus musculus
  siRNA target sequence for Pdcd10 (NM_019745.2,784-802).
caaccggctaattcatcaa

SEQ ID NO: 709165 - DNA, 19 bp, Mus musculus
  siRNA target sequence for Pdcd10 (NM_019745.2,789-807).
ggctaattcatcaaaccaa

SEQ ID NO: 709166 - DNA, 19 bp, Mus musculus
  siRNA target sequence for Tagln3 (NM_019754.1,200-218).
ggcagggcccattttcaga

SEQ ID NO: 709167 - DNA, 19 bp, Mus musculus
  siRNA target sequence for Tagln3 (NM_019754.1,206-224).
gcccattttcagaaatggt

SEQ ID NO: 709168 - DNA, 19 bp, Mus musculus
  siRNA target sequence for Tagln3 (NM_019754.1,207-225).
cccattttcagaaatggtt

SEQ ID NO: 709169 - DNA, 19 bp, Mus musculus
  siRNA target sequence for Tagln3 (NM_019754.1,250-268).
gctgataaacagtttatat

SEQ ID NO: 709170 - DNA, 19 bp, Mus musculus
  siRNA target sequence for Tagln3 (NM_019754.1,253-271).
gataaacagtttatatcca

SEQ ID NO: 709171 - DNA, 19 bp, Mus musculus
  siRNA target sequence for Tagln3 (NM_019754.1,371-389).
gtcaggaccactgacattt

SEQ ID NO: 709172 - DNA, 19 bp, Mus musculus
  siRNA target sequence for Tagln3 (NM_019754.1,373-391).
caggaccactgacattttt

SEQ ID NO: 709173 - DNA, 19 bp, Mus musculus
  siRNA target sequence for Tagln3 (NM_019754.1,375-393).
ggaccactgacatttttca

SEQ ID NO: 709174 - DNA, 19 bp, Mus musculus
  siRNA target sequence for Tagln3 (NM_019754.1,527-545).
cagaatcggagaggatttt

SEQ ID NO: 709175 - DNA, 19 bp, Mus musculus
  siRNA target sequence for AW108046 (NM_019757.1,322-340).
cttccacaggatcaatgaa

SEQ ID NO: 709176 - DNA, 19 bp, Mus musculus
  siRNA target sequence for AW108046 (NM_019757.1,514-532).
caaggggctctttacgtat

SEQ ID NO: 709177 - DNA, 19 bp, Mus musculus
  siRNA target sequence for AW108046 (NM_019757.1,547-565).
gcgctcgagtccagatgat

SEQ ID NO: 709178 - DNA, 19 bp, Mus musculus
  siRNA target sequence for AW108046 (NM_019757.1,588-606).
ctctgtcccccgttagcaa

SEQ ID NO: 709179 - DNA, 19 bp, Mus musculus
  siRNA target sequence for AW108046 (NM_019757.1,592-610).
gtcccccgttagcaacaaa

SEQ ID NO: 709180 - DNA, 19 bp, Mus musculus
  siRNA target sequence for AW108046 (NM_019757.1,595-613).
ccccgttagcaacaaaagt

SEQ ID NO: 709181 - DNA, 19 bp, Mus musculus
  siRNA target sequence for AW108046 (NM_019757.1,597-615).
ccgttagcaacaaaagtca

SEQ ID NO: 709182 - DNA, 19 bp, Mus musculus
  siRNA target sequence for AW108046 (NM_019757.1,1085-1103).
gaagtgtgtggcctaaagt

SEQ ID NO: 709183 - DNA, 19 bp, Mus musculus
  siRNA target sequence for AW108046 (NM_019757.1,1159-1177).
gtggaaccactctagtcta

SEQ ID NO: 709184 - DNA, 19 bp, Mus musculus
  siRNA target sequence for AW108046 (NM_019757.1,1459-1477).
cactggccactcatatcgt

SEQ ID NO: 709185 - DNA, 19 bp, Mus musculus
  siRNA target sequence for AW108046 (NM_019757.1,1563-1581).
gcaaaacacgctctacaaa

SEQ ID NO: 709186 - DNA, 19 bp, Mus musculus
  siRNA target sequence for Pkp3 (NM_019762.1,200-218).
ggaggctgatcgacttaga

SEQ ID NO: 709187 - DNA, 19 bp, Mus musculus
  siRNA target sequence for Pkp3 (NM_019762.1,325-343).
gcatgcccagaggtcaata

SEQ ID NO: 709188 - DNA, 19 bp, Mus musculus
  siRNA target sequence for Pkp3 (NM_019762.1,330-348).
cccagaggtcaatatcaca

SEQ ID NO: 709189 - DNA, 19 bp, Mus musculus
  siRNA target sequence for Pkp3 (NM_019762.1,610-628).
gagctgactatgacacatt

SEQ ID NO: 709190 - DNA, 19 bp, Mus musculus
  siRNA target sequence for Pkp3 (NM_019762.1,612-630).
gctgactatgacacattat

SEQ ID NO: 709191 - DNA, 19 bp, Mus musculus
  siRNA target sequence for Pkp3 (NM_019762.1,718-736).
cctacagggcctatgctta

SEQ ID NO: 709192 - DNA, 19 bp, Mus musculus
  siRNA target sequence for Pkp3 (NM_019762.1,836-854).
gcgaaccctgcaaagattt

SEQ ID NO: 709193 - DNA, 19 bp, Mus musculus
  siRNA target sequence for Pkp3 (NM_019762.1,933-951).
gtgcgcagcctcagtctta

SEQ ID NO: 709194 - DNA, 19 bp, Mus musculus
  siRNA target sequence for Pkp3 (NM_019762.1,1025-1043).
gctcagcagtggctttgat

SEQ ID NO: 709195 - DNA, 19 bp, Mus musculus
  siRNA target sequence for Pkp3 (NM_019762.1,1186-1204).
gactggtgaagctcttcaa

SEQ ID NO: 709196 - DNA, 19 bp, Mus musculus
  siRNA target sequence for Pkp3 (NM_019762.1,1243-1261).
ccatgcgcaacctcatcta

SEQ ID NO: 709197 - DNA, 19 bp, Mus musculus
  siRNA target sequence for Pkp3 (NM_019762.1,1344-1362).
gagctacgcaaaaatgtta

SEQ ID NO: 709198 - DNA, 19 bp, Mus musculus
  siRNA target sequence for Pkp3 (NM_019762.1,1346-1364).
gctacgcaaaaatgttaca

SEQ ID NO: 709199 - DNA, 19 bp, Mus musculus
  siRNA target sequence for Pkp3 (NM_019762.1,1771-1789).
gggctccgcctggtgaaat

SEQ ID NO: 709200 - DNA, 19 bp, Mus musculus
  siRNA target sequence for Pkp3 (NM_019762.1,1774-1792).
ctccgcctggtgaaatggt

SEQ ID NO: 709201 - DNA, 19 bp, Mus musculus
  siRNA target sequence for Pkp3 (NM_019762.1,1851-1869).
ctcacctttgccgaagtat

SEQ ID NO: 709202 - DNA, 19 bp, Mus musculus
  siRNA target sequence for Pkp3 (NM_019762.1,1855-1873).
cctttgccgaagtatctaa

SEQ ID NO: 709203 - DNA, 19 bp, Mus musculus
  siRNA target sequence for Pkp3 (NM_019762.1,1935-1953).
ctgcagcgctgtgaactaa

SEQ ID NO: 709204 - DNA, 19 bp, Mus musculus
  siRNA target sequence for Pkp3 (NM_019762.1,1937-1955).
gcagcgctgtgaactaaat

SEQ ID NO: 709205 - DNA, 19 bp, Mus musculus
  siRNA target sequence for Pkp3 (NM_019762.1,2162-2180).
cgagatgtccacaaaggta

SEQ ID NO: 709206 - DNA, 19 bp, Mus musculus
  siRNA target sequence for Pkp3 (NM_019762.1,2236-2254).
ctgaggtgctggtcaacat

SEQ ID NO: 709207 - DNA, 19 bp, Mus musculus
  siRNA target sequence for Pkp3 (NM_019762.1,2238-2256).
gaggtgctggtcaacatca

SEQ ID NO: 709208 - DNA, 19 bp, Mus musculus
  siRNA target sequence for Pkp3 (NM_019762.1,2303-2321).
ggacctgctctactttgat

SEQ ID NO: 709209 - DNA, 19 bp, Mus musculus
  siRNA target sequence for Pkp3 (NM_019762.1,2328-2346).
cgaaagctggtcttcatca

SEQ ID NO: 709210 - DNA, 19 bp, Mus musculus
  siRNA target sequence for Pkp3 (NM_019762.1,2334-2352).
ctggtcttcatcaaaaaga

SEQ ID NO: 709211 - DNA, 19 bp, Mus musculus
  siRNA target sequence for Pkp3 (NM_019762.1,2364-2382).
cccgacagtgagaagtctt

SEQ ID NO: 709212 - DNA, 19 bp, Mus musculus
  siRNA target sequence for Amotl2 (NM_019764.1,1468-1486).
ccttagagagagattggaa

SEQ ID NO: 709213 - DNA, 19 bp, Mus musculus
  siRNA target sequence for Amotl2 (NM_019764.1,1469-1487).
cttagagagagattggaat

SEQ ID NO: 709214 - DNA, 19 bp, Mus musculus
  siRNA target sequence for Amotl2 (NM_019764.1,2162-2180).
gagatggagagcagattga

SEQ ID NO: 709215 - DNA, 19 bp, Mus musculus
  siRNA target sequence for Amotl2 (NM_019764.1,2349-2367).
ccagtgagcggcaaactga

SEQ ID NO: 709216 - DNA, 19 bp, Mus musculus
  siRNA target sequence for Amotl2 (NM_019764.1,2350-2368).
cagtgagcggcaaactgat

SEQ ID NO: 709217 - DNA, 19 bp, Mus musculus
  siRNA target sequence for Amotl2 (NM_019764.1,2593-2611).
gtcagacatggtagaaata

SEQ ID NO: 709218 - DNA, 19 bp, Mus musculus
  siRNA target sequence for Morf4l2 (NM_019768.2,1057-1075).
gaattctgcctctctgttt

SEQ ID NO: 709219 - DNA, 19 bp, Mus musculus
  siRNA target sequence for 1110004F10Rik (NM_019772.1,108-126).
ccgcacggggtgaaacgtt

SEQ ID NO: 709220 - DNA, 19 bp, Mus musculus
  siRNA target sequence for 1110004F10Rik (NM_019772.1,172-190).
cagacttaggcaatgaaga

SEQ ID NO: 709221 - DNA, 19 bp, Mus musculus
  siRNA target sequence for 1110004F10Rik (NM_019772.1,239-257).
cactggtcgtcttgttata

SEQ ID NO: 709222 - DNA, 19 bp, Mus musculus
  siRNA target sequence for 1110004F10Rik (NM_019772.1,392-410).
cttcagtgaggtagaagat

SEQ ID NO: 709223 - DNA, 19 bp, Mus musculus
  siRNA target sequence for 1110004F10Rik (NM_019772.1,563-581).
cccgaagagcaaaaaagat

SEQ ID NO: 709224 - DNA, 19 bp, Mus musculus
  siRNA target sequence for 1110004F10Rik (NM_019772.1,579-597).
gatgcgaagagcaattata

SEQ ID NO: 709225 - DNA, 19 bp, Mus musculus
  siRNA target sequence for 1110004F10Rik (NM_019772.1,582-600).
gcgaagagcaattataaga

SEQ ID NO: 709226 - DNA, 19 bp, Mus musculus
  siRNA target sequence for 1110004F10Rik (NM_019772.1,583-601).
cgaagagcaattataagat

SEQ ID NO: 709227 - DNA, 19 bp, Mus musculus
  siRNA target sequence for 4931421K24Rik (NM_019784.3,372-390).
caggcacctatcacatcta

SEQ ID NO: 709228 - DNA, 19 bp, Mus musculus
  siRNA target sequence for 4931421K24Rik (NM_019784.3,449-467).
ccgggaacccaatcataca

SEQ ID NO: 709229 - DNA, 19 bp, Mus musculus
  siRNA target sequence for 4931421K24Rik (NM_019784.3,452-470).
ggaacccaatcatacacaa

SEQ ID NO: 709230 - DNA, 19 bp, Mus musculus
  siRNA target sequence for 4931421K24Rik (NM_019784.3,457-475).
ccaatcatacacaacaaaa

SEQ ID NO: 709231 - DNA, 19 bp, Mus musculus
  siRNA target sequence for 4931421K24Rik (NM_019784.3,637-655).
caggagctacagataatat

SEQ ID NO: 709232 - DNA, 19 bp, Mus musculus
  siRNA target sequence for 4931421K24Rik (NM_019784.3,677-695).
gccttcaggaccttattga

SEQ ID NO: 709233 - DNA, 19 bp, Mus musculus
  siRNA target sequence for 4931421K24Rik (NM_019784.3,781-799).
gatctagagaaccgtttaa

SEQ ID NO: 709234 - DNA, 19 bp, Mus musculus
  siRNA target sequence for 4931421K24Rik (NM_019784.3,811-829).
gtgggaagagaggagatta

SEQ ID NO: 709235 - DNA, 19 bp, Mus musculus
  siRNA target sequence for 4931421K24Rik (NM_019784.3,866-884).
gcagcttctcgccctatat

SEQ ID NO: 709236 - DNA, 19 bp, Mus musculus
  siRNA target sequence for 4931421K24Rik (NM_019784.3,869-887).
gcttctcgccctatatgaa

SEQ ID NO: 709237 - DNA, 19 bp, Mus musculus
  siRNA target sequence for 4931421K24Rik (NM_019784.3,870-888).
cttctcgccctatatgaat

SEQ ID NO: 709238 - DNA, 19 bp, Mus musculus
  siRNA target sequence for 4931421K24Rik (NM_019784.3,875-893).
cgccctatatgaatctgaa

SEQ ID NO: 709239 - DNA, 19 bp, Mus musculus
  siRNA target sequence for 4931421K24Rik (NM_019784.3,898-916).
ccggaagattccttggata

SEQ ID NO: 709240 - DNA, 19 bp, Mus musculus
  siRNA target sequence for 4931421K24Rik (NM_019784.3,899-917).
cggaagattccttggatat

SEQ ID NO: 709241 - DNA, 19 bp, Mus musculus
  siRNA target sequence for 4931421K24Rik (NM_019784.3,900-918).
ggaagattccttggatatt

SEQ ID NO: 709242 - DNA, 19 bp, Mus musculus
  siRNA target sequence for 4931421K24Rik (NM_019784.3,959-977).
gaggcagtgttgtttactt

SEQ ID NO: 709243 - DNA, 19 bp, Mus musculus
  siRNA target sequence for 4931421K24Rik (NM_019784.3,975-993).
ctttgagggaccaattgat

SEQ ID NO: 709244 - DNA, 19 bp, Mus musculus
  siRNA target sequence for 4931421K24Rik (NM_019784.3,996-1014).
gcaaactactggtgataaa

SEQ ID NO: 709245 - DNA, 19 bp, Mus musculus
  siRNA target sequence for 4931421K24Rik (NM_019784.3,1024-1042).
gatttgatccaccaagaaa

SEQ ID NO: 709246 - DNA, 19 bp, Mus musculus
  siRNA target sequence for 4931421K24Rik (NM_019784.3,1200-1218).
ccaggaaatgggtgcaaat

SEQ ID NO: 709247 - DNA, 19 bp, Mus musculus
  siRNA target sequence for 4931421K24Rik (NM_019784.3,1287-1305).
gcagctctaccgcctttat

SEQ ID NO: 709248 - DNA, 19 bp, Mus musculus
  siRNA target sequence for 4931421K24Rik (NM_019784.3,1290-1308).
gctctaccgcctttatgaa

SEQ ID NO: 709249 - DNA, 19 bp, Mus musculus
  siRNA target sequence for 4931421K24Rik (NM_019784.3,1433-1451).
cccggactgcccacataga

SEQ ID NO: 709250 - DNA, 19 bp, Mus musculus
  siRNA target sequence for 4931421K24Rik (NM_019784.3,1434-1452).
ccggactgcccacatagat

SEQ ID NO: 709251 - DNA, 19 bp, Mus musculus
  siRNA target sequence for 4931421K24Rik (NM_019784.3,1435-1453).
cggactgcccacatagata

SEQ ID NO: 709252 - DNA, 19 bp, Mus musculus
  siRNA target sequence for 4931421K24Rik (NM_019784.3,1458-1476).
cagcaagttcaaaaagtta

SEQ ID NO: 709253 - DNA, 19 bp, Mus musculus
  siRNA target sequence for 4931421K24Rik (NM_019784.3,1467-1485).
caaaaagttagagatgtta

SEQ ID NO: 709254 - DNA, 19 bp, Mus musculus
  siRNA target sequence for 4931421K24Rik (NM_019784.3,1596-1614).
gactcaactaacgagaata

SEQ ID NO: 709255 - DNA, 19 bp, Mus musculus
  siRNA target sequence for 4931421K24Rik (NM_019784.3,1607-1625).
cgagaataaatgtccttaa

SEQ ID NO: 709256 - DNA, 19 bp, Mus musculus
  siRNA target sequence for 4931421K24Rik (NM_019784.3,1647-1665).
caggcaatctgtaacaaaa

SEQ ID NO: 709257 - DNA, 19 bp, Mus musculus
  siRNA target sequence for 4931421K24Rik (NM_019784.3,1881-1899).
gggatttaacatgaaaaca

SEQ ID NO: 709258 - DNA, 19 bp, Mus musculus
  siRNA target sequence for 4931421K24Rik (NM_019784.3,1926-1944).
gaagcttgtcgtccaaatt

SEQ ID NO: 709259 - DNA, 19 bp, Mus musculus
  siRNA target sequence for 4931421K24Rik (NM_019784.3,1929-1947).
gcttgtcgtccaaatttat

SEQ ID NO: 709260 - DNA, 19 bp, Mus musculus
  siRNA target sequence for 4931421K24Rik (NM_019784.3,1933-1951).
gtcgtccaaatttatgaaa

SEQ ID NO: 709261 - DNA, 19 bp, Mus musculus
  siRNA target sequence for 4931421K24Rik (NM_019784.3,1935-1953).
cgtccaaatttatgaaatt

SEQ ID NO: 709262 - DNA, 19 bp, Mus musculus
  siRNA target sequence for Dnajc7 (NM_019795.3,577-595).
cggagtgcgatgtggtaat

SEQ ID NO: 709263 - DNA, 19 bp, Mus musculus
  siRNA target sequence for Dnajc7 (NM_019795.3,666-684).
gggaatgcatattatgcta

SEQ ID NO: 709264 - DNA, 19 bp, Mus musculus
  siRNA target sequence for Dnajc7 (NM_019795.3,667-685).
ggaatgcatattatgctaa

SEQ ID NO: 709265 - DNA, 19 bp, Mus musculus
  siRNA target sequence for Dnajc7 (NM_019795.3,689-707).
ggactacaacgaagcttat

SEQ ID NO: 709266 - DNA, 19 bp, Mus musculus
  siRNA target sequence for Dnajc7 (NM_019795.3,690-708).
gactacaacgaagcttata

SEQ ID NO: 709267 - DNA, 19 bp, Mus musculus
  siRNA target sequence for Dnajc7 (NM_019795.3,739-757).
ctaacaatgccagctatta

SEQ ID NO: 709268 - DNA, 19 bp, Mus musculus
  siRNA target sequence for Dnajc7 (NM_019795.3,749-767).
cagctattacggtaatcga

SEQ ID NO: 709269 - DNA, 19 bp, Mus musculus
  siRNA target sequence for Dnajc7 (NM_019795.3,766-784).
gagcggccacactgatgat

SEQ ID NO: 709270 - DNA, 19 bp, Mus musculus
  siRNA target sequence for Dnajc7 (NM_019795.3,984-1002).
gccgtcatggagtatgaga

SEQ ID NO: 709271 - DNA, 19 bp, Mus musculus
  siRNA target sequence for Dnajc7 (NM_019795.3,985-1003).
ccgtcatggagtatgagaa

SEQ ID NO: 709272 - DNA, 19 bp, Mus musculus
  siRNA target sequence for Dnajc7 (NM_019795.3,986-1004).
cgtcatggagtatgagaaa

SEQ ID NO: 709273 - DNA, 19 bp, Mus musculus
  siRNA target sequence for Dnajc7 (NM_019795.3,987-1005).
gtcatggagtatgagaaaa

SEQ ID NO: 709274 - DNA, 19 bp, Mus musculus
  siRNA target sequence for Dnajc7 (NM_019795.3,989-1007).
catggagtatgagaaaata

SEQ ID NO: 709275 - DNA, 19 bp, Mus musculus
  siRNA target sequence for Dnajc7 (NM_019795.3,1058-1076).
ggaccgtgccctagaattt

SEQ ID NO: 709276 - DNA, 19 bp, Mus musculus
  siRNA target sequence for Dnajc7 (NM_019795.3,1078-1096).
cccctgcctgccatcgatt

SEQ ID NO: 709277 - DNA, 19 bp, Mus musculus
  siRNA target sequence for Dnajc7 (NM_019795.3,1081-1099).
ctgcctgccatcgattcaa

SEQ ID NO: 709278 - DNA, 19 bp, Mus musculus
  siRNA target sequence for Dnajc7 (NM_019795.3,1083-1101).
gcctgccatcgattcaaaa

SEQ ID NO: 709279 - DNA, 19 bp, Mus musculus
  siRNA target sequence for Dnajc7 (NM_019795.3,1084-1102).
cctgccatcgattcaaaat

SEQ ID NO: 709280 - DNA, 19 bp, Mus musculus
  siRNA target sequence for Dnajc7 (NM_019795.3,1085-1103).
ctgccatcgattcaaaatt

SEQ ID NO: 709281 - DNA, 19 bp, Mus musculus
  siRNA target sequence for Dnajc7 (NM_019795.3,1087-1105).
gccatcgattcaaaattct

SEQ ID NO: 709282 - DNA, 19 bp, Mus musculus
  siRNA target sequence for Dnajc7 (NM_019795.3,1089-1107).
catcgattcaaaattctca

SEQ ID NO: 709283 - DNA, 19 bp, Mus musculus
  siRNA target sequence for Dnajc7 (NM_019795.3,1106-1124).
caaagcagaatgtttagca

SEQ ID NO: 709284 - DNA, 19 bp, Mus musculus
  siRNA target sequence for Dnajc7 (NM_019795.3,1157-1175).
ggccagtgacattttacga

SEQ ID NO: 709285 - DNA, 19 bp, Mus musculus
  siRNA target sequence for Dnajc7 (NM_019795.3,1158-1176).
gccagtgacattttacgaa

SEQ ID NO: 709286 - DNA, 19 bp, Mus musculus
  siRNA target sequence for Dnajc7 (NM_019795.3,1208-1226).
ccggggtctttgcctttat

SEQ ID NO: 709287 - DNA, 19 bp, Mus musculus
  siRNA target sequence for Dnajc7 (NM_019795.3,1210-1228).
ggggtctttgcctttatta

SEQ ID NO: 709288 - DNA, 19 bp, Mus musculus
  siRNA target sequence for Dnajc7 (NM_019795.3,1213-1231).
gtctttgcctttattacga

SEQ ID NO: 709289 - DNA, 19 bp, Mus musculus
  siRNA target sequence for Dnajc7 (NM_019795.3,1220-1238).
cctttattacgaagattgt

SEQ ID NO: 709290 - DNA, 19 bp, Mus musculus
  siRNA target sequence for Dnajc7 (NM_019795.3,1221-1239).
ctttattacgaagattgta

SEQ ID NO: 709291 - DNA, 19 bp, Mus musculus
  siRNA target sequence for Dnajc7 (NM_019795.3,1247-1265).
ggcagtgcagttttttgta

SEQ ID NO: 709292 - DNA, 19 bp, Mus musculus
  siRNA target sequence for Dnajc7 (NM_019795.3,1298-1316).
ggcttgtgtcgcttgtaga

SEQ ID NO: 709293 - DNA, 19 bp, Mus musculus
  siRNA target sequence for Dnajc7 (NM_019795.3,1413-1431).
gggatagatcccaacaaca

SEQ ID NO: 709294 - DNA, 19 bp, Mus musculus
  siRNA target sequence for Dnajc7 (NM_019795.3,1414-1432).
ggatagatcccaacaacat

SEQ ID NO: 709295 - DNA, 19 bp, Mus musculus
  siRNA target sequence for Dnajc7 (NM_019795.3,1461-1479).
cggggtacggttaattcca

SEQ ID NO: 709296 - DNA, 19 bp, Mus musculus
  siRNA target sequence for Dnajc7 (NM_019795.3,1462-1480).
ggggtacggttaattccaa

SEQ ID NO: 709297 - DNA, 19 bp, Mus musculus
  siRNA target sequence for Dnajc7 (NM_019795.3,1500-1518).
gccatagaagactgtacaa

SEQ ID NO: 709298 - DNA, 19 bp, Mus musculus
  siRNA target sequence for Dnajc7 (NM_019795.3,1530-1548).
ctcgatgacacttacatca

SEQ ID NO: 709299 - DNA, 19 bp, Mus musculus
  siRNA target sequence for Dnajc7 (NM_019795.3,1561-1579).
gaagagctcagtgttacat

SEQ ID NO: 709300 - DNA, 19 bp, Mus musculus
  siRNA target sequence for Dnajc7 (NM_019795.3,1604-1622).
cgtgcgggactatgaaaaa

SEQ ID NO: 709301 - DNA, 19 bp, Mus musculus
  siRNA target sequence for Dnajc7 (NM_019795.3,1608-1626).
cgggactatgaaaaagtgt

SEQ ID NO: 709302 - DNA, 19 bp, Mus musculus
  siRNA target sequence for Dnajc7 (NM_019795.3,1609-1627).
gggactatgaaaaagtgta

SEQ ID NO: 709303 - DNA, 19 bp, Mus musculus
  siRNA target sequence for Dnajc7 (NM_019795.3,1746-1764).
gacgagatcaagaaagctt

SEQ ID NO: 709304 - DNA, 19 bp, Mus musculus
  siRNA target sequence for Dnajc7 (NM_019795.3,1807-1825).
gggccagtgccgaagttca

SEQ ID NO: 709305 - DNA, 19 bp, Mus musculus
  siRNA target sequence for Dnajc7 (NM_019795.3,1886-1904).
caagaaaaagactcgttat

SEQ ID NO: 709306 - DNA, 19 bp, Mus musculus
  siRNA target sequence for Dnajc7 (NM_019795.3,1923-1941).
gatgaggagggcatgaata

SEQ ID NO: 709307 - DNA, 19 bp, Mus musculus
  siRNA target sequence for Dnajc7 (NM_019795.3,1937-1955).
gaatatgggcgattttgat

SEQ ID NO: 709308 - DNA, 19 bp, Mus musculus
  siRNA target sequence for Dnajc7 (NM_019795.3,2016-2034).
ggcccagggaatttctact

SEQ ID NO: 709309 - DNA, 19 bp, Mus musculus
  siRNA target sequence for Dnajc7 (NM_019795.3,2017-2035).
gcccagggaatttctactt

SEQ ID NO: 709310 - DNA, 19 bp, Mus musculus
  siRNA target sequence for Dnajc7 (NM_019795.3,2018-2036).
cccagggaatttctacttt

SEQ ID NO: 709311 - DNA, 19 bp, Mus musculus
  siRNA target sequence for ORF18 (NM_019801.1,102-120).
ccgctgctgctgttgacta

SEQ ID NO: 709312 - DNA, 19 bp, Mus musculus
  siRNA target sequence for ORF18 (NM_019801.1,541-559).
cttcatggactttttatct

SEQ ID NO: 709313 - DNA, 19 bp, Mus musculus
  siRNA target sequence for ORF18 (NM_019801.1,561-579).
caagccgatgacggaaaaa

SEQ ID NO: 709314 - DNA, 19 bp, Mus musculus
  siRNA target sequence for ORF18 (NM_019801.1,565-583).
ccgatgacggaaaaatagt

SEQ ID NO: 709315 - DNA, 19 bp, Mus musculus
  siRNA target sequence for ORF18 (NM_019801.1,566-584).
cgatgacggaaaaatagtt

SEQ ID NO: 709316 - DNA, 19 bp, Mus musculus
  siRNA target sequence for ORF18 (NM_019801.1,567-585).
gatgacggaaaaatagtta

SEQ ID NO: 709317 - DNA, 19 bp, Mus musculus
  siRNA target sequence for ORF18 (NM_019801.1,590-608).
ccagtctaagccagaaatt

SEQ ID NO: 709318 - DNA, 19 bp, Mus musculus
  siRNA target sequence for ORF18 (NM_019801.1,731-749).
cgatggctttttaagatgt

SEQ ID NO: 709319 - DNA, 19 bp, Mus musculus
  siRNA target sequence for ORF18 (NM_019801.1,859-877).
cccctgagaagctgagtat

SEQ ID NO: 709320 - DNA, 19 bp, Mus musculus
  siRNA target sequence for AW545589 (NM_019805.2,277-295).
cgcaatgctgtgagtaagt

SEQ ID NO: 709321 - DNA, 19 bp, Mus musculus
  siRNA target sequence for AW545589 (NM_019805.2,313-331).
cagaagaaagccttaagta

SEQ ID NO: 709322 - DNA, 19 bp, Mus musculus
  siRNA target sequence for AW545589 (NM_019805.2,478-496).
gggatcccttcaagacaaa

SEQ ID NO: 709323 - DNA, 19 bp, Mus musculus
  siRNA target sequence for AW545589 (NM_019805.2,600-618).
ggcccttgacgccattcta

SEQ ID NO: 709324 - DNA, 19 bp, Mus musculus
  siRNA target sequence for AW545589 (NM_019805.2,609-627).
cgccattctaggtttgtta

SEQ ID NO: 709325 - DNA, 19 bp, Mus musculus
  siRNA target sequence for AW545589 (NM_019805.2,659-677).
caatgacgatgaatgtgat

SEQ ID NO: 709326 - DNA, 19 bp, Mus musculus
  siRNA target sequence for AW545589 (NM_019805.2,757-775).
gcaatcaacaccatctgtt

SEQ ID NO: 709327 - DNA, 19 bp, Mus musculus
  siRNA target sequence for AW545589 (NM_019805.2,762-780).
caacaccatctgttcacta

SEQ ID NO: 709328 - DNA, 19 bp, Mus musculus
  siRNA target sequence for AW545589 (NM_019805.2,767-785).
ccatctgttcactagagaa

SEQ ID NO: 709329 - DNA, 19 bp, Mus musculus
  siRNA target sequence for AW545589 (NM_019805.2,847-865).
gcaggggacagcaagaact

SEQ ID NO: 709330 - DNA, 19 bp, Mus musculus
  siRNA target sequence for AW545589 (NM_019805.2,895-913).
ctggatccctacttgataa

SEQ ID NO: 709331 - DNA, 19 bp, Mus musculus
  siRNA target sequence for AW545589 (NM_019805.2,897-915).
ggatccctacttgataaga

SEQ ID NO: 709332 - DNA, 19 bp, Mus musculus
  siRNA target sequence for AW545589 (NM_019805.2,981-999).
ctgccgcctcttcaacatt

SEQ ID NO: 709333 - DNA, 19 bp, Mus musculus
  siRNA target sequence for AW545589 (NM_019805.2,984-1002).
ccgcctcttcaacatttct

SEQ ID NO: 709334 - DNA, 19 bp, Mus musculus
  siRNA target sequence for AW545589 (NM_019805.2,986-1004).
gcctcttcaacatttctga

SEQ ID NO: 709335 - DNA, 19 bp, Mus musculus
  siRNA target sequence for AW545589 (NM_019805.2,1037-1055).
gccacagcttctatagcaa

SEQ ID NO: 709336 - DNA, 19 bp, Mus musculus
  siRNA target sequence for AW545589 (NM_019805.2,1208-1226).
cttgtcgcttggactgtta

SEQ ID NO: 709337 - DNA, 19 bp, Mus musculus
  siRNA target sequence for AW545589 (NM_019805.2,1221-1239).
ctgttacgaaggtctcata

SEQ ID NO: 709338 - DNA, 19 bp, Mus musculus
  siRNA target sequence for AW545589 (NM_019805.2,1223-1241).
gttacgaaggtctcataga

SEQ ID NO: 709339 - DNA, 19 bp, Mus musculus
  siRNA target sequence for AW545589 (NM_019805.2,1231-1249).
ggtctcatagagtgttact

SEQ ID NO: 709340 - DNA, 19 bp, Mus musculus
  siRNA target sequence for AW545589 (NM_019805.2,1278-1296).
ggtgatggccaacaatgtt

SEQ ID NO: 709341 - DNA, 19 bp, Mus musculus
  siRNA target sequence for AW545589 (NM_019805.2,1378-1396).
gccaaaactctgttagata

SEQ ID NO: 709342 - DNA, 19 bp, Mus musculus
  siRNA target sequence for AW545589 (NM_019805.2,1457-1475).
gcagggaacagaaatatga

SEQ ID NO: 709343 - DNA, 19 bp, Mus musculus
  siRNA target sequence for AW545589 (NM_019805.2,1579-1597).
gcgatggaccagtacagta

SEQ ID NO: 709344 - DNA, 19 bp, Mus musculus
  siRNA target sequence for AW545589 (NM_019805.2,1580-1598).
cgatggaccagtacagtat

SEQ ID NO: 709345 - DNA, 19 bp, Mus musculus
  siRNA target sequence for AW545589 (NM_019805.2,1581-1599).
gatggaccagtacagtata

SEQ ID NO: 709346 - DNA, 19 bp, Mus musculus
  siRNA target sequence for AW545589 (NM_019805.2,1584-1602).
ggaccagtacagtatagca

SEQ ID NO: 709347 - DNA, 19 bp, Mus musculus
  siRNA target sequence for Cbln3 (NM_019820.2,495-513).
catctcagcctttgcaaat

SEQ ID NO: 709348 - DNA, 19 bp, Mus musculus
  siRNA target sequence for 1110001F24Rik (NM_019821.2,183-201).
cttgggtccccggtattca

SEQ ID NO: 709349 - DNA, 19 bp, Mus musculus
  siRNA target sequence for 1110001F24Rik (NM_019821.2,204-222).
cccatcaaggcagacataa

SEQ ID NO: 709350 - DNA, 19 bp, Mus musculus
  siRNA target sequence for 1110001F24Rik (NM_019821.2,214-232).
cagacataagcggtaacat

SEQ ID NO: 709351 - DNA, 19 bp, Mus musculus
  siRNA target sequence for 1110001F24Rik (NM_019821.2,216-234).
gacataagcggtaacatca

SEQ ID NO: 709352 - DNA, 19 bp, Mus musculus
  siRNA target sequence for 1110001F24Rik (NM_019821.2,223-241).
gcggtaacatcaccaaaat

SEQ ID NO: 709353 - DNA, 19 bp, Mus musculus
  siRNA target sequence for 1110001F24Rik (NM_019821.2,457-475).
ccaacaaggcctatgagat

SEQ ID NO: 709354 - DNA, 19 bp, Mus musculus
  siRNA target sequence for 1110001F24Rik (NM_019821.2,662-680).
catgtacaccaagatgaat

SEQ ID NO: 709355 - DNA, 19 bp, Mus musculus
  siRNA target sequence for Zfp261 (NM_019831.1,781-799).
gagaccttccagtagacat

SEQ ID NO: 709356 - DNA, 19 bp, Mus musculus
  siRNA target sequence for Zfp261 (NM_019831.1,882-900).
gccctggacctgcttgata

SEQ ID NO: 709357 - DNA, 19 bp, Mus musculus
  siRNA target sequence for Zfp261 (NM_019831.1,1126-1144).
cacctgaggggctactaga

SEQ ID NO: 709358 - DNA, 19 bp, Mus musculus
  siRNA target sequence for Zfp261 (NM_019831.1,1151-1169).
ggctccagattctccaata

SEQ ID NO: 709359 - DNA, 19 bp, Mus musculus
  siRNA target sequence for Zfp261 (NM_019831.1,1152-1170).
gctccagattctccaataa

SEQ ID NO: 709360 - DNA, 19 bp, Mus musculus
  siRNA target sequence for Zfp261 (NM_019831.1,1172-1190).
cctggagtctcctcatatt

SEQ ID NO: 709361 - DNA, 19 bp, Mus musculus
  siRNA target sequence for Zfp261 (NM_019831.1,1197-1215).
gagataccccccttagcta

SEQ ID NO: 709362 - DNA, 19 bp, Mus musculus
  siRNA target sequence for Zfp261 (NM_019831.1,1532-1550).
ggtagatgaccccaatgat

SEQ ID NO: 709363 - DNA, 19 bp, Mus musculus
  siRNA target sequence for Zfp261 (NM_019831.1,1938-1956).
gccactcgctgcagcatat

SEQ ID NO: 709364 - DNA, 19 bp, Mus musculus
  siRNA target sequence for Zfp261 (NM_019831.1,2010-2028).
cgactctgcagcgattctt

SEQ ID NO: 709365 - DNA, 19 bp, Mus musculus
  siRNA target sequence for Zfp261 (NM_019831.1,2022-2040).
gattcttgcttctccaaat

SEQ ID NO: 709366 - DNA, 19 bp, Mus musculus
  siRNA target sequence for Zfp261 (NM_019831.1,2046-2064).
gccaacaagggactgaaaa

SEQ ID NO: 709367 - DNA, 19 bp, Mus musculus
  siRNA target sequence for Zfp261 (NM_019831.1,2170-2188).
cgtgcttgggggcatacaa

SEQ ID NO: 709368 - DNA, 19 bp, Mus musculus
  siRNA target sequence for Zfp261 (NM_019831.1,2177-2195).
gggggcatacaagaagaaa

SEQ ID NO: 709369 - DNA, 19 bp, Mus musculus
  siRNA target sequence for Zfp261 (NM_019831.1,2221-2239).
ggtgcaagaccctgtgtaa

SEQ ID NO: 709370 - DNA, 19 bp, Mus musculus
  siRNA target sequence for Zfp261 (NM_019831.1,2228-2246).
gaccctgtgtaagaacttt

SEQ ID NO: 709371 - DNA, 19 bp, Mus musculus
  siRNA target sequence for Zfp261 (NM_019831.1,2232-2250).
ctgtgtaagaactttgaga

SEQ ID NO: 709372 - DNA, 19 bp, Mus musculus
  siRNA target sequence for Zfp261 (NM_019831.1,2302-2320).
gctgtaccacttcttacaa

SEQ ID NO: 709373 - DNA, 19 bp, Mus musculus
  siRNA target sequence for Zfp261 (NM_019831.1,2303-2321).
ctgtaccacttcttacaaa

SEQ ID NO: 709374 - DNA, 19 bp, Mus musculus
  siRNA target sequence for Zfp261 (NM_019831.1,2305-2323).
gtaccacttcttacaaagt

SEQ ID NO: 709375 - DNA, 19 bp, Mus musculus
  siRNA target sequence for Zfp261 (NM_019831.1,2377-2395).
gcctctctgacccttgtta

SEQ ID NO: 709376 - DNA, 19 bp, Mus musculus
  siRNA target sequence for Zfp261 (NM_019831.1,2392-2410).
gttactacaacaaagttga

SEQ ID NO: 709377 - DNA, 19 bp, Mus musculus
  siRNA target sequence for Zfp261 (NM_019831.1,2651-2669).
cgagaagcttcgattcagt

SEQ ID NO: 709378 - DNA, 19 bp, Mus musculus
  siRNA target sequence for Zfp261 (NM_019831.1,2698-2716).
gctgtgtactgctgtacaa

SEQ ID NO: 709379 - DNA, 19 bp, Mus musculus
  siRNA target sequence for Zfp261 (NM_019831.1,2709-2727).
ctgtacaagcaagatttta

SEQ ID NO: 709380 - DNA, 19 bp, Mus musculus
  siRNA target sequence for Zfp261 (NM_019831.1,2732-2750).
gaagctgggcttatgttgt

SEQ ID NO: 709381 - DNA, 19 bp, Mus musculus
  siRNA target sequence for Zfp261 (NM_019831.1,2736-2754).
ctgggcttatgttgtatca

SEQ ID NO: 709382 - DNA, 19 bp, Mus musculus
  siRNA target sequence for Zfp261 (NM_019831.1,2746-2764).
gttgtatcacctgtactta

SEQ ID NO: 709383 - DNA, 19 bp, Mus musculus
  siRNA target sequence for Zfp261 (NM_019831.1,2902-2920).
ggaagctgctggaaacgat

SEQ ID NO: 709384 - DNA, 19 bp, Mus musculus
  siRNA target sequence for Zfp261 (NM_019831.1,2929-2947).
gtgggcaaatccgtcattt

SEQ ID NO: 709385 - DNA, 19 bp, Mus musculus
  siRNA target sequence for Zfp261 (NM_019831.1,2931-2949).
gggcaaatccgtcatttct

SEQ ID NO: 709386 - DNA, 19 bp, Mus musculus
  siRNA target sequence for Zfp261 (NM_019831.1,3192-3210).
gcaacaccccgcaaaaaca

SEQ ID NO: 709387 - DNA, 19 bp, Mus musculus
  siRNA target sequence for Zfp261 (NM_019831.1,3253-3271).
cctgcaaggcggaaatgaa

SEQ ID NO: 709388 - DNA, 19 bp, Mus musculus
  siRNA target sequence for Zfp261 (NM_019831.1,3345-3363).
ccagtgcctatgcatctat

SEQ ID NO: 709389 - DNA, 19 bp, Mus musculus
  siRNA target sequence for Zfp261 (NM_019831.1,3346-3364).
cagtgcctatgcatctata

SEQ ID NO: 709390 - DNA, 19 bp, Mus musculus
  siRNA target sequence for Zfp261 (NM_019831.1,3348-3366).
gtgcctatgcatctatact

SEQ ID NO: 709391 - DNA, 19 bp, Mus musculus
  siRNA target sequence for Zfp261 (NM_019831.1,3540-3558).
gaggccgaagagttagaca

SEQ ID NO: 709392 - DNA, 19 bp, Mus musculus
  siRNA target sequence for Zfp261 (NM_019831.1,3560-3578).
ggcctcctcggatctttgt

SEQ ID NO: 709393 - DNA, 19 bp, Mus musculus
  siRNA target sequence for Zfp261 (NM_019831.1,3562-3580).
cctcctcggatctttgtga

SEQ ID NO: 709394 - DNA, 19 bp, Mus musculus
  siRNA target sequence for Zfp261 (NM_019831.1,3634-3652).
ggacagctcgggatgatgt

SEQ ID NO: 709395 - DNA, 19 bp, Mus musculus
  siRNA target sequence for Zfp261 (NM_019831.1,3666-3684).
gttaagatggctaatgtct

SEQ ID NO: 709396 - DNA, 19 bp, Mus musculus
  siRNA target sequence for Zfp261 (NM_019831.1,3734-3752).
ggacattaacccaagtgta

SEQ ID NO: 709397 - DNA, 19 bp, Mus musculus
  siRNA target sequence for Zfp261 (NM_019831.1,3750-3768).
gtagacttcctctttgatt

SEQ ID NO: 709398 - DNA, 19 bp, Mus musculus
  siRNA target sequence for Zfp261 (NM_019831.1,3834-3852).
caaaagaggctgatgcttt

SEQ ID NO: 709399 - DNA, 19 bp, Mus musculus
  siRNA target sequence for Zfp261 (NM_019831.1,3892-3910).
gttgtactggtctcaacta

SEQ ID NO: 709400 - DNA, 19 bp, Mus musculus
  siRNA target sequence for Zfp261 (NM_019831.1,3908-3926).
ctattcatacggtgtcaat

SEQ ID NO: 709401 - DNA, 19 bp, Mus musculus
  siRNA target sequence for Zfp261 (NM_019831.1,3918-3936).
ggtgtcaatgcttggaaat

SEQ ID NO: 709402 - DNA, 19 bp, Mus musculus
  siRNA target sequence for Zfp261 (NM_019831.1,4090-4108).
ggcccaatggtgaacgata

SEQ ID NO: 709403 - DNA, 19 bp, Mus musculus
  siRNA target sequence for Zfp261 (NM_019831.1,4091-4109).
gcccaatggtgaacgatat

SEQ ID NO: 709404 - DNA, 19 bp, Mus musculus
  siRNA target sequence for Zfp261 (NM_019831.1,4093-4111).
ccaatggtgaacgatatga

SEQ ID NO: 709405 - DNA, 19 bp, Mus musculus
  siRNA target sequence for Zfp261 (NM_019831.1,4110-4128).
gaacctgacagtatctact

SEQ ID NO: 709406 - DNA, 19 bp, Mus musculus
  siRNA target sequence for Zfp261 (NM_019831.1,4114-4132).
ctgacagtatctactactt

SEQ ID NO: 709407 - DNA, 19 bp, Mus musculus
  siRNA target sequence for Zfp261 (NM_019831.1,4116-4134).
gacagtatctactacttgt

SEQ ID NO: 709408 - DNA, 19 bp, Mus musculus
  siRNA target sequence for Zfp261 (NM_019831.1,4170-4188).
cggatggtgaacattttca

SEQ ID NO: 709409 - DNA, 19 bp, Mus musculus
  siRNA target sequence for Zfp261 (NM_019831.1,4207-4225).
ctttcgttcaagaactcaa

SEQ ID NO: 709410 - DNA, 19 bp, Mus musculus
  siRNA target sequence for Zfp261 (NM_019831.1,4212-4230).
gttcaagaactcaacaagt

SEQ ID NO: 709411 - DNA, 19 bp, Mus musculus
  siRNA target sequence for Zfp261 (NM_019831.1,4260-4278).
cccaacaatactgtattct

SEQ ID NO: 709412 - DNA, 19 bp, Mus musculus
  siRNA target sequence for Zfp261 (NM_019831.1,4310-4328).
caagcaactgggggtttat

SEQ ID NO: 709413 - DNA, 19 bp, Mus musculus
  siRNA target sequence for Zfp261 (NM_019831.1,4344-4362).
ctcaataccctcatgttct

SEQ ID NO: 709414 - DNA, 19 bp, Mus musculus
  siRNA target sequence for Zfp261 (NM_019831.1,4358-4376).
gttcttcaacactaagttt

SEQ ID NO: 709415 - DNA, 19 bp, Mus musculus
  siRNA target sequence for Zfp261 (NM_019831.1,4475-4493).
ggtgagcatccgctactat

SEQ ID NO: 709416 - DNA, 19 bp, Mus musculus
  siRNA target sequence for Zfp261 (NM_019831.1,4562-4580).
cttagagcagcgtgagaat

SEQ ID NO: 709417 - DNA, 19 bp, Mus musculus
  siRNA target sequence for Zfp261 (NM_019831.1,4596-4614).
cgctgccccgtcaagttct

SEQ ID NO: 709418 - DNA, 19 bp, Mus musculus
  siRNA target sequence for Zfp261 (NM_019831.1,4598-4616).
ctgccccgtcaagttctat

SEQ ID NO: 709419 - DNA, 19 bp, Mus musculus
  siRNA target sequence for Zfp261 (NM_019831.1,4602-4620).
cccgtcaagttctatgagt

SEQ ID NO: 709420 - DNA, 19 bp, Mus musculus
  siRNA target sequence for Zfp261 (NM_019831.1,4645-4663).
gcctccgaactcgaaatga

SEQ ID NO: 709421 - DNA, 19 bp, Mus musculus
  siRNA target sequence for Zfp261 (NM_019831.1,4646-4664).
cctccgaactcgaaatgat

SEQ ID NO: 709422 - DNA, 19 bp, Mus musculus
  siRNA target sequence for Zfp261 (NM_019831.1,4651-4669).
gaactcgaaatgatgtgtt

SEQ ID NO: 709423 - DNA, 19 bp, Mus musculus
  siRNA target sequence for Zfp261 (NM_019831.1,4701-4719).
gaatcacctctctggtatt

SEQ ID NO: 709424 - DNA, 19 bp, Mus musculus
  siRNA target sequence for Zfp261 (NM_019831.1,4753-4771).
gcatgctcaatcgcatttt

SEQ ID NO: 709425 - DNA, 19 bp, Mus musculus
  siRNA target sequence for 4933400B15Rik (NM_019832.2,378-396).
ggaatcttgctttcaagaa

SEQ ID NO: 709426 - DNA, 19 bp, Mus musculus
  siRNA target sequence for 4933400B15Rik (NM_019832.2,415-433).
ccattccatttgcaatgtt

SEQ ID NO: 709427 - DNA, 19 bp, Mus musculus
  siRNA target sequence for 4933400B15Rik (NM_019832.2,431-449).
gttcaacatgagctttcat

SEQ ID NO: 709428 - DNA, 19 bp, Mus musculus
  siRNA target sequence for 4933400B15Rik (NM_019832.2,470-488).
gagtcacgggaagaaaact

SEQ ID NO: 709429 - DNA, 19 bp, Mus musculus
  siRNA target sequence for 4933400B15Rik (NM_019832.2,586-604).
gcacaaacaggattatgaa

SEQ ID NO: 709430 - DNA, 19 bp, Mus musculus
  siRNA target sequence for 4933400B15Rik (NM_019832.2,624-642).
ctcagacaaaaggtataaa

SEQ ID NO: 709431 - DNA, 19 bp, Mus musculus
  siRNA target sequence for 4933400B15Rik (NM_019832.2,892-910).
ccaggaagtaggtctaaaa

SEQ ID NO: 709432 - DNA, 19 bp, Mus musculus
  siRNA target sequence for 4933400B15Rik (NM_019832.2,927-945).
gactaaagttagaacttga

SEQ ID NO: 709433 - DNA, 19 bp, Mus musculus
  siRNA target sequence for 4933400B15Rik (NM_019832.2,934-952).
gttagaacttgaaaggaaa

SEQ ID NO: 709434 - DNA, 19 bp, Mus musculus
  siRNA target sequence for B230317C12Rik (NM_019833.1,317-335).
gtgcactactcgtcctatt

SEQ ID NO: 709435 - DNA, 19 bp, Mus musculus
  siRNA target sequence for B230317C12Rik (NM_019833.1,319-337).
gcactactcgtcctattca

SEQ ID NO: 709436 - DNA, 19 bp, Mus musculus
  siRNA target sequence for B230317C12Rik (NM_019833.1,489-507).
gtgggctctggcaagacaa

SEQ ID NO: 709437 - DNA, 19 bp, Mus musculus
  siRNA target sequence for B230317C12Rik (NM_019833.1,649-667).
cttcctcaaggctaactta

SEQ ID NO: 709438 - DNA, 19 bp, Mus musculus
  siRNA target sequence for B230317C12Rik (NM_019833.1,691-709).
gctggttgaccagatactt

SEQ ID NO: 709439 - DNA, 19 bp, Mus musculus
  siRNA target sequence for B230317C12Rik (NM_019833.1,716-734).
gcggacttcaacaaggata

SEQ ID NO: 709440 - DNA, 19 bp, Mus musculus
  siRNA target sequence for B230317C12Rik (NM_019833.1,773-791).
ctgctgcagcgcaatgagt

SEQ ID NO: 709441 - DNA, 19 bp, Mus musculus
  siRNA target sequence for B230317C12Rik (NM_019833.1,847-865).
ctgcggggacctctatctt

SEQ ID NO: 709442 - DNA, 19 bp, Mus musculus
  siRNA target sequence for B230317C12Rik (NM_019833.1,850-868).
cggggacctctatcttact

SEQ ID NO: 709443 - DNA, 19 bp, Mus musculus
  siRNA target sequence for B230317C12Rik (NM_019833.1,852-870).
gggacctctatcttactga

SEQ ID NO: 709444 - DNA, 19 bp, Mus musculus
  siRNA target sequence for B230317C12Rik (NM_019833.1,1057-1075).
catgtgtgagactacactt

SEQ ID NO: 709445 - DNA, 19 bp, Mus musculus
  siRNA target sequence for B230317C12Rik (NM_019833.1,1376-1394).
gactggccagccagattga

SEQ ID NO: 709446 - DNA, 19 bp, Mus musculus
  siRNA target sequence for B230317C12Rik (NM_019833.1,1420-1438).
caccttaagaccttactct

SEQ ID NO: 709447 - DNA, 19 bp, Mus musculus
  siRNA target sequence for B230317C12Rik (NM_019833.1,1572-1590).
ggcccaatcctccgaatat

SEQ ID NO: 709448 - DNA, 19 bp, Mus musculus
  siRNA target sequence for B230317C12Rik (NM_019833.1,1574-1592).
cccaatcctccgaatatgt

SEQ ID NO: 709449 - DNA, 19 bp, Mus musculus
  siRNA target sequence for 2610024G14Rik (NM_019836.1,241-259).
ggaccccggaggaacaagt

SEQ ID NO: 709450 - DNA, 19 bp, Mus musculus
  siRNA target sequence for 2610024G14Rik (NM_019836.1,646-664).
cggctctggtgctctatat

SEQ ID NO: 709451 - DNA, 19 bp, Mus musculus
  siRNA target sequence for 2610024G14Rik (NM_019836.1,659-677).
ctatatggtgaatcttcta

SEQ ID NO: 709452 - DNA, 19 bp, Mus musculus
  siRNA target sequence for 2610024G14Rik (NM_019836.1,771-789).
gacgctcccggctacttga

SEQ ID NO: 709453 - DNA, 19 bp, Mus musculus
  siRNA target sequence for 2610024G14Rik (NM_019836.1,922-940).
ggtcccgcacggtagtcaa

SEQ ID NO: 709454 - DNA, 19 bp, Mus musculus
  siRNA target sequence for 2610024G14Rik (NM_019836.1,965-983).
gacgggctatggagttgaa

SEQ ID NO: 709455 - DNA, 19 bp, Mus musculus
  siRNA target sequence for 2610024G14Rik (NM_019836.1,1015-1033).
gctaccgtggtgatgtcta

SEQ ID NO: 709456 - DNA, 19 bp, Mus musculus
  siRNA target sequence for 2610024G14Rik (NM_019836.1,1037-1055).
ggtgggcaccactaatgct

SEQ ID NO: 709457 - DNA, 19 bp, Mus musculus
  siRNA target sequence for 2610024G14Rik (NM_019836.1,1056-1074).
ggcaagtccactctcttta

SEQ ID NO: 709458 - DNA, 19 bp, Mus musculus
  siRNA target sequence for 2610024G14Rik (NM_019836.1,1057-1075).
gcaagtccactctctttaa

SEQ ID NO: 709459 - DNA, 19 bp, Mus musculus
  siRNA target sequence for 2610024G14Rik (NM_019836.1,1061-1079).
gtccactctctttaacaca

SEQ ID NO: 709460 - DNA, 19 bp, Mus musculus
  siRNA target sequence for 2610024G14Rik (NM_019836.1,1078-1096).
cactcctggagtctgatta

SEQ ID NO: 709461 - DNA, 19 bp, Mus musculus
  siRNA target sequence for 2610024G14Rik (NM_019836.1,1147-1165).
ggccaggcaccacattaaa

SEQ ID NO: 709462 - DNA, 19 bp, Mus musculus
  siRNA target sequence for 2610024G14Rik (NM_019836.1,1187-1205).
caacccgactccttacaga

SEQ ID NO: 709463 - DNA, 19 bp, Mus musculus
  siRNA target sequence for 2610024G14Rik (NM_019836.1,1191-1209).
ccgactccttacagaatgt

SEQ ID NO: 709464 - DNA, 19 bp, Mus musculus
  siRNA target sequence for 2610024G14Rik (NM_019836.1,1192-1210).
cgactccttacagaatgtt

SEQ ID NO: 709465 - DNA, 19 bp, Mus musculus
  siRNA target sequence for 2610024G14Rik (NM_019836.1,1195-1213).
ctccttacagaatgttcaa

SEQ ID NO: 709466 - DNA, 19 bp, Mus musculus
  siRNA target sequence for 2610024G14Rik (NM_019836.1,1295-1313).
gaaaaagcacggctacata

SEQ ID NO: 709467 - DNA, 19 bp, Mus musculus
  siRNA target sequence for 2610024G14Rik (NM_019836.1,1356-1374).
gacgaagttccctttgagt

SEQ ID NO: 709468 - DNA, 19 bp, Mus musculus
  siRNA target sequence for 2610024G14Rik (NM_019836.1,1419-1437).
gtgtctgtgtgcaaaagca

SEQ ID NO: 709469 - DNA, 19 bp, Mus musculus
  siRNA target sequence for 2610024G14Rik (NM_019836.1,1476-1494).
gcccactggttttatgaca

SEQ ID NO: 709470 - DNA, 19 bp, Mus musculus
  siRNA target sequence for 2610024G14Rik (NM_019836.1,1491-1509).
gacacccctggaattacaa

SEQ ID NO: 709471 - DNA, 19 bp, Mus musculus
  siRNA target sequence for 2610024G14Rik (NM_019836.1,1495-1513).
cccctggaattacaaaaga

SEQ ID NO: 709472 - DNA, 19 bp, Mus musculus
  siRNA target sequence for 2610024G14Rik (NM_019836.1,1595-1613).
cctcaagccaggaatggtt

SEQ ID NO: 709473 - DNA, 19 bp, Mus musculus
  siRNA target sequence for 2610024G14Rik (NM_019836.1,1596-1614).
ctcaagccaggaatggttt

SEQ ID NO: 709474 - DNA, 19 bp, Mus musculus
  siRNA target sequence for 2610024G14Rik (NM_019836.1,1627-1645).
ggatagcccgaatagattt

SEQ ID NO: 709475 - DNA, 19 bp, Mus musculus
  siRNA target sequence for 2610024G14Rik (NM_019836.1,1726-1744).
cagatgctctgtatgagaa

SEQ ID NO: 709476 - DNA, 19 bp, Mus musculus
  siRNA target sequence for 2610024G14Rik (NM_019836.1,1857-1875).
gcagtagctgatatcaagt

SEQ ID NO: 709477 - DNA, 19 bp, Mus musculus
  siRNA target sequence for 2610024G14Rik (NM_019836.1,1897-1915).
cagtaacaccttattctga

SEQ ID NO: 709478 - DNA, 19 bp, Mus musculus
  siRNA target sequence for 2610024G14Rik (NM_019836.1,1971-1989).
ccccctgtcttgccatata

SEQ ID NO: 709479 - DNA, 19 bp, Mus musculus
  siRNA target sequence for 2610024G14Rik (NM_019836.1,1975-1993).
ctgtcttgccatatatcgt

SEQ ID NO: 709480 - DNA, 19 bp, Mus musculus
  siRNA target sequence for 2610024G14Rik (NM_019836.1,1977-1995).
gtcttgccatatatcgtta

SEQ ID NO: 709481 - DNA, 19 bp, Mus musculus
  siRNA target sequence for 2610024G14Rik (NM_019836.1,1979-1997).
cttgccatatatcgttaat

SEQ ID NO: 709482 - DNA, 19 bp, Mus musculus
  siRNA target sequence for 2610024G14Rik (NM_019836.1,1983-2001).
ccatatatcgttaatgtca

SEQ ID NO: 709483 - DNA, 19 bp, Mus musculus
  siRNA target sequence for 2610024G14Rik (NM_019836.1,1984-2002).
catatatcgttaatgtcaa

SEQ ID NO: 709484 - DNA, 19 bp, Mus musculus
  siRNA target sequence for Amac1 (NM_019871.1,233-251).
gccagtcatccctatttca

SEQ ID NO: 709485 - DNA, 19 bp, Mus musculus
  siRNA target sequence for Amac1 (NM_019871.1,234-252).
ccagtcatccctatttcaa

SEQ ID NO: 709486 - DNA, 19 bp, Mus musculus
  siRNA target sequence for Amac1 (NM_019871.1,474-492).
cctccccattgccttgtta

SEQ ID NO: 709487 - DNA, 19 bp, Mus musculus
  siRNA target sequence for Amac1 (NM_019871.1,546-564).
cttcctccatgccattctt

SEQ ID NO: 709488 - DNA, 19 bp, Mus musculus
  siRNA target sequence for Amac1 (NM_019871.1,549-567).
cctccatgccattcttaat

SEQ ID NO: 709489 - DNA, 19 bp, Mus musculus
  siRNA target sequence for Amac1 (NM_019871.1,730-748).
cccttgggctaatcatcat

SEQ ID NO: 709490 - DNA, 19 bp, Mus musculus
  siRNA target sequence for Amac1 (NM_019871.1,912-930).
gcctggtggggctaatggt

SEQ ID NO: 709491 - DNA, 19 bp, Mus musculus
  siRNA target sequence for Amac1 (NM_019871.1,1005-1023).
cagtggggctccttgcatt

SEQ ID NO: 709492 - DNA, 19 bp, Mus musculus
  siRNA target sequence for Fkbpl (NM_019873.2,158-176).
ccagcaaatcttaaataca

SEQ ID NO: 709493 - DNA, 19 bp, Mus musculus
  siRNA target sequence for Fkbpl (NM_019873.2,240-258).
ccggatccagccaatcaaa

SEQ ID NO: 709494 - DNA, 19 bp, Mus musculus
  siRNA target sequence for Fkbpl (NM_019873.2,242-260).
ggatccagccaatcaaatt

SEQ ID NO: 709495 - DNA, 19 bp, Mus musculus
  siRNA target sequence for Fkbpl (NM_019873.2,247-265).
cagccaatcaaattgtaga

SEQ ID NO: 709496 - DNA, 19 bp, Mus musculus
  siRNA target sequence for Fkbpl (NM_019873.2,376-394).
gtcctgatgggagttttgt

SEQ ID NO: 709497 - DNA, 19 bp, Mus musculus
  siRNA target sequence for Fkbpl (NM_019873.2,622-640).
ctgcacctcttgctaaact

SEQ ID NO: 709498 - DNA, 19 bp, Mus musculus
  siRNA target sequence for Fkbpl (NM_019873.2,624-642).
gcacctcttgctaaactca

SEQ ID NO: 709499 - DNA, 19 bp, Mus musculus
  siRNA target sequence for Fkbpl (NM_019873.2,827-845).
cgaacgaactaccctttat

SEQ ID NO: 709500 - DNA, 19 bp, Mus musculus
  siRNA target sequence for Fkbpl (NM_019873.2,994-1012).
ccactgctgatttcaagaa

SEQ ID NO: 709501 - DNA, 19 bp, Mus musculus
  siRNA target sequence for Fkbpl (NM_019873.2,1104-1122).
cggggactgcgcaagatgt

SEQ ID NO: 709502 - DNA, 19 bp, Mus musculus
  siRNA target sequence for Fkbpl (NM_019873.2,1106-1124).
gggactgcgcaagatgttt

SEQ ID NO: 709503 - DNA, 19 bp, Mus musculus
  siRNA target sequence for Fkbpl (NM_019873.2,1107-1125).
ggactgcgcaagatgttta

SEQ ID NO: 709504 - DNA, 19 bp, Mus musculus
  siRNA target sequence for Fkbpl (NM_019873.2,1110-1128).
ctgcgcaagatgtttagct

SEQ ID NO: 709505 - DNA, 19 bp, Mus musculus
  siRNA target sequence for AI839562 (NM_019914.2,233-251).
gcagcagcgttggcaaaat

SEQ ID NO: 709506 - DNA, 19 bp, Mus musculus
  siRNA target sequence for AI839562 (NM_019914.2,293-311).
gtgaccccctccttgagta

SEQ ID NO: 709507 - DNA, 19 bp, Mus musculus
  siRNA target sequence for Ltbp1 (NM_019919.1,648-666).
gccggcagctccactctaa

SEQ ID NO: 709508 - DNA, 19 bp, Mus musculus
  siRNA target sequence for Ltbp1 (NM_019919.1,823-841).
ctgccacgggtggagtaaa

SEQ ID NO: 709509 - DNA, 19 bp, Mus musculus
  siRNA target sequence for Ltbp1 (NM_019919.1,826-844).
ccacgggtggagtaaacct

SEQ ID NO: 709510 - DNA, 19 bp, Mus musculus
  siRNA target sequence for Ltbp1 (NM_019919.1,1137-1155).
gactctcccagcagataca

SEQ ID NO: 709511 - DNA, 19 bp, Mus musculus
  siRNA target sequence for Ltbp1 (NM_019919.1,1160-1178).
caagttgcacccttatctt

SEQ ID NO: 709512 - DNA, 19 bp, Mus musculus
  siRNA target sequence for Ltbp1 (NM_019919.1,1220-1238).
ctgctcaaacccaagtact

SEQ ID NO: 709513 - DNA, 19 bp, Mus musculus
  siRNA target sequence for Ltbp1 (NM_019919.1,1275-1293).
ccgaaggctctttctcttt

SEQ ID NO: 709514 - DNA, 19 bp, Mus musculus
  siRNA target sequence for Ltbp1 (NM_019919.1,1276-1294).
cgaaggctctttctcttta

SEQ ID NO: 709515 - DNA, 19 bp, Mus musculus
  siRNA target sequence for Ltbp1 (NM_019919.1,1281-1299).
gctctttctctttaagata

SEQ ID NO: 709516 - DNA, 19 bp, Mus musculus
  siRNA target sequence for Ltbp1 (NM_019919.1,1368-1386).
ctccgagcatctgtaaagt

SEQ ID NO: 709517 - DNA, 19 bp, Mus musculus
  siRNA target sequence for Ltbp1 (NM_019919.1,1429-1447).
gaataccaccactctcatt

SEQ ID NO: 709518 - DNA, 19 bp, Mus musculus
  siRNA target sequence for Ltbp1 (NM_019919.1,1434-1452).
ccaccactctcattagtga

SEQ ID NO: 709519 - DNA, 19 bp, Mus musculus
  siRNA target sequence for Ltbp1 (NM_019919.1,1485-1503).
cgaacttccgagtggttat

SEQ ID NO: 709520 - DNA, 19 bp, Mus musculus
  siRNA target sequence for Ltbp1 (NM_019919.1,1556-1574).
cagtgccctccaaatttca

SEQ ID NO: 709521 - DNA, 19 bp, Mus musculus
  siRNA target sequence for Ltbp1 (NM_019919.1,1558-1576).
gtgccctccaaatttcaca

SEQ ID NO: 709522 - DNA, 19 bp, Mus musculus
  siRNA target sequence for Ltbp1 (NM_019919.1,1607-1625).
gccagtatgcccaaactct

SEQ ID NO: 709523 - DNA, 19 bp, Mus musculus
  siRNA target sequence for Ltbp1 (NM_019919.1,1608-1626).
ccagtatgcccaaactcta

SEQ ID NO: 709524 - DNA, 19 bp, Mus musculus
  siRNA target sequence for Ltbp1 (NM_019919.1,1658-1676).
gggagtcacgtcatccatt

SEQ ID NO: 709525 - DNA, 19 bp, Mus musculus
  siRNA target sequence for Ltbp1 (NM_019919.1,1709-1727).
cagcaaggggtcaaagtga

SEQ ID NO: 709526 - DNA, 19 bp, Mus musculus
  siRNA target sequence for Ltbp1 (NM_019919.1,1738-1756).
caacatagtcaatatccat

SEQ ID NO: 709527 - DNA, 19 bp, Mus musculus
  siRNA target sequence for Ltbp1 (NM_019919.1,1747-1765).
caatatccatgtgaaacat

SEQ ID NO: 709528 - DNA, 19 bp, Mus musculus
  siRNA target sequence for Ltbp1 (NM_019919.1,2013-2031).
cgctccctggcctttccaa

SEQ ID NO: 709529 - DNA, 19 bp, Mus musculus
  siRNA target sequence for Ltbp1 (NM_019919.1,2058-2076).
ggacgtcctggggctttaa

SEQ ID NO: 709530 - DNA, 19 bp, Mus musculus
  siRNA target sequence for Ltbp1 (NM_019919.1,2061-2079).
cgtcctggggctttaacaa

SEQ ID NO: 709531 - DNA, 19 bp, Mus musculus
  siRNA target sequence for Ltbp1 (NM_019919.1,2062-2080).
gtcctggggctttaacaaa

SEQ ID NO: 709532 - DNA, 19 bp, Mus musculus
  siRNA target sequence for Ltbp1 (NM_019919.1,2091-2109).
gccccaagaaacaatccta

SEQ ID NO: 709533 - DNA, 19 bp, Mus musculus
  siRNA target sequence for Ltbp1 (NM_019919.1,2092-2110).
ccccaagaaacaatcctat

SEQ ID NO: 709534 - DNA, 19 bp, Mus musculus
  siRNA target sequence for Ltbp1 (NM_019919.1,2095-2113).
caagaaacaatcctatcat

SEQ ID NO: 709535 - DNA, 19 bp, Mus musculus
  siRNA target sequence for Ltbp1 (NM_019919.1,2102-2120).
caatcctatcatggatata

SEQ ID NO: 709536 - DNA, 19 bp, Mus musculus
  siRNA target sequence for Ltbp1 (NM_019919.1,2106-2124).
cctatcatggatatactca

SEQ ID NO: 709537 - DNA, 19 bp, Mus musculus
  siRNA target sequence for Ltbp1 (NM_019919.1,2107-2125).
ctatcatggatatactcaa

SEQ ID NO: 709538 - DNA, 19 bp, Mus musculus
  siRNA target sequence for Ltbp1 (NM_019919.1,2111-2129).
catggatatactcaaatga

SEQ ID NO: 709539 - DNA, 19 bp, Mus musculus
  siRNA target sequence for Ltbp1 (NM_019919.1,2131-2149).
ggaatgcctacaaggatat

SEQ ID NO: 709540 - DNA, 19 bp, Mus musculus
  siRNA target sequence for Ltbp1 (NM_019919.1,2132-2150).
gaatgcctacaaggatata

SEQ ID NO: 709541 - DNA, 19 bp, Mus musculus
  siRNA target sequence for Ltbp1 (NM_019919.1,2144-2162).
ggatataaacgggttaaca

SEQ ID NO: 709542 - DNA, 19 bp, Mus musculus
  siRNA target sequence for Ltbp1 (NM_019919.1,2153-2171).
cgggttaacaacacctttt

SEQ ID NO: 709543 - DNA, 19 bp, Mus musculus
  siRNA target sequence for Ltbp1 (NM_019919.1,2155-2173).
ggttaacaacaccttttgt

SEQ ID NO: 709544 - DNA, 19 bp, Mus musculus
  siRNA target sequence for Ltbp1 (NM_019919.1,2161-2179).
caacaccttttgtcaagat

SEQ ID NO: 709545 - DNA, 19 bp, Mus musculus
  siRNA target sequence for Ltbp1 (NM_019919.1,2208-2226).
gccctaatggtgagtgttt

SEQ ID NO: 709546 - DNA, 19 bp, Mus musculus
  siRNA target sequence for Ltbp1 (NM_019919.1,2210-2228).
cctaatggtgagtgtttga

SEQ ID NO: 709547 - DNA, 19 bp, Mus musculus
  siRNA target sequence for Ltbp1 (NM_019919.1,2269-2287).
cgggcctgaccctaccttt

SEQ ID NO: 709548 - DNA, 19 bp, Mus musculus
  siRNA target sequence for Ltbp1 (NM_019919.1,2272-2290).
gcctgaccctaccttttca

SEQ ID NO: 709549 - DNA, 19 bp, Mus musculus
  siRNA target sequence for Ltbp1 (NM_019919.1,2371-2389).
gcaccctctctctgttcat

SEQ ID NO: 709550 - DNA, 19 bp, Mus musculus
  siRNA target sequence for Ltbp1 (NM_019919.1,2458-2476).
cccaggcacagctgctttt

SEQ ID NO: 709551 - DNA, 19 bp, Mus musculus
  siRNA target sequence for Ltbp1 (NM_019919.1,2509-2527).
ggtttctggcgttcataga

SEQ ID NO: 709552 - DNA, 19 bp, Mus musculus
  siRNA target sequence for Ltbp1 (NM_019919.1,2532-2550).
ggccaatccatcagcatat

SEQ ID NO: 709553 - DNA, 19 bp, Mus musculus
  siRNA target sequence for Ltbp1 (NM_019919.1,2533-2551).
gccaatccatcagcatata

SEQ ID NO: 709554 - DNA, 19 bp, Mus musculus
  siRNA target sequence for Ltbp1 (NM_019919.1,2539-2557).
ccatcagcatataggtaaa

SEQ ID NO: 709555 - DNA, 19 bp, Mus musculus
  siRNA target sequence for Ltbp1 (NM_019919.1,2584-2602).
cactcaacctgttgctaaa

SEQ ID NO: 709556 - DNA, 19 bp, Mus musculus
  siRNA target sequence for Ltbp1 (NM_019919.1,2779-2797).
cccaggggtttcaactatt

SEQ ID NO: 709557 - DNA, 19 bp, Mus musculus
  siRNA target sequence for Ltbp1 (NM_019919.1,2781-2799).
caggggtttcaactattca

SEQ ID NO: 709558 - DNA, 19 bp, Mus musculus
  siRNA target sequence for Ltbp1 (NM_019919.1,2784-2802).
gggtttcaactattcatct

SEQ ID NO: 709559 - DNA, 19 bp, Mus musculus
  siRNA target sequence for Ltbp1 (NM_019919.1,2901-2919).
ctcctacgcaagtaacaga

SEQ ID NO: 709560 - DNA, 19 bp, Mus musculus
  siRNA target sequence for Ltbp1 (NM_019919.1,2907-2925).
cgcaagtaacagaaatcaa

SEQ ID NO: 709561 - DNA, 19 bp, Mus musculus
  siRNA target sequence for Ltbp1 (NM_019919.1,2912-2930).
gtaacagaaatcaacgaat

SEQ ID NO: 709562 - DNA, 19 bp, Mus musculus
  siRNA target sequence for Ltbp1 (NM_019919.1,2975-2993).
ctgccggtgcggtatacct

SEQ ID NO: 709563 - DNA, 19 bp, Mus musculus
  siRNA target sequence for Ltbp1 (NM_019919.1,2984-3002).
cggtatacctgcatatgct

SEQ ID NO: 709564 - DNA, 19 bp, Mus musculus
  siRNA target sequence for Ltbp1 (NM_019919.1,2985-3003).
ggtatacctgcatatgcta

SEQ ID NO: 709565 - DNA, 19 bp, Mus musculus
  siRNA target sequence for Ltbp1 (NM_019919.1,3149-3167).
gaggagggtactaactgta

SEQ ID NO: 709566 - DNA, 19 bp, Mus musculus
  siRNA target sequence for Ltbp1 (NM_019919.1,3154-3172).
gggtactaactgtatagat

SEQ ID NO: 709567 - DNA, 19 bp, Mus musculus
  siRNA target sequence for Ltbp1 (NM_019919.1,3156-3174).
gtactaactgtatagatgt

SEQ ID NO: 709568 - DNA, 19 bp, Mus musculus
  siRNA target sequence for Ltbp1 (NM_019919.1,3185-3203).
ctgaggcctgatatgtgta

SEQ ID NO: 709569 - DNA, 19 bp, Mus musculus
  siRNA target sequence for Ltbp1 (NM_019919.1,3433-3451).
gccaaaggtctgtacgaat

SEQ ID NO: 709570 - DNA, 19 bp, Mus musculus
  siRNA target sequence for Ltbp1 (NM_019919.1,3467-3485).
ctggaagggtcctacatgt

SEQ ID NO: 709571 - DNA, 19 bp, Mus musculus
  siRNA target sequence for Ltbp1 (NM_019919.1,3470-3488).
gaagggtcctacatgtgtt

SEQ ID NO: 709572 - DNA, 19 bp, Mus musculus
  siRNA target sequence for Ltbp1 (NM_019919.1,3772-3790).
ccactgtgaggatatcaat

SEQ ID NO: 709573 - DNA, 19 bp, Mus musculus
  siRNA target sequence for Ltbp1 (NM_019919.1,3858-3876).
gcacatgcccggatggatt

SEQ ID NO: 709574 - DNA, 19 bp, Mus musculus
  siRNA target sequence for Ltbp1 (NM_019919.1,3895-3913).
gggctgtcaagacattaat

SEQ ID NO: 709575 - DNA, 19 bp, Mus musculus
  siRNA target sequence for Ltbp1 (NM_019919.1,3942-3960).
ctcatggggagtgtctaaa

SEQ ID NO: 709576 - DNA, 19 bp, Mus musculus
  siRNA target sequence for Ltbp1 (NM_019919.1,3944-3962).
catggggagtgtctaaaca

SEQ ID NO: 709577 - DNA, 19 bp, Mus musculus
  siRNA target sequence for Ltbp1 (NM_019919.1,4016-4034).
ggccgtacatgcgaagata

SEQ ID NO: 709578 - DNA, 19 bp, Mus musculus
  siRNA target sequence for Ltbp1 (NM_019919.1,4017-4035).
gccgtacatgcgaagatat

SEQ ID NO: 709579 - DNA, 19 bp, Mus musculus
  siRNA target sequence for Ltbp1 (NM_019919.1,4018-4036).
ccgtacatgcgaagatatt

SEQ ID NO: 709580 - DNA, 19 bp, Mus musculus
  siRNA target sequence for Ltbp1 (NM_019919.1,4020-4038).
gtacatgcgaagatattga

SEQ ID NO: 709581 - DNA, 19 bp, Mus musculus
  siRNA target sequence for Ltbp1 (NM_019919.1,4037-4055).
gatgagtgtgttaacaaca

SEQ ID NO: 709582 - DNA, 19 bp, Mus musculus
  siRNA target sequence for Ltbp1 (NM_019919.1,4111-4129).
ctgttatcagggctttcaa

SEQ ID NO: 709583 - DNA, 19 bp, Mus musculus
  siRNA target sequence for Ltbp1 (NM_019919.1,4333-4351).
gaagaaggagtgctattat

SEQ ID NO: 709584 - DNA, 19 bp, Mus musculus
  siRNA target sequence for Ltbp1 (NM_019919.1,4344-4362).
gctattataacctcaatga

SEQ ID NO: 709585 - DNA, 19 bp, Mus musculus
  siRNA target sequence for Ltbp1 (NM_019919.1,4345-4363).
ctattataacctcaatgat

SEQ ID NO: 709586 - DNA, 19 bp, Mus musculus
  siRNA target sequence for Ltbp1 (NM_019919.1,4390-4408).
ccccaacgtcaccaaacaa

SEQ ID NO: 709587 - DNA, 19 bp, Mus musculus
  siRNA target sequence for Ltbp1 (NM_019919.1,4392-4410).
ccaacgtcaccaaacaaga

SEQ ID NO: 709588 - DNA, 19 bp, Mus musculus
  siRNA target sequence for Ltbp1 (NM_019919.1,4500-4518).
gccctagagggaaaggttt

SEQ ID NO: 709589 - DNA, 19 bp, Mus musculus
  siRNA target sequence for Ltbp1 (NM_019919.1,4588-4606).
gtttggagaggaaatctgt

SEQ ID NO: 709590 - DNA, 19 bp, Mus musculus
  siRNA target sequence for Ltbp1 (NM_019919.1,4627-4645).
cactcaacctgggtatgaa

SEQ ID NO: 709591 - DNA, 19 bp, Mus musculus
  siRNA target sequence for Ltbp1 (NM_019919.1,4653-4671).
gtaagcaagggacatacta

SEQ ID NO: 709592 - DNA, 19 bp, Mus musculus
  siRNA target sequence for Ltbp1 (NM_019919.1,4657-4675).
gcaagggacatactatgat

SEQ ID NO: 709593 - DNA, 19 bp, Mus musculus
  siRNA target sequence for Ltbp1 (NM_019919.1,4852-4870).
gaccgatgtctatcaagat

SEQ ID NO: 709594 - DNA, 19 bp, Mus musculus
  siRNA target sequence for Ltbp1 (NM_019919.1,4854-4872).
ccgatgtctatcaagatct

SEQ ID NO: 709595 - DNA, 19 bp, Mus musculus
  siRNA target sequence for Ltbp1 (NM_019919.1,4928-4946).
cagacgacgtacacagaat

SEQ ID NO: 709596 - DNA, 19 bp, Mus musculus
  siRNA target sequence for Ltbp1 (NM_019919.1,5058-5076).
catatggacgggatgcatt

SEQ ID NO: 709597 - DNA, 19 bp, Mus musculus
  siRNA target sequence for Ltbp1 (NM_019919.1,5103-5121).
cagaaacagacccttactt

SEQ ID NO: 709598 - DNA, 19 bp, Mus musculus
  siRNA target sequence for Ltbp1 (NM_019919.1,5232-5250).
gcgattgctttgatggata

SEQ ID NO: 709599 - DNA, 19 bp, Mus musculus
  siRNA target sequence for Ltbp1 (NM_019919.1,5233-5251).
cgattgctttgatggatat

SEQ ID NO: 709600 - DNA, 19 bp, Mus musculus
  siRNA target sequence for Ltbp1 (NM_019919.1,5291-5309).
gaatgcagcgagctgaata

SEQ ID NO: 709601 - DNA, 19 bp, Mus musculus
  siRNA target sequence for Ltbp1 (NM_019919.1,5332-5350).
cgccaagtgcattaacaca

SEQ ID NO: 709602 - DNA, 19 bp, Mus musculus
  siRNA target sequence for Ltbp1 (NM_019919.1,5371-5389).
gtgtctgccaggctacata

SEQ ID NO: 709603 - DNA, 19 bp, Mus musculus
  siRNA target sequence for Ltbp1 (NM_019919.1,5375-5393).
ctgccaggctacataccat

SEQ ID NO: 709604 - DNA, 19 bp, Mus musculus
  siRNA target sequence for Ltbp1 (NM_019919.1,5418-5436).
ccctgaacagcgctttgaa

SEQ ID NO: 709605 - DNA, 19 bp, Mus musculus
  siRNA target sequence for Ltbp1 (NM_019919.1,5427-5445).
gcgctttgaatttagacaa

SEQ ID NO: 709606 - DNA, 19 bp, Mus musculus
  siRNA target sequence for Ltbp1 (NM_019919.1,5428-5446).
cgctttgaatttagacaaa

SEQ ID NO: 709607 - DNA, 19 bp, Mus musculus
  siRNA target sequence for Map2k1ip1 (NM_019920.1,333-351).
ctcggactttcaaaaaaca

SEQ ID NO: 709608 - DNA, 19 bp, Mus musculus
  siRNA target sequence for Map2k1ip1 (NM_019920.1,380-398).
ccaggtggttcagttcaat

SEQ ID NO: 709609 - DNA, 19 bp, Mus musculus
  siRNA target sequence for Smt3h1 (NM_019929.1,131-149).
cggtggtacagttcaagat

SEQ ID NO: 709610 - DNA, 19 bp, Mus musculus
  siRNA target sequence for Smt3h1 (NM_019929.1,133-151).
gtggtacagttcaagatca

SEQ ID NO: 709611 - DNA, 19 bp, Mus musculus
  siRNA target sequence for Smt3h1 (NM_019929.1,285-303).
ggatgaggacaccattgat

SEQ ID NO: 709612 - DNA, 19 bp, Mus musculus
  siRNA target sequence for Ranbp9 (NM_019930.1,448-466).
gcggcctgtgggatttatt

SEQ ID NO: 709613 - DNA, 19 bp, Mus musculus
  siRNA target sequence for Ranbp9 (NM_019930.1,449-467).
cggcctgtgggatttatta

SEQ ID NO: 709614 - DNA, 19 bp, Mus musculus
  siRNA target sequence for Ranbp9 (NM_019930.1,450-468).
ggcctgtgggatttattat

SEQ ID NO: 709615 - DNA, 19 bp, Mus musculus
  siRNA target sequence for Ranbp9 (NM_019930.1,524-542).
ctgctcaaggtgtgaacat

SEQ ID NO: 709616 - DNA, 19 bp, Mus musculus
  siRNA target sequence for Ranbp9 (NM_019930.1,529-547).
caaggtgtgaacatgaata

SEQ ID NO: 709617 - DNA, 19 bp, Mus musculus
  siRNA target sequence for Ranbp9 (NM_019930.1,533-551).
gtgtgaacatgaatagact

SEQ ID NO: 709618 - DNA, 19 bp, Mus musculus
  siRNA target sequence for Ranbp9 (NM_019930.1,588-606).
ggatgatggacattcattt

SEQ ID NO: 709619 - DNA, 19 bp, Mus musculus
  siRNA target sequence for Ranbp9 (NM_019930.1,628-646).
ccgtatggaccaactttta

SEQ ID NO: 709620 - DNA, 19 bp, Mus musculus
  siRNA target sequence for Ranbp9 (NM_019930.1,660-678).
cattggctgttgtgttaat

SEQ ID NO: 709621 - DNA, 19 bp, Mus musculus
  siRNA target sequence for Ranbp9 (NM_019930.1,665-683).
gctgttgtgttaatcttat

SEQ ID NO: 709622 - DNA, 19 bp, Mus musculus
  siRNA target sequence for Ranbp9 (NM_019930.1,702-720).
cacgaagaatggacatagt

SEQ ID NO: 709623 - DNA, 19 bp, Mus musculus
  siRNA target sequence for Ranbp9 (NM_019930.1,704-722).
cgaagaatggacatagttt

SEQ ID NO: 709624 - DNA, 19 bp, Mus musculus
  siRNA target sequence for Ranbp9 (NM_019930.1,708-726).
gaatggacatagtttaggt

SEQ ID NO: 709625 - DNA, 19 bp, Mus musculus
  siRNA target sequence for Ranbp9 (NM_019930.1,737-755).
ccgacttaccgccaaattt

SEQ ID NO: 709626 - DNA, 19 bp, Mus musculus
  siRNA target sequence for Ranbp9 (NM_019930.1,741-759).
cttaccgccaaatttgtat

SEQ ID NO: 709627 - DNA, 19 bp, Mus musculus
  siRNA target sequence for Ranbp9 (NM_019930.1,745-763).
ccgccaaatttgtatccta

SEQ ID NO: 709628 - DNA, 19 bp, Mus musculus
  siRNA target sequence for Ranbp9 (NM_019930.1,809-827).
ggcaacatccttttgtgtt

SEQ ID NO: 709629 - DNA, 19 bp, Mus musculus
  siRNA target sequence for Ranbp9 (NM_019930.1,848-866).
gagaatggagaaccaaaat

SEQ ID NO: 709630 - DNA, 19 bp, Mus musculus
  siRNA target sequence for Ranbp9 (NM_019930.1,874-892).
cagatagaccgctttccta

SEQ ID NO: 709631 - DNA, 19 bp, Mus musculus
  siRNA target sequence for Ranbp9 (NM_019930.1,921-939).
catgatccaaaaaatggtt

SEQ ID NO: 709632 - DNA, 19 bp, Mus musculus
  siRNA target sequence for Ranbp9 (NM_019930.1,927-945).
ccaaaaaatggtttcatct

SEQ ID NO: 709633 - DNA, 19 bp, Mus musculus
  siRNA target sequence for Ranbp9 (NM_019930.1,979-997).
gaggcctttgccagatcta

SEQ ID NO: 709634 - DNA, 19 bp, Mus musculus
  siRNA target sequence for Ranbp9 (NM_019930.1,1003-1021).
cagactgttctagaagaat

SEQ ID NO: 709635 - DNA, 19 bp, Mus musculus
  siRNA target sequence for Ranbp9 (NM_019930.1,1005-1023).
gactgttctagaagaatta

SEQ ID NO: 709636 - DNA, 19 bp, Mus musculus
  siRNA target sequence for Ranbp9 (NM_019930.1,1040-1058).
gacaaagaattcagaagtt

SEQ ID NO: 709637 - DNA, 19 bp, Mus musculus
  siRNA target sequence for Ranbp9 (NM_019930.1,1156-1174).
gtacgtcagtttatagaaa

SEQ ID NO: 709638 - DNA, 19 bp, Mus musculus
  siRNA target sequence for Ranbp9 (NM_019930.1,1160-1178).
gtcagtttatagaaatggt

SEQ ID NO: 709639 - DNA, 19 bp, Mus musculus
  siRNA target sequence for Ranbp9 (NM_019930.1,1209-1227).
gggaggccgaagtccaaaa

SEQ ID NO: 709640 - DNA, 19 bp, Mus musculus
  siRNA target sequence for Ranbp9 (NM_019930.1,1210-1228).
ggaggccgaagtccaaaat

SEQ ID NO: 709641 - DNA, 19 bp, Mus musculus
  siRNA target sequence for Ranbp9 (NM_019930.1,1214-1232).
gccgaagtccaaaatctca

SEQ ID NO: 709642 - DNA, 19 bp, Mus musculus
  siRNA target sequence for Ranbp9 (NM_019930.1,1248-1266).
cagtcctcgaccctttagt

SEQ ID NO: 709643 - DNA, 19 bp, Mus musculus
  siRNA target sequence for Ranbp9 (NM_019930.1,1283-1301).
ccagtcatggaatgagtat

SEQ ID NO: 709644 - DNA, 19 bp, Mus musculus
  siRNA target sequence for Ranbp9 (NM_019930.1,1390-1408).
caatcatattgccatagta

SEQ ID NO: 709645 - DNA, 19 bp, Mus musculus
  siRNA target sequence for Ranbp9 (NM_019930.1,1440-1458).
gctaaacagtctcaatgta

SEQ ID NO: 709646 - DNA, 19 bp, Mus musculus
  siRNA target sequence for Ranbp9 (NM_019930.1,1441-1459).
ctaaacagtctcaatgtat

SEQ ID NO: 709647 - DNA, 19 bp, Mus musculus
  siRNA target sequence for Ranbp9 (NM_019930.1,1482-1500).
ctttaccagtaatgatgta

SEQ ID NO: 709648 - DNA, 19 bp, Mus musculus
  siRNA target sequence for Ranbp9 (NM_019930.1,1528-1546).
ggagttggagaaacttcat

SEQ ID NO: 709649 - DNA, 19 bp, Mus musculus
  siRNA target sequence for Ranbp9 (NM_019930.1,1537-1555).
gaaacttcatccaatggtt

SEQ ID NO: 709650 - DNA, 19 bp, Mus musculus
  siRNA target sequence for Ranbp9 (NM_019930.1,1544-1562).
catccaatggtttcctaaa

SEQ ID NO: 709651 - DNA, 19 bp, Mus musculus
  siRNA target sequence for Ranbp9 (NM_019930.1,1571-1589).
ctaaacatgaccacgaaat

SEQ ID NO: 709652 - DNA, 19 bp, Mus musculus
  siRNA target sequence for Ranbp9 (NM_019930.1,1579-1597).
gaccacgaaatggaagatt

SEQ ID NO: 709653 - DNA, 19 bp, Mus musculus
  siRNA target sequence for Ranbp9 (NM_019930.1,1581-1599).
ccacgaaatggaagattgt

SEQ ID NO: 709654 - DNA, 19 bp, Mus musculus
  siRNA target sequence for Ranbp9 (NM_019930.1,1615-1633).
gttgactgcagtcagttaa

SEQ ID NO: 709655 - DNA, 19 bp, Mus musculus
  siRNA target sequence for Ranbp9 (NM_019930.1,1733-1751).
gcaagaacacagcaaataa

SEQ ID NO: 709656 - DNA, 19 bp, Mus musculus
  siRNA target sequence for Ranbp9 (NM_019930.1,1764-1782).
ggacgcattcagcttacta

SEQ ID NO: 709657 - DNA, 19 bp, Mus musculus
  siRNA target sequence for Ranbp9 (NM_019930.1,1855-1873).
gctcttaacagtgcaatat

SEQ ID NO: 709658 - DNA, 19 bp, Mus musculus
  siRNA target sequence for Ranbp9 (NM_019930.1,1881-1899).
ccacaatctgccaaagcaa

SEQ ID NO: 709659 - DNA, 19 bp, Mus musculus
  siRNA target sequence for Ranbp9 (NM_019930.1,1987-2005).
gtggaagactacctacatt

SEQ ID NO: 709660 - DNA, 19 bp, Mus musculus
  siRNA target sequence for 1200020A08Rik (NM_019936.1,231-249).
ccacttgcagaatttgtaa

SEQ ID NO: 709661 - DNA, 19 bp, Mus musculus
  siRNA target sequence for 1200020A08Rik (NM_019936.1,284-302).
caaggctgcgcctacaaaa

SEQ ID NO: 709662 - DNA, 19 bp, Mus musculus
  siRNA target sequence for 1200020A08Rik (NM_019936.1,316-334).
gatgtgtggcaaaaaggtt

SEQ ID NO: 709663 - DNA, 19 bp, Mus musculus
  siRNA target sequence for Papolb (NM_019943.1,211-229).
cacccaaggagcacaacaa

SEQ ID NO: 709664 - DNA, 19 bp, Mus musculus
  siRNA target sequence for Papolb (NM_019943.1,466-484).
gaatgttggggggaaaatt

SEQ ID NO: 709665 - DNA, 19 bp, Mus musculus
  siRNA target sequence for Papolb (NM_019943.1,493-511).
cggctcttaccgattagga

SEQ ID NO: 709666 - DNA, 19 bp, Mus musculus
  siRNA target sequence for Papolb (NM_019943.1,525-543).
gtgcagatatcgatgcttt

SEQ ID NO: 709667 - DNA, 19 bp, Mus musculus
  siRNA target sequence for Papolb (NM_019943.1,555-573).
caagacacgtggatcgaaa

SEQ ID NO: 709668 - DNA, 19 bp, Mus musculus
  siRNA target sequence for Papolb (NM_019943.1,560-578).
cacgtggatcgaaatgact

SEQ ID NO: 709669 - DNA, 19 bp, Mus musculus
  siRNA target sequence for Papolb (NM_019943.1,562-580).
cgtggatcgaaatgacttt

SEQ ID NO: 709670 - DNA, 19 bp, Mus musculus
  siRNA target sequence for Papolb (NM_019943.1,647-665).
gcctttgtgccggttatca

SEQ ID NO: 709671 - DNA, 19 bp, Mus musculus
  siRNA target sequence for Papolb (NM_019943.1,648-666).
cctttgtgccggttatcaa

SEQ ID NO: 709672 - DNA, 19 bp, Mus musculus
  siRNA target sequence for Papolb (NM_019943.1,649-667).
ctttgtgccggttatcaaa

SEQ ID NO: 709673 - DNA, 19 bp, Mus musculus
  siRNA target sequence for Papolb (NM_019943.1,799-817).
cggttgccgggtaactgat

SEQ ID NO: 709674 - DNA, 19 bp, Mus musculus
  siRNA target sequence for Papolb (NM_019943.1,804-822).
gccgggtaactgatgagat

SEQ ID NO: 709675 - DNA, 19 bp, Mus musculus
  siRNA target sequence for Papolb (NM_019943.1,806-824).
cgggtaactgatgagattt

SEQ ID NO: 709676 - DNA, 19 bp, Mus musculus
  siRNA target sequence for Papolb (NM_019943.1,990-1008).
ccactcttgtgcgaaaatt

SEQ ID NO: 709677 - DNA, 19 bp, Mus musculus
  siRNA target sequence for Papolb (NM_019943.1,991-1009).
cactcttgtgcgaaaattt

SEQ ID NO: 709678 - DNA, 19 bp, Mus musculus
  siRNA target sequence for Papolb (NM_019943.1,993-1011).
ctcttgtgcgaaaattttt

SEQ ID NO: 709679 - DNA, 19 bp, Mus musculus
  siRNA target sequence for Papolb (NM_019943.1,995-1013).
cttgtgcgaaaatttttct

SEQ ID NO: 709680 - DNA, 19 bp, Mus musculus
  siRNA target sequence for Papolb (NM_019943.1,1062-1080).
cagaagaacgaaatcttaa

SEQ ID NO: 709681 - DNA, 19 bp, Mus musculus
  siRNA target sequence for Papolb (NM_019943.1,1094-1112).
gacccaagagtgaatccta

SEQ ID NO: 709682 - DNA, 19 bp, Mus musculus
  siRNA target sequence for Papolb (NM_019943.1,1188-1206).
cgaccaggatggtcatgat

SEQ ID NO: 709683 - DNA, 19 bp, Mus musculus
  siRNA target sequence for Papolb (NM_019943.1,1191-1209).
ccaggatggtcatgattga

SEQ ID NO: 709684 - DNA, 19 bp, Mus musculus
  siRNA target sequence for Papolb (NM_019943.1,1343-1361).
gagaaacaacatttagagt

SEQ ID NO: 709685 - DNA, 19 bp, Mus musculus
  siRNA target sequence for Papolb (NM_019943.1,1452-1470).
cgtttccagcaccaaaaga

SEQ ID NO: 709686 - DNA, 19 bp, Mus musculus
  siRNA target sequence for Papolb (NM_019943.1,1539-1557).
ctgaaattctcagtattga

SEQ ID NO: 709687 - DNA, 19 bp, Mus musculus
  siRNA target sequence for Papolb (NM_019943.1,1604-1622).
gcaataaatagtaagatgt

SEQ ID NO: 709688 - DNA, 19 bp, Mus musculus
  siRNA target sequence for Papolb (NM_019943.1,1643-1661).
gctgcaatgcatctaagaa

SEQ ID NO: 709689 - DNA, 19 bp, Mus musculus
  siRNA target sequence for Papolb (NM_019943.1,1678-1696).
gctacttccaaatcatgtt

SEQ ID NO: 709690 - DNA, 19 bp, Mus musculus
  siRNA target sequence for Papolb (NM_019943.1,1760-1778).
cttctcttgtctatagaca

SEQ ID NO: 709691 - DNA, 19 bp, Mus musculus
  siRNA target sequence for Papolb (NM_019943.1,1805-1823).
cctactggcactatgaaga

SEQ ID NO: 709692 - DNA, 19 bp, Mus musculus
  siRNA target sequence for Papolb (NM_019943.1,1984-2002).
ctcacaacctaccatttca

SEQ ID NO: 709693 - DNA, 19 bp, Mus musculus
  siRNA target sequence for Papolb (NM_019943.1,2006-2024).
ccacctaagcctacaatga

SEQ ID NO: 709694 - DNA, 19 bp, Mus musculus
  siRNA target sequence for Papolb (NM_019943.1,2040-2058).
cgacacatctggtaaacca

SEQ ID NO: 709695 - DNA, 19 bp, Mus musculus
  siRNA target sequence for Papolb (NM_019943.1,2050-2068).
ggtaaaccatccatctaga

SEQ ID NO: 709696 - DNA, 19 bp, Mus musculus
  siRNA target sequence for Papolb (NM_019943.1,2088-2106).
cgaacatacccaatcctat

SEQ ID NO: 709697 - DNA, 19 bp, Mus musculus
  siRNA target sequence for Papolb (NM_019943.1,2089-2107).
gaacatacccaatcctata

SEQ ID NO: 709698 - DNA, 19 bp, Mus musculus
  siRNA target sequence for Tmem4 (NM_019953.1,355-373).
ggttggctagccctacttt

SEQ ID NO: 709699 - DNA, 19 bp, Mus musculus
  siRNA target sequence for Tmem4 (NM_019953.1,356-374).
gttggctagccctactttt

SEQ ID NO: 709700 - DNA, 19 bp, Mus musculus
  siRNA target sequence for Tmem4 (NM_019953.1,437-455).
gggctctggtggatgaatt

SEQ ID NO: 709701 - DNA, 19 bp, Mus musculus
  siRNA target sequence for Tmem4 (NM_019953.1,438-456).
ggctctggtggatgaatta

SEQ ID NO: 709702 - DNA, 19 bp, Mus musculus
  siRNA target sequence for Tmem4 (NM_019953.1,501-519).
gggatccttccgaatcaat

SEQ ID NO: 709703 - DNA, 19 bp, Mus musculus
  siRNA target sequence for Tmem4 (NM_019953.1,536-554).
cagttgtggaggtacctta

SEQ ID NO: 709704 - DNA, 19 bp, Mus musculus
  siRNA target sequence for Tmem4 (NM_019953.1,638-656).
ctacccaccgcaagaacta

SEQ ID NO: 709705 - DNA, 19 bp, Mus musculus
  siRNA target sequence for Tmem4 (NM_019953.1,680-698).
gagaatccagtgaactaga

SEQ ID NO: 709706 - DNA, 19 bp, Mus musculus
  siRNA target sequence for Tmem4 (NM_019953.1,703-721).
cagggcatccgaattgact

SEQ ID NO: 709707 - DNA, 19 bp, Mus musculus
  siRNA target sequence for Tmem4 (NM_019953.1,774-792).
cgaggatgagcttatcgaa

SEQ ID NO: 709708 - DNA, 19 bp, Mus musculus
  siRNA target sequence for Tmem4 (NM_019953.1,775-793).
gaggatgagcttatcgaat

SEQ ID NO: 709709 - DNA, 19 bp, Mus musculus
  siRNA target sequence for Tmem4 (NM_019953.1,778-796).
gatgagcttatcgaattct

SEQ ID NO: 709710 - DNA, 19 bp, Mus musculus
  siRNA target sequence for Tmem4 (NM_019953.1,781-799).
gagcttatcgaattcttct

SEQ ID NO: 709711 - DNA, 19 bp, Mus musculus
  siRNA target sequence for Tmem4 (NM_019953.1,803-821).
gagaggctgacaacgttaa

SEQ ID NO: 709712 - DNA, 19 bp, Mus musculus
  siRNA target sequence for Tmem4 (NM_019953.1,813-831).
caacgttaaagacaaactt

SEQ ID NO: 709713 - DNA, 19 bp, Mus musculus
  siRNA target sequence for Tmem4 (NM_019953.1,834-852).
cagtaagcggacagatcta

SEQ ID NO: 709714 - DNA, 19 bp, Mus musculus
  siRNA target sequence for C1qtnf1 (NM_019959.1,62-80).
cctgtgcacagggattcat

SEQ ID NO: 709715 - DNA, 19 bp, Mus musculus
  siRNA target sequence for C1qtnf1 (NM_019959.1,217-235).
gaaacacgagagaagtata

SEQ ID NO: 709716 - DNA, 19 bp, Mus musculus
  siRNA target sequence for C1qtnf1 (NM_019959.1,296-314).
cacctgtataccagacaat

SEQ ID NO: 709717 - DNA, 19 bp, Mus musculus
  siRNA target sequence for C1qtnf1 (NM_019959.1,316-334).
cctccaccccagatcaaca

SEQ ID NO: 709718 - DNA, 19 bp, Mus musculus
  siRNA target sequence for C1qtnf1 (NM_019959.1,384-402).
ggggaagtacggcaaaata

SEQ ID NO: 709719 - DNA, 19 bp, Mus musculus
  siRNA target sequence for C1qtnf1 (NM_019959.1,387-405).
gaagtacggcaaaataggt

SEQ ID NO: 709720 - DNA, 19 bp, Mus musculus
  siRNA target sequence for C1qtnf1 (NM_019959.1,393-411).
cggcaaaataggttctaca

SEQ ID NO: 709721 - DNA, 19 bp, Mus musculus
  siRNA target sequence for C1qtnf1 (NM_019959.1,564-582).
gtttgtgaacctctacaaa

SEQ ID NO: 709722 - DNA, 19 bp, Mus musculus
  siRNA target sequence for C1qtnf1 (NM_019959.1,817-835).
cgtgagaacgccattttca

SEQ ID NO: 709723 - DNA, 19 bp, Mus musculus
  siRNA target sequence for Dbccr1 (NM_019967.1,108-126).
ggaatttgattggcttatt

SEQ ID NO: 709724 - DNA, 19 bp, Mus musculus
  siRNA target sequence for Dbccr1 (NM_019967.1,109-127).
gaatttgattggcttattt

SEQ ID NO: 709725 - DNA, 19 bp, Mus musculus
  siRNA target sequence for Dbccr1 (NM_019967.1,148-166).
cactccaggagctacctat

SEQ ID NO: 709726 - DNA, 19 bp, Mus musculus
  siRNA target sequence for Dbccr1 (NM_019967.1,153-171).
caggagctacctatccttt

SEQ ID NO: 709727 - DNA, 19 bp, Mus musculus
  siRNA target sequence for Dbccr1 (NM_019967.1,190-208).
ggatttacaaccagatata

SEQ ID NO: 709728 - DNA, 19 bp, Mus musculus
  siRNA target sequence for Dbccr1 (NM_019967.1,191-209).
gatttacaaccagatataa

SEQ ID NO: 709729 - DNA, 19 bp, Mus musculus
  siRNA target sequence for Dbccr1 (NM_019967.1,287-305).
ccctcatgccggagtttca

SEQ ID NO: 709730 - DNA, 19 bp, Mus musculus
  siRNA target sequence for Dbccr1 (NM_019967.1,289-307).
ctcatgccggagtttcaaa

SEQ ID NO: 709731 - DNA, 19 bp, Mus musculus
  siRNA target sequence for Dbccr1 (NM_019967.1,339-357).
cactcagcagttcattgat

SEQ ID NO: 709732 - DNA, 19 bp, Mus musculus
  siRNA target sequence for Dbccr1 (NM_019967.1,498-516).
gcttgcatcatcctacttt

SEQ ID NO: 709733 - DNA, 19 bp, Mus musculus
  siRNA target sequence for Dbccr1 (NM_019967.1,546-564).
ccatgagatccagatttca

SEQ ID NO: 709734 - DNA, 19 bp, Mus musculus
  siRNA target sequence for Dbccr1 (NM_019967.1,598-616).
gggcctctgggctgtaaca

SEQ ID NO: 709735 - DNA, 19 bp, Mus musculus
  siRNA target sequence for Dbccr1 (NM_019967.1,609-627).
ctgtaacagctatgacaat

SEQ ID NO: 709736 - DNA, 19 bp, Mus musculus
  siRNA target sequence for Dbccr1 (NM_019967.1,611-629).
gtaacagctatgacaatct

SEQ ID NO: 709737 - DNA, 19 bp, Mus musculus
  siRNA target sequence for Dbccr1 (NM_019967.1,678-696).
ccttcaaggtcttcagata

SEQ ID NO: 709738 - DNA, 19 bp, Mus musculus
  siRNA target sequence for Dbccr1 (NM_019967.1,704-722).
cgcagtatctgcaagagaa

SEQ ID NO: 709739 - DNA, 19 bp, Mus musculus
  siRNA target sequence for Dbccr1 (NM_019967.1,727-745).
gttcagtcggccttgagtt

SEQ ID NO: 709740 - DNA, 19 bp, Mus musculus
  siRNA target sequence for Dbccr1 (NM_019967.1,734-752).
cggccttgagttacatcat

SEQ ID NO: 709741 - DNA, 19 bp, Mus musculus
  siRNA target sequence for Dbccr1 (NM_019967.1,887-905).
cctggactgaagcttataa

SEQ ID NO: 709742 - DNA, 19 bp, Mus musculus
  siRNA target sequence for Dbccr1 (NM_019967.1,890-908).
ggactgaagcttataagga

SEQ ID NO: 709743 - DNA, 19 bp, Mus musculus
  siRNA target sequence for Dbccr1 (NM_019967.1,920-938).
cagatgagtttaagtcatt

SEQ ID NO: 709744 - DNA, 19 bp, Mus musculus
  siRNA target sequence for Dbccr1 (NM_019967.1,1134-1152).
gcctagagagaggacaatt

SEQ ID NO: 709745 - DNA, 19 bp, Mus musculus
  siRNA target sequence for Dbccr1 (NM_019967.1,1136-1154).
ctagagagaggacaattca

SEQ ID NO: 709746 - DNA, 19 bp, Mus musculus
  siRNA target sequence for Dbccr1 (NM_019967.1,1139-1157).
gagagaggacaattcaaca

SEQ ID NO: 709747 - DNA, 19 bp, Mus musculus
  siRNA target sequence for Dbccr1 (NM_019967.1,1170-1188).
ggtccagtcacttctctat

SEQ ID NO: 709748 - DNA, 19 bp, Mus musculus
  siRNA target sequence for Dbccr1 (NM_019967.1,1171-1189).
gtccagtcacttctctatt

SEQ ID NO: 709749 - DNA, 19 bp, Mus musculus
  siRNA target sequence for Dbccr1 (NM_019967.1,1176-1194).
gtcacttctctattgcaat

SEQ ID NO: 709750 - DNA, 19 bp, Mus musculus
  siRNA target sequence for Dbccr1 (NM_019967.1,1270-1288).
cgccctatcccatgtatca

SEQ ID NO: 709751 - DNA, 19 bp, Mus musculus
  siRNA target sequence for Dbccr1 (NM_019967.1,1272-1290).
ccctatcccatgtatcata

SEQ ID NO: 709752 - DNA, 19 bp, Mus musculus
  siRNA target sequence for Dbccr1 (NM_019967.1,1356-1374).
gggctacaagctgtataga

SEQ ID NO: 709753 - DNA, 19 bp, Mus musculus
  siRNA target sequence for Dbccr1 (NM_019967.1,1376-1394).
gccgctgtgaaccacaaaa

SEQ ID NO: 709754 - DNA, 19 bp, Mus musculus
  siRNA target sequence for Dbccr1 (NM_019967.1,1408-1426).
cggagtgagcagttcatca

SEQ ID NO: 709755 - DNA, 19 bp, Mus musculus
  siRNA target sequence for Dbccr1 (NM_019967.1,1492-1510).
cgcctctatgtccatacta

SEQ ID NO: 709756 - DNA, 19 bp, Mus musculus
  siRNA target sequence for Dbccr1 (NM_019967.1,1525-1543).
gagattcgcctggatacat

SEQ ID NO: 709757 - DNA, 19 bp, Mus musculus
  siRNA target sequence for Dbccr1 (NM_019967.1,1527-1545).
gattcgcctggatacattt

SEQ ID NO: 709758 - DNA, 19 bp, Mus musculus
  siRNA target sequence for Dbccr1 (NM_019967.1,1668-1686).
cctggaccctatgttcttt

SEQ ID NO: 709759 - DNA, 19 bp, Mus musculus
  siRNA target sequence for Dbccr1 (NM_019967.1,1879-1897).
cccaccctacgcaatgaga

SEQ ID NO: 709760 - DNA, 19 bp, Mus musculus
  siRNA target sequence for Dbccr1 (NM_019967.1,1918-1936).
ctgtcggatccctccaaaa

SEQ ID NO: 709761 - DNA, 19 bp, Mus musculus
  siRNA target sequence for Dbccr1 (NM_019967.1,1977-1995).
gtacagcctgaggttcaat

SEQ ID NO: 709762 - DNA, 19 bp, Mus musculus
  siRNA target sequence for Dbccr1 (NM_019967.1,2015-2033).
ccgtgcaacaggtgaatca

SEQ ID NO: 709763 - DNA, 19 bp, Mus musculus
  siRNA target sequence for Dbccr1 (NM_019967.1,2017-2035).
gtgcaacaggtgaatcagt

SEQ ID NO: 709764 - DNA, 19 bp, Mus musculus
  siRNA target sequence for Dbccr1 (NM_019967.1,2042-2060).
cacagggtggtcagttcta

SEQ ID NO: 709765 - DNA, 19 bp, Mus musculus
  siRNA target sequence for Dbccr1 (NM_019967.1,2044-2062).
cagggtggtcagttctatt

SEQ ID NO: 709766 - DNA, 19 bp, Mus musculus
  siRNA target sequence for Dbccr1 (NM_019967.1,2047-2065).
ggtggtcagttctattcct

SEQ ID NO: 709767 - DNA, 19 bp, Mus musculus
  siRNA target sequence for Dbccr1 (NM_019967.1,2072-2090).
ccgtgatgcttctcatgtt

SEQ ID NO: 709768 - DNA, 19 bp, Mus musculus
  siRNA target sequence for Arm1 (NM_019968.1,396-414).
ggtggacctgttagagatt

SEQ ID NO: 709769 - DNA, 19 bp, Mus musculus
  siRNA target sequence for Arm1 (NM_019968.1,553-571).
ccggatctgcctgttgtta

SEQ ID NO: 709770 - DNA, 19 bp, Mus musculus
  siRNA target sequence for Arm1 (NM_019968.1,554-572).
cggatctgcctgttgttat

SEQ ID NO: 709771 - DNA, 19 bp, Mus musculus
  siRNA target sequence for Arm1 (NM_019968.1,633-651).
gggcctccttgctagttat

SEQ ID NO: 709772 - DNA, 19 bp, Mus musculus
  siRNA target sequence for Arm1 (NM_019968.1,722-740).
ctgtgcacatctggaaatt

SEQ ID NO: 709773 - DNA, 19 bp, Mus musculus
  siRNA target sequence for Plag1 (NM_019969.1,32-50).
cattcctggtgatttgtca

SEQ ID NO: 709774 - DNA, 19 bp, Mus musculus
  siRNA target sequence for Plag1 (NM_019969.1,39-57).
ggtgatttgtcagaagtaa

SEQ ID NO: 709775 - DNA, 19 bp, Mus musculus
  siRNA target sequence for Plag1 (NM_019969.1,72-90).
gccccttcagggaaacgta

SEQ ID NO: 709776 - DNA, 19 bp, Mus musculus
  siRNA target sequence for Plag1 (NM_019969.1,73-91).
ccccttcagggaaacgtaa

SEQ ID NO: 709777 - DNA, 19 bp, Mus musculus
  siRNA target sequence for Plag1 (NM_019969.1,88-106).
gtaagcgtggtgaaagcaa

SEQ ID NO: 709778 - DNA, 19 bp, Mus musculus
  siRNA target sequence for Plag1 (NM_019969.1,93-111).
cgtggtgaaagcaaaccaa

SEQ ID NO: 709779 - DNA, 19 bp, Mus musculus
  siRNA target sequence for Plag1 (NM_019969.1,224-242).
ctgcaccaaggcctttgtt

SEQ ID NO: 709780 - DNA, 19 bp, Mus musculus
  siRNA target sequence for Plag1 (NM_019969.1,344-362).
gaatcacctccatacacat

SEQ ID NO: 709781 - DNA, 19 bp, Mus musculus
  siRNA target sequence for Plag1 (NM_019969.1,368-386).
caacaaagagacctttaaa

SEQ ID NO: 709782 - DNA, 19 bp, Mus musculus
  siRNA target sequence for Plag1 (NM_019969.1,399-417).
ggcaagagctacaatacca

SEQ ID NO: 709783 - DNA, 19 bp, Mus musculus
  siRNA target sequence for Plag1 (NM_019969.1,400-418).
gcaagagctacaataccaa

SEQ ID NO: 709784 - DNA, 19 bp, Mus musculus
  siRNA target sequence for Plag1 (NM_019969.1,765-783).
gatttcctggacccattta

SEQ ID NO: 709785 - DNA, 19 bp, Mus musculus
  siRNA target sequence for Plag1 (NM_019969.1,791-809).
catgtctgtgcctataaaa

SEQ ID NO: 709786 - DNA, 19 bp, Mus musculus
  siRNA target sequence for Plag1 (NM_019969.1,822-840).
ccggtcatgtccttacctt

SEQ ID NO: 709787 - DNA, 19 bp, Mus musculus
  siRNA target sequence for Plag1 (NM_019969.1,851-869).
cttgtcaaagccattcaca

SEQ ID NO: 709788 - DNA, 19 bp, Mus musculus
  siRNA target sequence for Plag1 (NM_019969.1,879-897).
cagttaaacctctataaca

SEQ ID NO: 709789 - DNA, 19 bp, Mus musculus
  siRNA target sequence for Plag1 (NM_019969.1,881-899).
gttaaacctctataacact

SEQ ID NO: 709790 - DNA, 19 bp, Mus musculus
  siRNA target sequence for Plag1 (NM_019969.1,924-942).
gggtctgctcaccaaatga

SEQ ID NO: 709791 - DNA, 19 bp, Mus musculus
  siRNA target sequence for Plag1 (NM_019969.1,926-944).
gtctgctcaccaaatgata

SEQ ID NO: 709792 - DNA, 19 bp, Mus musculus
  siRNA target sequence for Plag1 (NM_019969.1,967-985).
catgccccatagatatgga

SEQ ID NO: 709793 - DNA, 19 bp, Mus musculus
  siRNA target sequence for Plag1 (NM_019969.1,1036-1054).
cctcatacgcaatctctat

SEQ ID NO: 709794 - DNA, 19 bp, Mus musculus
  siRNA target sequence for Plag1 (NM_019969.1,1037-1055).
ctcatacgcaatctctatt

SEQ ID NO: 709795 - DNA, 19 bp, Mus musculus
  siRNA target sequence for Plag1 (NM_019969.1,1045-1063).
caatctctattcctgaaaa

SEQ ID NO: 709796 - DNA, 19 bp, Mus musculus
  siRNA target sequence for Plag1 (NM_019969.1,1141-1159).
ctccagcatcgtcatctaa

SEQ ID NO: 709797 - DNA, 19 bp, Mus musculus
  siRNA target sequence for Plag1 (NM_019969.1,1178-1196).
gagtgggtcgccagatgat

SEQ ID NO: 709798 - DNA, 19 bp, Mus musculus
  siRNA target sequence for Plag1 (NM_019969.1,1204-1222).
gggacctctccctgtcaaa

SEQ ID NO: 709799 - DNA, 19 bp, Mus musculus
  siRNA target sequence for Plag1 (NM_019969.1,1215-1233).
ctgtcaaagagctctatct

SEQ ID NO: 709800 - DNA, 19 bp, Mus musculus
  siRNA target sequence for Plag1 (NM_019969.1,1219-1237).
caaagagctctatctctat

SEQ ID NO: 709801 - DNA, 19 bp, Mus musculus
  siRNA target sequence for Plag1 (NM_019969.1,1250-1268).
cagcacaccagcattggat

SEQ ID NO: 709802 - DNA, 19 bp, Mus musculus
  siRNA target sequence for Tex101 (NM_019981.1,621-639).
cacaactcagtgctatcaa

SEQ ID NO: 709803 - DNA, 19 bp, Mus musculus
  siRNA target sequence for Tex101 (NM_019981.1,670-688).
gacgccaccgtgcaagtta

SEQ ID NO: 709804 - DNA, 19 bp, Mus musculus
  siRNA target sequence for Tex101 (NM_019981.1,672-690).
cgccaccgtgcaagttaaa

SEQ ID NO: 709805 - DNA, 19 bp, Mus musculus
  siRNA target sequence for Tex101 (NM_019981.1,714-732).
cagactgatggccatgata

SEQ ID NO: 709806 - DNA, 19 bp, Mus musculus
  siRNA target sequence for Tex101 (NM_019981.1,716-734).
gactgatggccatgataga

SEQ ID NO: 709807 - DNA, 19 bp, Mus musculus
  siRNA target sequence for Tex101 (NM_019981.1,718-736).
ctgatggccatgatagact

SEQ ID NO: 709808 - DNA, 19 bp, Mus musculus
  siRNA target sequence for 1810061I13Rik (NM_019985.1,36-54).
gatgaagatgggtatatca

SEQ ID NO: 709809 - DNA, 19 bp, Mus musculus
  siRNA target sequence for 1810061I13Rik (NM_019985.1,93-111).
gcggaacctgcctcttctt

SEQ ID NO: 709810 - DNA, 19 bp, Mus musculus
  siRNA target sequence for 1810061I13Rik (NM_019985.1,115-133).
ggcgtgtgatggctttagt

SEQ ID NO: 709811 - DNA, 19 bp, Mus musculus
  siRNA target sequence for 1810061I13Rik (NM_019985.1,116-134).
gcgtgtgatggctttagtt

SEQ ID NO: 709812 - DNA, 19 bp, Mus musculus
  siRNA target sequence for 1810061I13Rik (NM_019985.1,118-136).
gtgtgatggctttagttct

SEQ ID NO: 709813 - DNA, 19 bp, Mus musculus
  siRNA target sequence for 1810061I13Rik (NM_019985.1,196-214).
cacagcaaaagtatctact

SEQ ID NO: 709814 - DNA, 19 bp, Mus musculus
  siRNA target sequence for 1810061I13Rik (NM_019985.1,216-234).
gcggagaaggaaaatctct

SEQ ID NO: 709815 - DNA, 19 bp, Mus musculus
  siRNA target sequence for 1810061I13Rik (NM_019985.1,246-264).
caacaattggccaagaaat

SEQ ID NO: 709816 - DNA, 19 bp, Mus musculus
  siRNA target sequence for 1810061I13Rik (NM_019985.1,266-284).
ctgccaagagttgattaga

SEQ ID NO: 709817 - DNA, 19 bp, Mus musculus
  siRNA target sequence for 1810061I13Rik (NM_019985.1,268-286).
gccaagagttgattagaca

SEQ ID NO: 709818 - DNA, 19 bp, Mus musculus
  siRNA target sequence for 1810061I13Rik (NM_019985.1,269-287).
ccaagagttgattagacaa

SEQ ID NO: 709819 - DNA, 19 bp, Mus musculus
  siRNA target sequence for 1810061I13Rik (NM_019985.1,270-288).
caagagttgattagacaat

SEQ ID NO: 709820 - DNA, 19 bp, Mus musculus
  siRNA target sequence for 1810061I13Rik (NM_019985.1,347-365).
gagataccatggagatagt

SEQ ID NO: 709821 - DNA, 19 bp, Mus musculus
  siRNA target sequence for 1810061I13Rik (NM_019985.1,374-392).
gttcttcaggcgtaaccta

SEQ ID NO: 709822 - DNA, 19 bp, Mus musculus
  siRNA target sequence for 1810061I13Rik (NM_019985.1,458-476).
gagcaccctggactacatt

SEQ ID NO: 709823 - DNA, 19 bp, Mus musculus
  siRNA target sequence for 1810061I13Rik (NM_019985.1,470-488).
ctacattgcagaaaggatt

SEQ ID NO: 709824 - DNA, 19 bp, Mus musculus
  siRNA target sequence for 1810061I13Rik (NM_019985.1,473-491).
cattgcagaaaggattact

SEQ ID NO: 709825 - DNA, 19 bp, Mus musculus
  siRNA target sequence for 1810061I13Rik (NM_019985.1,495-513).
gtccgttggattggattat

SEQ ID NO: 709826 - DNA, 19 bp, Mus musculus
  siRNA target sequence for 1810061I13Rik (NM_019985.1,514-532).
cacgccagaactctaagaa

SEQ ID NO: 709827 - DNA, 19 bp, Mus musculus
  siRNA target sequence for 1810061I13Rik (NM_019985.1,565-583).
gcaagaacgggattaatct

SEQ ID NO: 709828 - DNA, 19 bp, Mus musculus
  siRNA target sequence for 1810061I13Rik (NM_019985.1,566-584).
caagaacgggattaatctt

SEQ ID NO: 709829 - DNA, 19 bp, Mus musculus
  siRNA target sequence for 1810061I13Rik (NM_019985.1,569-587).
gaacgggattaatctttct

SEQ ID NO: 709830 - DNA, 19 bp, Mus musculus
  siRNA target sequence for 1810061I13Rik (NM_019985.1,605-623).
catgaattgtgcttatctt

SEQ ID NO: 709831 - DNA, 19 bp, Mus musculus
  siRNA target sequence for 1810061I13Rik (NM_019985.1,638-656).
ccatccagcttcctgtaaa

SEQ ID NO: 709832 - DNA, 19 bp, Mus musculus
  siRNA target sequence for 1810061I13Rik (NM_019985.1,659-677).
gagacattacttaatatgt

SEQ ID NO: 709833 - DNA, 19 bp, Mus musculus
  siRNA target sequence for Habp4 (NM_019986.1,438-456).
ggagcagcaaggatggaat

SEQ ID NO: 709834 - DNA, 19 bp, Mus musculus
  siRNA target sequence for Habp4 (NM_019986.1,558-576).
gaagtttaccgatgaaaaa

SEQ ID NO: 709835 - DNA, 19 bp, Mus musculus
  siRNA target sequence for Habp4 (NM_019986.1,561-579).
gtttaccgatgaaaaacca

SEQ ID NO: 709836 - DNA, 19 bp, Mus musculus
  siRNA target sequence for Habp4 (NM_019986.1,695-713).
gagggaaacgagactttga

SEQ ID NO: 709837 - DNA, 19 bp, Mus musculus
  siRNA target sequence for Habp4 (NM_019986.1,714-732).
gagatacagtagcaatgat

SEQ ID NO: 709838 - DNA, 19 bp, Mus musculus
  siRNA target sequence for Habp4 (NM_019986.1,716-734).
gatacagtagcaatgataa

SEQ ID NO: 709839 - DNA, 19 bp, Mus musculus
  siRNA target sequence for Habp4 (NM_019986.1,1043-1061).
ccagatacagagacgatat

SEQ ID NO: 709840 - DNA, 19 bp, Mus musculus
  siRNA target sequence for Habp4 (NM_019986.1,1121-1139).
catcccagctggagattaa

SEQ ID NO: 709841 - DNA, 19 bp, Mus musculus
  siRNA target sequence for Habp4 (NM_019986.1,1192-1210).
ggccgagggagaatgagaa

SEQ ID NO: 709842 - DNA, 19 bp, Mus musculus
  siRNA target sequence for 0610033N12Rik (NM_019988.2,129-147).
gaccctgtcatcttagcaa

SEQ ID NO: 709843 - DNA, 19 bp, Mus musculus
  siRNA target sequence for 0610033N12Rik (NM_019988.2,222-240).
gactctcaggtaaatgcat

SEQ ID NO: 709844 - DNA, 19 bp, Mus musculus
  siRNA target sequence for 0610033N12Rik (NM_019988.2,231-249).
gtaaatgcattggagatta

SEQ ID NO: 709845 - DNA, 19 bp, Mus musculus
  siRNA target sequence for 0610033N12Rik (NM_019988.2,273-291).
gctgcaggttaccaacata

SEQ ID NO: 709846 - DNA, 19 bp, Mus musculus
  siRNA target sequence for 0610033N12Rik (NM_019988.2,274-292).
ctgcaggttaccaacatat

SEQ ID NO: 709847 - DNA, 19 bp, Mus musculus
  siRNA target sequence for 0610033N12Rik (NM_019988.2,284-302).
ccaacatatccgcatgtat

SEQ ID NO: 709848 - DNA, 19 bp, Mus musculus
  siRNA target sequence for 0610033N12Rik (NM_019988.2,383-401).
ggatggtcgctggatgtat

SEQ ID NO: 709849 - DNA, 19 bp, Mus musculus
  siRNA target sequence for 0610033N12Rik (NM_019988.2,384-402).
gatggtcgctggatgtata

SEQ ID NO: 709850 - DNA, 19 bp, Mus musculus
  siRNA target sequence for 0610033N12Rik (NM_019988.2,476-494).
ggtgaacgcacccattaat

SEQ ID NO: 709851 - DNA, 19 bp, Mus musculus
  siRNA target sequence for 0610033N12Rik (NM_019988.2,477-495).
gtgaacgcacccattaatt

SEQ ID NO: 709852 - DNA, 19 bp, Mus musculus
  siRNA target sequence for 0610033N12Rik (NM_019988.2,650-668).
catggcagccgtcaatagt

SEQ ID NO: 709853 - DNA, 19 bp, Mus musculus
  siRNA target sequence for 0610033N12Rik (NM_019988.2,669-687).
gccggaaactgctatgtct

SEQ ID NO: 709854 - DNA, 19 bp, Mus musculus
  siRNA target sequence for 0610033N12Rik (NM_019988.2,819-837).
gaccagacatgtaaaatct

SEQ ID NO: 709855 - DNA, 19 bp, Mus musculus
  siRNA target sequence for 0610033N12Rik (NM_019988.2,1019-1037).
gtatggtggccatcagaaa

SEQ ID NO: 709856 - DNA, 19 bp, Mus musculus
  siRNA target sequence for 0610033N12Rik (NM_019988.2,1043-1061).
cgtctgcttggccttcaat

SEQ ID NO: 709857 - DNA, 19 bp, Mus musculus
  siRNA target sequence for Sh3bgrl (NM_019989.2,189-207).
ggtgatccgtgtatatatt

SEQ ID NO: 709858 - DNA, 19 bp, Mus musculus
  siRNA target sequence for Sh3bgrl (NM_019989.2,192-210).
gatccgtgtatatattgca

SEQ ID NO: 709859 - DNA, 19 bp, Mus musculus
  siRNA target sequence for Sh3bgrl (NM_019989.2,218-236).
ctggctctacggcgattaa

SEQ ID NO: 709860 - DNA, 19 bp, Mus musculus
  siRNA target sequence for Sh3bgrl (NM_019989.2,220-238).
ggctctacggcgattaaga

SEQ ID NO: 709861 - DNA, 19 bp, Mus musculus
  siRNA target sequence for Sh3bgrl (NM_019989.2,221-239).
gctctacggcgattaagaa

SEQ ID NO: 709862 - DNA, 19 bp, Mus musculus
  siRNA target sequence for Sh3bgrl (NM_019989.2,224-242).
ctacggcgattaagaagaa

SEQ ID NO: 709863 - DNA, 19 bp, Mus musculus
  siRNA target sequence for Sh3bgrl (NM_019989.2,272-290).
ccaacaaaataggatttga

SEQ ID NO: 709864 - DNA, 19 bp, Mus musculus
  siRNA target sequence for Sh3bgrl (NM_019989.2,322-340).
cggaagtggatgagagaaa

SEQ ID NO: 709865 - DNA, 19 bp, Mus musculus
  siRNA target sequence for Sh3bgrl (NM_019989.2,375-393).
ccccttgccacctcagatt

SEQ ID NO: 709866 - DNA, 19 bp, Mus musculus
  siRNA target sequence for Sh3bgrl (NM_019989.2,417-435).
ggattacgatgccttcttt

SEQ ID NO: 709867 - DNA, 19 bp, Mus musculus
  siRNA target sequence for Sh3bgrl (NM_019989.2,479-497).
cagcaccacctggttcaaa

SEQ ID NO: 709868 - DNA, 19 bp, Mus musculus
  siRNA target sequence for Stard10 (NM_019990.1,736-754).
cccatgggcgctgattaca

SEQ ID NO: 709869 - DNA, 19 bp, Mus musculus
  siRNA target sequence for Stard10 (NM_019990.1,737-755).
ccatgggcgctgattacat

SEQ ID NO: 709870 - DNA, 19 bp, Mus musculus
  siRNA target sequence for Stard10 (NM_019990.1,748-766).
gattacatcattatgaact

SEQ ID NO: 709871 - DNA, 19 bp, Mus musculus
  siRNA target sequence for Stard10 (NM_019990.1,915-933).
gtgggtggtgaataagtca

SEQ ID NO: 709872 - DNA, 19 bp, Mus musculus
  siRNA target sequence for Stard10 (NM_019990.1,992-1010).
ccgagtggaagcagaaaca

SEQ ID NO: 709873 - DNA, 19 bp, Mus musculus
  siRNA target sequence for D3Ertd300e (NM_019995.1,258-276).
ctcctaaaaggaaatacct

SEQ ID NO: 709874 - DNA, 19 bp, Mus musculus
  siRNA target sequence for D3Ertd300e (NM_019995.1,275-293).
ctgtctagtggaagaaagt

SEQ ID NO: 709875 - DNA, 19 bp, Mus musculus
  siRNA target sequence for D3Ertd300e (NM_019995.1,279-297).
ctagtggaagaaagtctat

SEQ ID NO: 709876 - DNA, 19 bp, Mus musculus
  siRNA target sequence for D3Ertd300e (NM_019995.1,345-363).
ccgaggttaagcagaaatt

SEQ ID NO: 709877 - DNA, 19 bp, Mus musculus
  siRNA target sequence for D3Ertd300e (NM_019995.1,346-364).
cgaggttaagcagaaatta

SEQ ID NO: 709878 - DNA, 19 bp, Mus musculus
  siRNA target sequence for D3Ertd300e (NM_019995.1,347-365).
gaggttaagcagaaattaa

SEQ ID NO: 709879 - DNA, 19 bp, Mus musculus
  siRNA target sequence for D3Ertd300e (NM_019995.1,369-387).
gaaatgtgaacttgttaga

SEQ ID NO: 709880 - DNA, 19 bp, Mus musculus
  siRNA target sequence for D3Ertd300e (NM_019995.1,395-413).
gttatgcaggagactttgt

SEQ ID NO: 709881 - DNA, 19 bp, Mus musculus
  siRNA target sequence for D3Ertd300e (NM_019995.1,412-430).
gtcgtgtttagtagtcaat

SEQ ID NO: 709882 - DNA, 19 bp, Mus musculus
  siRNA target sequence for D3Ertd300e (NM_019995.1,414-432).
cgtgtttagtagtcaatct

SEQ ID NO: 709883 - DNA, 19 bp, Mus musculus
  siRNA target sequence for D3Ertd300e (NM_019995.1,427-445).
caatctgtacccaggaaat

SEQ ID NO: 709884 - DNA, 19 bp, Mus musculus
  siRNA target sequence for D3Ertd300e (NM_019995.1,470-488).
gggaaaaatggatcagatt

SEQ ID NO: 709885 - DNA, 19 bp, Mus musculus
  siRNA target sequence for D3Ertd300e (NM_019995.1,495-513).
ccatccgattgccttatga

SEQ ID NO: 709886 - DNA, 19 bp, Mus musculus
  siRNA target sequence for D3Ertd300e (NM_019995.1,496-514).
catccgattgccttatgaa

SEQ ID NO: 709887 - DNA, 19 bp, Mus musculus
  siRNA target sequence for D3Ertd300e (NM_019995.1,499-517).
ccgattgccttatgaagaa

SEQ ID NO: 709888 - DNA, 19 bp, Mus musculus
  siRNA target sequence for D3Ertd300e (NM_019995.1,515-533).
gaaggagaattgcttgaat

SEQ ID NO: 709889 - DNA, 19 bp, Mus musculus
  siRNA target sequence for D3Ertd300e (NM_019995.1,566-584).
gtggatctccttgaaaaat

SEQ ID NO: 709890 - DNA, 19 bp, Mus musculus
  siRNA target sequence for D3Ertd300e (NM_019995.1,620-638).
gcagaaatacgtgactata

SEQ ID NO: 709891 - DNA, 19 bp, Mus musculus
  siRNA target sequence for D3Ertd300e (NM_019995.1,634-652).
ctataggcagtccagtaat

SEQ ID NO: 709892 - DNA, 19 bp, Mus musculus
  siRNA target sequence for D3Ertd300e (NM_019995.1,639-657).
ggcagtccagtaatatgaa

SEQ ID NO: 709893 - DNA, 19 bp, Mus musculus
  siRNA target sequence for D3Ertd300e (NM_019995.1,671-689).
caaagtaggcacattctct

SEQ ID NO: 709894 - DNA, 19 bp, Mus musculus
  siRNA target sequence for D3Ertd300e (NM_019995.1,696-714).
caacaatgcagactttagt

SEQ ID NO: 709895 - DNA, 19 bp, Mus musculus
  siRNA target sequence for D3Ertd300e (NM_019995.1,719-737).
gatgtccattctataacaa

SEQ ID NO: 709896 - DNA, 19 bp, Mus musculus
  siRNA target sequence for D3Ertd300e (NM_019995.1,760-778).
ggaagacaaacttttgctt

SEQ ID NO: 709897 - DNA, 19 bp, Mus musculus
  siRNA target sequence for D3Ertd300e (NM_019995.1,848-866).
gccaataggctgctctata

SEQ ID NO: 709898 - DNA, 19 bp, Mus musculus
  siRNA target sequence for D3Ertd300e (NM_019995.1,849-867).
ccaataggctgctctataa

SEQ ID NO: 709899 - DNA, 19 bp, Mus musculus
  siRNA target sequence for D3Ertd300e (NM_019995.1,880-898).
gaacactcgcccaatgaaa

SEQ ID NO: 709900 - DNA, 19 bp, Mus musculus
  siRNA target sequence for D3Ertd300e (NM_019995.1,967-985).
ccctcagctgagactactt

SEQ ID NO: 709901 - DNA, 19 bp, Mus musculus
  siRNA target sequence for D3Ertd300e (NM_019995.1,971-989).
cagctgagactacttgatt

SEQ ID NO: 709902 - DNA, 19 bp, Mus musculus
  siRNA target sequence for D3Ertd300e (NM_019995.1,978-996).
gactacttgatttcttaca

SEQ ID NO: 709903 - DNA, 19 bp, Mus musculus
  siRNA target sequence for D3Ertd300e (NM_019995.1,1024-1042).
gcattatgacctcaaaatt

SEQ ID NO: 709904 - DNA, 19 bp, Mus musculus
  siRNA target sequence for D3Ertd300e (NM_019995.1,1044-1062).
ccaaagcaggaaattgtgt

SEQ ID NO: 709905 - DNA, 19 bp, Mus musculus
  siRNA target sequence for D3Ertd300e (NM_019995.1,1045-1063).
caaagcaggaaattgtgta

SEQ ID NO: 709906 - DNA, 19 bp, Mus musculus
  siRNA target sequence for D3Ertd300e (NM_019995.1,1176-1194).
ggccagctcatgatgtaaa

SEQ ID NO: 709907 - DNA, 19 bp, Mus musculus
  siRNA target sequence for D3Ertd300e (NM_019995.1,1196-1214).
gacgattatgtatttgaat

SEQ ID NO: 709908 - DNA, 19 bp, Mus musculus
  siRNA target sequence for D3Ertd300e (NM_019995.1,1215-1233).
gtgaaggtggtaatcagta

SEQ ID NO: 709909 - DNA, 19 bp, Mus musculus
  siRNA target sequence for D3Ertd300e (NM_019995.1,1220-1238).
ggtggtaatcagtatcaga

SEQ ID NO: 709910 - DNA, 19 bp, Mus musculus
  siRNA target sequence for D3Ertd300e (NM_019995.1,1223-1241).
ggtaatcagtatcagaaaa

SEQ ID NO: 709911 - DNA, 19 bp, Mus musculus
  siRNA target sequence for D3Ertd300e (NM_019995.1,1263-1281).
ctcttggggatccacttta

SEQ ID NO: 709912 - DNA, 19 bp, Mus musculus
  siRNA target sequence for D3Ertd300e (NM_019995.1,1265-1283).
cttggggatccactttact

SEQ ID NO: 709913 - DNA, 19 bp, Mus musculus
  siRNA target sequence for D3Ertd300e (NM_019995.1,1271-1289).
gatccactttactatggta

SEQ ID NO: 709914 - DNA, 19 bp, Mus musculus
  siRNA target sequence for D3Ertd300e (NM_019995.1,1274-1292).
ccactttactatggtaaaa

SEQ ID NO: 709915 - DNA, 19 bp, Mus musculus
  siRNA target sequence for D3Ertd300e (NM_019995.1,1352-1370).
gctgatgaccattcaaact

SEQ ID NO: 709916 - DNA, 19 bp, Mus musculus
  siRNA target sequence for D3Ertd300e (NM_019995.1,1394-1412).
gacgcagagagggtagtta

SEQ ID NO: 709917 - DNA, 19 bp, Mus musculus
  siRNA target sequence for D3Ertd300e (NM_019995.1,1396-1414).
cgcagagagggtagttaat

SEQ ID NO: 709918 - DNA, 19 bp, Mus musculus
  siRNA target sequence for D3Ertd300e (NM_019995.1,1398-1416).
cagagagggtagttaatca

SEQ ID NO: 709919 - DNA, 19 bp, Mus musculus
  siRNA target sequence for D3Ertd300e (NM_019995.1,1400-1418).
gagagggtagttaatcaat

SEQ ID NO: 709920 - DNA, 19 bp, Mus musculus
  siRNA target sequence for D3Ertd300e (NM_019995.1,1404-1422).
gggtagttaatcaatacca

SEQ ID NO: 709921 - DNA, 19 bp, Mus musculus
  siRNA target sequence for D3Ertd300e (NM_019995.1,1443-1461).
ccaaatgcccagtgaagat

SEQ ID NO: 709922 - DNA, 19 bp, Mus musculus
  siRNA target sequence for D3Ertd300e (NM_019995.1,1520-1538).
gagacctcgtccattcagt

SEQ ID NO: 709923 - DNA, 19 bp, Mus musculus
  siRNA target sequence for Brp17 (NM_019999.1,207-225).
ggcttgggtacctcttcta

SEQ ID NO: 709924 - DNA, 19 bp, Mus musculus
  siRNA target sequence for Brp17 (NM_019999.1,260-278).
cccaaaggccactccaaaa

SEQ ID NO: 709925 - DNA, 19 bp, Mus musculus
  siRNA target sequence for Brp17 (NM_019999.1,262-280).
caaaggccactccaaaact

SEQ ID NO: 709926 - DNA, 19 bp, Mus musculus
  siRNA target sequence for Brp17 (NM_019999.1,321-339).
ctgtcctctcggacaacta

SEQ ID NO: 709927 - DNA, 19 bp, Mus musculus
  siRNA target sequence for Brp17 (NM_019999.1,511-529).
cagggactgtcgagtgtat

SEQ ID NO: 709928 - DNA, 19 bp, Mus musculus
  siRNA target sequence for Brp17 (NM_019999.1,531-549).
ggagccctcaggatggtat

SEQ ID NO: 709929 - DNA, 19 bp, Mus musculus
  siRNA target sequence for Brp17 (NM_019999.1,565-583).
ccccctgtgtcatcaagat

SEQ ID NO: 709930 - DNA, 19 bp, Mus musculus
  siRNA target sequence for Brp17 (NM_019999.1,567-585).
ccctgtgtcatcaagatgt

SEQ ID NO: 709931 - DNA, 19 bp, Mus musculus
  siRNA target sequence for Brp17 (NM_019999.1,592-610).
cgtgggacgacttcagatt

SEQ ID NO: 709932 - DNA, 19 bp, Mus musculus
  siRNA target sequence for Brp17 (NM_019999.1,768-786).
cactggacactgtgttaga

SEQ ID NO: 709933 - DNA, 19 bp, Mus musculus
  siRNA target sequence for Rec8L1 (NM_020002.2,321-339).
gtttggtgaagcgtgaata

SEQ ID NO: 709934 - DNA, 19 bp, Mus musculus
  siRNA target sequence for Rec8L1 (NM_020002.2,325-343).
ggtgaagcgtgaataccta

SEQ ID NO: 709935 - DNA, 19 bp, Mus musculus
  siRNA target sequence for Rec8L1 (NM_020002.2,326-344).
gtgaagcgtgaatacctaa

SEQ ID NO: 709936 - DNA, 19 bp, Mus musculus
  siRNA target sequence for Rec8L1 (NM_020002.2,332-350).
cgtgaatacctaaatgtga

SEQ ID NO: 709937 - DNA, 19 bp, Mus musculus
  siRNA target sequence for Rec8L1 (NM_020002.2,468-486).
gtgtgataagggtctactt

SEQ ID NO: 709938 - DNA, 19 bp, Mus musculus
  siRNA target sequence for Rec8L1 (NM_020002.2,550-568).
gctgcggattcgcattgat

SEQ ID NO: 709939 - DNA, 19 bp, Mus musculus
  siRNA target sequence for Rec8L1 (NM_020002.2,551-569).
ctgcggattcgcattgata

SEQ ID NO: 709940 - DNA, 19 bp, Mus musculus
  siRNA target sequence for Rec8L1 (NM_020002.2,647-665).
cccttttttgggaagatgt

SEQ ID NO: 709941 - DNA, 19 bp, Mus musculus
  siRNA target sequence for Rec8L1 (NM_020002.2,664-682).
gtctgtggatcctagactt

SEQ ID NO: 709942 - DNA, 19 bp, Mus musculus
  siRNA target sequence for Rec8L1 (NM_020002.2,685-703).
cagtccttttgatattcct

SEQ ID NO: 709943 - DNA, 19 bp, Mus musculus
  siRNA target sequence for Rec8L1 (NM_020002.2,702-720).
ctcagattcgacacctttt

SEQ ID NO: 709944 - DNA, 19 bp, Mus musculus
  siRNA target sequence for Rec8L1 (NM_020002.2,724-742).
ggctgcaaccccggaaaaa

SEQ ID NO: 709945 - DNA, 19 bp, Mus musculus
  siRNA target sequence for Rec8L1 (NM_020002.2,853-871).
ccgcatgctgcagattgaa

SEQ ID NO: 709946 - DNA, 19 bp, Mus musculus
  siRNA target sequence for Rec8L1 (NM_020002.2,892-910).
gatcagtcgaggagactta

SEQ ID NO: 709947 - DNA, 19 bp, Mus musculus
  siRNA target sequence for Rec8L1 (NM_020002.2,895-913).
cagtcgaggagacttagaa

SEQ ID NO: 709948 - DNA, 19 bp, Mus musculus
  siRNA target sequence for Rec8L1 (NM_020002.2,897-915).
gtcgaggagacttagaact

SEQ ID NO: 709949 - DNA, 19 bp, Mus musculus
  siRNA target sequence for Rec8L1 (NM_020002.2,1445-1463).
gaactcctaggtttatgga

SEQ ID NO: 709950 - DNA, 19 bp, Mus musculus
  siRNA target sequence for Rec8L1 (NM_020002.2,1824-1842).
gggcagtagcactgaaact

SEQ ID NO: 709951 - DNA, 19 bp, Mus musculus
  siRNA target sequence for Rec8L1 (NM_020002.2,1903-1921).
ggcttctcgggtcttctat

SEQ ID NO: 709952 - DNA, 19 bp, Mus musculus
  siRNA target sequence for 0610031J06Rik (NM_020003.1,106-124).
ctaccccatggctcctttt

SEQ ID NO: 709953 - DNA, 19 bp, Mus musculus
  siRNA target sequence for 0610031J06Rik (NM_020003.1,116-134).
gctccttttgagtctactt

SEQ ID NO: 709954 - DNA, 19 bp, Mus musculus
  siRNA target sequence for 0610031J06Rik (NM_020003.1,168-186).
gagactcgccaggtatcta

SEQ ID NO: 709955 - DNA, 19 bp, Mus musculus
  siRNA target sequence for 0610031J06Rik (NM_020003.1,179-197).
ggtatctatggaggttatt

SEQ ID NO: 709956 - DNA, 19 bp, Mus musculus
  siRNA target sequence for 0610031J06Rik (NM_020003.1,180-198).
gtatctatggaggttattt

SEQ ID NO: 709957 - DNA, 19 bp, Mus musculus
  siRNA target sequence for 0610031J06Rik (NM_020003.1,554-572).
caacctgagtgccgatttt

SEQ ID NO: 709958 - DNA, 19 bp, Mus musculus
  siRNA target sequence for 0610031J06Rik (NM_020003.1,815-833).
ctccatcgatgatgaatat

SEQ ID NO: 709959 - DNA, 19 bp, Mus musculus
  siRNA target sequence for 0610031J06Rik (NM_020003.1,849-867).
cagctgaaccagctgttat

SEQ ID NO: 709960 - DNA, 19 bp, Mus musculus
  siRNA target sequence for 0610031J06Rik (NM_020003.1,899-917).
gcgaccagtggctttctct

SEQ ID NO: 709961 - DNA, 19 bp, Mus musculus
  siRNA target sequence for 0610031J06Rik (NM_020003.1,971-989).
ctccaccttggcatcttct

SEQ ID NO: 709962 - DNA, 19 bp, Mus musculus
  siRNA target sequence for 0610031J06Rik (NM_020003.1,1078-1096).
ctggctactgggaccaata

SEQ ID NO: 709963 - DNA, 19 bp, Mus musculus
  siRNA target sequence for 0610031J06Rik (NM_020003.1,1080-1098).
ggctactgggaccaatact

SEQ ID NO: 709964 - DNA, 19 bp, Mus musculus
  siRNA target sequence for 0610031J06Rik (NM_020003.1,1081-1099).
gctactgggaccaatacta

SEQ ID NO: 709965 - DNA, 19 bp, Mus musculus
  siRNA target sequence for 0610031J06Rik (NM_020003.1,1129-1147).
gcttccctccggtggatat

SEQ ID NO: 709966 - DNA, 19 bp, Mus musculus
  siRNA target sequence for 0610031J06Rik (NM_020003.1,1134-1152).
cctccggtggatatcttct

SEQ ID NO: 709967 - DNA, 19 bp, Mus musculus
  siRNA target sequence for Gfra4 (NM_020014.1,32-50).
ggccaggtcaggcgatttt

SEQ ID NO: 709968 - DNA, 19 bp, Mus musculus
  siRNA target sequence for Gfra4 (NM_020014.1,35-53).
caggtcaggcgattttcct
